United States Patent Application Publication US 2007/0083945 A1 - sequence listing, part 26

SEQ ID NO: 176074 - DNA, 451 bp, Glycine max
  unsure (1)..(451): unsure at all n locations
cactcaagctngtatgttagacctcgatcggtcatctctcctggccgtcgcttactgtcatttttttcgatcaatatcggtgaataatatttttttgccgaggtgggctaatgttttcctggccgaataaatgggaacatgccagtttctgccgaaacgaaacatcggttgagctcgcacgaaaaaacctatccgacctacattgtaagttttttatgcaacaccgaaaaaaacaaaatttcccctgccgtaagaaaaaacattatcggccagcgagcgcgggacttgatattcaagctccaaaaactaacccaaggcaacaagggggttgaggagtatntcaaggaaatggatgtgctcatgaattcaagcaatattgaagaagatgaggacgtaactatggctcgatttcttaatgggttgactaatgattccatgatattgttgagct

SEQ ID NO: 176075 - DNA, 393 bp, Glycine max
  unsure (1)..(393): unsure at all n locations
agcttnatgatgaacgatgaattgtttaatttcaatactataattcaatatatacaaacgagcttgttgtaattattttagacttggagtgataacatgcaatcctcttgaacccttacctcccactcttttgttataccgagacttgggaagcccaataggtgttgcattttcaatgtactttgaacaaaacttaatagcttcttctgcaatgtacctttcaacaataaatgctttaggaaggtgtagattttttgtataccctttgaagatcttcatgtaccgctcaaccgggtacatctaccgcaaataaacgagaccacaaaattttatttccctcactatataaacaattaaatgaaccataatgtcagaaaatgaaggacgaaaata

SEQ ID NO: 176076 - DNA, 390 bp, Glycine max
  unsure (1)..(390): unsure at all n locations
ctcgtcgcctgngtcatatgtcaattcttgaatttaatctctggagnctcactcggggccttcataatgttagctttagctactgtcttttattggaaaaagagtctgactctatattggtggtgaatttcatcaacaatgggtgtccaaattcctactcatgtcttgattaaatagaaaaaatctagaggatcaaatctatcttttnnanttgctccttctcccatatgatttgagaagctaactacttaattgactcccttatccaccatggattctctcaatacaaaaagatttatattttatttcttgctagtttctgcgcgagatccctctttgggtgacttaaattgtattcccttattgagtaatcataaactttttgtttaa

SEQ ID NO: 176077 - DNA, 361 bp, Glycine max
tttgtaatcagtctctagtcatcaagagatactattgagatgagctttccgtctaatgagattttagtatctgtggaggaaatcaaatctacatccatgaaaaaaaaatgagagttaactctaaatctatggccgctagtgcaccaccagtgccaacctacattagcaacatttcacttttttgaagcatattattcttaatttcttaatggtattctaaggaacttatagaatttcttgttaaatatttctatctaattaaaacggttttattttttcataaaatattataataatatttttaattactactatgttaaagacatttttaataattttattttattaaaaaagattatta

SEQ ID NO: 176078 - DNA, 342 bp, Glycine max
gcatttgtgcgcaatacacaatgttctgttcatcacaacaaaatggtgtatcagaaagacgtaattgaactttaatggatatgattaagagtatgttaatcaatttgactttacccatatctctgtggatgtatgccttgaaaactgtcatgtatttgttgaataaggttcctagtaaggcagttccaaagacacctttgaactgtggacaaatagggcacctagtataagacacctacatgtttggggttgccaaacaaaaataatgatttataatttgcaagaaataaaatcggataccagaacaaccagtggatatttcattggttatccagaaaaatc

SEQ ID NO: 176079 - DNA, 392 bp, Glycine max
  unsure (1)..(392): unsure at all n locations
agctttgctgtaaataaagtatgttcattcattgaaaatcctttggatgctcattgggctgcagtgaagcgaattctaagatatctaaaaggcacagntctttatggtcttcatttaagacctgctgctttgggtcaaccttacttcattagagcactttgtgatgctgattgggcatttgacattgatgacagacgatctacctctggtgcagctgtatattttggttctaatctcatttcctggtggtctggcaagcaaaaagtagttgctagatccagcacagaggccgagtacaaaagtctagctcaaaccactgcagaaatttccaggatcaagaccttgctaactgagttaggagtaccattcagaactcctgttatattttgtgg

SEQ ID NO: 176080 - DNA, 440 bp, Glycine max
  unsure (1)..(440): unsure at all n locations
tcatctaaagtccatactctgttgatcttcatttattctatttcagantccatggctttttgccatttgttgcaatccgagcttctcatggcctgttcatagctcttatggtcatcatcattatgataaacctcatttgacatgtcatcttgcaccattaagtttaatttatcatgtgcacgatgcattctagtagatcttctaagaggttcttgtgttgggttcaaagggtgctacaattgntctaagattggttcattaacttcttcttgaacaatagttggttcttaagccataatcgtttgagttgaagagccttgtcctaatttcaaaacatcanagagagacctcttagttttcatttcatattcttgagttatgtatcaatggtgacttgagtctcatacagtcatttctttccatggttccttctcagaaac

SEQ ID NO: 176081 - DNA, 398 bp, Glycine max
catgcaagcttgccagtatacccacctagcaaggtattcgatgcaaatcacagggaggaatcaaggtgagactgatattcactgctcattttatgcagagttgttggaaaataaagctttagcctttaggttgtcacatattcaactgatgatctctggattacctcttatctggtatggacaaaataagagaaagaccgcatgtgcatttcacctggttgagtctactgccatacttggatttcataagccaatccattaatgaacatttgttttttgttttgaaatattttctatgggttattatattgagatatacttatcttttaaggcagaccatggcacgaggagtggagctagaaaatatttatagggatagccaaactatatgacctatg

SEQ ID NO: 176082 - DNA, 398 bp, Glycine max
tcttccctgcctctcaagatctgatattatgccttctcttcttcagcattcttgataaatacattgcctactgcctctgtgcattttaatgactcctatactgacttgtgcaataaaaatccatattataactttctcaaagcctcttgttgctcctgcttacctttccttataccttacaatcactaaaagctcgatattatgcctcatgagtgtgttattcttggggatcccacatctcataagggttacaaatgattctctcctactggcaaactctttatctctaaagattgtgtttacatgaaattaaatatgcttactcagatctgcttttgccttcctctatgactcatccaaatactaataaccccatcctttcattccttgctccctat

SEQ ID NO: 176083 - DNA, 384 bp, Glycine max
  unsure (1)..(384): unsure at all n locations
agcttcaagatgtatttattatggtcatgatcatgaaaagagggactcacctacacctcctagttccttaggcttccataggggcggaagagaatgaagaagaatcttatgggctcccttctctctctcttggncggcagctcaacaataaaggggtggggtttgcttctcttttatagaaggaagggttcagattaggtggggggcccatatgtgggtccccataggttttttcttctcttttcctattcaaactaactacacttagagacttaagctctcaattagtccttaattaattttatcttttaaactaattctagagtgataagttcatttattaatctcttatattactctcaaataaaaataattcaagagaat

SEQ ID NO: 176084 - DNA, 444 bp, Glycine max
  unsure (1)..(444): unsure at all n locations
cactngactcataccaaacatgacaagtttagtattctntcatcaaatttcttcacaaataactatcataaggcataaacctagtcaaactacccatcatatctcccaaaacccaatacccacaaaaatttatgtgagaagaagtctacccaaacctgaaatgtgaagtcccacaatggagaggtgcgcttcacgactcctaaaatggcttcctttctcgatttggagcataaatggtgtacaaaggttggagcttagatggagcttcaatggtgaggaataagataggaatatcaatgtgagagagagagggagaaaagcttctgaatttatttgtggctgagcgaggagagagaaagaacatagcttgtgtttaaaaggcttcctctattctttctttcttttttaaccaaaagatgtgccacatgtcttcttttgtgtgga

SEQ ID NO: 176085 - DNA, 380 bp, Glycine max
  unsure (1)..(380): unsure at all n locations
gcttgtaggatgtatatgcattgttgtttcatcatggcacttggatcggtcacatttcacatatatgaagagaaagaagctcgcaaagagaggtgagtntatgaaaaagtagaatttgacacttaatgatatactcaaaaattagaatgtaaattaactatgagaatgaagagaagttttcaattcttaagtctcattcatattcttccttatattaaattgtgaatgataccaaattggtatctcctacctttatttcagagatgctaaaaatatttcactggaaatacaaaagggagaaggaagatgtggagttatcaacaatatttgatttttcaaccatctctaatgctacagatcaattttcacccagtaaaaag

SEQ ID NO: 176086 - DNA, 277 bp, Glycine max
  unsure (1)..(277): unsure at all n locations
ntcaccattatcctcagacttggagtctgtgtgnttttgcatctccttgatccttattgaggtctggacttcttctagggtaatgtcttgattctttccataatggattgtatccttgaaatgttcaaaggattttggtaaggaattcaaaagcaaaagagctttatccttctctccaagctttacttcaatattttccaaatcatcaatgatcttattaaaatcagccaattgctcagagactgttcttgattctgtcatcttgaaggtgtacaat

SEQ ID NO: 176087 - DNA, 386 bp, Glycine max
ccggtgagagtgtgaactttaactgtgagtgaacgactaactgtgagtaatgatctttgcatgaatctctgaattttagaatgaaatgtataaatgaggacatgattaatgccatgattttacatacacaagctctctgaccaaatagcttaccttgaatgatacttgtatcttttgctcccgtgtataaagcttattgatttgtcagtaactaaaccctgaactttaaatgattatctcctaataccttgtttagattctaggagagcatatggttcaagacaaatttactctaaatttgggggagaaaagttgaaaagaatgaaaagaaaaaggttaagcatgagcacacacaacaaataagttgtatgttaaaaaaaataata

SEQ ID NO: 176088 - DNA, 477 bp, Glycine max
  unsure (1)..(477): unsure at all n locations
tctcctctggctgcctctagagctctattcttgaaatatgcactgtggtgtgctctggaattctgtgcaaaaatctctgtaaaagtgtgtgtaccctaatcctgcacaagacaaactttaaataggctctgaatccgtgatgttgcgcttggcgccaccctcgtgctaagcgcgagtaagtggatntgagcttagcgccagtcgtgcgctgagccaggctgaagacaactgctgcgcttagcgcactgatctcgcacttagcgcgcaaccttgatattgatgctctgccagattcttctatcgtactaagcatgctgaagttgcacttggcggtggatgcacgcttagcccaactgatgagctaagctcaactgtcacttttagcacttcataacttagcctctttttcacctgaaattgcatagatttcatcattaaatccaatggaaatattctagagatagctctaaccataaa

SEQ ID NO: 176089 - DNA, 398 bp, Glycine max
gcttcaacatcagaccacgtgcagggggctggaactatttcacatggactcgagggggcctatgcaagttgaaagccttggaggaaagaggtatgcctatgttgttgtggatgatttttttatatttacctgggtcaactttatcagagagaaaacagacacctttgaagtattcaaagagttgagtctaagacttcaaagagaaaaagactgtgtcatcaagagaattaggagtgaccatggcagagagtttgaaaacagcaagtttactgaattctgcacatctgaaggcatcactcatgagttctctgcagccatcacaccacaacaaaatggcatagttgaaaggagaaacaggactttgcaagaagctgctagggtcatgcttcatgccaaag

SEQ ID NO: 176090 - DNA, 436 bp, Glycine max
cgtatgatctggattctgggatagaaagcgtgagatctatgtttgaattggtgtcgctcattattaaatgtagaataaatatgcaaattgacatctccttgcagaatttatatttaccctattatttgcattccgtagtttatatttgttgttgttgcaaagtattgtgttgacatcgcaactcagcaacacggatgttgtgttctgcaaagatgcattaaccattcatatggggagtatcaagaaaagttgattgtataaatatgtgctaatgcacttctcctagctcaagatcaattcgggtaacgaaacataattgtttataaatgacaaaattcccttcaatggttcttctttattttctaggtttgaatatctaattttccacccacaattttctgttcttctttctgttccagaaacaagagtcttatct

SEQ ID NO: 176091 - DNA, 396 bp, Glycine max
  unsure (1)..(396): unsure at all n locations
gcttattanctaagaggcctgaaacatgtctaatgatggatgatggacaatgatgaatggacaacattgatgatttgacaatggacttatgacttgtgactgcaaccatgtgaggcttttatgagtttcatacgaattattttggtagtgtgctgacatttgcccatggatctcaatctcctgaggatttaggatactttcatctaaataaagctaatacaggaccactcaaccaaacgggatactcaaggcagatactgttcaacttttatgtcttttttgttttgccatctatatgtgcaaatttatcactgctacaaactcagaaagtcagcaggctgatgcaggaaggaaacatacattatttattcacacaaccagcaaatcaaaatgata

SEQ ID NO: 176092 - DNA, 334 bp, Glycine max
cttggaagaaagtgatgaggtacaagccctaaaggcagatcttgaaagagcctggatagtcgaagagaagttcaagtccatagccatcaaagtctgaaaagagtatgatgaactaagggatgtcaatatggccatcgatgaagccttggaatgagaaaccaagaaggcccgaaaggaagaacacgaccaaagcaaagttttgaggggctttatagggcagcaatagtgagctcaagctccgaagaggtgaaaggaatcatcacgggtcaaaggcatgatcttgaaggacgagctaaaggtttgccttaggtcgaaaagaaattgttccaacatt

SEQ ID NO: 176093 - DNA, 401 bp, Glycine max
  unsure (1)..(401): unsure at all n locations
gcaagcttcctcggggccattcctgcgaaggcaaacatttgtaaagttaattttaccaatgggacactactcttaaagcaaaaatggcatataacctcctcccataaatacaaacatcaatgtaaatttagagcaagcttatgcgcatatttcattacgaacgttctcttgcccaagacattctattaaccgaaaaaaatgcacccatatacaatcaaggcagctttgttacctagattatttacacgtacttccaaggtgtatttgttacttacatcacacacatctccttggctaaattcacatacatgcatactccaagcantttggggtaccaaaaattgcacatgtgcacatcttggtatttctaatacctatacatacacaaacttcatgatgaa

SEQ ID NO: 176094 - DNA, 387 bp, Glycine max
  unsure (1)..(387): unsure at all n locations
tgaagtgaanaggatatgattggtggtactctaatattagatcataacatgacaggtcaaaaaaatgtgaattgtatcaacaaaaataatatgagtatgcattaatactcagaaaataatatatatatatatatatatatatatatatatatatatatatatatataaagataggtgaggatatatatggatgtatatatatgtgggataaatatgtgcggaagagatatggaagcattttgtggtggaattgcgtgcggggataatcgggtgggtaattttcgaaggagggcgcggcgtcgatgagggaggagattggttgtgggatgttgtgtggaagaggtcgagcgtattaagggagggattagagggggaagttttgggggg

SEQ ID NO: 176095 - DNA, 188 bp, Glycine max
caaacgaccgctaaaagaaagtgctgaggacagaaaaaaaaacttaaaaactgcctcacaggaaatgcgctgaactatgcaggtgtttgcaaaccactcacggcatcatactgaacatcaatagaaaaggtccctgacctggaaatggacagtgccaagacacttgggaagggaaatcccttggggaa

SEQ ID NO: 176096 - DNA, 224 bp, Glycine max
caatcatatagcacctaccatgacaataggaagaagaacgtagatcgttaaatagaaagagggtgacctccatatgtgcaccatccttatactactgttgcgaaggaaccatctcaacaacgtagtccgggactgatagaagccaatcaattgctttgctccattgagctgtcctttctgccggcatcggttctaggcagctttgttcaccaaaaatagaagct

SEQ ID NO: 176097 - DNA, 272 bp, Glycine max
  unsure (1)..(272): unsure at all n locations
agcttgcatggggacctgaagccattgtatgtgatgatccaaattncaggggcgcgggaatccttcaagtggtatatttatatatcctacgcagatgatgcactagttnaatcttgtcttttttaatatngaantaacatgagacttctgaggctgtttcttgtcattccaactaaaacgaagcttaatcatattatgacgagtaaataaaaagaagaatctctaaaaaccattattttgtaaatagtcaagtgtttgcctcttttgaacca

SEQ ID NO: 176098 - DNA, 466 bp, Glycine max
  unsure (1)..(466): unsure at all n locations
ngatatactatnttatagatgatgacaaaatctatgtctttttctatagaaagggtaaacatgtcatttaccttgttgcagccatgaaaccaaatgctatcatcatatcccatccattgatgttaatactataaataataaaatntaattttaattatgctaagagagaagaggtcaagactataaaatatacaacaacttccaagttaggaatacatatgatagcaacacaagccaagctcccaacagcaggcccaaaaggatactaaggaagcatgcccatttcctggactatcagtgaccttatctcattcttgctctacagaattagttaggatcactaaattagttacctactccactacctattatggttattatcccataacaaaaattgtcatattgtgaacagccaatgattggctttgtattcatcaatgacatcactatataaaccatatcagtg

SEQ ID NO: 176099 - DNA, 393 bp, Glycine max
  unsure (1)..(393): unsure at all n locations
agcttgcttgatttatgtataaactgttatgtttaatagctatacagngaccgcaggataaaatagtttatcagttaaacagaaataactatttgtgtcttttaagaaaattattgttaaattaataaatttatcatatatagtgatttgtaattagataataacgtaaaatgactttatactcctgcataattgtaagtttgtaacctatttttcttataaactatagtacctttttggtaccaagtatcttaagaaattagtcatttttttctatgcttgtgatgtgtagaaatggccaccactggggagaaagagtggtatttctactgccccagagacagaaagtacaggaacagtgcaaggccaaatagggtaacaggagctgggttc

SEQ ID NO: 176100 - DNA, 397 bp, Glycine max
  unsure (1)..(397): unsure at all n locations
tctacaaacaaaatacctcaatgatgctcataatatattttaaatctgtgcaatcaaagcagcaggccaagcacaaccccccaaaatagtgggaaaacaacccatataatacgcttgtaaaagagttctccatttatagtttgtgagtacaatatctgattaacccagcatcaatttaatttaacaaataatctatccatagttaaccatgaatctaccacaccattttgtcaccgcccaccacccccttttacaaatatgtggttgactgtagggtagattattgattaaaataattgatacttaggtaatcatattntattcctgagccccatctatgggccatttttcaagaagagggggaaggggagaggaatatatataattattccaagtc

SEQ ID NO: 176101 - DNA, 398 bp, Glycine max
agcatgcagctttattttataagtcttgattatataatatacacgacaatagttagagtatttacaaacatttatgacaagtttagggtttgttatagtgtctggctaaggcacatgccacaatgtattggataagactgtactttactatgtaaataatacattacccccactttgctatttatcatattctaaggaaataagtcaccaatagtctcttcccaagcaagcaattaatttaaaatacatataacagtcttatgctgattcagcaaatccaactttcatattgccataatcgaacactgtatgatagctacccatgaaaatgtcccccaaaatcctgtatttcagaagcaacattcatgagttgaaagattaatataggcataatattt

SEQ ID NO: 176102 - DNA, 406 bp, Glycine max
acacttatacaaactcacgcttaattacgtaaccttctactgcattgacatgatttgcttaatacaatcaatagatgacttttgttggagatcttcccaatagtataactcgttgtcattcaatgttctgtcaaaatctaataacatactattttaaaatgtgatcatatttcatagataccaggaattagaacacatgatagaggtccaattgaatctgatcaattggcatcggaggcattgcacagttgaacgaataggaaagctagcaccattgccttgcatattgcggataagggaattccatactattctttcgcaaacaattccttctacataggcaagtagcctagaaccagatatgcactgcaaaacactttacctaacccatatgtacgctcattct

SEQ ID NO: 176103 - DNA, 261 bp, Glycine max
  unsure (1)..(261): unsure at all n locations
caccggaaaccggcaagcgagcaccaggagagaaaaactccgcccacccggaaaactttgagaaaaactnccccgaaaaaaaaaactgcgccacgttcgtcattagaaaaaacctatcaaaaccccccccgagaagaccacctgaatacccctcccgaatctcgaacacatcccctcccgaaactcgaaaccaaacccccctcgatacatgaaacctcttgagtccctctcacgaaacccgaaannaatcttgatcctgaa

SEQ ID NO: 176104 - DNA, 369 bp, Glycine max
  unsure (1)..(369): unsure at all n locations
ntgcaactttntgtccctgacacaattgtaggatcaaactattcctgcactggacgagtccaaccaaccaatcccaaacaaggtcatattccatcgacttttttggtcatttaaggcatacattgatgcgtttgcattttgtaaacccattgtgcaaatcgatggaacatggctatatggaagatacaaagggacgttgttagttgcagttgcacaagatggcgctaacaacatatttccattggcatttgccattgtcgagggtgagacagcagatgggtgacactctttttttgcaaaacttgagaaaacatgtgacaccacaacatggtatatgcttaacctctcatatgcatgagttaatcaaaa

SEQ ID NO: 176105 - DNA, 383 bp, Glycine max
  unsure (1)..(383): unsure at all n locations
agctntgaagtcttgaatatagtttatgttttgtcactactagaaaataagttntttacatcagttatttagaactttcaactgatgttgaaagtaccgacgttgaaagtgttatcattaacatcgatttttccaaaccaatgttaacgtaaaataacaacatcggttatttaaataaccgatgttatataataaaaaattacacaaaaaaaggtatatatgttcataccagcgttggcagttaacatcggtttttgtagaaagatgatgttaactgccaacgttaacatcagttttttaaataaccgatgttgtcatcataggttaaaaaaccgatgttgtttgtgtaagttaacatcggtatttttaaaaaaccgatgttg

SEQ ID NO: 176106 - DNA, 461 bp, Glycine max
ttagaaatttacttttgagaatctcaattctatcactcttatcatcatcctgagaaaataggtcttcatctttagcaactaataatagtgtaatagtgcatcagaggctttaattccattacaaagtaatgtgaggtaaacacaaaataaataattttttttgagttggtagtaacacctatgattccattggaaataaatgaaagcaaatctaaaatagggcgacaaagatattcataataagggctttgtctctgcttcttatagagatggtgtaaaattgtacttttgatcttcgcttcattactgttatgatccatgctctcattattagtgaaggtgttaaaagagtagtgaaggtgtcccattcttaaatataatattttgaagctttcacaatctcaaccctcacttttagaaactacatttaattgatatattaatatggagaaaaattcaaa

SEQ ID NO: 176107 - DNA, 383 bp, Glycine max
agactgttattattttactcctccactacttattttctggatatgttcatgttaattaatccctattaaatattttaatccccaacatatgaacacggaagattccagccaaaagatataattgaacacatagaataccaccttcttttttttttggtctagaagaataccacctgtttaagagaacatgcatttacaagttattggtggttttttcttcttcttatgatagcatagaagaatattattgtgaaaattctgaagataatttgtcttatcacatgaaagtttgaggacacaatttctgcccaaaacataagctcccatcactatctacttcatcaacagactacatatatgtgatatgattctaaaaacaaaac

SEQ ID NO: 176108 - DNA, 296 bp, Glycine max
  unsure (1)..(296): unsure at all n locations
accttatttaaattaattatagctttataataaaatattataatgcctataaagtattaaacataantaatgcctatgcttgaaatatcatcattctaatttatgtcaaagcaaaccaaacagtgatgacaaggaaccaatgaatgggcagattgattgtgttttgggctagcttctacactaaagggaacatataaaaatcatttaccaaatggcaaagcatttaagctaaatgtgcatttgtttggaaaactatggatccacaaactaaactcccaagttaacccaattactaa

SEQ ID NO: 176109 - DNA, 387 bp, Glycine max
agtcatgctaaccatatattattgttactgggcaaactggcaaagagtggaatagctttgtatgcaaaataaattcaagctgaaaggtagaaaattaccctcaagttgaatttccaattttttttttctttttgaacttacccttcatctcttttcttcagtactgtaaagtgatgtgcaacttctcaacaacagtaaacagaaaacttgtcaaactgtgtgaaaactgaatattagaaaatgtcaagggaaatcatatccattaagaaatatcaagtagccacttctatactcctgtcctgtcatatgatcaattttaatcgagacaacagaagaggaagaattctatatgcatcatttatttataagaacattcatgcattttaa

SEQ ID NO: 176110 - DNA, 432 bp, Glycine max
  unsure (1)..(432): unsure at all n locations
tctacggtggtgggttngtacgaccatctccgagaccttatttagactctctcatatgtcaaggcagggctgttagatgctgagcaaaagcatgagcataaccatgagctgcaggaatggctgatgcagctcaaaagtgtcttctatgacgccgaagatgtgttggatgaattcgaatgccaaacactgcgaaagcaagtgctcaaagctcatggtaccatcaaagacgaggtaagccacttcttctcaagttctaatccacttggttttctgtccaagatggctcaacaaatcaaagatgtcagcaagaggctagacaaagttgcagctgataggcataagtttggtctccgaataatttgatgtgacacacgagttgttcatatgagagacactagtcgcatgacacactcccgtgtgagtgacttacat

SEQ ID NO: 176111 - DNA, 384 bp, Glycine max
catagttgacacagaagggtattcttttctagataaaagcataatataatctgctaaagcctaatgagataccacaacctctgcacagctgggatgaaatttaaaattggcatcatccttgaggctgctcatatctctggaaaagtactccaaacaaagcacaaaccgataaggggagagaggatccccttgtctaaaacccccctgccctttgaagtggccataaatggatccattgactgtcacactaaaggaagtggaagaaacacattccatgatccaagtaccgaactgggctgggaagccaatggacttaagcatcccatccaaaaattctcaggagatggaatcataaacttttgcaagtcaatcttcatgaggcat

SEQ ID NO: 176112 - DNA, 439 bp, Glycine max
  unsure (1)..(439): unsure at all n locations
agaatanctaagcttcagntntaaatcgattgccacttgtgcctacaaaattattttcactntaacaataatanacattaagcgtaattgcattgtttatcttctacaactatatctagttttagcctttcaagttattttcaaataaattgatcttatctatttctaaaattaataaatttggtcaactcctcaatttttttatatatgccaacgcactcctcagatttaattcataaaaaactgtcaaattcatattctttactaaagcgttgtaccaattaaactgataattaaggttagtttcactcactattcactaaccaataatatatcatactccacccacaaataattgatgccttctttaaatcttaatctcacatcctatgaagctattaaattttactaacaaaattattataatgcttgtaaactt

SEQ ID NO: 176113 - DNA, 365 bp, Glycine max
atggtcacctcatggactcctctaaggacaatagcatcatttcttgcactgaatagttgggagttggaagccatcttctcaatcatatttctagcctcaacaggagtcatatcaccgagcgctccaccactggcagcatcaatcatactcctgtccatgttgctaagtccctcatagaaatattaaagcacgagttgctcaaaaatctggtggtgaggacagcttgctcacaatttcttgaatctttcccagtactcatacaagctctctccactaagttgcctgatgcctgaaatgtcttttctgatggcagtggtcctagatgcagggaaaaatatctccaagaacaccctcttaaggtcatc

SEQ ID NO: 176114 - DNA, 367 bp, Glycine max
agtgcatctctgaatggcttacttatcgaggccatacccgaatcaaataaacattaaaaatgtagtatttaggaagtgatcctagatcgtctcccaacgagcaatggtcaaccaatgttcgtaatagatagtgataaaatagtaacgaattggggttagttcaaccatttcccccataatgacaggagatgtgtccaaatttacaaccatttcccctaagtaaagtggacatgttacatatggcgacaacaatattagtaaaatctcaaaagaggtaacatctaagccatctctatgaattaaggtatgattagtattttgcattcatttgtggataatagaaaataattgtgagattgtttgatgt

SEQ ID NO: 176115 - DNA, 399 bp, Glycine max
  unsure (1)..(399): unsure at all n locations
agcttggtgggtgcattatatagacctcttcttgttgttcaccaagnaataaggcatttttaatgtccaattgatgaataggccaatgatatatgacaagcatggtaaggaaaaaatgaacaaagaagatttttgcctatagtcaacgctagaaatatgagtgtagccattatcgacaaggcgagccttataatgatcagggttttcatttgggccaattttcactatataaacccaccaacaactaattggagtcttaccaggggtaaggaaacaagctttcaagtatcttcgacatcgtttgtttccagttggaatcagtcatgatgtcaccagtagacttaagatagacatagaatccaaagaagagataagagggagataatcgatcataattta

SEQ ID NO: 176116 - DNA, 257 bp, Glycine max
tgaagtggtctgtgaatgtggaagtcataaaaatctgggcttgatggtttcaactttaaatttatgaaggctctttgggaaactttgagagatgatatcatgtgtttcatggaagaattctatgagaggggtattccccacgggaggtaacccatcttttattggtctcatacccaacatgaatgatcctatgagtgtgaggagtatcgaccaatctctcttggtgggtgtctattaaaatagccgtcgaatgttag

SEQ ID NO: 176117 - DNA, 382 bp, Glycine max
ctgcaagctttcttgagatgcaaaactctccttttttttctttccgagatgcacccatacccagaggtgagaaccttcttttcattttcaggatattactactgcattcctggttctgataaagccatacctgatcaagaagtcatcaatcagattccacatttgagggctttgctttagtccatacatagattttttaaacaaacacaccttgttctccccttcctcaaaaccttgaggttgggtcatgaaaatggtttcctttatatttccatgaagaaagtttaacatccagctgttgaaggtccaaaatctactgatgtaccagacctagtatgatttttattgaacaatgcttcacaactggtgaaaaaatctcatt

SEQ ID NO: 176118 - DNA, 282 bp, Glycine max
tgtacagcttctaatgttatgattagtttggccatcaccttccacatgttaactcagccaatttcctccttaacttatgtcctgtgacattggccttatctacagagctctttctatttttctttggccttcctctttggacccttttatatggtggaacaaggtgcgtatattgtgtttgggcccaataatgcggaccttggactggtccaataaaatgctggatgtattattataagcttctattgatcggcaatcatgacacatgttctaaagctaccc

SEQ ID NO: 176119 - DNA, 291 bp, Glycine max
  unsure (1)..(291): unsure at all n locations
ctactancatcgccaccatagattgtctctgtcatgatgtgctactagagcctctcagactcttcatctattggcgtatccatagaaagagccgtgccctctctttgcgcgtgaactataggtggcaatctaattcaaagccattatattgacactgactaatgaatgcacgcattacgtacttccaagaacggactcgataaggatccaagttcggtggtcatatgtaaccaaaaccccagccaaattatcttgaaggaagtgaaatacacaccgctgctctgcgatgcc

SEQ ID NO: 176120 - DNA, 394 bp, Glycine max
agctttctcagtgttgccacaataaagaaagttgagaactgccttgaatccatcctcctaggaaagtttagaattatggcaaatctcgcctctcctccagagtcaatagttgatatacctgagacttgaatctttgatcttcgtcttgccaataaagaggaaacctccttgtcacctcatctggtttgtaaaagagttttttgtggtcagggtatatagggtttggcctatctctaaacaaacgggtcttaaattttttccaagattggttgaaaagtgtaaacagagctccatgagaactagtcatggatacccgaccaactttacggtcctcggtcgcttatacctaatagaagtataaaaatttgtttgcaataggagtaatgtttaagta

SEQ ID NO: 176121 - DNA, 420 bp, Glycine max
  unsure (1)..(420): unsure at all n locations
tgtgtctgtnntttttagaaggggagtttattttatttttgaatatgaataacataagatntgcacgaattcaaacataaaatcattccaaacataaaaataacattaaattaacttcagcagagtcgaaagaaatagaattagcatcaaatacgacaactaagtgatgctaattttgtgacaaggacatattatcttccatttcgatgacatgcttactaaaaacaggtaaaatttctattggcccaaattttttccagtagttagaatacactaacaccttcaacacatcatcgttggttttcaagtcaataatttcgaattntgataatttttctaaatactcatagtgacttggttggcaaaanaacaattcgcttaccggttgtgttaatgaatatccatagggggaatcccatg

SEQ ID NO: 176122 - DNA, 383 bp, Glycine max
agctataaaaaaaagcatgtccataatatatgttaaatgtgtcatattttaacatttttttttttgtaaaaatacacttcttttatcaaccaaagaaaaatattcatcgactagtcaatgactaatctttgcacaagagtctagttgaacatctttagtaggatctctcttcgtaatcacttttttttttttaattctactaggctcaaatatgagattttttttaaggaatcgagtccagtttcacttaaaccaatgttggttgaaagacttgttggagttcaagtgtgaagattaagtcttacattggtagaaatggaaaagttaagcaacatataagtggaaagatttataaacctaatgcattgaagttttaggttgaa

SEQ ID NO: 176123 - DNA, 421 bp, Glycine max
  unsure (1)..(421): unsure at all n locations
aacaacagcatnccaaatagagtaatattatgataaaaaactttaacaaaatgtgaagcaaagagaaaaatacatctaaaagaaaaatgacaagaaagggcttgacttcagccgcaacatcaaggtttatagagtctctgtggccgaattatgactgcatcaaccgcatttataatgcaacaaaaccacgactgcgaccgttatttaagaccttaattgcattggcatgttagaaaatgagaaggatacccgaaattccattctgcacagacataaggtccaatgcggagatgagcgtagagccctgctttctgtattggcttcacgaatcataccaaatcattacctcctttgataattgtcttaattgaggtacatgcagaaacaaacacattggacaaaagctaaattagaggtgcaa

SEQ ID NO: 176124 - DNA, 393 bp, Glycine max
agctttggtagcagatttacttggtgtaggccaaatggatctgtgaggagtaggctcgatagatgcttggtttcagaagagtggctacttaaatggcctgattcttcacaacaagtactacatagggattattctgatcactgtccaattattttgaaaacagatctggtggattggggccctaagccatttagggtgatggactgttggcttaaaaataaagagtatcaaagactggttaatgaagtgtggtgtggtgaccaacaacttggatggggagtattgtgcttaaaaacaaattgaggaacctaaaatccagcttaaaacaatggagtatagagaatggggatgtcaataacaacaaaattcagcaactgaagcagaagctgcatg

SEQ ID NO: 176125 - DNA, 463 bp, Glycine max
  unsure (1)..(463): unsure at all n locations
cttcacctttggtcctcctcatagttgttgcatgagattacatgctctattntcatctcccactccaagtaggcctccagatcattatttcctttaaagggaggaatgttgagtttaataccatcaattcggttttgtctaggaacaccatcattccctcttctcctcctttcttcttcattatgatctctattctccatttgatccaacctctcatggagcgcatcatctcgttgtttcattaaccactccaaatgttgcatcaaagcttgcatttgtaattgcaaaagccccactccatcattaggattagtaccagacatctcaaacaaacaaatcaaatgtaacaagacaattatagttgttgtttgaatacctcacccactcaagtgtatcacacaattatggcttttctctaatgaaaacactctnggcttttaccactctaattccccttgagttc

SEQ ID NO: 176126 - DNA, 392 bp, Glycine max
agcttaatcaaggctcagtatccacaaccccaaaaaggttattctacattagttattaaccgtcgtcgtaggcaacgtcatagaaagtctttactttctacaatggttctataaaaaaaccatcttaaaaaaagacacccttctaagacggttcttagctaaaaactatcttaggagggtatctttctaagatggtttttaactaaaaatcgccttggaatgtgttttttttaatattattttaaaaaaaattaaagattctaagacgattttggtctagaaaccatcttggaatgtaatttttctataaaaaaataaaaaaactattttatgtatttttaataataagatgatgatatttgttattataaagaaaaataaaaagtattaat

SEQ ID NO: 176127 - DNA, 398 bp, Glycine max
tctaagaatagccttgataacactaacattctccatttaagcttccccaaagaagatggtgccatccgcaaactggagaatattcactgggaccttgttcttccctaccataaagctgtgaaataagtttctagacactgcttccctcatcaatcctgttaacccttcatcaaccaagacaaataataaaggggccaagggatccccttgtctcaatcccctttgaggcttaaattcttcagttgggcttccatttacaaggatggatattgaggctgatgtaaggcatcctttaaccctgccaatccacttttcatggaaccccattcttctcatcatataaaagaggaattgccaggacacacagtcataagcttttttcaaatccactttaaaca

SEQ ID NO: 176128 - DNA, 381 bp, Glycine max
  unsure (1)..(381): unsure at all n locations
agcttcagaaatctacccataatcatacattttntaaattaatagactagaaagataacgttcttattttttaatcaaacaatcgttcttgatcaaataaaaaaaagactcattgacatgtttattcaccagattttaaatagtctgctgtgcatgacaaaaagaaaagcagtgtcgagaagagatttgcactgacaaatgcaataacaggtaaacccctacctgggggaaaaaaattgaccaagcaaacctgtcaatgctaggaatgggaaaagaacaaagtaaattgaaatatgtatcagaagtaccgttgacagactaccacgctgagcctctggtggaatctcaaaatccagttcaggtatctgcaaaatcatgcat

SEQ ID NO: 176129 - DNA, 415 bp, Glycine max
tctcagctgtgatatttgtgatgtgttcttactaattgcggctattttatctttgattagcttcttttataataaactcaaccctcgcaattgttttgtaccgtgtggttggtacctgtgatgatcatgacctttgttcgtggaagcagaatgacagcaataaagtacgagaagtgaaattcttttgtggagccatcgagctgacgtgatgacgttgggattattttgtgagagagttgtgtattgtttatcgactcctccatagttggttccataattattttcgttgaattgaggatgtacatcacaacattaattatatgttatgaactagcgcttggatagttacaattttggtatgcttatggctcactatcttgcatgacacaacttaatgatagcttataacttattt

SEQ ID NO: 176130 - DNA, 383 bp, Glycine max
agcttatgccaaataaatctcaatttatacctactgctggaggaataacacatgaatatttggtcatcctaatagaatcaattgcgtttggcttatgcttctatatatatgaatcgctggatgaataatacaggaatgtttaatcatcctaattagcaatcgatctctcccagaatccatcacccaaattattgtccttaattatagggttcaaaactttcttaaaaccttgttgacaagcaaaacaccaaagatagaattcaaggtcagaaaagaagactgggagaaaatggagattccctgaattctgaatctgactgttatcatgttttctctgttagctacatctatatatataaatcagaaatctaaccatctaaaat

SEQ ID NO: 176131 - DNA, 434 bp, Glycine max
  unsure (1)..(434): unsure at all n locations
tctaanattggtccttaacagttgataaatagtgaactaaatcactcatgaacttgatatgtctgaacaggttggaaaatgaacatctaaataacgttggtcattaccgggcagtgaagacagttccactaccatttcgagagatagactctgactgatgaggtgatttttcttgtacaaaataaggtgtcctatagacatgctaacaaaatagaggcatggagtgtaaagaataaagagtggaggaggatagaaacttcgcttaatctgtttcttgtttattgcctctttttcaggcaactggacatgctaaaagtcgttcaaagaacgaaatgcntatttttcctgattttaataaatattgaaatgttatgttgttataatttcttttggcggcaaaacatattgtttcctattcagtagattcaaaatga

SEQ ID NO: 176132 - DNA, 399 bp, Glycine max
gcttgtaggattatggggtacccatcacatgtggtactaggtggcggtcgggcgatggtgcacaacaagtttttccacatccacaatgcgcgcataaacccaccatcccctgtagcccacctccaactgagctcacgtactcccacgtagcccatatcctcgtttctctcaacaccgggtccccatcaatcctcccaagcttccccaacatcaaagtaatacaacattcaaacagcacaaactatcacagccaagaaaacagagcaaaggcagaaaactctgccaaaacaccaaccaaaatcacagcttttctcacttaaagaccccagtaacaattccttcgttccaattcgttaaccgttggatcgactccaaatttttactggaagtctctagtac

SEQ ID NO: 176133 - DNA, 397 bp, Glycine max
  unsure (1)..(397): unsure at all n locations
gcttccatcatcaagtgtcaagggaaattgttttgttttaatggagattgttcggngttgagggtggtaacctcgactagtgtaagagttgtaagtttgtgaggcatgtcaagctcccctagcttggacgactgttgtttaggcttcttctggcaagttgtctaggatggacatgcttttgatcttgcaagcaaaattagacgtgtcagttggatgatgtccttatatatgacgattcaccccttttctgatcattggaggatgcattgaagacaaatgtttcgttttgtcttttgctacaggcgagtgcaacacacacatattactcttgcatatgtatcactcatggagtgggtgtgtactgaagatgcaatacgtgggtgagtggagctgcatc

SEQ ID NO: 176134 - DNA, 395 bp, Glycine max
  unsure (1)..(395): unsure at all n locations
tacccatcacatgtggtactatgtggttgtcgggcgatggtgcacaacaaatntttcacatccacaaatcgcgcataaacccaccatcccctgttggccacctccaactgagctcatgtactctcaagtagcccatatcctcgtttctctcaacaccgagtccccatcaatcctcccaagcttccccaacatccaagtaattcaacattcaaacaacacaaactatcacagccaagataacagggcaaaggtagaaaactctgcccaaaacaccaaccaaaatcacagcttttctcacttaaagaccccagtaacaattccttctgtccatgttgttaaccgttggatcgactcaaaaatttcactggaagtctcttgtacataaacctacattt

SEQ ID NO: 176135 - DNA, 388 bp, Glycine max
  unsure (1)..(388): unsure at all n locations
acctttntattcataaacgttgtttgttgctcgttttccgcttggtttggcatgtatgatggtatttcaagccaaaaggttcgacctttttgtattttatcatgagtttgttgtgttgtatacgaagctttntgatttttcttgggtggtttgttgttatataccattttggtcggggtttgttgggttttgatgttgcatgggcatcaattactagcttttttttttattcatcgcaataacaaagcttatagctttgttcattttttatgattagtacaaaaggttggacctttttttgttctataatgagtttatcgttttgtttcatgatagatgattttgggtggggtttgttgttccgctttgtcgtgggtgagttacattt

SEQ ID NO: 176136 - DNA, 448 bp, Glycine max
  unsure (1)..(448): unsure at all n locations
tgaacgaatgtaagacacatcttcttcaacctttgtgattcttgactccatttcattgaagcgcatatccacttgtaattccaaagtgtcaaacctttcaccaacaaaggtttgaataccatcaaacctgtccattatctttgaaagaagagatgaatcttctccatcatgtccttcttcaccaatatttcgagcacccttcttcacccaagagccatcatgctctttttgataaccaaaggatgctatgactgaagcgcctataaggaaggatctcttgattggaacatanggttcaaaatcaagagggatgttgaagtgttgaaggaaaagggtaacaagatgaggataaggcaatggagcattcaatcgcattgccttatacatgtgatatctaacaagatgtgcccaatcaatttgtaaaccttattgaaagcccactgacatg

SEQ ID NO: 176137 - DNA, 394 bp, Glycine max
agcttcaaattagtgtaccaaactaccacggctcctttcaagctatctaaaaaaaaatgtattaatagcttctcatccttagagtgtgcgcccatcttgcgacagtacatcttgagatggtttttgggacaagttgtccctttatacttgttgaagtccggtaccttgaacttcagggggataacaacatcgggtactaagcaaagatccgtcatgtctgcaaacggatagtccccaaatccttccacggctctcaatctctcctcgaggagatcgagcttcttcctttcttcagttgccgggggcggtccttccgtggacaaaactattggttgtgtcgcgatgttgggctgaggcaacgtgctgggtgccagcccttcaaggatcgggggat

SEQ ID NO: 176138 - DNA, 456 bp, Glycine max
  unsure (1)..(456): unsure at all n locations
tggagaggtatgctcaatggatgataagaaagagggttatatttatagatgggggagcactaaattgaaggaagataataggagagaagtttaactttgagttgtgtctcacaacgtgacatcctggaaatttctacccagaaattttggaaacaatgtatcttgaatgactatatatatatatataagtattattcagtgtatatgcatatatgttcttgatagaagtaggaatagtgggggctagatatgcgggttaggctaattaaggaagagaaatccataactggcaggttatgggttaattcttaattaattagttaaaaattatcgtnttgcgtgcgacttaaaatttaatgaaaacaacctctgaaccatgctcggggatttattctgagcgatttgatatacatattgcttacttncgaatactatccccgacggatgcaaaaaacg

SEQ ID NO: 176139 - DNA, 391 bp, Glycine max
  unsure (1)..(391): unsure at all n locations
gcttaancaagaagtgaccatgcctgtgtgattgtctcactgaagcgaattgagaattcctttataccttgatatttttttggttcggctttcttcatttgtgtatgtgtctatgtataatataaaaactttaagatgattcaaatttcttggtttaaggtgatggtaggatggaaaatgtttcaaataactcaaatgaatctctaatctgtatatctgagcattcatagaatatcctgttacaggaatggatgcccaagtggcttatggttttcatcatctacgcaatgaaaaaccttaccttgccagtgggccaaatttaaataagggttctatggagatgtggaatgtgttttataaattaccttctttgttgcttgcttgcttcact

SEQ ID NO: 176140 - DNA, 380 bp, Glycine max
aagctcctggtctgtgtcatgactcatagttacgcgtgtccatatattttttaatggagtggataggggttgagataacacatatgggaaaaaaatgcatcgtctagaaagaaagtattacatccgacaggcgtggtgactaaaacaaaagagaaagctggagaacaaaaattacttttctttgaatggattaacatcgaaaatctttacaatgagttatttttatctgtacgtgtactttggcggtactgcttctgtatgcgacaaaaaacgctattttacgacagttcattctatcaaagatgtaccatcattctatctgaatatattatggcaagatatatatatgactcctattaatatgtattaaccatgcctgg

SEQ ID NO: 176141 - DNA, 360 bp, Glycine max
  unsure (1)..(360): unsure at all n locations
cttctaaactntatacaagaatgaagctctgatactccttgttagacaagtggcctcagatatcttaagaagggggggttgaattaagatattccaaactacttccccaattaaaaatctatttcactttttattcaagttattaattcccttaataatgaacttcttaaatattgattcaaataaaacaatttgaatatgaatataaagcaataataaacaaaggagattaagggaagagaaagtgcaaactcagatttatactggttcggccacacccttgtgcctacgtccagtccccaagcctttgcaaatgatctttntttatttgcagaagctactattgatcaagtagatgtg

SEQ ID NO: 176142 - DNA, 393 bp, Glycine max
agcttttgctgatgacatagtcttgaagtttgtctatgattccaaaaaacaaaaccgcctcatagaactctccaatgggttctcctacaagttgtaattcacaaccacttctcctcaccgtcctttcagcccttgctggcatgttcacccccaatttgatactcgcccaactgctaacacaaattagatagatgtaatatccaacaagacatgacttaagtaataatggtcagccggagctcgggaggaggttttaagataaattcgtagaagcaaggtacaaaatatacaaccatattaagaaattaaatatgccttacatcatgttgaaatattaatttttccaaattcaattgaacttaattatgccaatgtcaagatgaaaacaaaatg

SEQ ID NO: 176143 - DNA, 439 bp, Glycine max
tgcctcagggcgaatagaaatttgtcccaactgttattcgatactgaagggaatatgtgggccatcatctatgagtgcaaagagaagctaaatcttgcagcgactcacgagcataggctataggatgagtatgccaagatatcagcagaaagggaagcaagggaaagggtaattgattcattgcaccaagaggcaacaatgtggatggaccaatttgctcttactttgaacaggagtcaagaacttccccgattgctagccaatgccaaagcaatggcggacacctactctgcccccgaggagatccacggacttctcagctattgtcatcatatgatagacttaatggaccatatgattagaaaccgctaggaagttgtattgtcgctcaaatctagactagttataaccttttgattaaatgagtttatcccacatt

SEQ ID NO: 176144 - DNA, 388 bp, Glycine max
  unsure (1)..(388): unsure at all n locations
agcttatgagaatgactaaacttgtgttatttaaactatgatgaggtctgattntgtttctgaggctatcaaaaactttagaacctgtccaaagatttagaggaaattgtgactgtaatcctatagccaacatatgtcaaaatgtatggacaatggccttgtaatccttaatgtgattaacttgggatcaacatgtttgtctctagtgcacgacccacttaagtctcggccactattttatttttaggcagaattttgtgtttttttatagtggccacagaaaaagggcaaccttacattacattttacgtatgtggtcctatcttttgcttttgcttgcgtagttgtagaatggatggcttaaatgtctttgtaattgtttttgtaa

SEQ ID NO: 176145 - DNA, 417 bp, Glycine max
  unsure (1)..(417): unsure at all n locations
tgtataacaagtaactaaatttgctgtggtcttatttaagtaactaactaactttcactaatatatacaattactactcataaggaagggatggaccttgattatgcccatctaatctacctaattaaactaattacacaaagtaaagtccaaattcgcagcccaattattcaagtgcaaaggttcaaacttccaagcccaatttgaccctctaaatggcagaattggcccaaacttgtttttgagaaaattgaagatcttnttcttatctttgcatagaatgctcacatgctccatatggagttttgtagtgtcctataagccttgcacaaggaaaataggtcaagtatgcacaaatatctaaaaataagccgcatatatcaattaagctcaatcatttacttaagaccataacta

SEQ ID NO: 176146 - DNA, 383 bp, Glycine max
agctttgttctttatataaaatgagaagttattgactcattactttatctaaaaaccttggggtggatccaaatgctccgatcatccatttgcatactcatgttttggtggcatactcaccgctgtttatttctttaggaatttcatcataactaagaaaacaccaaggcacccctataacactcgatccagaaaaatggataatgaaaagggcgtgtgcaggaacagatgaaggccgatctatcggccttaaaagatcaaatggcttccatctcggaggtcatgttaaaactccacaaaaccatagaggataaagccactgcaaccgcctccagtacaattatggaagcggagccggtactgcaacccgccttgaatcccgg

SEQ ID NO: 176147 - DNA, 403 bp, Glycine max
ttgagccaaaatcctgactcaccatagacctttacctttgagagattgtcaatccttaccctcggaagcggaaagaatataagggaaatttccaatctaagaataggaaagaaggaagatttccaatctaagataaagcataaaatacaagaaggaaagattccgcatcatagagttgtgagaatgcaaatataaaagaaagaatattcccaatctaagaatgggagaaagttataaaggaagaagatcattggaagatagcttctgatcacggatccaaggataacacaataaatgtgctgaaaggtctttgtacgggacatatttgaacattacaaatgtcccaatttggggagttgttggtgacaacatgtgttaaaaattacagcccccgcaaattatt

SEQ ID NO: 176148 - DNA, 393 bp, Glycine max
  unsure (1)..(393): unsure at all n locations
agnctngaactaatactttacccgtaacagttgtgaaaaacaaatgacaacaaacacatatttagcttcagttgttggtaaagcgattgagttttgtttcttgctttcccgagatattagataggggccaatgtaatggcatccaccacttgtgctttttcgtccaactctgtctcctgcataatcaacatcatagtatcctattaccctaaaatcttgatttatcttataaaataaactttggttaatggtacctactagatagcgtaggaccttcttaacaactttgagatgtgactctcaagaattagactgaaatctaacacacagacatttactatacacgatatctggtctactaacagtcagatagagaatgagccaatcacacct

SEQ ID NO: 176149 - DNA, 293 bp, Glycine max
ggggggcacggaattgaaggagaaaataagggagagaagttgaactttgaagtgtgtctcacaagtttcatattcatcaaagttacaacaagtgctacacatgcttctatttatagcctaggtagctctcttgagaaactttcttgagaagcttctttgagaagctagagcttagccacacccctctaatagctaagcacacctccttgagaagcttccttgagaaacttccttgagaggctagagcgttgctatacacaccttctaatagctaagctcacctccttgagata

SEQ ID NO: 176150 - DNA, 323 bp, Glycine max
gtcttgccttgacattcttaattccttttgccttatgttgataacctttctttggattttttatgttgaaagtcaactctaagaactaggcgaccttgacaaactgtacttttctgaatatatgttgcaaaaagtgtttgtggtccccactctctttctctgcacagtagagacctcgtgtcaagcaccaaagctattagacaatgactaactgggatctctcaatgaattgaagctttggattctatataaagcctaaagatgttcatgttaaggttttcgaatcacaagagaatatcctaagacaatatgaacaagtgttg

SEQ ID NO: 176151 - DNA, 440 bp, Glycine max
  unsure (1)..(440): unsure at all n locations
gtgcaactatcacattctctttttctggtgtagaaagaagcttgacaggttcacgtgcatgttctgctactgagggaggcacttgaatttggttgtcagaccgcatggtgatggctctcatattattctgattccgcacagtttgtgaatgaaatttgttacaatattaggactgagccttggttcatcatgagtagccatcaaccccatctgatttgtctaactctgaatggaggctcttgtctcttgctgaaatagcatattctggatggtcatttgcctcactaactcttctaaggaatgttgaggaggagcctcattcgcttgttgtctttgttgcgacacgtgttgatggtgatgttgttggtgctcgcttgaaagaggaacatatagcttgcttggaccantaacaattctgacaatgatggacatgctgtatt

SEQ ID NO: 176152 - DNA, 384 bp, Glycine max
  unsure (1)..(384): unsure at all n locations
agctttatctacaaccttttctnccccttttttaacatcaaaaagccaaagaactcgggaatcaacacagatataataatggagtagaaagataaaaatatcagagtataaaacataaccatccaaactcacaaacaagaaataatcaaaccagaatccaaataactcaaaatgtcaacaaccacataatgtcaaagcagaaaaaacaaggctgaaattttaataccacaagataaataagcaaagtacttaacgtaataattgaaactctaagaaacttaaccagccaaaatacacggcttattaaagacttataatcagaaactaaaatcttataagacggaggtggtggtggaagattcaaactttgacgaatgtatctga

SEQ ID NO: 176153 - DNA, 421 bp, Glycine max
tctggtctggaggtggtgatcaatgacattgatgttgttgtggaagactttgtacggagagtgatgtttgatattaatgaaatcccaaaactatattcccctttcttatctagtgttcattaacaaattattctatatcttactaatcttagagatgcaaatatgtaggaagagcaaaattaacccctacatacgtagcaatatcacatggaggaagcaattaactatatttactaaacaaaagctttcgataagaattttcctcaaacaccatacgtgcattttcaatttcccaactttaaaatccacctctataaaccctacttcacagaactcattgtattccacttctatgttcatatcaacagaatcaacttctcaatcgggttgtaatgtggaggattactcattgacactcaac

SEQ ID NO: 176154 - DNA, 380 bp, Glycine max
  unsure (1)..(380): unsure at all n locations
tgattgcatgggctggatcaacatacacattttgacaatacaangacgccagntagttgtttcaatcaaaactaatattnttcgtactcgtcaccccataatggattgcatgtgatcaattttactcaaaacattaacattggtgtttggtttgattgatcttacttttttactggtgatttcactatcttttatttttatactaattttttaaataaaaatagtgggatttttaatatttattatagaatggaaaaaatatttccttaaatgaaacaacgtcaaagaaggggttgatttatttggtggccccattttctggggaaatctatggttttcctggtaggataaaaaaacacccctttattttttttttttgg

SEQ ID NO: 176155 - DNA, 397 bp, Glycine max
  unsure (1)..(397): unsure at all n locations
tgaacaaaangntctgcatataaccatagttcaatacatttttcttagttgcaactcgaatatttacactactgagagatattactttatctgtggccaatccaagccctccatgcattgtgtactctttcaagcttttactatacttggaactgttcccaaaatggggacacctgcatcctgaacaattgtagtttaataatgttgcgctttggtgcaaagtatatactcttgatgccagatacaatataacatcaaacattgcatgtttgatggcacttaatactaatcagcatttacataaagggtgtggcccaacttttatgtgataatatacagaaagacgttaaataaaacatttctagattttgggaattacctgaactattgtcaaaat

SEQ ID NO: 176156 - DNA, 396 bp, Glycine max
  unsure (1)..(396): unsure at all n locations
gcttatngatttgtcatgaattgaacccttttcttttaatgattatctcctaataccttgtttagattctacgagagtatatggttcaaggcaaatttactctaaatttgggggagggaagtcaattataatgaaaagaaaaaggttaagcattaacacacacaacaaataagttgtatgttaaaaaaaagaaaaagaaaataagttgtgttgttacaaaaaggtcaaaagcaacttaagaaaagggaatactgagaaggctatttgtacaaaacaagaaaagatcattgggattagtctaggacttgtgctctcttagaatctaaacttttgaatcctagaaaaaccagtgaattttttgtagccacaacctcactacaagcctgagaaagtcct

SEQ ID NO: 176157 - DNA, 420 bp, Glycine max
  unsure (1)..(420): unsure at all n locations
aaaactaagcttcttatccaggctcatcttggtgggaagcttcttctttcatggcttattccctagnggatggcgcctcctctcacctcttctcctttgtcttccgctgcatctccatggtggaaaaccaccattaaaggacctcattgaagctcaaagatccagcctccatagaagccccacaaacaagcttccatcaagtggtaatcagagcacaagagcttcaagtaggtgctccttaaacctccattaatttttttgctctaccttctcttccattgttgtttcttcatttttctccatgtatctcctcacatatcttgttctaaatgtttctaacatgattatatagagtttccatcgattaaacttgctatagaagctatattagaatttctatggttcaaatatcttgttctt

SEQ ID NO: 176158 - DNA, 393 bp, Glycine max
  unsure (1)..(393): unsure at all n locations
gcttcacaaaacttatacaaagagagattgtggtgttatttcctcgaancatggcctgtatttaaaaccctataattctaaaaatgaccactaatccaactcatattttgtcaaggacttcacaccaatcaagatatatacgaacaatatacgaaaattaaacttatgactatgggagctcaagctgcacaaaacttatacattgagagtttggggtgtgaagtccttgaatcctgtcctgtatttaaaacaaaataatgcgaaaaatgaccactagtataaaggcttaatccaactcatattttgttcatgtaagactatttagataggaaattaccaaagaaattgcaaaaaaatatgctagctgtagtcaagttacctataagggtataa

SEQ ID NO: 176159 - DNA, 353 bp, Glycine max
actaagctgacaaaaaacacaaccgaagaactaagagtttatttgcatgagaataacagctataattggtttcttttctttctaattagtcatgcatagttagttacctcaacacccttcttctcaagacttctgagtaactctacaaaggctaggatgccacttgtgcctatgtccgtaaccgctgctacaaattaaaacacaaaaatgaataataatatataataacaagccgaatgaaaatgaaggttctactgcaggagtttaaggtataacaaaggacaaaagaatagagtctcacgggacattccaactatcgaaaactggattgtagtgcagaagtctcctatttc

SEQ ID NO: 176160 - DNA, 383 bp, Glycine max
agcttctgggcgggattgattcttcgtattctccttttacaccttcgagtaccactcaactggatacatcctccgtaaaaaaattggaccacacaactggatctccctcactagatgaacaatcaaatgaaccattatgtcaaaaaatgatggaggaaaatacatctccatttgacaaaggacaatggcagccttcgttctccaattcatccaatcatctagggtcaatgactttgctacagatagcattaaacacatagcacagacgacttatggcaacccgaactttgtcaggcaagattccactgatcgctacaggcaatagttgttgcattaatacatgacaatcatgaaaattcaagccaacccatttcacctcattg

SEQ ID NO: 176161 - DNA, 261 bp, Glycine max
  unsure (1)..(261): unsure at all n locations
gcgctgtatttttgggaagagnatgacgccccatcgcactgttcacgtgtgagactaatttgcctctgcgagaacattatttcccgaatcccaacggtgagattgtgccaaaatgaccggtagaggatttttccatctttcacgacgatccaccggctaaagagtctgatatcgcagttttattaggataggcttgggtgcatgcaagaaaagataaagctcagcgcgggggacatctcttccaccacataaaatattttc

SEQ ID NO: 176162 - DNA, 392 bp, Glycine max
  unsure (1)..(392): unsure at all n locations
tgcaagcttgagcttgtctttgagcatatcggcatagttatgaccgagnncacagagaggaatggaccgggttgaaacggtaagaattgtaacgtggaaggatgggagagtaagagttgtttcagcttctgcttctccattattcggatatcaaactcggaagaagaatggtagttaacgtttgaatggcagttacgcgccacggcttttagtttaagacctgtgaaattggcctattgagaaatgttcggcctaactggaccgggcccttttgggctttggaaccaatttgcataatccagctgttccggccggatttcaactagggtaatctcaattttttagtatccctccttttgtagacatcctttctaataaaaattcttttgcta

SEQ ID NO: 176163 - DNA, 399 bp, Glycine max
  unsure (1)..(399): unsure at all n locations
ngatgtctgcaactcaagtaaggaagagaattatcnttgcatcttctnctatatgaggatgggctatacttgtgtccaaactacttacaaatattatgggaaagcaatgaatttgtccctcaagctttgtttgtgtctccttgaagtaaaccaagatagggaagtttggccaccagaatttccaattaacaaatgttgagtacctgcagcatatcaaactagtttttgtcctactggtgtgaaattctagaagcgtaaacatgaaatcatggtacttacttccagcatttttttcctcccacagaagcattctcacccgattcctggagctgtttacctatttttacctcctaaaccataaattgtgtttattactaatatgaataactaagaagaaag

SEQ ID NO: 176164 - DNA, 398 bp, Glycine max
agcttctagagatcatgccgctgtcaacattttcgttgatatctaaacaggcggcaaccagctagacatttctcttaatgatatttgccatatctatggcttttgtgtctatgattgaacctaaaaatttaaaacaagccatagttgataaacattggataatagctttgcaggaagaactaaatcattttgaaagaaataatgtttgggaattaattgaaaaacccgaaaaccaccctattattggaacaaaatgggtggttataaataaatcagatgaaaatggcataattattataaataaggctagattagcagcaaaaggatataatcaggaagaggggatagattatgaggaaacatatgctctagttgctagattagaagccatcagaatg

SEQ ID NO: 176165 - DNA, 391 bp, Glycine max
  unsure (1)..(391): unsure at all n locations
agctntagcttctttaggaatcttcttaagtaagcttctcaatgaggcgagcttagttatgagaggggtgcgtgtagctaagctctagcttctcaaggaagtcttctcaaagaagcttctcaaggaagttttctcaagaaagcttctcaaggaagctacctagtctataaatagaagcatgtgtgacacttgttgtaactttgatgaatgagagtcttgtgagacatacttcaaagttccacttctatacctcttttattccttcaatttcgtgctcccccctctctctttctctccttctttcttttcctccattgaagcatcctctccaagcttcttatccaaggctcatcttggtggtgaagctccttcttccatggcttaattccta

SEQ ID NO: 176166 - DNA, 447 bp, Glycine max
  unsure (1)..(447): unsure at all n locations
ngaccggatgtaagatacatcttcttcaaccttattctttcttgactccatttcattgaagtgcatatccacttgcagttccaaagtatcaaacctctcaccaacaaaggtttgaaggccatcaaacctttccaaaatcttcgaaagaagagatgaatcttctccctcatgtccttcttcaccaatatttctagcgcccttctttacccatgatccatcatgctccttaatataaccaaaggatgctatgactagagcgcctataaggaatgatctcttgattggaacatatggttcataatcaagagggatgttgaaatgttgaatgaagagggtaacaaggtgaggataaggcaatggggcattcaatcgcaatgccttatgcatgcgatatctaacaagacgtgaccaatcaatttgtagatctttatgagaggcccacatgac

SEQ ID NO: 176167 - DNA, 282 bp, Glycine max
  unsure (1)..(282): unsure at all n locations
ttgccatgcttggggcgggtcttttttgtctagctttggagtttctaacggcaaactggttgtcgaatgagagtgttttaatggcggttgggagtgaggaggggctgcataacaaactctcggatctggtggagcgtcccaatgtctccaatttcagttggaactactccattttctggcagctctcgcattccaaatcccgtgactgggttctttgttggggagacgggtgctgcanggaacccaacgaggaagaagagggttcttttggaagaagaacac

SEQ ID NO: 176168 - DNA, 379 bp, Glycine max
  unsure (1)..(379): unsure at all n locations
ngcatgcggatcctctcaagtatggagaccatctactatctgcattctttcctcgcaaaatccatccactgcattaatgacatttacggttattaataaatttgtcccttccaatattattttaaatggatctattatttactttgacagtggagaaacacatatttttttctatcaattgataaattatgatatatattaaaaaaaattcaagtctcatgtcagaaaataagataaaaataaaatatgtaattaaaaaataattttcattttattaactagctttttagattgagttaattcttaacccacatcttaacgatcatattataatatattctagattcatatataatgacatgatttattttctaatgat

SEQ ID NO: 176169 - DNA, 381 bp, Glycine max
tagctataaatatcttttcattttcacaccattttgcaagataaagctgtttttggagtctaggagcctacctctacctcgtgggaccttcaatttcaggtaagagtggacttatcctcacttgaaatctgtgggtgttgggttcttgggagctataatgggtagctctactaggttatttctttagggtagttgtttgtgaaggaaattgttgtaattatgctaaacttgacatgtttaatgtaagcaaaactgcccatgttgatttagggtccaataatgatgttttgagatatatgtgtgcttaaaatgtagatagaaaactggtagagaggatggggagagttagcttaaagttaaatgtgagaatggtattgttgt

SEQ ID NO: 176170 - DNA, 379 bp, Glycine max
  unsure (1)..(379): unsure at all n locations
tcaccgaatagctagagttattgtagaatatgcttctcttagataacatgtgaccgaagaaccagaacgaggcacagaagatattatgctatgtggggatggaataccagaaaatacatatatgtcctaatgattgtattctgtatagaaatcaatttgccataatgcgccatttaccaacatgcaggggataccgctataaagtgaagtatgacaaatgtaatgatgatntagccacaaaaaatgatcatccatcaaaggtgtggcggcatcttccaataataccaaggtgtaagcgatagcttgccaatagaaatgacgaaaaaaccttacatggcatgcagatgacagaaaaatagatggattgcttcgacatccc

SEQ ID NO: 176171 - DNA, 394 bp, Glycine max
aagtcacctgcggcatgcaagcttgcaatctatacttatttattcgaattattatttccattgtcatgataaagacaaatgtaatttctgtattgtcattggattcgtagtcatgatggaacctactgttgtttgccaattatttttcctgtattctaaactttagtctgccttctattggttttggaagtcaaaagtgacctttcttcttttcctttattgaagcttgtggaattactctttaaagtttgcaatgaatattctacatttaacaggacattatcctgttccttcccaatataaacaatcccagaatgcagaatctttgttattttactgaaataatttcctgcgttgctggaatcaattgtgcttaccatatatattgactatc

SEQ ID NO: 176172 - DNA, 392 bp, Glycine max
  unsure (1)..(392): unsure at all n locations
acactaanaaactcaacantttagggtagaggatctccatgtcgatgacaacattctaccttacacacaccgaagagggaagaagtcaaagaatccctataagcacatatcatacaaacaaagaacagatgcctacatggagccatctacacaggatgtgataatctcgaaacgttttgtatcagcttcactcactcataaggtaacaagcaaacaggctgcagttgccgggaccaactccaaggacatataagctgtacttaggtctcagttccgacataccggcatgcatagccatcggtaggatgttatctgaaagagcaaaagaagctgacgtttacactggtacatatgctccaagggatagggacaagatagaatggaaaatcaga

SEQ ID NO: 176173 - DNA, 397 bp, Glycine max
ctgcagctttgggtcttcggcttcttgagatttgtggaactttctcaaggggtccttgctggaacctcttccttcggaggcgctgcggaacagcaaaaagtcagtgagcctccatctcctggaagtcttagaaagcgagtcggctttgttgctctgcgattggttgcgttcctcgtcccacgtgtagtgagatattctgttacaaggagagagagaacgcgtgaccctactagaactcgcagtcctatctctccctcgtgtctcttgttcttcttcacttaaatctccctcttctttcttctttctcgtcgagaaggcttcgcgaatggccttcttgccttgggctatggaagatcgtttggcagggagaagtgggcttttagcagactccgaggaa

SEQ ID NO: 176174 - DNA, 286 bp, Glycine max
ctttcttatggtagaatataaaactgaagaggcatctttcttgttcataattacatacatatacaagggtgcaatcaaatgaaaaggacttcgctgtgtactaatctatctataatcaagaaatgatatcaaatgtgtgtgtgatttcatgactatggggtgcccggtgtaacattcaaacctatccaccgacaataaatggatttgatctcccagctgcaaccatggaataagttccatcttgctctctcatacaaatcccatccaccatattgtcaaatggcta

SEQ ID NO: 176175 - DNA, 373 bp, Glycine max
gcgggaatgggatttctctattggcagcagcgggacagggggtatgactcagcctaaatcgccattcgtactggcgggataaggctgagtatgagagaggagagagaggagcatggctgaagccatgccgccattggtgctggcgggacatgcctacgtggacagtcccgccattggcacctgcggttcccctttgcatgtgaccttcctactgcagatgacagtctgaacgttagcgcagtgtttaggttccagttctgaaaaggctatggctatcatttgaacgttaaaaatttgaacgttggctttaagtcttcagctatataaaaaatgtttgaggcttattctttacgcttacatttctttctccttg

SEQ ID NO: 176176 - DNA, 124 bp, Glycine max
tagcgctcgacaatttctggtagaacacctgcagactattatttatttcatgatacattgatatgtctattgtccaagacaaaatgctctcgggacttttgtcgaacagtcgtgggggggggag

SEQ ID NO: 176177 - DNA, 294 bp, Glycine max
  unsure (1)..(294): unsure at all n locations
aaatttaaaagttactaggttgcctcctaatatcgcttctttaacggcttgagcaagaacgcattgatgaacttgtcggtcacggacctaaaacattgcttacctttggctttggacttggttgcatattggtcggccatgtgtcgtaagcaatactctaacctttttgtggatgagctgaaggggtctggaagtggccgctgtgcatttgttgtctgttggtggccatcccaaggtgttatggtgtctcacccctctgcctgcatggnggcacaatacttcttgatgaaagct

SEQ ID NO: 176178 - DNA, 454 bp, Glycine max
ccttgcggatttgtcttcgccggcgaaaggatcgaagtttgtcttaaaagattcaaatctgatcatccttctttgatgaatgagaaaactggggcaaatgaataggatgataatgaggaaggaacccatgttgtggctgccattcctacatggtcaaacttcccaccagcccaacaatgtctttgctcaaccaatatcggcccttctcattacccaccacctattcgttcacaaaggctatccccaaatcatccacaaagtttgttggctgcacatccaatgccatgtgcaaaccaaaacaccaaccaagaaatgaattttgcagcgaaaaagcctgtagaattcaccctcattgctgtaacatatgttgacttgctcccatatctacttgataatccaatggtagccataaccacaaccaaggttcctcagcctcctttctccgagatactac

SEQ ID NO: 176179 - DNA, 262 bp, Glycine max
tctctttctaaattgctacgaaatatagttaccgtgaggaaaatctaagccgaggcgcttccgaaacgtttgcgtaacgcttgccggaggaatttcgtgaatgtatataccggtcttaaacgttcctgatgtatatctttatcctcttcgatcttcaacgggtaagtatcttgaaccatgcctctcgaatcattcaatgtacccgtggtgagccacgttgagattctagaatttttattctgattacatttactttatatac

SEQ ID NO: 176180 - DNA, 401 bp, Glycine max
  unsure (1)..(401): unsure at all n locations
atgggaagncgagccacgccacaattttaaatattattggaatgctcaaaatcanagtattcgtaaacactagcaatataatactcagaatgcgcataatgctcagaatgatcggatgcaccattgcctaactaatctatgaaaggggtagttatatcaggatcaaagggttataaatcgcctaaattgcccctagtcatgcactatatgccgtgaataatgtgtttctcaacaaacacctctcaagggggtaatactacaactattctcatacactatatattgagccgtatcttgggtagaacacctatattattaagaatatcaccataagttgatacaaatgtatgttacttgtagaaacctatcgatatagcagttcacagctggaatttttctcc

SEQ ID NO: 176181 - DNA, 390 bp, Glycine max
agcttctccgaagggcatgggtattttctgtttcctaaaaatatctaacaatctcgccagatgacgatctttttctttcttggaaggtaccacaggatatggtacttccacaccttcatccacaactttttcacttctactcttctttgcattcttcttatttttttcttctttttcaattttttcattttctatttctttgtctacttttttttatttttcttggtccttcatttctttattcttaaccattatttgttcctctttttcttgatcactttcacctctcacctcatttttcttgccattagtacctttcttgttagcagttttcttcttatgcacaacactatcctcatcctcagcctccacaaaccttttactccttgt

SEQ ID NO: 176182 - DNA, 389 bp, Glycine max
  unsure (1)..(389): unsure at all n locations
ntacccccaggtngnaccatgttgctgctccattatctctaacaatagagtcctatgcaataggctggnactcgctagaattgcgaagacttgaatcagattagaatttcactccttctgtgagtttaagagttgcgcctctcgtgtgtttttagattgaacctttcttatgtcttatcaaaggttttatacctttatggtgaatctttccaggacttatcactctctatagagtgtggctttttatgatcttctttttttccccatatttctggctcatttcctcacttccatgttgtctatttcttgcgccaatgttatcaaaagtatttattcttcgagccaaatacactctctacatctgtatcgttatatcctgtaaccagata

SEQ ID NO: 176183 - DNA, 395 bp, Glycine max
gcttataagaacaaaattgcctcaatcatttccaaatatgcatgtgaattaggaagcatcaacaagaatcaagccaaggctattgtgcaagcaatcaatggggcaaaacacaccaaatgattatgatgatggatggctcaaattctcacaaaggtaaactcatcactttcaaattgagctttcaaaactatcatgtcaggtagaggaaaaacaaggatttcaaatcacaaaatgtcaagaggctttttttttcaaaacaattacccatttcttgaacatatcctataattcaaagaaaaacatgcaaagtcgtacatgcacacagaattgacccaaaatattaaactagaaacccaatgaaactaacaacattaacaaattaacacaactaacaa

SEQ ID NO: 176184 - DNA, 470 bp, Glycine max
acactaaaaactaagcttcaactgaattacaacgtgtcagagaattgcaaaatgtggtgatttattacaatatatcggtaatcgattaccagtgtgtgtgaacgttgaaatgcaaattcaattgggaagagtcacatcgtttcacaaaaatgctgtgcgttatcgattacaatgaatttggtaatcgattaccagtgataagtttataacaaaattcaaaagatgtaactcttccaatggttgtcaaatatttcttatgggtataactcttctcaaggatttcttgaccagacatgaaaagactatataaacaagtcccttactgcgtttttaagtacaatattacaattctgtacaacctttgaaatctcttgagcaacgtcttaaaatatttattcgtcttcctttgcaaagctttctaaggtgttggtttttcaaacctggaaaaataagtggcggttcatttttct

SEQ ID NO: 176185 - DNA, 83 bp, Glycine max
ggaaactaactagggccactccgttatacaaacttactgtgagaaggcttagaaattgctagagctgagctacatcatcctgc

SEQ ID NO: 176186 - DNA, 337 bp, Glycine max
  unsure (1)..(337): unsure at all n locations
agcttgtgacctgtatagaaaatgtccaatttttntttaaaacccatttgttttttgcagccactatatttgtccttcctctagttctaatcattcaccatttttagttaaaaactatgatgttcctagttcctagactatgtttcagacatttaagaccttttgctttagtatcggcaaccatagagagctctgtcaatgattccttagtgagtctagaaattttggggaaaaattgaggataatttgattaagaaaaatagtgtttagtaggttatagaataggaatacattttgaaatcgattaaggtgggggttttagaaattcactcacttt

SEQ ID NO: 176187 - DNA, 271 bp, Glycine max
aagtgaaatctataatgaggtaaattggaggcaaactctcacctcacaccaggccataacatccattaagacttgctcaaacgggatatacacctaaaatcacaccgaatcacaagttgactctgcaacacccaaatatgccctagcaatggctctgtggtcacaatggtcatgtagttgtctctctagctcaacctacgctttctcacatgatctagatgacatttcaagctagtagtaactcactctaacctcctttaccacaaaattc

SEQ ID NO: 176188 - DNA, 356 bp, Glycine max
  unsure (1)..(356): unsure at all n locations
acaatctctttctttggcagaaanagtctaaaacataactatactcttactgagcacgaactaacagctatgcaagtgggatcagcatcttccatttatagagtaatcgtgctcagcggaatctgcagtttatacaagttgcaatgcgtttccaggatgtcaagacatctcacatgacatctgctttcttgcttctgctccccctgtctccatgcttactgcagcatcttctaacagctactaatctttttcaggatgtcaagacatctcctgtgaaatcagctatctgctccccctgtcttcatgcttttactgtagaatcttataatagtttacatcagtcatcaacaggaaca

SEQ ID NO: 176189 - DNA, 382 bp, Glycine max
agcttagctatattattctaaactttcgttagctatttaagctgagtctagtccaacaagagggatctgaggacgaagcttattttaagttagtctaaacctaggaaggctgtctaaattaagcctagtccaacaagagggatctgaggacgaagcttggattgattcagtctaactagggatcgaggttttgtaatttaggctacaacatagaacacaaaagcatgactgattagataaacatctttatatacatcagttggcttgttagaaagacccaacatctttacctacagctgtcactcttacttgcatttttactattttttagcctagacttagtctaattttgttctaaatcatcaattatcaatttttcttt

SEQ ID NO: 176190 - DNA, 373 bp, Glycine max
ctgagccataatcctgactcactataattcttgaccttttgtgagaatgccaatcgttaccctcggaagcaataaataaaagaagagaaggaaaatctccaatcaaaggaaaaatgagaaggaaaatttccattcaaaggaaaaatgagaaggaaaatttccaatctaatgaaaaatgagaggaaaggaaattcccaatcaaagaatgggagatagctaaaagaaaagaaaggaaattccctatcaaagaatgggagatagataaaaaatgatgaatatgatagggaagaaagttcccgatctaagaatacagaagaaatattctgaaaggtctttggaccggacaatatctgaacaatacataattgtcacc

SEQ ID NO: 176191 - DNA, 401 bp, Glycine max
gcaagctgctgaaataagctaaaaaaggcttattgtttttgcaagctattctgataagtccagataagctcttctaaacactctcgatgcatatgaacacgtggacactacagatactgctcgcattatgacagacagcgaataattctaattctaattccaatcaacatataaaatcagaaccagccacaaataaacactgaaaagcaagcatctcatctcgatgtacacactgacagtcagagagagaggtttgaacatagcaaagcgaaaagcgaagagctggtgagaaaatgcatgcgcatgcagaataaaacaaaatgaaatgaacttacagagataagcaactctaggatgagtcttctcaacctcattagcaacgcgaagaatgggtgcaatct

SEQ ID NO: 176192 - DNA, 387 bp, Glycine max
gaaactcagctttacactaatgcctttcagcacagaacatacgaacatatgtttcaactatttggacaatacagtggcacgggcaacaaatggtattaacataaccaaatactgaatttcttgtcagcttcgactctgtccaaccccattgccacatgctaataagctatattttttacttgactaaagcattaattcctgatcttataaattataaaatattcagaatgtatacaactccactaaacggcacatgccagaatcttattctagaaagatttcttgatcaggctttacttctaagaaattctattgatcctatcaaacatggcatcatctagccccgaaaataaaaaaaaaatctcgtaaaaaggaacatctcttcca

SEQ ID NO: 176193 - DNA, 393 bp, Glycine max
cttttcgattcattctatgtacccggagtggtccacattgtgtttcgtgcatttttattctcattttgtttactatttataccccctgttgacgtgcttaagccattttacttaagtcatttctcgcttaacttaaaaacaaaataaatttcccccgaacgtttgaattgtattatccattaacttcggttaaaataaattccgaccgttcggtcattgccgaaccacgttggaaatcaaaaagaggtaaaaaataatataataatcaaaaagacatcttttagtaaaataaagcggaaaatcaatcggacgttttctctttgggatttctcattcttaatcgaaatgattaataactaaagtgaaattaaggctaaaatcaactcgcctagt

SEQ ID NO: 176194 - DNA, 366 bp, Glycine max
  unsure (1)..(366): unsure at all n locations
cttaatctaactggctcatatctatgagatgatcatatgttttctttactggactaatacatntgctgcccaagattagtggtcttgcatgagaagatcctcataagcatcttaaggagtttcatatattctgttacaccattaaaacccctgatgtccatgaagatcatatcttttctcaagggttttcctcattctctagaaggagtggcgaaagattggttgtactaccttgctcccaagtccattactagttgggatgacctcaagagggttggtagtgcttatctttacttatttattaaagattggctaatattttggtcaaacatatgctcttaaaacattgaagaaaactggagttgc

SEQ ID NO: 176195 - DNA, 395 bp, Glycine max
catgcaagcttgttcacacatcattcgcgtgtatgacattcactccacaaggtttgaagtacaagagaccttcaatcctattacccaacgtggcggaccaaagagggcatataactcgaatggtcaatattgacaatgcggaaggtattcagacgttccactatgcatgttcacatataattgcaactaatggttccgtgagcctgaactactaccaaaatatagatgttcatacaaatgaacacatcttaaaaccttactccccaccatggtggcctctagggaaagaagcgggctattcctccttctaacgacgcatggacacttatccctgacccaactacaaatcttccaaaggttggccacaataacacggataacgaatgagaaggaat

SEQ ID NO: 176196 - DNA, 424 bp, Glycine max
  unsure (1)..(424): unsure at all n locations
ctcacagcttgcctaccatatctgaagttggatgatacattcggtttattccngatggttacttcgggnacaccttatcaacagcgctggtagcggcaactgcaaccacataggcgttcattatcttcttcatgctcatcatggcctccatcattgtggccatttgctctttcatggcctcctatgtcggactccatctgctcttgcacctcctctacttcacctattactcttgctctagcacaagttcggtaagggcgccgtaaagcgtgttctttttctttatataacaatgattaagttcccttttttcttcaaggaaagaatgcaatgagcaatgcaacttatgaacaacaaggatgtatgcgaatgacgcacagttgaagtattgctagaatttacgcacgatatggggttgaatcaa

SEQ ID NO: 176197 - DNA, 383 bp, Glycine max
ttttaataaactggtttaacactataatatatactatcaatattttttattgagaaaataatttcattagattataatctgaccctatagaataaggaatgctaaaggccaagaaaaagtttatgtaacaaattacacacaaaaactgaatcatgccatctccaaacacaaaccatatattcgccagctggcttctaaaggcactagaaaacttcctagctagtgtctcacatgaatgacgaacccatatacacaaactgcacctaatcatctcaagataaaattgcaatatcataactctctatgttaaatcatgagggagccctagccccccttgcatccatccgactctggactgacataggacttatccaactataatc

SEQ ID NO: 176198 - DNA, 277 bp, Glycine max
  unsure (1)..(277): unsure at all n locations
cggaatgagggttgttgatcatgaatggataatggtttgatttcttacagatggaaacgccgaagagatggaaaaagatgtngaatctgaatctttaatatgagtcatgcagattcaatggagttcttttggaggcttttatggattccaaaatgatggagtgtctattgcttgaccctccattcaatagctactcaggctgacagttcacatggtctttgtgaggattttaactttcttcgcttgaataacatttgatactgagggatactcttag

SEQ ID NO: 176199 - DNA, 198 bp, Glycine max
  unsure (1)..(198): unsure at all n locations
acccctccacccccacaaagaaagaggcnacacctctctgggttttagggagcccaaggacaaaagccatactaatgtctaccccaggtgcaaatggaatgggtaagggtgtgtatagcccatgaggcatcaccctaaacttggtttgtaaaacagccacatctttcttattatggggccaataaacaattttctttg

SEQ ID NO: 176200 - DNA, 390 bp, Glycine max
agcttgtgtaaaatgattcctttctcggtttatgctgaagggcctgctcgacctactggaggagctgctgctattgccatgctaattggtcctgatgctcccatttcttttgaaagcaaattgagaggaagtcatatgtctcatgtttatgatttttacaagcctaatcttgccagtgaatatctcagttagctttttgaatcccttttcattttctgttataacatttgacttttgggatcataaacattgaaaaactactagcaattattttcctcgtcatgatcaaaattatccttgcaagttgcactttatttttgtcttgatatgccatgaaggatagcatttgatcgttcatgtccatttacttttacccataacctgctgata

SEQ ID NO: 176201 - DNA, 471 bp, Glycine max
gacctctaaaactcagcttgaacaattagttagaaaaaccactacctctttctcgattcatatgagattcctcatgctttcgttgattcatcacaaactgctcttcaagcttcttaattgactccatatagtctttctgatattttgatctctccttctgagaaaggacaatgagtatcagaacatcatcaacatcaaatcattgacatatgttgtcgatataggcgatataatctcaaaagactaattaaatttgatactatggattcacctgtagcaaaaactatgtaattggatactgtgttagagaaaatctttcatacaaaccactatactaatcacatgatatttataattgatttggagccaacctccaatgaatctacatagtttcattcagcctcagatatccgatgttgtgctccagtggctaacctttcaatctatcctcaatggtctctgtagccttta

SEQ ID NO: 176202 - DNA, 374 bp, Glycine max
tattgtgggacttcaacttgtgatcatgtgggtcaattcacataataaactccttttcatatattcatctatcctattggttctgtccctttagagaacccagactaatacaaaatcttgtaaatgatcctgagttgactatggaataaagatagtaattaaaaaactctttgagtggggaggagccaagatggctgaataggaagagctctggtctacagctcccaacatgagtgacacagaagacgggtgatttctgcatttccatctgaggtactgggttcatctcactagggagtgccacacagtgggtgcaggtcagtgggtgcatgcaacatgtgtgagctgaagcaggttgaggcattgcctcactc

SEQ ID NO: 176203 - DNA, 430 bp, Glycine max
tgacgtggccattgcagagaaatcacccttcctatcatacccagcagccagcaaagcatgtggcacagctgtggtcactacaaagctgatcacacaaagaagtatgacaaacttgaagggtctacgtggaaatggcagccttcattttgggggcaaccaactgggaattgatatgtggaaaagaagcccataaacaacaaagtgcttaccatatatcttatcataggtaagtgatttggggcttatgtgtggcctacaaccctctcatagccacagaagggaagcattctggctggggtacaaatgaaaagggacagttgatagacaatgacaccaaaaatgttgaagcctgtaattcgtggagggtggtagtcatgaagttattttgtcaacagcttgtggtcagatatacacacctggcactgtagaa

SEQ ID NO: 176204 - DNA, 393 bp, Glycine max
  unsure (1)..(393): unsure at all n locations
agctttgatggtgttgagaagaaatcacatgtntgtcatcatcaaaaagggggagaatgtgaatgtatgtatacatgattttgatgatgtcaaaagaagaatcaaacaaggctcattttgcttcaagattaatacaagattgcttcaacaaacaaagccttgattcaagatttcttcaagatcaagccttacctcacaatgaaaggtttcaagtcattcaaggcacatgtaatcgattaccaatacatgtaatcgattaccaatggtttgaaagtgtgaatcgattacacatcatatgtaatcgattatcagagactctgaacgttgggaattcaaattttaaatgaagggtcacaactgttcaagaaaaacaactttgtaatcgattacact

SEQ ID NO: 176205 - DNA, 419 bp, Glycine max
tgtacctgattatgctgtgatacagaccgaccatagcttttattcatgaacttcggttagcgctgagagcctgatattgatgcagccaatggaaacgaataaaatctggtggtgcttatctagtgagatttatattgaggtaaatattaaactttacacgtcatagacatgttaccataaatcttagcatatgaacaccaacttagatattgtaagcggccaacaaactctaaaggccgacttaagtaatatgtgctctattaatgaacctactttagccaagtcggacataaccttcgaatatgaaacttatcgcaaatactttaatagaccccactgtgtgattactcaatgtgggcaacactccaatttgccttttgatttcccaatcaaagaaacatgctatcccatgattttta

SEQ ID NO: 176206 - DNA, 337 bp, Glycine max
cacaaggaactcccccccatggggaacacccagagttctaagggagtttcaaaaacgcatgacatacccccaagacaaagattcccccttaagaaaaaactaaaggacttactcgcaaagttgatactatttccatggcacatgatatatgaaacatgggtaccaacaatgcacaaaactggggaaattaaaaatactaaagccaccccctttaaagatgcgaaaaactcttttaccacccttttctgcaccaatgagatacatcaaggagaactgaaccccccctgtacatacaccacatacatcatcaccatgacattttcaacatcaaaaacaa

SEQ ID NO: 176207 - DNA, 382 bp, Glycine max
agcttgagcttggtggatacagtttaactcttgtttgggaaggatgagtttctcggatcagtggagttctgatagacgatattttggttcgaaattgaaatgttttagcataggacttagttgtgaaatagttaattggtgcttaaatgcagaataccttcattgaaggagatcctagttgctttcctgaactgcatattataaagtaaaaagttacagccatgtaacaactaatgaaagtttcatcatgtctgtatttctatacttgaaaaaaaatagtcaagattgaattgccagccttgtacggccgagagaggaatgaaatatgaacttttgttagatgaatgcaataagcctagtcaaaaattgtcacctggctatg

SEQ ID NO: 176208 - DNA, 406 bp, Glycine max
  unsure (1)..(406): unsure at all n locations
ctgagtctcaaagaagctatgtgtttcactttgtncgcaatctggcgagctgatcattcccattcacaagagcctggtctgatgggagcaatctctcccctgatagaagattaacaaaatatcgattatcaaaagtagcaggtgtagccaaatcaagatgtgcaactgcgttactattatctggtcctgagcatagccgttgcaatgatgcaatgaatacaatgttagcattggctctttctgatttactactagactgaaaacgcgagctaaatgttcttgtacgagcattaccaattgtgggcgcaccagaataaaatgctaatcttgtaaatatctcaatgatggaaaaaaattctaataccagttcaataaaaagtgtgaagatgattaaactgaaagggcc

SEQ ID NO: 176209 - DNA, 374 bp, Glycine max
agcttttccctcatctcccacgttgcttttcttctccctttctcctccaccattgttgcccattaaagctccaaactttgctcatcatttctactccaaattgcaaagggaagccattttcggagtcgtgaagcgcacctctacgttgtggaacttcgaatttcaggtttgggtggacttcttctcacatgaattttgtgggtattgggtttttgggagatatgatgggtagttttactaggttaatgccttatggtagttatttgtgaagaaatttgttgaaagcatgctaaacttgacatgtttgatgtgagtcaaatttacccattatgtcttagggttttatgatgatgctttgggatgtttgtgtgctg

SEQ ID NO: 176210 - DNA, 382 bp, Glycine max
  unsure (1)..(382): unsure at all n locations
ccttatgctagataggctaaactttcgtattctgcttgatctgagtcttgtcttacaagaaggatctacagacgatactcactttaagttagtctatacctaagagggctatctcaattgggcctaatccaacaagagggatctgaggacgaagctnggattgattcagtcttacgagggatcgatgttttagaattcctgctacaacataaaacacaagagcatgattgattagagaaatatatttatatgcatcatcttgtttggagaaagacccaccattcctacctactgttgtcacttttacttactttgcatgttatagatttagcataaaagattactgtatattctgggtggaattatcaatcatacatgttct

SEQ ID NO: 176211 - DNA, 307 bp, Glycine max
  unsure (1)..(307): unsure at all n locations
agctngncacatnnggggctcgcttaagccttcctacatttatataattatggctntatatgcgtgcttaagcaagccatgtacgagcaaacttaagctagttatattggggcatactacgagataagcccacgtctaataaaaagcccagatttaataactataaaaggagacttttaaccatacttaatttattatattcttatgcatgcattcatcgaggttagagagagaaagtatgtgacaatgttcatgctttgggttccctcttcatcaaatcttgtttctcccatggctatgagtatgt

SEQ ID NO: 176212 - DNA, 234 bp, Glycine max
  unsure (1)..(234): unsure at all n locations
tcagagaatgaggcttgcttccatttagctgtgcactcattatacatgtctaccaacactatggcagagacttaaaaatagtgtaatagaatgtatcgcttgcattcctcttactganttaaccaggaacagcaatacacctttagctatttctcttactgttttaaccaggaacaagaactcacctttagcgataatattattcctcctgattaaagacaaaaataattataa

SEQ ID NO: 176213 - DNA, 351 bp, Glycine max
gagacacctgaggctgcagctctgaaatactctaaagaattcttttttttaaaatagaatgggccacgagtgaactcatatgttctagtttccacactcatgcatgctatttactggtaggtgtgcactgtatggtcttcagcctgaacatagaagttgtctacttccaagagcaagggacattagtctaaagaccaaagaagcactacaagggaacttggtgagcaagatggggttacagtgatatatgagccgagagatttcatccagtagacgtttttaacaggtttgatattagacccaacaaataccttatggactaatatcaagatcaattgttatcctactttt

SEQ ID NO: 176214 - DNA, 177 bp, Glycine max
  unsure (1)..(177): unsure at all n locations
gcttctgcctcttttgggtcatggattagaccatgctaccaagnagttgtggctttcanaaatcgtccatgcccctctctgatgcaaattccagctccaaagatttgttgttgtttgaatatagcagcatctatattgctttttatcttcccttgtggaggcttcttccaagttgtg

SEQ ID NO: 176215 - DNA, 178 bp, Glycine max
catacattttatctaataaaaaaatgattaaatatgttttttatatctaaagaatattattttaagtaatacatactttggcaattataattattaaaacctgaaaaaattatttaactaggacctgattacttactctgtattccgatgtcgagctattctaataaatcgtcatctc

SEQ ID NO: 176216 - DNA, 348 bp, Glycine max
  unsure (1)..(348): unsure at all n locations
atcctctaagcacctgggctgcagctgaacggaacttatattctggttctacgagtntaaagnagaattggagaggcgaaaccttcacaaacgcctcgccaaccttcaggaaggaagcatagatgtnggcagtggtaaagaattctatgccaatttctatagtccagcagatcaagctcctaaatgtgctagaataagaggccatttaatcaggatagttgtagacagcttaaatgagttcctccagactccagtgttattagaggagggggaatctttacccacttattctagattttacagattaagatctgatcccaaagagatggaggctagtctgngcattcc

SEQ ID NO: 176217 - DNA, 466 bp, Glycine max
  unsure (1)..(466): unsure at all n locations
agcttctatagaaggttcgttcttaatntctctacaatngcatcacctctcaatgagctggagaagaagaatgtggcatttacctggggtgaaaaacaagagcaagcctttgctttgttcaaagaaaagcttactaaggcacctgttctagctcttcctgacttttctaaaacttttgagctagaatgcgatgcctctggagtgggagttggagctgtattgttacaaggtgggcaccctattgcttattttagtgaaaaacttcatagtgccaccctcaactaccccacctatgataaagagctntatgccttaataagagccctccaaacttgggaacattaccttgtttccaaggaattngtcattcatagngatcatcaatcacttaagtacattagagggcaaagcaagttaacaagatgcatgcaaaatgggataagacctagagcaatttcatatgtat

SEQ ID NO: 176218 - DNA, 255 bp, Glycine max
  unsure (1)..(255): unsure at all n locations
aaagatgatgacaanacactcaaaagccaagaacacttcacgatgacgnagatgataatctcaagaatcaaagaatgagttcaagactgaatcaggtacacttcaaggatcaagaagaaagttgattcaagaatcaagaatcaagaatcatgtttcaagattcacgttccaagaatcaagatcaagattcaagactcaagattcaagaatcaagagaagactcaatcaagataagtataaaaaaggtttttcaaa

SEQ ID NO: 176219 - DNA, 320 bp, Glycine max
  unsure (1)..(320): unsure at all n locations
agctncangtctatctgtatatacggaatgtccctgatgctggagcagagaagntagcagactcaaagtcagctccagccagcccagcttcaagtgatcaaattgctaaaccagctccttctatcagtggcatcagtgttcagccagcaggtaaactttattcttacaaagaagtagccctagccaaacctgggacaattgagaaggtggtggctgaacagtcgccaaaaggaactcctattcaacanaattctgaggtgagtgccatgatagctacaacaaaggaaactcaaaatatcatcatggcaacaacaaatgat

SEQ ID NO: 176220 - DNA, 96 bp, Glycine max
gtggaggaacgccccggcgtttacgcaacaagcataatgtaaacctttacggttttaaaagctctatagttgggcctaggctgtagagttttcttt

SEQ ID NO: 176221 - DNA, 229 bp, Glycine max
  unsure (1)..(229): unsure at all n locations
gctcaaagaaaagcttactaaggcacctgttctagctcttcctgactttactaaaactttngagctagaatgtgatgcctctggagtgggagttggagctgtattgttacaaggtgggcaccctattgcttattctagtgaacaacttcatagtgccaccctcaactaccccacctatgataaagagctttatgccttaatacgagccctccaaacatgggaacattac

SEQ ID NO: 176222 - DNA, 359 bp, Glycine max
  unsure (1)..(359): unsure at all n locations
agcacctgcaggctgcagcttgatggtgtgagaagaaacacangttttgtatttcaaaaagggtgatgaatgngaatgtatgnatacatgattntgatgatgtcaaaagaagaatcaaacaaggctcattttgcttcaagattaatacaagattgtttcaacaaacaaagccttgattcaagatttcttcaagatcaagccttgcctcacaatgaaaggtttcaagtcattcaaggcacatgtaatcaattaccaatacatgtaatcgattaccaatggtttgaaagtgtgtaattgattacacatcatatgtaatcgattaccagagactctgaacgttgagaatttaaattttaaat

SEQ ID NO: 176223 - DNA, 344 bp, Glycine max
  unsure (1)..(344): unsure at all n locations
actactcttaaagcaaaatggcatataacctcctcccataaatacaaacatcaatggtaatttagagcaagcttatgcgcatatttccttacgaacgttctcttgcacaagacattctattaactaagaaaaatgcacccatatacaatcaaggcagcttcgttacctagattatttacacgtatttccaaggtgtatttgttacttacatcacacacatctncttggttaaaattacatacatgcatactcaaaagcatttggggtaccaaaaaatgcacatgtgcacatcttggtatttctaatacctatacatacacaaacttcatgatgaatcttgacta

SEQ ID NO: 176224 - DNA, 266 bp, Glycine max
  unsure (1)..(266): unsure at all n locations
caaacaatgaacctatccaccctttcaatgtttcctgggggcaatgactnatggagggtgaatggaaggtgtcgtatggaatntagagcatgantttagagaagtattaaagtgtatagtattcactttgacttgatctcactccccanaatgggatacagacatagtaatagtatattatacactatgcatcttgcgtaggccaatttgctntgtaactttagtttctcccttgaccccatttaagtcctgcatatatatgcgta

SEQ ID NO: 176225 - DNA, 424 bp, Glycine max
  unsure (1)..(424): unsure at all n locations
ctctaagncacctgcaggctgcaagcttaacattaactgcgttctttcgattattacaggactcaatcaaacatccgagaaaatagtttttgtcgtttgaatctgctcagaggttcaacattcaatctcgagcgtctcgttatattacaggactcaatcagccatccgagtaaaaagttattgtcgtttgaattggctgagagcttcaacattcaatttcgagcgtctcgatatgttacgggactcaaacagacatccgagtaaaaatttattggcgtttgaattggctcagagcatcaacattcaatttcgagcgtctcgatatatgacgggactcaatcagacatccgagtaaaaagttatggtcgtttgaattggctcagagcatcaacattcatattcgagcgtctcgatatatgacggg

SEQ ID NO: 176226 - DNA, 427 bp, Glycine max
  unsure (1)..(427): unsure at all n locations
agctngtaaggttaaagacgtactatngtctcgtgtncangcaacaatggggagacgnggctatacgagacatcttgccaaacaaagtcaggttaacgataactcgcatgtgctttgtcttccattctatatgtagcaaagtcattgatccagtcatgtttgatgagttggaaaatgaggccgcaattatactgtgccagttggagatgtattttccccctgctttctttgacatcatgattcacttgattgtgcatctggtcaaagaaatcaaatgttgtgagcctgtttatctacggtggatgtactcggctgagcgatacatgaagatcttaanagggtatacagagaatctatatncgccagaagcatctattgtngagagggacatttcagaagaagccatcgaattttgttcagaatactt

SEQ ID NO: 176227 - DNA, 423 bp, Glycine max
  unsure (1)..(423): unsure at all n locations
agctnctatattaagctgtttccattnancattattacacaagnnngagntttaattcagaaaaagttagatgtgtactctctctctaatcttagnggagaagcggattcnntcctacaattctttgagtagtattcaagagcancccttggcttgtatcaanaggaactttcacnaaccttttgtgttgttgcccttcgcttggaaaagaatgtgattctttcctttccttatgcatctccaccgcttgttcctttcaaacccaccaagttccagaaatatccacgctctgcccaataattatctacgtgaccactaactcccatttcacacactcaaattaagtgattcttgatcctaaattgaagttcaaaacgagatctctcacctcgtttgggaatcacctatttggagccctgctgc

SEQ ID NO: 176228 - DNA, 257 bp, Glycine max
  unsure (1)..(257): unsure at all n locations
catgcaatctnttaccaattcagaatacacaggcaatttttatagacataatgtggaatgattanttgagnnnngaaaggcccgaatgcatncgaaactcttatcagaaaagaaatccatatctatgaacttagggtctatgatagaatgagaggagaaaaggtttctgtaccgtatacgttgttcttcggatgagaacaatgaggaggaggaaatggaggaaggaattggagtattctgagcctcggaatgcagtt

SEQ ID NO: 176229 - DNA, 403 bp, Glycine max
  unsure (1)..(403): unsure at all n locations
aaaggcactgggaatcgattaccanaacattgtaattgattacagctttttgaaaataattggaacgttgtaaattcaatttgaaaactttttcaaaacaattttgctactggtaatcgattacaacaatctggtaatcgattaccagagagtaaaaactctttggtaaaaggttttgtcaaaaactcatgtgctattcaaagttttgaaaaactttntaatacttatcttgattgagtcttctcttcattcttgaatcttgagtcttgaatcttgatcttgattcttgagatcttgaaccttgaatcttgattcttggctctagattttctttttgagtcttgaattcttcttgattcttgattcacttgagttggtctttgattgatctttgattcacttg

SEQ ID NO: 176230 - DNA, 497 bp, Glycine max
  unsure (1)..(497): unsure at all n locations
tgatctcagagtcacctgcggcatgcaagctnggacatcaatggtggctgcgactctcttcgaccattcatttanatatcttcccaatactcaggcgacttgatatcaggaagtggcctaatctaaagaggatttcacaggggcaggctcataatcatctccagactctgtgtgtcggatcgtgcccccaattagaatcattgcctgaaggaatgcatgtcctccttccatctcttgatgatctgnggatagaggattgtccaaaagttgaaatgtttcccgaaggaggtttgccatcaaatttaaaaagtatgggtctctatggtagttacaaacttatgtccttattgaaaactgccttgggaggcaatcactctctagaaagattatctatgggaggagtggattgtgagtgtcttcctgaggaaggtgtactgccacactctcttcttactctagagatcaggaactgtccagatctaataagactggactac

SEQ ID NO: 176231 - DNA, 227 bp, Glycine max
  unsure (1)..(227): unsure at all n locations
acatacaannctattgatactttatatggtagccaagggaccaatgacccattattgataaaaccttggacaatgccccgcactgattagagcttataagagagcacaaactaggtagagctcataccttgtaactgcagtgtaaaagcttgagcctgacacccacgattgtccaagagagctaggtttttcgaccccagttcaacagatgtaggtttttcactttc

SEQ ID NO: 176232 - DNA, 418 bp, Glycine max
  unsure (1)..(418): unsure at all n locations
agtttttaaaaaaannatcataatctctttcaatcaatctttcaatatctttcatctctttcaacagaactttctggtttcatttctcttcatctttctaaaagtgntttatcaacactttctcttccaaganaagttctttattcaaaaacttgtgctattcatctttttcattctcttctctcttttccaaaaagaattcaagaaggactaatcgcctaaattctttttgtgtctctcttctcccttttccaaaagaacagaggactaaccgccagaattcttttgtgtctcccttttcccttgccaagagaattcanaaggacatagtttgaaaattcttttgattcttccctttcccttaaacaaaagattttaagggacaaccggctgagatatcttttgtnttcccttacaa

SEQ ID NO: 176233 - DNA, 383 bp, Glycine max
  unsure (1)..(383): unsure at all n locations
agcttgcacaatnctggggttgtccacacattgtccanatctgttncaanancatcctagacacanaattcatcaccaaaatacttccatgccccattttcattttgtatcaatttaccattgtggtgcaaaataagagtgatttcatcacacatcctacaggtaaacataaacatcattattttgtattttcacaaacctagtttatacaaaacatcagtaactaaaaagtaaaaatacaattttgagaacccaaatataagcctccaaacaaacatcattaaaaaaaaggaacatgaagccaaacgagaaacccaaaaaggaacaaacactgcacaaaaggaaatgacttcatctctttacaaccaagcaaaaacgagatg

SEQ ID NO: 176234 - DNA, 357 bp, Glycine max
  unsure (1)..(357): unsure at all n locations
agctnngaccaggaatatttgtatgggtngtangttgaatncaggtngnncctggggcggagatgatggtactgcgggtgaaccagaagcggaagtttcttttggtgaggaagcccatggaaaacagagcgtttggaatgatttcgtaaatctcagaaggctattgggaaatgctggtgaaaacacgaatgccaagcagatataaatttgaatgaagaatgtagaggggcgtgtgaggcaacggtcgaatttgctttgtggtgaacgtgctattaatgttaagtgattcgtttgggcacattcaaattgcagtagctgctataattccttagcaaacatatgcccaccttgccccta

SEQ ID NO: 176235 - DNA, 430 bp, Glycine max
  unsure (1)..(430): unsure at all n locations
agcttgatgattacatgctctccctntttattcaaanncttaattcttcttgacatcatcaaaatcttcatgatttacaccaacgccttaacgtttctctcctttcaaaaaacaagagatcgtcaatggtccaacgccttaatgtttctctcctttcaaaaacaaaagatcatttaatggtccaatgtcttaaacgacattngttcagtcaaaatatatcttgcaaaaaagataaaaacaacttaaccaacgttcagttctcgaagaactacgtaggtctgatttccttaccacaattgaggaatacgtaggagcaagggaaacacccttgtcgaccacanaaagataataaaaatataaaaggcacaaaaagacatanagacgtaaaagggaacatataacaaattgaagtcatgttcgcacatttgat

SEQ ID NO: 176236 - DNA, 371 bp, Glycine max
  unsure (1)..(371): unsure at all n locations
atagacgcttgcgtnnagaactngncgaatttacgatcgcaaaaaaacaagatagcttgcagattcaaacatgactttttgtattagtgtaaactcgccttaacccaccggtcatactcgctaccattgaatccaacaatcgacaacccgaaatgctcttgcgattagatacagttcaaaaataatggtggttaattntgatcgattcgaacagtttttgcctaataccgaccaaaccgatcaaatgctcagccctacttagaggcgtcactctgcactttgacaccaccttaggtatgatgtcagaacaggaggcacctatcaaagctactcctctagaagggcgtaacccaaactactttnttcatgat

SEQ ID NO: 176237 - DNA, 362 bp, Glycine max
  unsure (1)..(362): unsure at all n locations
agcngtgttctctaatccttgtctcaccatattactcttgacccagggtgagaatgccaatccttaccctcggaagcaaaaaagaatagaggggaaatttccaatcaaagaaaaagagaaggaaaatttccaatgaaagcaaacaagaaatgaaggaaaattccccaatcaaagagtgggagaaagcacaaaaaggaaaagaaggaacattccccaatcaaagagtgggagaaagcaaaaagaaaagaaaggaaaattcccaatcaaagaatgggagaaagtaaaaaaggaagaagaagaaggaaagaaagctcctgatcaaggatcgaaagaaaccagaagaaatgtgcagagaggtcttt

SEQ ID NO: 176238 - DNA, 405 bp, Glycine max
  unsure (1)..(405): unsure at all n locations
agctngagttatctactgctttatggntnattgactagnnctagngngcataggcgaaaccaagtttcgtaggtgtgaaagtaaccaacactgtctgattttggttgcccatcctgcaccgtaggattgagttatccgtaatccaacggacttagatatctntgtcctcataaaactcgttgtgctgccataaccgtatatgccttggtctgcttggagaagatgacatcatttagttatgcttcgctaatgtgtttcccttttttttctttttctttgaacactaataatacatttgctttttctttcacctatatccaaccaagcaattaatagttgtgattaaattaatatttacacaatggactccnctaaaatatatttacacgattgaatcaagaaata

SEQ ID NO: 176239 - DNA, 260 bp, Glycine max
aaaaatgctgctggttttgttgctatctgtttaactgcatgtcttttttctgtactgcaaaaaattacttgtgagggctctacttaataacttaacattttaataagaagagccctgctgatgctgacaagaatgaatcttcatcttgaactctatgcatagctagaaaatgcattacattccactattaatcttaccaacattgtataactatacatggatgaatcggttgagtcattctgaaaaggggctgaatcaac

SEQ ID NO: 176240 - DNA, 494 bp, Glycine max
  unsure (1)..(494): unsure at all n locations
ctcgagcacctgagctgcagctgatattactgctttgactttctttactttatttaatnntaccaaatataacctaaatataaaaatactatctaacggatacaactaaatatgaagcagctatcctagatgttggattactggcagaaaaaatttcattacataatgatttacagcatctcttttgctcatgtttacatgctttcaagttcattttgcttggttctttccagagatacattgatgtacattaccaaaatttaattcgactactttaccttcttggatatcaaatacaagtttagtttaacttatatacactctctcagtgtaaaacagttttacataaacatccaataataatttatcttatcatcatattatattaatgaataagataacttgataaaacgatcaaatcttataggatatctatgtaaaaatggtttacattgacagtgtatantaaataaactcataagagaaactttggt

SEQ ID NO: 176241 - DNA, 399 bp, Glycine max
  unsure (1)..(399): unsure at all n locations
cacaacaattctgcacatccacaaatcacgtataacccaccatcccttgttgcccacctccaaatgagctcacgtactcccacgtagcccttatcctcgttcctctcaacgtcgggtccccatcaatcctcccaagcttccacaacatccaggtaattccacatccaatcatcatggactaacaaaaccaagcaaaacagggcaaaggcagaaaactctgcccaaaacacaactcanaatcacaacttttcacatacaattaccccagtaacatttcctttgttccaactcgttaaccgttggatcgactcgaaaattntactggaagtctctagtacataagtctacattntgaaccgtgggatctgctagcaattgtccagaactccatattgacta

SEQ ID NO: 176242 - DNA, 450 bp, Glycine max
  unsure (1)..(450): unsure at all n locations
atctcagagtcacctgcaggctgcagctatggactgctgattgacaagtctattatttttcataggacctgtgagctngcaaggaagctaacaatggcactgcaggtgtacaagcacatggttcaccagaagtgcagtccaaacatatttacttatctgtccgagattagatgctgtgttcgtggaaatctctgggaagagttagaagaaatcctaaatgtgagtaaaaagcattttcaaatttctaagcaatatttgtctagtttgttatgagaattacagatgatagagtgatagttgctcagttgaaaatgtcttttcgaagagatcgtactttaaccagtcaatttatagatttgtttatgctagcactactttcacacaagacatatattttcatcaaaataattatgaatcttatcgccttaatttatgaattggaaatgatat

SEQ ID NO: 176243 - DNA, 141 bp, Glycine max
agacagcaaacgaaaaatccaacaacaaaaactgaagcacgccaggataagagacaaaggctgtaaagtgaaggggagactgcagacattgaggaaaaacatgaccgaagatgtcaccacaagacgcaatcgcccacaaag

SEQ ID NO: 176244 - DNA, 191 bp, Glycine max
aaaaatactaactaattatttaattgccttttaacatatcactcatttttatgttatatacattaaatattaatagattaagctggtcaagtcaacaagttaattcatcttatcctactttccacactcaccaatatggcgaattaagtgagtgaattagaacaagttaatgggttgaatcacctaaccta

SEQ ID NO: 176245 - DNA, 189 bp, Glycine max
  unsure (1)..(189): unsure at all n locations
tgcagatatcgctcaacaggtggggcctacagacaaccaagagaacaataaataaataaattgcaagatatggngaatgtgtaaaataactgtcatacctgacacaattccaacatagtaatatgtccattagatgccaagaacttctcaactgctagccaacgtgttctcacaaatgcaggacctaac

SEQ ID NO: 176246 - DNA, 336 bp, Glycine max
agctctcaccccattctggattagggccagttgaaaccacctgatcagcacatcatcatagaggatattagtaatttagtatattcactctttctggaaaagagtatacagcatgcaacatgtaataataaacaataaagctccataaaaaaaatcctcaatttttttatacattcagcagaaaacacaatgttctttgcctttatgatattcaacaagattcaaactctggcatgtacattttgaaactcaaggtcaagatacaacttgcaagtggcattagagaggattcccaagagtaagggaccagataaattgcaaaccaacaattaagac

SEQ ID NO: 176247 - DNA, 274 bp, Glycine max
  unsure (1)..(274): unsure at all n locations
agcttctagagaatggagcttgtatcaatgtgatggaccaatttggttggacatcgctgcacagggcctcgntcanagggagaatcgacactgtgaagcttcttgtagagaagggggcggaggtggatgcaaaggacgaagaagggtacacggcgttgcactgtgctgctgagtcggngcatgctgacgtgactgagtttttggtgaagagaggtgctgatgttgaaaccaggactaggaagggtgtgagtgccctgcaaatagctgattcgtt

SEQ ID NO: 176248 - DNA, 197 bp, Glycine max
ccacttaaaacattgtgcatggcagttgtgagtcttttcgcctaagcaagaatgtgcttagagagtttttttggtactggaaggaaagcttttgttgtttttcttacccataaggagtaccataaatcttgattttgttattgctgaagccattgaattagccgcttttgatttagagaacaaggtccggcaaccat

SEQ ID NO: 176249 - DNA, 369 bp, Glycine max
  unsure (1)..(369): unsure at all n locations
aataatcttatcctgcttgaatacaagtgttntgaactggtaccaaaaaaattgaaacacatttgtaatgtaaaaaaaattacatgttaatttaatcataaattattatctataataaaattattaaattttaaaataattattntaacaatcatacataagtaagttttaattggttaatagtataataataataataaatattgtaataaaccatacaataagagtggagtatataaatacaaatataagttgaatataaaagttgagatatgtaaaanaaaaaatctaaaattaagaataantgtccttttatcaccccttatnttttatttntttactgaatcctcaattaaatttcttttcatg

SEQ ID NO: 176250 - DNA, 273 bp, Glycine max
  unsure (1)..(273): unsure at all n locations
ttccatgacacaaatgcaaaaatgatgaattggaaactttatgcaaaactggtcatgcatgcacctatgtggacactcaagtgccaaatttttatggtcatgtgatgctagggctcaggattcattccctctattttagtcaacccaatgtttccaaaatatgttcttttatccatttgtgcattcatccgagtccattttgggcgtctggngaaatttcacagncgtcacccttcgggtgtacacacattttttccaaaaccagctatgatc

SEQ ID NO: 176251 - DNA, 334 bp, Glycine max
tgttgcaggtcatgccattggggcaaatcctgcaattactagaatgtttccaaatatgtttccactggttataagtcaagtatatttttgtttctttttgccaactctggttatgcaatgcgatgttttttcatttatttcacacattcttgtttctttcttaagttgcagctttctatgtactcctgatatggttatatactgtatttacatcgcttcgacagtgattgtctttatatatccgcttattcctgttatataaatttcttacgtattgcaacactcaatcattattagtttccttttcccccattttttattttttataacgccc

SEQ ID NO: 176252 - DNA, 408 bp, Glycine max
  unsure (1)..(408): unsure at all n locations
aaaaannatcatgatctctttcaatcaatctttcaatatctttcatctctttcaacagaactttctggtttcatttctcttcatctttctaaaagttttttatcaacactttctcttccaagaaaagttctttattcaaaaacttgtgctattcatctttttcattctcttctctcttttccaaaaagaattcaagaaggactaatcgcctaaattctttttgtgtctctcttctcccttttccaaaagaacaaaggactaaccgccagaattcttttgtgtctcccttttccctttccaagagaattcanaaggacatagnttgaaaattcttttgattcttccctttcccttaaacaaaagattntaaaggactaaccgcctgagatatcttttggttccccttac

SEQ ID NO: 176253 - DNA, 432 bp, Glycine max
  unsure (1)..(432): unsure at all n locations
aaanaactttagagctttgtatatgaccataatcaaattatttatattcattccaattgtggatatgtacactagaaatggaccgtgatctcaagtgggttttatcttcaatattttgaatttttgagttttttttttactgatggatttttgagtttgtatcctaaaattgtcaactctagttagagaagtttttttttttttaaactaataactatatttggaagattagagttaaattgagacattntttggttcgattaaaaaataaggacattatttatctattaaattaaaatagacaaattgtagtattagcgaatcatatacacttattacacaactttaaatataagtttttattaaacaaaaaaaaacactaatttcatttctttctctacatctcaatgcactctatttttctttctttct

SEQ ID NO: 176254 - DNA, 228 bp, Glycine max
  unsure (1)..(228): unsure at all n locations
cgcgactctttcttgctttaaacattgtgatcgataccatggatgagttggggaactcgtgctcactgcaaggatcttttgttggttctgttgcaaggatttggtttgtggaactcgtgctcgttgcaaggaattggtttgtggaactcgtgctcgttgcaaggatttggtttgtggaagtcgtggtcactgctaggtctgtttggggtgctcattnttgtagtccgt

SEQ ID NO: 176255 - DNA, 466 bp, Glycine max
  unsure (1)..(466): unsure at all n locations
agctnctagctctataanattttattctattttactnnccnnnctccnccgcccccatgggctcttcactttccttcctccctccccatgttnagnctttctttcttttctgattacgcactcactcacatgcatgtgtaacaactaanataattaatataacctatttaaaaccattactaaagctttttttcataatagcgtttttagcacttttattaagacaaccctaacactacaatctatatcccgtgcatgtcatcccatatgtggctagaggtttgtattggtgttgtggcaaggctgcttacgcactagtgttcctgatgaaacactacaatttctacagttgccactttagaattttggaaatcaactaatggtgtagcactctaaatangtgaatattatttcatgctngggtgatggagatgaactcctggcatgtaccttgtaaaatattttc

SEQ ID NO: 176256 - DNA, 299 bp, Glycine max
  unsure (1)..(299): unsure at all n locations
cagatcttatgcaagaaagtaagggcatatagggctacaaacatcttgaaattaatacatacggacatttgtgggccatttcatacaccttcatggaatggtcaacaatactttatatcattcatagacaattactccagatatgcatacttgtttcttatacatgaaaagtcacaatctctggatgtgttcaaaacatttaaagttgaagttgaaaatcaactcaacanaagaataaagtgtgtcagatctgaccgtggcggtgaacactatggcaaatatgatgtgtcatgtgaaca

SEQ ID NO: 176257 - DNA, 220 bp, Glycine max
cctgagttgtaccgttggaaaaggagggctaaaggaaggggttattgactcgttacatcaagaggcaacaatgtggatggaccgatttgctcttactttgaacgggagtcaagaacttccctgattgctggtcaaggccaaagcaatggcggatgcctactccgccctcgatgagatctacggacttctcagctattgtcagcatatgatagacttaatg

SEQ ID NO: 176258 - DNA, 456 bp, Glycine max
  unsure (1)..(456): unsure at all n locations
agctctattgttcgactcttatgacacatttccttaggctnccttccttggngagtaatggttgcaagggcatgccgacatggcattcctacattaaaagttgaaaatcagcacacatgtaggttaggaatgaaaaaaaaaactacaaagaacacaaccttgtagtttccatactccacaagtgcatgtccattcaacaaaattgacctcaaccttattcccccacatgtggacctcatatctcaggcccatgttatcaccacaccaaatgggagtccattgattagcaaaatgaatttcttttttctagtcttttatattggacatnaatggccaggctttccagaaagttaaccttgcgggcagccatggntctcatgatataacttctaatttcttcaagcattgngataataggcttgcatctatactgcagaagaattctggaattgaata

SEQ ID NO: 176259 - DNA, 211 bp, Glycine max
  unsure (1)..(211): unsure at all n locations
agagaaggaaaatttccaatcaaagagaaagcgaaaagaacagaaagaaatattcccaatcaaagaatgagagaaagaaaaaaagagaagtaaaaaagaagaaagctcctggtcaaaaaaaccagaagaaatgtgccgagaggtccttggaccagacgatatctgaacaatacagaatngtcaccaaatgaacaatagaaagaaaaggaaa

SEQ ID NO: 176260 - DNA, 390 bp, Glycine max
  unsure (1)..(390): unsure at all n locations
atcctgtctgggtatatatatgggatctgtcaggcgaaaataaataaatgtctcaattatagaaagtgactttattctgcgagtataaatgtataatcaccttgtaaggctatgtttggtgactttgatctattattattgctgagagtataatcaccttgtaaaaatgataggtcttaaccgaaaacttgctactacaagttcccttaactcgctgctttccctccattccagtatctaaaataaattagaggaaaatacaagagaaataagatttttatatttaaaacataatataaattaccataataacacgcacacatanattagtttgagntggatttganantcatattaaattcaaatagtgaagtaaaaattcagttttca

SEQ ID NO: 176261 - DNA, 316 bp, Glycine max
  unsure (1)..(316): unsure at all n locations
tacctatnncggccttcgcctattaattccctcccccctccctgttttttctttcatttcatctttcacaaaaaaaaatgctgagatgcagaatttacttctgaaacccttttgctaagcaactttagcatgttatccatctgaaaattgaaaattacaagtattattccccagcttgtggttgacatgatcatgtcttgtggcttcattatagggagcgcccaaagtaccaaataaaggaagatgaggagacacccagtaatggtccatgtgggatggcggaggcatcaggtactgtatagggtggcatgagatt

SEQ ID NO: 176262 - DNA, 403 bp, Glycine max
  unsure (1)..(403): unsure at all n locations
tatgaccataatcaaattatttatattcattccaattgtggttagttacacttgaaatggaccgcgatctcaagtgggttttatcttcaatattttgaatttttgagttttttttttactgatggatttttgagtttgtatcctaaaattgtcaactctagttagagaagtttttttttttttaaactaataactatatttggaagattagagttaaattgagacattgtttggttcgattaaaaaataaggacattatttatctattaaattaaaatagacaaatcgtagtattagcgaatcatatacacttattacacaactttaaatataagttttttattaaacaaaanaaaaacactaaattntcatttcttttctcttacatctcaatggcactcta

SEQ ID NO: 176263 - DNA, 287 bp, Glycine max
tctcttggcatggacaattgacattggggtattatgcaattgtatgaaccaacaactatagttggcaatcgtgttccataccaagtttggagaaatgtgcttaatccaaaaacaaacaacaatatatgtatcaccttggccttctcagcctacattgaattaatgattttcagtttactcacaacatttaaaaatttgaaaaagaaaataaatggaagataaaagctgcttagatggcgtctacccatttcaggaacaatcatagttggaatcagaacgatcatgac

SEQ ID NO: 176264 - DNA, 440 bp, Glycine max
  unsure (1)..(440): unsure at all n locations
agctgggaataaagctngagttatggagcctaatgtggcagttgtaaggacccgcctcatcgctacgatatcactactctaaaccacataaatttcaatttttaaataaaaactccgttaatttgcttatgaaaaacgtgagtaaattttttgcgatttacattngccaaacaacacacanatacttaaatgaatatatgtatagatttattaactcagtacacatcattcacatgatgaaagggtaaattgttcatacatataattaaatctataatttacatcctcaattcaaaaagaattatagaaccaactacaaaggagtgggttaacaaaacacaaatctcttccataataatcccaacgtcatcacgtcggcttggcggctccaacaaaagaacctcactccacataatttactgttgcatctactccataaa

SEQ ID NO: 176265 - DNA, 386 bp, Glycine max
  unsure (1)..(386): unsure at all n locations
tgaggcatgcagactgatgcaaacttccgcgacacgggacttttcttttctttatcaaagcggttcatagctaagggggctaatgtactggccaggacccaccaatcctacccacaaatcatcccttacccactcatagccagcgacggtaggggtggacgacggtgacccaacactcatgctaggtcgaacggagggagacgacctcacgtctccacctccaccaacctacacccctgaaagcagaaggatggagggtcacagtaatggagactggctccctggaagtagcaacaagtcatgcccttccgtgaaggcgagaagtgcctctactanttttgtgtgaagtcttcagcttgaagaggactccccatgagaagcacctc

SEQ ID NO: 176266 - DNA, 100 bp, Glycine max
ttatattgaatctgataagactcacattgcacttaaattgtcattatatatttacttcaactctcttgtataaaaactttggctttgaagcacacaagta

SEQ ID NO: 176267 - DNA, 341 bp, Glycine max
  unsure (1)..(341): unsure at all n locations
agccctgtttgtatcttttatggagaatgttggaggaaagaaaggcaacgngagggagaggggaaaaggcttctgaaaagtgtgaggctgagtgaagagagagagagttgctttttaattttaaaaaggctttttcctcatttcttattattttattataaactatgccacatgtctccatgtgagtggagcaagaagggcccacttcctcttttgattgtgacccatactcagccacaaaaagtgagaaaaatctgacctttgaaacgctaaaatcccacctcggtttgcgtgccgcttctctggttccagttcctcgcgtttctctgcgtccgtcgggg

SEQ ID NO: 176268 - DNA, 317 bp, Glycine max
  unsure (1)..(317): unsure at all n locations
tagatcgggtcatgaataccttttttctaatcaaaagtatatgaaataccgtttattctacagcgtggcatctaataaactaataatcaatcaagactttctttntttaatacgtgttcttcttttttcattttttggtaaaccgacagaaaaattaatatatttctaagtaaaaaatttcaaaatatcgaaagaacgatgtttcttanagcttcttttctttcgaagactacttgatactaatgaacggcagatnttaagtctaaataaacttgtgtcgacaacatgtcagacatacctgccgatttgaaatatca

SEQ ID NO: 176269 - DNA, 384 bp, Glycine max
  unsure (1)..(384): unsure at all n locations
aatggccatgctttgaataatagggtgaacccaacccatgctttacaaaagggtcattcagtaaagtgaaatatggaagaaccctctttgcaaaatggggcaaaagatgaatcgagtcacatcaatgcttcgtctacttccaaacatatttaggattattgatgtccttgttacttccagtttcaccttgacaaagatgtcatggaccatgttgaaaatctaaattgattcaaccccatatcctgcgtaaatattcgcaatacttcgactggacatcattcgcatgcatccatgcttttcattggntgcattgctcattgcattctttcctttgaaaataaaatanaatgaacttaatcattggtatanaaaaggaaagggaca

SEQ ID NO: 176270 - DNA, 65 bp, Glycine max
gcagcctatggcacccacccagagggaagctccccaagttccaactccgaacacaattcgcccgg

SEQ ID NO: 176271 - DNA, 419 bp, Glycine max
  unsure (1)..(419): unsure at all n locations
acctgcaggctgcaagcntgaggcgttgcaatacgctattcctgttganaattcttcaanncgngttngagaatcgattttcaaggtggacaaccctcgagtgtttgttgtcttggaaaatagccgcaactcttttccaacgttgctcgacttattcatttatcacaagtagtggattgagaatgtcttgtgatatggtggcatacatccattgtaacatggccacatcaagacgatgccaaagatcaggatcgactgcttttgaatcatctattgccttcttagccttctcatccgtaggagggatgccgtgatcaagcctgttatggactcgtgcttgaactttgannaagggttgccaagaaatgtattagcttgaatcattgtttaacatgactcgtaggagggaattcatgttg

SEQ ID NO: 176272 - DNA, 389 bp, Glycine max
  unsure (1)..(389): unsure at all n locations
gctcggctaaacgagagttttctttcttttatcagcaaatctcgctaagaagccctactcgcgcgctaagccaagctntgtgtgttaaaacaatgatttttaatttcaaacattggctaagcgtgcagatccgctaagagagcctctttgagaaaccaaacatctcttaggctcgcttagcgaggcaatccgctaagcgagagggtcagaaattgcttaagtgagtgtaacatcagttatactcacattggcccaaatttgctgaaccttacctgcattntctctcacaaccaatttcgtgcattcgtgttttctactgcattntcatgcatcttctgctactaacagcaatccaangaagntcctcattccttttatttctcttttac

SEQ ID NO: 176273 - DNA, 181 bp, Glycine max
ttcactccattgaagtgacatgtatgcaagagcatgccacatctctagtacatgccactccacgagtgacacgtatgcaagagcacaccacaacatctctagtatgtgccactccatgaagtgacacatatgcaagagctcaacaccatgtcttcagtacgtgccacttcatgggtgacat

SEQ ID NO: 176274 - DNA, 354 bp, Glycine max
  unsure (1)..(354): unsure at all n locations
ctgcagctgagttgaggaangtttttggtgatacttcctgctnttattcgnagaccacagagtggtacctggagatatgccgctggngtcaggagaaccttgggacgtcaggtggtgtgctattgcccaaaaccaagcttgaccaatcccgacccaacccgggcatagtcagtcagtgagaacctgtgatgtacctaagcaggcgagctcctgacagtcaacagataaaaggaactaagaccacaaagcaaggaggcttgtgtggtggctggctagctgtgaactntgtgtgatatatgggttttttgcctctggtaatcgattaccaagggtgggtaatcgattacaaggctt

SEQ ID NO: 176275 - DNA, 224 bp, Glycine max
  unsure (1)..(224): unsure at all n locations
agctttgagtgtgcattaatttgaactgngtaatanngaaataactggtgactatttcacattctttacactgcattctaagcacccacgggtttgagtaaaaaaggggccctatacccgggttcatgggaatttaaggagtgaaggtgaatctatcatcatgctaggtctccggcttgcttgataatagagaaacctcggctagagctttctctatttataat

SEQ ID NO: 176276 - DNA, 425 bp, Glycine max
  unsure (1)..(425): unsure at all n locations
agctatgtgtattggttcttgcagggatatgatcgaagngggtctaaaaagaggcaaatctgataatcatgctttgataaaaaaaactggngcttatgatgagggtgagagtgaaggagaaacccatgctgcgactaccattcctatacagccaagtttcccaccaacccaacaatgtcattactcagccaataacaacccttctccttacccaccacccaattatccacaaaggccatccctaaatcaaccacaaagcctgtctactacacaaccaatgctaaacaccacctttagcacgaaccaaaacaccaacaaagaaaggaattttgcagcgaanaagcctatagaattcgccctaattccggtgtcctatgatgacttgcttccatatccactcaataattcaatggtagccataaccc

SEQ ID NO: 176277 - DNA, 357 bp, Glycine max
  unsure (1)..(357): unsure at all n locations
agctagtgtgctttggatcttctcancattggagnccttngcttccttaaatntaacggcagcggaatgaagaaggaataaagatgattggagatgccacttcaaggtgaatatgaattaagaagaagttcaccaccataggaagccatggataagagcttgaaggtagaagaagaagaatagagggagaaagagagaggaatcaccaaatttgtgcctcaaaagaggtatgaactttaagtgtaatcctccactgatcaaagttgaaaaaatgtatacacatggcctctatttatagcctaagtgtcacacaaaattggaaggataattaaatttctattcacatttcacttgaat

SEQ ID NO: 176278 - DNA, 243 bp, Glycine max
taaacttttcttgatttgattgcaagttcggccttgaatgaatacttctaaaaaagggtacctttcaactttttgaacgcttcttcttcttcttcttcttcttcgacatgtatgtaatgtatctctgccctttatcaacaggtactgcctcgtgtcattggatgtgtgaatttctgaactcatctcacagaggtcatgcattattctgctgcctcattgtgcatacaatacctgctgcaggtt

SEQ ID NO: 176279 - DNA, 253 bp, Glycine max
atgagtaatcacgcgaagattctcgaccgttcttcaagattcatcgttcattcttcgttttcttcagtcttcaacgggtaagcacctcaaaccaagcttttcaattcattctatgtacccgtggaggccacactttgatccatagatttcttatctcgattcatttactcttttacctcatgtggccggctcaagccctttatttagcattttcgctaacctaaaatacaaaattatccccgatcgctgattg

SEQ ID NO: 176280 - DNA, 263 bp, Glycine max
  unsure (1)..(263): unsure at all n locations
agctttctctgtgaggtacntagggactagttatctgcctataattnggctttntgttgccaatagttgtgtatgtattggccaggttcagttcccatttcaacttacctaacttgaaacttttcgtttatattggccttattttgtgctacaattataggatacaactactgataaattaattggtacaaggaaaacttcaagtgtgcgcggattctaatagttcccattgcccctcactgtttcggttcgaggtaagtttg

SEQ ID NO: 176281 - DNA, 380 bp, Glycine max
  unsure (1)..(380): unsure at all n locations
agcttattgttcttcaggttattgctcagtttggttgtngcaacctgtccaaagaatcgggaatatggcttgcaagttgattgctctctagattcaatgaaacaagagaagagaggttagagaagctagcaggaaggctgccattgatgacattgtttgatagatcaagaatttgaagcctggaaagtgcacctagctcacttggaatagcccctacaattttgttatgactcaaggaaacattttcaagataagctagcttccctagagaaactgngatagttccagaaaaaagattgtgatcaagggtcaaaacttgaagctgagaggctntcttctttccagttccaccccaagaatctgggatagaaccggagaga

SEQ ID NO: 176282 - DNA, 279 bp, Glycine max
  unsure (1)..(279): unsure at all n locations
agctggnggagtctgaaaatttgtggnnnctantttaaaggttattaaaaaggaagggggagattaggttattaattggggtgcgaaggggaggcttattaggttngaatgggcaattcaggacctgatgcattggcaattcaggaacgttggattgtaaactaatcgacggtctatgttcgcgatccgtggactgatgaatgggcaattcaggaacgtcaataagaaagttttaacggtcaggtattgtttcctgagccagttacggatttggacttt

SEQ ID NO: 176283 - DNA, 408 bp, Glycine max
  unsure (1)..(408): unsure at all n locations
aaaaaaggggaaaaaatgggccaataaatatattcccaaacctctttgaaaaattataatcaacatagtatattgatgttctattgtatgttaaaactatactcaaaattatatatganagtaaatatatactttttcccattcctactattttaagaaaaatgtatttatcttttaatgttaaaatacaaacaaatgaatcctaattaaaataaaaatattctaaatcaccaaaacctactgatccatgctaaattacctatcaatattcccttattgattcatggcctaaatccattatctaaaactgtattcagntntttccttcttttcaatgttgggttacacattngtatgatgagaaactataacaccctataaaagttggcctggactaaaataagtcta

SEQ ID NO: 176284 - DNA, 367 bp, Glycine max
acccagctggccttgaatcacaaatctgtacctgtcgccagggtttgtggttgtgctcctctgctgaccaccatacagacctttgcccttccatgcagcaacctggagcaattgagcagcctaaagcttatgcagcaaatatatacaataaacctcctcaacctcagcagcaaaatcaaccacagcagagcaattatgacctttccagcaacagatacaaccctggatggaggaatcaccctaacctcagatggtccagccctcagcaacaacaacagcagcctgctcctttcttccaaaatgctgttggcccaagcagaccatacattcctccaccaatccaacaatagcaacaaccccagaaaca

SEQ ID NO: 176285 - DNA, 431 bp, Glycine max
  unsure (1)..(431): unsure at all n locations
gacacataaaactaagcttgctagcgttatgcgagacggagacaacatgctagcttcatcgccaagnaccaagaagagttaggtctagccgcggcccacgagcataggattgcggacgaatatgcccaagtatacgcggaaaaagaggctagaggaagggtgatcgactctttacaccaagaggcaaccatgtggatggatcggtttgctcttaccttgaacgggagttaagaactttcccgattggtagccaatgccaatgcgactgcagacacctactcctcccccgaagagattcatgggctcctcggctattggcagcatctgatacacttaatggcccacataattagaaatcgctatgaaacttgtatggtccctcataccttgactagatacgacttcctttttgacataaatgagttggtcca

SEQ ID NO: 176286 - DNA, 148 bp, Glycine max
atggctcacattctgacaacggtgaacttatcactctcaaactatcatgactctgacaggaaaaataaagatcttcaatctcacaatgtcaagagactgttattttcagaacaaatacctatctcttgaacatatcctataattcaaa

SEQ ID NO: 176287 - DNA, 379 bp, Glycine max
  unsure (1)..(379): unsure at all n locations
gtctaattagaggcagatctgatcatcatgctttgataaatgcaaaaaacaaaaaaaaaactagggcaaatgaagagggtgagaatgagggagaagcccatgctgtgactgccattcctatacagccaagtntcccaccaacccaacaatgtcattactcagccaataacaaaccttctccttacccaccgcccaattatccacaaaggcaatccctaaatcaaccacaaagtctatctaccgcacttccaatgacgaacaccacctttagcacaaaccaagaacaccaaccaagaaatgaattttgcagtgagaaagcctgtagaaattcacccaattccagtgtcctatgctgacttgctcccatatctacttgata

SEQ ID NO: 176288 - DNA, 442 bp, Glycine max
  unsure (1)..(442): unsure at all n locations
catgaaccatcaaagaacgtcctaccacactagatagcttagaaatttcccatgggaaaactctgtcttatgtgactgcgtgtgcttgttaaattgcttgnggttctatgttaggcccattgtcaccttaggaaaatggacttatcgactgtcttgaactacaagtagaacagctaactcagactcagggggcacttctgacttgttagctgcaggtacgaacgtacagagtttgtaggtcccatccagtctacaaaaaaagaactcaaactactagacagactaagagggaatagacgggaagcaagcatggaagcactctagctaaagcaaatgcaccttacaacacttcgaaagcgaactaatgcaaggtaaggtacctcactacaggggctagggaaactattctatacacggaagaagataacctcgatcgaacctt

SEQ ID NO: 176289 - DNA, 323 bp, Glycine max
  unsure (1)..(323): unsure at all n locations
ccagccccctccccncccaaagacactaccttgactcaacccaanncacgccccgncgcacaaagagcgagattttttagcaaccaccgctgatataactgactgccagggttgggtcggctcctcaacaccaaaaccttcccttatgcgcaccgagcataacacccaactatgtgcaatatacataacctccacccagcagcaaacaccacccaacatatgacttcacacaatacaccggaggagatactaacctaaggccccctaaacacaaagagctgtcttcttcaaatgtgctgccaagaacatctctccccatacac

SEQ ID NO: 176290 - DNA, 443 bp, Glycine max
  unsure (1)..(443): unsure at all n locations
caagacaacgcttatcttaacgcataaaatgtcatgctcatctctctgatattagaacgaactgacccctcacccacaaacagctgaaacacgtatgtgtggaatatcctactacttatatcaccatagaggccatccaacacattccaatcgtcatacatatatgcatctgaaaagaacatacattcctacgcccaatgcattgcgtcaaaactcacacttaatctatatcctaaacattggctatttacaaactacctacatatgtctgaaacatatatcatacaaactctatctgttcactcacatctattcatattggcaagctatctacattatgcacacacttgcattcaacacggaatctcatgctatcataccttcatttangaagacaatcatctacactctggttaggaatctcttgctctctatatctcaca

SEQ ID NO: 176291 - DNA, 304 bp, Glycine max
ccaacaagagggatctgaggaccaaacttggatagatacaatccaactacggaccgacggctactaatttacgctacaacatacaacacaaatgcatgatgcgacacaaaaacatctctatgtacatcagctactctgtgacacaaacccaacactactacctactgctgccaaccttactcattcgcatttccactgacttcagcctacacctagcctaacattgtcctaaatcatccactatcaacgcgtctttcaacaatgccttacttctgaagtcaactctcgctaacactacgcccct

SEQ ID NO: 176292 - DNA, 434 bp, Glycine max
  unsure (1)..(434): unsure at all n locations
acaactagacattctcttacagatttatgcaataatatggcttttcgatctatgattgaacctaaaaatataaaagaagccataatagatgataactggatcattggcatgcaagaagaactgaatcaattcgatagaaacaatgtgtggaaattagtagaaaaacctgaaaattatcctgtcataggaacacaatgggttcttagagataaattagatgaacatggtattaatattagaaataaacccacgtttgtagcaaagaagaaggaatagactatgaagaaacatatgctcctgttgcaagattagaagccattagaatgctnttggcatatgcatccataatggatcttaaactatatcaaatggatgctaacaagtccttttctaaatggcttaattcaagaagaggtatatgttgaacaacccct

SEQ ID NO: 176293 - DNA, 353 bp, Glycine max
  unsure (1)..(353): unsure at all n locations
aaaaatctgcacctgtcaccagactctgcggtttatgctcctctgccgaccaccacacatacctctgtccttttgtgcaacaatctgaagcaattgaacagtctgaatcttatgctgtaaacatctacaacagacctcctcaacctcagcagcaaaatcagccaccacagaataattatgacctcttcagcaatatgtacaatcctgtgtggaggaatcatcccaaccttagatggtcgaatccttcacaacagcagcagcaacaataacaaccctattttcaaaatgtngttggcccaagcagacattacgttcctccactaatccagcaacaacaacagcaacaggcccag

SEQ ID NO: 176294 - DNA, 398 bp, Glycine max
caatggagatggaacacacattattggacacgcctcttcaaggagaagatgactccacaagaaacctcccaccctaggaagccatggataatagcttgaaggtaggacaagatgaggcgagggagaaagagagaataagcacacaactttgtgcctcaaatgaggcctaaactttgaagtgtaattctcaaatgatcaaagctcataaaatgcacacacatggtctctatttatagcctaagcgtcacacaaaattggagggaaatttgaattctaatttcacttgaatttgagattgaatttgtgaagcccaatcttggagccaaatctcactaattatgattagtgaatcttagctatggttcacccactattccaagatcaggtccaagattact

SEQ ID NO: 176295 - DNA, 382 bp, Glycine max
gcccacagggggctggctgctatatgtaccctagtttactaaatgctcccccctctctattaatttgtgatactcgttgcgcaacgccactaacctttacgaatttcgtagcgatacttatgtttcttccgcaaggttaccaatccttacggataatgtatttactcctttctaccttaccaagaagttacggcaactcacggattgcgcacaaacaccatttttcgatttccgcctcattatggaattgcacgatacacgcacgcctgcttccttttcattcctgagatctcttgggactgcatatattgcatgtcatcacagaataatccctgcaccaaacttaggcatgacagtcgtccctctttcttacctctcatcg

SEQ ID NO: 176296 - DNA, 276 bp, Glycine max
ctaactgtactggaggcggttgcgtggctttatcctctatggttttctggaggtttaacatgacctccgagatggaagccatttgatcttttaaagccgatagatcggccttcatctgttcctgcacgccctcttcattatccatttttctggatcgagtgttataggggtgccttggtgttttcttagttatgatgaaattcctaaagaaataaacaatggtgagtatgccacccaaaaatgagtatgcacatggatgatcggaccacttggatc

SEQ ID NO: 176297 - DNA, 370 bp, Glycine max
ggaaatgaattggttacttgaaattcaaaaatattattgaaccaaggtggagatagttgattgttggatgatggatgatagacataaggtagacaatcgtggtcatcccggctaatacttttgtcttctgtattggttgtccaatcttctataatctaatggagcatccagtcacatagaagggagtgtccaatcacatagaaggaagcgttcagtctgatggttcattaacataggatgtgtctgaattggaactattttttgtttttctattataaccattttctgttagatagttagttattgtctcctttataaggagctctgtattctgggttcagagatcttgagagtgctttgaaccctttta

SEQ ID NO: 176298 - DNA, 339 bp, Glycine max
accagagcacacgagtactaacccgtagggagcacgtaactccttcctaaaaaaaaaagggttagctcgcctgggcgagcactccctgcacgaattagctaaaaaaaggaggggggtgagtttcttcacccaaaatttctcccttttactcaagaacgccatcacccacgagattggccatccttcactcctaggtcaccattcttttgcatttccaaccccgatttgcattgatgatcactccccaacaagtaacgacctcattcttggtctctctagctttccattgatgcttttggggattcgagttacatgtcttggcaaaaaacaaacgcgagc

SEQ ID NO: 176299 - DNA, 290 bp, Glycine max
actagcttggatcaactagctctgaaccaagaagagcggtatatttttataaaacagaccaagattgatgaaactatcatcactgtcactcatagaagcaccttgctctaacgatgtacactgtgtacatctaaccaactctacaactaccaaaataacagttcactactctacaccaactctggtaactattgatcttaccgccgatattactctaatatatagcgatgagactcctacaacaatcaaatcaactataggatttactcaattagcactatacaaatatc

SEQ ID NO: 176300 - DNA, 408 bp, Glycine max
ctatcgagatattatgcgcccgaatcggacatccgtgtgaaagagatatttccatttgtatcgctcgagagtttccgacgtctaatttcgagcgtctccatatatcataagcctgaagaggacctccgagtgaaaagatatgaccataggaatttctcgagagcttccggcgtgcaatatcgagcgtctctatatatgatgcgcctgaataggacatacgagcgaaaagatatgaccatttgaatttctcgagagcttccggcgttcaattatgagcgtctccatatatgatgcgcccgaatcggacatccgagtgaaaagttatgaccatatgaatttctcgagagcttccgacggtcaatatcgagcgtatcgatatattatacgcccgaatcggacatccgagtg

SEQ ID NO: 176301 - DNA, 374 bp, Glycine max
  unsure (1)..(374): unsure at all n locations
ncgagttctgctgcgttgggatagccaggcgtgaagtgagagtgtatatatattctccacgaagngaccccattcattcgntatgcaaaggcgcatcccaaatatacatgttactgtcttcgaaaaccaaagcatcaatattgcactttaaacggcctgtatgcggaggatgccatgattcaattcgttgctgatgctgaacaggtttacaagatggagatctgaccggtttccattccatcaagctttgcgatgccaaagaaacaaagatcattgctggtgtttcaaaattctcgcataatttctcagttctccactgccacattgcccatctctggtagtcatcatgacgcacagagcctatgatattaaag

SEQ ID NO: 176302 - DNA, 360 bp, Glycine max
gcataattctaggctgcaactctagctcttactattcacgtagcaataaaatgtgctttctgctccaatctgcactttcgttctctactgcttaatggaaggctaaatctccagcgtcgctctctcttgaggatcaagcacaactctctttgagttttattatctactactgaattctgatcagcttttgctctacaccaattactctgcatatcttcctataaatccatgcatgcctagtgcttgattacatgtctatgcgcttaagttacgtccatgcttaatgatcaattcattcatgataatcgacggtcgtgtgctaatcacataagacacctcatgtaaattcctaactattaa

SEQ ID NO: 176303 - DNA, 392 bp, Glycine max
cacgaatttcttgagcaagtgtgttgtgaaagatcctacgcagagatggactgctacaatgcttctcaaccatccttttctttatccaacatgttacatgcgtagttcatcttttttctcatatgatattgttagtcatgtgccctttaaggtataagatataccggctgatcgaatgttttgctttcgtattcagagtgtatgctctttttaagcaatctttctaccacagcaatgtagacaataactatattgctatatatgcagactgctatgtagcatatggagaattgagtctatttccagtatatcatcctcattcttattggagaacaattactgggccgagcatgatatgataaacaattaagaatacatgggctataattttg

SEQ ID NO: 176304 - DNA, 356 bp, Glycine max
  unsure (1)..(356): unsure at all n locations
tcaacggcaaaatccaccacagcagaacatatatgacctctccaccaacagatacaaccctggatggaggaatcaccctaacctcagatggtccagtccttagcaacaacaacagcagcctgctccttccttncaaaatgctgctggcccaagcagaccatacattcctccaccaattcaacaacagcaacaaccccagaaacaaccaatagttgaggcccctccacaaccttccctcgaagaacttgtgaggcaaatgactatgcagaacatgcagtttcagcaagagaacagagcctccattcagagcttaaccaatcagatgggacaattggctacccaattgaatcaacaac

SEQ ID NO: 176305 - DNA, 293 bp, Glycine max
  unsure (1)..(293): unsure at all n locations
cactggcngcatgttctcaattagctcacttgcttcttccagcgtcttcagatatatntttccccctgcagaagcatctaatagttgcttggttggtggtctcaacccatcttataacatattcaattggattggctcagataacccatgagttggagttcttttcaacaagcctctgaatctctccactgcgtgacttagagatgcatcatgaaactactgaaatgaagagattgcagcttttctcttctgcagtcctggactatgggaagctcatatttatgaacctttca

SEQ ID NO: 176306 - DNA, 434 bp, Glycine max
  unsure (1)..(434): unsure at all n locations
acttagaaactaagcttatagcgcggtcgggagacagaggtgatagcgtttttattgcgaagagatattccgagtcttggatttggacgaccatgccctcctgattccagctgggaaattggcgagtggaggaacgccccggcatttacgcaacaagcataatgtaaacctttacggttttaaaagctttatagtcgggcctaggctttagagtatttccttttgttaaggctttgtgtcttttgtttttgaatctataatacaaggatctttcttcatctgttcctggtctctacccattctcattcatttgcatgtttacttctttttctgaaacggtagatccgatgacgagttcctcgaaggtactaatacctgggacccgtctatcgacttcgagcaagaaatgaatcanaccgaagatgaatgaaatg

SEQ ID NO: 176307 - DNA, 450 bp, Glycine max
  unsure (1)..(450): unsure at all n locations
tggtaatcgattactatatatgtgtaatcgattacacagtgcaaattttgaattcaaattctaatagctgttgtaaatcagttttggccattggtaatcgattacatcctctggtaatcgattaccagagagtaaatctcttgaaaaagactttttttaacttaaatttcttggccaaaccttttgctacttcaattggaattcccttcctatttaatgtaatcttcctaagactctagatactgtcttgatcatccatcttgaatatctttgatttctttgtcttgaataaaactttgagaaacatgtaatccttnggcatcatcaaaacattaagctcgtcaccaacaaaagtctgaaaccatcgaactttgtcaaaagctttcgaagaagagaggaattatccttcaactgtacgcctgcctcatcatcagcgggttgagcaccctt

SEQ ID NO: 176308 - DNA, 390 bp, Glycine max
ccggagatatgtcgcaggggtcaggagaccttggggacttcaagtggggtgctattgcccaaaaccaagcttgaccaatgccgacccaacccgtgcatagtctgtcagtgagaacctgtgatgttcctaagcaggcgagctcctggctgtcaacagataaaaggaaaacaagaccacaaagcaaggaggcttgtggtggctggccagctgtgaatcttgtgtaatatgtggattgtggctcttggtaatctagtaccaaggttgggtaatcgattacaatgcttaaaatcgtatacaggaggctaagattgtctctggacatctataccaatgggtgcaatcattaccatgcttgaacgaagtcaggaactatggagtctttgtatctat

SEQ ID NO: 176309 - DNA, 298 bp, Glycine max
  unsure (1)..(298): unsure at all n locations
gctgatctgcanaagaacataaaccacagactcttgcaacaggtgctgatttctgattcatggtaagctgagttactaggctgaccaaggcatcaagatttccctcaagctctttaattttagcagatgaagatgaatctgtggccacctcatggaatcctctaaggacaatagcatcatttcttgcacttaattgttgggagttggaagccatcttctcaatcaaattcctaccctcagcaggagtcatatcaccaagggctccaccactggcagcatcaatcatactcctctccat

SEQ ID NO: 176310 - DNA, 319 bp, Glycine max
ccgaatccttcatcaattactttcctgaaccccttacccatatcatccttaataagccctttattactgcccacaccctcaaaatcaccctcacccacccctgtacctctgaagcgcctctcaccaatagaattagcttcccgccgagaccgctggttgtgtttcaactaccatgaaaatgtccatcatgcgcataaacggacctatagggttcttctgcttatcacagatgaagatgaccactctctcgaagacagcatggccttggatcactcacctgacccgcctgatgacccaaacccaactccaacccacatta

SEQ ID NO: 176311 - DNA, 122 bp, Glycine max
tgtcgcagggcagattatttccctgttacgatgcggagaaagcaacctcctaaccattcctttactgggcaaattcaaacaattcacctaaatgaaaaaaccttatcctcgggatctctccc

SEQ ID NO: 176312 - DNA, 262 bp, Glycine max
ttttgacaagcaagctacctcccttaaataatggatagctctacaatcataaattatttccacaacactcaatttactatgctggaatacaactacccaatcaaaactagctaggcctaaacaagctaaaatctatatttggaccctactactatggacctaatacagacaattatgactctattaattgacaaatattaccacttgcatgctataattactgagtagaacctaactttcaactctccatcttatgcctgta

SEQ ID NO: 176313 - DNA, 330 bp, Glycine max
  unsure (1)..(330): unsure at all n locations
tatatatataanacactctcacaatctcaaacttacaaaatcatattcatatgccgccgaggcatttcaccgaacacttggcgggcgcatgtttacacataaattgcaagaaaaccggggcaatcgggcatgccccattgcttcaaaatgtaacataggcctagggctatctcacacaaactctcaactcacaaaacaaacatggattcacatgtgaattgcttcacgaattctgcaaaagataagctactaaggcctcaaaccacactaatggacagctaaataaccaacggaaattgcactacttgtggggagcgaataaaggcgaaa

SEQ ID NO: 176314 - DNA, 332 bp, Glycine max
agcttctcgcccatcctaacgcagatgagcatccatgtggctcaattaaccgctgatgccatttatatcttcgcaacgatggcgcctaccacgcaccccttggatccagataaattcaacagggccgtgtgatttcccccactgatcacaggattctgccagtcgtccggacgtccccgcggcacccaccatggtgattcggccgcccatcacccgggcttttattgagaagtcctgacccagagacaggctcacggggatgctcccgatgccgcagacccgccaccacctccccaggatggcccggctggaccattcgaacggagcgatat

SEQ ID NO: 176315 - DNA, 227 bp, Glycine max
agaacaccctggctgcgacaaaggacacccacaacctccgtgcgtcgcccacgctggacagagagatactctcccttcctccaaccacaccctccgccttacaaaccacaattccagaaaacccacccctgcccagacaaatcacgcggccacaactcccacgctacgcactcaacacaagcgagcccggagcccaacacgacgtccaaaaggagagcgcacacccc

SEQ ID NO: 176316 - DNA, 379 bp, Glycine max
  unsure (1)..(379): unsure at all n locations
ggcccgaagacaaccttctttctccctttgatggcttgcttagcatagctttatttttccttcaatctgatctttgactctctcatgaagcttcttcacatagttcgcctttgcttgaccttctttatgcttaagaacagacacattaggcatacgcaaaagatcaagaggagttagtgggttaaaaccataaacaactctcaaaggagaacaattagtggtgctatgaacagctctattgtaagcaaatttaacatggggtaaacaagctctccaagtttctaagttcttcctcaaaactgtcctaagcaaagctcccacagtcctattaacaactctccgtcgcccatcggtttgtgggtgacacgtggntgaaaat

SEQ ID NO: 176317 - DNA, 412 bp, Glycine max
gtcgggcgatggtgcaaaacaattctccacatccacaaatcacgtataaacccaccatcccctgttgcccacctcaactgagctcacgtactcccacatagcccttattctcgttcctctcaacgccgggtccccatcaatcctcccaatcttccacaacatcaaagtaattcaaaatccaagaatcatgaactaacacagccaagaaaatagggcagaggcagaaaactctgcccaaaacacaaaccaacatcacaacttttcacactcaaatacccccagaatattctcttcgttccaattcgttaaccggtggatcgactcgaagatctactggacgtcttagcacataaatctaacatatgaccgctggatctgctaaaaacgtgcaaacctatctgactactctttc

SEQ ID NO: 176318 - DNA, 324 bp, Glycine max
  unsure (1)..(324): unsure at all n locations
ctgagaaaactggggcaaatgaagagggtgagaaagagggagaaacctatgctgtgaatgccattcctatacggccaagtttcccaccaacccaacaatgtcattactcagtcaataacaaacctcctccttacccaccacccagttattcacaaaggccatccctaaatcaaccacaaagcctgtctaccgcacttccaatgacgaagaccacctttagcacaaaccataaaaacaccaacaaaaaggaattttgcagcaaaaagccttgacggttcaccccanattcccgtgtcatatgctaaacttgatcccatatcactc

SEQ ID NO: 176319 - DNA, 411 bp, Glycine max
  unsure (1)..(411): unsure at all n locations
aaaaactaagctcacctcgttgagaagcttccttgagaagctagagcttagctacacacccctataatagctaagctcacccccatgacaaaaaaaacatgaaaatacaaaaaaaaaatcctactacaaagactactcaaaatgccctgaaatacaaggctaaaaccctatactactagaatggccaaaatgcaaggcccaaaagaagaaaacaacctattctactatttacaaagaagagtggacccaaccttggcccatgggctcaaaaatctaccctaaggttcatgagaaccctaaggccttctttatcaactctagcccacatctcttagagcctntacctcatggctctgggaactggtcctcttctagggaggattgcatcaccaaatgacctccatgatggag

SEQ ID NO: 176320 - DNA, 152 bp, Glycine max
gaggaaaatatgctctataacaatggatgcccaagctattccaaaaagtgcttggtgcgattaagtaaaaaatcaaattgaaagagataaaggaaaattgaatatgttgaaaaaaacataaatgtggtaaattgtgcaaaatattaattgaa

SEQ ID NO: 176321 - DNA, 234 bp, Glycine max
gcctttattttcatctcccactacaagtacgccctccggatcatcctctccttttcagggaggaatgttgacgttaataccatcaacttcgctctgtctacgaacaccattattccctcttctccccctttcttcgtcattatgacctctcatctccattcgacgcacactctcatgacgtgcattatctccttgtttcattaccctctccaaatgctgcatcacacttcgctt

SEQ ID NO: 176322 - DNA, 296 bp, Glycine max
  unsure (1)..(296): unsure at all n locations
gcctacaagaaagactngcctagggaggataatggaagtgccactttcaatgcgcctgatctatctcttttngatgcacacggaggagccttggatttgaggacaaatccttctcaagaaggacggagcgatgaggacataaccaacggcaaggaccatgaagcacttgaaggtcccatgaccagaggcagactcaaacaagccccacacgtcatagagacaaggctggtcatttgcatagctgccatcgatgatgattgaaggcccacaggcagaggcactaccaagactactaa

SEQ ID NO: 176323 - DNA, 243 bp, Glycine max
cacccgcaccgacgcaaccagaaaaaaagagaggcgcaacaagaaaacagcaaggccccaccaaaaaaaaagaaaggcaaaaaaacgacaagcaacggatcagatcaaaaaaaacaaccaggcggacagattggacaacgaacaacaccaaaatggacaaccccgcagaaccttctaaaaaaaaagatggagaaacccaggacagaaaagcaccagagagaaaaaacacaaaggcacgccaaa

SEQ ID NO: 176324 - DNA, 439 bp, Glycine max
  unsure (1)..(439): unsure at all n locations
aaaancttcatgatttacagtntgctcgtgtgttggtgtgtgttaaagctttgaatgaatctggtatttataggactagaatgaagctacgggtccttgtttgtacgggtttttatagccttttcacataattatcggctcgtaaatagtagctggtagcttatagataaagttaaagacaatgcattgcttatagataattgctagtagataatttaccacttacagataacaagtaacttgtagataatcgagtacctaccaagagataaagtggttacagtatatacaaataataagaggttagagacaactctgtagttatggagccccgctgctaagggccgaatgtccgtgcttactgtgcatggttgacattgacgttggacacgtatctcagaatgccacgtaggatgccacatgtatcttgttgacttta

SEQ ID NO: 176325 - DNA, 322 bp, Glycine max
agacacaactcaaagctcaactcctctcccttgttcttccttcaatatcgagctcccccctctctctttctctccctctttcttttcctccattgaagcatcttctccaagcttcttatccaaggctcatcttgggggtgaagctccttcttccatggcttattccttagtggatggcgcctcctctcacctcttctcctttgacttctgatgcatctccatggtggaaaatcaccattaaaggacctcattgaagctcaaagatccaacctccatagaagccccacaagcaagcctccatcagagaccctcgaaggcaata

SEQ ID NO: 176326 - DNA, 278 bp, Glycine max
tgctcggtgcggcaatctttaagtgccgacatgcttgacaccagtcataaacagcctacgcacccacacatacaagcgcaaatattgatcatgataattctgtaccaatataataagaatgtatgttatcacataatatgacatttcaatataaattatcgttaagatataaatcgatgaatataagtattgactctacaaacttaatattttgcttctatctagtttttggaaagaaacttgttactactattgaaatttgaactcgtttatcattt

SEQ ID NO: 176327 - DNA, 328 bp, Glycine max
cgacgtttaccttccggcgaacagtgaagacggaaaggcgttatgggtaagtcggacacaaacaatgctaaaataaggataaaggagttatatgggtgaaaaacactcaatcaatgaatggatatatataggtttattggagaacaggatgctgcctattaagagttatgaaccatatgcgcaaggcacaaacatgaaagcattggaatgtcccaatgaacaatcaataaactgtaataagctgctagcacgcgaaaaaaaaaaaagatcttgaagcctttgatgatagaaacataaaacaatctacccacaaaatccatatatcttc

SEQ ID NO: 176328 - DNA, 301 bp, Glycine max
  unsure (1)..(301): unsure at all n locations
caacaagtcctatagcaatgtcaacccacaaaactctctccattggacaaacgacaaacaacactctacttaatttggctggctaatgaagcaaacaacgcacatctaacacatgaaaagccattcttgttgaaaatgttctcggaccaatcaaggaagagttacgaggcggtcatataataatcactcataaacgagatacagaagaacatgaaggaaggaacaagtgaagaggcgggagatntatacacacgacagtgttagtcggtttttattactgcacgtttcgaatcttataaag

SEQ ID NO: 176329 - DNA, 337 bp, Glycine max
  unsure (1)..(337): unsure at all n locations
aaccaatcatctttgaatcatctatcttttacatcatcttctttcaacatccttgaatcaatctttaaatcttctctcaacagcattcaatatctttcaactctttctacagaattttcttattctttgtctcttcatctttctaaaagttttttatcaacactttctctttaaagaanagttctttgttcaaaaacgaaggactaaccgcctgaattcttttgtgaacagaacgaaaagacaacnnttctcttcatccttctaaaaggtttttatcaacactctttctttaaagaaangttctctcaacagctattcatctttctcattctcttct

SEQ ID NO: 176330 - DNA, 311 bp, Glycine max
agtactaatgtcgcaacctacccttcggcgggatggcgacgcggggctcacgggtgcatcttgtggcgtccctaaataatgactgggttaatagtaaaaaactaaacacgcggaaaccatggaaattttttttttctctttctctctttcttttctctcattgatattcatctcacgggaattaaattcagaaggaaaattatcactatagagctctgaatggccaattcttaactctattcggattcatttttttctgatcactcataacctctaaactatattgctctttcataaatataccacccctc

SEQ ID NO: 176331 - DNA, 139 bp, Glycine max
aatagtgtttatttacattttttgggtaattttatattttgcctttttttcacagagtgtattgttgacatgaacttttcttcatagcacatactgctttgttggaaccacttacgaaaaggtgtaataattttgagaa

SEQ ID NO: 176332 - DNA, 214 bp, Glycine max
ctttcgagcattcccactacgcaggatgacttatcattgtatcaactcaacacttttaattgagcgaatgctccacacataaggacataattaagctcctaatctattgctgcaagaagaagaaaagggatcactacattaataaactctctcaagcttccgtcgtggataatactaattaaaattaacgagcatggttcattagtcatacact

SEQ ID NO: 176333 - DNA, 236 bp, Glycine max
aaccatgccttaggcaccatgttcaaccatctcgcctacaagcgaaacggggtcacgaccccaacatggtaggctcatggtgcctaacacatgcaactaagaacgagggcgaagaccaccgctcccctcttcgcccttggagaggaaaacacaaggatgagcaaacacgaaaacaaacggcatgcaactctgcagatcaaaaagtctgttgacgcatatgcctgacgacgccatga

SEQ ID NO: 176334 - DNA, 320 bp, Glycine max
cccccaaaaagaggaccaaaccgccacaacagacaaacgaccgggaaaaaacacacacaaacaccccccccacgaaacaggcccactacaaaaaaacacaaacaacccacaccaaccaaaactccccaaccaacgactcaccaaccaaacccaaacaacccaacacaaaaaaacagcccgcgacaccaaaagaccgaaaacacaaaaacatcacggagaaggcaacccacaagcatgagacaagcgaccacaaaacacgcgacaaacgaccccagaacccgcgacaactgacccccaacacccaacaaaacgggcgacac

SEQ ID NO: 176335 - DNA, 299 bp, Glycine max
tttgccttcgcaggaaatgccccgaggaagcttgcctcaaagaggtccaggaaggacaaggcagcagaaggaactagttccgctccggagtatgatagtcaccgctttaggagcgcggtacaccagcagcgcttcaaagccatcaaggggtggtcgtttctccgggagcgacgcgtccagctcagggacgacgagtatactgatttccaggaggaaatagggcgccggcggtgggcaccactggttactctcatggccaagtttgatccagaaatagtccttgaagtttatgccaatgc

SEQ ID NO: 176336 - DNA, 419 bp, Glycine max
  unsure (1)..(419): unsure at all n locations
agagacgtgtgtagctaaactctagcttctcaaggaagttttctcaaagaagcttctcaaggaagctttctcaagaaagcttctcaaggaagctacctagtctataaatagaagcatgtgtaacacttgttgtaactctgatgaatgagagtcttgtgagacacgactcaaagttgaacctctctccctcttttattccttcaatttcgtgctcccccctctctctttctctccctctttcttttcctgcattgaagcatccttccaagcttcttatccaaggctcatcttggtggtgaagctccttcttccatggcttactccctagtggatggngcctcctctcacctcttctgctttgtcttccgctgcatctccatgatggaaaatcaccattaaaggacttcattgaagctcaa

SEQ ID NO: 176337 - DNA, 276 bp, Glycine max
gaaaccccccacacgaccccgcgggggggtttattttacaatttcggagtccacctacaaagactggccactgtgaaccgagacagctctggaaccaccaatcaggtcccttttttcttaattggccccctccctattacctcttttcctctgaacatctccagtctaccagtatggggggacccttcaggtacctaggaggactcttactcttccttgctcgtgattcagggaaaccctaaggacctgactaaatagctctaacccaacagtcat

SEQ ID NO: 176338 - DNA, 395 bp, Glycine max
  unsure (1)..(395): unsure at all n locations
cattatngncacaacatacttaaaaccaaaacttaatccgcagatccctcttataaaactaagtttcaattccgcttcattcaagttctaaggcaacaatacatttgccaatgctaaagtcacctaactaggcacacaaacggttgatcagaccaagagcatacagatattatacactgatagaagcattgaacacaagatacccaatcaattagatattacaacaattacattagttgttctgtataaatccccaacaagagtgtttagccatccattacaatagacaccctatcaataatgagattacaaaacctaggtatctctgcaaaagttgctcctcttgctgcttcagagctcttatctcgaatatgcactgtggtgtgctctggaat

SEQ ID NO: 176339 - DNA, 313 bp, Glycine max
  unsure (1)..(313): unsure at all n locations
aagaagatgaaggctagcattcaagattaggaaattagagattaaattaggaagatggaagattaaagataaagtggtcatttaataaaatataaattaaaaatcaaaataaaaaataaaaatataaaatttgctataaggtccttagatttgaatcacaaaaaaaaaataattcaaatttgattggttgatatagctatgtaatctttatgatgcccatgaatggagtatacataatatatatcggtgngacttatttttaatgcacaccgaataacaccatatccaaacaattaataccataaaccagttg

SEQ ID NO: 176340 - DNA, 478 bp, Glycine max
ctaagctttactgattgcacgttccatcgatgttaaatggtgttatctattacaatacatcggcaatcgattaccagtgtatctgaacgttgaaattcaaaatcaacttgaagagtcacatcctttcataaaatgttttgtgtaatcgattacatggttttggtaatcgattaccagtgacaattttgaataaaaagtcaagagatgtaactcttccaatggttttcatgttttcctcaaggttataactcttccaatggttttcttgaccagacatgaagagtctataaaagaaagaccttgacttgcatttcaataactttttagaacaattttttagaatgtcttgaacaacttttgagaaatcttgaaacctttgctacttatctatcttcttcttcctttgccaaaagctttctaagtttactagtgtccaaaccttggtctttctagaacacaaaagtgagctatatctttc

SEQ ID NO: 176341 - DNA, 353 bp, Glycine max
tacatacataaaacagccctaccatcccaatttcgcaaaatcatattcatatatcattggggcatttcaccgagcacttgatgggcgcatgtttggatataaattgcaagagaatgggggcaatgtggcatgccccattgcttcagaatacaacataggtctaaggccttctcattcaaatcctcaactcaaaaaaatcaagcataaaaacaacccaaaactgtcccacaaatataagcacattctccacaattggagcaccaaaagatgaagaaaatataccaatgggaagctaaaaacatcaaggattgaatacttacttgttggagtgaatagaaacaccaaaaacgaaa

SEQ ID NO: 176342 - DNA, 493 bp, Glycine max
  unsure (1)..(493): unsure at all n locations
ctaagcttctgattaaacnagagaattacaattgatcacatgactagtttgatanataatcatattcctggtatgaatattattcttattttatggacaactttcacatttataaaataacactcccttntttatattaattatattcttggtgctagcaaaaaatataataatatttcactaaaatatttatttgattaaattaaattctctaatttagttttcaaataaattattttcttttgcaaagattagaatattcgtttgtgtatgaccccttaggtttaatactaaatcagcagtaaattaatcataattgattgactaatcaaggtagtcgtctagcaacactccttaacatccgagtagcatgaagttacatattnttcaagaaccaatagaagaataatgtgatattgtctttcattatttatatcttaaggttaactctagagtataatattattgtgtaactctaataagctcacacatt

SEQ ID NO: 176343 - DNA, 397 bp, Glycine max
aggaactgaccccgatagcttattccctcctatatttcttcaatcgaaagacaatcatatgatcctctctattctcagaaataaaaatatcaaaatcatttaaaatataatatatagttctgctcaaaatacaacttacaaaatcctcaggtactcaagttgagataatgactcgggcacaaaaccatttaaactgttatctgagacatccctgttaattgagtaagtgagaagaccatagcatgtaacaattccactggtgatgttccaaaaaatatgtgtagacatactaactgtattaattattatgtgtaagctctgattaaaataattgactcaatggatatagatttatatagttataatgggaaacaatatagattcggtacactcttat

SEQ ID NO: 176344 - DNA, 300 bp, Glycine max
  unsure (1)..(300): unsure at all n locations
atctctagcaggcggaggctaccaagatgaccacacaccttcaaatgctccaaaccattacatttaacaattgctatttcccttaccatagggcagctgcgaaagaaccaatcaatgtcactctctttgtgtacagntacattttctaaccttagaatctcaaggtgggaaaactttgcatccataaacggctggatcattatcaaaccacttaacctcaacaccattaacatctccgcgctatagatatgatgaagaagttcataagaataatccggactatcaaaatgactacctcga

SEQ ID NO: 176345 - DNA, 280 bp, Glycine max
agccgaggccgtcggcgatggcgagcatgatcttcctcatctcatcccggaactcgcggcggtcgacggcgccgttccggtcgccgtctaacttgtcgaatatggagtcgtagagcttcgcgagctgatccggcggcgtggcgacgtctatgctcaagtgcgtttcgatgaggcgcatggactctaatgccgtgcggagctccgagcgcgagaggaccccgtcgttgttgaagtccatcaccccgaactgctcgtccacgctcttcgcgaatgctcgctc

SEQ ID NO: 176346 - DNA, 297 bp, Glycine max
caggcaagtaatatgcgaacaactatgtcacttagtatgatatcatattatgcgaaatattgcactacaactctgaagaaacaacgctatatgtagattgcgaaattgacctgctatagttctctattttgaatattcatttctatccaatcttgttcgcaagttattacaataatgagttatacaaatctaaacaaaattagtcacattatatcacataatattatctgaggtcacaaagtttatgcattgtagcacttactagtaccctctatcatcttaatattaaaccataaa

SEQ ID NO: 176347 - DNA, 202 bp, Glycine max
aggcttactgtatggatcatcatcgaattttagatgcgatctcactaaaaggaaattataggagctgaaaatctgacttatcatgactttgtcactgaaacagttaactatttgccttgggtctcactcagaaatagaaaattcagagtcgccttcctccaaggccttcatcaccgagcgccgcaaggcgcagctgaaagaa

SEQ ID NO: 176348 - DNA, 317 bp, Glycine max
  unsure (1)..(317): unsure at all n locations
ggccattacaattagcagattcaataattatttcttcaaacagaacctttctctcaacaaaaaagacgatgaagcttcatatctgcttctttcatgatactttacatgcactatgaacgactgcttcataatcacaatattgcttcctctgctagatgtcacaaaacttgaatccttaaaggaattctttgatccaaataagcccacaagcggctcttgccggtcttatatnttcccaccaatgttggatatctcaagacttgaataaggctcttgattagccaacaattatgatntggatccatgcgaccatcaat

SEQ ID NO: 176349 - DNA, 223 bp, Glycine max
acaataaccctcattaattcagtcttaatagccttacccatctatttgttgtccctcttcaagattcctaaacatgtctcgcacaagattacatctatctaaaggaattttttatggggaagtcaccaacactccaactagattccctgggtgaggtgggacatactttgcctacctaacagtaaaggcgggttacggatcaaagatcggactaaacttaatg

SEQ ID NO: 176350 - DNA, 391 bp, Glycine max
  unsure (1)..(391): unsure at all n locations
tgacaaactgagaaagagacacatgaacctggtaagctgaagttgatgcaccaaacacaaaaccaggaagtacgaagatcatatctaatccaatgtatcctaattacacgatactaggaatgaaatctttacaataacatcaaatgacatgcatcctacataagtccatgcaaattgaataccctcttttttctaagagtaaaaaaatggaagttactacagtatatataaaacatcagaaaattgcaaatgaattaatgatcctctaatgtatccaacatacaaagttgctgccataattgttctaattctntgatgaaaccacaggacaaatgtactcgtacataatgtaaatcaaatttagcaactgctctacctaanagttaaaaag

SEQ ID NO: 176351 - DNA, 327 bp, Glycine max
ttaatagttgactcagataatttgtaaatagttaaacagagatataaaccagactaccgactttctggtactctaacatcagagcacgattcctcaaatgaggaggacagaattttctgagcagatttatgtaactgtttcacgtaaatcagattatggtcccataggtataccaaatgtcaagggaccaaatctgacctgtattatgtacttttagtaccactggtactcattaatataatactatttttgcacgaaaaaaaaaaaccagactactgactaactacataatctaccatgaagagatctaagatctctgaagtaatg

SEQ ID NO: 176352 - DNA, 251 bp, Glycine max
cataccccaacaaaagccacacgatgcacaaaattatagccaatcttcattctccaaaacattgaccaaccacttatctgagcaaagatacatacaaaaaatgcatgaaacttgcatgcaggacacagagaactcccatctgcaacttttgcaccccctaaatgttaattttctcccaaaaccgcacaagaaccaaatacagatcgctatggctgatgacaaacacaaatgctaattttctctatatctga

SEQ ID NO: 176353 - DNA, 381 bp, Glycine max
aacattcagaacagagaatggaacaactgatattattgattctgcaaaagctagttttaatgcagctacaaaggaggtatttataaacctctagaccttgaaggggattgcaccttacaacaccatttggcacggttaaaaaccaaatcttcagatattatttaccaatgcacttgctaagaaaaaattttgtatgcaatataaaatcataaactcgtaacttattgaatgtttcagacgtacttcattattctctgattgataggcacttctttgaactcgtttctcaagttctattagctcatttcgcagaagcttgaatcggcggatttcattgcgttcttggccacaacccctacgtttggtgcagactgttcaata

SEQ ID NO: 176354 - DNA, 331 bp, Glycine max
  unsure (1)..(331): unsure at all n locations
tacctactctgattaataaaaaatataatatatataagtgacgcagttagagcatatatctagtcctatcatcacaagctggagaggatatctncatcgatggccaacactaataaacaaggttgtgatcaccaatcatcatctaacaaagacaaaagatgggcttcaacctatggcttattctccctcgccttcctctttgtgcttgctgcaaccaacttcatcgtcaactgggttgacctagtaagccatccaattcctctctcttttgctatgctaatctatgctagctcctcttaattaattcctgtgtatgtgcgtataagtctcc

SEQ ID NO: 176355 - DNA, 326 bp, Glycine max
aaacataaaacccatagagatatcattgaatcttagaaaatccagaaagcaggaggaattagatcaaaggaaaaaagctgcgcttttgaaatgtatgtcaagcacataatgatgtaatccaatcaattgagtcaatttgaattatctcccagccaaaattaagaaagaaagaagcaatgttcaaaataatgctgcagacaagaaaacattattcagcaggtcaacaaaacaacatattcccagaaatgactcaactggagaagaaacaactgcgcgactaggaattacaaacacgagatattaacaaatcattagtgctaagccta

SEQ ID NO: 176356 - DNA, 431 bp, Glycine max
  unsure (1)..(431): unsure at all n locations
gacgncgacaccggaatcacatttgttcaatatgcatggcttgcctggtcagaaactgacctagtgccatctctttcttcatacatgagcttgtgatttgaaaatcctgtacaaccagaaaccatcccatttcggacatatccagtcaaaattatatatcataacataccagaatagagcatttacacgctataaaattttgacgtgagaatcccttgcagacccataaaatgtctctgcaatctcttgcagccccacaaatatataaagactacgctcacgtattaactctttgcaacgaattctcatgcctgtgtcgtaccaactagagaaaggccctattcttatctcaccgtaataacattaaattttgcaatctctgataccactagatatagcaaccagatagagagctacgacaatcttatctc

SEQ ID NO: 176357 - DNA, 377 bp, Glycine max
gaggcaataattaaattcattcctcaagttcatcaaaacatcgtgcaagtcctgcatccattacattgcatcaccaacaccatcaaagttgaaaccaatgcaaatatagatcaactaagttcaacaataatgagctcaagataaatgaattaatagaatctcagaatgcaattaaaaaaactataggagaaactagtaagaagaatctgaagctcaatagtttgtctatagaaataatttatggcagaatattatggtgtcgattgactcgtgtaccgacccaatctagtaggacaatactttgttatgtcttttagtaggaaaaatctaaacaaatgatcatgggaagaaaacgcaagtatgcacgctccatacta

SEQ ID NO: 176358 - DNA, 271 bp, Glycine max
aacagtcgcctataaggttcttagttcttcacaatttactcttcgacaattcaaatatcagatcaaaacaaacatattttccaaatcttaacaacttgaagatgagaactatttttagaaaatgaaaaccaaaaatgttttctcaaatcaagtgccacctaaaattaatggcgtgcaaattaaaaattgcatgaatgagaaattcacatcttatagagacatttaaaaagccacatgttgaaatacatttagttgaatctatcaacgatca

SEQ ID NO: 176359 - DNA, 386 bp, Glycine max
  unsure (1)..(386): unsure at all n locations
gtactaggcggcgggcgggcaatggtgcacaacaagttttccacatccacaaattgcgcataaacccaccatcccctgttgcccacctccaactgagctcacgtactcncacgtagcccatatccttgtttctctcaacaccgggtccccatcaatcctcccaagcttccccaacatccaggtaaaacaaaattcaaacagcacaaactatcacagccaagataacagggcaaaggcagaaaactctgcccaaaacaccaaccaaaatcacagcttttcccacttaaagaccccagtaacatttccttcgttcaatttgtaaccgttggacaactcgaaaatttactggaagctctagacataacctacatttgccgtgggactgt

SEQ ID NO: 176360 - DNA, 431 bp, Glycine max
ccagaactgagagaccatactaggttcctagcggtttctaattatatgggccattaagtctatcatatactgacaatagccgagaagcccatgaatttcttcgggggcagagtatgtgtctaccattgccttggccttggctaacaatcggggaagttcttaactcccgttcaaggtaagagcaaaccgatccatccacatggttgcctcttggtgtaaagagtcgatcaccctttctctagcctctttatccgcgtatacttgggcatactcgtccgcgaccctatgctcgtgggccgtggctagacttaactcttcttggtacttggtgatgatagctagcatgttggtctccgtctcgcataaacgctgagacaagcatctcttggaccttgaacaggcaactaactcctctttaagaccatgctatg

SEQ ID NO: 176361 - DNA, 338 bp, Glycine max
tacttacacctatcttctaaagagaagctcgaatcccaaatgcaagatacgtgatcttgtgttgattgtccacatttccagctcatactgtcttacatgagggagcttgtcataaactaaaaccattcacaaccctgagcctcttcacctaacaacaacttaagatttctctaaagctggtccttgacactttcgaaatgccagcattaagcttcttaacctctaaacgcattctcatctttatctttcagatgcatattccatcacatgtacatctagaatcatttatgctattttggctgatcaaacactcctaaggcatcactgtacaattatta

SEQ ID NO: 176362 - DNA, 400 bp, Glycine max
tctcagacttggattttgtcggctgcgttgactctcgcaagtcaacatctggatacatcttcatgatggctaatggagcaatatcttggagaagtgcaaaacaatcattagttgccacttctaccatggaggctgagtttatttcattatttgaagcgacatcgcaaggtatttggataaaaagttccatggctgcgctacaagagattgattctgttcctagactgttaaagatatattatgataatttagctgctgcttttctggctaaaaacaacaaaagtggaagtcgaagcaaacacatcgacattaagtatttagccatgacggaacatgtcaaagaaaatgaaatcatcattgaaaacatcagtactaaactaatgattgcaaatccattgac

SEQ ID NO: 176363 - DNA, 440 bp, Glycine max
  unsure (1)..(440): unsure at all n locations
gcttctttctccccatatcaactatgcagctcgcagttaacatgaatagccttcccaatattacaggaatgtcattntcttcatagatatccattaccacaaagtctcctgggaagataaaatgttttactctgaccaacacatcttcaattactccatatggtctggtaatggagcggtcaacaagttgtagagtcatcttagtgggcatgatctccaactctcccaaccttctgcacatggagagtggcactaagttaatactggctcccaaatcaataagagcctttcccatagtgacttctccaattgaacaaggaatggttacactcccagggtctntatgctngcgtggaaggatctttcgaatcacaacactacaattngctnccacaacaatggtttcctggnngaatatacttgtgttccttggtaacata

SEQ ID NO: 176364 - DNA, 382 bp, Glycine max
  unsure (1)..(382): unsure at all n locations
gttctgtggaacatgatttatacacaaacatccaaatattttgagaaaatttagagatggtttataaccataccaagcctcatatggtgtctgatccttaactgcttttgagaggagtctgttttgcaagaaaacagccgtatgagctgcttttgcccaaaacttcttgggtagattttntttcatgcaacatacacctagtcatctctaggatgtatttgtttctcctttcactcaccccattctgttgtggagtatagggagtggttagctgatgctcaatgccagcttcctcacaaaactaattgaatttttttgaggtgtactccttgccattatcagatcttagaatctgaatttgtttgccactttgattttctac

SEQ ID NO: 176365 - DNA, 354 bp, Glycine max
  unsure (1)..(354): unsure at all n locations
tttgaaaaacttgcaacctgaaaaaggaaaaagacgtggcaaaagtaacgttgtactggtttgatcattattgtgttgaagtgatatcacataagaaaagagattgcaaggcgaacacttttgatcacgttgattgcactggattttgggctcacggcccttgatacacnaccaagtaaagagatagagcggatctacccttaaactggaaggaagagaaccggtcacacaattttctgtatcagttgcatttgaaacggtatgagctttatacagtactactggtgacttgagntgaattttttaaaaaacaatatcaaatatattctgtggacaataaaatgatactaaatg

SEQ ID NO: 176366 - DNA, 370 bp, Glycine max
tatcccttatttttactccaaagtcagcgcgaatcaaatcactcccgcattttatctctagcatgcattcatttttttacctactcctcatgtttggtttttttagcaaaaaaaccataactaaacgcgccccaaggcatccctattgcaccaaatccaaatctagaacgatgggtgatctagaggagacacaggaacagatgaaagccgacatgtcggctttgaaagaacaaatggcttccatgatggaggccatgttaggaataagacaacttatggagaaaaatgtggccaccgctgccgctgttagttcggctgccgaagctgacccaactctcctagctatcgcgcaccatcctcctccaaacgc

SEQ ID NO: 176367 - DNA, 441 bp, Glycine max
  unsure (1)..(441): unsure at all n locations
aactaagaaaatgcacccatatacaatcaaggtagcttcattacctagattatttacatgtacttccaaggtgtatttgttatttacatcacacacgcctccttggctgaatttacacacatgcatactcaaagcattttggggtaccaaaaattgcacatgcgcacatcttggtatttctaatacctatacatacacaaacttcacgatgaatcttgactacctacacaataaggtgctacatttcattgccttttttcaagtttttgctacctaaagccgcatgcaaattcaagcatattttcctttgctgactaanattgtattcaaattaaaaggtattatatttttttgaatatggtttcttacataacatgcaacatatatntatantatattttttgtgagacattntgactaccaaanattatatatacatac

SEQ ID NO: 176368 - DNA, 285 bp, Glycine max
acaaaacaaaattatacagcccacaaaccaagcagaaggcaacaggctatacatgaaaaaaaaaacaaaagatcctagctcaaaactaagaaataggtgcttgacaaacatgagatggcgagcacgaagacagataaccagcacaagcatgaaccagcgaacgatatgcgcctgatgatgctgtaacaacaacccgcacataatacacacaatcatgagaactaagtttaagatgccacaaagaacacaataaaatcatctagccagacgagcctataattgccc

SEQ ID NO: 176369 - DNA, 393 bp, Glycine max
  unsure (1)..(393): unsure at all n locations
accacttctataaacccatgtaagcgcttctaaatgcccctctagatctgcagtgggattttgtttttcaaattttctcttgatcctgtttccagatgtactagaatctcctgcttgccttgcgtttgaatgtgaaattcaaacagtgattaatgaattggtatctaaaatgatattattttctgcacacatgggccttgaattgcaatgatgtcaggcatgtaactttaaagtattttaatgagagaagcaaggtcatctccatttacagngcttcccaattttgctgcagtataagtgaatcttcttgcataggaattgacactaccaacagagacctgcttcatctttatgaacactgngcatctttcatttccttttatcctttgctca

SEQ ID NO: 176370 - DNA, 388 bp, Glycine max
  unsure (1)..(388): unsure at all n locations
taattaatctatnacttcttagtcttaatgttaattctgtggcacatccatggaagggagaaaagagcctttcttcacacatatttaattataatgttgatcaataattgaagcgatacgataaagacttctctttttnttttctttgtataaaagtgtgtttaagtgattacatagatgatttataactaattaagcaattgttttataagtatacaagatattatatatctagcccaatagttatacttcacactcacaaaagagagagatgtagaaagagagtcaaccgtgtttgtaccgagagtaggaatcactgagtaatgatcgcgcatacgaaacataagataagttcccacatattcttatttttcgaaacgtgcatata

SEQ ID NO: 176371 - DNA, 404 bp, Glycine max
  unsure (1)..(404): unsure at all n locations
ggaaacttccatcctaggtcaaggttatggcaacaagttgatgtttgactcaaaaggcttgcaaatggcaggacataatgtatgtggggatatctgtttggccagacggctcagaaagatggggatgcccaaatcatttccacgaaacacacatcatgatgattagaaattcatgcaaaatttaattatagcacacattcatgcggacactcaaatataaggctttgtggcgatgcaaacactaaggcttagggttcatttccacattcaagcctaactagtgttccaacgattgctcttttatcaagtcacacataacatctgagtccatttggcattcgggaaagtctttcgttgttttcaccctctaggtgcacatttctttntttctttttcaaaaaccc

SEQ ID NO: 176372 - DNA, 490 bp, Glycine max
  unsure (1)..(490): unsure at all n locations
tccttgctatggaaggctaaaccctcaattggagattcttgctgagtaatcgatgtaaactctttccctatctaatcatggttgttttatgtgttcattgcttctatcagtactttattattgcatgcttatggcttgatcacccaaatgtgtgtactattaggggctttagcattgaaagatgtattgtctccttagaacttgatagagcgagattatgttactgtatgtttagacacagagtgcggtaatttagttttattatgctgtgatcataaagctgttcaattaagctaagcttaacaagagacatctgcgaacgaagtttaattagaattagactaaactcacgagacatctgtgtttagtacttgagcctttagcatctaacacaaaaacatctctaattagagaaacattcttaattgcaacanattgctcaataagaagacccaagcgccttagatattctgtttcacacttacatgct

SEQ ID NO: 176373 - DNA, 373 bp, Glycine max
cataactcaataggttccagatacctactcctcatcattgtggaaaattgtccatcatatctttccaaagcacttttgatgtaagggagtctaatacttgactgcactcaaagacagtaatggtggagttaacaacaggccatatctttatccaaacaaggacagttctatataattaataatatggttagcatggatgtattatctatgtagctaatgacaatgatgatgaaaaaaataataatagtcttgaatcacaaaacaagcacaaatgcaattgtaagatagccataacattggcgaaattctacaccttatcacaacctaacagtaactatagataagactctaccttgataagttaaacatatgt

SEQ ID NO: 176374 - DNA, 382 bp, Glycine max
cgggctaataaatctcaagtcaatcaacatcgttggctacaactgtactcagaacagaacagaaaccatctcttatcccagaggtgttgtcttaattttttttattacttgttattttttgctagcaggaagattcaatcggagactgtttccttcttttttttttctttcttaactagctaaataaccttatatatcagagttgatgtcttgattatgatataaataaaacgcagagaagagagaaaagagaaagaatggatgtgaggaacattgctgtggtgcgggaagacctggatgctgctataactcgactacaatgggcacttgacaacatcattctctatggagacataatcacactgctccatgtctaccctta

SEQ ID NO: 176375 - DNA, 358 bp, Glycine max
ggatatcttctcaaacgtatcttcatccaccgattgataaatgagaaagagagctttcttgtctctctttcttgactccttcaacgtctcctttacaccttggcttagcgagacttcattttgctcctcgaagccattctctacgatatcccacacatcttgagctcctagtagcgcctttatcttgatactccaattatcatagttgttctttgtgagcatcggtatttggaaatgaaaacctccattcgccatcttttgaggatgttgaagctctgataccaatttgttggaaataaggccttttatgtttaggaaaaatgtttacgaatattggagactttgatagaaacttgat

SEQ ID NO: 176376 - DNA, 374 bp, Glycine max
  unsure (1)..(374): unsure at all n locations
agcttctcanagaggttagtttagttattatagaggtgtgtgtagttaagctctagcttctcaaggaagcttctcaaagaagcttctcaaggaagtttctcaagaaagcttctcaaggaagctacctaggctataaatagaagcatgtgtaacacttcttgtacctttgatgaatgaaagtcttatgagacacacttcaaagttccacttttctccctcttttattccttcaatttcatgctccccccttctctctttcttttcctccattaaagcatcctcttcaagcttcttatccaaggcacattcttggtggtgaagttcgttcttccatggcttattccctagtggatggngtctnccctctcctcttc

SEQ ID NO: 176377 - DNA, 169 bp, Glycine max
agcttatgctaaattaggctaaactttcgtaagctgcttgagcagagtctagtcttacaaaagggatatgcggaccaaactcagtataagttagtctaaacctaatagggccgtctaaattgggcctagtccaacaagaaggatctgaggatgaagcttagattgattc

SEQ ID NO: 176378 - DNA, 478 bp, Glycine max
tgtagtgaggcttggctacaacaatttattgggttttctaggattcaaatgtttagattttaagagagcacaaatcatagacttatcccaatgatcttgtatcatacaagtagcttactcactatcttttcctcttaagttgcttttgaccttattgtaacaacacaatttattctttttttttaacatacaacttatttgttgtgtgtgctgatgcttaacctttttcttttcattctaattgacttcccttccccaaatttagagtaactttgccttgaaccatatgctctcctaaaatctaaacaaggtattaggagataattatttaagtttagggttcaattcatgacaaaatcatttagcttatacagggagcaaaggatgcaattatcattcaaggtaagcttttttgtcaaaaggcttgtgtatgtacaatcatggccttcatcatgtcctcatttatacatttcattct

SEQ ID NO: 176379 - DNA, 182 bp, Glycine max
  unsure (1)..(182): unsure at all n locations
tgaactcctgcaatgttgngctattccaagttcatttaccatacctttattttcgattgcttccttcactccttcagctaggcccatgtatcctacttcaaatgttgacaaaacatcaactgattgttgatttgctttccaactgattgttgtaccaaacaaagtgaacacatattctgtta

SEQ ID NO: 176380 - DNA, 291 bp, Glycine max
  unsure (1)..(291): unsure at all n locations
aaagatgatgacggaggtgatgacttaaagctcaaagatttaccaaagaacaactcaagtgcattatgaataattctggagttcaagattagaatcaagaagaattcaagacttgagaagaacgtttagagtcaagaatcaagattcaaggttgcagatctcaagaattaagagcaagattctagactcaagattgaagaatgaagagaagacttcatcaagataaggattaaaaaggtttttaaaactttgaatagcacatgagtttntgacaaaaccctttacccaaga

SEQ ID NO: 176381 - DNA, 176 bp, Glycine max
  unsure (1)..(176): unsure at all n locations
agctttttaaataattcttgtcatcttattactatttgttttattattctaatggntgactataaatgggttgttaggagggaaaatctgcactatcacccgagactctgttgaaatacatagatgaacttccattgtgtgcaaggtattacgggttacaaatttttttgttctaa

SEQ ID NO: 176382 - DNA, 482 bp, Glycine max
agcttgctctaaatttacattgatgtttgtatttattggaggaggttgtatgccatttttgttttaagagtagcattccttggtaaaactaactttccaaatgtttgccttcgcaggaaatcggcccgaggaagcttgcctcaaagaggtctaggaaggataaggcggccgaagggactagttccgctcctgagtatgacagtcaccgctttaggagcgctgtacaccagcagcgcttcgaggccatcaagggatggtcatttctccgggagcgacgcgtccagctcagagacgacgagtatactaatttccaggaggagatagggcgccagcggtggacatcactggttactcccatggccaagttcgatccagaaatagtcctcgaattttatgccaatgcttggccaacagaggaaggcgtgtgtgacatgaagtcctgtgtaagaggtcagtggatccccgttcgatgcaaatgctat

SEQ ID NO: 176383 - DNA, 185 bp, Glycine max
catgcaagctttcacaagaaccaagatttactctttcaagtttttttgtatttgaataagtctagcatctcaaattaagtcttggaagcaataaagaatcaattgccattcaacatggaaggttttggaataaaaaaaatacatcaaaatactaaaaaatcattaaattcttacgcgttactttt

SEQ ID NO: 176384 - DNA, 656 bp, Glycine max
tcagactataacacaactggatctacaaatgatgaggtgtctcttttgtccaaaaatttgaaatagatcctaaaaaagaaaggcaagttcaagcaatcctccaaaaagaaagatacttcattcaaaaagagaaaaaaaaaaggaaaacaataacatcatctgcttcaaattttgaaaacttggacacatgaaagttgaatgtcacaagcataagaagaaaaggcattctggaggtaaaaaaaatagtttgatggccgcgtgggatgatatacacaatgaaagaagcaacaacaatttagataaggaataagccaatatttgtctgatgcttaatacagatgaaaaaattgaggtaaaaacatgctcaaaatttgatactttattagattcctaataagaagatgaagtagggatgccatatgatatttttcttcaaaattgtcatatgatttctttacaatgtgaaaaatataaagaaaaataccaaccatctatctgcgaaaacaattctgttaagaatacaatgcatattaataggaaaaaatctgactctagaagagagtgtaagcaaaccaattctcctgaaaattagacgaaccattttagttttataactaagaatgaaagagttgtataactaagatttgggaagtttt

SEQ ID NO: 176385 - DNA, 173 bp, Glycine max
agcttgtgttggcaaaacaggtcggcgattttggtctttcacgtcttaaacatgaaacatatctcactactaagacaggaaaggggacggtaggctctcatttgttgtggtcccttagatgatttgttttctgcttcttcagtgtcagaatatgtttctgactctccagtttt

SEQ ID NO: 176386 - DNA, 506 bp, Glycine max
ttgaagatctatacagtgtaatagagggggcctttgatcactcattctgattttgcttatgattaattttacttgcaaaagcttatatggaacaagctgagatgactaaagcggtcctggatttgttctgggggaaaaatgaatgtggagaaaaccaagatattcttctcagaaaacatcaactggcatataaaggaggatcttactgcaaagattggttctcaatgtactttggggaaatatcttggagtgccgatattccataaaaaggtgaagaaagaatcctttgagttccttctacataaagttaatcacatattaagtggttggaaaagtaaaatgttatccatggcgggtagattaaatcttgcaaagtatgtgaacaaagctcttccctcatatgtgatgcaaattgtgaaaattccggcctacatttgtggtgaaatttatagaaatgtagagcatttttatttgggggatgatgagaatacgacgagagtgcatat

SEQ ID NO: 176387 - DNA, 171 bp, Glycine max
agcttgtttttggatgcaagagaacacaagagtgggtgcatattaggtgaagctaccctttttggccagcaatcagctatgggctacgccataaatagtttccttacacctagatgtttagaaattttgttcatcatgaacatgtaggtgtaggataggtagcaaaatacc

SEQ ID NO: 176388 - DNA, 538 bp, Glycine max
aattgcctgaatcatttccaaatatgcatgttaattttgacgcatcaacaagaatcaagccaaggctattgtgcaagcaatccatggggcaaaacacaccaaatgattatgatgatggatggctcaaattctcacaaaggtaaactcatcactttcgaatcgagctttcaaaactatcatgacatgtagagaagaatcaaggatttcaagtcacaaaatgtcaagaacttttattttcaaaacaattacccatttcttgaacatatcctataattcaaagaaaaacatgcaaattcgtacgtgcacacaaaattgacccaaaatattaaactgaaaatccgactaaactaacaacatttacaaattaacacaactaacaaattaacaaaaccaacaaaactagcataaccaaagaacactctccccccatacttaaacaacacattgtcctcaatgtagcacaattaaaagattaaaaacaattaaatcatcaaagagaatcggacaagtgtattaaagcaaagaacgagataggaaa

SEQ ID NO: 176389 - DNA, 167 bp, Glycine max
agctttggcattttagattaggtcatttatctggtaatcgtcttaatgtcttaaatcaacaattcccttttatttcaaaagattctaatgaaatttgtgacatttgtcatttagctaaacaaaaacgattgccatattctcttagttcgagtagaagctctaaaatt

SEQ ID NO: 176390 - DNA, 566 bp, Glycine max
catagagagaagaagcataacagttgaaaataagatatttgttctgttgattttatccataaaagagcattccaaattttaaacaaaatcaaagttggctttcgcatgatatggaagttattagcaccttgactaacagaatcaaacttgaagaaaagtttgtttttgctatttataaaagtactcacaacaatatagatcaacatggatgctaaatataattcaggtttcatactctattcatgaaggcatacagtagctctactctactacagggcgactcaatcatgaccctaagtccctaacccttgtgataaaatttgcctcatagttcattctagcacaatactaacatttagtatgttttggagaaactctaacttgcattcccaaaactagtaattcaggataaatttctttttgattgacttggcatatatggaactagtccttttttgtatgctttggtaactatgagttagattaaccccacccccaagttcatggatattggttctaacttctgggctttgttgcatctcactagcacttgtttgcccctatgt

SEQ ID NO: 176391 - DNA, 174 bp, Glycine max
agctttcataagtgaaatcaggtgcagccatcttcctaagagtcctctcacgaggtgtaggttggagccatgttctcagtatgaaaattattagtagaatgctcaaaatcagaatgttcaaaattaccagcaacagaatactcagaatgctcaaaatgcacagaatgatcagga

SEQ ID NO: 176392 - DNA, 656 bp, Glycine max
tgtaggattatggggtacccatcacatgtggtactaggtggcggtcgggcgatggtgcacaacaaattttccacatccacaaatcgcgcataaacctaccatcccctgttgcccacctccaactgagctcatgtactcccatgtagcccaaatcctcgtttctctcaacaccgggtccccatcaatcctcccaagcttccccaacatccaagtaattcaacattcaaacaacacaaactatcacagccaagaaaacagggcaaaggcagaaaactctgcccaaaacaccaaccaaaatcacagcttttctcacttaaagaccccagtaacaattccttcgttctagttcgttaaccgttggatcggctcaaaaatttcactggaagtctctagtacataaacctacattttgaccgttgggatctactagtaagcacccagaactcattctgcatcactctttccataaccagaaaatacatagcattttcttctgcacttatgcaaaattctgctgcacaatttcacagcacaaatctgcataaagtgcagatttcgaaaccacacttcccctcatccaatcttgctcaaataaatccttcaagtccaaaacatgtatcaatcatgtctaaaccaaagtcaagcttcaaaacaca

SEQ ID NO: 176393 - DNA, 172 bp, Glycine max
agcttcagaccaaagcaactcaaaatctatgtatctataaacccctcaatttagtggattttcaaggtttgagaagtgaaaatgagaatggggtaaatttggagcaaactctcacctcacacaagtctataaacttaatctaaacttgctcaaactggtttttcacctaaaa

SEQ ID NO: 176394 - DNA, 533 bp, Glycine max
gcttcctccaatattgatgcaaaaagtcttttcaagctttaccttttattctctaagcttttgcatgctctactcaagatatcattcaaaaagccttcatgcttcacactattggtagcgaactgctattggatacacacaacacttattgtgttcctgttgaccttcagaagcacctgttccttgactacccttttgagttatttccctctaaacctatggtgtgcactcacaatttttcagatttggcattactgactccacctaaagtgttatgactaaagaatctccaaaggggtttgtcaacctgacatttaccctatcttttggcaacactttcttgcaagttactccattgaatttgctcaatgcatacagtgagcttggagctagtcattattggggctgctggaggctgaatataacttttgaatgttgcatgagttgtccaagttcttatagctagccactctttacatcttcaacctctatcatacaactcattttgacttcgcatcttcatttctaccctt

SEQ ID NO: 176395 - DNA, 172 bp, Glycine max
agcttgaaggcatgtaacccaccatcttctcatagtagaacaccagtaacgtgtctactatcattgttatcatcttcttctccatcattgggggcgctacttgagctgtcagatccctccacctttgggcgtattctttgaaagattcatgctccttcttacacatgttctg

SEQ ID NO: 176396 - DNA, 516 bp, Glycine max
tcttatccaaggcaattcttggtggtgaagctccttcttccttggcttattccctagtggatggtgcctcccctctcctcttctcctttgcctttcgctgcatctccatggtgaaaaatcaccattgaaggacctcattgaagctcaaagatccagcctccatagaagccccacaagcaagcttccatcacctttcaagtgttggacctttcagaacaaactcagaattgtcatttctcaagttatcatgcaatttatttattcatgcataaatttaaactactgaaattaaattgctgaaatcaaaatgcataaaaataacacaactatcctaaaaaaaaaacaaaatgcgattaactaaaagaaagataaagtaagaaatcctgggttgcctcccagtaagcgcttctttaatgtcattagcttgacgagtcaaatgccttcaaggtggcatgaaggtcacgtagaacacatcttccttgcattctcgcctcttagttagagacgccatgaaac

SEQ ID NO: 176397 - DNA, 160 bp, Glycine max
agcttagtgctggctaaaacagtgtaatacaaatactctttttttttattaaaaaaacttcaggttagtagtgaaactggtagaataacactctctctaaagcagacagcttgttcttcaactgatgcatcatttattcaggactactttctcatggatg

SEQ ID NO: 176398 - DNA, 395 bp, Glycine max
gatgggctaatggattaaacaaccatcgacgcttttcttgcttatgacctcaacaagtaaagcccagtcattgttgttttggctgatgcctatggcacattcgacctgagatgcgaaaaagagtagtgcaagaattgtctgttgtacacctgctctttatgtatggttggtctcccacattttttgtcatgaaggtaggcctatatgttccctacaaagtcatcacatgtgtgccaagaaaggaaaagcaaattgggaggaacttttggcaggtatggtaagagcgttcgttaattggtttccccgatggaaagaaggacgggcccaacttttttgctcatgtgaatgattcccaacatccccctgattggaacaaggggtgggttaattataat

SEQ ID NO: 176399 - DNA, 160 bp, Glycine max
agcttatggtatttgttaatgttttcttaccaattatggctatttaatttttgtattaatttcttttataataaactcatccttggaatttttgtaccgtgtggttgatacctgtgatgatcgcgaacctttgtttgtggaagcagaatgacgactgtag

SEQ ID NO: 176400 - DNA, 519 bp, Glycine max
ttgagtctgtgtagcatcgtagcctcttggcttcgacttctcttgctagcttctgacctgcaatgagctcctcgtactctaaagttgagctttagggatttctctagagtgatattgttagggccttcgaggatgatccttgccctatttccttttacgttggatgcgccgtcaatgtaaaaggtccaccaatctaggtggttgtgttgtttcctgtgaattctgccagaaaatcaaccatgaattatgtcttcttggggtcgtgtggttcgtactaaatgtcaaactctaatagttcgatagaccaagccaccatccttcctgggagttcagtctttctcaaaacctgcttgatagggtagttcatcttgactaccacctgatgactctagaaatagggcttgagtcatcaggctgagtttatgagtgctaatgccacattttcgatcatttggtagttcttctcgatgtcatggagtatgcggctggtgaagtaaatattgagctagctgctttcct

SEQ ID NO: 176401 - DNA, 173 bp, Glycine max
aagctttgtgtaatagattacagtaatttggaaatcgattatcagtgtttgtttctgaataaaaaaaaagatgtaagtctttaaaaaggttttgaattttttaaattggttttaaggttttttttgtaaaaaatataacttttttaaatagggattttggttatgatatgaaa

SEQ ID NO: 176402 - DNA, 479 bp, Glycine max
taactccttactgtctttaagttgtgagtacgattatgtttcaggatggatgcatgaagaccagggtgctatgcttaatgaagaaaccgatcaagatcagccgaattgggtgcccgcatgtcccctagactttgaattgagaaattggcagatcataaagcaacccgagatttatgatttgatgtaattaaacattcccagatcctattgctatgcctaaggctttaggattcacatgttgttgagcgtacttttcttttcaattctagtgatcggtaataaaatgcatttcaaagacatatttccttctgcatctcttaacatatttattttcgttgcgattaaatgagttgctgcatatctaataatgagttttgcgaagacattgatatcgagatccctaatgtcaattttgagatgcccatcaaccggagtgaggaaaatgaagagaatgattgggaattgccctctgatttgtg

SEQ ID NO: 176403 - DNA, 101 bp, Glycine max
  unsure (1)..(101): unsure at all n locations
gccagcttaatggcaactctgggaaatccgagttttatttttttacggccttgcgngnccgccccatgtgacatcttataagccttggctccgcgaaggtc

SEQ ID NO: 176404 - DNA, 858 bp, Glycine max
  unsure (1)..(858): unsure at all n locations
gcgcgcttgattgcattcattgacananccnatncnttatgataccccaccctcctggttcaataattntatttccctangggcggggcctttttctgttctgggggagcgcctcttccggtggggggttttttttatatatcttccctactctcacttattccggttgttatacactntatagggggtttacggagacgacgtgcagtgtctttactccttttaatctggactcggtgttaatcaatcattgaccgggcttactatcttcggagacttgaactggtaatgtacctctcccatcgggctgaattctatttatgtactctcgggggggcctcttttctgttaaggagttcgaccttctctgctttcatcgctatcgtacacccgctcgattaccgtggtcatactcattcgtttagagacatttcccggctcacgccgcccgatcatatattcattggcctgctgcgtctgaactctaccattcggtaattttacttataacgctatcctccactgttcgtcctgcgttcagcctcgtggcgagtttcagtaagggtctattgtttatacgttcggtcaatcctctctctttattcgttccttccacattctaatctcaatttgctctttgcgctatccactctctacggggtttcacccgtcctcaggtcgcaatttctgtgttgcccgactctactaggtgtgctctcccccgaattggtgttgcaattatctatggtcctgccttccccgtacttagtgtcatcattaaagtgcgcatcgcctctaaggttatgtgcgcatgagatataggtacggtgcgtcttcctgtgacacatctactcatca

SEQ ID NO: 176405 - DNA, 169 bp, Glycine max
gcagcttaaatagaccactttcaggtgctggaactacttcacatggacttgatggggcctatgcaagttgaaagccttggaggaaagaggtatgcctatgttgttggggatgatttctccagatttacctgggtcaactttatcagagagaaatcagacacctttgaag

SEQ ID NO: 176406 - DNA, 225 bp, Glycine max
gcttgttggattatggggtacccgtcatatgtgggactatgtggtttttatgtgatggtgcaaatcaactctgccacattcacaaatcaaacatgaacccaccatccccaattgtccaccttcaactgagctcaagtactcctacgaatcccttatactcgaacctctcagcaaccggttcccatcaacccctccaagcttccacaatagttcattgtatacaat

SEQ ID NO: 176407 - DNA, 168 bp, Glycine max
agcttaactccttcactgtcttttaagatttgttttattaccaggctgcacgaaggatgcctgaagaccaggttgctatgctaaatgaagaaaccgatcaagatcagccgaaattgggtgcagccatgtcccctagactttgaattgagaaattggcagatcatagag

SEQ ID NO: 176408 - DNA, 406 bp, Glycine max
tatttagtactcaagctctaaagtttgaattaaaacgttcaatagctgctggtaatcgttttcacagtgcaaattttgaattcaaatggtaatagttgttgtaaatctgttctggccactggtaatcgattacatcctctggtaatcgattaccagagagtaaatctcttgaaaaagattttttaacttaaatttcttggtcaaaccttttgctacttcaattggaattcccttcctatttaatatactcttcctaagactctagagactgtcttgatcctccatcttgaatatctttgattctttgtcttgaaaaagcttgagaaacatgcgatcttttggcttatcaaacatcagcttggccctttgctactcatggactcttcatcaattattttacaaactg

SEQ ID NO: 176409 - DNA, 176 bp, Glycine max
agcagaagaagcaagtatccttctgtcacctttacaacaagattcttcatcaaagtctactcaaagtcgagtaagatctttggtggatatatatgaatcttgcaacacagatatggttgagcctaaatgctatgaaaaatccttaaagaagcaaaggcaactaattaagcaaatca

SEQ ID NO: 176410 - DNA, 620 bp, Glycine max
tatcccatgcctccttagcgtatgtttcataagaaactatctttaactcttcatcacctaatgcttgatagatgaggaagaaagctttcttgtctctctttcttgaatcctttaaagtctccttttgtgcttgggatagtgaagtctcatcttgcggctccttataacctttttcaaccatttttcaaacatcatgtgctccaagaaggaccttcatttcgatgctctaattgtcatatgcgctcccctttagaaatgaaacttggaaggatgccgctcaattgcttgccataactatagaggaatttcttatcaaaacctaagctctaataccactttgttggaaaggagataggaagtatttgagagaaatggaggaggagagaatatttgaaaaaaggctagtttttatcacttgagatacgctttgggcttgactcctttttgtgtctttggatgctttacaaataacaacctctccccctattataggcttcaatgagggattctaaatacctcaagaaagatccacacaccttaattgagagtttacacattttttccaactacttagttctacacacctctttccatgcaaatatttttttcacttatttcta

SEQ ID NO: 176411 - DNA, 170 bp, Glycine max
agcttggttacctccttcttcactacattttgtatcaccgggttgagtcttctctggggctggtgtcgcaacctacccttcggcgggagggtgacgcatgactcgcgggtgcatgttccaagaaaggaatatgcgcggagtcgccaccaacgtttatttgaggaaaacgt

SEQ ID NO: 176412 - DNA, 868 bp, Glycine max
  unsure (1)..(868): unsure at all n locations
cggccatgattgcattgcatgcccgaccncttnggnatagaagctcgccaccctaagaaaagatccatgtcacagtagacggagagatgcattttgtatatatatccggcagcatcaagcatagaatgaagggaggcggatcgagtctattgaatagaaancatacacactctacaccccattcaaatctgggcaatttaatatagactacaatcttggaacacgaatatatagatagttcantgttagactgcgtcgaagggactgaataaatctattttgccctaagtcgctaatacctaaacgaagtggtgcaacaaagacaacgaagtccttgtcatataatgataaatccttaaaccagcactaggcctttatatctcttggattcaatccaaaagaaatcaaatttatgaagactagcaaaggcttttttattttcctgtttagctagctctctgacgaggtatattgatttactaaaataagggcaataaacaacttccaatggtaaaaaatgtgcttatttacacaaataatgaagacagattgaactaccaaaactaacaaccccaacaaatctggctagagccaacctaagtcgacggcccaacttataactcggccaaaacctaatcaaagtaaatattagttcaaaagcttccaacgaaacaaaagaaaaaaaatcgggaatcggccgaaacttgccccctaccacaaaaggctggacagaacttgtctgggccaacgctctacaaatgaatagaagggctcaaactaagaacacaaccttcattacacaatatatggtgcactcagggggacaccaaaccgaggtccattgggcgccacgcagaccggttacact

SEQ ID NO: 176413 - DNA, 162 bp, Glycine max
atgcaagcttccatatccctgccaaataccagctcttcataatatgataccaagccctaaagaaatagggtttatatatattcttatttttctccccccaacaatatataaaaataaaagaagtttatcactttcgtaaatcaatataaagattacctattt

SEQ ID NO: 176414 - DNA, 605 bp, Glycine max
  unsure (1)..(605): unsure at all n locations
tctcccccaattntctataaatagggggagaagggttgtattttagggtttagccccttaggcacttctgtgtttctcgaaatagctgaggaaaattagttccgtggaggaaattctagccgaggcacttccgtaacgtttccgtgagtaattacgcgaagatcctcgaccgttcttaaagattcatcgctcgttcttcattttcttcgggcttcaacgggtaattacctcaaaccaagcttttcaattcattctatgtacccgtggtggtccacattttgtttcatgtatttttattctcgttttcatttactttttatacccccttttgacgtgcttaagccatttatttaagtcatttctcgcttaatctaaaaataaaataaatttccaccgatccgttgaattgtatcattcgttaattttgggtaaaatgaattccgaccgttcggtcgtgcccgaaccacgtttggaatcaacaaaagaggtggaataattaaataataattaaacataccttttagttaaataaagcgaaaaacaacggccatttctctttgggattctcattcttaatcgaaattgactataactacagggaacta

SEQ ID NO: 176415 - DNA, 176 bp, Glycine max
  unsure (1)..(176): unsure at all n locations
gcatgcaagcttctccgaaaggcatggggatttctattnttccgaaaatatctaagaatctcgccaaaggaggggccttcttctttttggaaggcacccccggatatggtactttcgcaccttctttcacaactttttctcttttcttctctctaaattggtcacttttactcctt

SEQ ID NO: 176416 - DNA, 121 bp, Glycine max
actgggaccactcatttaggcaatttgtttttttcctggtaaggtctgagagagcgggggagattgctaacaagatccaatcatgtaggccattaaatttctcatatgcttgacatatata

SEQ ID NO: 176417 - DNA, 157 bp, Glycine max
ttataataaagaagaaaaattttttttttagtgcctatgcatgggaatgatgaagatgttggatgtatgggtgaatttacaaaagaagaatttattaattaaaatatttattataataattattatagggatttggtggataataataattattttg

SEQ ID NO: 176418 - DNA, 167 bp, Glycine max
agcttatactatttccatgcactatgatatcatgaaacatgggaaccatcaatgcactgataatggataattaaatattctaagccatcccccaccaaaaatgcttaaagctctttaaccattctatttcccctactagggatattcaacttggtcactgcaccccc

SEQ ID NO: 176419 - DNA, 785 bp, Glycine max
  unsure (1)..(785): unsure at all n locations
cgggcaatgatgcatagcactgncacacccnctnggtaactaaacttcgcccttntggtcaaanctggctaaatgagcgaggcgagtctaataatatgcgggtgggatcaacatacggggaggaatgcctaacaaaaaaaccgcgccagcgcgaaaggtggaaaatctcaacgcaaccaagaggtaaacataattacactacagtcttgcctcacaacccccctggtggactaaaactaataccaaagcaacattggtgtaagtancctatacgagagcaacacttaatgcgcaaaactcctcaaataacacaaaattcaaggccgcttgtataaggtctaaggcaaaaaaccattcccaaggtcaagccaccaccagtactcccaggggggggacacaccacgacatgcaatccgagccttgaaggggcgatgaccccccgaaccccccagttgaagttagagggctacctcaggcggttttcaaaactccaccagggggggtagccggcgattcaaacaacccgtgctaaggggaacgaaagagaaaataccggttctacaaaaaaggggaacgagcgaagtgttcgaaggcccacgactcggaccgaaaaagctcactcaaaaaaaaaacctaggcttatagcaaacgaccactccgccggtctgaaaccattttcggaatagggagcggaggcgctggaaaagctgggaaaacctttatggggacgggtgcagacctagctcgccagcacagatcaaggggtccgagccagcgggcgcggt

SEQ ID NO: 176420 - DNA, 1017 bp, Glycine max
  unsure (1)..(1017): unsure at all n locations
cgcagtcgttgattatgaattagcanttagcnananancnatctnnaatataatgagaacatgacccgcgcagagggnactgtgcatgnagcgcatctgtacagagcgggaccgatgtttatatattttttttgtcggcgtcaagagacncgatctcaataggtcggtgtgggatgtttctttagtaacatacatactccaccaccnacgatctcgataatggaattatatacgcgtggttatatacacgacgtctctgtagatgtatctacatcgaaggtcggtaacactaatatactggtgatgatattgtcctgtgtcagcttaattatgtatgttagatgagtctacgagaatactatctgttcactgtaattttctctcaagcccttcactcaatatatcattctgaaggctcgtattttcattgtgtagtggcgacagcttcctgtagcgatttagtataatcatagcttctattttaagttatttatttgacaacaagaaatgacatttgtaataattattgtcaatagtgtactatgtgaacatatcatatcggtacaatgcagtatatgttgcttgtattctaagatgattaattgcaagtaatgatcatgtccatgatacggcattatgatcctactataggtagacatgatgatagatgacgtatgctgtagaatgttgattacatgagagacagtaacttagtatagtgctgaagcagttgatatacctttatcaatatcaggctagtcggttctgatttttcggtaatatgataaatcgttacgaactgtgtcatatatgaactcgactgataatgctaagtgcgtatcgtatattatgatttctgcacattattcgcaggatattcgtttagaagtagattaattaggaagatggattatctaatgagttgtctagggtcgagtacgttctataagtatagtcaaataccgattatatatacaggcatcagttgtcgagatggcatattgcactagtatatag

SEQ ID NO: 176421 - DNA, 171 bp, Glycine max
  unsure (1)..(171): unsure at all n locations
agcttaantgaaatctgatcgaatttaagggagtttttttctaccttggccagcataacggacgcagtgatccttacatgcaaaggttgggcactcaccgcttgataataggagcttagcattttaatagagatgcgccttccacgagggttgtgccttatcgaaatgact

SEQ ID NO: 176422 - DNA, 489 bp, Glycine max
ttatcctcagatccctcttgttggactaggcttaatttatactaccctcgtaggtttagactaacttaaactaagctttgtcgtcagatccctcttgttggactaggctcaacttaaatagcttacgaaagtttagactaatttaacctaagttttttcctcagatccctcttgttggactagacttagaccaaacaacattgttgtaacatcatatttaaaaccaaaacttaatccgcaaatccctcatttaagactaagtttcaatcctgcttctatcaagttctaaggcaacaatacatttcccaatgctaaagtcacctaacagtacacacaagtgggtgatcagaccaagagcatgcaatctttaagcattgaaaggagcattgaacacaataaacacaaccaattagatattaaagtgattacatcagctgttctttagaaatccccaacaagggtgtttagccaggcattacagaaaaaccc

SEQ ID NO: 176423 - DNA, 122 bp, Glycine max
aaaaaccctttatttcttaggtttatgaaagcatgcaaaaggacaaaaatgctataaatgagaagtttaagaaataaataaatgcatgatccctatgcgtatattattaatgctcaatggga

SEQ ID NO: 176424 - DNA, 886 bp, Glycine max
  unsure (1)..(886): unsure at all n locations
aggcctgtgtagaaatcgatgtannaacccctnngntaggaaaccaaccgcggggggaacgaanaggtgcgggggaggcggcaaacttttgtttctatttcgccggacccactaacaaggggggagcgggttatataaaaagaatcctcccgcacgataagcagaatgtgttataaaagcaagagaatagcaaaccgggtagagggcaacggaatggcaattccacctcacaaattatgctaacgagcgaacgtggaactatggctataactgactcaaagaagttaaacaaatgagtgaagaaggtgtggaggatagacaagagaggaaaaccaccagtgccaatggccactacacaccatcaacaaacgttcctttggataccttatactcaatcgttgttgtcgtcaacgcagtaacgtagaacaaatccaactcccacgttaagaaatcaaccatccgagcaacacgatcgacacacccctacatgtatcaacgtaacatatctataagagtagacgcaccacagcctccactcacaggacgcagcaccacggacgtcagcgggacgaaactaacgacaccgggcgtaagagccgcctgaccacaaagagcgacaggggcccttatccaaaaaagacctgagggaggactaagttagcatgttctgagaaacagatacacagggcaaacccactagatactatcctatcacgcacacacgaaaccgaccaagaactggcgaagagagcaaacacgtcaccgaaagcagcaacggacccacagcgaatcagacacgcgtcacacagaaataaagaaatctgcattttcacatgcccgagcaatgtaacgtattggtaaataccaaaagcgacgttccgacgct

SEQ ID NO: 176425 - DNA, 276 bp, Glycine max
  unsure (1)..(276): unsure at all n locations
tggttcgaggtacttacctgttgaagatcgaagaacgatgattaacgaatgaagaacgtcgaagaacggtcgaaaccttcgcgaaattcttcacggaaaatgttacggaaacgtttccgaagcgcctcggcttaaattttcttcacggaaacaatttttccaagcaaattcgaaagagagagaagtgcctaaggggctgaacccttttcttcttcacttcctcccctatttatagcaaaataggggaggtggttgncgcccagctcgcccattcga

SEQ ID NO: 176426 - DNA, 129 bp, Glycine max
tgcaggcatgcaagcttggcatgccatcaccattccgggctcatattcatcccttaacatgacttataccaccatcaagggaggcaccagataaacgtgggtgcaccagaagagccttaacataaacat

SEQ ID NO: 176427 - DNA, 392 bp, Glycine max
tgaaattgaacaacagaagctcttgagaaactcaaatgttcatatacttgtcacacggaagtccgatgcaggcgcataatatattgagatgctcgaaattgaacaacgaatgctctcccgaaattcaaatggccataacttgtcacacagaagtccgattcaagtgcataatatatcgagacactcgaaattggacaaccaaagctcttgataaattcaaatggtcataacttttcaaacggaagtctgattcagccacataatatatcgagaagcttgaaattgaacaacggaagctctcgggaaacaaaaatggtcataacttatcacacggacgttcgatttaggcgcataaaatatggagacgcttgaaattgaacagcgaatgctct

SEQ ID NO: 176428 - DNA, 176 bp, Glycine max
agcttaagagcctacttttgtggcaaaacaatatagttggaacaatcccataagagcttggaagctgcatagagatcaaagtcctagacttatcagaaaaccttctcacaagtagcataccaaggagctttggcaacatttcaaatatccaggagcttcaactaagtgtcaataag

SEQ ID NO: 176429 - DNA, 478 bp, Glycine max
tcctcaatttttatggattgatgctcttaagatggttgcgtatatattaaactgagttccaaccaaggcaatctcaaagacaccttttgagttattcaagggttggaaaccaagttgtgacctatacgcgtttggggatgcccgtctaaagtaagaatttatatccacaagagaagaaactagaccttaggactattactgggtatttcattggatatgctaaaaggtctaaagggtataggttttattgtccatcccacaacactaggattgtggaatcagggaatgcaaagtttcttgaaaatgatttgatcagtgggagtaatcaatttcagaacatttcttctaaaagggatcactatgaagctgaaccttctgggacaagtaataggttggtagtcattcccacccctcaaggtaaaatgggtgttagacaactagtgattgaagttccacacgctgctgaaagtgatcatgt

SEQ ID NO: 176430 - DNA, 172 bp, Glycine max
catgcaagcttcccactgcagcagttaagtgaacaaatgatgtgtccacagtcagtggatgattgcttggtagaagtacatgctaataactaataagatttcttgtgtagggtatcattgtttttgcatcaatgatggctaccttggggctggagattttgattgaatttgc

SEQ ID NO: 176431 - DNA, 617 bp, Glycine max
  unsure (1)..(617): unsure at all n locations
aaggatttgagtttgagagctacatattgtattttttgttatagnaccaaacgatcctaatggctcatgatttagctaaaacatctaaataaacccgagtatgtctttataaataaattaaaaagttattgaataaaattactctatcataatctcctctcacacattttctaacataaactacatcagtatatttaaaggtaattattaattataaattactaacgcactttgacaaaaaaaaaaaagaagaaagaatttaatgtacactaacaaattctactggctttttgttaacgcatatttactgtttctatggttggaaaacataagatataggaacacattttcattacaaacttctcattaacagttcaacacccatttttttttatatctctatttttattatattataatacctatcatatttacatttgtctctcttgtatctttttatctctctagatatccaacgttcattaaactttttttataaagcaaaatgtacccttaataaaaataattatattgagactttttctatattcttaagaataattaaaatgggtttaggttatgataaatctcttagatggatataataatctgctaaa

SEQ ID NO: 176432 - DNA, 306 bp, Glycine max
tagaaactaagcttgtgctaaaaaaaactgatgttgaatttcaaacatcggtttgcgcgcggatccgctaagcaagcctattgagaaacaagcgctctctggcttgcttagcgagaggtccactagcaagagtgtcgaaaactgcttaagtgagtgtaatggcagcacactcacaattccagatttgaaacttcgcctgtgattctctctcccaaaatttacacatgttgcatattgctttctttttacattataacttcatgcaataaccattcagcatccaggtaagttccttggttccttttc

SEQ ID NO: 176433 - DNA, 172 bp, Glycine max
agctttaaaaactaattacttcttgtacacacgtacaagaagtaactagcttttggtttatttttcgtatctctaccatcaaaggaatcttcaagctatgaaaaaatctaaaagacaataaccaattattttatgcattttgaaaatggcagagcactatgataacagtgga

SEQ ID NO: 176434 - DNA, 538 bp, Glycine max
ttgacttgagtcatcaagagattataaatatgtgaccatggtatgagtttcaataatcatcaatcatctttgaatcatctatctttctatcttttttcaacatcatctctaaaacatctttcaatcaatctttctacacaattttctaattcatttctctttatctttctaaaagttttttatcaacactttctctttcaagaaaagttctttgttcaaaaacttgtgttattcagctttttcattctcttctcccgttgccaaaagaacgaaggactaaccgcctaaattcttttgtgtctctcttctcccttacaaaagattcaaaggactaaccgcctgagaattcttttgattcttcccttccccttaagcaaaagatttcaaaggactaactgcctgagatatcttttgtttccccttacaaagattcaaaggactaaccgcttgagaattctttgtcccaacacatcggagggtacatcctttgtggtacaagtaaagggtacctctacttggcgattgttatactgagaac

SEQ ID NO: 176435 - DNA, 170 bp, Glycine max
catgcacagctgaaattgaacaacggaagctctcgatatattcatatgggtccaacttaccacacggaagcgcgaatcaagcgcataatatatcgagacgctcgaaattgaacaacgaaagcctctcgagaaactcaaatgggcataacttttcaaacggaagaatgatt

SEQ ID NO: 176436 - DNA, 661 bp, Glycine max
  unsure (1)..(661): unsure at all n locations
tcgtccatagatccatcttgtaaggctaggcttaagtttaacagcattatcatcacagcatattcagaaaaccaaaaccccaacaatccatccctggtaatatggttattcagtcctgcttctgtcataccttaatttcgtgcgggaactattgcttgatggcatgcaaccttttgattggccgcttcaaggtacttggcacccgttgttgcacaatatgtgaagtcccgagacatgccagaaatcaaaaggaagcgttgttacgcagtccgtgaaattctgtaacgtgacggaaatcaaaaggaagtattgttacgcaatccgtgagtttccgtaactcttcgaaagctaaaaaaggagtaattatgtgatccctaaggtttcgtagccttacgaaaagaaaacaagtatcgttacgaaatttgtaaagtttcgtaacgttacgaaaaaagaatcaccaaaaaaagcaaaggggtgtatttagtaaaaaagggggtgcaaacagtaaccaggcccacttgtgccttccagattctttctccagaaagcgattgcttctggaggaagcaacctgactccgctgggcgagctcggtggcaagcttctcccctaatttgctattaataaggggaggagtgaagacngaaagggtcagccttct

SEQ ID NO: 176437 - DNA, 799 bp, Glycine max
  unsure (1)..(799): unsure at all n locations
ggtgcacgcgcgcgccaaggccgganagtannacccctcgtgtggcgggcgcgcggcgcggttttcgtcttntnccgncgccgcancncgcgcgccgggcgggcggcggcgtgggcgcgggggtgggccccccgcggcgcgcggggcggaaaaatcgcgccccggccgcgccggcgccgcctccccgcggcgcgccgggccgcggcgggcgggctactccgnnngcgcggggngcggncgggggggggcgcgcnggggggggggggggggggggcggggcggcnccccggggggggnncggggggggggggccgnccncgggggggggggggggggggnnggggcngcgggggggggggcnncgggggcggggggccggggggggcgggggcggggcccggggggggggggngcgggngngggggggncggggggggggggggggggggggggncggggnnccggcgggggggggggggggggcgnnnncgggcgggggggggggccggcggggncgngcgggcggggggggccgcgggcggnnncgggggggggggcggggggcggcggggcgcgggggggggggcgcggggggnggggggggggggggcnggggcgggcgcgnncgggggcgcgggggggccggcgggggcgncgggggcgggncgcgcggggggcgggggggcggncggggggggggggggcgggcgcgcggggnctggggcggcgcggggncgcggggggcggggggcgncngcgcggggcgggggggcgncggggggggggggcgggggcgggt

SEQ ID NO: 176438 - DNA, 911 bp, Glycine max
  unsure (1)..(911): unsure at all n locations
caccaggacaccggcggacgcagaagnactctacaagaccgtagnagtgccaaacaaactgaggaaccagcgaccatccaactacacnnnccacaccnnnnnagcgggttgatgcctgcatgacccaaccnttnaataaaanaccccgcccgcgaaaaanagaccactgaaacgacagcggacttttcatttgcctgagcgccaaacaccggcgggcgggggcggaccacaaagagaaaccacaccggtacgaacccaaaatacataccagccaacaagaaggaaccaccgcccacacgccaaggaacacaccccaacaaaaacaagcgcccacccagaacaaccacaggaaacaacgccggagaagaccaccaccatacaagacttcaggtgcaatacccgacacgcgacactccaagtgacgaaccccaccaaagcaaggtgacacacagaaaagccggacaccgagagaaccacaccgcgaaaccccttaacaaaagcacccacaacggaaatcagccgcacaagaaacactcaaagggccgagaaactcaccaaacccccgagaaaaaggggacccaagacacccacacatacagagccccaacaccgccaagcgaacgagaccaaccaacgaaccgcacgacaaaaccaaaacccactcaacagacaaccgacaacaccaaaccaatgcacccaaccaacgagcctcaccgactccgagcgcataacagaccacacaaccgacgccgaaccaacaatacatgaacacaaaaaacaccagccccaccagtcaaaaaggcaacaaccggaccccaccaggaaacaaaaacacacacaaatgccacaagcagcactacaaccgggcgaccgaatagatgctacggccacgtagataaaaacgccacacg

SEQ ID NO: 176439 - DNA, 168 bp, Glycine max
agcttccttagcaacatgcttttccttatgtcttcagaccaattttctctaaagtatcacaaagttatgaaatgttacacaattagcaaaatacaaattttacaatttcatatcaaataaaacaaaatcagcattactatccatttcaaccattgaactaaattcatt

SEQ ID NO: 176440 - DNA, 910 bp, Glycine max
  unsure (1)..(910): unsure at all n locations
cgcatgatgcatgcatgacaanncncatagtaaagaaaacccacgctcgctgcacaaaaaagggaagccgagaaggcaaattttttttttatcgcgcggagccgctaaacagggggggtttgaaaaaaaaaaaagccctcttaacgcatggttatcagtaatggatctctgtattacgatgtgtagaataactgtctaagcggatgtttaaatggaaaacttcacttcacaatgtaaccacaattaaggaaaaattctagctactggatttggtatatcgttcatgaaatgcaacaccatttgcgtaataggggactattttttttacattattcaacttccattgcgataaacccctctacatcccgtttcaggaccctggggtagtttacctctatttcatgcgggaagactttctgttggcacaaaacacattgtgctgccatgggtatcaaaccacacgaaagactcatcgagacctattcctactgcttagctgaccaacaccatattccattcatctcattacaagaatcttacgcaatccaggttagatcccataagatttaactacttataagctacattacaaaatcaatcgcccaccgcctcacacgacgtcaccgcatgcaatgatcgaatgagctgctacactcgctaactcgtacgtacatactaatattacaacaagtgattactgacatgatatcaagttatcacctgatttgtctctccacctcccntccgaacacggcattcactctcctctatcttacctcatatccttaccaccacataatacatattctcgcaacatanacgatcattacaacacggaaagaaatattgtaggagtaacacatcgacctgactgactacttactactcactcaccgctcaactttcaccc

SEQ ID NO: 176441 - DNA, 163 bp, Glycine max
  unsure (1)..(163): unsure at all n locations
agcttgaaacttgcagaaacacactanataaataggggtgaatagtgtgtgtatcaaaaataaaaccttttcgtaataacatggatagtatggataatatagagataagcactggtgatccatgagagtagatagattgtgtaataaagaaaagagtgatcat

SEQ ID NO: 176442 - DNA, 819 bp, Glycine max
  unsure (1)..(819): unsure at all n locations
ngagcagagtgtttgattcacnnncnatagtanaaanacnacgcgggncnccanaaanccttcttgcccgccaggccctattattttttttatcagaacaagaaggagagggatttaaatactaaaaacccctccctggcaatatggatatttatnctggtttttggcctccttaatttcttgcggcaaatattgattgatgtgatgtaatcttttgaatggatgctatatagtaataggcaaccgttgttgaacaatttgtgtagtactcgagaaatgcctgaaattaaaacgaatctgtgttatgcaatacaagaaaatttgtttcgtggctgatattataacgaagttatggataacatatccgtaaaattcgaaactttttgaaaggttaaaaaagaataaatattttatcctatgggttggtaacctttcaaaaagaatcaagatctgaactataatttaatattagaactttactaataataatattattatagtaaatgggtgtatttattaaaaaaggggtggaaatggattaaggtcaattttggcttataaaattttcttccaaaagagattgtttttggtgaaataacattgaatctttgggtaacttagggggaaatatcttccttttttttgtatacaagtgggtgggtgtggaaatagaaggtataactttcttatgacactctatacatatgtaaacttattaacaataaacgttcttcgaaaaaaataagtaacaagtagtatttcataatgatttctattgtgttgagactaaatataatttataactacatcagtactctt

SEQ ID NO: 176443 - DNA, 589 bp, Glycine max
  unsure (1)..(589): unsure at all n locations
gaatacccaagcttgtacttttgaacacttgcttatcttatccagagctttcagtttctaaactaagtgcttttaaactatttgcataacttttgttgattttgttacttatggtgtgtgtcaggtatttgtgttccattccttgtttagttatgatgcattttttgatgatactcaagtcatgtgtaacttttgaacatctacctagcccttgactggagatatctttcaagcatgcttttgatcatacaaaacttttcatttctattgcactttgatatgggaaaagcaagattttcctttcatgattctagctagtaaactctattctagtagtcctacttctattgtggctgatcctatgtctggaaggttgacatacttcaagttgattcttcgtacctttcttgatgcttattgatcaagtcctatatcataaacacatcattaaaagagaccattagcaaccaaagcttgataacttaaaaattaactcttataaagtaattattaataaagctcaagcattanaaggagttattcttcaaagatttcaatatcatcatattagttcttgtatttttttttc

SEQ ID NO: 176444 - DNA, 163 bp, Glycine max
agcttaccaccataggaagccatggataagagcttgatggtaggagaagatgaatgaagggagaagagcacgaaattttgtgcctcaaatgaagtctgtactttgaagtataattttcaaatgaatcaaagttacaacaagggtttcacatgcttctatttat

SEQ ID NO: 176445 - DNA, 554 bp, Glycine max
  unsure (1)..(554): unsure at all n locations
ttataaattcttgctcacttgatacactccatggatgaacagtttggacttttgccgaataaagagtggtggaatttgcaggaggattttgcttgtagatcattgtatcaagaacggtgtcaaaattctgaggagaatctagggagacaaagaacataggaattgcaaccttctgatggatttctaggtcgcccacaaggttaacaagctcaacaaaatcactgataaggcgctgaggaacatagaacacctcagaactgcatattaggaggtttttatcgttgtcgcttggttctttgtaactgacttgaaagtgcgctggcatcgtgctaacaaccttctgtaccattcttgcttgttgtgataaccaatctgagtcctcaccatttgttaatatagaagaccaagactcggatacctgaattcccagtaatgtgtaaattgtcagagaaaagagctatacgaccttctaagagctatatgaccttttaagagttaaagctatgctgtanaatattttcagtgacattgtcctgaatgattgaatatgatct

SEQ ID NO: 176446 - DNA, 595 bp, Glycine max
tgtaactcttggcaatttgtttaaaactagtcacttatttatgttatgacttttgaaataatcttcagaaaaaagtcacttgaagaattatgacttttggaaatgtatttttcgaaatcagtcactggtaatcgattaccattaaggtgtagccgattacacatcaacagatgtgactcttcattttgaattttgaaaatcttaacgttttaaaatactggtaattgattacatgattatggtaattgattacaactttgtaaatcagtttgaaaaacaatgctggctactggtaatcgattactacctttggtaaaagattttgtgaaaacttcatgtgctactcaatgttttgaaaaactttttagtacttatcttgattgagtcttctcttgattcttgaatcttgagtcttgaatcttgatcttgattcttgaatcttgagtcttgaatcttgatcttgattcttgaatcttgaaacttgaaacttgattcttgaatcttgaatcttgaaacttgaaacttgattcttgaatctttgcttgaaactttgcttaactcttgattctttgaatcatcaaaataaccttggaag

SEQ ID NO: 176447 - DNA, 177 bp, Glycine max
ctgcaagcttgaaggtgcctaccccaccattggttcataaataatcactgggaatgtggctactattacaggatcatctttttctccgcccttatgggtgccatatgggctggccaggtctctccccctttgggcatattctttgaaagaattctgccccctcttgcatatgctctg

SEQ ID NO: 176448 - DNA, 531 bp, Glycine max
ttataagcgcaggtctggaagacaaaggtcaagtggtcgcattatgcgaagatgatgttccgagtacattggatttggtacgaccatgccctcctgatttctagctgggaaattggccagtggaggaacgcctcggcatttatgcaacgagcataatgtaaacctttacggttttaaaagctctatagttgggcctaggctttagagtttttccttttgttaaggctttgtgtcttttgtttttgaatttataatacaaggatctttcttcatctgttcctacgtctctacccattctcattcatttgcatgtttacttctttttctgaaacggcagatccgatgacgagtcccccgaaggtactaatacctgggacccgcctatcgacttcgagcaagaaatgagtcatacggaagatgaaagaaatgaggatgtgggacttcccccagattagaaagaatggtcggccatgacgaccaagaaatgggacctcatcaagaagaaacagagcttgtagacttaggaattgg

SEQ ID NO: 176449 - DNA, 179 bp, Glycine max
gcatgcaagctttggaggcattacctttatggaactaaatttaagggggttaatgaccataagagccttagatatatgtttgatcaaagagagcttaacatgaggcagaggagatggttagaggtccttaaggattacgaattttagcttaactatcacccaggtaaagccaatgtagt

SEQ ID NO: 176450 - DNA, 609 bp, Glycine max
tgaaggacatgcacaaagtgtgactatatgatgtggcaatggtgtgtattaagcaaatgctcacctcccctctaaaatttaattggattgggcttctaccaattcaattaaatttatttcccaccatacacatcaaatattcacttagtgcgtgtgaaattacaaaactacccctaatacaaaaactagtcttggtgccctaaaatacaaggactgaaaaatcccatatttctagggtaccctacctacattatggagccctaaatacaaggaccaaaattaatgaaaccttaatctaatatgtacaaagataagtgggctcatacttagcccttgggcccgaaatctatcctaaggctcatgagaaccctagggccttctcttgcatctttggcccaatcttcttggaatcttctatccaatgcccttgcggggtaggattgcatcactaatgtacccaaccctagggtattttatgaataagagcctaagagaaacctacctttagcccaaactagaaaaactattattgcatgccttccgaaattcatgcataagctaacatggtaaacacacgaaaaaatcgagtcaacgagagacacaactttg

SEQ ID NO: 176451 - DNA, 178 bp, Glycine max
catgcaagcttgctcatgcgtttggagctgaattcctgtatagaggcgccccacggattcgaatgcgaccttggagacggcgtcggagcggtcgagcatgttggagccgacgcgggcccaccaggcaaagacgcggtcgaggaggttgacgttgttttcgcagagggtaacgagatcg

SEQ ID NO: 176452 - DNA, 641 bp, Glycine max
aaaatttgaattaaaacgttcagaaactgctggtaatcgattactatatatgtgtaatcgattacacagtgcaaattttgaattcaaattttaatagctgttgtaaatcaattttggcccctggtaatcgattacatcctctggtaatcgattaccagagagtaaatttgttgaaaaagactttttaacttaaatttcttggccaaactttttgctacttcaattggatttcccttcctatttaatataccctttctaagactctagagactgtcttgatcatccatcttgaatatctttaatttctttgtcttgaataaagctttgagacgcatgtgaaactttggcatcatcaaaacattcagcttgatcctttttctacataggaaaaccttcttttcctgagggtcaggtatgaaatttattgcttcaaacaaaagattctgctcttttgtcaaagtggtgacctcttggatctcatcatctttcgaagatgatacctgatcatcttgctagaatttggttgctggttgacggttatccagttttttgtacttgaaaatccttttaagaacatatttggtcttttgaacttctttatggggggtgattttttttttctttggacagatgacaattta

SEQ ID NO: 176453 - DNA, 182 bp, Glycine max
tgcaggcacgcaagcttggaaggatgcttcaatggaggaaaagaatgagggtgtagaaagaaagaggggggagcacgaaattgaaggaataaaagagggagagaagtggaactttgaagtatgtctcacaagactctcaatcatcaaagttacaaccagtgttacacatgcttctatttata

SEQ ID NO: 176454 - DNA, 154 bp, Glycine max
  unsure (1)..(154): unsure at all n locations
agctttattaagcatatacttgagtttcnnttcctaaacatattcttacttgagcgtcagagtcctttgttttgaaagtcccctctctttcaaaagtacccctccaagccaacgcgctaagtttgggaccccactcaaccatgtccaccttgat

SEQ ID NO: 176455 - DNA, 1106 bp, Glycine max
  unsure (1)..(1106): unsure at all n locations
gggctgacacgacgtngttgattgcatgcatcgncacaccncntnaggtatcaaacttcagcaccctactacacagaaatctaggtaatacgagaccctcttttttttttattacaaggttgagacggcggggtggttttgtgttgataaattacccaaccttcactcatatgcttggaaaatagactattggatggatctcacggcgtcctttaagcgggggggcactcctgcaacatcttaccgggagtcaaataatgcgacttatacgcatggtgcgccgaaggtcttacatccatatctaaacaacttcctcgtgtaaagatgacctttcgacgctccattattgtctgttacgtaatattattcaaccactaacgggaagccttctcttgcgatatagtctacctgacgggcatctatgcgcatctactgcaatacacatcctgctattggtctcacctacttcgttctcatagagaacacgcagagaagctcggggtgattgaagtcccgtctcagaaagaggttcacaacatacttgttgcggccgtcggtgcactatccgtatcttctcgtatctcactagaaatcgacgtacagactcggcgatatatcgtcaccgcactagcgtacgtatgtatgggactcttccacccgacgtaccttgctagacataatgggtgcgcgacctaggaagaacgtctgtaaactggggactgctccgtgaacgtaatataaaactattagacctgggttgcacatctatgatactcttcgcatgctggtaactattggatacattgtcaagtatactgtcatctgtctgtctacatcgaagcctcatctctctcatgggagtcgcaaagatgctctcgcgtaatcgtatcttacccgcgctatgcttctcgcttgcgacantaaacataactgtaacctcggccgtcgtagtcccgtgagtatgganaacacgtcctgtcttcttcctgaattctctntgattgttctcgctgtggtatctacgtcaacgtcgaaatcgcgtatatactccaaacgttcctctgctatatcacactagtaatcgctatgtcttcctgttctcttcg

SEQ ID NO: 176456 - DNA, 171 bp, Glycine max
agcttcaggctgctcaattgctccaggttgtttcatggaagggcaaaagtctgtatggtggtcagcataggagcacaaaccacaaacccttgcgataggtacatatttctgattcaaggccagctgggttaccaagttaaccaatgcatccagtttgccttcaagcttctt

SEQ ID NO: 176457 - DNA, 756 bp, Glycine max
  unsure (1)..(756): unsure at all n locations
aggagctgtganttatggttgacatgcagaaacntcnnnattgggccnccnncccgggagatgttatttagtgagggaggggtttcttgtctttttcacataataacaaggggccggggggtttttatattaaaaaccctctccttatgaagaatattccaatgaaatgtaggttaagaggtccaggtaggtaaggagatggaagaaaaagaacggactcgtgatcatgatcttcgtttaaataacgttagactagactgtttgaaacaaactggagtgtggttatccggagcgaacggtcagctatggactagtagattcatgattataggaagaaattggcactggttgttgcaatatggatacttatatgtcacgtgtgaccagaaatataattggatttaagcctagtttggcgaaaaaagagggcggtagagaattaaaccttggttacggggtatggaatcattcgaatgcgagcttactagtaaactctgtgattactaggtgagtaaaatttgtctatccgatatggttcatgtggaacctcttagggtatgattagcagatctcttcattatgatatatctgatgagatattagacgagattatattaactgtaatgtttatgatttacataatcaatactcggatataattgtaatctggtctgatattacagctgatggacataaataaatgtatagaattatatgcgcaacggagtaaccggatgatacattgttaaatgttag

SEQ ID NO: 176458 - DNA, 173 bp, Glycine max
agcttgacaagccggtctctttaactaacaatattatataataactttattttatcaaatcttatcttatacagattttatttcgtccagattttatttcatccaatcttatcttattttgcccagattttattttatttcgtttatgggcttggacttaaaatagatttgta

SEQ ID NO: 176459 - DNA, 607 bp, Glycine max
taaagtaaaaattgagagaaaccatttttactttaaataaatatgtgatatgtgaggttttatagacatcaagtatgatcttttttagtttaaaaaactaataacaaatattgatagggctaaagctattttatttttggaccgatcatgcactcactcgtaaccagtaaggttttcttcaccaaatcttgtaaagaggaccatgaagtccatgacctcaaaggtcttgagggaaattatattggagttttgaggatacctaagttgttgtaaaataaacgtaacttacaaaattacgggagatgactgcgcacacttttttttattgaatgataatctatttaaatacaaatttattgtacagaaagaaacaatgattacttattttctaaataataaccaatcactaacataaccgctagtaggtaatagaaaataaaacaaataatcctaaagaccttgtccaacgatttatagaaaataacaaactaacagacaactgctgatacacgttcaacactcctcctagtagctcaagatttactgtagttgaatctatggctatcttaatgctctctttttcaacacacaatgactttgctttaat

SEQ ID NO: 176460 - DNA, 362 bp, Glycine max
tgagcaaattcaaacgacaataacttttgactcgaatgtcctattgtgttccgtaggatatcgagacactagtaattgaaaacggaagctctgagaaaaatcaaatgacaataacatttaactcggatgtccgattgagccctgtaatatatcgagacgctcgaaatttaaaacggaagctctaagaaaagtcaaacgacaataacttttaactcggatgtccgattgagtcccgtaagatatcgagacgctcgtaattgaaaacggaagctctgagaaaaatcaaacgacaataacttttaactcgaatgtccgattgagccttgtaatatatctagacgctcgtaatttaaaacggaagc

SEQ ID NO: 176461 - DNA, 777 bp, Glycine max
  unsure (1)..(777): unsure at all n locations
aaagcgcgtggggacccccccaagattttacaaaatgaagcagtgttttttttttttggtaaaggggcgtcagggggggtattaagggggggtttgatattaaaaccttcccgattgtattcaaattagagatccgggttttagttttacccaagaacctatgagttcttttaaggacgaactcgttgtctgcnnngggggggggggnggtnggggnnttntnggggtggggttgggggggtggggtggnngtgggggggtgggtggggggggggtggggggggggnntgggggtggggggaggggnagggggagttntttnttggggttgtggggggtgnntaggtggtggggggggtggggggggtgggggggggtgaggggttttgggggntggggggaagggtggggggggggatgggggaagaggggggggggggggggngaaggggggggggggtgggnntggggggtgggggggggggggggggtgnnnnnttgggtggggggggggtnnngngggggggggggggggaaatgggggggggggggtgtgggtggggggtaatggggagaggggggagtggggggtggtggggggaagagggggagtgggggtggggggggtgggggggggggggggnttgggggtgggggggggggtgnttnntgggtggtggtggggggggganantgagattggggggggggaggtggttgtgtggggaagaggggggggggtgggnnnctgccgggggggtgggtgggggggnagtg

SEQ ID NO: 176462 - DNA, 643 bp, Glycine max
  unsure (1)..(643): unsure at all n locations
gctctaaatttacattgatgtttgtattgatgggaggaggttacatgccatttttgctttaagagtaacgtcccactggtaaaactaactttccaaatgtttgccttcgcaggaatggccccgaggaagcttgcctcaaagaggtccaggaaggacaaggcggctgaaggaactagttccgccccggagtacgacagtcaccgctttaggagcgttttacaccagcagcgcttcgaagccatcaagggatggtcgtttctccgggagcgacgcgtccagctcagggacgacgagtatactgattttcaggaggaaatagggcgccggcggtgggcaccactggttactcctatggccaagtttgatccagaaatagtccttgaattttatgccaatgcttggccaacagaggagggcgtgcgtgacatgagatcctgngttaggggtcagtggatcccgttcgatgccgacgctatcagccagctcctgggatatccgatggtgttggaagagggccaggaatgcgagtatggccagaggaggaaccggtctgatggattcgatgaggaggccatcgcccagctgctatgtatanccgggcaggattttcccggactgctgcatggaggcgagtgcgaatcat

SEQ ID NO: 176463 - DNA, 178 bp, Glycine max
atgcaagcttcagttttcaactacgagcgtctcgatatattacgggactctatcagatatccgaattgaaaggttttggcatttgacttttcatagagcttctgttttcaatttcgagcgtctcgatatattaaagggctcaatcagacattcgaattaaaagttattgtcgtttgat

SEQ ID NO: 176464 - DNA, 524 bp, Glycine max
cttctacttatgtggcagggcgggcttccttcaccttcttgtcttcaacgcgaactttgaccattgttcttccttcccgcgatgcttcttttcatgtccgcctgagtgggcttatagcctaaaccatacttcccacgatttccttgggtatttatcaggctagttatgccgccgttgttttttcctaaacccatcccgggttcataaccgttccccaacataactcgggccatcattaccgctgcatcggacagacaaggctgcccaaagagggagtccacggaggaaatgctgaccacctcaaaagactggaaagcagtttctaacgattcttctgcggcttccacataaggcatggaggatgggcagcttaccaagatatcttcctcgcctgacacgatgaccaagtgcccctccactacgaatttcagcttttggtggagtgtagaaggcacaactcccactgagtggatccacgggcgccccaacaggcagctgtaggggggggtaatatccattatttg

SEQ ID NO: 176465 - DNA, 174 bp, Glycine max
gcttcagaactttactactgctattttttttttcgatcgctaaacaaatatatttattaataaaagggcacgagaaattcatacaccataatttcagtgggcgcacgcacaccataaacataaaatgatgagtgtacgttttaattatcaagcaaattataatataatagtaag

SEQ ID NO: 176466 - DNA, 610 bp, Glycine max
  unsure (1)..(610): unsure at all n locations
ctttaaagctctcttctattaagctctcgcagccaaccaaagcttcaattgtgacccaacatggcacaacttaacctcacattgctagccattttcctctctctcctcttttcaattctggccaccccggctagttgaaccgtcaaggcacaagaattctcaaacaatgacctgttggaattttaagggatccttataaaatattaataaccactatgaacacattacattatattatcaagaagagttttaggaatatctgaatacataatgattggtcaaacaaacgcaacgaaatttgaatttgtaggtgatttctgatctatgtgttttttttaagatctgttacgaaatattgtagagataatgaataaccgactaacagcgtaatcggggacttcatgattcttcctcaaccaaattttttttatttctctttagatgaggaaaagagaaactatgtgtgtgacgaactcgtatattggggaccataacattctcatagcgtgttaacataggtttctcattatcccctaatggncaacactgacattngttcagttaaatctatattatctaatttatttggctaacaaacttactttaattg

SEQ ID NO: 176467 - DNA, 179 bp, Glycine max
catgcaagcttctaaactttatacaagaatgaagctctgataccacttgttggacaagtggcctcagatatcttaagaagggggggttgaattaagatataacagactattccccaattaaaaattctacttttaatttaacccaacaacctatgattccttttaaacaagaactccaa

SEQ ID NO: 176468 - DNA, 416 bp, Glycine max
gcttagtgaagtggttgtgaggtttatttccagcattcatttcttgtatgcacactttcaacataatctgagtatttttataacaccattctgctttctttctttttacaagaacttgaccgagagacatttgacaagcttaacgaaacaaacgacagcgttccaaggaggaagaaaatgtgaccaaggaagaagaaaaagaatgacgaagaaaaaaacctgtgatgctaacaaaggaagaacaaaaaatgacgaatgatgatcggaagagatgaccaaggatgatcggaagagatgaccaaggagatcggaagcatgggagaaaaatttcgaggaaggcacagcaacggtcgttctcacgaacgagagacaaatttagggttcagaaaaatgacgagggtttgcttgcattttga

SEQ ID NO: 176469 - DNA, 169 bp, Glycine max
gcttggttggctttaccagatttatattataaaaattaattttataggtttattgaaaattaatcatattttattttttaatttattttttataactcttttattagcttctactatatatagagagagagtaaattatactagaatgagagttgaataatatgttact

SEQ ID NO: 176470 - DNA, 580 bp, Glycine max
taatgaccttgttcatgttcgttacaacttgaggttacaacttatgtattactatattgattatgctttgattgtttacttattttgcttggatttttttttattgatgatatataaccattttgatcaatttttctttgaaaacccttgatgaccattctaattgggtggtggaggagtctccaccattcttaacttgtgaagaggtggaggctttacgtaatgatcttgctaacatgcccatccaatcaactttagacgatattaatatgtgtctttataacattagtatttataaggtaccacttatgtacttatattaattgctaatttgcatctacaatgatgttgccacagataaattaaatctggatgaagatgacgatgatgatgtgccacaaccactacatcacactatggaagatgttaatccaaatgaaagcaatattggtgaagagcctccttcttttgatggagaaagattacttgaagttgactcaatattggctccttggatataattatggatggtgtcatatttaagctatttgtgtctctttatttatggacttatgttatt

SEQ ID NO: 176471 - DNA, 179 bp, Glycine max
agcttatttgaaaagctttcttgaagaagcctagatcttatctacacacacccctttaataactaagggcacctccttgagaagcttccttgagaagattcctagagaagctagagcttagctacacacacctctctaatagctaggctcacctccttgagatgagaagctagagctta

SEQ ID NO: 176472 - DNA, 599 bp, Glycine max
  unsure (1)..(599): unsure at all n locations
taagctctttcttaagctttttctacaaccttttctccccctttggcttcatttaaaagccaaatatgacaatggagtaaaaaatatatataaatatcaaagtataaaacacaagaagccaaactcacaaagaagaaataatcaaaccagaatccaaataactgaaaatgtcaacaaccacaaaacatccaagactgaaatttaaaaccacaagataaataagcaaagtacttagcataataatgtaaattctaagaaactaaaagccaaaatacacggcttataaaagataaataatcagaaactaaaatctaagaagacggaggtggtggtggaagatcgaaactctgacgaatgtatccgacatcctcttcaatctgtgtaagacgaatgtccatactggcaaagcgtgaatctaacgagtcgaaacggtcaccaacataagaacgaagaccccgtaattcggagaggacttcattcatgagtgcggaatcttcacgttgagggggaggtgaatgagtacgtccatcttgaggagggagtgcatncttcttcagccattgtccattccgatctttactatagccaaaggaggccac

SEQ ID NO: 176473 - DNA, 172 bp, Glycine max
agcttatactctgcttccccttttctttaacatttgcttcttgcactttctggaaactcttcgaattttttgaagcttcaaatgctttagcagtcgacttgtcaaacacgacgttacaacaaagacaaagcataacctctttctcaactttttgtttcttcaatagaaattc

SEQ ID NO: 176474 - DNA, 533 bp, Glycine max
  unsure (1)..(533): unsure at all n locations
attagtgtaccatacaactgcagctccagccaagctatcttgtaaaaaagtgtatgaacaactttgcatccctagagtgtgcccccatcttgcgacaatacatcttgagatggttcttaggacaagtcgtccctttatacttgtcaaaatcaagcactttgaattttggggggatgacaacatccggtaccaagcaaagatctgtcatgtccacgaatggatagtcaccaaatccttcaacagctctcaatctctcctcgaggagatcgagtttccttctttcttcggccgccgggggtggtccttctatggacaagaatattggttgtgctgtgaggttgggctgaggcaacgtgttgggcaccggcccctcgacgaggatcggagggtagaaatcgacatccncttgggcatactctcgatgatcttcatggaccgcgtttaggggaggatggtgcgcggtagctaggatagatgggtctgcttcggcaccccaactaacagcggcagcggtggccgtgttattctccatg

SEQ ID NO: 176475 - DNA, 167 bp, Glycine max
agcttatcaacacttttatatataacaattactggatttggtttatgttgatgaaggtatatggtagcatatacttcagatcatctttcttcaagtgagtttgaaccccaaccgtaagaaaggcagtaaggcacatgttgtgagtctagaccactcacaagtatttt

SEQ ID NO: 176476 - DNA, 439 bp, Glycine max
tggcaagtttgtattgtacaaatggtcccagagtgccccttttattatgtactcataaaccagtatattctcgaaccttttattgcaaggtgcctgtgacgaatcttatacaaaatcatgatctctctctgaaattctggaaggccttgacctgacctgttaagaattattgattaaatttattatttattatattataaccaggtaagaactaagatcattattaatatatatatatatatatatatttagatatattgatatcttaaagattggacgaaccataactcccatatatgaaatgataagaggttggtgagataaatggagattttaagatgtgtattaaaacattgtactaaaaaagaataaccgaataacagagtactcggggactttaagattatttctcatgcgaattttttttatttctctttta

SEQ ID NO: 176477 - DNA, 175 bp, Glycine max
ggcatgcaagcttcttctcaacaggatgataaaacctatatttctattcattctcaccatagccaatgaagatacactgccttgactttgcatccaacttggatctcttatcctttggaacatgcacaaaagccttgcagtcaaaaactcttaagtgactatacttcacattctt

SEQ ID NO: 176478 - DNA, 627 bp, Glycine max
  unsure (1)..(627): unsure at all n locations
tgcattcgatagtggagctcatccaatggagttattaatgctaagaaaattcaggttttaaagaaggagctgaatgctttggaggctggtatctctgacagaattctgaatcaatttgaagtggagctcaagaagtctcttcaggagcaattgtggcatgctgctaatgcctatgaatgtatgctgaagcaaaaggctatagtgaaatggttaaaggaaggggacagaaattcagcttacttccacaagctgataaatcatagaagaagacataatgctattcaaggattgatcattgatggggaatgggttcaggaccctagtagagtcaaaactgaggccttcaatcatttcaaagatagattttctgagcagaattttaatagaccaaccctggatggtgtgcagctaccttcccttggtcaaagtgagaatgaagcccttgtggccagattttctgatgctgatacagtttggttaccaaaagccatcaagaatgataacaaagcagtaatttaaattaaattcatcttagctnttctattttatgatcactctcgattgctggaatggtgaaggaaatgggcttctttatacgaggaccctatacagctgcaatgtgacatc

SEQ ID NO: 176479 - DNA, 171 bp, Glycine max
agcttgaagagtcgagactcgtattggtttaattgattaccaatatctcataatcgattacactgttatttgatttattcaggagtctctactttaatcgattaccaagtggtttaattgagtacttctctcttatttagctgtgcataagtgaataggaacactttaatc

SEQ ID NO: 176480 - DNA, 639 bp, Glycine max
  unsure (1)..(639): unsure at all n locations
ttgaaatggaggattgggggaattttctccaccgaatccttgaggaggattctaaggattccactccgattaagatgttcctcttggtgtggtggttcggcgaaaagcaacggcggctcatggcggccattggtggtcgtgggtggcagagaagaaggtgttaaggtttgggtggcgttttggagaagaggagagtgaaaaatcgtgtttttcacgctgaggaacatatttataatctgcaaatctcgcttagcgaggtcgtctcgctaagcgggagtccacttttctcactcaacgtgcaaattctcacttagcgcaacttcctctgcattatgacttgcccaacaggccaattctcactcaacgcaattccctctcaggttggaattgcgcttagcgcacccttcacgcttagcgagacatcaaaagttgttattttcaaaatcccaatagtcagactgtgcaaaaagtgtctttggaagctccagacaaaatttgaagatgatccaacgggtaacgactctaggatcgcgattttactaanataggttttgggtaaaatctgaaatctcataatttcaacttagttaaacaaaactccacataactcagcatccacatcaagaaatcacacatgac

SEQ ID NO: 176481 - DNA, 155 bp, Glycine max
agcttttatgactacaaccacaacttgcgttggacttgaccccagctaagacgattgaccaccgtgtgaatgccgtgcaccctgaacacagcggcgtctttgaaatacattttatgttatcatacatacgtgcatgaggtgagcatcataccaac

SEQ ID NO: 176482 - DNA, 384 bp, Glycine max
tcaagcttgcaacaggactgatctaggtgatctgagtacccgcctttatgtactataccctgaggacactcccgatggtagagatactgtcactgttatcagatacacacggaaatgcctctatgtgaaaatgctgatatatgccattctacgcttgggcatatatcaaaccctgttttcagtcgtttgactaataataatggaacacaaatctctgcgaaatgatcttcgtctaagagatctatctgcccactctctaagattgggagatcaaactttgctaactctaacaatagatatgatataccttttgattgactccattgcgatctatggggtctagtgcccaccttacatatgaggggaataatatactccttaaaa

SEQ ID NO: 176483 - DNA, 115 bp, Glycine max
agctctacaggaaccctaccatcatgatccactgttcatatgcccggacagagctgaacgccatgctgttgttctcgatatttatcatttaagtagagttttcctatccttgaca

SEQ ID NO: 176484 - DNA, 311 bp, Glycine max
aaaaatcccaaaaacaatcctttttaattctaactaatttgaattccttagttcctgaatgtacaaaccttaaactggagcccgttccccccatttctttctacaaaaaagaaaattaataccgacaaaaacatggatgaaaccctaaggatgccaagttcatgtggatttctgaagaaataggatctatattccatcaaacatagaatgaccattgattacatgtaatatactttttaaaacatgggtgccccaaatcacaactaaaaagcacaactaccacatcttcagaggcctttggtaaatgggct

SEQ ID NO: 176485 - DNA, 165 bp, Glycine max
agcttcaattgtagttacccattaaagtggattgcttgggtagagcaattctttgacctgcaacatacaaaaacattggcaaacaagttcttcaaagagaaaaaatagaacttggcacaagaaggtctaccaacaaggcaactagtaacaacaggggggcttcaa

SEQ ID NO: 176486 - DNA, 393 bp, Glycine max
gctcatggcggccattggtggtcctgggtggcaaagaaaaaagtgttaaagcttgggtggcgctttggagaacaagagagagaaaaatcgtgtttttacccttgaggaacatatttataatcttgaaatctcgcttaccgaggtcgtctttctaaacgggagtccacttttctcactcaacgtgcaaattctaacttaacgcaacctttctctgcattattacttgcccaacaggccaattcttactcaacgcaatttcctttcaaggtggaaattgcgcttaacgcacccttcacgcttagcgagacatcaaaaggttgttattttgaaaatcccaataatcagactgtgcacaaagagtcctttggaagctccagacaaaatttgaagatg

SEQ ID NO: 176487 - DNA, 160 bp, Glycine max
attgacagggggacgaatcctatttcacttacagaaaaagtattcttttttttttacagagaagcactttaacccttcccatggcaaaaatcgtgtaaaggacaaattaaaataccaagggagaaagacctaccacacacagttgtgaaaaaggaaaaaa

SEQ ID NO: 176488 - DNA, 179 bp, Glycine max
  unsure (1)..(179): unsure at all n locations
gcaagcttntatagaagggtcgntcctaatttctctacaattgtctcacctctcaatgagctggggaagaagaatgtggcatttacttaaggtgaaagataagagcaagcctttgctttgataaaagaaaagcttactaaggcacatgttctagctcttcctgaattttttaaaacttt

SEQ ID NO: 176489 - DNA, 1081 bp, Glycine max
  unsure (1)..(1081): unsure at all n locations
cgccgtcatacactattacactgcgttacaatagcttattaatacactctctaatgtaagtactaaatttcaaaatatatggcctattatctataccccattaagataccgccaatcaaatacgctcactacgacgctaatttcccttcggaacatgcaacagtcttagaaaataataaaaactcaaataagggaaaaagaggtaagttggtctgaaatctaaaatatcgacgaaaggggcacagaggagggtttcatactatgaaatctccgatatgagacgcgatgggttgtccgaagacacataaagcagagggggtctatattattactatcgataagaaaacaatagtggaatgatggcccgctatgagatcgactagtgcagaaaaccactggtgtactagaccgaaggagcccttgcttatgacttcttcgaaaaagggaaataaagtgagaccatctctaatatgggcatacctaagccgaacttggcgagaatgtgaggacctttaggcacctaacatacggtgctgcgggagactccgttgtcaagacatataacttcagactcgctgactnaacaacatcaacaccacatgctgtgaactataccaacgcacgaagagatcgacgactcacgtaaccgcacatccacattatcctgtgtggagagacactctcacctctacgagacaaactcnactgactagtgtggatgtaatcgctagacttgagatacatacgagtacatgactcgaggacatagggcgaatctcttaacttcgcatngtcgtcgtctggatcgcgcaatcgcggttgatgcgagactacttcagacaatatatatatacccagtaagaggcgtctcgcttcntcgcgctcactcatatgatatgatcagtangatagtgctgcgaaagccacttgtgatcttcgcgactggtactgcagtatatatcaattgacgctcaccagtttcgagaatatagctatatcgngtctgcacactgcgatcactattgcagatcatgacgttttgataaggcgaaacgtctacgcgtatcacgtttcactccat

SEQ ID NO: 176490 - DNA, 1126 bp, Glycine max
  unsure (1)..(1126): unsure at all n locations
ggcggaggtcaagatactgtactatacctataagtgtattggtccatgagagaactagactgtatcagactttaacactctccactacgcgagggantttatgcatcctttgctgaccttacaatataggctaacaccctcggacaaactaacaagtcgataccaagcactgttctaacatcgacctatagttacacgccggagaatatactggccgactgtttaccgctccgagactgtgatattcctcgtcaataccccaactctaaatcgcgcattgcagactcattaccccatttccgccgagactggcagtaaatagcggcaagaatggaccacattccgatacgcgctctttgactaacaagtttgtctcatgcctcgaaataggcgaagtggtggccatgtaagcagcttattttgctacctattacgcaatcttggtgtcgagatttgtacagcaaatgtcataagttggttgtcaactactgtagattcacaacttaggatcgtgtgtggccgagactatcgcttaattctgatgatcctgactacaccgtaccgacaaccgcgcatatatgacgattgatacttgtgtgacccggtacagtaatatagttactctctacaacacctttatcagctcataactccttaatatactgagtagtctagatgtcgaccaactctctatacgtgtacagcgaactcctatatagattcaataattgtactcgcgtcgacattatatctacatttaactttacattgctagttggtatctcatgcatcatatatcggcatcacgctcatatactaagtcacaattgaaattatacgtgacgactcatctgtaactactcacttataacacatacgcatgacgttctagccgacctaccgctcattatagcgactattacggacctgtatcgnggtgaaccctaactagtcatatcgtaccaattcatggtggtgcactatgctactctacaacacacatacatcatgaacgaactacagatgtctatctccacgacagacgtatcaacgtttactctcgagtgtgtagtcaattaggtatcatctgtcgacgtcacgtatacatgtagtaatcttaagcacg

SEQ ID NO: 176491 - DNA, 179 bp, Glycine max
catggaagcttttaaaatttattctttttggaggggcgatttattaaagataaatggggaaaatatggtggatttagtaaatggggataaatagaaggaaggtataacttaatttaaaaaataattttgatataatggttgggtatggtgatggtttaacatttattccatggataaac

SEQ ID NO: 176492 - DNA, 940 bp, Glycine max
  unsure (1)..(940): unsure at all n locations
ccgcggcggtattacactacccctctatttcctgagttcctcattggtacatctcctcacttcgntgcccaaccaagcctagtgtggtgttgaatcatccatatacagacccatacataaacataccttactattggcatacactggctcagagtgatacctgccaaactgtattgttagaaaatgtacaaacacctattgcgactcgataatactctccatatcttttggcaagagcaataccaacataattttctctagtgtagatgattcgtcatgagaatagtcaaggggtggcgtactttacacctggtacgagaagaactttatgaggccggaccacatttaatctgttcgacgttgagagtgtcggaaaaaggtgaacgacactttccatgggctatcaaccgtatcttcttagcgtccgaatttgtatgcccttagggttacttctaagggaaccacgactgtattacgaggaggggagtgatgaccggtcatatcggcgtcacttcgtctcgatggggttcgtcatgaaggggacggtcatgtatcgcgtagcctggggcccacaaacgtaactttcctatgcgcctgatgctcgatgaacgggttcatcgacgattactatcccaaagcaatcagtggctgggatcaaagtttctcgacgcatcgtagcgaatatatctgaagtaaaccacgagctagggcaacgcactatactgtagaccatagcgggcgaggtgccactctcgaccctagtggctgtggtgaccgaccgaggtctatcgccatgcggactagaggctgaactatctactctaatcgatcgaggatagataacacttacgggtaagccggaaggatgttctgtctccgatctgtgatttcaatgacactggggtcgtgccacgatctttgccgatttagtgccgtaacg

SEQ ID NO: 176493 - DNA, 164 bp, Glycine max
  unsure (1)..(164): unsure at all n locations
gctgtttaggncatacatggagggattccttttttttttttacaggcgccaatgatctaaaagggggttcatgtttgttatccttgacccccatgcatgcggattttttaatttaagctgtccttaaggaaagcattgttcatatctagctgagctaggctgcc

SEQ ID NO: 176494 - DNA, 1054 bp, Glycine max
  unsure (1)..(1054): unsure at all n locations
acacgctaatcagcacagtcnataccgcgcgnacgacactaatcactaaacctcgcgcagcccncgttanacccacgtntanatctaatatntanccaatcccgccctcantcacaaccacancccccaaaaggggnnnnaccgggcgcggattgaattccagatngcanatngancanacanccnnnntnannanntanagnnanagccancnacccccgccnacgangancacccacgaaaancggnnccggnagcagaggagacacagaccgctatcttttttgtaaccggaagacaacctcgtgcggactccactcagtcacgcggaggagagtactaactcggctcgcaccatacgcagtacccaagaccgcgaaaccaagtaactagccgacaatacgccggagacccgaccacgcccagggacgggaacccacagcaggacagacgtacgcaacctcgacgggcaacaccaggaccaaggcacacacagcccatgcacaccacgcccaacggcacacaccaaatgcacctgacccacgacgaaggggccgacgacccccacacgccaagacacagccatagagacacaccaacccaccggccgcatccagcgcgcccaacggagcacccagaccagatcaacaccgaagcggcggcccaaactacagcaccaggcaccccaaccggaaggaaaaacagcgcaaagacccgccaaccacaaactgcagcgcgaaccagcggaacacacaggcggacacgcgcccacaccaccggcgctggcacggacccctacgaacccaaacacaaacccacgccgcgcgcgcaagcagctccagcaagagccacacgcccaccaccgcgccgaacaaccaaccacaggcacccgcgacgcaacccaaccacgcccaacaaaacacgccccacccaaccaaggaaacccccactcccccccgggccaacgaccccccacccaacggcacccccaccaaaccactacctaacaaaataacacacagcactcgacacacacgtccaccgcccccacccc

SEQ ID NO: 176495 - DNA, 59 bp, Glycine max
cctcttcccaatcactagggagggttgaagtacataatgaatattgcactccaccctaa

SEQ ID NO: 176496 - DNA, 1085 bp, Glycine max
ctgctagtccagtaggtgacgcgtgtctcactcactcacatgtccatttcttaccgtattactccttctcttcttgcgcgtcatatcatcttccctagtatcatatcagtgctagtgacaactgtcatttagcgcacccctaatccacatccttcactcatctcacccgacgtggtaccaactcacattctccacctttgtatttcattggaagccaatggataccataatactcctgcaggaaacttctgtccaacaacgctttattgggctggtcaaggagaaaaccatcccaatacacctctttgccttcagtgcaaagctctactaggccctcaaccctggcaccaataaaataacgactacaatgggcatgcccaaatcttcttctaacagtagaattgtctatccactgtcttaatctattctcaggacaagtgggattatgtgtaaccatttaggtcgtaacacatacccgcctaaggtttagccccttaaatctaacgaaaaacaccgctttaactatccttcataatgctagtatgccctatcccttgaccataaggctttaaccattcctagtgaagtaacgctggatgtcaaggttttacccacctctgattctgccgaacaaacatggtttaactcacgcttattattggtataatggaaccaagggttgaacctctccaagaagtgtgaacttctgatcattgattgccttaatccactttaacgacaggaacgcaatatccaaggccaattgggataacatcacttatattaggctcgacatccatataagcgttaaatattgcaacaggtcacaagctacacactagggtggctataacaacctatgtgggacacgccaaacacactgtacgtggaatgctatatcctccctttaagggcctagaccatctacccacatggttataccggtcttagaacaatgagttgactctcactgttatatccacctacggttacgataaaaacatactgtttaagcgaagtgagtgtccttgctatggtaaacacaatagaccaggcgcaatgattgctttgtcagttatataaca

SEQ ID NO: 176497 - DNA, 172 bp, Glycine max
tgccagcttaaagaataattaagaataatggtagaatatcttattttatattccggaaatatattctaatcaaaatacaaactgattaagtaggctaaaaaaactgatataatatcttatcatatattctaataacttcgaaattaccccacaaaaattatttacttcgaaa

SEQ ID NO: 176498 - DNA, 1422 bp, Glycine max
  unsure (1)..(1422): unsure at all n locations
cgccgcagtaactcagcgtgtacactgcgncacactatacnactaccctctctaccctacaccgttcntntcacactntcacactaccatttataatantacataaantctcancgcaantcagctagaacacngagtcggggancnttaattcgattgcccttgtcgcctncaccgtctatgatattaataaataccttcgaagcntcgtcctacgaatgaccaactatctcctggactatatgagaactacacatatatgagttctgagtctagtactcccatcacatgcncgtgcacgacacactacctgcactaagtagggtactcatcggtactcccgtgtctctcacacactcctctcaccacacgctattcataaagaacgacgacacacgataagaatgcgacgcacgacggctgtaacaattggcgcatgagacggatccatcgacgcaaacatcaggactgactgctcgtaagaggagacgtccggcatgtcagaacttcacaagaccattggtcctgctgcgcatggcgaacggactaggcaggcacaggggattacacgtccacgacaaggggtaacacacgcaacgcggacgatagcgtcgcaaccaagtgtcgcagtcacgtcaccgtccaagagcgacctactacttagggctcagagagtagaataactaccgcccgcaacaggcctgaagaggcgtttacgcgcagggntcacacacaatacggcgcaccatccacgcgtcgggcatatcgggaacacgctgacgaccctctggacacgcatgcaaccatcagtactcacgcatatggaacgagctcaccatgcggcaaaacgcagacgcagccctctatcactcagacttcttcgttcgtagatgcgcacaaactattcggtgcttcacccgaatgtctccacgagcactgcacagtacaccatctgagcgttcgtacgcagaccgcgcgccgatcgcatccgatcatacgtgacgaacgcaacatangcgcatacacacgcgcacgattacgctgcatgctcatctgcgcagtctgtcgcatgtccagacccacgactgacgagattatggtactgacagaggagacagtcgccgtaccatcaacggacgacgttgagnctaaccgtgacatacgactactgtcgnacgctgttgcaatacngatcgatatgtcacatatcgacatgatcgancgcgctacgcatgtggagtcagtgtactgcacgtcntccagagacgacacctcgactgtacacgttgagtagcactgagtgcgacgactgcgncntgncatgacacgtgtcatgtgngtgcacgcgtagcgaggaccgatcagagacgatgaagaggcncacgtcgagcaccgtgactanagacgcgatacgtcncgcgt

SEQ ID NO: 176499 - DNA, 558 bp, Glycine max
  unsure (1)..(558): unsure at all n locations
gagcgnnncgnnncgtgggctttcggcggtgcgcctcgncgccgtgcgtgtttggttgntggggccctcggtnnntgccgcggcgggggcgtgcgcncnctccctctttttgcgggttgtggggnggttttntgttgcccgccggccctttntttttgtgccgctgctggcgnccncgttgctncgtcgcggcgcggggncgttttnnnttggtcggggctgtggtcccnnctctggtgttggtgcggttttnnnngtggtggccgggcgttgnntcgcggttctcgttgcgtgggcnnccnccgcgccctctggctgcgtcgccccgcccgcggcgcccgctgtcgtgtgctgctgggcgccggntcccgtttntnnnnggtggttccctggccttctcgcgnccncgnnngcgggcctggggtcnnnnccgggggggcggccgccggggggtgncggngnnggtggcggcgggtgccggggnnnccgcgcncgtgcgggccngctggtttggtgntttcgggtgggggtctcgcggcctttctcttgcttttcntt

SEQ ID NO: 176500 - DNA, 83 bp, Glycine max
aaaaatttggatttggtgagattttatggggagaatataggttgaaaaagtgtaaaaaaatgtttattgaatggggtgaagtg

SEQ ID NO: 176501 - DNA, 381 bp, Glycine max
ttgatggctttgtgaaaaagttatttaatggagggcttcccattctaatcttggcatggacgagaaacatcctgtgttaccacatgtatgacttgttggaaacctaataaatattcctttaaatattactaccatataactttggatggattattaaaaaatatggtcaactaagtctatagatcttgaactgtatcaaataatggatttcaggtcttaaacacaagtgtgattaatcaaaatctctaaacattgtttcgctaaaattttagatcctgtgcttatttacaacattaaatcatgatattgatgtgacactcaaactattattattaaacttgggtacattttgcagcggctaaaaattgtcaaaaatttact

SEQ ID NO: 176502 - DNA, 170 bp, Glycine max
  unsure (1)..(170): unsure at all n locations
tgcaagcttgagatgaggaagngntgaagggagaaacttcctacttttattcggtgaccacagagtggtacctggagatatgtcgcgggggtcaggagaccttggggacgtcaggtggggtgctattgcccaaaaccaagcttgaccaatcccgaaccaacccgggcata

SEQ ID NO: 176503 - DNA, 632 bp, Glycine max
  unsure (1)..(632): unsure at all n locations
agcttcaagttgctcggatagcaacttgttttgggccaacaaagtgttctatgatgaaagcttcaacaggcttcttttggttgggatgtgtgctctatcacacaagattgaatggtcactagcaaccatattgtcaatcaattccatggcttcttcaggggccttcaattttatttttcccctgcagaagcatctaaaagctgcttggattgtggccttaacccgtcaatgaaaatattgagcaggattggttctaaaaatccatgagtaggcgtctttcttagtaacccacaaaatctttccaaagcctcactcaaggactcgtttggaaattgataaaaggatgagatggcagcttttccttcagcagtcttggactctaggaagtatttcttcaagaatttttcaaccacttcatcctaagtcttaagactgttacctttaaatgaatggagccatctttttgtctctccaaacatagaaaatgaaaacaagctcaatctaacagcatcctcaggcatgccaaccagtctaacagtggtgcaaatctcaatataagtggctaaatatgcatatgggtcttcatttggcagaccatgaaacaanatgttctgaatcaactgaattaatga

SEQ ID NO: 176504 - DNA, 167 bp, Glycine max
gcatgcaagcttcaagtaggagcttcctaaaccttcattatatttttaactttaccttctcctccattggtggttcttcatttttcttcatgtatctcctcacatgtcttgttttgaatattgttaacatgattttttttaaaatttccaccaattaaacttgctat

SEQ ID NO: 176505 - DNA, 1106 bp, Glycine max
  unsure (1)..(1106): unsure at all n locations
gatcgtgcactctccatngtcatacctctctctctatccacgtattctcctctatctctgntagtctatantatatcatctatatctgaagatnanacatttaccnacacacnctcntcncgtacgtgntttgaatcgatgcatttaccgacactctataattctcangacctgtcgtcgcaccatccgacccgaacgtccacactatgtgaccgacatggtgtttggtgttcttcccaatacatctctaacaaaggcttcgaggattgaggggaagatgtcttgaagagggtgacaaccttccctcgcactgctaagtggcttgacacaccaccactggggtttctccttgagagaatattgtcagcatgggggttcatcagaaaaccatttgggggaccgtccatgtcgtgggttgcctatatgtgcctaaacaccgaatgcgtaggacccaatacctcgaccccaaaccccgggcaatagtactggttcaggatgagacaccttgtagactgttaccataattctaggactaagctgtcctgcgccgtcataccgcatctatagtgaaaagcatagaaccaccatagtcacggaaggcgttgtggagggattggccacacttgccaattctagcgtaataagatagagtggtaggcgtctgctcacccccccactctatggcttttagaggagaccataattcatcataaaacgcaaacttgaatgatccttttggtcttaatgtggagtgggcaagaaacaatctctacaaatctcatacaattcggcaatcttttatctgtcgtgaaatttagactctttttactacacttttgatcatgctttagattattaatcctttggtcatatgtcgtcaagtaggtagcaatactgctggttgggatacatcttatcatatctaaattgagacctatcacctttattggggaggcagggtgttttcgtggtcttcacccttcattcgtctcccacatatattaacactggtgccgccatctgactctcgtataccactttgtccacacctactctccttgcattttcagacgactcgtgattttcatcttattatgtcattccca

SEQ ID NO: 176506 - DNA, 125 bp, Glycine max
tctttatgagtaagggaaggaatatttattctttgttggccacatgaatttcaagacaagggttgagtgtttttgttttggacacgccccacgatctatgggatcttgcccaaggagtgtgttaa

SEQ ID NO: 176507 - DNA, 319 bp, Glycine max
tacctaatattctgttaacactctatcttcaaaagtggtggctttttacttttcttgaagaatataacttgagtccacagatttttacccaccatgtgtttgtggaaaaatcgtatttcttcatcagtctcggtgtatgggaacttttgctggtaccacaagctcttgcatatataaacactatattgtatggatacagcaaagcttaatccggtgcattataaaagtatctatacgtacacatggtccaagactaagatgacagtttatatttataaaacaccttataagttcccgctatgtgacctcccatgtgaac

SEQ ID NO: 176508 - DNA, 97 bp, Glycine max
agcttggagaagatgcttcaatggaggaaaagaatgtatgagagatagagagaggggggagcacgaaattgaaggaataaaagaggtttagaagggg

SEQ ID NO: 176509 - DNA, 525 bp, Glycine max
tgcatgttagagtagtaccacaggaagttgataaaactaaattctaaagacacataattgggacattttactcaactatctttgataacttttcctatcccgaggatatgataatggagcatctcaataacaaataataatggcatatgaaagacataagtgcatgcatgctaataatttaataatttcatgttttaatttgcatattgataattttgtgattagtaaaatcagatacagttgtaaactttcacactctgactcatgagcaccctcattcccactatttaattgatagatcccctctaacaaactgtctataactatttgtcacttcccttctatcttaaatgagatggctcatcgtctccccccccccccttcatgctctagaagatacaaatttcacataacacccaacttaatgatccatcaatttaaattgagtgggaagacaaagtttacaaattcagaaatttgcaatcttttacttgggtgaagttgaactcttttacaaactctgac

SEQ ID NO: 176510 - DNA, 172 bp, Glycine max
agcttaacaaactctgattttgtaatattccttgtgctctaaaagataagaattatgttactaaggaatagtatatataactatgtaaataagccagcaagaagaatgaaaaattacctttatctaatttctcttctcttgtccatggaggccatggtcctcgaaaccagtt

SEQ ID NO: 176511 - DNA, 431 bp, Glycine max
tttaatatattaaaagttttgttctgaatgtttattattagcttttgataacatgacaccatcttaatagttcttctaatgtatatcagctgtttggatggtctcacgtgattaccctgcctgacatcatagactaaaaacaatttttttaatatattaaacaattttttttaatagtgattcaaccaaaatcggatatatattatatacgtaaaagttatttaagattaaaataaaaactatatatacttgcacattaagtagtaaaaatatatgagagctgcacactaaccaattaaatttaatgtgagctgaataaatttaaatttaatgtgaaccgactaaattcaaacaccctaagcattataggaccgattttgtattttttattttcttgggcaattaatttaattttaatgtaacacttaact

SEQ ID NO: 176512 - DNA, 176 bp, Glycine max
agcttgttcttgattttttcaaagttctttaacaaccttataacaatatactcgtccttcatttaattatctttgggcttgtcgaccacgatcaacaaagtactttcgacagctactatatgttgatttcaccaacgctgttatcggtatgctgcgacaatccttcaataccttat

SEQ ID NO: 176513 - DNA, 546 bp, Glycine max
ttcttatgtctttacccattttcctctaaggtagccaaacttcgttgaaggatgaccttggcaacattggtcgagttttgtaccttgactgaccaaatgaggttttggtcaaaacgggacacaaagtatgtaggaatcctcatcttaggtctatagcacaagcttcatattgaatttgtatcatgagaagtgtatacatggtttagtgagacacttggatgtgaaaaagaggaagacattgtcgaaggtaagataattggagctgaaggttgcaaggccggggaagaaggaggcaggctcgccaagacatttgctatcatcacaccaacacttagcaatgccaagggagttgatgcaaccagagtagtggaagaaggggcagcaattgcctgaatcaaacgagaagaaggcccaaaagaataaaaaataattgcaaaagcaacaacagcttgagtagccaacaaggttgaaggtggaccttgggacctggtaggggaaggacggctcgagccggacatcaacccagtagcctgctttagagcttga

SEQ ID NO: 176514 - DNA, 177 bp, Glycine max
agcttctcccccaattttctataaatagggggagaagtgaattgaaaaagggttcagccccttaggcacttctttctctttcgaatttgcttaaaaaaattgtttccgtgaagaaaatccaagccgaggcgcttccgtaacgtttccgtgaagaatttcgcgaaggttttcgaccgt

SEQ ID NO: 176515 - DNA, 602 bp, Glycine max
taaggttagcgaagggccgaggctttggtgtaaaggtagcacccattttgcctcaacctttggttttaaaaactgaaattcatatggcacgcttagtgcacagctgcgcttagcgcgtcaatgcaacgtttgggttttgagcaaccctgtgcttagcctaacctagtgctaagcctaacttgaggtttcaaattccagtgagcatttggggcttagcgcagaaggtggtgcttagcgctttctgcaacacaaaattttctgccatatgcgcttagcctgagatgtaaggcttagcgcgcaatcaagcttcaacttacagagagtagttcaggcttagtgcaacaggcgcactaagcgcacttccaagaattcaaaaacagtaagagattggcgcttagcgcatcctgccccgctaagcccaagtcatggagttcaattacagaatggatatggggcttaactcaggacagcgtgcttagtgctgctacaataaattttttccagagaaaaagtggcgcttagcgcatcatctccgctaagcccactgcttgaagtctaattctagtgaagatgttgggcttaacgcgatgatgtgcacttag

SEQ ID NO: 176516 - DNA, 173 bp, Glycine max
  unsure (1)..(173): unsure at all n locations
agctttanaacaagctaaacatgcaaactaaaatttgaatcaaaaatataaacccaaattataaaatgttctaaaagcaggaaatgataataaaagtgttcaaaagacaggaaaatagaatataaatcctgtcatgagtcctatgatgctttagatgggtcatcatatggagc

SEQ ID NO: 176517 - DNA, 601 bp, Glycine max
gctgaatattccaatgtagaatatcggttgtataaaaaaaatgttttttaacaatggagaggaagtattgaagtaacactaactaataaatatttcttgagcaccattgcagatactcccaagtcccaccatagatgttggtcaatcttgttgctttctaactagtctcaaataacatcactcagtcaaataatcaaatgaaaaatcaactcatatctcatgcatattaatttttcacttcaccgtatacaattataaaatccttttttttcataagctataaatcaaatacttatatatcaattgaaaatatctcataaggtaaaatctaatccaacctttaccataagctttgtttaagcaagccagacacaaatatatacttgttttgtgctctgcattattacacattattcctatcggttgttaataacatagcaccacacatacacaccactcatatctcattgattaactatcaacactgcgaccatataatatcactcaatatttcaggtgagtaactgagctggtaatttaatatgaccactgcatataagaagaaaaataaagcaattttccacatcataatagctagcat

SEQ ID NO: 176518 - DNA, 171 bp, Glycine max
agcttgtttctaagcagggatccattattagtgattgtagaactacccttgccacttatccaaacttttcggtcaagtttattaggtgacgagctaatatagctgcaaatagcttaactaaaacagttattgcatatgttagtcgggcctgttttaatcatatttcacatt

SEQ ID NO: 176519 - DNA, 700 bp, Glycine max
  unsure (1)..(700): unsure at all n locations
aaccgatgcactgataccattctcggctggaatatcctttcggtgagaaatgttaaactatatcacacagagtttgatgaatttaaagtggagttggagaggcgtaatctacacaaacacctcactaatctttaggaaggaagcattgatgtggcgattgtcaaagaattttatgccaatctgtacagccctaaggatcagtcacccaagcaagcacgagtaagaggacatttgataagtattgatgcaaacagcctcaatgattttcttcagacaccagttgtgctagaggatggggagaccctacccacctactctagattttgcaggttgaggtctaatcctcaagagatagaggctagactgtgtattccctgcaagggttttgttttgaacgccgaaggccaaccatggaagctcctcagaaaggacttgaccacattggcccagacatggagtgtcttatcttactccaacctagctcccacatcctacacatcagacttaaacacagatagagctagggtggtttacaagctcntaactcacatggatatgaacattggcgcccttatcttaggtcaaatttcttctattgctcaantcaactcctgtaggcttgtgattccagcattgaatattgctctctgcagagctagaggaggtacttatgataggttgacctacgagagcctgagcc

SEQ ID NO: 176520 - DNA, 151 bp, Glycine max
gcaagcttccaataatcgatgcgaaagggaccccatattaagctttactaacttctagtaatggggggtcctcattcggggccagtaatctatctaaacgaactactctactcaacatacacaaccatatattttgggcctaaacaaattt

SEQ ID NO: 176521 - DNA, 909 bp, Glycine max
  unsure (1)..(909): unsure at all n locations
caccgaacacaccacactgccgcaaacacaacacaacccacaacngcgcacgataaatatatcaaacgcacacacanacaacacaaacacacacnnnnncccgggtgatgagtgcatggcaanccnttngnataaaaaccaacccatatgacaaggacaaaacagcaagcagaaatttaattttattaccaccactgcaccaaccggaaggggaaaggaaaaacagaaaacacacagctcacgaagaggacaaacgcagaagaaaccatataacagagacaaggacccaaggtggaaacacaaagactacacacacgagaaggaaccgaagaggaagataaagagacgaccccaaagcaagaacacaaaaaaaaccgacaaaagaaacccacacgaagaaggaaacccagagacggagggcgctaaccgaacaacgggatcgaatgcgaacagaagaataaaaaacacaaggagggccgacaagaatgcaggaacccaacgatcaagggagacgggagagaaagtggcaaaccgagggcaaaagaacaaaggaccgaacgaccaacggagcggacgggaacgcaaggggcacacgagacagaagggacagcgacaagcaaacgcaaagaacaaagaaaaatcacggcgcgaaaacaggacacgccccaaacaaacacgaaaaggccgaaccccaacggccatcagatgcaccaacacaaacacaaaccaaagggcgccggaaaaacaccacggaacaaaaaaacccaaaccggccaaccccaaaccacaaccaccacaggcaccacaggaaaaaaacgcacgcagcgagcgagagaaaaccggaaaaccccaccaccaacagcacgaccacacggacaaggagccaggacaagacagaaacgaaccccc

SEQ ID NO: 176522 - DNA, 174 bp, Glycine max
gcatgcaagcttgtatttaaaaatgtttttaaaatacttttaattaatatttgaatttttaatcctttattaatatatatgggaggggtaaaagcgggcacatatttggtttggccgttaacaaaattcaatgcatggatatatatcgcacacctacacaaacacacctacacc

SEQ ID NO: 176523 - DNA, 527 bp, Glycine max
tcatagattaataaaggttttgaatgaaaaataaaatgccattagctgaattaatctattcattcatagaaaacaaaaaaaggtacatgaaccttacaattccaccacttgtgtttcttccccccttccaatcctacattggatctcatgacaaccttgagacatcttacatgacattcgcaccatgtttcagaatataatgcttcagctgtattcaaatttcaaaagcataacttgtggattacctctttgtaaacatcaattggaagaggcaatctaagatatgcaatccagtctttagtaaattttagcttcatctttttggcaactttggctgctgacaatacctatatatgtaaaatgaaaattaagtagacagtaaaaaaagaaaaactacacaaacaattacaagagtgtttaaatgagaagggccttcaatatataaattcattaaattgaagataagaaaactactatggaattggaaggcaagagttccttaataatgaaaaaacaaaaaaggagac

SEQ ID NO: 176524 - DNA, 170 bp, Glycine max
agctttaagcccatttatacgacaagaactttttactcggatggcagaaagagccccccaatataacgaaacgctcgaaaatgaatgtttaagctttgagccaattctaacgataataactttttactcggatgggcgatcgagtctcgtaatatatcgacacgctcgaa

SEQ ID NO: 176525 - DNA, 385 bp, Glycine max
taaacattcaatttcgagagtctcgttatattacgggactcattcagacatccgagtaaaaagttattggcgtatgaattggcttaaagcataaacattcaactttgagcctctcggtatattacgggactcaatcagacatccgagtaaaaagttattgtcgtttgaatttgctcagaggttcaacattcaatttcgagcgtctcgatatattacgggactcaatcagacatccgagtaaaaagttattgtcttttgagttggctcagaggctcaacattcaagttcgagcggcccgatatattacgttaatgaagcggacatcacgctaaaaagttattgccgattgaattcgctcccaagatcaacattacattttcgagcg

SEQ ID NO: 176526 - DNA, 166 bp, Glycine max
agcttataagaacaaaattgcctaaatcatttccaaatatgcatgtgaattaggaagcatcaacaagaatcaagccaaggctattgggcaagcaatcaatggggcaaaacacaccaaaagattatgatgatggatggctcaaattctcagaaaggtaaacttatca

SEQ ID NO: 176527 - DNA, 536 bp, Glycine max
tgtttgttagaaagacccaacacttttacctatggctgttatctttaattacttgcaattttactgtttttaacatagactttagtttatttttgttttaaccattgattattaatgttgttcctacaatgccttacttctgaataaaactctgtctaataagcaagttccctgagtttgatactcggatcactccgttttaattttaaatacttaacgacctgatgcgctttccgacgaatcgaatttcccttgaacatatttgttgaagaaaaattggacaaaaagtaactctaggggaaatcccaacaaaaaccaatcataaaagatatctatgaggacactcaatataaaatttatggtcacacacagtcactaaagcttatccatgacaccttctttagtaggccagacatttgcataaaactccatgactactttaggatcatatttagccatgggctctgccatctgcgtccaatgcctccttgcaattttcgcctgaaattatgtatactcaccctcagctagctaga

SEQ ID NO: 176528 - DNA, 106 bp, Glycine max
tttttattttttaaaagatttaaatatgggaaaggattaaaatattaagatatttaagggtggaatgttttttaaaaatatttattgtattttttaaggataatta

SEQ ID NO: 176529 - DNA, 651 bp, Glycine max
ttagtgcctcctcaccaggtccataatgagcatttgcagatttattggcattccaagtactagaattcttattagctaatacgtcaaaaatatagttacttgtattaagatcaccacactgggcatacatttgaattagggagctttggacaaatgtttctaattcaaagcctgctacaactatatgtgcatggatgggcattccatgatccaaaaggtcatcaggagacaaaaaagcactgagaagattaacaatagtaatgtagtttacaggcacaccttcttctctcaacaaattgaaggcttcaatcgctgcattaggttctttgttatcagcatgtccacctattagtgcattccaagtcacttcatctctgtcaggcataattttgcacaccctttgtgcagcagccatggaaccaaatttcccatacatggtaaccaatgcattacctatgatcaaattgtgatggagaccaagaagaatcacaaaggcatgaacaatctttaatgtttctaaatatacatgcagataatgcagtagtgaaggtacatagtttgtcggctttcttgtttgaagcatctcaatcaaaagttctaagcacgtggataatttccattgtcacattgcttgccatatggaattcatga

SEQ ID NO: 176530 - DNA, 168 bp, Glycine max
agcttttaagtgaaaggaggcgactcttcacttttgaatttgaatttcaacggtcaagggcattggtaatcgattaccaaaacattgtaatcgattacagctttttgaaaaataattggaacgttgtaaattcagtttgaaaacttttttcaaactcattttgctact

SEQ ID NO: 176531 - DNA, 662 bp, Glycine max
tcagcttcttaaacagaggctgaaaatctgaagttactttgttttatgttattgtaaaacagttacaagcataataactaaatgcaatacaagaatatgagaattgacgaacccagttacttggaataggtaactgtttttaatatcaacagttacctatttttatagtccaaaacagttatcaacagttacctattttaatcctgcatcgtaaaataactaaatgcaataacctattttaatatcaacagttacctatttaaaatagttacaagcataatttgcaataacaggatatgagaacttttagaaactgccaatacgaggcaagtgaatagtttataaacagtctggaagcattcaacaattaagcgaataaaatagaaaagagagcaagcaacccagttccttaaatccatttgggtaaaaacattatctatacttaagcattacttgctcaagaaacaaaaaatatgttaaaacaacaatagtgaagccccctctgttggacagtaaaatgttatagcaattgcaggaaatttcaacaaccctgtggatctgtgtacagacatcatgggtgattctcttgtatagtgcagacagaataacacgttactataaatcatgcaacattacttattactacccagaaaaataaaata

SEQ ID NO: 176532 - DNA, 176 bp, Glycine max
agcttgtagggttaaagtctcacgattgtcacgtgctcatgcaacaattggtagccgcggctatatgagacatcttgccaaacaaagtcaggttcacgataactcgcctgtgctttttcttccatgctatatgtagcaaagtgaattgaatccagtaatgtttgatgagttggaaa

SEQ ID NO: 176533 - DNA, 330 bp, Glycine max
gcctaagatcctcttcatcaatggattccttatcttttttgaagatgaatggcagcggtatggagaatgaatatagagaagatactccacttctatgagaaaatgaatttagaaaaagcttaccaccataggaggtcttggataagagcctgtaggaagaacatgactgaacggagagggagagaatagcacgaaattttgtgctctaaaagagctctaaaatctgaagtcttattttcaaatgatcaaagttggaaaaaatgaacacaccttacctttatttattagcctgactgtttcacacaactggagggaaattttaattttaat

SEQ ID NO: 176534 - DNA, 178 bp, Glycine max
agcttatcaacttctgccagtggatacaaatatttaagtatccacaatcataaaaatatcaccaggcagagcactagcctaatctggttttcgcagataccaacaacttaattcaaagaacaagcatctataattggactcgaaccatccaattacatacatttaaaggatttttaac

SEQ ID NO: 176535 - DNA, 655 bp, Glycine max
  unsure (1)..(655): unsure at all n locations
cgggtgagtcctgacnacnctnnttggaaccacccggggctccgacggagaggagggagaattcctttacacnctagccacagggggggggctttgaagataactcccccgaaaaacctgagagatgagggacaggaggcgaaagtaagcaagtccgcaccgaggacgacaaaccgaaggtccagaggtgagagggacccatcgtgcatgaaaaacctgcacataagcgatggaaagaggtgggcgacaaatgaaggcatttacaacacaaaaacacagaaaagaagggcactcgtaaatatgagggaaaaagccactccgatcaacaaaattgacgattggcgggtagtaccacccgagcacctacggttgctcactcaggggagagtagcttcgccatctcaataagcgcgggatgacggctcctgcggaacgaaaacaactacccagggtgcggagacccatttgcagccaaaggtgattccctaacggacgaacggggacatgcaaaaggggggaaacaccgagggcaccgatatactgggtaacagacgagcttgggacacaacaaaaaagatcctctaaagaagtagccgaactcgataaataggcgacgcgacatcgggatcggtggtacctgctaagtatttcacgc

SEQ ID NO: 176536 - DNA, 171 bp, Glycine max
agcttaattaacatcctattctgtgttgcaactttttgaattggttcgtctcccacctacgccggggtacttttctagaccattaattcgaaccacaaaaatggttgaacaagttgataaaaaagaaatggttgaacaatttacacaacattaatattgtcgttgaaaatt

SEQ ID NO: 176537 - DNA, 631 bp, Glycine max
  unsure (1)..(631): unsure at all n locations
tgatccttgattcttgaattcatccttcttcttgaatcttgaagtgttcttcaacttttcctcttaagtcttgaattgttcttgattccttcttgaacatcttgaactcatcttttgattgacttttgagctttttgttatcacctttgtcatcatcttttgttatcgttattgttatcatcaaaacacctttgattcaccatgaagctttgcttctacaatctccccctttttgatgatgacaacttctgaaatcaagaaacacacacacactttttcctagtcgatcactcacataaattctccccttttgtttttgaatttatgcttatcttaaaattaagttgattactcatgtgaattcttgatttaatcccatttctctccccctttggcatcaacaaaaaagccaaagtgcgtatcaaacttaaagtatacaaatataacttacacatccatacaatattcatggaaaaatatcaaccaaatcatgaagcaagaagcaagaaccatgaagcaaccatcatgaatagattaattataatatccacatagtcaaataacatacttaatatttgttcaaacataccatgcaaantaaagaaatagtaaattggtcaaatatcataat

SEQ ID NO: 176538 - DNA, 95 bp, Glycine max
agagaaagattccatggaggaagaatttgccttagagacacagagagagagagagagcaccagagagatgagggagcctaggaattgaaggggat

SEQ ID NO: 176539 - DNA, 429 bp, Glycine max
tcatgatgatgaatcaagtatgattcaagtagttttgatgattacataaagcccaaaagaatgatgtcaagattgagtcaaaaagttcaagaaatcaagaagattcaagattcaagagaagttgatttcaagattcaagaaaagacatcaagaagaatcatgattcaagagaagatgaattcacaagggaagtattgaaacggatttttcaataaccaaacatagcatagttttgttttacaaaaagagttttctcaaaattttctaagttaccagagtatttactctctggtaattgattatcagtttcctgtaatcgattaccagtgataaagtttgatttcaaaagcttttaactaaatttgcaacgttccaaaagttttttaaatggtgtaatcgattacaatatattgtgtatcgattaccagc

SEQ ID NO: 176540 - DNA, 121 bp, Glycine max
cttacacagaggcttaatcataacacataaacgccccccccggaggccaaaaaggttatataggcgcgcgagaaatgttatgatgaagaccattatcaatttttcccccaaaagaatacta

SEQ ID NO: 176541 - DNA, 417 bp, Glycine max
ctgagtgcatggggaacacattactcgagtccccgtctgtgttgttagcgaaagagctcgacaggcttatcttggacggcatgtgtgctctatctcacctgaaaaatagctttcctcacatcgtcgacacacagtgcgtgagtgactatgttagtgtcgaccatgttctcgtgaatctggcgcacttggtactgtgttatgcgtttgtgcgcttacccccttgatggatatgttccaactgtaagcgaatcacaactcgatcttatgctgacaacaatacaaaccttgctgacgttgttctgaactttatgcttgaagggcctggtgagcgtctttactatcatgttgaggattgctcttggccctaattccactgctagtagccttatttaaagaattttatatccttctctattc

SEQ ID NO: 176542 - DNA, 151 bp, Glycine max
tttaatggaggattttatttagaagaagggggagcacgaaattgatggaatataatagggaaagaagtggaaatttgaaaagtattttataagattttcattcatgaaagttacaaaaagggttataaatgcttttatttatagagtaggt

SEQ ID NO: 176543 - DNA, 676 bp, Glycine max
  unsure (1)..(676): unsure at all n locations
tcaccttcttccctacaagacgagactcactatgtgatgaatcacccgtagagtcctcctgcctcgctgtcttcttgcccatctgtttgcttaattctgtcatgatcacactctgctgttgcctttgctgcgcatgttgttgcatttgcaaagcaagctcctgcagcgtcgtcacgttttcaacctgagtttccaaagcttcaagtcggtcacccatccttgtcatgaacaatctccgccacagagagcgatttgaaatccggtaggtcggaccaattgatgggttatataacagataacaaaataacacagcaaaagaatggataatctgtaattatattgatggaagaaatgacaaattacagataaaacaaagatagaatgtattgatagtgatagctatcaacccaaagcactaacggcttccctcacctcaaggtgatctcatttctctctcccaatctcaaattctatcgtgattattctctcttccctccgcacactaaatactaactacttcacgtgctcctcatcaccctttntgccagctcatcatctttcattccccttccatggtttctcttgtaaactctccacacctggggcgtataattctcctcacgcccacttcatatttttgttctataagcagcagtttaattgacagaaaccaaaa

SEQ ID NO: 176544 - DNA, 870 bp, Glycine max
  unsure (1)..(870): unsure at all n locations
aaaaaaggaaagagggggaaaaggagggggaagggaaaagaaaagggatattatcttgatagtgaagaggagaagaatggggcggggagggggagggggagagaaatataactgcaaaaaatatggagaggaaaaagattggganaggggaaggggaaatgggagaggtgggagataaaaaggagaaaaagggaaagagggagttagctagnnnnnnaggaggggagagggagggggagggnaggaggagggggaggagggggagggggggagaggagagggnnnnagagnagggaggggggaggggggagggaaagggaggggggggggagagagagggggngggaggagggaggggnagnnagggggggaagngggggnaggggggggagggggagggggggggnagggggagggagggggggagggggggnagaggggagaaggggagggggagggagggaggagggagggaagagnnaggggggggaggggaggggagnnagggggggagggagaggagggaaggagagaagggaggaggagggggagggaggaggaggaggggggggggggaggnaagggggggagggaggagggggggggaggggggggggggaggggggggggggggtgtgggggagggggggggggggggggagaagggggagaggggggagggggnaggaggggggggagggggaggnnagggaggaggggggnagnaggggggggagggagggggagaggggnagtaggaggggaggggggaggggaagggagannnagaggaagaggagaggggggaagnagagggaagggggaaggggaggggaggggagggagagaaggggaagnagaggagggggg

SEQ ID NO: 176545 - DNA, 316 bp, Glycine max
tttataagcacatttcttatttattgcgtcgagactatgctggtgtttttgttctgcgttttacagactggtttagacataatcctatacactattttttactgtgaccattttctgtcaccccttctctgtcaaacgtaattgggcgactctttgtggatgatcattctatcctgtccgggctcaacatacaaattagactgtgactttatatattgttaaacgcaaaggtctaaacatggctcagtctatatatagcgttagtgcgacataatgctccatcacacgaaacgaatgaaccctcactttctctttc

SEQ ID NO: 176546 - DNA, 169 bp, Glycine max
agcttttcctctggttgttctgctggggtttcctatgttagagagaaggagaagatattagagcctcaatttcaatgtctctgtgcgaggggcatatctctctttacagatattattttgcaaatcccaacgataggaatgcgccaaaataagttccaaaagtgttatc

SEQ ID NO: 176547 - DNA, 188 bp, Glycine max
tgtagccaaatggacttaccttgaattaattcctttttatttcttctttgagcctatgttcccctttctttggtctgaagctcattacaagcctcaagtgaaaaaccatgatatcaccctacccttaaggaattttggagctttggaattgttttgggaataactgtgtgtgtgggggggggggacct

SEQ ID NO: 176548 - DNA, 158 bp, Glycine max
ttggttatgcggggacaccttttgttttataccccggcagactaagggacccacccagagagaaagatccccagatgcaactctcgacacgaatataacgggcggtaattcccacaccacaaggaactttccttcgagggcattgccggaatttaccc

SEQ ID NO: 176549 - DNA, 513 bp, Glycine max
ttgatgatgtggtcttcaccgatgaaaggatcaaagtatgtcttataagaggcaaatctgatcatcatgctttgatacatgccaaaaaaaactagggcaaatgaagagggtgagaatgagggagaagcccatgctgtggctgccattcctatacagccatgtttcccaccaacccaacaatgtcattactcagccaataacaaaccttctccttacccaccgcctagttatccacaaaggtcatccctaaatcaaccacaaagtctgtctaccgcacttccaatgacgaacaccacctttagcacaaacctaaaacaccaaccaagaaatgaattttgcagcaagaaagccttataattcaccccaattccagtgtcccatgcttacttgctcccatatctacttgataattcaatggtagccataaccctagccaaagttcatcaacctccatttctctgagaatacgactcgaacgcaacttgtgctttgcacggagaagtactggggcgt

SEQ ID NO: 176550 - DNA, 163 bp, Glycine max
  unsure (1)..(163): unsure at all n locations
agcttagtaagccttggtttgaagggacgtgctagaatataagaaaatatcaaaagtatcttatcatatcttagattatccgctaggattagnttccctatttcctcattatctcttactattagttcccatgtttccttatcttttcatgatttgtttcctt

SEQ ID NO: 176551 - DNA, 490 bp, Glycine max
tgcttagtccttatgaaaaggaagaagcttgaaacctatcctatcattgaaatacaactccaccatatgaaagtttgtaggtagcacttcctccccatgcacatggacatttcatgcagctgatttgcgggccttggtttcattgcattggaatcataaaccaaggctgcaagaaggccatagagacatgaacctaaaggaatgttagtgatgaggatattgtggttcacaccaacactgtttgggccaaatagctctgaggtaatagacactgctgcagaaaacacaaagcctgaactcagccctatcaaggcagtgcctatgtgtaatgcagctccactgccagatatggccagcaaaatgaatgcaattggtgttagcaccaagcctgctccaaaccatccagctcttgcaatgtgtatcttcctgcattgtcatacaacattagatgaatttacgtgcaatgttggtttcgtgacatgtcctccca

SEQ ID NO: 176552 - DNA, 1516 bp, Glycine max
  unsure (1)..(1516): unsure at all n locations
ggctcttgttgcgcccgcgcgcgncctctgnntctanctcactctctcttttgtgctacgtgcnctccatcacccgtgttcgttttttattttctttatctctgtgtgctccccggggcgccgcatctcctcgtctcgcgcggaggtgcggttcgtgttgcgacgtcttgntganacatatantccacttcctccctctctctctcctctcacgcgggtgtgtttgccgtggtgtgtcgcatcctcgcccttcctccactacggcgcgcgtcttcttgtcttctcgtgcgtggctctcgctgtgtcttctctcctcgcgcgcgntgtgtctagctcccgttctctcttcttactctgtactgcttcacctcgnnnnnnnnngtntnnnnnnnntnctnngnctgtcgcgntcgccgcgtcgntgcgcgcgncgctgcgcgcgcgnnnnctcgggcctgcgccgcgccgggcccnnnnnttcctgcgccgcgnnncggcggcgcggcgcggctcgcggtgctgntcgcgnctgtcgcntcgcgcgcgnnncgncggcgtctcctgcgctgcgccgncctcncgcgcgccgnnnnnccggcgtcgntgcggcgcgccgcgcggtgcgcgccgcgcgncgcgntccnncgccgcggccgcgcgctgctgnnnnnctcgcgccgcgccgnccgcggcggncgncgcgcgcggcgcgcgcgtcgtgnncgcgtcgcgcgcgcgcgcgccgnnctggncgccgcgcggccgcgcgcgcgnnnncgcggcggcgccgcgcgcgcgcgcgctctccgcggcgncgtggtctnctgngcgcgtgctgcgnnnntgtgtgtgcgcgccgcgcgcgcgtggcgcgnccgncncgnctncncgcgcggcgcgcgccgcgcgcgncggcgtnctgttnccgcgtggttgcgcggcggncnncgnncgcgcggcgcgcgggcgcgcgcgcccgcgccgcccgcgcgtccgcgcgcgctggcggcgcgcgcgcgcgcggcgcggcgcgcncgnccgnccgcgcgcgtgntgggcgnntgcgccggtcctgggcgcgctcggcgcgcgcgnnnccgcgcgcggnnttcttctggtcggccgcgccgtgcgtcgtggcgcgccgccgcgcgcgcgcgcggcggtgcgcgcgtgncgctgtggcgtcggncgcgncgtcgtgcgcgcggttgtcgccgccgtgcttcggcgncgtgtcgctgccgccttctnnncgcgcgcggcgcggcgcgcgcgcgcgcctgtttnntntnnnctccgcgtgtgcgccgcgccgcgcgcgnnnncgcgcgcgcggcgcgcgnngnggcggcgccgccgcgcggcgcgtgcgnctgnnnncgcgcgtgccgcgcgcgcgcgcgcgcgcggcggcgcgcgcgnncctcncggcgccgcgtcgnncgncgnnncgncccgtcgtccgtgcgcgctgtcgtgcttcttcgccgtgcgctgtctgtgcgncgnnnnn

SEQ ID NO: 176553 - DNA, 568 bp, Glycine max
  unsure (1)..(568): unsure at all n locations
cttgatactaagctagacgactttgttgagtcgataatactttattatttatttggacaagtttgaatatgaagganaagaaaatgaatgtgagcctttttcccctttgaaagactttgttaaaaaaatgtttaaaaatacttttaattaatatttgaatttttttttattcttagtatatatgtgaggggtagaaggtgtcacaccatatgtatatttctctttgtttatatgcttttttgatcaaaatgaaatggttttatgtaggagttttagtggggttttttttacgatggagtcttagtgtttcggattaattgaagaggatggtactattgtaacatcttatttttcataaataagttaaaaaggttttttagtaaaaaaaaataaagttttataaaatagtgagatttattcatttgataagacataaaatagagtctttttattaaataataaaaataaataaatagagtaaataatagtttatgagtaccctatctataaatagcatcttaggttcagtttcagactgacgatactctctacacctnctctttctctc

SEQ ID NO: 176554 - DNA, 98 bp, Glycine max
ttttgcttggatgcctggtcgccccccctaaagtattgctaccctcgatcaactatgctgaactttcgagctggctggtatcacaataactttttgct

SEQ ID NO: 176555 - DNA, 408 bp, Glycine max
tcataattcaatttcgatcatctcgatatattacgggactttatcatacatctgagtaaaaaagttatgggcgattgtttttgctgagagcttcaacattcaatttcgagcgtctccatgtattacgggactcaatcagacatccgaataaaatgtttgtctttcgaattagctctcagtgtcagaattcaatttttagcgtctcaatagattatgggactcaattagacatccaagcacaaagttatcgtcgtttgaatttgctgagagcttcaacattcaatttcgagcggctcgatgtattactggactcaatcagacatgcgagtaaaaagttattgtcattcgaattaactctcatcttcagaattcaatttcgagcgtcttaatagattatgggactcaatc

SEQ ID NO: 176556 - DNA, 102 bp, Glycine max
atctttaattaatcattcctagaattgatcttatcctttgacttaaattgatagatacggaatcattagggcattgacttacagcaaagaacatcttatgac

SEQ ID NO: 176557 - DNA, 412 bp, Glycine max
  unsure (1)..(412): unsure at all n locations
tgcttaagattatatattgatttctctaatttgcacactatgtgtttctttccttcaactaagaatcccattgggtggtccatataaacattctcctctaattctccattaagaaaggcattttttgcattcatctgatgtagctccaagtcataatgggctactaatgctatgataatcctgaaagaatcctttattgagaccgatgaaaacgtctctttataatcaatgccatctttcttagtaaatcccttagcaacaagtctagccttgtaacatttaaggttgtcatgagagtcacatttagtcttgaagacccacttacaaatcttacaactttggtnattctaccaggtgccaaacaccattatgttcccatggaattatctcttctttcatgggatttaactac

SEQ ID NO: 176558 - DNA, 365 bp, Glycine max
gcataatattataataatcacttccaaaaattgacaaacataatttaaaagaaatataataataaccataatattaattaacaatcataatttgtttatcacaatagaaattatccaaaataaacattctatcaatttacctaagtaaacattgtatcagtgtaccaatcattacaaatttatccaaattataataattagtcataatctactataaataaaagataaacatatatcatataccaagagtgtccgaccgccaaaattcgaagaagtgaaatatgagttaacatatttttatataatatttagcatattgttattataaataattaaaaaaaaactaaatatcatgtcaacaaaat

SEQ ID NO: 176559 - DNA, 271 bp, Glycine max
  unsure (1)..(271): unsure at all n locations
tgtaaganaagaagacaagttgaagattccttttagagcaagaatattatttccacctctagaccattagaacttttatatcttgatttgtttggttcaagtagaacaacttcactaagtgacaaaggtatggggtgattatagtgaatgattattctaaatggacctaagttatgttcctagtctacaaggatgagtcatttaatatcttctttaaatgttttaagagagtctaaaataaaaaagaagtctgtattactttaatcaaaag

SEQ ID NO: 176560 - DNA, 458 bp, Glycine max
  unsure (1)..(458): unsure at all n locations
agcttganattgaacaacagaagctctcgagaaattcaaatggtcataacttatcacaccgaagtccgattcaggcgcataatataccgagacgctcgaaattgaacaacggaagctctcgagaaattcaaatggtcataactgatcacacgaaagtccgattccggcagatagtataccgagactcttgaaattgaacaacggaagctctcgagaaattctaatgggcataacttttcacatggaactccgattcaggcgcataatatatcgagacttttgaaatataacaacggaagctctcgagaaattcaaatggtcataaaatttcaaacgaaagtccgattcaggtgcataatatatcgagaggctggaaattgaacaacggaagctgtcgagaaattcaaatggtcataacttatcacaccgaagtccgattcaggcacataatatatcga

SEQ ID NO: 176561 - DNA, 470 bp, Glycine max
  unsure (1)..(470): unsure at all n locations
tgccttgccccttgatatatntgagggactcatggtcactatgaatgacaaattccttgggataaaggtagtgttgccatgttttcaaagcccgtactaaggcatacaactccttatcataagttgaatagttaagggtaggaccacttaacttttcactaaaataagcaattggatggccttcttgcatcaacacagccccaatcccaacatttgaagcatcacactcaatttcaaaagatttttgaaagtttggcaacgcaagtatgggggcattagttagctnttgcttaagaacattgaaagcttcttcttgtttctctccccatttgaaaccaacattnttcttgagcacttcattgagaggtgctgtcaaatgtgctaaaatccttcacanatcgtctataaaaacttgctaagccatgaatactcctcacctcggtcacagacttaagtgtaggccattcttg

SEQ ID NO: 176562 - DNA, 460 bp, Glycine max
  unsure (1)..(460): unsure at all n locations
agcttgcttgtggagctnttatagaggttggatctttgagcttcaatgaggtccttcaacggtgtttttccaccatggagatgcagcggaaggaaaaggagaagaggagaaaggaggcaccatccactagggaataagccatggaagaaggagcttcgccaccaagaatgtgccttggataagaagcttggagaggatgattcaatggacgaaaagagggagagaaagagagagggggagcacaaaattgaagaaggaaaagggggagagaagttgaactttgagttgtgtctcacaagactctcattcatcaaagttacaacaagtgttacacatgcttctatttatagactaggtagcttccttgagaagctttcttgagaaaacttccttgagaagcttctttgagaaaacttccttgagaagctagagcttagctacacacacccctataataact

SEQ ID NO: 176563 - DNA, 444 bp, Glycine max
  unsure (1)..(444): unsure at all n locations
aggaggggttgatggngacccggtgctgagaggaacgaggataatggctacttatgagtacgtgagcttagttgaaggtgggcaactggggatggtgggttcatgtttgatttgtggaantgggagagatgatttgcaccatcgcccgatcgccacctagtatcacatatgacgggtaccccataatccaacaagcttgatgtgagaaagcgtggaagagttagtcttcctacttttgtctgttgaccacagagtggtacctggagatatgtcgcgggagtcacgagaccttgtggacatcacgtggggtggctattgccataaccaagcttgaccaatcccgacccaatntgggcatagtcaggcagtgagaacctgtgacgtacctaaacaggcgagctcttggcagtcaaccaatataagaacaaataccacgaagcaatg

SEQ ID NO: 176564 - DNA, 456 bp, Glycine max
agcttctcgaatattatgcgtttgaatcggacttccgtgtgataagttatgaccatttgaatttctcgagagcatccattgtttaatttcaagcttctcgatatattatgcacctgaatcagacttccgtttgaaaagttatgaccattttaatttctcgagagcttccgttgttcaatttcgagcgtcttggtatattatgcgcttgaatcggacttccgtgtgataagttacgaccatttgaatttctcgagagctttcgttgttcaattccgagcttctcgatatactatctgccggaatcgaacctccgtgtgataagttatgaccatttgaatttctcgagagctctccgtggtcaatttcgagcatctcggtatattatgcgcctgaatcagacttccgtgtgacaagttatgacaattagaatttctcgagagcttccgttgttcaatt

SEQ ID NO: 176565 - DNA, 437 bp, Glycine max
gaagctcttgagaaattcaaatggtcataacttatcacacggaagtccaattcatgcgcatagtatatggagacgctcgaaattgaacaacgaaagctctcgagaaattcaaatggtcataacttgtcacacgaaagtccgattcaggcgcataatatatcgagaagctcgaaattgaacaacggaagatcttgagaaattcaaatggtcataacttgtcacacggaagtccgattcaggcgcataatataccgagacgcttgaaattgaacaacggaagctctcgagaaattcaaatggtcataacttatgacacggaggtcctattcaagcgcataatatatcgagacgctcgaaattgaacaacggaagctctcgagaaattcacatggtcataacttatcacacggaagtccgattcaggcgcatactatatc

SEQ ID NO: 176566 - DNA, 145 bp, Glycine max
ttaatcattcctacaatagatcttatccttcgacttaaattgatagatacgtaatcattatggcattgacttaatgcaaagaacatcttatgaccttgataatagactttagttaattttgggaattagaaattaatatggaaag

SEQ ID NO: 176567 - DNA, 150 bp, Glycine max
aactgcctgctatactgctcaccatagagtgtgtcctgaagaatgtcgcggtggtcacgagaccttgaggacgataggcggggtgctattgcccaaaaccaagcttgaccaatcgcgacccttccctgtcttaatgagtcagcgataacc

SEQ ID NO: 176568 - DNA, 211 bp, Glycine max
  unsure (1)..(211): unsure at all n locations
agcttgacaagggggtcatggggagtcattntctctatatctttctttcattcacaaataattaataaggttaattaaatttttaatcccttaaattttttagcctccaatttttaatctcttaaattttttttataaattttaatctttcattaatttttttatcactttacttcttctacattattttatctatttttaattcctcatt

SEQ ID NO: 176569 - DNA, 219 bp, Glycine max
tgaggcattaggacaatgagttatgatcaaatcatgaagaagtgagagactctagtaagcatgttctacaatatatagaaatggatttcaaatgtttacaatcagaaagtatatgacttttaatcacagacaaacaacctaaggtgaatgaagtcagtgaataacatctattaaatattgtcaaattctttaaagatgtgttattgtcgacggattcat

SEQ ID NO: 176570 - DNA, 418 bp, Glycine max
tgttagcgtgtattgctccgtttgtgtataggcgctgatgcgattatctgttgagtctgttctgttacacactgggacgctgaatgactcgcacacttctcattcacacagtgctctgagaagtgagataagttcactctcaattgagtacaccagcaatatcatgcaaggaattcgccttgattgctccgcatgattgagaaataccattagtcactaccattgatgactgttcagataactgcgcaatattacttgaggatagattgttggactgcagaaagtaataacccaacacacgacaaatgcgacatccatttaaataatatttgattgacaaatgcacttgatgtacggattcaatcgatcacctaattaattatgacaagaatctctatcttacctatgcttttatcat

SEQ ID NO: 176571 - DNA, 453 bp, Glycine max
  unsure (1)..(453): unsure at all n locations
agcttgacacattgcttaaccacctaaaaggcaaaagcaaaccaagcttaactatcaagagtagaagctacacacgatgcttaaccactcaagacagcagcaaaccaataacagtgcttaaccaccatataggtagaagcaacatagcttaaccatcgagagtagaagctaaacatggtgcttaaccactaagacagaagcaaaacaatatttgaatgcttaaccaccatanaggcagaggcaacacaccaatgcttaaccaaaggcagaaatttgacatcaatacttaaccaccatggacagaagcaaatgactgttttttttataaaaaaaaataaacacctaaaacctcttgatgaatggaggggacagcaatagtaaacagagaatatatatacagcagaggcaacacaccaatgcttaaccatccatggcagaaatctgacatcaatg

SEQ ID NO: 176572 - DNA, 477 bp, Glycine max
  unsure (1)..(477): unsure at all n locations
tcaagaatcaagtttcanagaatcaagattcaagaacaatcaagtttcaagattcaagattcaagaacaatcaagatcaagattcaagactcaagattcaagaatcaacagaagactcaatcaagataagtactaaaaaagtttttcaaaatattgagtagcacaagaatttttcactaaatcttttaccaaagagttttactctctagtaatcgattaccagaaggtagtaatcgattaccagtagccaacattgtttttcaaactgatttacaaagctgtaattgattatcatgagcttgtaatcgattaccaatgttttaaaacgttagatttcaaatttcaagagtcacaactagtgataaaacattttcaaaccatcttaaacttgtgtaatcgatttcataatacttgtaatcaattaccaaagtttctaaacgttttgattntcaaatntaaacatgaagagtcacatct

SEQ ID NO: 176573 - DNA, 445 bp, Glycine max
  unsure (1)..(445): unsure at all n locations
agctttntattctaaccttgaaattcaagaaagtaccttgatttctgaggtctttgggataaagatggtcattgaccaatccctcttctatgatttgacccaattgtctagtgacggtgtaccatttgaagttgcactggatgatgattggaagtttgatttttttgtgcatgatgcccaccggttggtttgcaccaaccaagcgaataggaccagaaggttgcttgccgattcattggctcttgaaagcggtatcctccattatctaattgtccgaatcttactccccagatctttaaaccttgcatgggtttctgaagaagatctaatagttatatgggcctttcataccggccgacaaattgattgggtacatctagtccgatatcgcatgcataaggcattgcgattaaatgctcctttgccttatcctcacttagttacc

SEQ ID NO: 176574 - DNA, 478 bp, Glycine max
  unsure (1)..(478): unsure at all n locations
tgtgactctnggcaatatctntaatactagtcactttaaaaattgtgactcttgaaaaaatcttcagaaacaagtcacttgaagaattgtgacttttggaaatgtatttttcgaaatcagtcactggtaatcgattaccgttaaggtgtaatcgattacacatcaacaaatttgactcctcattttaaattttgaaaatcaaaatgtttaaaagctctggtaatcgattataagtattgtgtaatcgattacacaagtttaaaatgatttaaaactgttgaaatttgaaatctaacgttttaaaacactgttaaatgattactaccttctagtaatcgattaccagagagtaaaaactctgtggtnatgatnttgtgaaaacttcttatgctactcaatgtnttggaaaactnttntagtacttatcttgagtgagtcttcccttgtttcttgaatcttgagtcttgaatcttgatct

SEQ ID NO: 176575 - DNA, 153 bp, Glycine max
agcttttcagaagggtaaaaggctcacattcactttcttctacatcatattcaaacttgtccaaataaataataaagtcatctcgactcaaagaaagacatataagtctcatacaactaatatagaacctatatgctaatgtcacatcctatc

SEQ ID NO: 176576 - DNA, 400 bp, Glycine max
tgtcatagcatgacatgtgcagatgaataagattatgagtgggcaatccacccgcaaaaaatgagtcattaggacaatgagttatgatcaaatcatgaagaagtgagagactctagtcagcatgttctacagtatatagaaatggatgtcaaattcttacaattagaaattctaagactttttagcacagagaagcaacctaaggtgaaggaagtcagtgaataacatctattaaatatcgtctaattctttaatgatgtgtaattgcgtcaggattcataaggtgggaactacaatttctcacaattaagtcgagtaagagattgctttgcattcagcagaccatctcttaaggatgctagggaattagtgccagagatagtgaagtctaagatgaaat

SEQ ID NO: 176577 - DNA, 133 bp, Glycine max
  unsure (1)..(133): unsure at all n locations
agcttttgtaaacccatatcattttagtagacgcctatgcnatattttcttttgtgcaagaacaataccctctgtgagnatcgggcaaccttccaagccaagaaaaatattgaagcgcgcctaaatctttgat

SEQ ID NO: 176578 - DNA, 90 bp, Glycine max
  unsure (1)..(90): unsure at all n locations
tgccattggagtgggctccctttcaatggtcatctntagagttntaagaggattctcaagaggcatcttgcgagactatctgaaacatat

SEQ ID NO: 176579 - DNA, 447 bp, Glycine max
  unsure (1)..(447): unsure at all n locations
agctttccacattgaattcagcacctaatgtcatattagatggaaattgtgtatcttaacataagagatttcagatggactttaatcctaatcccacagccgaccttttcacgagatctctacttaaccctttggttaaatgatcagccaaattatgctgagttctcacaaactccactgatatcacaccatgcatgattaactcccgaaccatgttgtgtctaacacccaagtgtctagacttcccattatacacttgactatatgccttagccaaagttaatatgggggaaccttattccttttgtaggaattcagttcaacaagtaacaggctgtcaacatagcctcaccccanaatccttcacttanacccgaataggataacatggaattcaccatttctttcaaggttttattcttcctttcagctacaccattctggttt

SEQ ID NO: 176580 - DNA, 221 bp, Glycine max
ccggcttgagtctaacatgaaagatatttttacccaagactacacttgcttccgcttattataattgctgcaaaccgtttgtcttataaggtgttagacacaatgtttcttatagagacaacgcctctcttggcttcaatttttacattcagatcctgtatattattccttttttggccaaaagctcgactacgttacatcttgtgacttcgttgaacatg

SEQ ID NO: 176581 - DNA, 458 bp, Glycine max
  unsure (1)..(458): unsure at all n locations
agcttgtcactatgtattntattngagtacctttcagagacttattgaaaatatctgctacgcaatcatttgaattggaggagtggtaatgacttcagattaaatcttctctctaatgaaataacaatcaatggcccactaaactgttaaaaccataatgctaaatcaatcaaaccaaaccctacgggattgtatatagatatgacaaactagtccaatagactccccttgagcaacaaatcaagtaagtttctccatataaacctcattgtcaagatcaccaaagagaaaagcattcttggatcatgaatatctagntggagtaacagccatggacaaaaacaagcaaactgaagccattttctccactggcaaggtgtccccttaatctaattcaaaaacctatagattcccttgggctattacacaagccttaagacaatcaagtcgaccattgg

SEQ ID NO: 176582 - DNA, 273 bp, Glycine max
tcatacagttgcgcatacaaatcatttggcggctcatcatttcgttcgaaagcatccactgcctattggaatctgcccttcgactgttaagcaagctttgtgttcaagcgagtgactctaagtgtagactgtgctacgacggtgcataaatcatccaatcactgccttaatctgcaggcgtcttaacggattaaaaccaaagtcctactgctgagagcgctcctgcgcgtgctcacttgtgatccatcacatgagcaactggggactcctgag

SEQ ID NO: 176583 - DNA, 435 bp, Glycine max
  unsure (1)..(435): unsure at all n locations
agctntgaggattntcaaacgacaataactttttactcggatgtctgattaagtcccgtaatatatcgagacgctctaaattgaatgttgaagctctgaccaaattcaaacgacgataaatttttactcggatgtctgattgagtcctgtaatatatcgagacgctcgaaattaaatgttgaagctctaagcaaattcaaacgacaataactttttaactggatgtgtgattaagtcccgtaatacatcgagacgctcgaaattgaatgttgaagctctcagcatattcaaacgacaataactctttactcggatgtctgattagagtccgtaatacatcgagactctcgaaattgaatgttgaagctctgaccaaattcaaacgacgataactttttactcggatgtctgaatgaagtccgtaatacatcgaga

SEQ ID NO: 176584 - DNA, 409 bp, Glycine max
ctcagcttaacattcaatttcgagggtctcgatagattactggactcaatcagacatccgagtaaaaagttattgtcgtttgaatttgttcagagcatcaagattctatttcgaacgtgtcgatatattatgggactcaatcggacatccgagaaaaacgttattgtcgtttgaatttgctcagagcttcggctttcaatttggagcgtgttgatatattacgagactcaatcagacataccagtaaaaagttattgtcgtttgaattggctgagagcatcaacattcaatttcgagcgtctcgatatattacgggactcaatcagacattcgagtaaaaaattattgtcgtttgaattgctcagagcttcaacattcaatttcgagggtctcgatagattactggact

SEQ ID NO: 176585 - DNA, 458 bp, Glycine max
  unsure (1)..(458): unsure at all n locations
agcttcctttacacaaagagaagagnaaaatgaaggattgaagaaatacaagtagtggggatgtctcatccacctctaggacctcacaaccactcacaaactcatctcaagctctcgggacgacttcctcttcaagctccattctttgcaggtctttgcacaaaaaaatctctcaaaactctatggattcagacacttctctctcttgaatctctcacatgcagaagctcctcgagaaaatggccaaaatccctggaacttggacctttctctctagaaatctctaaacatgcagaagcttcgagaattgcccaaactcctctccaaaatctaatttcaggcttaaataggtggctntgtttgtgctagcgcgcttagcgtgactatggactgctcagcatgcataaaccaaaagaagaagacaagcaagaaaccaaaagatgaaacanaagctaaac

SEQ ID NO: 176586 - DNA, 478 bp, Glycine max
  unsure (1)..(478): unsure at all n locations
ctcaagcttctaacgctatacaagaatgaagctctgataccacttgttagacaagtggtctcagatatcttaagaaggggggttgaattaagatattccaaactgtttcccctaattaaaaatctatttcactttttactcaagttatgaattcccttaatgacaatcttcttaaatattaattcaaatgaaacaatttgaatatgaatataaagcaataataaataaaggagattaagggaagagaaaatgcaaactcagttttatactggttcggccacacccttgtgcctacgtccagtccccaagcaacccgcttgagagttccactatcttgtaaattccttttacaagttctaaacacacaaggacaatccttcctttgtgtntagaattcctttacaacaagagactcacaatctcttaatcccttagagaatgagaagaagaagaagaacaaatctctctagaaagagat

SEQ ID NO: 176587 - DNA, 432 bp, Glycine max
  unsure (1)..(432): unsure at all n locations
agcttctcaaggaggtgagcttagttattagaggggtgtgtgtatctaagctctagcttctcaaggaagcttctcaaagaagcttctcaaggaagtttctcaagaaagcttctcaaggaagcttctcaaggaagtttctcaaggaagctacctaggctataaatagaagcatgtgtaacacttgttgtaactttgatcatttgagaattacacttcanagttcagtacaattctgatatggctccagattgaatgtagctacagaacttgtgcaagaaggatcatgagtcgttcaaagaatacacccagaggtggagggacctggaagctcaagtagtgcccccaatgacggagaaggagatgataaaaatgatagtacacacattaccagtgttctactatgagaagttggtgggttacacgccttcaagc

SEQ ID NO: 176588 - DNA, 453 bp, Glycine max
taccatacctttgtgttcgacaagtggcctctgatatcttaagaatgtgggttgaattaagatattccaaactacttccccaattaaaaatatatttcactttttattcaagttataaattcccttaacaatgaacttcttaaatattgattcagataaaacaatctgaatatgaatataaagcaataataaacaaaggagattaagggaagagaaagtgcaaactcagatttatactggttcggccacacccttgtgcctacgtccagtccccaagcaacccgcttgcgagatccactatcgttgaaatttcttgtacaagatctaaacacacaaagacaatccttcctttgtgttagaattcctttacaaaagaacccacggctcttaatcctagagaatatgagaagaacagaatgaattatcctaaagagataaattacagatgacact

SEQ ID NO: 176589 - DNA, 448 bp, Glycine max
  unsure (1)..(448): unsure at all n locations
agcttctacttatgtggcagggcgggcttacttcaccttcttgtctccaacgcgaactttgaccattgttcttccttcccgcgatgcttcttttcatgtctgcctgagtgggcttatagcctaaaccatacttcccacgattaccttgggtatttatcagtctagttatgccgccgctgttttttcctaaacccatcccgggctcataaccgttccccaacataactcgggccatcattaccgctgcatcggacagactangctgcccaaagagggagtccacggaggaaatgctgaccacctcataagactggaaagcagtttctaacgattcttctgcggcttccacataaggcatggaggatgggcagcttaccaagatatcttcctcgcctgacacaatgaccaagtgcccttctactacgaatttcagcttttggtggagcgg

SEQ ID NO: 176590 - DNA, 492 bp, Glycine max
  unsure (1)..(492): unsure at all n locations
ngtatttctgttctagagtatgtcatgtgcttcaacttcgcatttgcaaatattggtgtgcagaatatttaagggtggataattaagtgcttgtttgcattgaaagcccaatggaatttggcctccgtcgcttttggaaaatttgtgttgaaaagtgtgattttatctgaaaactgtgctaccccgttggacaaataaaccaaacagaaccttaatcagcaggcaatttcacccattagaaccagatcaagaatgcaaatgacaaaaatccttgaaaaacttattagtcattagttgttttaaaaagggcgccaaggccgagtaaatatggttatagcattgtaaagaaaaagtggcactgcaagtggtattaacttctgcatttgataagaaaataccattcctccttgtcgagcctcttcctctggacatccaatgttaatgaagttggaagatcaacatanaanacaatcaatcctctgttcacacaat

SEQ ID NO: 176591 - DNA, 442 bp, Glycine max
  unsure (1)..(442): unsure at all n locations
agctnttaaccatgctgctnggaatctaatcactgaatcaatcatgtcactgagactcggaacataaatgaacttctcccttgctatcattctttttctctattttttctctctctctagctgccttgctatgttatatatctatcttcatatacaaatgatactctctttttacttcatggtgaataattaacctacctaggtctacaatgacggactgacacttccaagagaagagtttgaatccagagaatatcatctgtggcagcgactaaacttctatatttagctgcaggggccacttctatatcagttgtggctttgtatctattgatactgccatcagaattactaatgatcaagcacaccagagaaaagatgttatttcatatacatagacctaaacattgatctactaacccgtgtgcttaaggaccatata

SEQ ID NO: 176592 - DNA, 441 bp, Glycine max
gaatgaggcttgcagcctcttacacagtaactatgaccactggacgcggcttataggtgatgagatatggagctggaatgacactgaatacatgcaagagctgaccctttgctaaatcaataagagttaattcgctggagcagcgcttgagacgcactatattgtgccacacatttatgagagatgcattgttccagtcttaaacttgcgggatattgcgatgcacacgatgatccaatagggggggtcgtcctgcatgaggagcctgtcatgaatggataaaaatgcattgggacagtcttggtaaatgctttctaaaagcatattgagttcttagagagaacttgtgctgcgaccttgatcaaggagggtgtgattgtgttaacattgcctatctattcgtagaaagctattatagaataatatcttttgatccttcct

SEQ ID NO: 176593 - DNA, 447 bp, Glycine max
agcttggatgatagaggtttgcggttataaacatattagggtgatagattggtggataaagcagcctggacccaagaatttgcgcacttttgtctatctgatttaagttttagttcctcttctggtatgcttctttcattatctggagaagaatcatctggaatggatttagatagcgagtcaacaatcatccgcgcactatttatgctagcatgaagagttaggaactgctctactgcaggctgtgggttttgttccttatcagaattacttagctctgcatatacactgccaaaaacatcacaaaataagagtcagaaacaatctgttatgctgtattgcaggagggtgacacaatataatgcctaccatcccatagaagaattgtggaagacgtggatgattaacataatatatgcgtaaaccccagtctgtctgtatgattga

SEQ ID NO: 176594 - DNA, 457 bp, Glycine max
tacttctaccttactcgattatggattccaacagttcaaggctgattattctcttttcactaaaaggtctcctactggccttaccattgtccttgtttatgttgaagatttggtgcttactgacactgatcttgctgaaatctagcaactaaagcactccctggatgcaaaattcagtattaaggaccttggaatactcaaatacttccttggttatgaagtagcccgatccacctcaggtattgccttgcatcaaagaaaatattgccttgatcttcttctagacactaatctgcttgctgcaaaaccttctttcttacctatggatcctacactaaaatttcacaaatcttctggtattcctttctttgatcctactgtttacaagaggcttatggcgcgattattatatcttactcacacaaagcccgatattagctatgctgttggaaaattg

SEQ ID NO: 176595 - DNA, 381 bp, Glycine max
ttgattgtacttccactttgacaagtggtcaacacaacagaccgctccgtattattttgcccctcttctagaacaataattgtgtcaccgtgtcaactatctaatctataaacctcacatagtggggagagctgaaaccaccctatctttattctattttaaaaatgatataacaatctaattcctaaccctctttcttttctacacaccacagtgatacttccccttaccccccatgcccaccacctgcgccgagacaccctctacatgcctccatgacacctcttttccatcatttgttcacatacacaaacatacatgatcccctccatcttaacttgtcccaagatatactaaccatttaaaaaactgcgggaaaac

SEQ ID NO: 176596 - DNA, 141 bp, Glycine max
atactgtgaatcgtttgatcttatatcggattttataccctatggataatatctacagtttacgagaaccatgcaccaacatttggtacttacctactatcaatttgacggaagaacgagactttgaccactatgtacatg

SEQ ID NO: 176597 - DNA, 426 bp, Glycine max
  unsure (1)..(426): unsure at all n locations
agcttcttagcattgccaacaaagtaagattgcttggttctgaattntccaatttaagaatagttgaaaaaatactggtgactgtccctgaaagatttgaggctactattacagccttggagaatactaaggatctgtcaaaacttaccttggcagaacttgtaaatgctttgcaatcccaagagcaaagaagaagaatgagggctgatgattctgtggaaggagtattgcaagctaaattgcaaattaaccaaggagagaaaagcaagtggaagaaatacaacaagaagaatttcaatacacaagaagcagcgggtaacactagcaacaaaagtggagacaacaacaaaggatttcctccttgcaagcactgtggcagaatgggtcatcctcctttcaaatgttggagaagacccgatgttaagt

SEQ ID NO: 176598 - DNA, 461 bp, Glycine max
  unsure (1)..(461): unsure at all n locations
tgagggcactgattcttanaaataactgaataatgtagtggtgttcacttgtcagctgaagcaaagggtccagtgcaacaatactcaagttggtccaatgccaaacgtgcactcttgcaagcaatgacacttccatctgaccctttgacagcaaaatttggaggacaaactatgttcacatcactagggcagctagttgtgttgcaaccccttaagcctccctgagcgatcaccaacactggcagattgaagccatcaacaaggctaacatcatagaaatcttgtcctttatttgaagccaaagtgaattccactagagaaactggaggggttccaccattaccattgcatggtacttgacctgatccacagtcaccagtggcacaagtgaatttcccatatgtgtctgttgagcattgagacttggcccagaatctgccagaccatggagctgtgacatc

SEQ ID NO: 176599 - DNA, 421 bp, Glycine max
agctttgagaagataaaattctataatgatgtgattatttataaattctcattgacggaggaattgttggagaaaaattcaaattctaaaataaacaaagttggtgaagattcaaggagattcttttaggaatttgcgtttcaaacctttaggattttatctagatttaaatatattattaatttgttttaacttattctacatatttgtttcttgttttaaagactacaacatgataatattcggattctgtagcgctatttagctctatatagagagccaacagaataattctacagtatatttcatctaagatcccttgaacatgtggataaatctgttgtgtgaaagttttccaacagccttggcttcattagtgcatcactctagctgctcgctctttggacacatttcgagaaat

SEQ ID NO: 176600 - DNA, 317 bp, Glycine max
  unsure (1)..(317): unsure at all n locations
ttgaagaatatgcttgctgcctattacacagttacctaagaaccattatgacgcagataatatgttatgccctgtgggtatggaataccacaaaatacatgcttgccctaatgattggcttttgcataaacatcaatttgctgaantgcgcagctgcgctacatgtggagcgtcacgtttcaaagtgaagtatgatgaaagcagtgtagatggaggcacatacgaagacttggcatgacaagagtggtggggtcttccagtaataccaacgtttaagcgattgtttgctaatgcacatgaagcataattcctcacat

SEQ ID NO: 176601 - DNA, 313 bp, Glycine max
agcttcccaacatggtttgaatgtagcaagaacatgggcattcaacgatggaggttacaataatgcccttcaaatttctcctggttcttacaacgagaatgtcttcaaggtatcaatcgtatcttaattaatttactaccaaaatagttgtatgctattattgtgtgcacacatgagtagttttttttttcaaaaataattaaatatattaatttatatctcaataaaagaatgatattaattactccctttcttcttatatataagactcaattacctaattcattaaaattaagaaaaatggttaatttag

SEQ ID NO: 176602 - DNA, 380 bp, Glycine max
  unsure (1)..(380): unsure at all n locations
tgttagctcgatgacttgtcagaaacaatatcttgactagcgtcacatcagagaattaaacttggacatcttttagaaatgcttgctgaattaagacaggcagaaatccagcgtctccactagggacaaaaacccattctttgcagcatataatccaaaaaagcccatgagactgagtcataggccttttcaaaatccaccttgaaaaccatagctggccttatgcttctacaagcttcctcaatcacctcattaagaactagtatgccatgcaggatgtgtctgtttttgatgaaagttgtctgcctctcatcaataagaccagatatcacttgtctcaatctatttgctaataacttagatatcaccntgtacataca

SEQ ID NO: 176603 - DNA, 165 bp, Glycine max
  unsure (1)..(165): unsure at all n locations
atgcaagtcaatnttcaagaggcatctctgagaggatctttttcgggcatatttgcacaaaaactcttgaactaggaaaaagatagccatcatctttctgttcttagtgaaggcagtttgaaggtccccaataatagactcaaacactggggctatgcgggtggc

SEQ ID NO: 176604 - DNA, 394 bp, Glycine max
gcttacacgaatactgttgttattgaagaatatgcttcctgtagataacacattacccaagaaccattatgaggcggataagatattatgccctgtgggtatggaataccacaaaatacatgcttgccctaatgattgtattttgtatagacatcaatttgctgaaatgcgcagctgccctacatgtggagcgtcacgttacaaagtgaaggatgatgaaagcagtgttgatggaggcacatacaaagattgtccatcaaaagtgtgttggtattttccagtgataccaaggattaggcgatttgttgcttatgcacaagacgcaaaacacctaacatggcatgctaatgggaggattaaagatggatcgctcgtcatccagctgattcttctc

SEQ ID NO: 176605 - DNA, 455 bp, Glycine max
  unsure (1)..(455): unsure at all n locations
agcttcattctgcactctgaaaaaaggatgagatagttgcacataagagaaagcttcctgatcatgagggagctaacaaaaattttcatggaggttgaccttcttcgagtagttttgacttccagcaccctcttatccctcttccatttccacctagagcaattccaaacaaaataatggaagaagtggaaaaggagatcttggagacctttaggaaagtagaggtgagcatacctctgctagatgccatcaagcagattccaagatatgccaagtttctaaaggagctttgcacccacaaaaggaagctcanaggcaatgaaaggattagcatgggcagaaatgtgtcagcattgataggtaaatatgttcctcacattcctgagaaatgtaaggacccaggtactttctatataccttgcattattggggaacagtaaattgagaatgtcatg

SEQ ID NO: 176606 - DNA, 477 bp, Glycine max
  unsure (1)..(477): unsure at all n locations
tgcactgtcatggatattctcatggcaatatcgttacagcatgactgataagacaaaccaatatccatcactacaaagacacgcatttgtaaaatgatggacacaatttgactcatccaaagcggatccagaacaagtaaaactctggttccaatcccatccagaattcctcaaagcagctgatccagaaacttctgtgttttggaaccaaaagtctcatctggcagcatttttagcaggatcgacatcaaaggaagtcttagctaaaaatctgaaggaagttctgcaaatgttacagtaggaagaagaagcttcatcctcaaagaaggaagaaacaagttctgctgaagaagaagaagaatatccctnttaccacaacgaagatgattggtttggtatctggttagaataacattaatntcggtcacacaaccgtatatttggtattaatgtgtaaataatgctcgacaatactac

SEQ ID NO: 176607 - DNA, 472 bp, Glycine max
  unsure (1)..(472): unsure at all n locations
ntttgcncagtcggtcccgtgatcctctagagtcacctgcggcatgcaagcttanagtatgcccgagtcattcatccctaatgatgatgtgtgaagtnatggcgatcagaattgccattccttggattatatgggtgaaccaagctcatgcttttacaaaaaggttcatcaagtcaagttgaaatatggaaagaaccgtcttgccaaaatggggccaaagatgaatcgagacacatcactgcttcgtctacttgccaaacatattaggattattggatggctttgtactttcagttcaccttgcccaaaaggcataaccatggggaaatctaaatgattcaacccatatcttgacaaaacttaactgacatattcgatacatcatgttttcatggttgcatgtaatggcttcttcttgnaagaaatanattactattactaatttattaaagtgttttttcttgttcaaaaa

SEQ ID NO: 176608 - DNA, 484 bp, Glycine max
  unsure (1)..(484): unsure at all n locations
actcagctctcacaagtttcttcacaaataactatcatgaagcaganaactagcaagactacccatcatatctcccaaaaccccatacccacgaaatntaagagagaaagaagtccacccaaacctgaattttcgaagtcccactcgtagccacgcacttcacgaccccgaaaatgccctcctttcgcgatttggggcagaaatgatggccaaaggttgaagctttgcttggagcttcaatggagaatgaagaagaagaaaatggcaacgtgagggagagagagagctgtctgaaaaagtgtggggctgagtgaagagagagaaaagctctntggttttaaataaaagggctgtctctttctctattattttataaaagcaatgccacatgtctccatttgagtggagcaaaaagggcccactttcccttttggactgtgacccatactcagtcacaaaagtgaggaatatctgacctttgaaa

SEQ ID NO: 176609 - DNA, 362 bp, Glycine max
  unsure (1)..(362): unsure at all n locations
gcttggaaatgatttctatacaaaaattagttgtataaagcgactaacagtcgacaagggtgttgccctcgctcctacgtatcctcgggtgcgatgaggaaatcagacctacgtagttctttaagtttgaaattttgttggttaaattgtttttatcttttttgaaagattgattttaaccgagcaaaagtcgtttaaggtgttggacctcanaatgatcttttgatttttgaaaagaggagagagtcgttaaggcattggaccttgaaatgacatcttggtttttgaaaggagagaattgttaaggcattggaccttgaaacgacctcttgatttttcttgatgaaatgaagaagcttatg

SEQ ID NO: 176610 - DNA, 472 bp, Glycine max
  unsure (1)..(472): unsure at all n locations
gtgcgggttcgggagacaaaggtcaagcgttcgcgatatgcgaagatgatattccgggtactttggatttggtacgaccatgctctcctgatttccagctgggaaattggcgagtggaggaacgccccggcatttacgcaacaagcataatgtaaacctttacggttttaaaagctctatagttgggcctaggctttagagttttcattctgttaaggctttgtgtcttttgtgtttgaatttataatacaaggatctttcttcatctgttcctggtctctacccattctcattcatttgcatgtttacttctttttctaaaacggcatattcgatgacgagtcccccgaaggtactaatacctgngacccgtctatcaacttcgagcaagaaatgaatcatacgggagatgaaggagatgagggtgtgggactttcttcngaactagaaagaatggtcgcccatgatgacc

SEQ ID NO: 176611 - DNA, 457 bp, Glycine max
  unsure (1)..(457): unsure at all n locations
agcttggtagtaactctatggacttaaactagctagccgcaaatggtatgagaagttgaatttcttgcttctccaacttgggtttcaacattctatagttgatcactccttttttatccatcacacagttgattcccttactactcgtgtatgtagatgacatagtcattgttggaaattctatggatatgataacttcattcaagcagaatttagataatcaatttgggcattcttaagttctttcttggtgctggtgttctcagtgccaaacctgcaagcaccccttctgaacctacctttgagacttcgccaagatgtcgctcctatacctgactttcacacgcccagatatatcccatgttgaccaacaacttagtcaattttcagccctcccaacagtgagtcattatcaataagcccaacgcgtactttgngtatttgaaaaggaatccca

SEQ ID NO: 176612 - DNA, 466 bp, Glycine max
  unsure (1)..(466): unsure at all n locations
tcctcgcacatattagggaagttgngagcaagatgctggtcatgtatatctacaagaacaacttctatttgatatcgaaaaagaaacaagcacaaagatacgtaatgttgaatcangaaaagttatgttaaaagaacgacttcgccataaaagggtacttcttatactcgatgatgtaaataaattgcatcaattgaatgttttgtgtggaagtcgtgaatggtttggttcacggagtagaataatcatcacaactagagatatgcatatacttagagggagaagagttgacaaagtgttcagaatgaaaggaatggatgaatatgaatctattgagctttttagttggcatgcatttaagcaagcaagtccaagagaagatttattgaactttctagaaatgtagttgcttattctgcgggattgcactagctcttgaagtccttgggtcctatttgtttgatat

SEQ ID NO: 176613 - DNA, 325 bp, Glycine max
  unsure (1)..(325): unsure at all n locations
acagcgtgcaagctgtatgcaagccagtacatangaggcgtctttgggaggatttttttctggcatacttgcacgatatctcttgaactaggaagatgatggccatcatctttctgttattagtgaacgccgtatgaggtttcccaagaatacccacactgactggtggtatgcaggagggctgaattataaacaccaatttctttatataaaataacatagcataagcacggagacggtgtacgagtcgaactaatatttatcggccaaggacacctacataaccccggatcatcatgattatttgattgaaaactgaaatatc

SEQ ID NO: 176614 - DNA, 278 bp, Glycine max
  unsure (1)..(278): unsure at all n locations
gtactgatacttaaccttggcccacggcantagtatgactacaactctacgtgaccaactaccagaacgagcattcctaactttattggacaaaacatatattctccgaagaatatacggaacagggcagggaatatttactaattcttaacttaaccaactctacggaggccacctaactttccgctttccggaaccactactctcaactgatcattgtattatgaccaaatacatgctgggctcctattactcatactcaggaagagaaaagtccc

SEQ ID NO: 176615 - DNA, 445 bp, Glycine max
  unsure (1)..(445): unsure at all n locations
agcttcaggttgctcattgactccaaattgttgcaaagaaggacagagatctgtatggtgatctgcaaaaaaacatagaccacagactctttcaataggtgcagatgcagatttctgattcatggcaagctgagttactaggttgaccaaggcatcaagttttcccttaagctttttattttcaacagatgaagatgaatccgtggccacctcatggactcctctaaggacaatagcatcatttcttgcactgagttgttttggagttggaagccatcttctcaatcaaattcctagcctcaacaagagtcatatcacgaagagctccaccactggcagcatcaatcgtactcctctccatgttgctaagtccctcatagaaatattgcagaaggagttgctcagaaatctggtggtgaggacagcttgcacacaatntcttgaa

SEQ ID NO: 176616 - DNA, 486 bp, Glycine max
  unsure (1)..(486): unsure at all n locations
tgtagaccanatgcttaccactactaaaggagaagccttcaggttgtttcatataaacctcatcctctaaatcactattaagaaaggctatnttcacattcatttgttgtaactcaaggtcaaaatgagcaactaatgccaagataatacgaagagaatctttcttagatacaggagaaaaagtctctatgtagtcgatttcttctttttgagtaaatcccttagcattgagtcttgccttatatctctcaatgttgcctaatgaatccgttttgatcttaaagacatttacagccaatggcctttgccccattaagaaactctacaaggctccaaactccattactctgcatgtaattcatctcatccttcttggcatcataccatagatntgactctntacaactatggattgatcaaacgtctcatgatcattntcagctgcaatattatagtcaaattttgcaaatatacaatataataact

SEQ ID NO: 176617 - DNA, 448 bp, Glycine max
  unsure (1)..(448): unsure at all n locations
agctnttggaaggatcgagaagtgccttatgaatcctcccgtgcttatgccaccggtacctggaaggcctctcatcttatacatgacaatcttagacgagtcaatggggtgtatgctggggcaacatgacgaatccgaaaagaaagagcgcgctgtttactacctaagtaagaagttcacaacctgtgaaatgaactactccttgctcgaaagaacgtgttgtgctttagtatgggcatcccatcgtctaaggcagtacatgctgagccatactacctggttgatatccaagatggacccggttaagaacatctttgaaaagccagctctcacgggacgaatcgcccagtggcaagtcctgctatccgagtttgatatagtctacgtcacccanaaggcgataaaaggaagcgccttagcagaattattggctcaacagcctcttaac

SEQ ID NO: 176618 - DNA, 465 bp, Glycine max
  unsure (1)..(465): unsure at all n locations
tctcaggtccggtcatggaaagacttggcaactgccttcattatgcagtaccaatacaacacggatatggctcccgatcggaaccagctntagagcatgaccaagcgagaacatgagtccattaaagaatatgcccaaaggtggagagacctcgcagcccaagtcgttccgcccatgactgagagtgagatgatcacaattatggtagatacgttgcctacgttctactatgaaaagctgatagggtacatcccagctaactttgcggacctcgtcttcgcccgagaaaggatcgagtccggactaagaaaaggcaagtttgaatatgcctccaacgttacccccaacaacaacagaagagccccagtggtgggcacgaagaanaaggaaggagatactcacgcggtcaccaccgccccaacatggatganagcgccccanaatatccaaaactcataccagcac

SEQ ID NO: 176619 - DNA, 449 bp, Glycine max
  unsure (1)..(449): unsure at all n locations
agctntcatcaaatatatgcatgttttcaataatgcaattagtaagccaatcacacaaaccaatcatcaaatataaatgtggattaaatattaatcgatgtcaataatatgtttagtaggttatgtaacttaatgtgaaaattttcaaaaattttaataattgcagcattagtccaattcaacttaatgtgataaatacattggtcttcaaatttcacctcaataaattatatgacttatgtagaaaaatctagcaaatgaatctagcaaaatcaaatatataaatagaaaattacattagacgatgttaattaattctccttcatcatgatcattacgattagcatgaacgtgattagcttcttcttctccgacaacattaggagtgatttgtatggacagaggactaacataggtgtccatgtatgaatcatcatcttctacattaa

SEQ ID NO: 176620 - DNA, 420 bp, Glycine max
  unsure (1)..(420): unsure at all n locations
ggtctacgcagttaatgttntattcatcgttagataattaatttgttaacnnnnnncataatattttgtgtgtaacctaaaacttcattcaaattatataaattctcacaagtggatcaacccagcaatatgacttgttttttcaaattctcactactagaaaaagcagatttaacattggcgcattaacattgattttctacaaaaccgatgttaacataaatgcggtgacataattgtaaataatgtgtatccgttaacatcagttttgaagaagaaaaccgatgttaacgtatgatcagctaacatcggtttgttgaataaaatcgatgttaacgttcacatcaatttgttaacatcgggtttttattgaaaaccgatgttgaacttacattntaaattatatntgacgcgacctat

SEQ ID NO: 176621 - DNA, 442 bp, Glycine max
  unsure (1)..(442): unsure at all n locations
agcttcaccttaggccgctcttgatggatctattcatgcctaacacaatggaccctatagactgaagaaggaacaatcaactagacctcctttggatagaggtccaatgatcctaccagcagttggcctgactgtggctttggctctgcctactatcgaggctcatcatcacagcgctagcatgtcttccccttgctatgataggccttcatgggaggggtcgagaccaataatatatgatgtttgcttcatgcgaaccatctataaaagatgaaaaaaaaaagtcattataataaacaattatatttagctaagacattgaaatacataattgaacattctatctgtctaagagtaataaanaaatatacaacagaatgatttcgctgtgtgtctcatcataatgcacaatagaatcacgatttcattgggtattatttcg

SEQ ID NO: 176622 - DNA, 440 bp, Glycine max
  unsure (1)..(440): unsure at all n locations
agctatcactgcttcttccttccaatccttaattcatgaaccttagatctctcctttntactcgagaaaccttcttcacattcatctttactttcatcaatggcggcctcttctgaacataatatctctacaaaccaagacacttatgctaatactgagagaagcataccattgccaacaccaacaatggccttgaattagttcttattacaggtcgtgaagaagaatgtaggaaggtgtgggaaacccatgccttgaatgagttctctctgaacactaaaaacatttgctttgcaggtccttaccaccctaaactagattatgaagtcattaggagttggttcccaacttataagaatgaacacccataatccacaaggaaaccattaggagtgactttctaaaagagaagagtggaattntcaaagcctccctgccta

SEQ ID NO: 176623 - DNA, 541 bp, Glycine max
  unsure (1)..(541): unsure at all n locations
gcgtaaatgtacgctatgcancangcgacactttgttaaccttgcacttacgagacactgtggagtgctcaagctcgctcacccacggaagcagcacagatctctcacactcactggagtgggacatactaggaaggccttgattgtctcatggaacagttggatcacatttataccagacacgggatctaggagtacttgacatatatcaaagagaatgcttctctattgcgggataaagagtgctttttccatggacggtgagaacttgacttacacgcgctaagggaacatgtaggcttcttactgccaccgccgatttcatacacttatcggctagcgaactactgccttgtgacatgagcatgcagccttataaaggcgatcgtggcattaaagagccccacaggagtcaataggcattcgtactaaccaaacttggtctggaaagcggtctcgaagactaacgctttgttcctgaggtgcgatgaccactntatgagcaagtttgacaagatgatggcacctgcacctatcaagc

SEQ ID NO: 176624 - DNA, 350 bp, Glycine max
agcttggactatgactacgaagccattatactattggaatgcgatatatgtaatcacgctctcttttgatcctgtcgaacactacacgcagactctgtttctttccattaaaaaaccttcttccttcttttgtgcttattaacaaagactttgctgtgcaagataaatgagaatgatctattcaagcatgactggaggagcagatcatgagttcaagtgctgcagatatatcctagaaatggatactagcattccttgtcggacttctcactgagattatagccactctcatcaatcctgcagatgagaatattgctgggtataagcttctggctgagcttaaatacgtc

SEQ ID NO: 176625 - DNA, 124 bp, Glycine max
ctcagctttgctgccaagttatcatagagcttgtcgacagctaaatctgcatcagcggaacaatggcgagttttacagccctagatacaatccaggttggaggagtcatacacaatgtgagatg

SEQ ID NO: 176626 - DNA, 405 bp, Glycine max
  unsure (1)..(405): unsure at all n locations
agctnttcaacatggcatgcanaatggtagacctgatccccacaactaggaccatttttaaacttgtttttctcactcacactgtccataggtctaagcttcagtcttctcaacacgaacctctactggggtttcaactgacttagctggtttgttctcttcctctgtggttgctggtggtgctactgctgctgattctgtttcagtagtttccttaagcctctctgcttcttctttcacttcttcagttttctcctctgatttctcttctgctggcttctcttcctctgtctcctttgccaccacctcctcggtctcaactggaacttctttaggctcctctggggctacttctgtagntgttttctctactggttctgttggngcctcgatggcttcttcctt

SEQ ID NO: 176627 - DNA, 419 bp, Glycine max
  unsure (1)..(419): unsure at all n locations
taagagagatgtgttgtgcttctttctatacatttctttttcagactgataacttcctccactgtacagggaaagctgagaaacggttctttggcagctataaaggttttatcagctgaatcaagacaagggatccgggagttcttgacagaaatcaaggtgatctctagtatagagcatgagaatctagtcaagttacatggatgctgtgtggaagacaaccacaggattttggtatatggctatcttgagaacaacagcctagcacaaacacttattggtaagtgaactactgccatgtgatgtgagtatgctntgttagaaaaactatcttgataatgaattaatcctcatgagtttataggttcaggccatagtagcatccaattaagttggcctgtaaggaggaacatttgcat

SEQ ID NO: 176628 - DNA, 435 bp, Glycine max
  unsure (1)..(435): unsure at all n locations
agcttccacaacatccaagcaaaacaacattcaaacagcacaagctatcacagccaagcaaaacagagcaaaggcagaaaactctgctcaacacatcaaccaaaatcacagcttttctcacttaaagaccacagtaacaattccttcgatccaattcgttaaccgttggatcgactccaaaattttactggaagtctatagtgcataagcctacattgtggccgttgggatctactagcaaatatccagaactcattctgtactactctttccacagccaaccacacacaagcattttctgcaccaagctaaaatcctggtgcacctaatttgacagcaaaattctgcataagtgcagatttcgaaaatcacancttccctcatccaatcttgctcaaatcanatcctacaagtcccaaatcaggtatcaaacat

SEQ ID NO: 176629 - DNA, 468 bp, Glycine max
  unsure (1)..(468): unsure at all n locations
aatgcgaaagccccactccatcattaggattagtacctgacatctcanacaaacaaatcaaacgtaacaagacaattatagttgctgtttgaatacctcacccactcaagtgtatcacacaattatggcttttctctaatgaaacactcttgccttttaccactctaattccccttgagttcttaggcaattcaagagattatggccacaacaaagaacaattcaccaatatgtgtaaggtaaggctagacaaggaaaaggttaaccaagaaaaaggctaacaatgtttttaggcacaaatgaaggaaacaaaattcagaatttaagaattcaagtaacaatccttcatgcaaccaatatattaccttaaagagtnttttttttaagttcttcaagcatgaaccattcagcccaattntttttttttttaattttgttatacaaattctgcttttttttttttataac

SEQ ID NO: 176630 - DNA, 114 bp, Glycine max
agcttgcgcttgagttgctatattatcctctgatcgactctactttttattctcttagctaaaggctcaactctcaaggacacaagctcacattggccttattattattagctt

SEQ ID NO: 176631 - DNA, 328 bp, Glycine max
  unsure (1)..(328): unsure at all n locations
gttgaggatggagaattgcctaagcaatcactacgcatggctccaagctccagggtgaatgacgcatgaacgaaatcgccattcatggngctccgaaaaggggttgaggatggcgaattgcactaagcaatcactatgcaaagctccaaccttcctgngtggaggacgcatgaacggaacgcaattcatgtggctccgaaaagggttgggatggagaattgactaagcattacttcgatggctccaactcgtggtggaggacgcatgacgaaacgcactcatgggctccgaatagattggaatgagattgcctaacacatacgcacat

SEQ ID NO: 176632 - DNA, 472 bp, Glycine max
  unsure (1)..(472): unsure at all n locations
tggcatcatgcagtgaatggganactacccctcaaaataccgatattaccttccaatcacccttgttccaattttgatgtgatattgatcaccactcaaaacgaaccttcacttatcctccgattcacaggatgacaggatgacaagatgcaaatgcatgcatgcttatgtttaggaagtttaagtgcaacaattaaacaagtgttattatgttcaattttacttaaacacttatggcaccccattgatagagccaaatggctctggattcaaaaatcgatagtgtattctaaaggcgtagaagacacaacacaggaagctaaagtgcanatcatcaatccattgtttattaatgttgcgattatgggttacacaggatnggaagacnttggaaatcccaatgagcctttggagaacaatcatgtattgactcctctagctggcccaagtactaagcataatatcatttgac

SEQ ID NO: 176633 - DNA, 434 bp, Glycine max
agcttagaccatgtgaactgctcttgcacttccatcgttcaatttcgagcggctcgatatattatgcgcttgaatcggacctccgagagaaaagctcagaccatcatgagcgctcaagagcttccattaatcaatttcgagggtctcgatatgttatgttcctaactcagagctccgaggcaaaagttatgtccatatgaatatgtcgagagctctcggtgtttaatttcgatcgtcttgtatatgtgatgctcctgcatcgcacctccgagtgaaaagttatgaccatttgaatacctagagagcgtccgatcttcaatttctagcgtctctatatgtgatgcgcctgaatcggacctcctaatgagaagcaatgaccatctgaatttatcaagagcttccgctgacaaattcgagcgcctctatatgagatg

SEQ ID NO: 176634 - DNA, 107 bp, Glycine max
tatgagcaattcaaatggactgaacatattcactcgtagctctgattgaggcacatgacatatatagacgctctatactgaacaacggaggctctcgagatattcaa

SEQ ID NO: 176635 - DNA, 448 bp, Glycine max
  unsure (1)..(448): unsure at all n locations
agcttgctcgtcttgctgatatttatcatgcagacttttctgatgatgaccgaggaacaattagggatcaacttgaaacttatgtgcttcaagtgagaagaaatgcttctttttccacttgtgaagatgttcaaagtttggctatgaagatggttcaaactgagaaacatttggtatttccattggtttataaacttattgagctagctttgatattggccggtgtcgacaacatccgttgaaagagctttttcagcaatgaagattatcaagtctaaattgcgcaataagatcaacgatgtgtggttcaatgacttgatggtatgttacaccgagcgggagatattcaagtcacttgatgatattgatattattcgaacatctaccgcacagaagtctcggaaaggacacttgcctcgtaattntatttaacccgctattgtaagat

SEQ ID NO: 176636 - DNA, 448 bp, Glycine max
  unsure (1)..(448): unsure at all n locations
tattagtgacctatgaaactaagctatgctganatattacaatagacctcctcaacctcagcaacaaaatcaaccacagcagaacaattatgacctttccagcaacagatacaaccctggatggaggaatcatcctaacctcagatggtccagccctcagcaacaacaacatcagcctggtccttccttccaaaatgctgctggcccaagcagaccatacattcctccaccaatccaacaacatcaacaaccccagaaacatccaacagtcgaggcccctccacaaccttccctcgaagaacttgtgaggcaaatgactatgcagaacatgcagtttcaacaagagaccagagcctccattcagagcttaaccaatcagatgggacaattagctacccaatngaatcaacaacagtcccagaattctgacaagctgccttctcaagct

SEQ ID NO: 176637 - DNA, 282 bp, Glycine max
  unsure (1)..(282): unsure at all n locations
ggatactctcagtcacctgcngcatgcaagcttcaagaacccgatcaagagtaagccccattatatattcttaatgaaagcgatatcttggaacgcatggtgaatggcccatcagcctacccagaaatttctaaaaatgctatgttctactcaccattcagatttgctatttattacaaaacatttgacatatatcaccgatattcatgaattctattgacataaaaagcgttccctctaatctctaggcactcacaacatatagagacagatagaatagtc

SEQ ID NO: 176638 - DNA, 389 bp, Glycine max
  unsure (1)..(389): unsure at all n locations
tgtctcagcagttgtgcgagaccgagaccaacatgttaaccatcatcagctagtaccaagaagaattaaatctagccacggcccacgagcacaaagtggtggacgagtatgcccgagtgtacgcagaanaggaggctagaggaagggtaattgactcgttacatcaagaggcaacaatgtggatggaccgatttgctcttactttgaacgggagtcaagaacttccttgattgctggccaaggcccaagcaatggcggacacctactccatccccgaggagatccacagacttctcagctattgtcagcatatgatagacttaatgacccatataattaggaaccgctaggaagttngtattgtcactcagatcttgactagttataac

SEQ ID NO: 176639 - DNA, 431 bp, Glycine max
  unsure (1)..(431): unsure at all n locations
agcttcttatccaaggctcatcttggtggngaagctccttcttccatggcttattcccgagtggatggcacctcctctcacctcttctcctttgtcttccgctgcatctccatgttggaaaatcaccattaaaggacctcattgaagctcaagatccagcctccatagaagccccacaagcaagcttccatcaagtggtatcggagcacaagagcttcaagtaggtgctccttanacctccattaattnttttttgctttaccttctcttccattgttgtttcttcattattatccatgtatctcttcacatgtcttgtgctanatgttgttaacatgattctttataatttccactgattgatcttgctatagaagcttgatttcattntctatggttcaaatttcttgttcatgttcttgaaccatgag

SEQ ID NO: 176640 - DNA, 343 bp, Glycine max
  unsure (1)..(343): unsure at all n locations
cgcagccattagaagagaaagaacttgtgactagaattatgaatcataatgttagtcagtttgtcagattgattgtgaaggaatgcattaactgtatctcggtgagagtgtgatcctaaaatttggagagaaacgactatcatttagtactgatttttgcatgaatctctgaagtatggattgaatgcatgaaattgaggatgatgaaggccatgtttgattgtgatagccacttagccaaaaagcttactacgtgcttgaatgatntatcccttgcacccagttttgagctgaatgattgaaccttaagcctatacaattttatctcctgctaccttatctt

SEQ ID NO: 176641 - DNA, 392 bp, Glycine max
agctttcattgttgacaactaacattgttaattgatgaccgtgatgcatgtttgtgccagatcattgacaatgtttcataatgcagaataatttattcttttgcagcattgtgatttttcaatcacacttggatttggataggttccaattaaggcaaaaattatgatatttgcttgatcaactaaaatgttctttgtacatatttttctgtgtatataatattaatttatgtatatctaatttttaatatttctgttatttattgtgattgtatttttttatttatcatgtgatgtcttgggttttatttgttaggtttttttatcattctaatcacattggtgatgatgttaatttaactgtgatgctatacttgtgaccttgctacgaa

SEQ ID NO: 176642 - DNA, 381 bp, Glycine max
cgccacccagctcgcccaggcgagcagggttgcttcctccagaagcaacagccttttggaggaatcttctggaaggcccaagtgggcctggttgctatttgcacccccatttttactaagtacacccccctgccctttttttggtgattctttttcgtaaagttacggaaacttacgaatttcgtaacgatacttgttttctttctgtaatgttacagaaccttgcggattacataatcatcccctttttgacttacggaatgttacggaacctcactaattgtgcaacgatgcttccatttgatttccggtgtgtcacggaaccttaccgaatgtgcatcaatattttctttttgtttccggcatgtcccggaatttcac

SEQ ID NO: 176643 - DNA, 442 bp, Glycine max
  unsure (1)..(442): unsure at all n locations
agcttgcttgtggagcttctatggaggctggatctttgagcttcaatggggtcctttaatggtgattttccaccatggagatgtagcggaagacaaaggagaagaggtgagaggaggcgccatccactagggaataagccatggaagaaggagcttcaccaccaagatgagccttggataagaagcttggaaggatgcttcaatggaggaaaagaaaggggagagaaagagagatgggggagctcgaaattgaaggaagaaaaagggagagaagttgaactttgagttgtgtctcacaagactctcattcatcanagttacaacaagtgttacacatgtttctatttatagactaggtggcttccttgagaagcttctttgagaaaacttccttgagaagctagagcttagctacacacacccctctaataactgagctcac

SEQ ID NO: 176644 - DNA, 443 bp, Glycine max
  unsure (1)..(443): unsure at all n locations
agctntaattgccagcaacttactttgttaatgacgttgagctagtaaggaaaaaagggttcagttagctagctagctaggttgtgctctctctatttaaatcaagagtttacctgtgtagtagggttggcagaaaatctagaagattgagaagccaagtgctgaagagcctgaacaaatgcagtttgtccaaatttggcacaatattgccagtaaatatgacataatcccatcctctagccttccactccattaatgttctgtcaatgtcattttcatgctttgatatgtaaggcctcaacagagtctggtaaacatatcccgtcccctgcatgatgcaacattttaagtaatatatttaaaagggtgcgttgttggattcctcacgttcacactattaaccataaacactattntagttatatacttttgtagagtatcat

SEQ ID NO: 176645 - DNA, 370 bp, Glycine max
  unsure (1)..(370): unsure at all n locations
tgtataactcttaaagataaagagtccaagttgtgtcttgaaattgagactagtgttaaggaaagagctattcttctcaagaactttcaagagttggaaaatagacttaaagatcttcaaaaggatcagtaggagctgaatgaacttcatgactatcaaaaagaagaaagatatgatctatggtgagaatgcacacaagcacacaaagattatgataacctcanaataagtaaaataatctttaggtggaatgtgaagaacacaagagatctgtgaaattcttgaatgataaactttngaagaatcaacaatttgaaggtcaacctcaagatgttgtcaaacttcatgaggaaattagaaccttaaaaac

SEQ ID NO: 176646 - DNA, 454 bp, Glycine max
  unsure (1)..(454): unsure at all n locations
agcttgccgcccagctcgcccaggcgagcaaggttgcttcctccagaagaaacaaccttctggaggaatcttttggagggcccaagtggacctggttgctatttacacccccctttttactaaatgcacccccttatatatttttctgtaattctttttccgtaacgttacgaaactttacgaatttcgtaacgatacttattttcctttccgcaagggtacgaatccttacggattgatgaatatactctttttggctttcaaagaagttacggaaactcacggattgcgcaaaaacacctcttttcgatttccgccacattacggaatttcacggattacgcaagcctgctttctttaggatttctgagacgtctcgggacttcatttattgcatgtcatcaatttataatcctcggacgaaattaagggatgacagtngcccctctctact

SEQ ID NO: 176647 - DNA, 456 bp, Glycine max
  unsure (1)..(456): unsure at all n locations
agcttgctattaaaaccaatcttgtgtatctatcaaaactcgtttgaactggagttggtttctccttttactgaggttaactagaataccatggtcgcgggtgtgaaaggaaaagtggtgctaaaaaatattcattgggattattattctataaattaataagactgtgtttggcaatgacatgacttgatttattcaatttatgatttataaaatcnaacaggaaaatggagcaatgaattacttatccagaatgttgaagcacctcaagtacaatgttgatgcccagatttaacactaatgtttaatcttgatatttaagtgtaatgggaaaatcacccattttcactgaattatgtttagttctcatattacaatgattattgcttttctgctaactattactaatttctaattgatcatatgatgctccatcccatgtacttacagtctcat

SEQ ID NO: 176648 - DNA, 489 bp, Glycine max
  unsure (1)..(489): unsure at all n locations
cttgtccaagcttctttgagccatttcttcagatactcccatgcctttatgtttaatgcctttacacgagccaggttctgattaaattcaggaactgtagtagatttggcacaatcccaaacaaccccttttaattccttacccttccattgttttgtgaagttcttccacaaatgcattgcacaaaaacgatgaggtgcaccaggtaggacttcttgtaatgctggaataagaccctgcaacatttatgaaattatgtcaaaatagtccctagcttttgtcacttactgtcaatttactgttaattatgtcagcacagtccctaacttttgtcacttactgtcaatttagtcctttagaattaataatattgacgaatttatccaagtgctaatggcatgcatgcaacatactaaataatgaattaaaaattacttctacatgtcaggcatanagttccacttatgctccttgtagtcttcaatatct

SEQ ID NO: 176649 - DNA, 456 bp, Glycine max
  unsure (1)..(456): unsure at all n locations
agctnttaagattaatatttgtcatgttttctctgagacaaaaagcctatcttcacttaatttatttaccaaaaaaaaaaagcatcctcacttaatttgataatcgagttattgtattgtatcattttgccgaggagaaaatcagataggacgggcctttttaggtccaaataggatatttttaaggatagataattttgatattatctttttaaacataagttntattttatatattttttaaatattatattatgtcacttgtatgttgatattatttgcaatttcctatttaatagagcatgctgtacaagaaattatcaaaatgaagaaatcataattntatcttggttatctttttatagnnttttttctagtcttttgtggcgttttcttaggaatagaattaagtagtgtagctcaaggttgggcgtttcctaaaaaacaccataaaat

SEQ ID NO: 176650 - DNA, 475 bp, Glycine max
  unsure (1)..(475): unsure at all n locations
cactaagcttcccatcctggtattacaagttccatcaagtcattacctcatatggttatgaggcaaatgcagctgatgattgtgtataccacaagtttagtgggagtaaatactcattcttagggttatatgtcaatgatatactgcttactagcaacgatataagcttcttacttgagactaagaaatttctgatgaaagattctatgatgaaagatcttggggaaacctcttttgtattatgaatttagatactaagagatcactctcaaggtatcataaggttgtcacaagagagttatatcgataagggcctagatagattcggcatgaaagatagtaaaccaggagataccccgatagctaaatgagacacnattagtctcacacaatgtcccaataatgaccttgaaagaatagagatgcaaaagattccttatgcatcagcagtatgaagtctaatgtacgctcaagt

SEQ ID NO: 176651 - DNA, 455 bp, Glycine max
  unsure (1)..(455): unsure at all n locations
agcttatatacatctgcaacttgaattctgttacaactganaagctaactaactaattcagccaactaactaactatttctgttaaagctgtttatactgctaagagcccccctcaagctgggaatggatattcatcattcccagcttgttacaaaggtgctgaaaggtggctggtcgtaaagctttggtgaatatgtccacaagttgcattganggatgagaccggaaggagcttgacgagacccgcagtgactttgtggcggataatatgacaatcgatctcgatatgcttggtgcgttcatggaaaacgggatttgttgctatctgaattgcagattggttatcacaatataaagtggctggctgaataaatgctacaccaatgtcttggagaatatacgttaaccattgcagctcacaggcagtagatgcgagagctcgatactcagcttc

SEQ ID NO: 176652 - DNA, 464 bp, Glycine max
  unsure (1)..(464): unsure at all n locations
agtcaagatcactgaggtgcatattttcatttaatttaatttttgcataacttatcaatattacttactgttacgaaaattaatttaagtctttatggttatttattcaaactaaggcgttatacgagtggtttttgaacgaatttatgatagatttgtcattatcatttatgaagcattcagtcattcggtaggattatgcacttgcttaaatttatttatctgttgactactatacaccgcaattaattgagatgaattatatacttggttttagctggcacgattgcaagaggaccttcggcgcatgaatgcagagaaccaaaagctgaaggagatgctcagccatgtcagcagtaactacgcgaacttgcanatgcatcttgcagcagtactgcaacagcaacataaccaacgcactgagaacacggaacaagaggtcattntaatatatanataacatc

SEQ ID NO: 176653 - DNA, 459 bp, Glycine max
  unsure (1)..(459): unsure at all n locations
agctntganatggtgctaaccaagcgacccgtgcgtatgcacgggttgcatactagttaacataaaatcacaatatctataaaccaatatggtcagtctagtttgcataaggtcattgaagcaaacactattaccattgttgcgcatgttctaaaaaacaaaaactaagcatataatgagtagctcactctatgattagttaaggctcgaattctcacaaaaggaaacgtatctgatcttctcttaaaagaaattgtatctataagataatatttgtgaaaacaatacattaactagtattttaacgtgaatttatatcatttaaagtgaactaaaatatgtaaatacatgataaccaaattattgatacatgttaattaattaataataaaattgtataaatattattttaattcttgaaagtacattnttagtatttattaatttcagtaattaaat

SEQ ID NO: 176654 - DNA, 484 bp, Glycine max
  unsure (1)..(484): unsure at all n locations
ngtacgcacatcgttcacgtgtatgatatccactccacaggtttgaagtatatgagaacttcaaccttataacgcaacgaggcggacaaaagtgggcagttaacttgaatggtcattattggcaatggcgaagggaatccaacccttacctggcatggtcacaccataatgcaacttgggggttacgtgaccatgaactactaccattttttgaatgttgttcatacaaacaagcacatcttaaaagcttactccgcacaatggtggcctcttgggaatgaagcggctattcctccttctgatgacgcatggacactgatccctgacccaactacaattcgtgcgagaggccggccaatatcaacaaggataagaaattatatggattgtgtcgaaccatctgagcaccgacaaatatgtattatatgtggagccaaagggcataacagatgtcgccgtccaatgcaatctgagcgtgggagtt

SEQ ID NO: 176655 - DNA, 403 bp, Glycine max
agcttcattgcctaacaagccaacttacaacagcaagccccaagagactcatcatatggatgcacagaccaaagttgcgtatgtaaaaaaattgtatgaccaagtgaaggtgctaattgcaaagaagaatgaaagctatgccaagcaagcccaaaagaaaaggaaggaagtggtacttgaacccggtgatgatcttggacatttgaggacaaatggtttccaagaaggagggaatgatgagaatcatgaaacaggccaaatacagtctaaaggcccaagtggagaaggacgaacgcccaagtggagaaggacaaagcccccgagtggagaaggatgaacgcccaagtggagaaggatgaacgcccacaggcagagacactatcaagactattaattgatgctg

SEQ ID NO: 176656 - DNA, 409 bp, Glycine max
ctgtgcactggttctcaacccacaactgaggaatctatatctcctaacctatgtaagacaaattcagttatttggaacaatgtataacagaaagcttaatgatggaacccttgtggctataaagcatgtcctgaacgtatggtagtataatgatcatctttcgattatttcacatcactagaattgtccaattgtgcttgaagttaaatgatgtaaacgagatatgtttatcatatataagcctgaccatgtatgactttttttagattgtattagcttttattgattattctgatccagtgaagttttctggcacgatttacaaaacaaaaacttggctgaattcaataatgaaataaacacctggtcaaaatatttaaattgtgatgtgtggtacagcatactaata

SEQ ID NO: 176657 - DNA, 414 bp, Glycine max
agcttaacttaaataccttcaattttaacttatgtgcttatatgataagtccaaaccagttctgaagaagctattctaaatggccccaaattgtattcttgagtctttaatgctcgtgctgaccaagcttctgttcctggcctgtttattttcttcactgaaataatttgtgttctgtgctgacgagtgtgctgtaagaaactgactttggcgatcttaacctacctaatactctattttgaaaacaggaaaaaccgagtccatggatccaaattcaagaattatggttcctgaagataggcatggactccatgcaattgatattttggaccctgacttggtatgcttgttttaaagtttgttgaagtgcaatgcagatatccaagcaagttattcatgaatcctatataattc

SEQ ID NO: 176658 - DNA, 482 bp, Glycine max
  unsure (1)..(482): unsure at all n locations
ngaggaatcccacaaaaagtgtaaagatgtcgttatcactatcataatacacacgtgagcccacttagagataagaaatgagttattcacaactggggagtagtgagaacatgtgtacggatccttatagtatcaattggaattagtttttggggtgtttccacaaattctgattctatccttacaattataactgcgaattatatatgtttgatgaaccaattgatatctcaatgagaaattgctatgaaattgatatgttcttgtggaccaccggtctgtcagccccagctggtctagtcgccaattatcgtagtcgtgtggcttttcttgtgcgcttcanagcatatggcgattgtgatgctgcttctgtatgaggaggatgagagctgagtacagtatccatcttcctgcatagaanataacattacttatgtaacattatcagacaactataatcggctatgtaaatgaatggactc

SEQ ID NO: 176659 - DNA, 392 bp, Glycine max
agcttctagcacaatggacttaccttgaattaattcctttgataatccttttgagccttgtgtccctttgcttgattggacgctcactacacgccttaagtgataaaccagtcgatatcaccatatccttaaagaattttggagctttgcaattgatttgggaataagcgcggagggttataattcctattgacataaaagtgttccctctaatctctagtcatcacaaacatagagagacagaaagaatagtcgagggagtgaaatcttgtttttctcttatttcaaggaatcatagtacacaagagagaaacctcattatggagaaaggtacgcattgtctatctattatttgtgagaatcatatatttcaagaatttattgggtttcta

SEQ ID NO: 176660 - DNA, 216 bp, Glycine max
gtgctagagcttcacgtacatgtagaacatcttgtaatcaccccaacatatatgtcgcaacgtgcacttcgcgggcgagcaaaggcgaggctcacggttgcgctgtgcacacgaagaaagatgctcggagatggcaccaacgcttatttgttgaagacgctgcaatgaccgtaggacaccgggctcattctatattctaaggtcgggagctgtatt

SEQ ID NO: 176661 - DNA, 440 bp, Glycine max
  unsure (1)..(440): unsure at all n locations
agcttaaacaaatccaaaagagaaagaagctacataacataactaattgtacctgtaggaattataagattgttttgagagtgaaagatcgtaacaactaacactgattaaaaaaaaaaaaaaaactaattgtacctgtattggagacatatccctttgcatataatcaagaggggtccaagaggcaagcttttcacaagttttagaacccanaatacagcctctaatagtgttccaatagcgaggatcctgaattctcttcctcaaccatggtgagtaatcttgaagacgatactccttgtaaacccttccaggcacttccacaccaccgcccttgctagtcacaccaaaaccaaatattgtgaagcccatgagtgctgctatgaggaacaacatgaccaccaagtacaaccatagtgcacatgccacatgaaaacatg

SEQ ID NO: 176662 - DNA, 425 bp, Glycine max
  unsure (1)..(425): unsure at all n locations
tggtaagatattntgatcttatcattnntttttcttcatgtggacagggagagattgtcaatcaaaacaatatgcactatctcaaccaagagaatctagagtttgtcaaactggggacacctaccttattgttttagttgccaaattactcccacttgaaaaaccctttctcagaaagcttctaaataattttaaagtttgcatcagtgtctccaatatgctctaacattagaggcctacctctctgcccccatccaatttcacttnctttgctggaaactgcactaatattccctcagcattatttctaattttaataaccattttgagggtcaatgtcttattgttgacctactgctgacagcatgagaagccaatcattttttctactttaagcaagataatctctatcggtagtactacta

SEQ ID NO: 176663 - DNA, 439 bp, Glycine max
  unsure (1)..(439): unsure at all n locations
agcttccttaagaagattcctaaagaagctagagcttagctacacatacctctctaatagctaagctcacctccttgagatgagaagctagaacttagctacacaccccctataatagctaagctcacccctatgacaaaaaacatgaaaatacaaaaaaaaattccttactacaaagactactcaaaatgccccgaaatacaaggctaaaaccctatactactagaatgaccaaaatacaaggcccaaacgaaggaaaaacctattctaatatttacaaagataagcgggcttatacttagcccatgggctcgaaatctaccctaaggctcatgagaaccctagggccttcccttggatctctagcccaatctacttggagtattctacccaatgcccttgcggngtaggattgcatcacagcagagtttgaccttca

SEQ ID NO: 176664 - DNA, 365 bp, Glycine max
  unsure (1)..(365): unsure at all n locations
tagtgagagcaaatgagagaaattagtagcaaatgtgaaaagatagtcatttatagtgtttattgagcgttgagaggtccaattttgaataggttgagattttactctaaaatcactttgagcaagtctaattcaatgttatagacttgatgaagatgaaagnttaccccaaaatcacccaattctaattttcacctttcaaaccttgaaaactcactaaatctttgtggttctggatacctatattttgatttacttttgtttaaggtttgtaattagtttgaacatgatctatacatggtctaagacttgtaggatcaaatttgagcggaattggatatatataagttagattttaagaatct

SEQ ID NO: 176665 - DNA, 436 bp, Glycine max
agcttccttaagaagattccaaaagaagttagagcttagctacacacacctttctaatggctaagctcaccaccttgagatgagaagctagagcttagctacacaccccctataatagctaagctcaccctcatgaccaaatacatgaaaatacaaaaaagtccctactacaaagactactcaaaatgcctcaaaatacaaggctaaaaccctatactactagaatgaccaaaatacaaggcccaaacgaaggaaaaacatattctaatatttacaaagataagcgggctcatacttagcccatgggctcgaaatctaccctaaggctcatgagaaccctagggccttcccttggatctctggcccaatctacttggagtcttctatccaatgcccttgtgggttaggattgcatcattccctccaccttggaaag

SEQ ID NO: 176666 - DNA, 54 bp, Glycine max
ctggaactactttacaaggacttgatgggggctatgcacgatgaaagccttgga

SEQ ID NO: 176667 - DNA, 413 bp, Glycine max
  unsure (1)..(413): unsure at all n locations
agcttgttgaaattgccatgtttggatgagttagacatacccattctgttttagggtttttgtgatgatgtttgtgatgtttatatgctgagatttcttatggaaaactgttagaggtgaagggtagagttaacttagggttagaaagtgagaatgtgatgttatgagtggaaaaagagtgaggctttgagagttggaaggttaagtctgaattttgtggtaaatggaggttaaagtgagttaatcctagcttgaaatgtcatttaggacttatgagaaaggttaggctgtgctagagagaaaaacaaatgaccaaagtgaacaaagagccatttctaggacaaatttgggtgttgaagagtcaaactttgattcggtgagattntaggtgtaaatccagttcgaacaagtct

SEQ ID NO: 176668 - DNA, 396 bp, Glycine max
tctacttatgtggcagggcgggtttccttcactttcttgtttccaacgcgagctctgaccactgttcttccttcccgcgaggcttcttttcatatccgcctgagtgggcttatagcctaaaccatacttcccacgatttccttgggtttttatcaggctagttatgccgccattgtctttgcctaaacccatcccgggttcatacccgttccccaacataactcgggccatcattaccgccgcatcggacagacaaggttgcccaaagagggagtccaccgaggaaatgctgaccacctcataagactggaaagcggtttctaacgattcttctgcggcttccacataaggcatggaggatgggcagcttactaagatatctttctcgcctgacac

SEQ ID NO: 176669 - DNA, 450 bp, Glycine max
  unsure (1)..(450): unsure at all n locations
agctnggagtcaacgaaatcaggatcctaatgagtgctgaaaatcactaaaggagtaatgatgggttaattgccagtggaggtagctggtaaaggcaagggcaaagtgaggtcctccttggtggaataatgaaacagtttgagcaaggaacaatagaatacaaggtgaatacatgcaccatcaggcagtttgagcttataagcagcctttgccaatgtgttccaagatttggtagggcccataatatcttttagcaagcttcgagtaaactactaaagttcanaagatagtggattgtcgatgaggtcatagttcaccatgacccagtccccttcgtgaaaattaacatcccttcgtttagtgtttgcaatttgtttcataagggcttgtgttttcaaaagcttctttcttatttaagtgaaaactgcctctctgttcgttagaagttca

SEQ ID NO: 176670 - DNA, 470 bp, Glycine max
  unsure (1)..(470): unsure at all n locations
agctctanattacattgatgttngtatttatgggaggaggttatatgccatttttgctttaagagtaatgtcccactggtaaaactaactttccaaatgtttgccttcgcaggaatggccccgaggaagcttgcctcaaagaggtccaggaaggacaaggcggccgaaggaactagttccgccccggagtatgacagtcaccgctttaggagcgttgtacaccagcagcgcttcgaagccatcaagggatggtcgtttctccgggagcgacgcgtccagctcagggacgacgagtatactgatttccaggaggaaatagggcgccggcggtgggcaccactgattactcccatggccaagtttgatccagaaatagtccttgagttntatgccaatgcttggccaacagaggagggcgtgcgtgacatgagatcctgngttaggggtcagtggatcccgttcgatgccga

SEQ ID NO: 176671 - DNA, 450 bp, Glycine max
  unsure (1)..(450): unsure at all n locations
agcttcagaccaaagcaattcanaatctaggtatctaaaacccctcaatttagtggattttcaaggtttgagaagtgaaaatgagaatggggtaaatttggagcaaactctcacctcacacaagtctataacattaatctaaacttgctcaaactggttttacgcctaaaattccaccgaatcaaaatttgactcctcaacacccaattttaccctagaaatggctcttgttttcactttggtcactcatattcctcatttgcacagtctaagctttctcttaagtcctaaatgacatttcaaactaggattaactcactttaacccccaattaccactgaattcagatttagccttccaactctcaaagcctcactctttttccactaataacaccacattctcactttctaaccctaggttaactctacccttcatctctagcagttt

SEQ ID NO: 176672 - DNA, 489 bp, Glycine max
  unsure (1)..(489): unsure at all n locations
ttggaaataatttctatacaaaagttagtcgtataaagcgactaacagagtccactggaaatgacaacacaaaagaaagaccaaaaaagcctcgagcaaccggcagcccaaacggcacaacgaagatgtccgccaaaaagaacatgacaggttggggaaaaagggactggtatggctacctagggagcgtaatgaggtgggggagtagtgaagaaaccattctcagctgcgcgtataggcgccaaagagaagacgaaatgaatatcacgtgtacgccatgtgctaccactaacgatacaaaaatggttatggaaaaaagactgtctttgtaacttaataaggaaaaccacatgtcgccagcctataaccagtaactatactaagacgggtcccacgtggagactgtctttgtatgggaccactaaccattctaagacgggtctcangtggagaccgtcgttgtatgccacgtccaaccactaatcatac

SEQ ID NO: 176673 - DNA, 457 bp, Glycine max
  unsure (1)..(457): unsure at all n locations
agcttgtaaaggtcaaagagaagtttgtaccaattgagcaagacgaaagaaaacatgtgtgtgggccatcgttgaccaatacaaggagaatctaagtctagcggcaacccatgaacaaaggctagcagatgagtatgcaaaggtatcggtcctacaagaagaaagggaagccagagaaagagtgatcgattcattacacagagaagcaatgatgtggatggataggttcgctttcaccttgaatgggatttaagagcttccaagactgctagccaaagctaaggcgtagcaaacgtgtactcggcccccaaggaagttcatgggctcctcgattattgtcaacacatgatcaatttgatggcccacataattaggagccaataaggcggtcatattttcggntaattttgacaagataaacattnttgttccttaatgaaaaataagtttgtttcag

SEQ ID NO: 176674 - DNA, 471 bp, Glycine max
tttgcatgtttaggaagttctagagagagaaaggtccaaggtccaagttccaaagagttctgagagattctgctgtgttaagatctgtagagatgcgagttcgaagcggaagctgttctaagaacttgagatgagtttatgagcgattgtgagatcctagaggcgaaggagacatcctcaccacttgtgtttttgctgtctttcatcttattcttctctttgttgtaaaggaggtttccggactattgaaagctaaatcctctgttggatcttccctgtaggtacctaatgtaaatatatttctatctatgtaatgatgttttatgtgttctctgtgctatcttcttttcattccagtgtgttttaaccttgatcatgtagatgcatgctttgttagggtcattcaacagtgggaactagtctgattctaaagtccttggtagtacgggtctaagttgttgtgctatcacg

SEQ ID NO: 176675 - DNA, 445 bp, Glycine max
  unsure (1)..(445): unsure at all n locations
agcttgtctcagcgtttatgcgagacggagaccaacatgctagctatcatcgccaagtaccaagaagagttaggtctagccgcggcccacgagcataggattgcggacgaatatgcccaagtatacgcggaaaaagaggctagaggaagggtgattgactctttacaccaagaggcaaccatgtggatggatcggtttgctcttaccttgaacgggagtcaagaacttccccgattgttagccaaggccaaggcgatggcagacacctactccgcccccgaagagattcatgggcttctcggctattgtcagcatatgatagacttaatggcccacgtaattagaaatcgttaggaaacttgtatggtctctcagaccttgactagatacgacttcctttntgaaataaaatgagttggtcccatgtttctactccaaaaagctt

SEQ ID NO: 176676 - DNA, 309 bp, Glycine max
  unsure (1)..(309): unsure at all n locations
gtgcctgtatattgatgcgccggaatcggacatacgatggagaagttatgaccatttgaatttctcgagagcttcctatgtttaatctggagcgtctcgatatattatacccctgaatcgaacctcagctgtgaaagttatgaccatttgaatttctttagagcatccgatgttcattnttgagcgtctctatatgtgatgaagcttaatcggacgtacgtgcgaaaagttatgaccatttgaatttctagagagcttacggtgttgaatatcgagcgtcgcgacatattatgcgcccgaatcggacat

SEQ ID NO: 176677 - DNA, 472 bp, Glycine max
cctgcaagcatgcacgcttaccattaattgcgcacctgatgtggaaaatattttctttttatgtgtcatccaccggttatatctagcatatcaccttgcaaagcttcttccacaagctcttcttccacttcttcttcactgatttcagattcactggtgatctctccatctgccttcatgatcatggtcctccaggttggacagtcagaagcaatatgtactctgcctaagcattcgaagcatattatgtttctggtgtccgtgttggatgatgagacaaaattatgcttggtttcattaacttacattgcattaaatttcattacaaaaggcaaaataaatacataaatttgacaacttgatcttatcctgtaatgatatcaatataacacacatgttataaattaccacaaatctaacagataagataaaataagagatatacacatgatcttacatatctaggagagat

SEQ ID NO: 176678 - DNA, 472 bp, Glycine max
cactctagcttactgatgatgaatgaagtcgattcaagtagttctgatgatgacttaaagtctcttataatgatttcaagactgagtcaacgagttcaagatcaagattaatttcaagattcatgatatgacatccagaagaatcatgattctacagaagatgacttcacaagggaagtattgaaaagaatttttcaaaaatcaaacatagcacagttttgttttacaagaaaagtgtttctcacaattttctaagttactagagtttttactctctggtaatcgattaccaatttcctgtaatcgattaccagtggccaagtttgatttcaaaagcttttaactgaatttgcagcgctccaattgacttttaaatggtgtaattgacgacaccatattggtaatcgattaccagtgtatctgaacattgaaattcataataaattgcgaagagtcatatcttctcataaaa

SEQ ID NO: 176679 - DNA, 443 bp, Glycine max
  unsure (1)..(443): unsure at all n locations
agcttangttgattcaataatgaagccattatgagtaattgaaccttagtcccaacaacaggaacccactaaacgaaggaaatagaattcaatagctgaagctctgtcacaagaaattgtgtcgaaaatgacatagcctaagcttttctcaacaacatcagaagaaaaaaaaataacattatactaaacttagtaagaacacacaaaatggatcaattacaaagtgaaaatgacattatactagatctaaacaaagtacttcccagataaagcataatttgatgccatgagtcagtcatacagttattttagcaaattatttttatgataaaactaactcactatgttggagacaagctgacaaaaatacataatagtggaaacagaaatgaatagactctattatcttacattagattgtggcacanatggagcagctagta

SEQ ID NO: 176680 - DNA, 456 bp, Glycine max
  unsure (1)..(456): unsure at all n locations
tgtcctaatttgcccaacanaaagtagacagtaccgtctctgatctagagnaattgtacatcaaagctagtccaagtttttccctcaacaatgaaatatttgataaaggaatgaaagtgaatgtagaaggattaatgaacaagtaatctggtatagggaaatccctcgtgatgaactacaaagaattttcaaagctcattagatttcacacaataaagaaaaaagcacttttgtctttgaaccataaaaatcgtgcaagaaagtaagtccaagttgtttggacaacaacaatgcaaatgcaatttttgcacacatggtcaaaattaaactgaattagtaacaaagtgtatttcatgttccttctctttagtgctcataacaacacaaggagaaggaagaatggtatggattgattattgcttgcatataaagtgtatttcatgtgtcacataaact

SEQ ID NO: 176681 - DNA, 439 bp, Glycine max
  unsure (1)..(439): unsure at all n locations
agctntctacatgatgaatcctgatagcaatggtgctcctgaactcagtgtttacttgcttagagtctagcaaccttgcaagcttgcaagatctctgtttattatacttaattttcctctttgttttgggttattggtatactacttgcttagctcttcaatcatgaacatggttgatctagtcttctccagatttttctttttttcatgtagtatattaaggtgggtttacttttttttttgttagaataggtgagtaggctaagtaaggaagacggcgggagatagtgggtaaccaatactttacagcattgtggtgtgtggggggtgggtcatgaaaggcgtatatgtgtaattttttttccctttccaatccttttaattaatgatatgagggatggaggttaatgcaagtcatcattgtcttggcatttttagt

SEQ ID NO: 176682 - DNA, 458 bp, Glycine max
  unsure (1)..(458): unsure at all n locations
ctgagaatttaggtctaaatcacctaaagaattagtggattggcttagaactcaaggattaatcactaaggaattaggattagtcattgtagtttgaatcttggttgcattgaactaaaagattgattaagaacaaatttcatatgaagaattctatgaattttatctcaacaacacttttttctatttgaattcattctcactccaaaaattcctttccaaagccaaaaataatttattttcgcgttagcaaattatccatttgctataacgaaatcttctcttttcaaaaattaaaagtcagacaattgccacatcaaattgataactcattgcaattgggtgttgatttcctttatattacacatagtttctatggatataataactcaatacttattgtttggtgttacaattagactagagttgcttgcctattatgttngaagcacaacaat

SEQ ID NO: 176683 - DNA, 447 bp, Glycine max
  unsure (1)..(447): unsure at all n locations
agctntcatgtcntaataaattgttaattctactgaaattgattattttaaaaattatgtttattatgatttttgatcggatgattataaaactttttctattgatgatatatagaaattagattctatgttataacatttaaaatataaaactacattatgaaaaatgcaatggtaagtaaattaaatactttttcttgagagattcataactaataacgcgaagttgaaatagacataacgttttaagttgaaattctattaatttacaattagtattgtttgattgagtagaaagaaaagtaaaaaaagattaataaaattaaattaaaatagaatgtacaaatataaattctgcattattttactggttattattttttttattctctttttcttcaaacgaaaccttagtattcttataattgaatgagttttttatgtcca

SEQ ID NO: 176684 - DNA, 447 bp, Glycine max
ggttgtgaccgttgcaccgtacctagagtttaaaatgccccttatctcaacacaacagcacataccacatcattttcgccattctctgatttctctctccgatatccaaagaatccaaaaaatggtatcaaaagtgaagagaagcccagcgaagtccatcaaggacctccgcaacagcaacaaccacagtaaccgtcgctggcgcaggaaaaccttcattaaaaatgtagtggcggcgtactccgccggcctggccaccatacgccgccgcatcacgaaactcttcttcaagatcgcgcacctcagcaccagcgcccacaagataaaagcaacctcgtacaatatcctcaaaaagacaaaaacaacaaccgacgaacacgaacaactcgacaacattcgccgaaccctcttgttcgacgacaccaccacgctcctccctcacgtcgt

SEQ ID NO: 176685 - DNA, 395 bp, Glycine max
agcttgagatgaggaagtgttgaagggtgaaacttcctgcttttattgatgaccacagagtggtacctggagatatgtcgcggcggtcaagagaccttggggacgtcaggtggggtgctattgcccaaaaccaagcttgaccaatcccgacccaacccgggcatagtcggtcagtgagaacctgtgatgtacctaagcaggcgagcttctggcagtcatcagataaaaggaacaaagaccacaaagcaaggaggcttgtggtggctggccagctgtgaaacttgattgatatgtgagatatggtctctggtaatcgattaccaacgcggggtaatcgattacaaggcttataaatgaagacaggaggctaagatggtctctggtaatcgattacc

SEQ ID NO: 176686 - DNA, 458 bp, Glycine max
agatgaggaagtgttgaagggtgaaacttcctgcttttattgttgaccacagagtggtacctggagatatgtcgcggtggtcaggagaccttgtggacgtcaagcggggtgctattgcccaaaaccaagcttgaccaatcccgacccaacccgggcatagtcggtcagtgagaacctgtgatgtacctaaacaagcgagctcctggcagtcaacagatacaaggaaaacaagaccacacagcacggaggcttgtggtggctggccagctgtgaattttgcgtgatatgaggatggcggcctctggtaatcgattaccaaaggtgggtcatcgattacaaggcttataattgatgacaggaggctaagatggtctctggtgatcgatcaccacgggtgaatcgattaccaggcttgaaacgaagcaggaacttatggagccttggaatcgataccccct

SEQ ID NO: 176687 - DNA, 489 bp, Glycine max
  unsure (1)..(489): unsure at all n locations
atgaaccttgatgcggcatgtacagcacgcagatgcagctgctgggacttcatgatgctgatttaaccttttagatgaccttcaatggagagattcccacatggagaggggaggcgccattcaatacggaatatgcctgggtagatagagcttcatcacctataatgggtctttggtaatgaaccttaagaagacgctttaccggaagaacagaacggaatagaggggtgtacgagattcaaggacattcatagggagagaagtgaaccattgatgagcgcatcatacgacttctatctatgaaaattacatccagtgttacacatgctaatatttatctactcgttgctctcttgactaactttcttgagaaaactctcctgtgatacgtcatctaaaaaactcccttgctaaactatagcttacatacacacacgcctctaataactgaacctacctgcgtgagaagctcacttgtagagatctctn

SEQ ID NO: 176688 - DNA, 419 bp, Glycine max
agcttataatatattgatacgctcgaaattaaacgtcggaaactctcgagaaattcaaatggtcataacttttcacacggatgtccgattcgggcgcataatatgtcgagaggctcgaaattgaacaacggaagctcttgagaaattcaaatggtcataacttttcacacggatgtccgattcaggagcatcacatatagagacgctcgaaatttaaatgggcataatttttcacacggatgatcgattcaagcttataatatattgatacactcgagattatacatcggaaactctcgagaaattcaaatgggcataacttttcacacggatgatcgattcgagcgcataatatgtcgagaggctcgaaatcgaataacgtgagctctcgagaaattcaaatggcgatacatttatac

SEQ ID NO: 176689 - DNA, 171 bp, Glycine max
  unsure (1)..(171): unsure at all n locations
tcaacatcagaccacttccagggtgctggaactacttcacatgtgacttgatggngcctatgcaagttgaaagccttggaggaaaaaggtatgcctatgttggtgtggatgatttctccagatttacctgggtcaactttatcagagagaaatcagacacctttgaagtat

SEQ ID NO: 176690 - DNA, 432 bp, Glycine max
  unsure (1)..(432): unsure at all n locations
agcttggttcgaggcacttacccgttgaagatcgaagaacgatgaagaacgaatgaagaacgtcgaagaacggttcaaacctttgcgagattcctcacggaaaacgttacggaaacgtttcggaagcgcctcggcttagattttcttcacggaaacgatttttccaagcaaattcgaaggagagagaagtgcctaaggggctgggatccttttccacttcacttcctcccctatttatagcaaaataggggagatgcttgccgcccagctcgcccaggcgagctcagctcgcccaggcgagcagggttgcttcctccagaagcaaccgccttctggaggaatcttctggagggcccaagtgggcctgggtgctatttgcacccccattnttactaagtacanccccctctgctgtttttttggtgattcctt

SEQ ID NO: 176691 - DNA, 359 bp, Glycine max
  unsure (1)..(359): unsure at all n locations
tcaccttctggacctcctcatagttgttgcatgaganaacatgctctattgtcatctcccactccaagtaggcctacggatcattctttcctttaaatggaggaatgttgagtttaataccatcaattcggttttgtctaggaacaccatcattccctcttctcctcctttcttcgtcattatgatctctattctccatttgatccaacctctcatggagcgcatcatctcgttgtttcattaacctctccaaatgttgcatcaaagcttgcatatggaattgcgagagccccacttcatcattaagatgagtacctgacatctcaaacgaacaaatcaaacgtaacaagacaataata

SEQ ID NO: 176692 - DNA, 177 bp, Glycine max
ccactatgaccctgaagaccctccacttgctcggatgacttgtacaactagagtgcatcgttgatgcgttgtatgcatccttcattgccataaccacctttgagttgtcaatgcactatagggtttgggtattgttaggagggagagatctttatggggaaaaatttttaaaactta

SEQ ID NO: 176693 - DNA, 326 bp, Glycine max
  unsure (1)..(326): unsure at all n locations
atactaatttgtaaaaaagtatattttactgtgataagaggaaacagacattnttttgcaacaattgaatataagttaatattgaacattcgcattgaatatgactctaagcataatatttttttgaagaaaataaataaatgacaatcagacatattttgtaaaatttcttaagaatatttattgaaatgcttactctgagaaaagtaatttantttggaatatttttttgcatcaaacataaaacccaacttacaactaaactaaagaaattcaatggtataataaatattcgactacttgaatgtaagtttgtattgctatat

SEQ ID NO: 176694 - DNA, 456 bp, Glycine max
agcttaagatctatatatatattagtatgtcacagatcataataatgaatcgtaatacctatgtttctacttgaaaaatatgagataaaatcttataattaagtgcatagtataatatcagatgaacacaatttggaaaaaattgaaaataaaggggaaatgcttgaaacaaattgaaaggaaaaatacacaaaatcatgaaagtaattatgagtttgaatttattaaaatttgcagagtttcaagtcataagataagttacatgcatattaaaaatttgatttttatcaccaaggtttaagtgacttaaatgcaaagtgaaagattgtattttattagatgaaccttagttgaatagatgcattgaaactatttttgtttcaactttcaagagaacttatttattatagttggtgacaatcttcacgataaatagagagtgtctgagaagagaga

SEQ ID NO: 176695 - DNA, 422 bp, Glycine max
ttgagtggcttaatggctggagtagaagattcaatatagttgtagtttgaattaattgctccaagagaagcaatggaagtgagaggaaggggagccaaagcgccaagacaaccaatgatgaaacggagcacatcttccctagagagacaacagtacctatcacggataggagtgatggaagttgaggggctccgattcatgttaagtggtagattgttgctgctgttgccaggagattcactattcttgagccacttgccatagtagataactgagaatcgcttgctcatgcccttccatggctacgctcttggaacaagcagacgcttcacaccttgtttcatcatgttcagcgcatctatcaaccttaatgagaggaagtaaagtaagatattaagggtggttttgtcaaattagaaaaa

SEQ ID NO: 176696 - DNA, 438 bp, Glycine max
  unsure (1)..(438): unsure at all n locations
gtcacctgcggcatgcacgctcgtanaatgcatctgtccattgaagtgattgagaaacagatctatatcttataggtgttaggttgaatgtgtatcctcttaagttgcatattttctgtcatcacatgataaattaatcttattctcaatcaatatgttcataaatctcattctcaatcaatatgtactatcggaactttcgtctaacaaaatgatacatacatattggaagactgattgtttttctctttntaaaggttagtcttgttatagatctgtaagcaatgcttgtactagtgagaattaaagcaataacagaagcagaaatacaaaagaaggtagaaaagggagattaggagagtaattcctataatctattttggcaatgattatgtgacaggagaggtgctgccaattgagctagttatggagaggaga

SEQ ID NO: 176697 - DNA, 439 bp, Glycine max
  unsure (1)..(439): unsure at all n locations
caccaatttgaatctcctatgctgtacctacatataagaaacagtcccactctcccaattntacaaaatcatattcatatatcattgnggcatttcaccgagcacttggtgggcgcatgtttggacataaattgcaagagaatgggggtaatgtggcatgcctcattgcttcagaaaacaacacaggcctaaggccttctcacacaaatcctcaactcaacaaatcaagcatcaaagcaacccanaactgcctcacaaatataagcacgttctcacaatttagagcaccaaaagatgaagaaaacacatcaatgggaagctaaaaactcaaggattgaatacttacttgttggagtgagtagaaacaccanaaatganagcaaaatgcaaccaanagtggcttatgggagcanaaaccgcaagccttcgtgagtcctct

SEQ ID NO: 176698 - DNA, 455 bp, Glycine max
  unsure (1)..(455): unsure at all n locations
cgctcgtgaccatntgaataactcaagagcttccattgttcaattntgagcgtctcgatatattatgcgccttaatcggacctccgagtgaaaagttatgaccatttgaataactcaagagcttccattgttcaatttcgagcgtctcgatatcttatgtgcctgaatctgacctccgtgtgaaaagttatgaccatttgaatttcttcagagccttccgttgttcaatttcgagcgtctcgatatcttatgcgcctgaatcggacctccgagtgaaaagttatgaccatttgaataactcaagagcttccattgttcaattacgagcgtctcaataaattatgtgcctggatcgacctccgagtgaaaggttatgaccatttgaattgctcaagagcttccattggtcaatttcgagcgtctcgatatattatgcgcctgaaccggacctccga

SEQ ID NO: 176699 - DNA, 376 bp, Glycine max
tggtctaacctttcacatggaggtccaattcaggctcataatatatcgagatgctcgaaattgaacaatggaagctcttgagcaattcaaatggtcataaccttactctcggaggtaagattcatgcacataagttaacgagacgctcgaaattgaacaacggaagctctcgagatattcagatgatcataacttttcactcggaggtgcgattcaagcgcatcatgaatagagacgctcgaaattgaacaacggaagctctcgagagattcacatggacataacatatcacatcgaggtcagattcaagcacataatatatcgagacgctcgtaattgaacaacggatgctgtcgagaaatctaacggcataact

SEQ ID NO: 176700 - DNA, 432 bp, Glycine max
  unsure (1)..(432): unsure at all n locations
agcttgcttgtggagcttctatggaggctggatctttgagcttcaatgaggtccttcaatggtgattttccaccatggagaggggaggcaccatccactagggaataagccatggaagaaggagcttcaccaccaagaatgtgtcttggataagaagctttaagaggatgctttaatggaggaaaagaaggaaatagggaggagaacgaaattcanggaataaaagagggagagaagtgaaactttgaagtgtgtctcataagactttcattcatgaaagttacaacaagtgttacacatgcttctatttatagactaggtagcttccttgagaagctntcttgagaaacacttcttgagaagcttctttgagaaaacttccttgagaaactagagcttacctacacacacccctctaataactaagctcac

SEQ ID NO: 176701 - DNA, 452 bp, Glycine max
  unsure (1)..(452): unsure at all n locations
tgtcaaagaaatgggtgttgaaaaagcataacaagactttctgtgattggtttaaagatacaatctttgcagatgagaatgcttcagaaacattaagaaaactagcagatgggcctaaaagaaatgttataacttggcaaggatatgacataaataggtattcattttacacaaaagcacaagacgacaaaagtacaatgcataacagcgggatcaccctaagggcagaatctcaacacttcgcaagtgtgcatgacgtcaatccctgtgtagcttccatcccttactttgggttcattgatgaaatttgggagcttaactatgtgaaatttactgtatgtgttntcaaatgtaaatgggttgacagcaacaccggtgtgtgcactgatgatataggaattatgttggtagacttaaagaaacatggttaccacaatgaccctttcatcatg

SEQ ID NO: 176702 - DNA, 446 bp, Glycine max
agcttctatagaaggttcgttcctaatttctctacaattgcatcacctctcaatgagctggtgaagaagaatgtggcatttacctggggtgaaaaacaagagcaagcctttgctttgctcaaagaaaagcttactaaggcacctgttctagctcttcctgacttttctaaaacttttgagctagaatgtgatgcctctggagtgggagttggagctgtattgtacaaggtgggcaccctattgcttattttagtgaaaaacttcatagtgccaccctcaactaccccacctatgataaagagctttatgccttaataagagccctccaaacttgggaacattaccttgtttccaaggaatttgtcattcatagtgatcatcaatcacttaagtacattagagggcaaagcaagttaaacaagaggcatgcaaaatgggtagagtac

SEQ ID NO: 176703 - DNA, 367 bp, Glycine max
tccattgttcaatttcgagtgtctcgatatattatgcgcctgaatcggacctccgaatgaaaagttatgaccatttgaatttctcgagagctacctttgttcaatttcgtgcgtctcgatatattttgcgcctgaatcggacctccgagtgaaaagttatgaccatttgaatttctcgagagcttccgatgttcaatttcgagcgtcttgatatactatgcgactgaatctaacctccgtgtgaaaagttatgaccattttaatttctcaagagcttccgttgttcaattttgagcgtctctaactgtgatgcgcctaaatcagacatccgagttaaaagttatgaccatttgattttctcgagaac

SEQ ID NO: 176704 - DNA, 447 bp, Glycine max
  unsure (1)..(447): unsure at all n locations
agctnntgaaaatgttgtttttcaccttctcgctaagccaatctgttggcttagtgagtgtccgctaagcgcaacactcatgggctaagcacgaggaagactctggaagaagatgagttgtacaggtttgctaagcgcacagcttcatcccactaagcgcactgcttcagttcatctactaagcaagaaaggcacgcactaagccaaaattcaataatgtgcgctaagcggtccataagtgcgctaagcgcacgagcacgaacaaggccacctatttaagcctgaaatcagattttagaaggattttggactgggattcaaagctttgcatgtctaaggtttctagagagagaaaggtctaagttccagagagttttgagagattntactgtgggaagatctgtagagaccagagcttgaagcaggagcccggttgagagcttgaga

SEQ ID NO: 176705 - DNA, 428 bp, Glycine max
  unsure (1)..(428): unsure at all n locations
acaacacanacaaaatagaaaccctgagtaggaatcaccactaaaccgacgggaagggcaatgcaaacaacacatgcatgaagttgggcaacaatgaaaagaaaaagaaaataaaatccaccaaaggcgagtgaagaaaagagagacaaaagatctccagatttcacatggaagacacanaaagtacaataaggattaatgcataagacaaaaggagtagagcccaacccaaaaggtacaagcaacgctcttgaggttcttactcaatgtaaaacttaaacactctttgagcctctctaatcctttctttcatagccctcttatccctgaccacgttacaagcccaataaagtccatgtggatcaaggaatgactaattnntgcttttaagttggattctggaatggaacccacacacgctttgtgat

SEQ ID NO: 176706 - DNA, 449 bp, Glycine max
gcttatagatcaacttgatccgtagtcttcaatatattgttgaaaaatacatatatttttataatttgatttgctttcccagttgaatatattgcctatcaaggatcaactctcctgaaagccatcattggagtgcatattaaaatttaaatgaggacaatgcgcaggcttattgtgcctcattttaaaattcaaatttaattagtagaatctagctgacaagaataaagctcttgagtcttgaccgcttagtgatgcagatgttttaatattatgtccaagacctacacttaaaagttaagctgaaggttcaagattagtcttatatcttctattattaccaatgtcttttgtagttgttgttgtcatttagagtaagtagtgaagcaacctaattgagtagcaagttaggaaaattgtttttgatccaaagattaaagttagctcac

SEQ ID NO: 176707 - DNA, 432 bp, Glycine max
  unsure (1)..(432): unsure at all n locations
ccatgtgtttgtcatgcttaagcaagagaagagccacgcttaagcaagccttgcagatctagttgttgctatcaggaaacctgttgcttaagtgagagaagaaccacacttaagcctgatagaggctggaacatggctgcttccaggaattgaagcttaagcccatgaagagtcacgcttaagcatgtctgaggctgaaattaatgcacttccaagagttggagcttacacgtagcttgatctagagttgtggagctttatgtaatttaggaaaatttttgttcaaaaaaaaaaaacactatgaaggagttgacaaaatgaggaaaaggaaaaatnttgtttaaaaaaactcacatacattaaaaaatagtttatcanattagtttcctttcctttatctcaaccattaatttatttattaatatattcaat

SEQ ID NO: 176708 - DNA, 436 bp, Glycine max
  unsure (1)..(436): unsure at all n locations
agcttgaacgtatgtaagacacatcttcttcaaccttggtgattcttgactccatttcattaaagtgcatgtctacttgtagttccaaagtgtcaaacctttcaccaacaaaggtttgaagaccatcaaacctgtccaaaatctttgaaagaagagatgaatcttcttcatcatgtccttcttcaccaacatgtcgagcacccttctttacccaagagccatcatgttctttttgataaccaaaggatgctatgactgaagcgcctataaagaaggatctcttgattgaaacatagggttcaaaatcaagagggatgttgaagtgttgaaggaaaagggtaacaagatgaggataaggcaatggagcattcaatcgcaatgccttatgcatgcgatatctaacaagatgtgcccaatncaatttgaaacctttatg

SEQ ID NO: 176709 - DNA, 467 bp, Glycine max
  unsure (1)..(467): unsure at all n locations
tgtgcanatcaagtcactcccacattntatctctagcatgcattgtatgttggtctcatcctttgtcacgggaagccggaaggtccatatcaccttcttaattgtacacatggggcactacgccccaaatgcgcaagtaagaagagatgattttccgggctctcgtgtccgtaaaatgcattcatatcatgcaccacataagcatctcttcataacatcataatggacatatcctgcatttgtccgttatcatattctagcctcacattntgcatgagtcatggcatcatcatgcatatgcgttcaacaaactttntgatctgcaaaattgcataccatttgttttcatgtttgctcatccttgcgttntcctctacaaaacaaaaacaaagaagggggaagcgtgaaacttcacactacattcttagtttcatgtgttaggagccaaccatgttgggatcataaac

SEQ ID NO: 176710 - DNA, 446 bp, Glycine max
  unsure (1)..(446): unsure at all n locations
agcttattatggttagatgtagagaatgaaactagtacagatttttcaaatttcaaattttcatttgttataaaaagaaaaaataaaagagaaaaataaatttaaaaattaaaaagtattttttttccttttttctaatttaaatttaactttcttctttttcttcatcccaataaattgtgaatgattagttctttgttctaaaaattcaaagtcaggaatttatgtatttatttagaagcgggaaaggaataaaaaaaaggtgccagctatttccaacaataaacgtggcccgcatggatgagataattcgaaaacgaaatagacggccacgatcttcctaaatcacatttgcggttcatttgccacaacttgcctttnttaaaccaaactgcgggcacctcaggcctcagccacacaaagccacgttcgttaaaaatagaaag

SEQ ID NO: 176711 - DNA, 439 bp, Glycine max
  unsure (1)..(439): unsure at all n locations
cttggcttcatgtaaggacttgaggctgtaagttatttcttgttccaattcttatattttttattntacattctttatttctcctcccttttttctgctaatttcttttaaaggtggatccgtaggtgtaaatcaacaagattctaatgattggtgtatagtttaatttaatattctagcattcttttacatttgttgcaattatgtcattcaataacattattaacaaagcagtttttttgtttggctaaatatattggatatatttgtaggttntagattgcttcagtaaattagttgggtcacatgctcttctggttgaggataatggttgcatctttatggcatgtgatacaataatgaatctttattanaggtgagtttttatcatanatcaccttatattctatatggtttggtgtgccaatcttgcataagt

SEQ ID NO: 176712 - DNA, 389 bp, Glycine max
  unsure (1)..(389): unsure at all n locations
gtgcgctgcggttcatactcgganagaggaggttgtgtcaggatccactagcaccgcattggtacccgcgtatattttctattaaagcattcttgtatacgcttatgaacactattctatatacccatagtggcgagatttcctaatgactgatagaactggacggacattccatttgaggtcatctaagcttctctgtacggtaaaatatcctcaggaataccacttctcatgtcctatactgtccttggaatgatgataagcttatattgtgcttggggttaggagacaaaagctgtctattattatacaaccaacttggtatagcagtcgcttccctcttccctgtttttctgattggcgtgctactttagacaattttgaaaatg

SEQ ID NO: 176713 - DNA, 443 bp, Glycine max
  unsure (1)..(443): unsure at all n locations
agcttgtgtattgttacattctactaatatatggaattgcccactgctttgcttgagaataacaattgcttgaccacaacagcgctggaggcgacaagggacaatggtctttcaaataaacctgttgtacatgaacaaacaatatatcatacgctgaccgtgccaaacgaaccagcgaagtcattgcataattgttatactaactataattcatgaacctgaacaaaatgatttccaaacacatgaccgacacatatgatgcggtggccagaagaatcaggtggtggttgacttctaagagggaaaaatgtcatgctntgttgtcgggacaacgatacaaggattacgttataccgtgaagcaatcacatatcccatgtccgttatatccatccacttgtccacattaacctgaatgaaccanacatacacatgtangtaatt

SEQ ID NO: 176714 - DNA, 326 bp, Glycine max
gcctgtgcagatcaaggcactgccacattctatctctagcatgcgttgtatcgcgggctcatcctttgtcacgggaagccggaatgtccatatcaccttcttaattgtacacatggggcactacgccccaaaggctcaagttagaagagatgatttttcggcctctcgtgtccgtaaaatgcattcatatcatgcaccacataagcatctcttcataacatcataatggacatatcctgcatttgtacgttatcatattctaacctcacattttgcatgagtcatggcatcatgatgcatatgcgttcaacacactttttgatctg

SEQ ID NO: 176715 - DNA, 446 bp, Glycine max
  unsure (1)..(446): unsure at all n locations
agctntgtccgcannaaatcacttaaaaccattttaaggtccaacgccttaaacgatcctcttcgcttttatcggttaacatggaccgttcaaaagcataaaatcaacatgtatctttagcgcttttgcgagaactacgtaggtctaatttcctcttcgatgtaggatacgtaggagcaaaagccccgcttttgtcgacctcgggagatggttagaagtccaacgccttagctttctcaccaagtaaaatgaatcattntaaggtctaacgccttatatgacccccttccaagtaaaaagaatcacttgattcgccccttttgaaagaactacgtaggtctgatttccttatcacaattgaggaatacgtaggagcatgggaaaaacccttgtcaccacaaaaagataaaaaataaaaaaggcataaaaagacttataaaaacgta

SEQ ID NO: 176716 - DNA, 451 bp, Glycine max
  unsure (1)..(451): unsure at all n locations
tttgaagtttgtcatttcaatttctcactaagtaaaatggatcattcttaaggtccaacaccttaaaatgatcaccacttaagtaaaacagaatcatttgataagcaagaactacgtaggtctgatttcctcatcgcaattgaggatacgtangagcaaaagccccgcttttgtcgaccaccccaagagatcgttaatgtgccaatgccttaacgtttctctcctttcaaaaacaagagatcgttaatggtccaatgccttaacgcttctctcctttcataaacaagagatcgttaatggtccaatgccttaacgtatctcttctttcanaaacaagagatctttaatggttcaatgccttaacgtctctctccttcataaacaagagatcgtatatgtccaccgcctaacgttctcatctttaaaatcaaataccggtaatggtcaacac

SEQ ID NO: 176717 - DNA, 459 bp, Glycine max
  unsure (1)..(459): unsure at all n locations
agctntgagccanaatcctgactcaccataaaccttgacccagggtgagaatgtcaatccttaccctcggaagcaaaaaaagaatagaggggaaatttccaatcaaagaaaaagagaaggaaaatttccaatgaaagcaaaaaaagaaaagaaggaaaattccccaatcaaagagtgggagaaagcacaaagaaaagaaaggaaaattcccaatcaaagaatgggagaaagtaaaaaaggaagaagaagaaggaaagaaagctcctgatcaaggatcgaaagaaaacagaagaaatgtgcagagaggtctttggaccggacaatatctgaacaatacagaattgccaccaaatgaacgaaaaaagaaggaaagggaaccacgacctanaatagtcttctccctttgattaccaaccaaaatcccgtgcgctagcgaccttttttttctcgccccgcact

SEQ ID NO: 176718 - DNA, 478 bp, Glycine max
  unsure (1)..(478): unsure at all n locations
agttgtcgtgtgctgagtgtgtgagcaagtcgtatatggctgtcatgtagaggggttcgatggaacatgtatttatattagttgagcgagggtgttggtccttgtttgtaggaactattgtagcattgtagataattcttggcttatagataatagccgggagcttagagataatgttagagataaacatttgaattatagataaagatagaagataatcatacattatagataatgtggtgttataaataatttaatacatgccaatagataatatattcaaatatatatgaatattagttaggttagagataacctatttgttgaggaatccgacagttaagtgttatgcgttcgcacttgtcataccctaatttcgtccggagacctttgcttgatgacatgcgacctttctttggtccttgtgaggtgcttggcacccatcattaggcaatntgtggaattccgggacatgccg

SEQ ID NO: 176719 - DNA, 458 bp, Glycine max
  unsure (1)..(458): unsure at all n locations
agcttattgctntcctgcgaccaaattgcaaaatatctaaaacgaataaggacggaggggaaaaaaacaaaagtacttcaactttcaacttatgtgttcaaaaggtgaaagaggaagtgaaggtaccaaaccaaaccaccaaaccaatggaagatggcagagtacttcaccacacccaactctaccaataattaatgttacaaattccgggaatttgaacatataacgattcgtcacctgtaggaaattatagccccatttcccatactcacagcatatatatatatatgccacaagatcatggtattttgtactttcagagcaccatagatggttggcattggcaagttgagagaaatatatatataaatagacatttaacatttattcattctgataaataaaagcaagctggattntttattgatgcaataaataaagaaaatattacaagaata

SEQ ID NO: 176720 - DNA, 470 bp, Glycine max
  unsure (1)..(470): unsure at all n locations
acgggtggatggatcgatagaatggtcagattagttgtggtagttgatagctgcccagccctacctctcatattattgacaaattctatttctataatatataaaattgtatactttttatgtaagaaagaaaatatataaaaagaataatttatcattaaaagtgggttgtatattaattattataatttaattatgtttatatgagaaactgttaaaatgatatgttaaagtaaaagactacggatatcatttttttactctaacacaactaatggttntagcacatgtttgtgtgtagtcatttgctgtgttcaggatcgacccgtcagaaagtaaaatctaaaataaaaattgagagaggattttttattctaaagaanataatgatagttgaagtcttttatttaactgtgtgacattgtttactttaaaaaataatatatatcataatagacctaaagtttaag

SEQ ID NO: 176721 - DNA, 438 bp, Glycine max
  unsure (1)..(438): unsure at all n locations
agctnttgcaggagaagacacatgcagagttggaggctttactgtttcacattgaatcagaaatgcgtactggtacagcacaggtggatgagtactgggaggccattttaaaacatctccacatttataaggccaaggcattctccatcatattattttccagtattcttatatgcctatgaacaatggtttctttgactgtattactaaatcggttccacatgcaggctttgtttaaaggaaattcatgctatattgctacgtaagcatttgcaatctcttgagagaccattggaggatgaagataaattagagaatgctcatgttatggtacctgaggaggaagatactgaggatgatattaaaggtatgtataagctttttgttatcatggacatttagttgttcatgacacaatttttattggctctatttctc

SEQ ID NO: 176722 - DNA, 445 bp, Glycine max
  unsure (1)..(445): unsure at all n locations
agataaggctaatatctgcatattntnttcctttctttcttgttttatatatgatcaaattatctaatctataagattaaaagaatgattaatttaattataataatacacttattttcaacttatatcttttcaaaatatttccgttattaatattttttaatggctttgtgatatattttttcttttttataaaatatatttataatttcaaagtaataaatattataaaatgaataatttagaaagaaggtaatatcattctaataaaatggtatttctggcccttttactcatctttaattttgagcttaattcttatttaaatctatttaagaatgtaattatctaactatgttcaattcaataaatgtaattcgcaagtcatatctaatggatgtattacggtcatatgatatgttttgatggaatatcatagttaaat

SEQ ID NO: 176723 - DNA, 445 bp, Glycine max
  unsure (1)..(445): unsure at all n locations
agcttccatcaatggctcatgagcggacatggatgccttgtgtcttgttggaacaagtgcgaaaccaaccaaacacagagggcgggcaagcaacagatgatccgtgcgctactcttttcgtaccttcggtcaaatgtgtcaaatagatctgccaagacagctaccaccggactttccttgctatggtggtatgcaaggaaagcgtcgattgctgctaggtccaccaaaccatccacgtttggaaagaggacgaccccaaaaattagcaaagctaacacatccataaacgagacctaatctccttgattggccatacccctcgccttgtcttctaggtacccccgtggtaggcccgctatgccattccgagtctgttttatgcggtccanacctcttgctgaatccttgaccacagttgcaattctgctcanagaggggagacacc

SEQ ID NO: 176724 - DNA, 224 bp, Glycine max
agccacccagctcgcccattctagctatgttgcttcctccactatcaactgccgtctggaggaattgtatgtacaggcaagtacgcctgattgctatttgcaccctcattcttactataaacaccatttgtatatttctgaagatgatctttcgtaataatatagaacttaacgaatatccgaacgatgcttgtctcttttccgtaacgtatgaaaccttacag

SEQ ID NO: 176725 - DNA, 443 bp, Glycine max
  unsure (1)..(443): unsure at all n locations
agctntcataagtaaaatcaggtgtagccatctccctaagagtcctctcatgaggtggaggttgagccatgttctcagtatgaaaattagtagtcgaatgctcaaaatcagaatattcaaaatcactagcaacagaatactcagaatgctcaaaatgctcacaatgctcgaaatgcacagaatgatcaggatgcacactatgcctaactaatctatgaaaggttctatctattntangatcaaaggattgtaaatcacctggattgcccctagtcatgcactatgtgcagcaaataatgtgttctcaaacaagcaccaagggagggttaaaactacaactatagttaaacgatatccaaatgagctgaaattntgtgagcaacaccctanaatcatgaagatagcacacaaattttcagacaaaaattcaaagtctaactatg

SEQ ID NO: 176726 - DNA, 507 bp, Glycine max
tattaggacactatgaaactcagcttacatggagctacattagtaagtgtcgaggtcacattgtcatgcacaggtaactcccccccatggtgatcaccctgagtcttaagggagttccaaaaccgagtgacatacccccaagtacaagtatttccccttatgagaaacttcaagtacttactcgcaaagtttatactatttccatgcaacatgaagtatgaaacatgggtaccatcaatgcacaaactgtggataattaaagattctaagtcatcccccttcatagatgcttaaaactctctaaccactctttcctccaccagggatatccatcatggtaactgaaccccccatgtacatacacaacatacatcatcacaatgacattttcaacatcaacaacatttcatctcaatgtcattatcaacatcaacatcatctcatctcaatgccattctcaacatcaatatcatctcatctcaatgacattatcaacaacaacatcat

SEQ ID NO: 176727 - DNA, 454 bp, Glycine max
  unsure (1)..(454): unsure at all n locations
ttaagtcacctgcggcatgcaagcttgaaccanaaccggtgagagtgtgaacttatactgtgagtgaacgactagttgtgagtaataatctttgcatcaatctctgaattttagaatgaaatgtataaatgaggacatgattgtacatgcacaagccttttgaccaaaaagcttaccttgaatgataattatatcctttgcaccctttttgagctgaatgatattgtcaaaaatttgaaccctgaacttaattaattatctctagataccttgtttagattctcagagagcatacggttcaaggcaaatttacctcaaatttgggggagtggaactaattgcggtgcaaagaaagagataaaacatcagtacacacaacacataagatgtgtgttaaaaaaagaagaagagaaaagtgtgctaatgtaacaaggtcaaaagaaaatgaaagtga

SEQ ID NO: 176728 - DNA, 482 bp, Glycine max
  unsure (1)..(482): unsure at all n locations
ntagtcaagganagtaacccanaaatgaccaagaatagagtgttgaaagagcataacaagactttcctaaattggtttaaagatacaatctttggtgacgataatgcttttgaaatattaaggaagttagcagataggcctaaaaaaatgttataacttcgcaaggatacaacatcaaaaaatatttgttttacacgaaatacaagacaacactagaacaatgcaaaatgatggggatagtataaggactgaatctcaatactttcctactgtacatgatgacaatcctcgtctagctttcgtgccttactttgaagtcattgaagaaatctgggagcttaattatctaaaatgcattgtctgtgttttcaagtgtaagtaagttgatagaaatatcagtgtgtgaaccaatgatttcagttntactttggtagaattgaagaagctcacttatcagaatgagcctttcatcatggcataac

SEQ ID NO: 176729 - DNA, 452 bp, Glycine max
  unsure (1)..(452): unsure at all n locations
agcttctttgagaaaacttccttgagaagctagagcttagctacacacacccctctcataactaagctcacctccttgagaagcttccttaagaagattcctaaagaagctagagcttagctacagatacctctctaatagctaagctcacctccttgagatgagaagttagagcttagctacacaccccctataatagctaagctcacccccatgacaaaaaacatgaaaataacaaaaaaagtccttattataaagacaactcanaatgccccgaaatacaaggctaaaaccctatactactagaatggccaaaatacaaggcctagacgaaggaaaaacctattctaatatttacaaagataagcgggctcatacttagcccatgggctcgaaatctaccctaaggctcatgagaaccctagggcctttccttggatctctagcccaat

SEQ ID NO: 176730 - DNA, 471 bp, Glycine max
  unsure (1)..(471): unsure at all n locations
actcattctttaactaccaacagaaagaaatgcagttttgctaagcccagtttagagtatcttggcctcatcatttctggttntggggtggcagcagataaatccaaggtggctacaatgagttcctggccagttccgaaagattcgaagagtttgaggggatttttaggattgataggctactatagaagatttgtccaaggctatggtaaaatagcaaagcctttgactgaattactgaaaaaggatagctttgtatggacactagtagctactctagcttttgaaactttaaaatctgccatggtcagtttgcctttattagcagttcctgattnttcaaaaacctttgttctggagacaaatgcttctagcanaggagtaggggctgctcttatgcaagagggcaggcctttggcttttatgagcanaggactctcccctcgagcacagctgaagtcagtctatgaa

SEQ ID NO: 176731 - DNA, 426 bp, Glycine max
  unsure (1)..(426): unsure at all n locations
ggctgcagcttttcctgctaacagggagctctgatttctagggtgattgactattgcatcttcattttccttaaaggcatctcctcgttgtagtacaacctatagcctttgtttttagcagcatcccacacagggagacatggacacaccttgtcaacaactatcttgacattagtggcccttgagatgtgcagacaaggagggtaaggagtacgctgatctcttgcatacatctgagcatgaaggttgccaagagataagcatttttcttgggttagattatgatcagctggatgcactggcaatagttntgtgataggcatccacaaatgcaccttcttttgaaattcactctttggaggttcaacttcttgcgagggatcccatctgtgcttctcanacaaatccctagggatatgattttat

SEQ ID NO: 176732 - DNA, 398 bp, Glycine max
ttgtatgctccagctcgaggtggaatgctagattcatgtatgtagttctctatatattgaggtcttttctctctgttgtagttatctgtcatttagagacagtgtgtatttcgactcttaatatataaatacatttcaactttgtgtgggtgagacacacaagtattattatcaaatatatcttaatctcaactgagtcatttgtttatggagttttactcatgaacatatgatcatatatatgttattgttgggaatggtttccggatgcactctaactatgataaacctctacacgtctattatataaggaagaaagggtccaatataggatatgaagggacaaatacttataatcgactacgtcttctttgtaactgattacgagtgttatatct

SEQ ID NO: 176733 - DNA, 453 bp, Glycine max
  unsure (1)..(453): unsure at all n locations
catgcaagcttttagtataaaacttttgtgaaaacaaattttatgatacttttgaaacaaaaggtcaaataaaagaaataacacanaattgaaagaacacatgagaacttatatactgtttgtttgtccagttcttggtaaaccatcaaattttactataacttataataagctataagtattctttcctaagtcacttctacttcagacccaaagtagtctttagacttgtgtcttcaagcaaacactccaaatattctttgtatcatagtctcttcatacattaactaaagtcacttaaaagctggtatatgtaagtcccacaattctatcatcttatctgaataatatacaaatgaattacaagaatttctcagagttttcactaaagcacaagatttacaaagaaagcaaaagagaattgacattgaatggtacacatctcattatcta

SEQ ID NO: 176734 - DNA, 433 bp, Glycine max
gctcttctcaagtgtcttcacttgttctatgttaagcctccttttcttctctcctgcctgagatccatcatcagaatcttcctcagcattagcttcttctccaagttcaatccctgaaaatgacatagatctcttgccaagaaaggatgctcctccacctgcatatcaacattgtgaaacattagtattaggccactacacaacataatattgcaccattggttggtgtttttgtgatctagaggagagagtaccatggtactcttgaggtgcacatgaagttataattgagtcgagtgaacgtggaggttgatggtcatcttggtgaggtgttgtagcatgaaatttgctgagaagatagccatatcattgctggctagcctatgcctgatgccactgatcttcaatggctgaatgatattctgatcaccat

SEQ ID NO: 176735 - DNA, 417 bp, Glycine max
  unsure (1)..(417): unsure at all n locations
agcttatcctcatggcctgcctccggacttcaccccccgtgccaccccggaagatttaagccaagcccctactttcgaggggcaactcccaccttatgaagactatcccgggcaagacgatgggggaaggagatacccatcttggccccctgctccacctcaaagatccgtccccacatgaactaccccaaccgaacatagtccgccatatcccggtgtcgcaaccttcccttcggcgggagggcgacgcgagactcgcgggatgcgtgttccacgaaaggaatacgcgcggagtcgccaccaacgtttatttgaggaaaacgtcggaaaaaccggaaaagacgtgatctacgaactttttagtgaaaggttcgggagtcgtatttacgcacggngaaggtattagcaccccacacg

SEQ ID NO: 176736 - DNA, 464 bp, Glycine max
  unsure (1)..(464): unsure at all n locations
ggggtaaggtacttacccgttgaagatcgaagaacgatgaataacgaatgaagaacgtcgaagaacggttgaaacctttgcgaaattcttcacggaaaacgttacggaaacgtttcggaagcgcctcggcttagattntcttcacggaaacgatttttccaagcaaattcgaaagagagagaagtgccaaaggggctgaacccttttcttcttcacttcctcccctatttatagcaaaataggggaggtggttgccgcccagctcgcccaggcgagccangttgcttcttccagaagcaacagccttctggaggaatattctggagggcccaagtgggcctgggtggctattgcacccncctttnntactaagtacaccccctctgctgtttttggtgggatctttttcgtanagttacggaaacttacgaatntcgtaacgatactcgttntcttttccgaat

SEQ ID NO: 176737 - DNA, 424 bp, Glycine max
  unsure (1)..(424): unsure at all n locations
agctntgagccaattcaaacgacaataactttttactcgaatgtctgattgagccccgtaatatatcgagacgctagaaatggaatgttgaacctatgagcctattcaaacgacaataactttttactcggatgtctgattgagtcccataatatatcgagacgctcgaaattgaatgttgaacctctgagccaattcaaacgacaataaccttttactcggatgtccgattgagtgacttaatatgtcgggacgctcgaaattgaatgttgaacctctgagccaattcacacgacaataactttttactcggatgtctgattgagttccgtcatatatcgagacgctcgaaattgaatgttgaacctctgagccaattcaaacgacaactaacttttactcggatgtctgattgagtcccgta

SEQ ID NO: 176738 - DNA, 360 bp, Glycine max
  unsure (1)..(360): unsure at all n locations
taaagattgaatttcgagcgtntcgttatattacgggactcattcagacatccgagtaaaaagttattgtcgtatgaattggcttaaagcttaaacattcaactttgaccgtctcgatatattacgggactcaatcagacatccgagtgaaaagtaactgccgtttgaataggctcagaggttcaaaactcaatttcgagcatctcgttatatgactggactcaatcagacatccgagtaataagttattgtcgtgtgaattggctcagagggtcaacattcatttttgagcgtctcgatatattatgggactcatatagacatccgagtaagaagttattggcgcttgaattggcacat

SEQ ID NO: 176739 - DNA, 385 bp, Glycine max
  unsure (1)..(385): unsure at all n locations
agctngactagagttgcaagtgtaagagctataagtgtctgtgaacaatacttcaaacttggacaagttagtgaaaaattggtggttgtcaagaactgaacataatcttgagttaagacgaaccaatataaattctttgtgtgatttcttgtctaactaacaaagagtttttgaatttgtttttgtgaatgtatgtatacatgattttgatgatgccaaagaagaatcaaacaaagttgcttcaaaggataagcatggcttcaagattaatacaagattgcttcaacaaataaagtcttacttcaagattaactcaagatcaagccttgccttanaacanagtgctttcaagacattcaagactctggtaatcaattaccaggca

SEQ ID NO: 176740 - DNA, 441 bp, Glycine max
  unsure (1)..(441): unsure at all n locations
tggtggagtgctgctgctnttgcttcactgaggctaanaagtgtatagaatntacagaggaagactatgttagactacgctattccattctgaataaatcaagcttaaaataacatcattagttataatgaattccatgagttttatcttaaattgagtgacatgccttctagtaactgaagctagtatctcatggtttgctctgattacagattctgaattanggtgtgaatgatctcccatgtaaactatataatgctacattaatgcanatcccaaagttagttttgttctatataagtaagtagttaggagctgctagtaatgtagctcataggctgtagatgcatgcaactcacattgacagcatgcattaagttcaagtgaatatgctccttacctttggtgtggatccattcaccanagtatacccaatgaaca

SEQ ID NO: 176741 - DNA, 457 bp, Glycine max
  unsure (1)..(457): unsure at all n locations
agcttctatataagctngaaccatttatcaatattcatttgttgagttntatttagaaaattagagtttttctcttttatcttagtgagagtgattctcctaaattcttgagtgattcaagaacaccctggctgtatcaaaggactttcacaacctttgtgtgttgccctcgctggaaagagtgagtctttccttcctttcatcttcacccttgttctttcaaaccacaattccagaaaatccacctctacccagaattatctcgtggccgtaactcccattttacgcactcaaattaagtgattcttgagcctaaattgactttcaaaacgagacctttcacctcgttttggaatcacctcatttggagccctgtagcttcagttattgccatttctatatttcttgccagccaccacttaacctacantttaccatcccattcattcattttatg

SEQ ID NO: 176742 - DNA, 340 bp, Glycine max
  unsure (1)..(340): unsure at all n locations
gcccgagtcattcatccctatgagatgttgntgaattattggcgatcataatttccattccttggattacggngttgaaccaagctcaagcttttacaaaaaggttcatcaagtcaagttgaaatatggaagtaaccatcctgcaaaattggggcaaaagatgaatcgagtcacatcactgcttcgtctactgccaaacatatttaggattattgatgtccttggtacttncaagttcaccttgacaaagatgtcatggaccatgttgaanatctaaattgattcaaccccatattctgcgtaaaaattcgcaatacttcgactgtacatcattcgcatg

SEQ ID NO: 176743 - DNA, 465 bp, Glycine max
catgcaagcttgaggattatggggtacccatcacatgtgtgactatgtgttggacgggcgaaggtgcacaacaagttttccacatccacaatgcgcgcataaacccaccattccctgttgcccaccttcaactgagctcacgtactcccacgtagcccatatcctcgtttctctcaacaccgggtccccatcaatcctctcaagcttccacaacatccaagcagatcaacattcatacagcacaagctatcacagccaagcataatagagcataagcagaaaactctgctcatacaccaaccaagatcacagctgtttctcgcttaaagaccacagtaacaattccttcgatccaattcgctaaccgttggatcgactcgaacattttactagaagcctctagtacataagcctacactgtgaccgttggcagctactagcaaacatccagactcattctgcact

SEQ ID NO: 176744 - DNA, 162 bp, Glycine max
atgcaaggaaacatgcttgttgctaggattccaagatttggctctagaattagaaaacaacatgaaaattaggattcgcttgtgagagtctttgctcgaatatgggctgccccatggttgatatagaggtagtgtgcaatacaccttgcaataatgtgtata

SEQ ID NO: 176745 - DNA, 395 bp, Glycine max
  unsure (1)..(395): unsure at all n locations
catctgatgttntccctttagccacaatttccaagtacttccctaatagaataaaggatatcatcatggaacttgtctcaaagaaatcttgtccttcanatgtgtgcccagcgcaaccagcacgtccatgttagcggattttcgcttcagtgcatgatatgaacctacatagaacctaatagtaatagccatagtaaaatgactataagaatctccaatttcttgaaaacaatacaataaaattgtctttggtgaataaagagaaacattaacaagaaaagaaattagaattaaatagttattgatagtcatagtaccttttgccaactatgaactgcacaggcgtgctaagaatccatcttataaacaacccaagagtaagcgtattgtggatc

SEQ ID NO: 176746 - DNA, 394 bp, Glycine max
  unsure (1)..(394): unsure at all n locations
ctaagcttgtgcatgggagtggngtcaataggaagaaactcttcanagatggaggaagtgtgcgtaaaagataacaagggaatgagaaaaaattatttgtaattaaaaaaaataaagaaaagtaaaattacataacaactcttagatttatccatatctaaatgataacaaattggtttttttccaattgaaaaggtgtttgatgcgaacatacaccttgtaattnttaagtgagtctatgttagcaaaccccatatatatatntttaagaggaaagagaccatgactaattcgaagttcagttgggacataaataaagtctgacaaaaaaatattttcatcaaggatcaaacttaagtactacctgaatgattcaaccttagcttcatcacat

SEQ ID NO: 176747 - DNA, 442 bp, Glycine max
  unsure (1)..(442): unsure at all n locations
agcttcatgatgaatcaagaatgattcanagaatgtttgattatttcaaaggtgatgacaaaaagctcanaggtcaagaacacttcatgataacaaagatgatgatcttaagaatcaaagaatgagttcaatatggttcaagaggaaattagatttcaagaatcaagattcaaggttcaagcttccaagaatcaagatcaagattcaagactcaagatttaagaatcaagagaagacttaatcaagataagtatgaaaacgttntttcaaaaactgagtagcacatagatttttctgaanacctttttaccaaagagtttttactctctggtaatcgattaccagattattgtaatcgattaccaatagcaaaatggttttcaaaaagctttcaactgaatttacaatgttccaattgatttcaaaatgttgtaatcgatta

SEQ ID NO: 176748 - DNA, 392 bp, Glycine max
  unsure (1)..(392): unsure at all n locations
agatgaggaagtgtagaagggtgaaacttcctgcttttattcgttgaccacatagtggtacctggagatatgtcgcggnggtcaggagaccttgnggacgtcaggtggcgtgctattgcccaaaaccaagcttgaccaatcccgacccaacccgggcatagtcagtcagtgagaacctgtgatgtacctaagcaggcgagctcctggcagtcaacagataaaaggaacaaagaccacaaagcaaggaggcttgtgtggtggttggccagctgtgaatcttgtgtgatatatgggttatggcctctggtaatcgattactaagggtgggtaatcgattacaaagcttataaatgaagacaggaggctaagatggtctctggtaatctcattcc

SEQ ID NO: 176749 - DNA, 334 bp, Glycine max
gccctagaagactggcaagttttgttaagaggcgggcgtcgacatctgaacataatcttgagttagctacgaaccgatataacttctttgtgtgacttcttgactaactgacacatagttgttgaatttgttgttgtgaatgtatgtatgcatgcattctgatgatgcctaacaagaatcgagcaaagttgcttcacaggataagcatggcgttcgagaataatacaagattgtttcaacaaatcaagtcttacttcgagattgactcaagatcaagccttgccttaatacaaagtgctctcaagacattcaagactctggtaagcgagtacca

SEQ ID NO: 176750 - DNA, 245 bp, Glycine max
  unsure (1)..(245): unsure at all n locations
atacacccctaagactagttcccaagcaaggactagccacattaaatgcttcacatgtcttgggagaggtcacattgcctctcaatgccccacaaagaanatcatgattatgaggggtcaagatatttatatgtagtcaaaaggagactacttctttcccttcctcgagtggaagtgaacatgaagtatgggatgaagagtgtagtgaggaattctaccctcatgaagaatgtgacctcctaatg

SEQ ID NO: 176751 - DNA, 362 bp, Glycine max
agcttactccacgctatcctccatatctagattttcagaccttcgattctcactcgagtcttcaccaaatcacgtcccgtagagaccaatcttcctctatttcactcctctttcacttccaccgatcagaatccagagaaacttcatcaaatggcagagccgtcaaagaagagaaggggatcatcttccaccgtcaccgctgctgcccatcgccgtcacggcccatccggagcacccacagcacctattcctacttctttgtgatctgcaagatcatcaacattgctttcatccgatgatcaacggctacggtacctttctcagattcttctagaataatcttagaccctaagcacctagac

SEQ ID NO: 176752 - DNA, 453 bp, Glycine max
  unsure (1)..(453): unsure at all n locations
actaagcttgtctatgcttataaattcaactcaatgaaataatttatagtttactataaaaatggatatcagaagatcggaataattactataccgcagatggtattcagaaatcatatacctctcatagtatcgggtgcttgccctatccaaaatatacctcttgtagtatcaggtacttagtctagccgaatacttgacaccccttatagtatcagatactcggcctaatcaaatatctgatcctttgttaaatactcggtctaaccaaatatcgaatatgtctaatgttatctttgacaacttattaaagaaagattacctagattaactaataaaaaataattaagggagatatcagttccttaatgataattatacataggagcattacctaattntaatttgatgctgacacggcacctgtaaagactttgatgcttaagttcgaat

SEQ ID NO: 176753 - DNA, 451 bp, Glycine max
  unsure (1)..(451): unsure at all n locations
agcttataattggcttccaaattgattttgtgtatacaatatgatggactgattccttttagatcagaaatgtgccaaccaatagccgctttacgtcgttgtagaatttgcaccagttattcttcttcttctttcttcaaaaagttgctaattataacaagtttggtctcatcttcttccaagaatacatactttaaatgtgccagaagggtttttaattttgctttgggcttttctgttggactcagtttttccaattcttcacaacaaccttgtcaacataattgtcttttgaatcatcaagctcttcatcacaagctaagcaatctctcccatagccaggttctttntccaaaggagactgtagcaccatggntgaggctaataatgttatttcctgctccacctcttcttcttcgaaataggcatcacccatatctgagtggttcat

SEQ ID NO: 176754 - DNA, 392 bp, Glycine max
  unsure (1)..(392): unsure at all n locations
tcatgagtgaatcaagatgattcanagaagttttgatgatatctttggtgacgacaaacaagctcataagtcaagaacacttcatgataacaaagatgatgatctcaagaatcacagaatgagttcaagatgttcacgattgaatcaagaacacttcaaggttcaagagaaaatttgatttcgagagtcaagattcaaggttcaagctttcaagaatcaagattcaaggttcaagctttcaagaatcaagatcaagattcaagatacgtatgataatagtttttcaaaaactgagtagcacatggatttttctccaaacttgtttaccaaagagtttttactctttcggtgatcgataccagattgttgtaatcgattaccagtagcaaaat

SEQ ID NO: 176755 - DNA, 351 bp, Glycine max
agcttccattgttcaagtttcgagtgttttcgatatattatgtcgcctgaatcgacacctccgaatgaagggctatgaccattcgagtctctcgagagctacctttgatcaatctcagagcgatcgatatattatgcacctgaatcgcacctccgcgagacaagattcaccgttctagcttctcaagagcttgcgctggactacttactcccgcattaacagtgatgcgcctacttaagccatacgagtttgacatcctgacctttagactgagtcgcgcacctacgttgctgaaatcctatcgtcccaagagtttttgctctctggtgagccactaccagattattgtat

SEQ ID NO: 176756 - DNA, 257 bp, Glycine max
  unsure (1)..(257): unsure at all n locations
tagccctagaggngatggaccttttcaggttttggagaggattaataacaatgcctataggttggacctcccagaagagtatggagtcagcaccacttttaacatttctgatttaactccttttgcaggtggagctgatattgaggaggaggaactaacagatttgaggtcaaatcctcttcaaggggaaggggatgatgcaatcctccctatgaagggaccaatcactagaaccatgagcaagaggcttcaagaag

SEQ ID NO: 176757 - DNA, 387 bp, Glycine max
  unsure (1)..(387): unsure at all n locations
agcttgagatgaggaagngtttaatgttgaatcttcctgcttttattgttgaccacagagtggtacctggagatatgtcgcgggggtcaggagaccttggggacgtcaggtggggtgctattgcccaaaaccaagcttgaccaatcccgacccaacccgggcatagtcggtcagtgagaacctgtgatgtacctaagcaggcgagctcctggcagtcaacagataaaaggaacaaagaccacaaagcaaggaggcttgtggtggctggccagctctggattttgtgtgatatgtggagtatggcctctggtaatcgattaccaagggtgggtaatcgattacaaggcttacaaatgaagacaggaggctaagatggtctctggtaat

SEQ ID NO: 176758 - DNA, 416 bp, Glycine max
  unsure (1)..(416): unsure at all n locations
tagatcaggcatccgagtcattcgttatggctgttcgaatattcataggcattccatttcaacttttaatcgccatgatatattacggngctcaatcggacatgcgagtcaaaactttagcccgtcgtaattcacccgagttttccatgtntaaatttgagcgtcgcgataggttacttgcgttattcgaagatccggtggaaaagatatggtcgtttgtatttgcgatgggcttcattcttttcctaagagcatctcgatatattatgagcatcaatcacgaatccgagtcaaacgttatggctgttcgaatttgcctggtcagcccatttctactttcgagggcgatgatatattattggcctcaatcggacgtccgagtcaaaagttttacccttcagaattcacccgagtct

SEQ ID NO: 176759 - DNA, 397 bp, Glycine max
gcaaaccggagcaccgttcaaccacttggaggtttggaacatctacttgacagaggtaatggcttcgactcccttgaggagctttacacttgaggatatggaagacgattcatctagatctggttctatgacgaggctagagagaccatgcctcatgacaccccagaccattactgatgtgcatatggggaccctttccatgtatgtccgcagatgctgctaattctatttgcatcaactataatttgatttacactactcatatatcttatatgcacgcttccccttggagcggctgcattatctttggacccttgccaaagttacatttttctcctctgaactgtagatagatgcacgcatcacggctcctaacatattgcattggcggcactat

SEQ ID NO: 176760 - DNA, 129 bp, Glycine max
  unsure (1)..(129): unsure at all n locations
agcnttgtaataaatcttccaaacatcctctaatatatttcttntcctcggtgtattggtctttacttgtagtgagttcattaatttctcatttgtctgtgactatgtcttttcgttctgttttaattt

SEQ ID NO: 176761 - DNA, 440 bp, Glycine max
  unsure (1)..(440): unsure at all n locations
tacttatgttgttaaagtagatgagctccatgacatgcaagattgtctagtcttcctcctagatgaattgtcacactctgataaaaaaaaaaaattaaaataacatgtcacacatgtctttataaaattatagaataattaactgctctttntctaattttttagcactccaatctggttcatcacagtgctttttctcctggtttacactgatggtaagcgagtacatcttataataatccaccaagcctaaatcatttactgattattgattaaatgtattactataattacattntcgtgccattattgtatatggagaggttggtactcttattattggcagggggatttaatgacttgtttctaatctctgatgcttatcataattgttgagatacaatgtatttgtcctagagactctagttatattactctct

SEQ ID NO: 176762 - DNA, 404 bp, Glycine max
  unsure (1)..(404): unsure at all n locations
agcttanaccaagacattgttatccagacaagttcaattcatcaaatcaacctccctttttctcaagaactgcaaatcctccattcaggaaaggagtggtattaagagaagcttccaagtcaaaatcaatgccaccaatgaagaggaaagattctgatcaactaattgcccacactgttaggcaagcaatgaaagcctctccattcccctttaagatattttaattttaatatttcataatagttgtgaatgaactgtgacaagataaattacaaaagctttgttttggttacttgcaatgtaccttttaaatttgattaagtntaatntaaaacataattaagatagttttttaacatgctcaaaactataaaagaaatacgtatcattaagtttaaaaccta

SEQ ID NO: 176763 - DNA, 334 bp, Glycine max
ggcattgcaaacgattcacacctggactctcactcctctgccacctcacaagcaagttgttggctgcccgtggatatacaagatcaagtataatgcagatggtaacattgagctgtccaaagcgagacttgttgcgaaaggatacacacaagtggaaggcttagattaccttgctactttctcccaagtgccaagctcaccatagttcaactcattcttgccctttgcagccattttgattggcatctcaagcaattagacgtgaataatgcatttctttatggagaattgatgaagaagttacatgagtctttctccagaatgcatcagccta

SEQ ID NO: 176764 - DNA, 463 bp, Glycine max
  unsure (1)..(463): unsure at all n locations
agcttattgggagataattntcaatcatcattgntatatgcaatgacaatcaacaaatctcaagatcaatcactagcatttgtgggtttgtacttgcctagaccgatgtttagtcataaacaattatatgtggcagtttcaagagttcaaagaaaacaaagattaaagatcttaattcatgacaaggaaagaaaaccattgaagtctgctactaatgttgttttcaaagaggtatttgaaaacctttaataagtatgtccacaagtgctactaattctatttgtatcaactataatttgatttacaatactcgtatatcttatatgcaagtttcctcttggagtggctgcattatttttggtccttggccaaagttacatttttctcctctgaaatgtagatagatgcaagtatcatggttcttaacatattgcattggtgggaatatgtggaaacaatatga

SEQ ID NO: 176765 - DNA, 473 bp, Glycine max
  unsure (1)..(473): unsure at all n locations
aggtagaagaagaagttcanagacattcaganatattagtggataagttgctgtcaaaagaattgttgaatgaattaattaagattaccgaaatgcaaaccaaagccttgcttttatagactcttcatgtctggtcaagagaaccattagaagagttataacctttagaaaaactntaaaaaccatttgaaaaagttgaaaactatttgaagagttacatcttttgattntgttcagaaactatcactgttaatcgattaccaaatcagtgtaatcgattacacanagcttttttgtgaaaggatgtngactctttcacaattaaattgaattccaacgttcaaacacactggtaatcgattaccanatcattgtaatcgattacaacattntgaaataaattggaacgttgtaaattcagttgaaggctttntgaaaaactatttgctactgggaatcgattacaacaatct

SEQ ID NO: 176766 - DNA, 223 bp, Glycine max
catacatgtaatgggattccccagcacaagaaatgtccccttgcgatgttatttatagcaatcaacgtttaatcacagtaataatctaatctattaattgtagggataataatcaagccaactcaattacatataaatagaactaggacactcagtcaataacgttaataaggaaacaatcctaatgtacatcaggagacaagcatatcagaacgatatctag

SEQ ID NO: 176767 - DNA, 458 bp, Glycine max
  unsure (1)..(458): unsure at all n locations
agcttcttatccaaggctcatcttgngggngtttctccttcttctatggcttattccttaatggatggcgcctcctctcacctcctttcctttgtcttccgctgcatctccatggtggaaaatcaccattaaaggaccccattgaagctcaaagatccagcctccatagaagccccacaagcaagcctccatcaagtggtaatcagagcacaagagcttcaagtaggtgctccttaaacctccattattttttttgctttaccttctcttccattgttgtttcttcattttttctccatgtatctcctcacatgtcttgtgctaaatgttgttaacatgattctttagagtttccaccaattaaacttgctatagaagctagatttgattntctatggttcacatttcttgttcttgttcttgaaccatgaattgtgttgagtttacgttcctttgag

SEQ ID NO: 176768 - DNA, 374 bp, Glycine max
  unsure (1)..(374): unsure at all n locations
atgaggaagtgttgaagggtgaaacttcctgcttttattgntgaccacagagtggtacctggagatatgtcgcggtggtcaggagaccttgnggacgtcaggtggggtgctattgcccaaaaccaagcttgaccaatcccgacccaacccgggcatagtcagttagtgagaacctgtgatgtacctaaacaggcgagctcctggcagtcaacagataaaaggaacaaagaccacaaagcaaggaggcttgtggtggctggccagctgtgaactttgattgatatgtgggttatggcctctggtaatcgattaccaagggtgggtaatcgattacaaggctaaaaaaatgaagacaggaggctaagatggtctct

SEQ ID NO: 176769 - DNA, 304 bp, Glycine max
  unsure (1)..(304): unsure at all n locations
ttagagtctaactgcacgcgtgcgcgcgcaagcttccttcttgccatacttacaaatttgnattttttgcctgggcgtatactttcaactagcgtttgtagaggctctatagcgcattgacagcctataagcaaactacatgtagatgctgtcgtagatatagaactctggttggtgtgaaaagttgcttttccatcatgaaaatgaaactcagattccagaaaagattgccgtatagagatgggaaaactcgaactttcttgcttcgtgaacgaaactgagtcacaatacatccctagagctg

SEQ ID NO: 176770 - DNA, 456 bp, Glycine max
  unsure (1)..(456): unsure at all n locations
ttgaanatctttataccctcganancnacncagcgaaactaagcttgcttcacaataacaacgccaacgatttttctactatatatngactgccgacaggagtacagaagtcatacactattcttagaatgattataaccctggtccacagataaaagacaatggctgctcacctggctcgcctctcctacttttacactccatctggtcatcacaagctctttctctggtttacactggtggaaccagacatcttataatatcccccagccaatcattcactgatactgcataacgactactataaacattctcggcatatttgatatggaaggtcgcactctatatggcaggggaattaagactcgttcaaccctgacgctatacaatgtgaacacatgatgtctcccaaacctatatactactcttggatatgatatacatactccatcagct

SEQ ID NO: 176771 - DNA, 129 bp, Glycine max
  unsure (1)..(129): unsure at all n locations
agcttagggatggaatacttacttgttgttgatgaacaaaaacgcacaatggaatcaaaaaatgcgaaaaaggatgaccctagggctacaaactcgtcaatcccgtgggtatggcttntgaaagggggg

SEQ ID NO: 176772 - DNA, 154 bp, Glycine max
  unsure (1)..(154): unsure at all n locations
tacaaaacctaggtatctctgcanaagctgctcctcttgcagtcncgagagctcttttcccgaaataggcactgtggtgtgttgtggaattntgtgccctggccttcttaaagttttgtaccctaattttgcacaagataggctttaaataggt

SEQ ID NO: 176773 - DNA, 375 bp, Glycine max
  unsure (1)..(375): unsure at all n locations
agctgccaatgttgtaaaattgtctgtttgtccacaggtagcaaactgttttgatttgactttgcaacgagaattgcctgcggatgcagcctggtacatatataccacaacaaattcataataataataataataataataataataataaaaaatgaactggatgcactaattaatgatggagacaagtcttggcttatttgaaagaagccatattgacatgaaactttaaaatatatactttaaaagacagtacttgaaaaaggaggacattgaccctttggttancaattctaccatttgattttcttggtacggatgacatatgtgatacgtctaaattgaaggaaatacgtataaggagattttcttact

SEQ ID NO: 176774 - DNA, 169 bp, Glycine max
agaatcggaagaagtaattggctttttccctggcgatctaactgcagatctcttgacctctgccgtggaagcagctgcataagccattcatgatatttctacaccttagatcaacatgatgaaagcagctgggtgggaccttgatgctgatgccaactgactcgaacct

SEQ ID NO: 176775 - DNA, 79 bp, Glycine max
  unsure (1)..(79): unsure at all n locations
agctctcccaccctacatcggcngttttttnatacntttttgtcaccattgnagaaacgacgaagacggtggaagggag

SEQ ID NO: 176776 - DNA, 117 bp, Glycine max
acttgaaaaaactatttactgtaagtgcacaaacttgatcacactggtattaaacacttgctttggtttaaccacaagtactctcactctgattaaccctgttccaataaatggtta

SEQ ID NO: 176777 - DNA, 424 bp, Glycine max
  unsure (1)..(424): unsure at all n locations
agcttatgagaaaccattaaaactttttgttttcctatacaaacancaatggaagaagcttcgtcaagtattcccattgaaaaacctttattcaaacctttcaaagttagtgagaaggctacacgaaaaattagggaacttagaaaaactaaatccttaattgaaggcgtaggtgacaatcatagtgaattactaaataagattgcgtgtttacttaaggacattccagatactccccaaacctcgaaaaatacttccaaaatggcaacaagaagtacctccaaattaattaatgctattaatgaagagagtggccacaactcagataatgatcatgatcacacaagaatataaatccacttaatttcaacactggaatacaccctccagattatattatcaacgtccgactgccctgatcttt

SEQ ID NO: 176778 - DNA, 406 bp, Glycine max
agctttttgaaaactttttgaattgctttttgagaaaacttccttgagaagctagagcttagctacacatacccctctcataactaagctcacgtacttgagaagcttccttaagaagattcctaaagaagctaaagcttagctacacacacctctctaatagctaagttcacctccttgagatgagaagctagagcttagctacacaccccctataatagctaagctcacccccatgacaaaaaaacatgaaaatacaaaaaaaaaaagtccttactacaaagactactcaaaatgccccgaaatacaaggctaaaaccctatactaccagaatggccaaaatacaaggcccaaacgaagggaaaacctattctaatatttacagagaatccaaccttgagccat

SEQ ID NO: 176779 - DNA, 405 bp, Glycine max
  unsure (1)..(405): unsure at all n locations
tcctcggngccatttcctgcgaaggcaaaaatttggaaagttatttntaccagtgggacactactcttataacaaaaatggcgtacaacctcctcccataaatacaaacatcaatgtaaatttagagcaagcttatgcgcatatttccttacgaacgttcactngcacaagacatcctatcaactaagaaaaatgcacccatatacaatcaaggtagcttcattacctagattatgtacttccaaggtgtatntgttatttacatcacacacgcctccttggctgaatttacatacatgcatactcaaagcattttggggtaccaaaaactgcacatgcgctcatcttggtatttctaatacccatacatatacaaacttcacgatgaatcttgactacctacac

SEQ ID NO: 176780 - DNA, 616 bp, Glycine max
  unsure (1)..(616): unsure at all n locations
cacgcgcgacacactcttccagtantcacgacactngcgtacactacgncngtgccgcnaggaacacgcatactccagaccaccccccccccnannnttgaaatcaattgattgccgtcgcannnacagncgannnacgagagacgagcgcgcacgcanagcaagcnncacaacacgagcaangnaagncatatatctctgttcaacaacgcgagaaacacgaacgcgcaacgcgagcagaangtgcgcggacaacacgaccacaccacgcgacaagacacaacgtaaccgaccgccacgccgcaacctcaggaaaaccgaagcacagcaaagaaccacaaaacacgcaacatagctcggagaaacaataagcaaagaagcaaagcacccccgaacaaaagcaccacaacaaacaaacgcgacgccagctgggaaagatgccccgaacgaagcgacgactaaccaacgtgaaaccaagaccaacatcaacgcccaaaccacgcgctggaccgaacaacacgaaaaaccgcnccaggaccccgcctaaacagacccattgcagcaaccggcacacgaacccaaccagcgaaacacaccggcgccgacgacgcccacc

SEQ ID NO: 176781 - DNA, 138 bp, Glycine max
  unsure (1)..(138): unsure at all n locations
ctcgcttgttntggaagttctatagagagaatgttccaagntttatagagcnctgagagattntgctgtgcgaagatctctagagacgagagctcgaagcggaagccattctgagaacttgagatgagcttgtgagtg

SEQ ID NO: 176782 - DNA, 160 bp, Glycine max
agagccatgagcctagggaagtaatacaaacgtactggctgaatgtaactgaaattgttggcaaccataattcacccccaacatccaacaagtcagcctccattaggtctccaaatatgctgatgcctatgttgccaaatggggccatattacgacatga

SEQ ID NO: 176783 - DNA, 359 bp, Glycine max
  unsure (1)..(359): unsure at all n locations
agctntgcaacaaatgtcactctactcgaaatttctgatagatatgtttgacaggaaaaacaaacacgtccaccacgagaatattgtcgcggaacgaaaccgcagtgctgtaatacagagaattcttccaccaaaacataaggaccctggtagcgcaactactccttgatcaatcgaagaagtcactctcggaaaggctctcattgactggggtgccagaatcaacctaacggcgctctctatgtgtacaaggtcgggagagctggaaatcacgctcacgagaatgactttacaacttgctaaccgatccatcacaagaccttacggtgcagatgaggaagtactgactagagtgaaac

SEQ ID NO: 176784 - DNA, 297 bp, Glycine max
aagaatatccctttatttacaatattgtcacctttaataatttatcatcagttcgagagataatatcggttttgatcaaaattaatgttaacgagcattgtttattaaggtcgtcaaaggaaacttattgatgcaatgctacccgccaagggcattggatagaagactccaagaagattgggtcagataggcaagagaaggccctaggggtctcaagagccttatggtagatttcgggaccatgggctaagtatgagcccacttatctttgtacatatcatattatgattccattat

SEQ ID NO: 176785 - DNA, 392 bp, Glycine max
agcttcttgctggctgcttagtttgtagaaacttttctcataatgtgtgtataacagaaggggcgagaagggctgcaaggtgattttacctaacatagttgtgggaaatgaacaggcagcaaggagcatttcctaatgaacaggctgttaatggaaatggaaagaatatatatggatggggaattggggagaatgtaggcataatcacttgcgacacaagcaagataccaaaggctcataattctttgtaagaatgaactattctcggttctgtactctgctttaccagtataagaagaacaggttacttccattatgttcttctgttcgccttaatctagatagtacacatcattttgttattagagctcctaatccagtatgtcctgaat

SEQ ID NO: 176786 - DNA, 464 bp, Glycine max
  unsure (1)..(464): unsure at all n locations
actcagcttaacacnatgtaaccaccacaccttgtaagaaagtatttatatctgatttataaataaacgattatatgagttatgggccacgccatacagattattaaaccttgtggggacagagcagtgactgttgctaaagggggaaccttttggaggagagattatctcctattttagttaatagaatatttgggttcccaacaaaaaatgacgcagctttttgcataaatatattattgaattactgactgggcgttcaatcttattgatacttcctccctcatgttntacacaaatatcattgatacgtcccaaatcatcagtcttactgaatgaaaccgggtacccacaataaccagtgatgaaactgagacggaacatatgacagaccatagacgagaccaatcagttcataatatagcatccatacaattaaatgagatggaagtcgctggatattc

SEQ ID NO: 176787 - DNA, 461 bp, Glycine max
cctctcagtcacctgcggcatgcaagctttgaaggtgcgtatcccaccatcttatcttagtttaatacttgtaatgcgcctaccatcacgattattgtctccctttccatcattgagggtaccacttgggttgccagatccctccacctttgggcgtattctttgaaagattcatgcccttttttgcacatgttttgtagttgtatcctatccggagccatatcaaaattgtactgacactgcctaacgaaggcaaccattaggcctttccgagaatggactcgggaaggttccaagttagtataccaggtgacagctgcgctagtaagacttttttggaagaaatgtatcagcagtttcccatcttttacgtatgcccccatcttccgacaatacatttttagatggttcttggggcaagcagtccccttgtacttgtcaaagtcgagcgccttgaactt

SEQ ID NO: 176788 - DNA, 458 bp, Glycine max
  unsure (1)..(458): unsure at all n locations
tgtagatgttgagcaatagtcatcaccgcgattgaaatgcctttattnttctctaattacaccattgtcactgttattcaacatatgatggttatgatctgttatatgttttagatcaataaggtggcttgacacaaaactgttaacaaaaaccccaccgctggtaatggtcaagatactagccaaaaagtgggcaatatgaaactctaacacctgtcacttcatctttttggcctccttatgactggagggttccgcagacctattcttgtgatcacagttttgtcttttgcctttgcaactgtctttctcctttggctctntgggagaggggaactgcactagtcgaaaggtccctacgcgcaagatttnggtaatagaagccgctagaatggtgttgctgacatttaaaagaatgagttntgaaagctagtcaaaagctaccatgtcacaccaat

SEQ ID NO: 176789 - DNA, 389 bp, Glycine max
  unsure (1)..(389): unsure at all n locations
tatcttaagtcacgtgcggcatgcaagctcgactagtccacataagtgagaattcntatttgtctaagacgaggagcattaagggttatcattgcctgacaataccgctcatcaacataacatttgtgtggtttgcagaattctttgagcttaggatagtaagtattgtcttcaactatcctaagagctagttctcggctaatttcaaaccactgggagccttttcaccaggcactcatgttgatttcaaattattttgtttggtattagaagcatacttccccaatgagtgagaaaagtgtacataacatatttaatagcatgaacaaacaatttataaagactcaggataagatcatgaacaagcatgagccagaaacccatgatca

SEQ ID NO: 176790 - DNA, 385 bp, Glycine max
  unsure (1)..(385): unsure at all n locations
gctgcataacccagcccacaagaagtttctacgattttgtgcagaaagccggcatacagcctggataatgacgctgaccacagcgtgaatagcctcacgagtggatagtaagaatnctagcctcaacaaaagaggacccaagtaatactgggaagagagggaggggtcacccaggtgatcccaaaagagtgagaccatgttgactggacaaaaatgaagaccactcgtcaaggttgaattagaccaagagaggtctgtcagaacaaagagtgagaattgttcacatgtatcgacaccttgtctggctatccaatttggagattgaagactattgaacttatgcccaatatgaacactccgccaaattctaagagatggatctttt

SEQ ID NO: 176791 - DNA, 424 bp, Glycine max
gatcttaagcaccgcggctgcaagctgtaccaagattcttttctcctttacttgtcatctccaaatcgagagggaagggggaagggggaaaagggaagaggaagaagccttgaagataaagaattgtagtcaactctttgattagtagttgtttaagaaccctaacgactttaataattttgtaattgaactcatgtatgattattaactttattttagttgccttggtaattttctttagtatgtcagtttctggccttggtccaagtgctcattttagtgagagcaataaatatacctcttaagcattttgtaaggaccttttttggttgaataattacaattttagcttggtgctaatagagaaagtgcttctctttggttctttcttggaaccctgattctcatcaaagaatttcattct

SEQ ID NO: 176792 - DNA, 454 bp, Glycine max
  unsure (1)..(454): unsure at all n locations
ttctttggttcttaaaattatggttagtctccttgtgtgatcagcaccttggactaaactctataaatagatatgtaacccctttcatttgaggtttgctccattgtggcggtaagtagggcattggctcttttttttggttataggattagaatcttctttgaatcttatcaaaggtctccatacttttgtggtgattcctcacttagcttatcattctcctagagtgtggcaccttccttttcatttcctgtctatgccatctttttcttttgttatttacttttccatctcttttcctcttatttcttactatcacgttctctaanattngcaccattgttacaagtctttatcttcgtgctaattaatatatttgtctntaattcctttaaaaagataaccaactcaaggaagacttgtaaaacagtatggtttctgctaaggatcatat

SEQ ID NO: 176793 - DNA, 451 bp, Glycine max
  unsure (1)..(451): unsure at all n locations
agcttgtccnccaattntctataaacatggggttaagtgaagtagaaaacggttcagccccttaggcacttctctctctttcgaatttgcttaggaaaattgtttttgtgaagaaaatccaagccgaggcgcttccgtaacgtttccgtgagtgatttcgcgaaggttttcgaccgttcttcgacgttcttcatcgttcttcagtcttcaacgggtaagtacctcaaaccaagcttttcaattcattctatgtacccgtggtggtccaaatttggtttcatgtatttttagtctcgttttcatttactttttatacccccttttgacgtgcttaagccatttatttaagtcatttctcgcttaacctaaaaataaaataaatttccaccgatcatttgaattgtatcatccgttaactctggttgaaataaattccgaccgatcggtcgtg

SEQ ID NO: 176794 - DNA, 470 bp, Glycine max
  unsure (1)..(470): unsure at all n locations
ntggtctctatagatcttcacacagcanaatctctcanaactctctggaacttggaccttctctctctagaaaccctagacacgcaaagctctgaatcccagtccaaactccccttctgaaatctgatttcaggcttaaataggtggccttgtttgtgctcgtgagcttatcacacttatggaccgcttagtgcacattagtgaatttcggcttagcgtgttcctttctcgcttagcaaatgaactgaagcgtggcacttagcgaacctgtacatcttatcttcttccagagtcttcctcgcgcttagcccatgagtgttgcgcttagcggaggctcgctaagccagcagaatggcttagcgagaaggtgaaaaatagcactttccanagcttgcctaattaacctganattgagagaacatgataatcaaacaaacaataaggaagtactaagtatttattacctatac

SEQ ID NO: 176795 - DNA, 449 bp, Glycine max
  unsure (1)..(449): unsure at all n locations
gagcacctgcggcatgcaagcttgtaggattatggngtacccatcacatgtgttactatgtcggcggcgggcgatggtgcacaacacgttttccacatccacaatgcgcgcataaacccaccatcccctgttgcccacctccaactgagctcacgtactcccacgtagcccatatcctcttttctctcaacaccgggtccccatcaatcctcccaagccttcccaacatcaaagcaaaacaacattcaaacagcacaagctatcacagccaagcaaaacagagcaaaggcagaaaactctgccataacaccaaccaaatcacagcttttctcacttaaagaccccagtaacaattccttcgatccaattcgttaaccgttggatcgactccaaaattttactggaagtctatagtgcataagcctacattatgaccgtcgggatctact

SEQ ID NO: 176796 - DNA, 502 bp, Glycine max
  unsure (1)..(502): unsure at all n locations
nttaacgcaatcataccttgagaccctgcacatccaaacacagctaactgctagaatcagagaacacgattttcaaacgatttggaatatactgacgccagtctatctatatacaattgcctgtcgcttgcttgaactctgatctcaagtaatgatatgccattactcaaaagggggacattgttgatgcaaatgaacttcatgttctgatgaagatcatgacgatgtgttgcaattgatgcaaccggcgcttttcatgattaataaccaggacaatacgtcaagactacaaggcacaacatcaagatgagcactagaatattacgaagggaattcctaattgaattatccaacagttggcccagtgatttcacataacaacgcgttttcaaggtnttactctctggtaaccattaccagaagatgaaacgactaccagtggcaaatacgctccatacacctataaaaatcgatctccagttttcagctgcactcctacccc

SEQ ID NO: 176797 - DNA, 185 bp, Glycine max
  unsure (1)..(185): unsure at all n locations
agcttagcatcaatcaccttgctgaccataacattagtaggaattgnggcttcccataatggatacaaacacaagggatcacattcacaaacaccattcaagtatgaaaacgtcactggtgttccgaatgcagtggattggagggaaaatggagctgtcacagcagtcaacgacctacgccaatg

SEQ ID NO: 176798 - DNA, 332 bp, Glycine max
  unsure (1)..(332): unsure at all n locations
tgtacctagcatccctacaagagattattaaatctttgaaattgagttaaattaattnttctgatgtagcaagaatcaataatgagtgcttcaacttttaataggtttttttttgtaaattcaaagatattttgatgttttgatgatgccaaaggaacacgtttctcaagttttattcaagacaagaattcaagatattcaagaaattcaagaaataatgatcaagaaaattcctagagtcttacgaagaatattccaagttgaaacagcaaaaggttatgcccaatgatgtaacttaatatatttntnaaagagttgtactatctgatcat

SEQ ID NO: 176799 - DNA, 399 bp, Glycine max
gcaagctttggtttcaattacgttcgtgttgatatattattggactcaatcgtacattcgagtaaaaatttattgtcgtttaaatttgctcagagcttcttttttcaattacgagcgtctcgatatactacgggagaccatcggacatccgagctaaaagttattgtcgttagatttttctaatagcttatgttctgatttttcgagcgtattgatatcttacgggacacaatcggacatacgaggctaaagttattgacgtttaaatatcttcagagcttctgttctcaataacgagcgtctggatatattacgggactcaatcggacatgcgagtaaaaacgtattgtcgcttcaatttgctcagagcttcctttttatattacgagcgtttcattg

SEQ ID NO: 176800 - DNA, 344 bp, Glycine max
  unsure (1)..(344): unsure at all n locations
tgtagcaaattcgaacgacaattacgntntactctgatggtttgattgagcccgnaatatatcgagaggctggtaattgaaattagaagctctgagcacattcaaacgacaattacttttgactcggatgtgcgactgtgttccgtagtatatcgagacgctcgaaattgaaaactgaagctctgagacaaagcaaacgacaataactttatactctgatgttcgatagtgtcccataatatatcaaaatgcttgtaatcgaaaatggaagctcttataaaaatcatacgacaatctattctatgtcggatgttcgattgtgtcccgtagcatatcgagacgct

SEQ ID NO: 176801 - DNA, 371 bp, Glycine max
agcttgaggtgaaacccactttaacttatcattttgtcgctggctgctaaccgggaaagacccttttgggtttggcataacctatacaatgacgactgtcatctagaaaaaatatctgtgaaagccattccttggacatggaattctactcatttgagtcttatttcacgtaagctctgtaatggctggcgtacctgatttcctaccttggcttttaatccctataaaatcatgaaagtacttttgctgaggaggttttagcacggcaccatgtatcatatcactattactgaatacgtttcttcatcatatttatttacacactatgattgtcaaggatgacgttttaactaatagttccttctcaaata

SEQ ID NO: 176802 - DNA, 352 bp, Glycine max
ttagcccatcaatcctttttctatatctatcatattaatgatccgggctcctttgaatattttacaggaaagattctatttcacctgtaatccgattcgcaatcccgtgatgtgacccgcctatttcatataaaataattccttctcttatatgtgcacataccagagttgggttagcgcttttttcttggtcaaagtaattacaccattctaccagtttagcggctgtcgcaccttctttaccttacaatacccaccactgcacaatgccctcacgtgtacctcaggcgcggcatcctctctgtcatgtgctcctttaccgcatgcaccaccaccatcctatgcctacatt

SEQ ID NO: 176803 - DNA, 210 bp, Glycine max
  unsure (1)..(210): unsure at all n locations
agctnttcgattcattctatgtacccgtagtgttccacattgtgtttcgtgcattnttattctcgttttgtttactttttataccccctgttgacgtgcttaagccattttacttaagtcatttctcgcttaacttaaaaataaaataaatttccaccgaacgtatgaattgtattatccactaacttcggttaaaatagaattcaaccg

SEQ ID NO: 176804 - DNA, 365 bp, Glycine max
  unsure (1)..(365): unsure at all n locations
gtggtaatcaaagcacaagagcttcaagaaggtgcttcttaaacctccactaatttccagctttaccttctcctccattgttgtttcttcatttttctccatgtatctcctcacatgtcttgtgctaaatgtttttaacatgatatttagaatttccaccgattaaacttgctatagaagctagatttgattttctatggttcanatttgttgttcttattcttgaaccatgaattgtgttgagtttaagttcctttgagtcttgtcttgataantttttgtggctgaaacctaaaccataaaattcttactaaaacattaaagtagaagataacctctaaactctagagagacttgttctccta

SEQ ID NO: 176805 - DNA, 487 bp, Glycine max
  unsure (1)..(487): unsure at all n locations
taagtcacctgaggcatgcaagcttgtaggattatggngtacccatcatatgttgtactatgtggcgattgggcgatggtgcaagtcgactttccacatccacaaatcacacataaatccaccatccccagttgcccaccttcaactgagctcacgtactcccacgtagcccttatcctcgttcctctcaacaccgggtccccatcaatccctccaagcttccacaacatccaagcaattcaaaatccaaacatcatgcactatcaaaaacaagaaaacagggcagaggcagaaaactctgcccaaaacacaaaccaataccacaactttccttactcacataccccagtaacattctcttcgttccaatttgttcactgttggatcgactcanaanatttactggaggtccctagtacataagtctacatnttgaccgttgggatctgctagaanacgtccagaacccaatatgtactaccctttt

SEQ ID NO: 176806 - DNA, 448 bp, Glycine max
  unsure (1)..(448): unsure at all n locations
taagtaataataatagtaagaagaatattaataactattatctatanccattttgtggcattatgaatgacaggatgtagtgacataaagtgcttagagagttcacttgcatgtgaaaaattttcaaaaagaaaaagacttaagttaaaaggataatgcaaccagattaatacttccaaagaaaaaaatgttttgcaaagacattttcagacaatttaaatatttttatttgactatattagtataaatcatctctaatccatatattttttaatattatgttctttntattcattntcttttgatatactttgtgttttaataatttgaattcaatatgattntgtttatcaattatttctggatttgacatntacttatacgaaatttataagtttctttttttggtagtatttactaggtttaaaatgttaattggtaaagacgt

SEQ ID NO: 176807 - DNA, 559 bp, Glycine max
  unsure (1)..(559): unsure at all n locations
ccaccccacaccgcctgcatgcgccaaaccacccccaaaaacactcanctccacaaccccaacggatgaccattcatgcataccncacaccagacgcagcaggaagctnaattaagatngncgaaccgacaattacttttacttatcagaaccaccaccggccccagaaacgccacatccaggagcaccgcacgccgccgcaagacaacacaaacaaagaatctacatcaaccattaacgtgagcacctcatctagccctgtgcctcgagtccaaccctagccaggaatgagagcagaaatccagacaccacgaagaatacaaagccccattgccacacggaaccgacaagaagaatccgtgaccatcctttcgccactcagcacggcacaaagtaagtcgagcacaactcatacaaacgcgggggaccctcaaacgaccgccgagccctcaaaaccccccctaccgactactgcgaacccaacaggacgccgaacaaccacccacgtaccaacacgcaaccaaaacaggcaagataccactccacaacacgacaagcg

SEQ ID NO: 176808 - DNA, 419 bp, Glycine max
  unsure (1)..(419): unsure at all n locations
agctttaattagaacaaaaaaaacatatgcaatattgttattaaattaaaattgtgaatttttaaaaataaaggatcaaaatcgtaggaaaaaaaccaaaggatcaaaattgtagattagaaattataggtgataaaaattacaatttaacctaaaacatttaatcattatataataaaatttaatagatataaaatattaaaaagtgcaatttaatttaaaattactcttaagataactttattgattctcgtgataactatattttagagcttactttttatgtgcggaaatgacagagaatttttacatgtacaagttaataaattatggtacagaaatatgttgatggtctactttctggatattttaatatatnttttataagcatttagttcttattaccatgacacctaaat

SEQ ID NO: 176809 - DNA, 467 bp, Glycine max
  unsure (1)..(467): unsure at all n locations
gacattgcttctgaagatcagagttattcaaattagttagcagcatggatcccttcaatgctagcagcatacttccacagaaggtttaaagacattgacacaggctaggagaactaccactttcaccaaggataacaagttaaaccgtgattcatcactacttacgtagcctctaaccaaaacctttccacacgggttgatttcaagtaatttcatagtagtaaaacaacgatccatgactatgctgctaattcattcgcttttcttttctctcccatatagaccacacagcatggattattactaattaagttctttctgacgcacactggcacccaatctttgtagctcaccagcacctactttcccaaacaagaaatcgaagtccataactgttccacagtactcagagaagtgtangagcaaataatgattttaagggtaattaattaatcaccaaaatctga

SEQ ID NO: 176810 - DNA, 521 bp, Glycine max
  unsure (1)..(521): unsure at all n locations
cacccaccccctcaccaccnctcatngcttattttcccgncccccaatacgacnnatagcctgaaccgactacgcacgcgagcacttttttacaaatcgcaggatacatcatttaagcacccccggtcttcttggtaacatgcccattgcccaaattcaagaaaggaaacacacaattcatcataagcacggcatcaatgtaaaacaagggctaccacccttttcacaaaaaaaataaaccaccttactggcctaccaatcaaaggaaggtaaactgttcaccatgcttcaagatgagcaactatacaactcatggccaagactaacaaaaagtaactcatggactaaccatcaaggtatactaataactcaaaagaagcaccaaaaataacccacacgaaattaaaaggcccatgattggccctaagaggcctcgtcccgaaaccccctcctcccatgcgaatgcaggaccgacagagatacaagagaagcatttcgagaactggactggggtggttccg

SEQ ID NO: 176811 - DNA, 432 bp, Glycine max
  unsure (1)..(432): unsure at all n locations
tttcttgataaaagaatgattaatgatatttataaaacccaaagctataacaattntgtttgtccctatattgagttctatttctaaggatttttcaaatacggaaaattggagaggtgaaaaatattggttaagtaaaagtgttacatttgcaacattctgatgtaaaatatagaaaataggttactggaaattttctgctcagcaatgttttgggatgactggatctagattttcaataataagaatgaaccagaaaggagattaaatctacttccttatctaataaaatctgttagggaacaaaaggctggagtagttttgagctttgaatggtatttaagaacacttggtcagtctttaattcatatggtaattgtgagtatntaatatattatgaacttctcgtaaataattgactatatctaatct

SEQ ID NO: 176812 - DNA, 272 bp, Glycine max
tagatcaggtgatgtgttctttgtttggaaggcaaacatagatatatatattattaataagatcagatcagcaccagaagtactgatgaattacacataaatacaagacactaagagtgtcgccttccaaccaaaacaaaccctccaaaaatccactacaaaggataaaatatccatcccaaacagatatacaatgcacccagcccatatcaactaatataagccacacggttcgaagaccattggttgaaggatatactgaagagattctc

SEQ ID NO: 176813 - DNA, 427 bp, Glycine max
ttcacatttacttgatggggcctatgcacgtcgaaagccttggaggaaagacgtatgcctacgttgatgtggatgatatctccagagctacctgcgtcaactatatcagagaaaaatcacacccctttgacgtattctaggagctgagtctaagacttcaaagagaaaaagactgtgtcatcaagagaatcacgagtgaccatggcagagagtgtgacaacagcaggtttactgaattctgcacatctgaaggcatcactcatgagttctctgcagccattacaccacaacagaatggcatagttgagaggaataacaggactctgcaagaggatgctagggtcatgcttcatgccacagaacttccctataatctctgggctgaagccatgaacacagcatgctacatccacaacagagtcacact

SEQ ID NO: 176814 - DNA, 482 bp, Glycine max
  unsure (1)..(482): unsure at all n locations
attgacaccctgatgcccgtggaanccccttcactatccagactcaagcttctatttagacctcgatcggtcatctntcctgtgtcgacgctctctgtcatttcctttcgagcgagactagtgacaaatatgttgttgtcacatatcgcgccttatataacttacttgcctgtgaaaaattttcaaaagagaaagactaagctacacgataatgcaccacattattacttccaagaaaaaacgtttgcaagacttttcagacaaccaaatacttattttgccattttaactaaccatcctaatccccaaattttggaaaatatgccccttatcatatccttggatacttgggcttaatacccgactcaaatgaactgtttacaatattctgggattcgcactacttatccaaaattanagttcccttttcgttcgctttccttgcataaacaatatattcgttacaccttttacccgacccc

SEQ ID NO: 176815 - DNA, 429 bp, Glycine max
  unsure (1)..(429): unsure at all n locations
agcttcctcggggccattcctgcgattgcaatanttggaaagntagttttaccagcgggacattactcttaaagcaaaaatggcatataacctcctcccataaatacaaacaccaatgtaaatttagagcaagcttatgcgcatatttccttacatacgttctcttgcacaagacatttaaccgaaaaagtgcacccatatacaatcaaggcagcttcgttacctagattatttacacgtactgccaaggtgtatttgttacttacatcacacacatctccttggctgaatttacatacatgcatactcaaagcattttggggtaccaaatattgcacatgtgcacatcttggtatttctaatacctatatatacacaaacttcatgatgaatcttgactatcttcacanaaaggcgctacacttcatc

SEQ ID NO: 176816 - DNA, 606 bp, Glycine max
  unsure (1)..(606): unsure at all n locations
ccccgcccctccccaacacactactctagaggtcctcagggcacgaccaaccacaaaacccnnaaaaacgcgnacnnggaggannnnttggagnccccctgtgaaggccctcgaggccccctcgcaaancccncgaagaagnngangnaggagaacagaggcaggcanangatctagcaacacttatacctataatgctcgccggagaccagcacgagaagagtaaagacattgacccacgctaggagaactaccacaggcaccaaggaccacaagctaaaccgacgagcaacacgacctacggagcctcaaaccagaaaccccccacacggggagagcccaagcaagttcacagcaagaaaacaacgaaccaagaccacgctgcgaaaacaggcgcaacactctgtcccccacagagaccacacagcacggaacaccacgaagcaagcgccccaaggcgcacactggcacccacggccagcagccaaccacgaccgaccacgccacacagaaggcgacaaccggaaacgacgcacagaaccaaagaagcgcggaacaaaacgagacgcgacggcataagcaaccgcacaaaccgggaccagcccg

SEQ ID NO: 176817 - DNA, 449 bp, Glycine max
agcttgagcttcagctgctatttatctaatttatatgtacatcttgtaagaataatatgatatatgtcacagcttacaaacattgatgtaacattaaaaaataaatcaagtaactagaatatgtgaacagttctagataagggaatatcagcacaacaacaacaaacataacaaaaaggataaaaaacatatgaaaagaaagaggaggaaagaagagaataacagttgactactacaatatccttataggtattaaaaatatttgcaataacatgacaaaggaattgcttctcttaacattgtctaaaaaaaactaacatgataccatggagtaacaaagttcagatagaggtttcttcatttaatacagctcacttcaaaatagactttttatttccatttactttccgtgttagtctaaggaagggactagggagagtgacatagct

SEQ ID NO: 176818 - DNA, 459 bp, Glycine max
tcacagatccgatcatggaaggagttggcatctgccttcattatgcagtaccagtacaatacggatatggctcccgatcggaaccagcttcagagtatgactaagcgagagcatgagtccattaaggaatatgcccaaagatggagagatctcgcagcccaagtcgtaccgcccatgacggagagggaaatgatcacaattatggtagatacgttacccacgttctaatatgaaaagctgataggctacatgccagctaactttatggatctcgtcttcgccggagaaaggattgaatccggactacggaaaggcaagttcgaatatgcttccaatgtggcccccaacaacaacagaagagccctagtagtgggtgcgaggataaaggaaggagacatccacgcgtgcaccaccgccccgatgtggatgatagcaccccaaaatatctaaagctcatac

SEQ ID NO: 176819 - DNA, 382 bp, Glycine max
  unsure (1)..(382): unsure at all n locations
agcttaaccgagactcgcgcttcggttaatgtccagtagtttcctttgatcagattctgggccacccccctgatattggagggcgaccaactgtgcaagcacaaccagagagggaggctatcacgcacctactatgcataccggggcaagatttcacccgtgccgctgcaaagaaacgagtgtggatcatgtgcaccaacatgactactattacacagatatgtatgacattgctacttatcaacattctaccctgcagatgtatcaggtggtctgtgtcatcccgacataggtaagtatgcatatggttcaactgatttctaatgtcatctactatntggagggagcgcgaccacaatgcacccagtggacccggaggagt

SEQ ID NO: 176820 - DNA, 193 bp, Glycine max
gagagcatttcttatttaagcacttttggcttttgtttcgcgtagcttaggaaaaacgtcacttattcttctttgtttgttccgaagccatgtgtaaagtcccaagcacgttttacatcagccagagtcaccattagtcaccacaaaccatcattggtcttcatgtaaaacccacaccgagaggaactcttca

SEQ ID NO: 176821 - DNA, 387 bp, Glycine max
ggctgcagcttgaagctggagaaagctgttttgttttgctttacatgccctactcccttgagtggaatttgtattggtctgttctattaaatgttgcatcttagtccatatcatatcttttgtgcatatgcatcattgtgaataagtgggaagaaaatttttaagttagaacaagttcttcagaaggcaaaactctttgttctaatctattacagccttattgtaagcgattacaaaagttgtctaaagcttgtagagttatgtctcgtatcgatttattcacaaaagttgtcatttacacaattgcttttagacaatgattggcttattcaggagcctctactataatcgattaccatgtgatataatcgattacttctctttcta

SEQ ID NO: 176822 - DNA, 242 bp, Glycine max
agagtggtacctggagatatgttgcggtggtcaggagaccttggtgacgtcaagtggggtgctatagcccataaccaatcttgaccaatctcgacccatcctgggcatagtcagtcagtgagaacctgtgatgtacctaagcaggcgagcttctggcagcctacagatataaggaacaaagaccacatagcaacgaagcttgtgtggtggctggccaactgtgaaacttgattgatatatgg

SEQ ID NO: 176823 - DNA, 485 bp, Glycine max
  unsure (1)..(485): unsure at all n locations
tctgagtcacctgcggcatgcaagctngaaagcgttgcccagaacatttgctgactagagtctaaattgaagcgtctttcggtgagttaaggtcaggtggctagattttctaaattaattaacacggattacgatgtgtcgatgtgacacgaatggagttcccctagtagcatgtgaatgaaatcgtcacaatttcattactttatatttaaaaaaaaaaatgggttaaggtacgaatattgaatgataaaataaataattagaaatttagaattcactaacatgatgtcattcaattatagattttcatcacgattagattataggattatgtaatacttattttaaaagttatatttaaaatattnttaatgaatattgataagaaaactttacaccagtgtataaaaaataaaattgtaaaaaaaattatgaaaataaaatattgcattacnaattanaaggaaaacataatatttatttta

SEQ ID NO: 176824 - DNA, 477 bp, Glycine max
  unsure (1)..(477): unsure at all n locations
ctcagcttaggatgagctntattatgaacataagacttaattntacatatgcatctttctattggatacatccacctgtattgaacaggaccacctaatctaactttgtttgccaagtgaacaggaaagtgaaccattatgtcaaaaaacttggaggaaaaatcatctctgattgacaaagaatttcaataatttgtgattctatataatccaaatcttctacctggatcactntctaacacaaagagcgaaagaaggatccaaggtgaattaaaagatcaaccaccacactaggcattgtgcttctaattgctatttgtaataagtaatgtaacatgatatgtgtatcatgactctngtagccagaatatttgtcagtgatatgcatgcattntgaaatatttgttgcactcccatctangcaattggcatctttcaagataccacanaaaatagacttctttnttgtagtcatta

SEQ ID NO: 176825 - DNA, 189 bp, Glycine max
agcttcttggttgtgtaagaatagggagcctactacatcttacagtatgctgatgatactgttttttttggagaggctgtgtgggacaacattcatgctattaaggccatcttaagaggatttgaattagcttctggtttaaagattaattttgccaaaagccaatttggggttattggtgatggtgat

SEQ ID NO: 176826 - DNA, 459 bp, Glycine max
agcttgaatagatgtaaaaaatatcaatgaaaactcactgcttcaagtgagattatacaaacttctgaagtctctctcagcttgaagcttcaacgactttaacacgtacctgctagctgtatttgcttgtagtgtttgaatacaggttttaatacatggtttagacatatacatgtatatataaaaagtagtaacaatgtgctttacctgtacttgatataatgaaacagcttccacaagaacaccaatggacaaaccaacttcaactacaacaaagtaattcaccttcacctggagttcatataatgagtaatggcattagaagaagtcaaagccaaaccaacttcaagtacaacaaactaattcagctttttctcaaccaaactatgtcaaactacttgttggctattaaaagtgttagttattcatgtgacgggcatactattctagtttctattc

SEQ ID NO: 176827 - DNA, 477 bp, Glycine max
  unsure (1)..(477): unsure at all n locations
cttctacctatgacagtgctaagggatgtttccctagatagtagaaggtatatagattgttttagaaggagtgctcttttgatatcaccttttgttataaaatgattttccttcttaaaaatcttcttggaggaatccttttcctctttttccttccccttggcctttgaagagaaggccttactatccttctttttcttttgtttttctagtttttcttcctcatccctattatctttcatagttagttgatctttggccacctgtgaaggtgtttgaggatgcaacacanatttagtgccaagatgggtgagggtaatctcattagttaggccattttaaatgatcttcctatcanatttccatggccttcctaaaagaatatgcattgcctccatgggaactatatcacaattaacttcacccttttatgtcccaatggagaaaggtacctttacttgttggctaattatcatt

SEQ ID NO: 176828 - DNA, 459 bp, Glycine max
  unsure (1)..(459): unsure at all n locations
agcttacttggacttaacctatttccattctattaggatataaaaaagggaggaggatgatgaacactanaaccaaatgaaagcctttagcatcacatgggacaaaagtgaccatcctacagctgtcctaaactgtagggaaaaccaaaagtggggtagcacgtaccatagcagtaccccatggactcttaatattgggaagtctggaatctcccaacattntgagagactttgggttgggatggcctagtcctaagcctccacaccgcactcttcactctcgctacttgctagtgttagtggatagagtgtattcccatacccatacccatacccatgatagtacaaacacaaacacaactcaaaaccccgtaaccgctaattaacgtccttatatatctcatctgcttttttttggcggcaccaaaaccgcttcttcccactctcnttcatccatac

SEQ ID NO: 176829 - DNA, 402 bp, Glycine max
  unsure (1)..(402): unsure at all n locations
tcttgactgaagatggatcagtggacataagcactgctcatattgttgcatgtgctgtaaggattntggctgcagttatgattcttcaggtttttttttattaatttccaccttgtttctgttatgttgttgatgcttaagataagcgcatgattgtaaatttgataagatgttgtttccagagttctatggatcctctgttgggaacattggcattattatgtggatcatttgtctccttattgaagaaaatgcataggttgagattccttcgtcatttacgcaggttggtccacttccttgaattttggaccttattaattntcaacaataaaaattttcttttcattntttttaattaagtagaagaacgaaggttttctttttccctgcagagggggg

SEQ ID NO: 176830 - DNA, 463 bp, Glycine max
  unsure (1)..(463): unsure at all n locations
gagtcacctgcggcatgcaagcttccttgggccattacctgcgaaagcattatttttagttagcctacaagaaatgcttattgtacacaaaaatgacatgctaatccctccggcttacaacgaactcatgtgcacgtttaacgaaacacatttatgcacatgcatacgtaacaatatcctactattgatgtcaacatacaaggacacccaacacattctaattgccatacatctatgtgcatcttgaatagagcacacattctcatgctcaaggcgctgcgtcaaactttacacctaagtatatcctaaatattttctatttacaaactacttacacatatttgaaatatatatcatacaaattgtattgtttcactcacatttatttatatgcatattgganaactaattatatcctgcacacacacttgcattcaagagggaatttcacgctatcatgtgt

SEQ ID NO: 176831 - DNA, 578 bp, Glycine max
  unsure (1)..(578): unsure at all n locations
cgcccaccctccgtacacgaaaccccgccacgtcacaccnncccttnncagaaaaaaannntttgacgcctgagaccctgcaaacaacncagcaangagaaacggcgacccccacacggggacaaagcggnttgcgggcgattgtgcacaacacgaacaacagagacacggagcgcgcataaacccaccacacccaggggaccaccagcaactaagcacacgtacgccgacgcggcccataagcgcgagggacccaacaccggcgccccaccaatcctcccaagggaaccaacaaccaaggaagccaacacgcgaacagcacaaacaatcacagccacaaaaacagggcaaaggcagaaaactccggccacaacaccaaccagaaacacagcgtggacccacgcaaagaccgcagtaacaacgccaacgagccaagagcggaacccgacggaacgcacgcgaacaccgaccggaagtccnaagaacacaagccgacaaagcgaccggtgggatcaacgaccatacagcgcagaacacacaccgaacaaggcgagacacagcccaccacacacacgccc

SEQ ID NO: 176832 - DNA, 231 bp, Glycine max
cagtggctggattatgtgcgctaatcaccaccgactattatgtgccgatgtgacacgaatggagctcccctagcgacatgtgaatgaaatcgccacaattttactgcttactattaagaaataaggcgccggcgggggccaccactgaatgctcccatggacaattatgaacctaaaatatcctatgatgatgatgcccatgcttggacttccatcgcgagcgtacgatac

SEQ ID NO: 176833 - DNA, 529 bp, Glycine max
  unsure (1)..(529): unsure at all n locations
tgagtttgggcccctcgagacccttcgaataccncgcactagctactagtcgagcttctcaggaggcgagcgacgttatgagacgtttatgtgtatctattctctaccttcaccggaagtgatctcgaccaccctttttaacgtatgttctctcaagagagcatgatagtgaacctttctgtcctataacttggaggatgagtcacactctgatggaactatgatgatagagagtcgtgagagactcatactccaagattatctcctgtatctctttcttactccaagagcgagctaccgatccatggtgatctacctgtatcttctacctccctaggcgctgcgcttctaagcttcttatgcaatgctcatcgtggcgtggatgtgcatcatgactgtggtattccatattggagggcggctactctcgcctattgtaatatgtgttgcgctgccttctcgcggtgtggcatctctaagatccgacctatagagactcattattctagctcatagaaaccgcctagct

SEQ ID NO: 176834 - DNA, 451 bp, Glycine max
  unsure (1)..(451): unsure at all n locations
agcttctctanacatntattattggttatttctagataaaaaaaataatgtcttggtgagggtgtaattgtattggtcttaatcacactacattgacataaagctatgatatttgacatagcttttatacatttttttattctccatactgaatcgttaaagttagaagctttgctttttatcctctttttgtgctagttgtcatcacagaataaaaaatgtaccagattattcatgaatcaggactcagatttganctaatttgaatctttagtaagtagttgctagtgccactaattattgaataattgattttggtttatctacgtgatttactattcaaacatttgaatatggttgcagaataagagttgcaacttctgatatgagaatggtgctctcagttatatgtctcatgtggcactttctttctttcttgcatctaccatga

SEQ ID NO: 176835 - DNA, 116 bp, Glycine max
gaatatcagcaaacgtagttgcttcttagcagcatccttatatacttttccataatttttcattcactgctcatgcgcttacgacatggatgcctcatggaggtagcgggacatta

SEQ ID NO: 176836 - DNA, 103 bp, Glycine max
ctcctacaaggacgaattctttcattccacttttgttatttccaacactccgcgaggactatataggtgggtaagacgttccgctccctatcttctctatcac

SEQ ID NO: 176837 - DNA, 449 bp, Glycine max
  unsure (1)..(449): unsure at all n locations
agcttattgggagataattntcaatcatcatttttatatgcaatgacaatcaacaaatctcaagatcaatcactagcatttgtgggtttgtacttgcctagaccgatgtttagtcataaacaattatatgtggcagtttcaagagttcaaagaaaacaaagattaaagatcttaattcatgacaaggaaagaaaaccattgaagtctgctactaatgttgttttcaaagaggtatttgaaaacctttaataagtatgtccacaagtgctactaattctatttgtatcaactataatttgatttacaatactcgtatatcttatatgcaagtttcctcttggagtggctgcattatttttggtccttggccaaagttacatttttctcctctgaaatgtagatagatgcaagtatcatggntcttaacatattgcattggtggaattatg

SEQ ID NO: 176838 - DNA, 403 bp, Glycine max
  unsure (1)..(403): unsure at all n locations
tgctgcaaaagaattggtgaatgaattaattaagattaccgaaatgcaaaccatagccttgctcttatagactcttcatgtctggtcaagagaaccattagaagagttataacctttagaaaaactttaaaaaccatttgaaaaaagtgaaaactatctgaagagttacatcttttgattttgttcagaaactatcactggtaatcgattaccacatcagtgtaatcgattacacaaagcttttttgtgaaaggatgtgactctntcacaattaaatttgaattccaacggtcagacacactggtaatcgattaccaaatcattggaatcgattacaacattttgaaataatatggaacgttgaaattcagatgaggcttttgaaactatttggtactggaat

SEQ ID NO: 176839 - DNA, 339 bp, Glycine max
acgcttcatcaagtggtaatcagagcttctgtatcttttttaggtgctccttacacctccattaattttttttctttaccttctcttccattgttgtttcttcatttttctccatgtatctcctcacatgtcttgttctaaatgttgttaacatgattctttagagtttccaccgattaaacttgctatagaagttagatttgaatctctatggctcacatttcttgttcttgttcttgaaccatgaattgcgttgagtttaggttcctttgagctttgactagttattttttgtggctgacacctaaaccctaaaattcttacaaaaatattaaagca

SEQ ID NO: 176840 - DNA, 401 bp, Glycine max
  unsure (1)..(401): unsure at all n locations
cgaatcggacctcagtgtgaanagttatgactcttttgaatncttctagagctttcgttggtcaatgtcgagcatctcgacatattatgcgctcgaatcagacatccgtgtgaaaagttatgaccatttgaatttctcgagagcttccgatgtttaatttcgagcctctcgacatattatgcgcccgaatcggacatccgtgtgaaaagttatgaacatttgaatttctcgagagcttcggatggttaatttcgagcctctcgacatattatgcgcccgaatcggacattcgtgtgaaaagttatgatcatttgaatatctcgagagccttcgatgcttaagttcgagcggactcgatatatataagcctgaattgccctcagtgtctaaagtatgaccat

SEQ ID NO: 176841 - DNA, 330 bp, Glycine max
agtctttacatgtcatggatttactcttcgtttattgctcacgctctccatgatggtttataaactattatagaacatgcctttctatgacgattatttaaaatcgatgtgaaatttgttacgtttttactaaagatgactcatttacatctatgtttatgacggtttttttggaaaactcattttgagagtgtatcttctctgactgacatatatatatatatatatatctatatatatgtatatatatatatatatactcaccctactaaaaaagtatatagtggctgaaaaccctatcttataatacacttgttccatacatatgaa

SEQ ID NO: 176842 - DNA, 445 bp, Glycine max
  unsure (1)..(445): unsure at all n locations
agcttatctcaagcaaggagtggttttatattttatatagcangnacgcatgaaaaaatagttgttataagaaggtaacctcttaaatgagatataattattgtgaaaaattagtcagtgacttttgacggaagaatcccatgttcacccactaatatttaagcccaactttaatctttaggaaaaaaaataatcttaagacaatgatgttagttaaccgatataagaatgttgtatttttgtcaatcaaaccaacatgtacgatagaaaaggatacggttgcaatgttattaaataattagttgatctgattgaatattttaataattgagggactcaattgagcttttaattataatcaagacattaattatatattaagcctttgaaaagtataatgagctaattatatttaataaataattaaatcgttggcattaatata

SEQ ID NO: 176843 - DNA, 425 bp, Glycine max
  unsure (1)..(425): unsure at all n locations
cgtgcgaatcaaatcactcctgtcatttatctctagcatgcattctttctttgnntacccactcctcacgtttgggaataacaccataactaaatgcgccacaaggcatccctatcgcaccagatccaaatctagaacgatgggtgatcaagaggagacacaggaacagatgaaagccgacatgtcggctctgaaagaacagatggcttccatgatggaggccatgttaggaatgaggcagctcatggagaanaaagtggccaccgctgtcgctgtcagttcggctgccgaagcagacccaactctcttggaaccgtgcgccatcctccctcaaacatagtatgacggngaaggaacancgctgggcacgacggctgtcggaccttgcggcctcaataatcttaagagggataggcttagaatat

SEQ ID NO: 176844 - DNA, 437 bp, Glycine max
agcttcatgtcagctgtgcacaggtactaactattaactattcttatttgagcaaactcgtacgtgtataattggcattaatcatgtcattttattttatgcaaaacaatatcaggtagtaagtgaacaaaaacctgtggtaggcctacggttgtacttggaaggcagaaaaagtgatagacttgcaatacatgtacaccacctttcaagcctcccaaacactatgatctactcttcaggcacatcttcgtggcgaggatctgatgacaatgaatccagtgacatctttctggaacctataaggtggaagggatttgcaaacgtgtgcactgcagtggtcaaacatgaccctacctggttgcaagaaacaagtggtggtgtttatattgtaaccggcgcacaactcattattaaagggacttggccaaagaatgtgc

SEQ ID NO: 176845 - DNA, 474 bp, Glycine max
  unsure (1)..(474): unsure at all n locations
ctcaagctttaagtggttgatggaacagatatgaaacataggtggacaattgttattgtttcttttgtttggctggntattacttacactaatagatttggtcacatgtcttcaaccactaacgtctaaatttttcttagcgatgatgggtttcccttaaataaattaatactaatactatatgatactatgattccaatatggacagagcttttgggtctatctccaagttcccccgatgctgctatcttcacatcaaattcttcgaagacaacaccttcagcacctacaacaacaaactcgcataccacgaccccgcagagccaaaacgcttctcatggaagcatggttcaacctagtagtaccgttacctatgtgatggtgatggctntggccattgttctggttgcagttccaaccgatactgtgagcatttatacatgatgcggcattatgccactgtgaagacagttg

SEQ ID NO: 176846 - DNA, 449 bp, Glycine max
  unsure (1)..(449): unsure at all n locations
gcttaagcttgattgcaccactcttgtatactagcattttatccatgaagccagaggataactcggtgagctcacagagctcctccacgttttttgaacccccatgaggtctagacttcacattaacatcgctgcttccagcagtagctgattgtttaatcataggcaattttgtacgcaaattaataaagaacatacttgcctctgggttgtgctcctaccaacaatttgttcaaaacactattataataagtaaaagaagttaacatgataaatttaaattcttgtactcaccacaaggtcaagctccattgctgaatatgatgcattttcatcataagctcttggctctgcagcctccccatattcttggtcatcaagaagagctatcagaanaaaacatgtgaagttaaagtcactagcccactagatattgcagagtatacata

SEQ ID NO: 176847 - DNA, 165 bp, Glycine max
ccgaagatgttagctgtgggttaagcatttaagattcagagcaataattctgtatagttcggtcagcgacttaagatttccgctgtttcaccatggattcatggttccgcacaaggatgagcatggatagagttctttacgactgaataactgaataacgtggtt

SEQ ID NO: 176848 - DNA, 378 bp, Glycine max
cctgcggcatgcaagcttggttcgaggtacttacccgttgaagatttatgtttgatttataacgaatgaagaacgggtgaaacctttgcgagattcctcacggaaaacgttacggaaacgtttcggaagtgcctcggcttagattttcttcacggaaacaatttttccaagcaaattcgaaggagagagaagtgcctaaggggctggacccctttcttcttcatttcctcccctatttatagcaaaataggggaggtggttgccgcccagctcgcccaggcgagctcagctcgcccaggcgagcagggttgcttccttcagaagcaaccgtcttctggaggaatattccagagggcccaagtgggcctgggtgctatt

SEQ ID NO: 176849 - DNA, 453 bp, Glycine max
  unsure (1)..(453): unsure at all n locations
tctatgtacccgtagtggtccacattgggtttcgtgcattnttattctcgttttgnttactttttataccccctgttgacgtgcttaagccattttacttaagtcgtttctcgcttaacttagaaataaaataaatttccaccgaacgtttgaattgtattatccattaacttcggttaaaataaattccgaccgctcggtcatgccgtaaccacgttggaaatcaaaaaagaggtaataaataatattaataatacaaaaaataacatcttttagtaaaataaagcggaaaatcaatcggacgttttctctttgggaattctcattcttaatcgaattgattaataactaaagtgaaactaaggctaaaatcaaatcgcctagtcaagctctgtcacaaaaatagggctttgaagtccgtcatttcaatcttccactaagtaaaatggatca

SEQ ID NO: 176850 - DNA, 208 bp, Glycine max
  unsure (1)..(208): unsure at all n locations
agcttctgtcaccttctccgctgctccattctctttgcctagcccttcttcatcctttcttctaaaacattntcaaactaaataattgagactcatcaatacactcatccacacgctgaatttatgatccatatcatcaatgaaacttgagttaagtgccttttattttctactactactgtcttctatacactacacgtttcactta

SEQ ID NO: 176851 - DNA, 438 bp, Glycine max
gctgacttattaagatgatgacaaaggtgatgaacaaaaaactcatagatcaatcaaagaacaactctagtgaatcatagaacatctcaagtgaatcaagaacaagtctagagttcaagataagaatcaagaagaattcaagactcacgaagaaagtctagagtcaagaatcaagattcaaggttcaagatctcaagaatcaagactcagagattcatgaatgaagagaagactcgatcaagataagtattaaaaagttctttcataactttgaatagcacatgagtttttgacaaaaccttttaccacagaggttttactctctcataatcgattaccatattgttgtaatgcgataccagtagcaaaatgagtttgaaaaagttttcaaactggaattacaacgttccaattattttcaaacggcttaatcgatta

SEQ ID NO: 176852 - DNA, 356 bp, Glycine max
agcttatctatttcttttgatgaacttcaagattcatttttaacttgcataaagaatctgtcaaacttgccaaattattttcattttctaagaaaactattttaaatttagaaaagaaagttttgaaattaaatgtagaattataaaatcttaaagcagaagttaaaacattaaaaccaatagatacaaaccaatcctctactaaatgtttaatacaagatagcaatgaagcatctcattcatgtaaatattgtaaaatatttaaagaagaaattaaagatgtaaaagattctctttccatacttactcttggcaaaaataatttatatattatactaggaaaacatatatgtgtt

SEQ ID NO: 176853 - DNA, 208 bp, Glycine max
  unsure (1)..(208): unsure at all n locations
tagaaagacaaacattatgngaagnctgntttactttattatgcttatcntaacacagagatgacatgctgatccctccaatttacaacgaactcatgcacacttttaatgtaaaatatttatgcacatgcgtatatgtagaatattctactatttatgttatagtacaaggacatccaacacattctaactgtcatacatatatatg

SEQ ID NO: 176854 - DNA, 444 bp, Glycine max
  unsure (1)..(444): unsure at all n locations
agctnnttgaanagacacatctcttcttanatttttgaaaaggcacgaaggacctatatatgtgtgtgtccaatttcaaaaagcaagagatagatattccaagaaaacttcattgtcaaatgctctctcaataactcttgggcaaacacttgcaaatctattgagagttcatccaagaacttcaaattgtattattcactctaaaggagaggaatctttctgttcttcttagaaagtcaattgtaatcaaaagactagttgtctcttgaattatgagtttcctgaacacaacggaaagggattccttgngtgttcaaaagttgcaaaagggttgtttacaaagatagtggaaaatctcaagtgggttgcttgaggactggacgtangcacgggaagcggccgaactatgataaatcgagtctgcatatctctcttcccttatct

SEQ ID NO: 176855 - DNA, 395 bp, Glycine max
  unsure (1)..(395): unsure at all n locations
tgttgccaacatgttggtaacctggttttcatttttttgccttctttctgcacccaccttccttctccttcgacacacaagttntgcttcgggatccaccattggcttatggttgaagtgttatggatcaattgtagacatgtctataggggtccaagcaaaaatattcatattttctgtcaaaaagtgagatagtttctctaagataggcggnggcaactcagatcctaccttgacaatcttcatctcttctggtccgattttcacttacgagagctctctttcaggaattggtctttcgtgttggccattatgctccttggttctacaatccaattcttttatcagaatctattatttgcctgggatcaaaactagcttcttaaacaaagctg

SEQ ID NO: 176856 - DNA, 428 bp, Glycine max
  unsure (1)..(428): unsure at all n locations
agctntacagcagattttagtaatgactcactatcctataattaaaataacttaatgccattaacctagggaattaaaaaaaacttaatggctgagtgtaattgaaattgtggcaaccaaaagtcacccccaacagccaacaagtcagccaccatttggtctcccaaaaggctgatgcctaggttgccaattgggcccttattataacttgaactaaacctaactaaagcccttttagttgattaacccaaaacatatttttggtcagccaactttacaaggattgggccattatttagacaaactaaacactctaaaattgagacaaagtggtgtcatttagtcctcctccatttgggccatgatacaactcacaaccttggacttttctccttgaaacttgngcttgtattcaaatagtatggaca

SEQ ID NO: 176857 - DNA, 435 bp, Glycine max
  unsure (1)..(435): unsure at all n locations
tgtatacgctacaacgaatgatttctggggcttattanaattatatcacagctntgtggctcttacaaatagattagaaccttttgaacattttacatattttttacattcactttcagtttataatcgcgtgtnttctctcttttctctcttccttcttcatgactttacattcttatattcttcattggtcttccattgttcatggcattcattgtaagcatgtgcaactaaatcttcagttgctggaataaaacggngtagatttagagtatgtgccagaatcttctctttctcaattgcaatccatttctactcctttgcttcatgtctatgcttaggcttggtcaacctacattanatatacaaattcaagggttagatagaaattcatctagttaggggcattgctntgggcacccagtagttntactg

SEQ ID NO: 176858 - DNA, 351 bp, Glycine max
  unsure (1)..(351): unsure at all n locations
agcttgatagcacgcagagactaacgttcgcttcngcgcccttcgncaatcgcggccgacaagcccgttgacacgcggtgatttacgtcatcttccgcgctcacaagatctgtcatactgacttttgagtcacaatgacgggcacaaatacacgagtggttatccttataaactttttgctgtctgtaagacgaaaagcatgatagcacgcatagactaacgtcgtcttctgcgcccttcgtcaatcgcggccgacaagcccgttgacacgcggtgatttacgtaatcttccgcgctctcaagatctgtcatattgacttttgagtcacgctgactggcgaaaatacccga

SEQ ID NO: 176859 - DNA, 409 bp, Glycine max
cttaagtcgactgcaggctgcaagctttctctgattactctgctagggtttttagcattagagagaagggaaaaagattataaccttcattgcatagtctttgtgtgatgaacaattatccacccatagatattatttttcaaatataacgatgatccaacggttaataagtccggaattgtagttttactaggaaagatttgggtgtgtgtgggaaaatgagaggtacgtgtggggggtgtttctttcaccataagcattatttcacaaattctaatggtggggatgcgtataaataagttccaaacttgatattagaattgcacgatgatccacaggctaatgaatccgagatcattgttttaatgagataggcctgcttgtatccgatcaatgtctctctcatttg

SEQ ID NO: 176860 - DNA, 476 bp, Glycine max
  unsure (1)..(476): unsure at all n locations
ntgagacctttagccttgagnactgacaacacacacagcctaaaaggtatatacttgaacaacattttgcagtttatcaaatatttacgaggcatggcaactcaagttcaaacatgtgacatggccattgatgctacgtttagaaatatacttatagctatgttatccttgccatgtatggtgataacatcgtgattgcacgatgtagtatgacagagattaacacgtttgagcagctcttggcacaaaactcttaaaagaatgatcctggtccatctaaaataatcattggtatgagaattcttagactcagaatagaacgaatttctgagatgccttatgagacatatatacacaagttgcttacaagtttaccttgtagatttagaccagaatagcctttggattcattgaagttttgaaaagaatctttgctacagataacaaaatgtaactgtagatgccttgcttagccg

SEQ ID NO: 176861 - DNA, 329 bp, Glycine max
  unsure (1)..(329): unsure at all n locations
agcttatccncacaagagtgcagaacatctggtgatgtctgcattgattataggaggctgaatcaggtaactagaaaagatcattttcccctgcctttcattgatcaaatgcttgagcgcttggcaagtaagtctcattactattttcttgatggtttttctggttatttacaaattcatattgctcttgaggatcaagaaaagaccacattcacctgtccctttggcagttttgcctataggaggatgccctttggcctatgcaatgcccttggtaccttccagcggtgtatgcttagcattttcagtgattttttacagacttgcat

SEQ ID NO: 176862 - DNA, 363 bp, Glycine max
  unsure (1)..(363): unsure at all n locations
ctataaaactaagctttgcctcnaacatattatttccaacttccaatgctctgngaatcgattacaaggcaatgtaatcgattaccagaagacaattttgaaaaacaacttttaaaaaaggttttgaatttaaattttgaatcatgtaatcgattatcagatgtttgtaatcgattaccaacaacggcacttcagtaaacactttgaaaagtcatgacccttcaaaatataattgtgtaatcaattaccaaaaacctgtaatcgattaccagtgaagagttttaggaaaaatcttttgaaaagacacatctctccaaaccattttgaaaaggcacgaagggcctatatatgtgtgtgtctgac

SEQ ID NO: 176863 - DNA, 601 bp, Glycine max
  unsure (1)..(601): unsure at all n locations
ccctcccccacncacccactcantcttcnantgncgtcacacgttgggngaacacgnnncgannnncagtccccccaaccacnnntttagtcgtttgaggcgctgcacnaccgcgnancgcnagaacgacccgaggcaagcagacccgacggagcagagatcaatcatccgtttgtcatcaccacacaaggggagaaagcgagtgaatgaagacacgaccccgacgccgacgaaagaagaaccaaacacgacccacggtcgctgcacagaacaacacaaaaccgcccccccaaacaacgcccagagcgcagaagcccacgcgaccaagccgtcgctcacaatgaaaggacncaagccagacaaggcacatcgaagcgaatacccccacaggcaaccgccgaccaacggcccgaacacgcagcagccgctacaccacacaagccaaccactaccagagacacacaaagcggtgaaaccaaaccctacaccaagcgggccaacagacccagacaaaccacggacgaacccaccccactcacgcgcacggagaccaccacgcaaggcgcgacancggcaaacacgccccgcgccacccacgccc

SEQ ID NO: 176864 - DNA, 132 bp, Glycine max
gcccaaaaaaacacggcaccagagccagagcgcacaaacccccacaaagggaagagacgcacggagagcagaagaccaacggggcaggggcgagcaagcaccaagaaggaaaagccgaagcacgcaggaaga

SEQ ID NO: 176865 - DNA, 252 bp, Glycine max
agcttattaacattaaggggtgtgattctgtattcttatagcacgaccttgataaaacactcgttgacgtatttatttttttggttcaattttcactcgcatattatcctattttcagctatgccgtataggctactgaattatatgtacgggttctcttttacatgtttgacaattgagactggatagattattctatcagggccgatgagtgaaagtttttcacacttatttgttgctgagcacctcttg

SEQ ID NO: 176866 - DNA, 510 bp, Glycine max
  unsure (1)..(510): unsure at all n locations
ttgaagacctgtgtgagcattgatagtcttgtaganacncgcacatagacaactaagcgtacaaagtngagaagaatattctanagccactattaagaatacatatagggtacacaacaaggtaatatacccagctactcctcaattatatatatataagcctcaatgcaacccctcacatgttacatccaacccttgtattattaagaagaggaaagacaaacttatattatggtaagagagataaccaatcatacaagctagtatgtatatgtatcacgtaacatgagctgtgaaaaaagaaataccgtacactgaacataaagcgtataccagaatatcgctgctcgtgaaagacagacatcttttgctaccaacttattatgctaattatatagggcactccgtcaagaaaaagtacagaaatgattacttatcgatggatgtaatcggttcgagcaatgagcttaaagcaagtggccttctagagcaaacctaatattatgtccg

SEQ ID NO: 176867 - DNA, 345 bp, Glycine max
agcttgtagaatggctagacatgatacatgtcttggtttggtttgtttcaaggataaaagggatgccccacattatttccatgacacaaatgcaaaaatgatgatttggaaactttatgcaaaactggtcatgcatgcacctatgcgaacactcaagtgtcaaatttttatggtcatgtgatgctagggctcaggattcgtttcctctattttaatcaacccaatgtttccaaaatatgttcttttatcaatttgtgcattcatccgagtccatttcgggcgtccggggaaatttcacagcattcacccttcaggtgatacacattttcaaaaattggtatgatc

SEQ ID NO: 176868 - DNA, 447 bp, Glycine max
  unsure (1)..(447): unsure at all n locations
ctgatgatgtcaaaaagaaatcacatgtttgtcatcatcaattacggtgagaatgtgaatgtatgtatacatgattntgatgatgtcaaaagaagaatcaaacaaggctcattttgcttcaagattaatacaagattatttcaacaaacaaagtcttgattcaagatttcttcaagatcaagccttgcctcacaatgaaaggtttcaagtcattcaaggcacatgtaatcgattaccaatacatgtaatcgattaccaatggtttgaaagtgtgtaatcgattacacatcatatgtaatcgattaccagagactctgaacgttgggaatccanattttaaatgaaaggtcacaactgttcaagaaaaacacctgtgtaatcgattacactaattctgtgtcgatatccaaagaggattatcaacgtatgtctnctccagtcatatcc

SEQ ID NO: 176869 - DNA, 210 bp, Glycine max
cgcacatcgttcgagcgcacgacatttcactttacaaggagcgaagcagaggagaccttcgattctattactcaccgcgacgcacaaaagtgggcagttaacttgaacggtcattattgccaacgcggaacgcattctgcgcttcactatccatgttcacatattattgcagctcgtggttacgcgcgcccgaactactaccactctata

SEQ ID NO: 176870 - DNA, 382 bp, Glycine max
ctcaagctagagttcctcacgtacagtaaagtggcaaaaaaatttccccattaatataattgtcctatacaatcgcactgagcaactatatcaccgagaccttcgcatcattgcatgacatacttcataaatatgtgagttagaataaaaatgttgcactcttaaggggttactgctggcagccaccatactgaccacaatatccatctctatgtgatgcacgcgacccacacttaagtttttacatgcaaaccatccaaaccacatgggcaggtacacacttaaacacaatcacacacattggaaatatatgaacgatcaaaatggagaaaatcaaaatccgaatctgccttataacatctggcacaagtctttgctttga

SEQ ID NO: 176871 - DNA, 474 bp, Glycine max
  unsure (1)..(474): unsure at all n locations
gtcacctgcggcatgcaagcttctcttggaccttaggcaaaccttcagctcatccttcattatcaaactgnctactcgtgattggtccctttcctctctccgaagcttaagctcactgttactgccccacagagcccctcggaatttgttccggccgtgttcttccctacgagcccttttggtctcttgttctaaggccttggtggtagctatatttacatctctcagttcggcattctcctttcggatcttaagagctgctgatttgaacttttctttgactgtttgggcttgctcgagttctgctctaagggcctgcacctcttcgtcttcctccggtgcctcaacttcctcccctttagtggttctcaaactcgggagccaatccaaaccttgcatgtgggctttcaaccacttacggtagctaccgacgttgttactgcctctgagttctttgtccttcttttgcaccat

SEQ ID NO: 176872 - DNA, 437 bp, Glycine max
  unsure (1)..(437): unsure at all n locations
gatgaganagtgtagaacggtgaaacttcctgcttttatttgttgaccacatagtggtttctggagatatgtncgcggggtcaagagaccttgtggacgtcaggtggggtgctattgcccaaaaccaagcttgaccaatcccgacccaacccatgcatagtcagtcagtgagaacctgtgatgtacctaaacaggcgagctcctggaagtcaacagataaaaggaactaagaccacaaagcaaggaggcttgtgtggtggctggccagctgtgaactttgtgtgatatatgggttattgcctctagtaatcgattaccaagggtgagtaatcgattacaagcttataaatgaacgcaggaggctaagatggtctctggtaatcgattaccaaggtgtgtaatcgattaccaggcttgaaaacgaggtcacgaagcta

SEQ ID NO: 176873 - DNA, 458 bp, Glycine max
  unsure (1)..(458): unsure at all n locations
agctntgaagagtgttgttnttcaccttctcgctaagtttatatgctggcttagcgagcttctgctatgcgcaacactcatgggctaagcgtgaggaagactctggaagaagatgagctatacaggttcactaagcgcactgcttcatctcactaagcgcaccgcttcagttcatccgctaagcgagaatggcacgtgcaagccaaaattcactattgtgtgctaagcggtccataattgcgctaagcgcacgagcacgaacaaggccacctatttaagcctgaaatcagattttagaagggagtttggactgggattcagagctttgcatgtctagagtttctagagagagaaaggtccaagttccagagagttttgagagattttgctgtgtgaagatctgcagagaccagagcttgaagcaggagccgatttgagagctcgagatgagtttgtga

SEQ ID NO: 176874 - DNA, 474 bp, Glycine max
  unsure (1)..(474): unsure at all n locations
tgctctnatttacattgatgtttgtatttatgggaggaggttatatgccatttttgctttaagagtaatgtcccacaaaaactaactttccaaatgtttgccttcgcaggaatggcaccgaggaagcttgcctcaaagaggtccaggaaggacaaggcggccgaaggaactagttccgccccggagtacgacagtcaccgctttaggagcgttgtacatcagcagcgcttcgaagccatcaagggatggtcgtttctccgggagcgacgcgtccagctcatggacgacgagtatactgatttccaggaggaaatagggcgccggcggtgggcaccactggttactcccattggccaagttgatccagaaatagtccttgagttttacgccaatgcttggtcaacagaggaaggcgtgcgtgacatgaggtcctgtgttaggggtcagtggatcccgtcgatgccgacgctatca

SEQ ID NO: 176875 - DNA, 595 bp, Glycine max
  unsure (1)..(595): unsure at all n locations
cactcccctacactncctnccagntanctacgcgtcctcaccnntccctaaaaatttgctaatacggtcncnactaccaacncncnnccnnnattgaatcatcccctcgcacgnccnncnanatcnanacgcagcaggcaggcgcgnacacaactagaacaagacagcgagttgacgttggagaaccacgaaccgcacgacttggacacgcactaatgaaacaaatccgcacaccgcatcaacagatgaacccgacgcaggggggcccagagaaatgacaccacacaagcatgcacgtacaaagagcaagtcaaaagcccatacggctgttagnggccatgaaccaagcacacccaacccacaggtcggcagagatgcctatctaaagccgccgattgacgaatgggagaagctagggagccgccgccggacacaggatgtgacaaggaagcaaaactcgacgaggactataaacgactcccctactcatggcacgacgtccggctgcggaacccacgacacaacctcccgcccgcaccgcacggagcacaagaagccgctacaccacaacacgagaggaaagcagaccacaccc

SEQ ID NO: 176876 - DNA, 387 bp, Glycine max
  unsure (1)..(387): unsure at all n locations
catacaatatttagacaaaaactcgcctaatagcatgaaaagaaattactgaaggcaatgcatatttaagtgcaaaaccaataagaatatacaatgaaggcgatgcgaatttaagtgcaaaaccaaaataaatatacaatgaaggcaatgcaaatttaagtgcataaccaaaaaaaaaatatacaagcagaaccaacattttcaatcattgtctcaatatttccaggatttntagtctgcatacagaaaacaagcaaattaaaattttattaaatggtgatctcaaataaaaattacattagatatgatcgaatcattacttcagacattcttggtataatgactcagatgacactgaatagaaccacctacgacggtgtcaacgat

SEQ ID NO: 176877 - DNA, 453 bp, Glycine max
  unsure (1)..(453): unsure at all n locations
agcttataatatattattacgctcgaatgtattcatcagaagctctcgagaaattcaaatggtcataacttttcacccggatgtccgattatggcgaatcacatatcgagacgctcaaaattgaacaacggaagctcttgagaaattctaatggtcataacttttaactcggatgtccgattcacgcgcatcacatattgaggcgctcganaaggaacaacggaagctctcgagaaattcaaatggtcataactnttcacactgaggtccgattcaggattataatatatcaagacgctcgaaattaaaaatcggaagctctcgagaaattcaattggtcatcacttttcacacggatgtccgatttgggtgcataatatgtcgacacgctcgaaattgacaacggaagctctcgagaaattaaatgggcataactttatactgaggtcgatc

SEQ ID NO: 176878 - DNA, 385 bp, Glycine max
actcagcttgccgcacggacgtgtccgactatgctctattcgtggggaacatgctacgaaaggagagagcacgagatgaagagccaatggttgatacatggacggagatgaagatgatcatgaggaagcggattgtgccggctagctactcaagggacttgaaattcatgctcctcaaactaacccaaggcaacgaaggggttgaggagtatttcagggatatggatgtgctcatgattcatgcaaatattgaccaatatgaggagggagctatggctcgatctcttaatgtgttgactaatgacatacgcgatattgttgagctgcacgagtttgttgaaatggatgatttgcttcacaaagcaatccaagtggagcaacaatt

SEQ ID NO: 176879 - DNA, 441 bp, Glycine max
  unsure (1)..(441): unsure at all n locations
ttaagacacccgcggcatgcaagcttgaccaatcccgacccaacctgttcatattagtttgtgagaacctgngatgtacctaaacaggcgagctcctggcagtcaacagataaaaggaacaaagaccacaaagcaaggaggcttgtgtggtggctggccagcggtgaacttggattgatatatgggatatgggctctggtaatcgattaccaagggtgggtaatcgattacaaggcttaaaaatgaagacaggaggctaagatagtctctggtaatcgattacattgaaaacgaggtcaggaagctaggggagcttctggtaatcgattaccaggggatgtaatcgattaccacgcttcacaagagaactggaagactgtggagacctctggtaattgattaccagtctgtgtaatcgattacacagagggatgtgtcact

SEQ ID NO: 176880 - DNA, 434 bp, Glycine max
ctcagcttagatgggatcattgaaaaatagatatatcttgatttctttaatgtttaatgaatactctgatattgatggtcttgatttattctcacaattgacagtactaagagaagtgttaagagaagaaattagcacaccaatagaactattgagttatattaaaactctatattcttttccaaatgtttacattgcatataaaattctattgacaatctttgtaacagttgctactgctgaaagacgttttgaaaaaaagttgttcataacatacacagaataaagatgatctattttgcatctaaattatatttaaataaacggcatattaaatgtgtacatgttaattgaagcattcaaataattggtgttacgagagaatgagaagagaagtgataacttggtacttcaacgtggagcctaagaatgta

SEQ ID NO: 176881 - DNA, 202 bp, Glycine max
  unsure (1)..(202): unsure at all n locations
gtcgatctgactgtggaggattcatcaaggtagactctatatgcgtggctcctttgccattgtcaacgtagtataacttatatcaacctatatgtctatcgtatactgncaccgatcccgtccttacatgagtatgtccccctcttgccgtccatacagcactgttgtagaccttaagtatctgccttatgttagccatacc

SEQ ID NO: 176882 - DNA, 467 bp, Glycine max
  unsure (1)..(467): unsure at all n locations
ttaagtcgacgcggctgcagctgctaagaccgatatnggttcttattttgttctcatgngctcctttccttaaactgagaaccccattggttggttcatataaacattctcctcaaaatctccattaagaaagacagttttcacatccatctaatgtagctccaagtcataatgggctattaatgccatgataatcctgaaagaatcctttcatgagaacggcgaaaatgtctcttaataatcaatgtcatctttttgagtaaaatcccttagtaacaagtctagcattgtaatgttcaaggttgccatgagagtcatgtttagtcttgaagacccactttcaactaactctcttataaccctttggtaattctacaaggtcccaaatatcattatgtgccatggaatttatctcttctttcatggtatttaaccacttctcagaatcatcacagcttgcagcttgc

SEQ ID NO: 176883 - DNA, 301 bp, Glycine max
  unsure (1)..(301): unsure at all n locations
ctcagcttgtgatcctgatctacagacgactcggttttatgctcttgttcttaactatatctaggncagatatatgctattgtgtgcacaaattatatcaacttgtcttcaacccctatacgaaccacatgcatgctactaacatgtctcttcggtaccttaagcacactgttattcaaggtattttttttatggccaacttatacacaaaattacatgcatatgtggatgcagattaacgatcatgttctgaaagttaaagatcaaccactggcttctgtatcttcttagaaattccttg

SEQ ID NO: 176884 - DNA, 450 bp, Glycine max
  unsure (1)..(450): unsure at all n locations
agcttcanacttcgntgcatctaaccactatctctnttcttcactttccatggcctctctaaagcactcaggttctccatcatctgttaggatcacatactcattagtagaatacctattagaaggttgtctttccttgttggacctcctgagttgaacttgaggtggctcgatagcaccaccaagattttcatcttgtgacatgtcatgctcctcttcatacatcattttgaacatcagtatttagattctgaatatgcggctgaactggttcaaaatcaaccacaccaacattgtcttccttgggtgtagacttcttcaccttatcaatgtcttgaatggtttggtctttcatgaatttcacatcacggcttctgacaagcttcttctcaacaggatcatataacctgtaaccaaattcattctcatcataaccaatgaagatacatt

SEQ ID NO: 176885 - DNA, 383 bp, Glycine max
  unsure (1)..(383): unsure at all n locations
ctgttgcagaggtgcccaaaccttatctttgatcatggngctcaaccgcataagttctatagtggtttgagatctcaaacccagatgatacttgatgcctcaactagaggcactatgatgtccaagagttcggaggaagctattgccatcattggctccatatcagctagcgattatcaaagacattatgatagagctccacactaaagaaaaggtataatggaggtagacactcatagtgcaattctagctcaaaacacactcttgacgcagcaaattgaggccttagcaaagcagatagccaacgttctcacaatattaccaatgtggaccacaaaaaacacatcaagctcaccaagttcaacaaattntgatatgtgatt

SEQ ID NO: 176886 - DNA, 410 bp, Glycine max
  unsure (1)..(410): unsure at all n locations
agcttcattgcttcatgatgttgaatttagattgattcaaggngctctgatgataacaaagatgatggcaaaaagcccatgagaatgatttcaagattgagtcaagaacaattcatgaatctagagaaagattcacgagaagtttcaagtttcaagttttcaagaatcaagaataatcaagatcaagattcaagactcaagattcaagaatcaagaaaaggctcactcaagataagtacaaaaaagtttttcacaacattgagtagcacatgaagttttcacaaaagcttttaccaaagagtttttactctcgggtaatcgagataatcaattacccgtttactgtaatcgattaccaatggcaactttttgtttcaaaaagctttcaactgtgattataacgttccaat

SEQ ID NO: 176887 - DNA, 503 bp, Glycine max
  unsure (1)..(503): unsure at all n locations
tgttagcccttanncttgaantcctgaanacggacacaagatactcagcttttctatatataggcgcatctatatgtactttgacatattatcgccggagcttcacggtgcgtgcgctgaggtctcgagactgctacaacacttaatgctcgcatttaacgaacagtccttcttacatgccagaaccatgcttgataggtaacgcacgtcttggactttactaagaaagccacttattccatataatacgtacgcactagcaaatcatgccttttgatgaagaaacatatctatcacactgcagacttcacttacttcttcatagaactttgacatatcccaggagaatgttttatgccagaaagacacttacacgccgactattatatgacgatcttaaaagcactccctaatgtaatgctgaatgcctatatggacgtgtgttcgaaactcgaccgcagaatcaaatcatgatcgtaacacattccttaccctaattctcg

SEQ ID NO: 176888 - DNA, 210 bp, Glycine max
  unsure (1)..(210): unsure at all n locations
gctctgcagttgaccttcagcttcttcnattgagcaggacgaccaccttcatcagtggataacacctcattctaaggctcataatgctcttcctcatccttcttctcttcctcataatattcgtccgaggtctcatgaaaaacgtcataatctaatggctcatcaaaagggtcctcttctaactctctcactttatgctaaggggatact

SEQ ID NO: 176889 - DNA, 228 bp, Glycine max
agcttcgacattcaatatcgagcgtttcgataatttactggacttaatcagacatccgagtaaaaagttattgtagtttgaagttgctcagagcttcaacattcaatatcgagcgtttcgatatattacgggactaaatcagacatcagagtaaaaagttattgtcgtttgaattatctcagagcttcggcattcaagtccgagcgtctcgatttattacgggactca

SEQ ID NO: 176890 - DNA, 333 bp, Glycine max
  unsure (1)..(333): unsure at all n locations
actcaagctctgaggaacttcanacaacaacaactntntactcggatgtcttattgagacccgtaatatatccagacactcgaaattgaataccgaagctctgagcaaatttaaacgacaatacgtttttactcgtatgttcgattgagtcccgtaatatattgaatcgctcgaaattgaagaccgaagctctgagcaaattcaaacagcaataaatttttacttggatgtctgattgagtcccgtagtatatcgagacgcttcgacttgaatgccgaagctctgagtaaattcaaacgacaataacttttttcctcggatggctgattgagt

SEQ ID NO: 176891 - DNA, 260 bp, Glycine max
ctaagtcacctgcggcatgcaagcttgtaagagatctgaacagaatattagaatggattttatttgataaacacccaacgtgttatcaaatacttacaaaaagagagcaaatgtagatatgatacgagtttatgatatgattgaaagacagatatagagagagacactggaggtgctggcgtgctgttccattgctcactattctccgtgctatctctcccatcacttccctgctttacactgacgctccttattctccc

SEQ ID NO: 176892 - DNA, 262 bp, Glycine max
  unsure (1)..(262): unsure at all n locations
cagctctcctatttgctataaagggatgaagcgaaaagataatggtcattcccttaggcacttctctctctctcgaaatagctgaggaaaattagttccgtgaagaanatccaagccgaggcgcttccgtaacgtttccgtgagtaattacgcgaagattctcgaccgttcttcaagattcatcattcgttcttcgttttcttcagtcttcgactggtaagtacctcagaccaagctcttcaattcattctatgtacccgtg

SEQ ID NO: 176893 - DNA, 458 bp, Glycine max
  unsure (1)..(458): unsure at all n locations
catgcaagcttgttgngcagaacaatgggaatctngcctatttttttgctttgtcccatcctgnctactgagatgaatcctccaataaatggaagctnttgcggttagtgctcgtttagattaacccttatttatttatgagaaatgctctcttgttcaacaactaacattttgtctttaattgcataacatatgacaactagtggtggaagtttcatggacacaaattcttgatgaaactctaacttttggaaagtttgtttgtctgagcctttgttagctactaactcagctaatcatgggccatcctttgatttatctacgggcatgcatatgcttagactatgcatttaatttggaaatatactgaatgctccaaattagtatgtgctatctattgcacaaccagcattcgtgtcataaatggtgaaattccaattagacaagctcgagaatat

SEQ ID NO: 176894 - DNA, 461 bp, Glycine max
  unsure (1)..(461): unsure at all n locations
ctacagaatgtgtacaaagatgtctgcaaagatatttgatctctttaacaagttgagaatgaatatgatagatattcactcgttaacttgaagggagtggtgcatgttcttttttggactgagtgagtgcacgttctaataatcccacgcacattatttgttgtataatgttgtaattattgtaaactagaacaactctatgattaccatattgctagacatatttttaggaaaataattatgtagctttatatgaattataaagaccagtactatttaaaattattaataatattggatagacctaactttgggccattttcattactgtctcaatcaaggagaaaagtttanagaaaacagttgcacttctggacgcatgctggtatctgtattggcatgcatattattcaacattgcatttctaaaatgcaggggaataattgcttaacttatatatt

SEQ ID NO: 176895 - DNA, 458 bp, Glycine max
  unsure (1)..(458): unsure at all n locations
agctngtccataagctctctttcatagtaggatgaaatttgtctcttcctaagggcactcttaagatcattcaaatactctactggaggatccccatgaatccttcgttccctaacaagggaagtccaccaatagagggcatacccttgaaagctaagggtagccaatggaaattttctctctttgctaatatgatgacaagcaaagagttgttcaaccttcatttcccaatctaggtagggctcaacattatctttttcatggaaatatgggaggctaatgttaacctcttgaggccgtctatcattntctcttctttgggaatggtgtttagtatgtgaactatggtgtcctctataatagtcgctaagttcttcacttaaactcttgcaagagtcatgattgctataggagacatgnttttttcttttcatttctttcattatttttcttctttc

SEQ ID NO: 176896 - DNA, 481 bp, Glycine max
  unsure (1)..(481): unsure at all n locations
actcaagctttgtagaagtgggtcactctattgaagcaacaatggaagatttctcacacaatgatcttagctcgagattctctcaattggaaggctttgacatgtcttcaagattctccttgttgtcctcttaaagcttcaatgatgactattgaagtggaggccactcaactaaaaaacttatggaagaagcataaaaaggtgataattgtcgagtcatgacagctagtagagtcattctgagattgtcattatgaggagacctttttatgagctttctaaagatacatcaaaatggtgattctaatgttaactgagaaaagatctatgctgaagcacatccttttgatgaagtacaactganatggctctctgaaataacatagcttcatcatgcttaacacatcttcacaaagcattctaaattagtttgcatcataaatagaaattgaaggaacagttattagtctgttggtgtcta

SEQ ID NO: 176897 - DNA, 173 bp, Glycine max
agctacttctgtgcagtgtctctctttatatattcacccatcacagcatggcgcttcccttgcgcaatatgcacattcagctcaaatccatgaaacgaaacacacattgcatcgtaagcaagcattctatacaagacaaggcattcggccattataacttactaagaaatcta

SEQ ID NO: 176898 - DNA, 432 bp, Glycine max
  unsure (1)..(432): unsure at all n locations
agcttgtagacaacactgcggctgcatanttctatgctgacctttaccaacctccgtcacccttgttgcccaaattcctttgatctctaagtacatcagccaatacacgttccatttccaaattctatgtaaaataacttcttgcttcctcattattttttcctaaaactattcttttgtctgtcattttttcattagatgactccattgaagttaatgtcacttattcaacctgcacataacaaatattagatataacctactttattcatttgactagtccactgcacaatcatagaaaatatttcaagcaaagtttttatgcaatagcaaagtacaaaatattgtatcttcaatagataagtacaatagtaacaacgcacacaaagtttgtctgcgttagcaaattacaattaaaagagaactattcct

SEQ ID NO: 176899 - DNA, 446 bp, Glycine max
  unsure (1)..(446): unsure at all n locations
agcttgtccagcttcccatntacttcctccatataatcagccacaagaaacctttntaactcttccactaccgctcgagctttacctatatgtgcaatcatatcatggctgatctgtttgagtgtagcaactttttgggttgcataaaaaaactttcaatattattggcaaatatctcttgggccttcttcctaaaagagcaacatgttttgaatgatctaaggatttccaaaacatccggctcaacagattgccacaacacaacacatagttgaaagtcaagttnttcccactcagatttcttgttgtttgggacagcactagctcctttttccaagtggtcatgatatccttggccaagaaaccacaactccacttaggcagaccaagaaaagtagttcttcccagtgagtnttgcaatagtgatggtggnggttctagagaag

SEQ ID NO: 176900 - DNA, 467 bp, Glycine max
  unsure (1)..(467): unsure at all n locations
tatacanaagaaaagtatggatcgtgggtgcttgtataagtatatatgtactcaacaagtatgagaataaggattaaaattgttactcggatgaatatgagtacaagtattgtttttaaacgcgggtatagaactggtaattttattaccatattatttttaaagtagattatgagaaggcatatgattcggtgagttagaattttttttgtatatattgaaaagattgggctttaatgatacatggattaaatggatacatgggtgtctttcatcctccttagtctattattggcaacggaagtccttccaagaaattcatgcttcaacagggtttaagacaaggtgattctcttgcaccttttctttttacaattgtaactgaatgattaagtggcatgatgagagaggtttgtgataaaatctttttgaaaattataacgtgggagagaaaaagattgaatatg

SEQ ID NO: 176901 - DNA, 329 bp, Glycine max
  unsure (1)..(329): unsure at all n locations
agcttcattagttgttgcattntagtattaattcctcttatggaagaacgataaacatttcttgcattgtatacttgtctgattgttgtataactattgacatcgtgctcctttaacgttagaagaatatttcttggtttcaccattgactttgtaatatcagcaataataatcttctcatccttagtcaatcgaccaacatatggatgtccaactaatgacttgaccaattcatgattgtgacattcacacattaacttcaccattcatcctttgccttccaccactggttttacacgcagcttaaaggcacacccacattttctact

SEQ ID NO: 176902 - DNA, 206 bp, Glycine max
tgagctatgagaagcttatgaggacctcctactctcttgaaactcgaagctaatagtctgcgcggaacgagaccgccttctttcgacggccaaccttgatcttggagggctggatggaggactctgaccttgcaacatgaactcgtccaatatggtcatcaccaaggccactctcatacatcatatcattcagactcttagacacc

SEQ ID NO: 176903 - DNA, 243 bp, Glycine max
  unsure (1)..(243): unsure at all n locations
agcttgagatgaggaagtgtcgaagggtgaaattttctgttnttatagncgaccacagagtggtacctggagatatgtcgcgggggtctggagaccttggggacgtcaggtggggtgctattgcccaaaaccaagcttgaccaatcccgacccaacccgggcatagtcggtcagcgagaacctgtgatgtacctaagcaggcgagctcctagcagtctacagattaatggaaaacaggaccac

SEQ ID NO: 176904 - DNA, 218 bp, Glycine max
gtaaggccttgctctgttttttgcactttattgaactttaggagagagaaccttagatgaagttttagatttttagggacatacccgtttacaagcagttaacattctacgacttttcacatagtttgcagtatatacattgaactgacggttgtgcatgcttgatatgcctgtttgaggtcctggaacacaaggaaaacaagcatgtttttctgcat

SEQ ID NO: 176905 - DNA, 453 bp, Glycine max
  unsure (1)..(453): unsure at all n locations
agctntttgagccanaacctcaactcattggttataaaccttgacctaggataagaatttttccttttaccctcggaagagggaacaaaaggatctcccaagaaagaagatccattcacagttaagctgaaaatgtgctttgaaagcaaaagagaaaaaagaaaggtcccgggcaaaggttggaagaaagcaaaagaaaaataaagttcccgatcaaagatcgaaagatagaaaagaaaaagaaattcccaatccaagattagaagaaaacaaaagaaatatatagaaaggtctttgaccagacaatatctgaataacattcaggattgtcacaaacaagaaaaggaaagaaaggaaaccagagctggtgacacatgaagcagtccccttttgattaccaaccaaaatcctttgcgttgacaactctttcaccctacgctaaacataaacaaa

SEQ ID NO: 176906 - DNA, 257 bp, Glycine max
aaaatggatcattattaaggtccaacgccttataatgatcacctttcaagtaaaaagaatcacttgattcacgcataagaaagaactacgtaggtctgatttcctcctcgatggagggtacgtaggagcaaaagccccgcttttgtcgacctcaaaaaataaaaagaactaaaagttaagataacacaatttccataattctgagaaataggttggtgtcctttgagacacacgtgagaggtgctaatacctttctc

SEQ ID NO: 176907 - DNA, 134 bp, Glycine max
agcttgttgagggtctctgttatggcttctaattgtcgggacaacagctcgatctgagctaaggtcgcatcttgagtggtgagtcctagaaggcttctctttgttggcgcatatgtgcgatcaggaagaatggc

SEQ ID NO: 176908 - DNA, 330 bp, Glycine max
actcaagcttctattgcaggaatttcatgctttaccaaccttttgccatattgtagtcacgaagaccttagcaaggttactggagatcttctcgagcagctcacttcatcaggatgttcgcacattcatcgaacaatgcctcgattgtcaacataccaattatatcactaggaaaccaaggggactacttgcacccttccctataccaactcgaccatgggaagacattgcactcgatttgatcgtggattaaccatatactgggggtattctatcatacgtaggtattattgtcaacggaaggcctttccagatattcatgctttaaca

SEQ ID NO: 176909 - DNA, 396 bp, Glycine max
agcttctactgttgacatgatatgttatacaatctgtgatatttctcccttaaaggttcctgttccatgagccagtagtcccatttaacccatgcaattttcttctgatcaaggctaccaccccataagaacctcctctggattagccccgattgctattcccaaataagagaaaggcagaggcatgattcatgcaattcaaataactggcagcctgcaatttccattgttcagattggcccagcaccccaaagctgctcttcccataatttattttaagtccttgtatgagctgataccattgagcatcttcaatacacacagccacatccacacactggaacactcacacacacacatacacggccacacacacatctactcatacatttacac

SEQ ID NO: 176910 - DNA, 437 bp, Glycine max
tgcgtcggagggtacatctcaccatcatgttattgtttatgagagacagagccaaataattgattcccagttttctatagatgttgaacatagtattaactaaaaccaaactcgttgcttacattttctaacgtgtacattatcttatatagtattcgtgtgatgatccttatacttggattatcttgggtgatcctctatgtaatgaacatagtacactatatactgatgcaagacgcgagcttgtctacgtgcgaaccgtgtggatctatgggatatggcctccgtacctcatttctcggatggctccccacactacgcccacaatccaacatgcgcctcattgcctcagctaccgctatcccatcttatcccgacacctcccctcacttcccttctcctcttctatacctcacgtcgtttttatactttcatcg

SEQ ID NO: 176911 - DNA, 455 bp, Glycine max
ctgcagctttccacatgcagcatgcatgaggatgggtgtttattgtatattacctattgatccgtgctgacactaaaattaagttcacaaaataacaatttgggaggttacagacgcacattcactaagcttcaattgatgactaaatgcgttgagaatacaactttccgagtcttaccttcaattgatatgaacatttatttactcaatggtactatttagtttttcttttacacataatttacccagacaaaatagggagagtatccaataccatatgctatataatgacaaatgcaaataaacgtcgacgagtaaatcatggttaccatttacaagtcagacagcagctccgtcaaaaaataatgtgaagagtaacatatatctcatcacaagcattcattatctgacagtttcattatcaggagcactggcgaaataacatcataacacaa

SEQ ID NO: 176912 - DNA, 425 bp, Glycine max
  unsure (1)..(425): unsure at all n locations
ngaagttgctgagctgaaatccaagtattgtggctctctttgttnttacccattatatgctgtagtttcgttgttagattttttctttataggaatttatggtcctgtaagttcattgagagggcccaggcactaatacatggagatctacacactggttctgtgatggttactcgtgaatcaactcaagttattgatccagaatttgcattttatggaccaatgggttttgatattggagcattcttgggaaacttgattttggctttctttgctcaagatgggcatgctgatcaagcaaatgatcgaaaagtaggtcccctttttccatgtcttctgtggtccttacttgtcctcttctttgcatactataagttgtatttagtcacatttcttgttattctccataatctagctaccactta

SEQ ID NO: 176913 - DNA, 165 bp, Glycine max
tgaccatgtacgaagtttgtcttatcatcaaccttggcttaactcttcctatgtggcgtgtgaagcacaacatatagccgatgtacttccacgctgtctttcccaaatgaccatgactgacgggacgcctgggcatgatgcatgttgaaacccgcctcttgttag

SEQ ID NO: 176914 - DNA, 297 bp, Glycine max
attttctctgtaggcacataccaagaagaccattagcgagagcccatagaacagtcaagagaccagcagagacaaaccttaggagaaaacttgctgcaaataaagggggaaagaatcaattgacagaatatcccacattattaatgattgaaagaaaccctgttttaaagactttatttaccagaagaaaatattcaagacaaacaccctacgtggccgaccacatatataaattgctctcttggatgatggacgtccacgaataacatgcctggaattcaatagatgataagcatt

SEQ ID NO: 176915 - DNA, 374 bp, Glycine max
attcatggttcacgcccatggacttctcaagaatccattgctgcttggcctctttccagtcttccaactgattttcttcttggttaataatcccctcaactgcctgtcacttaatggtatttgggcctttagaaaacacatcatttaaaccacccatagtattatcctccttggagctattagcttgttcaagttccagctcaaagagacaaactttatctacgccgtgtctctgcctcacgtacactttaaagaatagtccataattcctctttgttgactgggccaagactggttgaaatgcatatttgtacccctctgtatttttattgtgcccggattgaggcttgccccgataacctctctactctgca

SEQ ID NO: 176916 - DNA, 422 bp, Glycine max
gactcgagtcatcaagagattataaatatgtgaccatggcatgagtttcaaaaaaataatcatcaatcatctttgaatcatctatctttcaatcttttttcaacatcatctctcaacatctttcaatcaatctttcaatatctttctacaaaattttctgattcatttctcttcatctttctaaaagttttttatcaacactttcacttccaagaaaagttctttgttcaaaaacttgcgctattcatctttttcattcttttctccctttgccaaaagaacgaaggactaaccgcttgaattcttttgtgtctctcttctcccttacaaaagattcaaaggactaaccgcctgagaattctttgtcttaacacattggagggtacatcctttgtggtacaagtagagggtacatctacttg

SEQ ID NO: 176917 - DNA, 423 bp, Glycine max
agctttgaaatccaaagatctaatccaatgtagatgtttcataaatgggattcctttgcttgtgttgtttgattctggtgccacccattcctttatatcctgtttgtgtgtaggaaaacttaagctttctgtgtcttctttaaataaagatatagtagtagagacccctactagtggttctgtgttaacttctgatgtgtgtttgaattgttctgtggagatttctggtaggatattcttgattgatttgatttgtttgcctttgagccagattgatgttattcttggtatggactggttatcttccaaccatgtcttgttgaactgttttgagaaaagtgtggtgtttgatgattctggagtgagtaaggatatgatgtttatctctgccaaccaaggtgtgacatctttaaaggaagatgc

SEQ ID NO: 176918 - DNA, 427 bp, Glycine max
tgtcgaaattgccatgtttgggtgagttagacatacctattctgttttagggtttttgtgatgatgtttgtgatgtttatatgctgaaattgctgatggaaatctgttagagatgaagggtagaactaacccaaggttagaaagtgagaatgtgacgttatgagtggaaaaagagtgagactttgagagttggaaggctaagtctgaattctgtggtaaatggaggttagagtgagttaatactagcttgaaatgtcatttagaacatgtgagaaaggttaggctgagctagagagaaaaacaaatgaccaaagtgaacaaagagccattgctagggcaaatttgggtgttgaagagtcaaattttgattcggtgagagtttaggtgtaaatccagtttgaacaagtctaaatggatgttatggact

SEQ ID NO: 176919 - DNA, 316 bp, Glycine max
tcgtaccagaagcacaagctcactcaccctctcgaactcaagatgtcatagtggagtcccggtcctgccacagtaatgcagttgatcctcttcaactggatcatagtcgtgttgctaaaacatcataccatttattgccattcactcgaatttatagccgcttacattagctaccagaattaaaataactcaacacgcgatcgccattttatatcgtatatactaaaaaataataaggcctgcagttacaacatatatcttcttaaaaagaggaaccaataattggatatatctgaccatcgaaagctattactat

SEQ ID NO: 176920 - DNA, 426 bp, Glycine max
tcactagttcatctcactgctttaatgaaaactgcctcttacagctgcatctctatgaagaccaaagaggattgtttcaaagtaattaatttcatatctgggtaaatactaaatactgagtgctattagttcctgtctagtcttccactagaataaaagtagacgaggaaactaatagtaagttaaaaaatttgctcatgtgcttttgcttagagttatgattttgtaagtttaacgcaacggaatggctaagttgctagcatgtatttttctgttgagcaggccctgtatttttgctattctgtcagtactccagtagcaacaaagcaaaatgcacacttagtagtacgtcagaacttaagactaccttgcctcttaaatcttataaaaatgctaaacgctatgaatgtgtttctatgaaaccac

SEQ ID NO: 176921 - DNA, 356 bp, Glycine max
  unsure (1)..(356): unsure at all n locations
gaaaattgctactaaaaattctcaccaacatgggtgttgagccaactaatcaagtctagaccgcatcaaatatacccatcaatgtcctcaaagaatacgcttgtaaaaccaaaatttctttaaaactccacttcagctttaaccttagggtgtttaccatgttggtccccctatctctaacagtgttatggcatataataaatttatgtttgaaaaagctattagtgctataaggaaattgagtaaagaacctgctgattggctattacataaagacataccaaagcatacatgggctaagcacacatntgaccctcaatgcaagagtgacaatgtnacaaacaaccttctgcgaa

SEQ ID NO: 176922 - DNA, 419 bp, Glycine max
  unsure (1)..(419): unsure at all n locations
tcacatatttgaagcttaacttcttcagtggctgtggctcacgggctacctttaaacttgcccaatctatgacgccggttcggaaaataaccgtcttcgtattgaatggttcgtgtactgttatttacaaaaaatgccaccggtcatttgttaaggacggttttagtagaaccgtccttattcacgcgtcgtaaaaagcttttaatttagtagtgactgtaatgttatttcaaagaagaatgaaagaacctagagttttcatcaccctcaccaatccatcccaccctagatttttgggtcatttcttcanagatctccaaaattctttagaaagagtcaacctccctccttctacatcttcaaccctctcacacaaccttatgttcaccacttatagctcctccactttggaatttata

SEQ ID NO: 176923 - DNA, 333 bp, Glycine max
  unsure (1)..(333): unsure at all n locations
agcttgacanaattatggacaattgtcttgccttcaggggttataatgctctcgggatgaaactgaactccctggtgaaaaaaaaaatcaatatgtgaagagaagagaagggagacaaagtgcaagttcaaagataataataataacaataacaacagaaaaaaggcatgaacttcagatcagcagaatcttttactgctaactangaataaatgaggtaaaaggtttaaatttgattgtaaagcaccttcacgagtagctaagtttcctaatttttaaacacagcataaaatataaagattttgccctgtaaaagtataaacactaaaaaag

SEQ ID NO: 176924 - DNA, 409 bp, Glycine max
  unsure (1)..(409): unsure at all n locations
ntgcgaaacgcttgtcgctggagctgacccatcaattgccctaactctcttagactgatgatccctaggctcttgaccttgacttgatagaacctttttttaagcaaaggcatttgacttgaccccatgttttactaaagtgaaaaaaaacccagtgcgaatcaaaactccgacatctactatggtcttccatttttcccgcagtattgagtcaatggttaggttggtgagatgttgccgtcgtggttcaattatatttaatatgtatgcatttatggttattttgtttggtcaacataaaaccaagttagcataaataatgaagtgttgtttctattcccttatgatcttatttgtgaaacttttgtggtgtttatgttggcagttgaacaggatcaagaaaattgga

SEQ ID NO: 176925 - DNA, 292 bp, Glycine max
ttcaatggtgtatttccaccatggagatgcagcggaagacaaaggagaagacgtgagaggaggcgcccttcactagggaataaaccatataagaaagagcttcaccaccaagatgagccttggataagaagcttggagaggatgctccaatggaggaaaagaaagacggagataaagagagaggggggagcacaaaatcgaatgaagaaaaagggagagaagtcgaacttcgagttgtgtctcacaagactctcattcatcaaagttacaacaagtgttacacatgcttcta

SEQ ID NO: 176926 - DNA, 391 bp, Glycine max
  unsure (1)..(391): unsure at all n locations
tgctctanatttacattgatgtttgtatttattggaggaggttgtatgccatttttgttttaagggtagcatttcttggtaaaactaactttccaaatgtttgccttcgcaggaaatggccctgaggaagctcgcctcaaagaggtccaggaaggacaaggcggccgaaggaactagttccgctcctgagtatgacagtcaccgctttaggagcgctgtacaccagcagcgctgcgaagccatcaagggatggtcgtttctccgagagcgacgcgtccaactcagggacgacgagtatactgatttccaggaggaaatagggcgccggcggtggacatcactggttactcccatggccaagttcgatccaaaaatagtccttgagttttat

SEQ ID NO: 176927 - DNA, 431 bp, Glycine max
gcttccaagctcattgtgatgatgctctttactccagtcaagaatcatgattcaagcgagtctcaagaatcaaagagtcattcaatcaacaatcaagattcaagtgaagaatcaagagaagactccagatatgcacgaacctcaagaaaagcatcacgataagtataaaaagaattttcaaagaaaagattgaatagcacaattcgtccgaaataatttttcaaagaaaaatcttttaccacagtttttatggtaatcgattaccagatgcctaaaaacgttttataactattttacaaagtagtaatcaattaccatgggcatgtaatcgattaccaatgtttttgaactttgaatttaaaatttcaagagtcacaacttgtgataaaatatttcaaacttgtgtaatcgatacaccaacattatgatcg

SEQ ID NO: 176928 - DNA, 420 bp, Glycine max
  unsure (1)..(420): unsure at all n locations
ntgagccaaaatcctgactcactatataccttgacccattgtgagaatgccaatccttaccctcggaagcaaaaaaagaatagaggggaaatttccgatcaaagaaaaagagaaggaaaatttccaatgaaagcaaaaaagaaatgaaggaaaattccccaatcaaagagtgggagaaagcaaaaaaaggaaaagaaggaaaattccccaatcaaagagtgggagaaagcaaaaagaaaagaaaggaaaattcccaatcaaagaatgggagaaagtaaaaaaggaagaagaagaaggaaagaaagctcctgatcaaggatcgaaagaaaccagaagaaatgtgcagagaggtctttggaccagacaatatctgaacagtacagaattgtcaccaaatgaacgaataaagaaggaaaggga

SEQ ID NO: 176929 - DNA, 440 bp, Glycine max
agcttcagttgttcaatgtcgagcatcttttatgtgatgttcctgtatcggacctccgtgtgataacttatgaccattttaatttctcgagagcttccgctgttcaatttcgagcgtctcgatatattatgcgcctaaatcggacatccgtgtgaagggttatgaccatcttaatttcacgagagctttggttgttcaatttcgagcatctcgatatgtgatgttcctgtatcggaccttcgtgtcataacttatgaccattttaatttctcgagagcttccgtagttccatttccagcgtctcgatatattatgcgcctgaatcggacatccgtgtgaagggttatgaccattttcatttcacgagagctctccgtgttcaatttcgagcgtctcgatatgtgatgctcctgaatctgaccttcgtgtgacaacttatg

SEQ ID NO: 176930 - DNA, 377 bp, Glycine max
  unsure (1)..(377): unsure at all n locations
ntctcccaagtcctaaatgacatttcaagctagtattatctcactntaacctccatttaccacagaattcagacttaaccttccaactctcaaagcctcactctttttccactcataacaccacattctcactttccaaccctaggttaactctacatttcatctctaacagttttccatgggcaatttcagcatacaaacatcacaaacatcatcacaaaaccctaaaacagaatgggtatgtctaactcatccaaacatggcaatttcaacaagctttcaacaagtttcttcacaaataactatcatgaagcagaaaactagcaagactacccatcatatctnccaaaaccccatacccacgaaatttaagagag

SEQ ID NO: 176931 - DNA, 366 bp, Glycine max
  unsure (1)..(366): unsure at all n locations
agcttgatacatcatcacaagtggtggtgtcaaggttcctttttatttaaagagtgaaggatattcagagaatggggacaagaaattcatcttacgcagctgtgtaaaatgaaatgaaaaaacgggttgtgttttgattnttcatcagaacacanatcctattttcccactcactccttttctttcaaaggccaaaataatgcactactctcactgatcaccatcaaactatgcttcttctctctttgacaccaaccatcaaacctacatctctcacctgcatatntggccaacccacaatttgnggacctctggcactcntgtttgtattgcttcacatcgtttgggatctggtttgctcacgtc

SEQ ID NO: 176932 - DNA, 406 bp, Glycine max
  unsure (1)..(406): unsure at all n locations
tcatgatgaatcaacaatgattcanaggtgttttgatgataacaatgatgacaacaaaagatgatgacaaaggtgatgaacaaaaagctcanaagatcaaagaacaactcaagtgaatcaaagaacatctcaagtgaatcaagaacaagtcaagagttcaagaatcaagaagaattcaagattcaagactcaagaagaaagtctacaatcaagaatcaagattcaagattcaagatctcaagaatcaagatcaagattcaagaatgaagaaaagactcaatcaagataagtattaaaaagttttttcaaaactttgaatagcacatgagtttttgacaaaacctttaccaaagagtttttactctctggtaatcgattaccatattgttataatcgattaccagta

SEQ ID NO: 176933 - DNA, 116 bp, Glycine max
tccccagagccctgtgcctaactgaacccactaacacgcgctcaccggaaaaaagctcctttcccaaccaacccaggttgaagaaaccaacatcaccaaaaaccccaagcccaaaa

SEQ ID NO: 176934 - DNA, 407 bp, Glycine max
  unsure (1)..(407): unsure at all n locations
tcgaagaaacggataacagattgattntactctgtaactagacgacatctccgactgatattgtggaccctatttgcttcttgatgcaatcctaccccctaaggacattgaataaaagactccaagaagattggaccagagagatgcaagagaagaccttaggattctcatgagccttagggtagatttcgggcccatgggttaagtataagtccacttatctttgtacatatcatatcaaggttttattatttttgggccttgtatttagggctctatagtgtaggtagggtacccttgaaatgtaggatttttcagcccttgtattttagggcaccttgactagtttattgtattaggggtagttctgtaatttcacatacattaagtgaatatttgatgtgtgt

SEQ ID NO: 176935 - DNA, 280 bp, Glycine max
  unsure (1)..(280): unsure at all n locations
gctcaagaaccgatgattttatcctcgttttatcgaacagntcngactgctgaacctgcaacccatggtcattgcacctggtgcttgtcatgctgctgtggtgggacgggatggccgagcttgcacgtggggatgggggcgatatggttgcttggtgcatgggaatgaacaatgtgaatcactaccgtcagtgtgggaagcattgagcactgtcaaacctgatcatgttgtaacatgatattacacgacctcagtagagtctgatgattgtgatgtgtat

SEQ ID NO: 176936 - DNA, 391 bp, Glycine max
  unsure (1)..(391): unsure at all n locations
ccttattatacaagcttgcctaaggtgtttctctttcctaccccctaatgtatccttatggcatntcttattctgctcagtatcctagaagttaattaacctgttgcaatatgttaggagccatttcagctgtttttggttatacccttcaaattcttatctgtattcagagctatgaatctgtaaattctgttgcatggtactcttttggagctttttaataacttatgtatacactgcaggaaggtgatgtaattgcttatcgattgattgagttaacagcatcttggactccggaactttcctcctttatggtacatatcaagtctgcttttggattacataattngaaaaaaaattgcatcagaagtttaatacgtattacatctat

SEQ ID NO: 176937 - DNA, 432 bp, Glycine max
  unsure (1)..(432): unsure at all n locations
agctagtccttcacggaaaacatgatatcttttttatgttctacgacattgcctataattgaaagctagatgaccaaaataaaagccacagacatattcaatgactcaaatgtcatatttccttttctatggaagactttcaaatctcccattaatcacantttgttatatagcatgggtcaatggggacaggacatgtattccttttgtcctcttctctcatcacccaaaagatattttaaattatgattgtaaaacaaatagaatagtagtcatttagtaatatgctataatagttttcggggtgacanccttgtgccattattgaatactatgattacaagagtgtaaagccttaanacactcatttttgtttcttgccatatcttaaataccagcgttccaccaccaaacatatctcagtccaaaatc

SEQ ID NO: 176938 - DNA, 389 bp, Glycine max
ttgagctcgatgatgctgccccatagagcccctcggatcttgtttctacccaattcttctgtttgggccctctttgtttcccgctccaatgcttcggtcatggtcatgttgacatcccttatctcgtcacactcttttctgaccttagtgactgccatctttagtctttctttaaccactcttgtttttcaagctctactttcaaggcttgcaccttctcgctctcctcagggacttcagcttcttccccacttggacctttcagctttgggagccaagttatctcttgcgtcttaaccttcaaccacttatgatagccgccgacgacaccgttgttgcttccactaagctccttatctttttgttccactgtattccatgcctttcgg

SEQ ID NO: 176939 - DNA, 457 bp, Glycine max
  unsure (1)..(457): unsure at all n locations
agcttgtaggattatggggtacccatcacatgtggtactatgtggcggtcgggcgatggtgcacaacaagttatccacatccacaatgcgcgcataaacccaccatcccctgttgcccacctccaactgagctcacgtactcccacgtagcccatatcctcttttctctcaacaccgggtccccatcaatcctcccaagccttcccaacatcaaagcaaaacaacattcaaacagcacaagctatcacagccaagcaaaacagagcaaaggcagaaaactctgccaaaacaccaaccaaatcacagcttttctcacttaaagaccccagtaacaattccttcgatccaattcgttaaccgttggatcgactccaanaatttactgcaagtctatagtgcataaagcctacatttgaccgttgggatctactagcaaaaatccagaactcattctaca

SEQ ID NO: 176940 - DNA, 425 bp, Glycine max
taacatgcttagaaatcaagtgatcatgtattccgaaatttagggggagaaaacggatgcacattttatctatatacaattgtttgttgcttgcttgaatcttgatttcaggtattgtattgtcatcatcaaaaagggggagattgtagatgcaattgactttgatgttttgatgatgatcatgatgatgtgttgcaattgatgcaaatgggcttttcaagattaaaattcaagacaatacttcaagattacaaggcacaacatcaagatgatcactagaatattaggaagggaattcctaattgaattagcaaaggtttggccaagtgatttaaaataaaaagtgtttttcaaaggttttactctctggtaatcgattaccagaggatgtaatcgattaccagtggccaaatacgttttataac

SEQ ID NO: 176941 - DNA, 441 bp, Glycine max
  unsure (1)..(441): unsure at all n locations
agcttgagcttcagctgctatntatctaatttaatgtacatcttgtaagaataatatgatatatgtcacagcttacaaacattgatgtaacattaaaaaataaatcaagtaactagaatatgtgaacagttctagataagggaatatcagcacaacaacaacaaacataacaaaaaggataaaaaacatatgaaaagaaagaggaggaaagaagagaataacagttgactactacaatatccttataggtattaaaaatatttgcaataacatgacaaaggaattgcttctcttaacattgtctaaaaaaaactaacatgataccatggagtaacaaagttcagatagaggtttcttcatttaatacagctcacttcanaatagactttttatttcatttactttccgtgtaatctaaggaaggacttggagagtgacata

SEQ ID NO: 176942 - DNA, 436 bp, Glycine max
actcagcttacagatccgatcatggaaggatttggcaactgccttcattaggcagtaccagtacaatacggatatggctcccgatcggaaccagcttcagagtatgactaagcgagagcatgagtccattaaggaatatgcccaaagatggagagatctcgcagcccaagtcgtaccgcccatgacggagagggaaatgatcacaattatggtagatacgttacccacgttctaatatgaaaagctgataggctacatgccagctaactttatggatctcgtcttcgccggagaaaggattgaatccggactacggaaaggcaagttcgaatatgcttccaatgtggcccccaacaacaacagaagagccctagtagtgggtgcgaggaaaaaggaaggagacatccacgcggtcaccaccgccccgatgtggatg

SEQ ID NO: 176943 - DNA, 445 bp, Glycine max
  unsure (1)..(445): unsure at all n locations
agctcgcgaacgaaagaaatncagaattgtcttaaactatatgtggcggtactaagaacgcgggaagcaccctaaatattgattcgcacgcgccatttgctaaagaggagcaagaaaactctattgtgggattcatgtatcaaaataaatggcttccttgcctcttcatcgtcatcttgtccttggcgatgctcataagaaatgtgggaaatttgttgcatgttaataaaccctgtcattcgattgctcgagacgcgctgtaccgcacgagtaattatgtctcccaaatcaaagtctttcgaaagcatctgagctgttagaaaatgtgtgactacgtatacttacttcgtcaaaaaaatacttattgtatgcttaggacagttcgcttcatggattatttctttaactcttgcatatgttctctcatgcgactatatttatattt

SEQ ID NO: 176944 - DNA, 429 bp, Glycine max
  unsure (1)..(429): unsure at all n locations
taagcttgttagtgtcttttctttctttntcttctggagttgagcttaagccctaaagccaaaacattgtcagagtcttttcttcatttttcttttagggttgagcttaagccacaaagcttaagccttggatgcccaatttcttcatttttcttttcttgagcttaagttatagatcttaagccttgtgagcacattttcttcatttttcttctaggattaagcttaagtcttgtcaaggtattttcttaatttttcttcttgggtcaagcttaagccttgtaagcctattttcttcactattcttcaaggagatagcttaggctatagagcttaagccttgtcaaaatcttttcttcattattgttctagggtcaagcttaaacggcaaagcttaagccttggaagtggtggttctttatttttctt

SEQ ID NO: 176945 - DNA, 390 bp, Glycine max
gatcatagtgggtctgaaaagaggcaaatttggtcatcctgctttgataaaaactgcggcaaatgaagaggatgagaatgagggagaaacccatgttgtggttgccattcctatatggcccagtttcccaccaacccaacaatgtcattactcaaccaataacaacccatctccttacccaccacccaattatccataaaggccatccctaaatcaaaccacaaaacccacctaccaatgctaaacaccacctttagcataaaccaaaacacccgccaataaatgaagtttgcagcgaaaaaaaacctgtaggattcacccaaattccggtgtcctatgctgatttgctcccatatccactcgataatgcgatggtagccataaccctag

SEQ ID NO: 176946 - DNA, 394 bp, Glycine max
  unsure (1)..(394): unsure at all n locations
tctaaacattntgattntcanaatttataatgaagagtcacatctgttgatgtgtaaccgactacaccttaatggtaatcgattaccagtgactgatttagaanaataaatttccaaaagtcacaattcttcaagtgacttgtttctgaaatttttttcaaaagtcataacttttttaagtgactagttttaaagaaactgccaagagtcacaaactttgacttgagtcatcaagagattataaatatgtgaccatgacatgaatttcataattatcaataatctattcttcaatcttttttcaacatcatctctcaacatctttcaatatattctttcatctctttcaacactttcaacagaactttctaattcatttctcttcatctttcta

SEQ ID NO: 176947 - DNA, 460 bp, Glycine max
  unsure (1)..(460): unsure at all n locations
agcttggcatatatatatatatatatatatatatatatatatatatatctatatatatattataaaaaagagatcttaatctatgaaattatgttacgtgaccatctcatattttttacttttcaattaaatgcaatcaattcaaatatttattttaattattttatttttcttcattaaatgcaaccggtttgaatatttgttttaattgttttattcttctatgtcaaaataaaaaaatacataataattattaaattgtctaaaacaatgtttgaattaaaaagttatgttttgtatgatttttatgatttgaatattggacctaataatacaagcatatattttaattcaaactaatntataaaatttatagtaataacatttactggtcaattccttatgattaaagcattcagaactaaaactaagagtattattctgattcctcatattaatg

SEQ ID NO: 176948 - DNA, 386 bp, Glycine max
gcttggcacaatgccactccatttactatccgagtatatagtggatcttgggatgacaatggcatttttatttacacaacattaaatcatataaaatattgcctccccaatggagatagtgggataattaaaacattggatgtcccaatttatattacaaaggttgttggaaacaccatcttctgcttgggtcgcgatgggaaaaacaaagctataactgttgatgcaacagaatatatctttaagcttttcttgttgaagaaaaaatatgatcatgtaatgaacatgataaagaattcgcagctttgtgggcaggctatgattgcttatctacaacagaaagggtttcctgaagttgcgctccattctgtgaaagatgagagaat

SEQ ID NO: 176949 - DNA, 270 bp, Glycine max
ctgcgaccattctttccttggtttcttttatccatctcataccttcttctatctacattacccctaaagtgtagagcctctcatgatactgagatgcttaacccccattgttgggagtctggccgaccaactattgtaaggtcgctttttcttattatttatttaatacaatccaatttctgctgctcttttctgcgcttatctgtttattgcttatagtatgaacctccatgtgcatgttgtgcttaaacgataatgctttgcaaaatg

SEQ ID NO: 176950 - DNA, 417 bp, Glycine max
  unsure (1)..(417): unsure at all n locations
tcaagaaaaagatggcctcagctnattccttatttccataagggaattctatcaatagacctccaatctttaatggagagggttaccactactggaaaacccgaatgcaaatttttatcgaggcaatagatctaaatatctgggaagccattgaaatagggccttatatacccaccacagtagaaagagtttcaatagatggtagttcatcaagtgaaagcataaccatagaaaaacctagagatagatggtctgaagaggatagaaaacgagtacaatacaacctaaaagccaaaaacataataacatctgccctaggaatggatgaatatttcagagtttcaaattgcaagagtgctaaggaaatgtgggacactcttcgattaacacatgaaggaactacagatgttaaaagat

SEQ ID NO: 176951 - DNA, 305 bp, Glycine max
  unsure (1)..(305): unsure at all n locations
cagctttgacgatatggtcttcaccttctattggctcaatgtgcgtctaaaaaaagagcaatttagttcctcctacttagacgaatgacaaaactggggcaaaacaagacggtgaggatgaaagaaaatcccgtgctgggactgctcattccaatacagccaagtttcccaccaacccaacaatgtcattactcagccaataacagaccttatacttacccaccgcccagntatccacgaacgtcatgcctaaaatcaaccaccaagcctacctaccagagctttcatgactaacaccaccttta

SEQ ID NO: 176952 - DNA, 413 bp, Glycine max
tgtaatcgattacacacatactgtaatcgattaccagagcacattttcaaaaaatattctcaacagtcacatctttttatgtggttcttgaatggctatcaaaggcctatatatatatgtgacttgagacacgaatttaagaagagtttttggagaacaaaaaggtcttatcctattaaaaagcaaatcgtgttatcctcttacaaattccttggccaaattacttgtgattcaataaggaattatttgagtgctcaaattgttcagtctatctctttcaagagagatttcttcttttcttcttcttcattctgaaaagggattaagagaccgagggtctcctgttgtgaaagaattctaaacacaaaggaagggttgtccttgtgtgtttagaaccttgtaaaggaatttac

SEQ ID NO: 176953 - DNA, 451 bp, Glycine max
  unsure (1)..(451): unsure at all n locations
agcttttcgattcattctatgtacttcgtttggtccacattgagtttcgcgcatttttattttcgttntgtttactttttataccccctgttgacgtgcttaagtcattttacttaagtcatttctcgcttaacttaaaaataaaataaatttccaccgaacgtttgaattgtattatccgttaacttcggttaaaatgaattccgaccgtttggtcgtgccgcaaccacgttggaaatcaaaaagaggtgaaaaaataatataataataaaaaaaacatcttttagtaaaataaagcggaaaatcaatcggacattttctctttgggaattctcattcttaatcgaattgattaataactaaagtgaaactaaaggctaaatcaactcgcctagtcaagctcgtccataaaaaataagtttttgaagtttgtcatttcaatttctcacta

SEQ ID NO: 176954 - DNA, 368 bp, Glycine max
tcattcccaaatgtgatattatcgctaaagacaagcacaaaagatacacaacatcattacatattttatttctgataattatctacctatcacctatgtgatgataataataataataaatatagcacaaatcaaggttgatttaatgatatttttcaatatgtaatgttaacctaaaactgaagttaatcgatcacataaataaatgtcgtcgtgattagaaaagaaaaacagaaaaaaggaaaggtggagtaaaacctgcagtgagtccatggataaagaattttggtgacattggcatgtaatgccttttggacttctggtctaattaagtacacttcagtataatcggatgcacaaagatcata

SEQ ID NO: 176955 - DNA, 408 bp, Glycine max
  unsure (1)..(408): unsure at all n locations
tatgaccaatttgatctccaactntgagctcctcattgtccatgaaggtgataattcccttccggcacacagaatcatagagtttacaagtaaaagtgtgatgggtatcatctctcctaaaactaaggaatacgtcatgggtacactntgtttcagacactgtaccatcatttgccatgattgtattgtagtagcactgcaagtagagtagtgggactatgagctttctttcactgaatgaatgactcgcatcacaaatctcctacaacttatatcaggaatttaaacaaatactaatatactttgttatttttacatcatattattatatattctattttttatttgaatatatttattatcattntctctccggctctctccaatagccactgtggccccttggat

SEQ ID NO: 176956 - DNA, 55 bp, Glycine max
tgagaccggactttataccgcgctcactccaaatttttcattcctaaggagggct

SEQ ID NO: 176957 - DNA, 407 bp, Glycine max
tgtcatagtatgacatgtgcagatgaataagattaggattaggcaatccacccgcaaaaaatgagtcattaggacaatgagttatgatcaaatcatgaagaagtgagagactctagtaagcatgttctacaatatatagaaatggatttcaaattcttacaattagaaattctaagacttttaagcacagagaaacaacctaaggtgaaggaagtcagtgaataacatctattaaatattgtcaaattctttaatgatgtgtaattgtgtaaggattcataaggtaggaactccaatttctcacaattaagtagagtaagagattgcaatgcattcagcagaccatctcttaaggatgctagggaattagtgccagagatagttaagtctaggatgaaattggtgga

SEQ ID NO: 176958 - DNA, 438 bp, Glycine max
agcttcattccttttttcactcatgtgttttagtctttgatggcataaggttgaattgttgacagcctcagtaactgctaccatatcctcatctgcaatcatgtaaagagatcctcgcttctttccacgagccacaatgagattgccttttgttaccttccaagctctatatccaaaagtggtgtaatgcccctcattatccaactaccctatagatgttagatttccctttaaggcaagaatatgtcaaacattgtacagtgtccatagggatccactagaggtcttgatgtcaatatcacctcttccgacaatgtcaagagattttccatctgcaaggtaaactttcccaaatcttccaaaaatatagttagataataaatctttagagggagtggtgtggaatgacgcacctgattccataatctatgaatcaat

SEQ ID NO: 176959 - DNA, 455 bp, Glycine max
  unsure (1)..(455): unsure at all n locations
gtgaccttagaatcctcaagcttcgagaattgcccaaactccctctccatttctgattttatgcttaaataggtggccttgttggtgcttgtgcgcctagcgcaactatggctcgcttagcgtgcattagtgaatttcagcttagcgcgcgtcttttcactcagtggatggactcaagtggtgtgcttagcgggattagccctcgctcggaaaacatttacagcttatccttcttccagattcttcctcgcgctcagccgcaagagtggtgcgctcagcggatggctcgataagccagcagattggcttagcgagcggatgaaaatcagcacttcacaaacttgcctaattaacctgaaattgagaggaaatgattattaaacacacaaaatgggagtactaagtatttattacctatctttaacananagtaattacaacattacaaaataacc

SEQ ID NO: 176960 - DNA, 418 bp, Glycine max
  unsure (1)..(418): unsure at all n locations
atgcccaatattgcgcttgtctttaaactcttccagagctctccaaatagcttaaaactttaaatgtcaaagaatgcaaatcgcttcagagtctaccagagctttccccgtcgctagaaattctaaatgcaagagactgcgaatcattgatgactgtattgtttccttcaacggcggttgaacaattaaaggaaaataggaaacaggttatgttctggaattgcttgaacttggatgaacattctctagtggctattgggttgaatgcacaaatcaacatgatgaaattcgcaaaccaccacctatctacaccaaatcgtgagcatgttgaaaattacaatgattcttntcaagatgtttacatgtatccaggaagcagtgttccaccgtggttggagtacaagacacgaaattatca

SEQ ID NO: 176961 - DNA, 434 bp, Glycine max
  unsure (1)..(434): unsure at all n locations
tgtcaaggtaggaaaaaaggacagtgcatgtcatattgtccgacccatcaagcatattcacaatctgcaacaggaaaaggacggcaatgaaggaagaaaaagactaatctacattatgttttcagtgtcactcacaaggacataagaataacatttgatgcaaatttaaaagaaatcataaacaaaaaatttgatgaagtgcatatcttatagaaaacagttaagaaataacaataaccaaatgaggcattttttggttgtgcttttttggtgtctgttgattatgctggagcataattctaaaacttttagccataaaagtacccttctccaccttttatgagacaggcttgtttccttagcttccttatngtggtttgcatattggatttttttagttttcaaaggttggccatgcaataggactatattgt

SEQ ID NO: 176962 - DNA, 448 bp, Glycine max
  unsure (1)..(448): unsure at all n locations
tgcagcttggaaaccagccatcagaatgtttattatatatatatgggaatagaggtcacaatggcggttatgactgaccgaggcagaaccgggttgagggagtaaagctcaatgttcctcccttcaaaggtagaagtgatccatatgcctacctggactgggaaatgaagactgagcacgtatttgcctgcaatgactacactgatgcgcagaaagtcaagctagcagcagctgaattctccgactatgcccttgtttggtggcataaataccaaagagaaatgttgagagaggaacggcgagaggtagatacatggactgagatgaacagggtgatgagaaaaaggtatgtgcccactagctataacanaaccatgcgacaganactccaaaggctgtctcaatggaatttaccgtggaagaatattatacatagatggaaattgcg

SEQ ID NO: 176963 - DNA, 431 bp, Glycine max
  unsure (1)..(431): unsure at all n locations
ntgatggtgttgagaaaaaatcacatgtttgtcatcatcaaaaagggggagaatgtgaatgtatgtatacatgattttgatgatgtcaaaagaagaatcaaacaaggctcattttgcttcaagattaatacaagattgtttcaacaaacaaatccttgattcaatatttcttcaagatcaagccttgcctcaaaatgcagagatttcaagtcatccaaggcacatgtaatcgattaccaatggtaatcgattaccaaggcacatgaaagtgtgtaatcgattacacatcatatgtaatcgattaccagagactctgaacgttgggaattcaaattataactgtgtaatcgattacacaaacattgtaatcgattaccagtggaaagttttcagaaaatctgccaacagtcacatcttttcattagatttgt

SEQ ID NO: 176964 - DNA, 444 bp, Glycine max
actacttaatagcatgtaatacgtcttagaagggaggattttctaagacggttatgatgatgaaaccatcttaaaataactctcattctaagagggttatctaatcaaaatcatcgttgaaaaggactcattctaggctctctgtgctttttttttttttttttttttatgttttagacctagtaattgtcttagaatgggagctattctaagaagatttcgttgtcatagtcgtcttatgtagcacccttattttttgtaaaataaattaaaacatttttttttaaaaataaatagggtttaagaaaataatgaggtttttgttattaaataaataaggaggaataatcctattaattaaataatggttttaaggtgaataaaataaatatatgttcttataaaataaaaaaatatttatttatttattcgatagagggtaaa

SEQ ID NO: 176965 - DNA, 426 bp, Glycine max
tgtccaaaactaggtaaagatgttcagggtccagaatctaattaattaagtcgatgcaaagattagataacactataacaatcatgaagctctcataataaaattacctcttttatttatggcagatactttactatcaagcaaacaagataaataaaattagaaagatacccaagaaagatgaagaaacacttgagaattttcgttctagtaactaatttgttataagatttgcactgctagatcctcaaacaaccaatctttccagaaaaatcattaatgatttaccattcttatttaaaaaatattaaggttaacttttatgaaccataatcatggatcatgttatttgaaacaaaatttataccatcatcaagaaggagaatgatactttaataatgatacttcaaattgtaccatcaaaag

SEQ ID NO: 176966 - DNA, 241 bp, Glycine max
tcaaagtctgagaagagtatgatgaactaatggacgtccatatggccaccgttgaagccttggaaccataaaccaagaaggcccgagaggtaaaacacgtgccaccaaagtcttgaggggctttatagggcagcaatgataagctcaagctccgaataggtgaaaggaatcatcacgggtcagaggcatgatattgtaggatgagctaaaggcttaccttaagtcgaaaagaaatttgtcc

SEQ ID NO: 176967 - DNA, 425 bp, Glycine max
tttatctctatatatttttttattcttttaggaatccatataatagccatatgatatacgagttcttgttattcaattatttgttttctaagaaatccgactcaatacgaattttctgagacttcattcacttcaatttactaccacaaattgcctcatgtacctacaacaattcttttacctgtattgaaaaataggggtatggcaaaaaaattagagcaattgtcctccactgagtgggcataagcttagcaagatgaagtagctttttatcctcttctcttgtccacccaatctatacacaaaaagcatcagattgaaaaatcactcattagaaaaatatcacaacaattaataacatagttggtacatactccttatcaataacatcttaaaaaaagagaggctcttaaacccaaagaaag

SEQ ID NO: 176968 - DNA, 365 bp, Glycine max
  unsure (1)..(365): unsure at all n locations
agctngacctcaacagagangctttattttactggcngagcacaattcggagagtgcttttagaacccatcacggacactataaatataagctgatgaggtttggtatctactacgcgatggccatatttcaagccaccatgaacgagttgttgaagatattcttacgcttgttcgttgccatgttcttggatgacatccttatgtatagttcatcactatctctgcatattacacttaaaggaaatcttcaacgtgctggctcacaacaaatttcagctgcgaagaaataagtgttcgttgcaaaagaaacactctatacttagggcatatcatctatctgtcgccgagctctgacaacaaaca

SEQ ID NO: 176969 - DNA, 415 bp, Glycine max
  unsure (1)..(415): unsure at all n locations
ntggngctggnaaactatataacttcaccaaggttctagtttaggctctctcttctctctctccctgtgtcattctgctttaggcttttcttcttttagacactatttcattttgcaattccaatttttacttttcgtttcagcaataaaactccattcttcaatctataattccggtctctattgattaatggaaggctaagtccccaacgatgttttctcttgaggatcaagcacagttctctttgaggttctattattactggtaatttatgttcatgcttaatgatcgctcatgattaattggtgtatgtgttgcttaatcacataatgaatgccttatgttagattttgcttagtaattcaatttaaggttggactaagtggttgaaatgataaaggataaactctcgta

SEQ ID NO: 176970 - DNA, 487 bp, Glycine max
  unsure (1)..(487): unsure at all n locations
ggatctctaaccacctgcggctgcagctgtccctcacttagattgtttcttttactntgccatcctaattatttattgtgtacatgtaaataatagatactgaaattcgaatcaaactaaaataaaacaacttaattcgattttaaacacctgccatctaaacgtggaataatgggttgtcaagtccatcagtaacacctgccatcctaattacgttttatttggtgaataattccttcctataaccatgctctattattttccacgagtgtacagtgtcccaacttcagcttgttaggaatctgagatctaccacaaaggagcatcaattatacaaaataaattattcgtttttctacaattcaaccctccttatgctagtttaatttcaaaagcttcttgtngatgccttaagagttntattcctgtagcagtaagtcttggtttttattccttcngcatanaacaacgacatcaataaaatgaa

SEQ ID NO: 176971 - DNA, 414 bp, Glycine max
tgtgcttaacgtagaatttccaattatattttataatattaattgcaactccaataaaaacaatttaactatatattattattaacgtaatttctatttctactactcttaaaaacaatttcactatatattgttataaatcatgtggatacattttgtcacaatctaaacatgtcagtcgcatcaatttttccttttcccatataaccccagaatttcaagagttagtcaacttgaatctcctattatagaggcattttcattcacacaccccaaattgttggaaaaataaaataaacaataagcaagaaaaacacacacgtgcttttctcctaataatcacctcaagctacgtatgagcaaccagtgaggggatatccccaatatgctccacaataaagaaacatgtgacat

SEQ ID NO: 176972 - DNA, 404 bp, Glycine max
ccacccagcaaggaaggaagttctctgctaaggagaaaaaaaaacgacatcggcattacgaatttaatatcatgcttaacgtttccctgattgcagacaccaagtagagtccagtctataattggcatggaaatgttgtgggcccacattgcttctacagaacttggtgcaggacatttcaactacaataaaatcacagcttcattccattcgcgctctgaaaatattccctccgctttgcattctacatcacaccagagtatcgggtcccatgttctaaatatgtaattacatgaagaactaaattgcatattgccattgatgagtacgctgaacttcaaaatcaacaccatttccatgacactgttcaatctagatattatagaacaacatacccgaatctt

SEQ ID NO: 176973 - DNA, 394 bp, Glycine max
  unsure (1)..(394): unsure at all n locations
tgatgttgttttgcatgtactgtatgaaaaagaaggtagtgattagatttaatttttaatagacatatgattgatttctgatctgctcaagtttgagatttctttctttctttcttttttttgcttgaattatgagtaacctacaagcttggtccaatcatgcaactaatttttggctcatcaatctttaagcttgacccttttcagaaacctttgcgaatgattaaccttttggttgctacttttcatccaacctatttgaatgtgacctatatatgtatgcattggaggtttccaactntttaagatagaaatgtatctgaaatctctaaatacatgagctgcagaagaggaaaatatgctgaanaatcttgtattgtgaatacctgacttt

SEQ ID NO: 176974 - DNA, 399 bp, Glycine max
agcttggttcaaggtacttacccgttgaagatcgaagaacgatgaagaacgaatgaagaacgtcgaagaacggtcgaaaaccttcgcgaaattcctcacggaaaacgttacggaaacgtttcggaagcgcctcggcttatattttcttcacggaaacaatttttccaagcaaattcgaaagagagataagtgcctaaggggctgaacccttttccttctcacttcctcccctatttatagcaaaataggggagatgcttgctgcccagctcgcccaggcgagcagggttgcttcctccagaagcaacagccttctggaggaatcttctggagggcccaagtgggcctgggtgctatttgcactcccatttttactaagtacaccccctctgcttttttt

SEQ ID NO: 176975 - DNA, 417 bp, Glycine max
attcgattcattctatgtacccgtagtggtccacattgtgtctcgtgcattattattctcgttttgtttactttttataccccctgttgacgcgcttaagccattttacttaagccatttctcgcttaacttaaaaataaaataaatttccaccgaacgtttgaattgtattatccattaacttcgtttaaaatatattccgaccgttcggtcgtgccgtaaccacgttggaaatcaaaaagaggtaaaaaataatataataatcaagaagacatcttttagtaaaataaagcggaaaatcaatcggacgttatctctttgggatgtctcattcttaatcgaattgattaataactaaagtgaaactagaggctaacatcaattcggctagtcaagctcgtacataaaataggcttt

SEQ ID NO: 176976 - DNA, 412 bp, Glycine max
  unsure (1)..(412): unsure at all n locations
agctntactatgtaaggaataacctatgtttattccttcatctgacttggcatcaaattctcctaagttttcctttccattgtttaatacaaagcatttgcaaccaaaaacatgtagatgtgagatgtttggttttctaccattgaacaattcatatggagttttctttaagataggtctgattaaagccctattcatgatataacatgcagtattaacagcttcagcccaaaaatattttggaagaagagtatcattcaataaggttctagcaatttcttccaaagacctatttttcctttcaacaactcctatttgttgaggggttctaggtgcagaaaaattatgttcaataccatgctctttcacaaataagtcaaattctttatttcaaattcaccccatgatcact

SEQ ID NO: 176977 - DNA, 399 bp, Glycine max
  unsure (1)..(399): unsure at all n locations
tttaacccnctttntaaaagatatgcttagaatacagatgaagaacaagaagcaatcaatttaacaatgttcttttaaacgtgcaaggaaaaattgattgcaataaaataaatgagataagggaagagagaaatgcaaacttgatttatactggttcgaccactttccgtgcctacatccaatcctcaaacaacctacttgagattttccactatctttgcaaaaatcctttttacaacttctgaacacccaaggaatcattttcccttgtgttcaagaaactcacaattcaagagacaaccagtctcttgattacaattgattttatgagaagaacaaaaagatttctctcttttagagtggataatacaatttgaagttcctggatgaactctcaat

SEQ ID NO: 176978 - DNA, 392 bp, Glycine max
agcttgagaattgtaaaggactacttaatagcatgaaatacgtcttagaagggaggattttctaagacggttatgatgatgaaaccatcttaaaataactctcattctaagagggttatctaatcaaaatcatcgttgaaaaggactcattctaggctctctgtgctttttttttttttttttttttatgggttagacctagtaattgtcttagaatgggagctattctaagatgatttcgttgtcatagtccgcttatgtagcacccttattttttgtaaataaattaaaacattttttttaaaaataaatagcgcttaagaaaataatgatgtttttgtaattaaataaataaggaggaatatatttattaattaaataatggttttaag

SEQ ID NO: 176979 - DNA, 366 bp, Glycine max
  unsure (1)..(366): unsure at all n locations
tgtccaaaactaggtaaagatgttcagggtccagaatccaattaattaagtcgatgcaaagattagataacactataacaatcatgaagctctcatagtaaaattacctcttttatttatggcagatactttactatcgagctaacatgataaataaaattagaaagatacccaagaaagatgaagaaacacttgagaattttcgatctagtaactaatttgttataagatttgcactgctagatcctgaaacaaccaatctttccagaaaaatcattaatgatttaccattcttatctaaaanaaattaagggtaacttttatgaaccataatcatggatcatgttatttgaaacaaaacttata

SEQ ID NO: 176980 - DNA, 402 bp, Glycine max
  unsure (1)..(402): unsure at all n locations
atcatcctatgtctagcaatgaattcattatgatatcttttctttntgttctattaaaagatatcctctgtcgagcgtataacccataaaactgatacatgcatattttctttatatttctaccttcctaagacaatctttatcctagccctcccccaaattaggggtctatcttgaataaaacccttatgttttcttaaaaccctaaaacaaggtcagagatatcataaattatgctcacgggatttattataaaaataattatttatgtttggctcaacaaaggtgcaagggataaattttaccaaaagctggctttttggctaagtggctaaaataaacagaagcatggctctgatcatcttcacctcgtgtattaatctaatagtctaacaatgatgc

SEQ ID NO: 176981 - DNA, 405 bp, Glycine max
tggggcattgaggaagggttttggaagaaagaaggagataggaatggttgttttccaaggctacacgaaaaataagacttgaaacactcaagtgtttctactctcaggaaaagaagcttttctcacacaccaaaagacatattgtagatcgtaacgatcaggtcgtagaaatctgtcctatgaacctccagaccaaatttcgagaagatctaacaattaacgattgcagaagggcgcttttaccaaggtagcttcaggtagcttccttgagaagcttttctcgagaggcttccttgataagcttcctcgtgaggcttctttgagaagctagagttttaactacccacacccttataataactaaattcacctccttgaaataaaacatggataaaacaacacaat

SEQ ID NO: 176982 - DNA, 456 bp, Glycine max
  unsure (1)..(456): unsure at all n locations
agctagtatagttccccaatatatggttattttgtagtaaattttgtaaataaatcttgttttatggttaacgatgtctttagaaaatttccattggatttaatgaagaaatctgtgcattttcaggtgaaaaagaggctaagttttgaattgcacaatgtagcaattgcgctaagctcagcagttgggctaagcgcagcttcagcgcgcttagtgcaaaggagaatctggcagagcatcagaattaaagttgtgcgctaagcacgagatctgtgcgctgagcgcagcaagtgccttcaaccaggctaagctcgagactagcgctaagcccaatttcacttactcacgcttagcacgagggtggtgctaagcgcaacattgctgatttagagcctatgtaattcctgttttgtgtagaattanggtacaatgcccagcgcacataattctacaaca

SEQ ID NO: 176983 - DNA, 425 bp, Glycine max
  unsure (1)..(425): unsure at all n locations
gcttctgatgaatcaagattgattcanagaagttttgatgataacaaaggtgatgacaaanagctcaaatatcaagaacacttcatgataacaaagatgatgatctcaagaatcaaagaatgaattcaagattgaatcaagaacacttcaaggttcaagaggaaatttgatttcaagaatccaagaattaagatcaagattcaagacacaagattcaagaatcaagagaagaattaatcaagataagtattaaaaagttttttcaaaaactgagtagcacatgaatttttctcataaccttttaccaaagagtttttactctctggtaatcgattactagattattgtaatcgattaccagtagcaaaatggttttcaaaaaacctttcaactgaatttacaacgttccaattgatttcaaaatg

SEQ ID NO: 176984 - DNA, 410 bp, Glycine max
agcttatcacctttatcggcgattgaaattatatttttatggaagtcaagagcatgatagtgtgtcgataccattaactggtcacaggttcttaagcacgccgagggcatcaatattgtatttggaaagacccaagagaaggaaaaaactaatacttccatatggaagaagaggtcgatattgtctgatcttccatactggtatgatctagatgtcagacattgtattgatgttatgcatgttgagaaaaatgtgtgtgatagcgtcattagcacacttgttaacattcaaagaaagacaaaagatggtttgaatactcaccaagatctagtttatataggtatacgagaccagttacatccaaggtctgatggctacaaaatatactcgcctccagcttgtatactttg

SEQ ID NO: 176985 - DNA, 410 bp, Glycine max
  unsure (1)..(410): unsure at all n locations
tcttacatagtccgcctttgcttgaccttctttatgcttaanaacagaaacattatgcataggcaaaagatcaagaggagttagtgggttaaaaccataaacaacttcaaaaggagaacaattagtggcattatgaacaactctattgtaagcaaattcaacatggggtaaacaagcttcccaagtttttaagttcttcctcaaaactgttctaagcaaagttcccaaagttctattaacaacttttgtttgcccatcggtttgtggctgacaagtggttgaaaataacaatttagtgcccaacttgctccacaaagtcctccaaaaatggcttaagaacttagagtccctatcactaacaatgctccttggcaaaccatggagtctcacaatctcctgttggatcaagt

SEQ ID NO: 176986 - DNA, 460 bp, Glycine max
  unsure (1)..(460): unsure at all n locations
agcttgatgtgagaaagcgtggaagagtcttttctttctactttntgtttgtgaccacaaagcggtacctggagatatgtcgcgggggtcgtcaggtggggtgctattgcccaaaaccaatcttgaccaatcccgacccaacccgggcatagtcagtcagtgagaacctgtgacgtacctaaacaggcgagctcctggcagtcaaccaataaaagaacaaagaccacaaagcaaggaggcttgtgtggcggctggccagctatggatcttgagtggtatctagaaattggcctctggtaatcgattaccaagggtgtgtaatcgattacaagacttataaatggagacaggaagttaagatggcctctggttatcgattaccaacgggtgtaatcaattacaacgcttacaaatggggacaggatgttgaggtggcctctggtcatcgataccaatgatg

SEQ ID NO: 176987 - DNA, 427 bp, Glycine max
  unsure (1)..(427): unsure at all n locations
tcagacctaagcaacacanaatctaggtatccaaaatccctcaatttaatggattttcaaggtttgagaagtgaaattgagaatgaagtaaatttggagcaaactctcacctcacacaagtctataacatcaatttaaacttgctcaaactggatttacacctaaaattccaccgaatcaaaatttgactcatcaacacccaattttaccctagaaatggctctttgttcactttggtcatttgtttttctctcttgcacagcccaagctttctcataagtcctaaatgacatttcaaactaggattaactcactttaacctccaaataccactaaatccagatttgaccttccaactctcaaaaactcactctttttccactcataacaccatattctcactttctaaccctatgttaactctacc

SEQ ID NO: 176988 - DNA, 391 bp, Glycine max
acccatgacgtaaaatctttaacatttcttgctccataacattcttgatgaacggctatttgacatctataaaatatataatgcattcttatattaattgcaacgaaattcaaaatgaagagtaagaaaacaacaaccaacaaaaacttgccggatagttcaatcttgcagaagaaaaaaaaaaggttttataagcaaatggtttcattgtcagcggtgatctgactgataagtgaggatggtaaggctgaaaaactgtttctgcaaagcagaatggagactgctgagcatggaattgaacaacataagaaagggtgcatataattgtcaaatgtgttagacaaaatgctggagtttcttcttgcttatatcatttcaagatgacattaat

SEQ ID NO: 176989 - DNA, 388 bp, Glycine max
ttctctaccacttgtcatccacaaactgatgggcttacagaggtagtgtataggtctttatccactcttttaagggctcttctaaaaggcaaccataagtcttgggatgagtatcttcctcatgtagaatttgcctacaataggggcgttcatagaaccaccaagcaatccccttttgaggttgtctatgggttcaatcccttaacacccttagacctcattcccctcccacttgacacttcttttatacataaagaaggggaatctaggtcagagtttgtaaagaagttgcatgagagggttaagacccaaatagagaaccaaacaaaggtgtattcaactaagggcaatagaggaagaaaggagctagttcttaatgagggggact

SEQ ID NO: 176990 - DNA, 393 bp, Glycine max
  unsure (1)..(393): unsure at all n locations
agcttccgcttattagtgcacagctcctttatataattggcatatcttggaanttgctgtattgcatccaacagaggtatgtttacctctacttttctaaacgtttccaagatctctttctctacctcttccatttttttgttggaaactgctcttggagggaatggaagagggggaatgtgctgcttctgcaaatcacaattacctgtggaagaagattcacctgcacagaaattgttaggtaaatttttgtcatcacctttttctggaatagagtgaagtgtggcaagttcatttgcagatgaagaaggtgctacacgttgaggtccttgacactgctttcccgacctcaatgaaatgacactgacatttttgggaatttggacagcttga

SEQ ID NO: 176991 - DNA, 380 bp, Glycine max
  unsure (1)..(380): unsure at all n locations
ntgagcaaattgaattgactattactttatacacggatgtctggttgagtccagtaatatatcgagacggtccaaattgaaaatggaagctcgtaggaaattcaaacgacaataactttttactcggatgtccgattgaatcgggtaatatatcgacacgctcaaaattgagactagaagctctgagcaaactgaaacgacaataactttatacatagatttccggttgagtcccgtaatatatcgagatgctccaaattgaaaatggaagctcttagaaaattctaacgacaataacattttactcggatatccgacagagtctcgtaatatatcaagacactcgaaattcagaacagaagctctgagaatttcaaacg

SEQ ID NO: 176992 - DNA, 401 bp, Glycine max
  unsure (1)..(401): unsure at all n locations
agcttgttgacggtctctgtgaaggtcttctattngtctggacaacagcttgttctgagctaaggttgcatcttgagtggtgagttctacaaggcttctctttgttggtgcatatgtgcgatcaagaagaatggcgtgatcactanccgccatgttttctatgagttccattgcctcctccggtgtctatagcttaatcttccctcttgcggatgcatccaatatttgctttgattgtggtcgcaggccatctatgaagatgtatagttgcaccgattcactgtacccatgtgtaggcatcttcctaagtagtccatggaaacggtcgagtgcctcgctgacggattcattaagaaatcgatggaataaagagaattccatcttnccttcagcggtctttg

SEQ ID NO: 176993 - DNA, 411 bp, Glycine max
  unsure (1)..(411): unsure at all n locations
tctattgcaggaatttcatgccacaccaaccggtggctatataggagtcacgaagaccttagcaaggttacaagagaacttcacgtgcagctcaattcatcaggatgttcgcagattcatcgaacaatgcctcgattgtcaacataccaattatatcactaggaaaccagttggactacttgcacccttccctctaccaactcgaccatgggaagacttttcactcgatttcattgttggtttaccatcttactgngggtatacaaccatattggtggttgttgatagattnttgaagggcattcatttgggtcttcttcttccacactatactgcgtaccaagtcgcaaacctcttcctggatattggttctaaactgcacgacatgcctaagagcctagttntcgatag

SEQ ID NO: 176994 - DNA, 431 bp, Glycine max
agcttcaagaaaaatggcctcaacttatttcttatttctcataagaaattctatcaatagacctccaatctttaatggagagggttaccactactggaaaacccgaatgcaaatttttattgaggcaatagacttaagtatttgggaagccatagaaatagggccttatatacccaccacagtggaaagaattacaatagatggtagcacatcaagtgaaagcataacaatagaaaaacctatagatagatggtcagaagaggatagaagacgagtacaatacaatttaaaagccaaaaacataataacatcagccctaggtatggatgaatatttcacggtttcaaattgtaagagtgctaaggaaatgtgggacactctacaattaacacatgaaggaactacagatgttaaaagatctaggataaaca

SEQ ID NO: 176995 - DNA, 405 bp, Glycine max
  unsure (1)..(405): unsure at all n locations
tctagccaaatggacttaccttgaattaattcctttgatagcccttttgagccttgtttccctttccttgttttgaagctcactacaagccttaagtgaaaaaccatgatattaccatatccttaaggaattttggagctttggaattgttttgggaataagtgtggggggtttttgtttcattggacaacttgttttgttgactatgcttcatgatgtattttgggtcatacttgatgtacattgtatattggttaaatgttggacatgctgaatgaaatgttgtttctcaaaggtaaaaaaaaaaataaaaaaatcaaaataaaaaaaaaatcaaaaaaaaaaagagagaanagcaataaagttgagtgaatatgatcttaaatggcacaagaatgatgaaac

SEQ ID NO: 176996 - DNA, 388 bp, Glycine max
atatcaagccaaatgctcaaggcttgcccaagttttatgtatgctggacccaaagatgtcacaatttcacgtaactcaatagccctagcaacttcattctggttatggaaagaagacaaaagaataaccaaaatgtattctcaaaatttgcatttgtgaacaaagactatgaaatataaagaaactgttactattttcagagaagctgaaatatttatctatagtccatacataacaaaagctcaagccataagctcttcagtacagaactacaacacttctgtatgcagccctatctattcattatttagatatataacaaagatgtacaataatacttacataattcatgatagtattgtatatagctgattatatactactggat

SEQ ID NO: 176997 - DNA, 416 bp, Glycine max
  unsure (1)..(416): unsure at all n locations
tgccaaagtgaaggctcaagtttctgaagtcaagggtgttatgatggaaaacattgaaaaggtaagacctatacaaaatgacattgtatagaggtctttaacagagtcgatgccatcatccatcaaatatatagtactaatttggattgaaaatttacattttctcgtaggttcttgatcgtggagaaaagattgagctgctcgtggataagactgacaaccttcggtcacaggtttcattttcttctttattcttttagatatatttttaatctaatttacacgactttgtgttcattttttttttatttttttgttaaatatttcttacattatttaaatttttggtgttagtatatgctgacatcattagntacttggttttaatttctatctcaacttgttatgcgatgact

SEQ ID NO: 176998 - DNA, 406 bp, Glycine max
  unsure (1)..(406): unsure at all n locations
agcttgtagccattataagagaatgagcatgtgattagaagtatgactgataatgttagtcagtttgtcaaattgattgtgaaggaatgcattaatcatatcctggtgagagtgtgatccttaaattttgagagaaacgactataatttagtactaatttttgcgtgaatctctaaagtatggactaaatgtatgaaactgaggatgatgaaggccatgtttaattgtgaaagccacttggccaaaaagttgaccatgtgcttgaatgaattattccttgtacccagtttgagctgaatgaattattgattgattgaaccctgagcctatacaatgttatctcctaccttgacttangtngcaggagagcatcatccacaggaagcatggttcanagcaaatttgt

SEQ ID NO: 176999 - DNA, 408 bp, Glycine max
  unsure (1)..(408): unsure at all n locations
tttanatatgtatacactnttagggatcacaaacttattaatactgaccagagatgaaagtaaccctcaatagcagtcaattcacacaacataacccacaggacagaagattaagacatggtgtgaaggaacttaccgtaggtttgagcaattctataatttcttgagcttgccaaagccttatgtcaacaatattagcaagtaaatcaacctcaatcaaaatgtgggattgctcattgngatgctgcctggtcttcctcttaattttttcttcctttacgattgaaaggataataatcttagacattacacaagaataatatatagatcaataaaaataagcatcatatttatttcacactttntaatattagacctagaaaggtcatatcaggccttcattacctt

SEQ ID NO: 177000 - DNA, 453 bp, Glycine max
  unsure (1)..(453): unsure at all n locations
agcttaatcttctttaagaatcttcttattgaagcttctcaaggaggtgagcttagttatgagaggggtgtgtgtatctaagctctagcttctcaaggaagttttctcaaagaagcttctcaaggaagttttctcaagaaagcttctcaaggaagctacctagtctataaatagaagcatgtgtaacacttgttgtaactttgatgaatgaaagtcttgtgagacacaactcaaagttcaacttctctccctttttcttccttcaatttcgtgctcccccctctctttctctccctttntcttttcctccattgaagcatcctctccaagcttcttatccaaagctcatcttggtggtgaagctccttcttccatggcttattccttaatggatggcgcctcctctcacctcttttcctttgtcttccgctgcatctccatggtggaaaatca

SEQ ID NO: 177001 - DNA, 439 bp, Glycine max
tgacactatgaaactcagctttataggtgaaatcaagtgcagccatttcccttagagtcctctcacgaggtggaggttgtgccatgttctcagaatgtgcaaaatcagaatgctcaaaattataatgctcaagatcaggatgttcaaaatcaccaataacagaatgcacagattcaccagttatggaatgctcagaatgatcaaaaggtataaaatgatgcctaactaatctatgaaatgtcctatctatctcaggatcaaaggtttgtaagtcagatggattgcctctagtcatacactacattcagcatgcacacaactagttgccttgtcatgtaaataaaggtgtaggtttgaactacagctaccctcaaatgatatccaaatgagttgaaattttgtgagcaaccttataaaatgatgagaagatagcacaaaa

SEQ ID NO: 177002 - DNA, 448 bp, Glycine max
  unsure (1)..(448): unsure at all n locations
agctntataagtgcgggtctgggagacttatgtcaagtgttcncgatatgtgaagatgatgttccaagtacttcggatttggtccgaccatgccctcctgatttccagctgggaaattggcgagtggaggaacgccccggcatttacgcaacaagcataatgtaaaccttgacggttttaaaagctctatagttgggcctaggctttagagttttcgttttgttaaagctttgtgtcttttgtttttgaatntataatacaaggatctttcttcatctgttcctggtctctacccattctcattcatttgcatgtttacttctntttctgaaacggcagattcgatgacgagtcctccgaaggtactaatacctgggacccgtctatcaacttcgagccagaaatgaaccaaacggaagatgaatgagatgaggatgtgtgactttct

SEQ ID NO: 177003 - DNA, 411 bp, Glycine max
  unsure (1)..(411): unsure at all n locations
tgcttctacaatctcccctttntgatgatgacaacccttaaatcaagaaatacatacacattctttttcctagtcgatcactcacttaatcctacatattctccccctttgtttttgagtttaagctttacttggaattaagttatttaattatgtgagttcttgatttaatccctattttctctccccctttggcatcaacaaaaagccaaagtgcataacaaatataaaacatacataaatgactaatcatacacaagacattcattgaaaaaatctaaaccaatcatgaagcaaaaacatgaataacccanattcaaatataaaccacatagtcttataacatagatcatagatgttcagtcatactaagcaaatagtaaaagaaatactaaatgttcaaatgtcgta

SEQ ID NO: 177004 - DNA, 435 bp, Glycine max
  unsure (1)..(435): unsure at all n locations
agcttgtcccagcgtttatgctagacagttatcaacatgttagctatcatcgccaagtacgaagaagagttgggtctagccacggcccacgagcatagaatcgcggacgagtatgcccaagtatatgcggaaaaagaggctagaggaagggtgatcgactctttacaccaagaggcaaccacgtggatggatcggtttgctcttaccttgaacgggagtcaagaacttccccgattgttagccaaggccaaggcgatggcagacacctactccacccncgaagagattcatgggcttctcggctatggtcagcatatgatagacttaatggcccgcataattagaaatcgttaggaaacttgtatggtctcttagaccttgactagatatgacttctttttttaaaatgagttggtcccatgttcctactccaaa

SEQ ID NO: 177005 - DNA, 408 bp, Glycine max
taaggcttgtttccttgttcaaatcaaatcaattttttgaaagttgttttgttatcaagtccatgcaaaaacatttgaattcatttggtatttgggaaagccattcattgttttcattctcaatgttttcaaaaatccttttgttgtgttttgatccaatcaaaagtaagttttagaaacatcggttattgattctttccaaagcatgctatgcccaataaaaaatttctgtttaagtcccaaaaggagttatatataatctacaactacactaatagaacaaaatatatcaaagcatgcataaactagtcaaaaacataaactcgcgtaagtttccaaacaaaaatccaaaatagtaaataagataataaagtactaaaatttaatacaaagcgataaatgaacata

SEQ ID NO: 177006 - DNA, 434 bp, Glycine max
  unsure (1)..(434): unsure at all n locations
gcaagcttctaaaaagatgtcaatctgatgttctatgcctcttgaaggtggcagtccatgaggaatctccttaagaaagatatctttaaactcctgcaataagggttcaacactaggagaagtagaaatagttaactcattagaattatcagcaaaaactctattgtatttgcaatacagtagatagagtggctcacgagcaagtaacactttcctcacttcacccgcctttgctacacaattaaattttctctcatgtgtatcactctttccctcacgtgtatcactcttctttttcctattcttctttggtgtttcaatcttttttttctcttgttctctcttttctctcattctgatttggtcatcacacacttctttaagggatagaggtttaagaataatattntggtcatggtgctggaaagaaatct

SEQ ID NO: 177007 - DNA, 359 bp, Glycine max
ctctagcagccagaatgtagagaggatatctcttcctcgtgcactagttgtcactccatatgctagacagtggatccctcctgagattggacaaggtgatgtcagatgtgatgcttcagtcccttaactgcggaggctcacaacttatggaggggcgcttcatgattatacatgaaatgctctgcgcggactcaaatacaatactggagattcatctgtgctgaatgtagaattgctgactattctaatgaatcttgcctatgaaatgctatttccttttaggaatggatcatggaatagcgggaaaagaactatcacagtacttctattgcaggggctaataatgggagctctatcat

SEQ ID NO: 177008 - DNA, 432 bp, Glycine max
  unsure (1)..(432): unsure at all n locations
agctcgaaggaggagagttcagctattcttattcttcttccttgcagggtctttgtgttcttgatcccttgagtcaccaagtttaagtaaatgagattcattcttcatcctaaacttgatttgtcttcattctcttgctctagtttctccaataacttgtaactgccattttgtattacccatgaaggaaaactttgaaaaacctaaatattcttcattcttccttctaaatttcgtggagtctacaagaggtaaggggagtctctccaactcttgaaccatgtgcttgttgttgaacttacttgaacatgttgttactttgaaattntcaagcttgctgctattcctgtatatgtgtactgagatattntccttgagctttgatgccaacaatgatctatttgcatgttaaaacatagaattaaccttaaa

SEQ ID NO: 177009 - DNA, 429 bp, Glycine max
  unsure (1)..(429): unsure at all n locations
tgaggaatcatanggaacctctagagacactgctatcatggccagactacacatgtgagcccacttagaggtaagggatgagtttatcgcaattgggattagaatgaacatgtgtagggatccttagaggattaaatttgggtttattttgggatgtttattgaattataatttttctcttacgattataattatgagattattatgtttgatgggtcaattgattccctgatacgaattggttgataaaattgagtgctcttggtgttttcgttcttttaacctatgattttgattactttgattttgatatgattatgtgaaattttttgaggggttttactcctcatgttgtgagaagtatttttgttggacaaatggcctcagttatcttaagaataaggagttgaattaagatacaaaaactat

SEQ ID NO: 177010 - DNA, 432 bp, Glycine max
  unsure (1)..(432): unsure at all n locations
agctttatagcacagcaacacagaatctatttgtccaacacctctccattcaatagagtgttctacgtttgaaaagtgaaatttataatgaagtaaatntgaagcaaactctcacctcacaccagtccataacatccatttagacttgttcaaactggatttacacctaaaatctcaccgaatcagaaattgactcttcaacacccaaatttgccctagaaaaggctctttgtacactttggtcatttatttttctctctagcacagtccaagctttctcataagtcctaaatgacatttcaagctagtattaactcactttaacctccatttaccacagaattcaaacttagccttccaaccctcaaagtctcacgtcttttccactcataacatcacattctcactttctaacgctacgttagttctacc

SEQ ID NO: 177011 - DNA, 427 bp, Glycine max
tgaaccattatctcctttgggttcgcaggttcttccatgcacggaatccagtgatcatctctattacaatgcacccaagagaccatatatctaacgctggttcaatctgaccaacgaccgattctggtgacatgtaaaaaggtgtccctctaaacttgaccttcccatactcagcatttgcatcttctctagtcttggacaacccaaaatcagcaatcttcagttgataccttgcatgatcatcagatgaaggaaagagaaggatgttgtccggtttgagatcacaatggacgactccttttcgatgaatgcaagaaagccctttgagaagcatacgagtgtagactcttacttcactatccgatattggccccttcttgttactaaaccaagaagagaaccataaggagcacactccatgaaaaga

SEQ ID NO: 177012 - DNA, 396 bp, Glycine max
  unsure (1)..(396): unsure at all n locations
tatatcatatcttttattattttatgtattngcatcacactattcaaaacctattttataaaataaatatacaatatgaattttatctttaagttatattttttacctaaattataatttcataaaatgttagtattttattatttataaatatttatatatgtcaatgaatatcttatacctatattaagatatttttattatttattataatagttttttatatttaaatttatttaatcactactttttaaaagaattaaattttataataaagatatatacataattaaataaaatgacaatattttctatttcttaaaatatttatgtatgtaaattattgatatctatatttttatttatattataataaataacatgagtaccttaaca

SEQ ID NO: 177013 - DNA, 406 bp, Glycine max
  unsure (1)..(406): unsure at all n locations
tagacgactntgtttgaaccgagatgactttattattaattggacaagtttttatataatgtagaagaaagtgaatctgagccttttacccctttgaaagacttgtatttaaaaatgttttaaaaatacttttaattaatatttaaatttttattcctttattagtatatatgtgaagggtagagggtgtcacaagagactatataaacaatcttttaaaaataattcaacgggaaactagaaagaaaagtgagccaagaagcctcattttgtttaagtgagctagagaccaaccggcgcaagctaaaaacctctataataggaaataccaacagagtctgctttcaacagaaaaagacaaaatctggaacatgataaaaaatagaaaaatcagcagacattagag

SEQ ID NO: 177014 - DNA, 464 bp, Glycine max
  unsure (1)..(464): unsure at all n locations
agctnttggttatctttgttgtccttggttcactttatatacaactaacaaacttcagaccaagtccgtaccatgtgtttcttaagttacaatcttactcaaagtgcatatcttttgttatgatctttcagagtctaagttgttcacctcccgtcatgttgaattcattgaagatgttctttcgttttcctccacttcaagtcaacaacacatgatccataaccctcaaattcaaaattcacaaccgaatcttccaaatccaacctccaccaattccaacaaacaattcaaattccagcttattatttaatatcaacattgtacccacccaagcacctcaatatcaaccaccttcaaattcaaattccaccttctcacaattccagcttatcttttaatatcaacattgtacccacccaagcacctcaatatcaaccaccttcanattcanataccaccttctc

SEQ ID NO: 177015 - DNA, 381 bp, Glycine max
  unsure (1)..(381): unsure at all n locations
atgctgcgcgtactgatgggtaccatgaggtgtttgctggggtttgtctccacgcggatgttgaagagacggcatgggtatctacttccttcctttntgcccctgttgccccgattcttttggcattcgcatttgcggaggaaacgtaatcaaactttcctcttttcaatcctacctcgattctttccccggcgaacactagatccgcaaagctggacggcatgtaacctactagcttctcatagtagaacactggcagagtgtctaccatcatggtaatcatctctctctcaaccatgggaagagctacttgtgccgccaaatacctccatcgctgcgcatattctttaaaggtttcaccctctttcttgaacatattct

SEQ ID NO: 177016 - DNA, 350 bp, Glycine max
tcttgaaagacatgtcaacaaggaagcataaatatattcatcaagacaacatcatagtggaagagaaattgccgtgttgcgatccaaaagatccttccacctaagcataaagatcctgagacgtgaactatcccttgttcaactacacaagtcaatgtgggaaaagctctcattgacctaagagctaatatcaatcagatgccactctccatgtgcagaagattgggagagttggagataatgcccactcgaatgacattacaattagctgaccgctccattaccacgccatatggagtaattgaagatgtgttggtcatagtgaaacattctatcttcccggcgacttt

SEQ ID NO: 177017 - DNA, 414 bp, Glycine max
tggtccagtgatttgatggatgcatcctccctttggttcctttaagttgaattacgatggatcagttcacgatgctttgaagaaggttgcggttggaggagtctttatgactgttgtgggagagttttatttgcctttgttgcaaaagtcgagttctgctctgtcatccttgctgagatgcgggttatctatcttggcattagcattgcttggaataaaaggatacattaattttattgtagagtctgattccttgaatgttgtgaatctaatttctaagggttgtgattttcatcatccttgtgctacttgcattattaaaagcataggtgagcttacagctgatggagactccctgagttggaggcatgcattgagggaggcaaatgagttggtaaattctgtctaatctct

SEQ ID NO: 177018 - DNA, 415 bp, Glycine max
  unsure (1)..(415): unsure at all n locations
agcttgactntgagagacgannctatcctttctttcactttagngactagtcaattcaattaagaaagagaaatccaaaagtgaaacatccgattgattntttcgctttattttactaaaagatattttttaattatattattattttatctctttttagtttccaacgtggttacggtacgacggaacggtcggatttcattttagcataaattaatggatattacaaatcaaacgatcggtggaaatttattttattttttgattatgagagaaaatgacttaagtaaatgactgaagcacgtcaaaaggggtacgaaaagtaaatgaaacgagaataaaagttcaagaaacaaatggagaccaccacgggtacatagaatgaattgaaaacttccgatttcggtacttaccg

SEQ ID NO: 177019 - DNA, 379 bp, Glycine max
  unsure (1)..(379): unsure at all n locations
ntgagggtgcgcagcccaccatcttttcatagtagagtatcgataatgtgtctaccatcacgattatcgtctccctttccattattgggggtaccacctgtgccgccagatccctccaccttttgggcgtgttctttgaatgaaccgcccccctttttgcacatgttctgtagttgcatcctatccggaaccatatcaaaattgtactgatacggcctaacaaaggcaaccattaggtccttccaagaatggactcgggaaggttccaagttagtgtaccaggtaacagctaccccagtaagactttcttggaaggaatgtatcagcaattcctcatcttttgcgtattcccccatcttctgacagtacatctttagat

SEQ ID NO: 177020 - DNA, 264 bp, Glycine max
  unsure (1)..(264): unsure at all n locations
tcatccaagcatnttcatgcaagcgtcatcaaagtaaaggggtctttccactccttgaaccctaaccgtgatgcctttggaagccaaccttcattgcctagcgttaagaagttcaaatattcgcagctatagtcttggctggaactggaggatacattactccatactcctattttcgcgaaaatctaaggttaaaaaagacgtctttgggcgtcaaaacttagggttagccctaaatnccactcaaatcggagataaggatat

SEQ ID NO: 177021 - DNA, 403 bp, Glycine max
  unsure (1)..(403): unsure at all n locations
tgtcgggttcagtttcaattacgcgcttgnggcatcctatggactgagagaaaaggctcaggtcatcaaatattgcacatcttttaaagcacaaagcgaggatcggaacttacgttctttttaaaaggctgcgatgagaaaattacagaggacatgaatccctaggggaaaccaagaagaacacacaaaagtagcgacttcctcaattaccccagatcttaagcatagtatcgcttgacaacgttggagttcacgggtgaaggtagctcctcgtcatccatgttggcgagcactagggcccctctggagaaagccctttttacaacgaaagacccttcgtagttcggggcccactctcctctgttgtctttcagagcttggcagactntcttcagcactaagt

SEQ ID NO: 177022 - DNA, 394 bp, Glycine max
  unsure (1)..(394): unsure at all n locations
agcttctaaactntgtacaagaatgaagctctgataccacttgttagacaagtggcctcagatatcttaagaagggggggttgaattaagatattccaaactgtttcccctaattaaaaatctatttttctttttacttaagttatgaattcccttaatgacaatcttcttaaatattaattcaaatgaagcaacttgaatatgaatataaagcaataataaataaaggagattaagggaagagaaaatgcaaactcagttttatactggttcggccacacccttgtgcctacgtccagtccccaagcaacccgcttgagagttacactaacttgtaaattccttttacaagttctaaacacacaaggacaacccttcctttgtgtttagagat

SEQ ID NO: 177023 - DNA, 408 bp, Glycine max
  unsure (1)..(408): unsure at all n locations
tgtagaatggctagacatgatacatgtcagggtttggtttggctcatggataaaagggatgccccacattatttccatgacacaaatgcaaaaatgatgatttggaaattttatgcaaaactggtcatgcatgcacctatgtggacactcaagtgtcaaatttttatggtcatgtgatgctagggctcaggattcatttcctctattttaaatcaacccaatgtttccaaaatatgttcttttatcaatttgtgcattcatccgagtccatttcgggcgtccggngaaaacttcacagcattcacccttcaggtgtatacacatttttttcaaaaactagttatgatcaactgaattttttcaaagaaaagttggaaatcatctcttttcaaagcatgtcggttttta

SEQ ID NO: 177024 - DNA, 380 bp, Glycine max
  unsure (1)..(380): unsure at all n locations
agcttgtggcaaactcagaaagtttgtgttgtttcaatggcgcctganaatgagtgaattaaaggcgcaaattattcattctgagcgaaaactgagaattaataacataattaaaaatcttatgacttctatcaaagacggttttataaaaaccatcgttaacggctaaaaatagttggcattaatttcaaaaatgccaccaaatgttgtactacatcgatttttcaatgaccgacgtagatacaacgacgcataaagacgcttttctagtagtgaaagaaagaagacaatcctatacataaaaaagagagaaagttaactttgaacgttttatggttttaaccacaaccacaacattctaattgactttgttttcatta

SEQ ID NO: 177025 - DNA, 411 bp, Glycine max
tagctacacacacccttctaataactaagctcaccttcttgagaagcttccttgagaaacttcttcagaagcttccttgagaagattcctagagaaactaaagcttagctacacacacccctctaatagctaagttcacctccttgagatgagaagctagagcttaactacacacaacccctataatagctaaactcatccccatgccaaaatacatgaaaatacaaaaaaatccctactacaaagactactcaaaatgccttgaaatacaaggctaaaaccctagactactagaatggccaaaatacaaggcccaaaagaaggaaaaacctaatttaatatttacaaagaagagtcgacccaaccttggcccatgggctcagatatctagcctgaggttcatgagaaccc

SEQ ID NO: 177026 - DNA, 428 bp, Glycine max
taactttactaattaaagttttctctgactgcagccatacaagatcagaagaagattcaaaaagaaagccaaattgtcccaaacaatgctctctcaagtaggatcaatatctgaaaaatgaaatgttaaatttagaaatctaagtaaatattgattcctaattttttaaatgttggaaagacttggaagacacaaattgcattagaatagacaatgcaaaacatatagtgagactgagacacattagcagcgtttcctcaactcaaaaattataagaatcagaagtcaagagtatgttaagagtgtggtaacatactctaacaagctttgatcaaatgactaatattaatcggcaaagaagatatttatcagatagccaaaccaacttcactattcctacttagaaattccaataatctatattacct

SEQ ID NO: 177027 - DNA, 405 bp, Glycine max
  unsure (1)..(405): unsure at all n locations
tgggtgatgttgcgcgtactgatgggtaccatgaggtgcctgcggnggtttgacccatgcgggcgttgaagagacagcatgggtatctccttccttcctttttgcccccgttgtcccgattcttttggcattcgcactcgtgaaggaaacgtaatcgaactttcctcttttcaatcctaccttgattcttttcccggcgaacactatgtccgcgaagctggacgacatgtaacctactagcttctcatagtagaacactggcaacgtgtctaccatcatagtgatcatctctctctcgaccatcggaggagccacttgtgctgccaggtctctccaccgctgtgcgtattctataaaggtttcgccctctttcttgacatattctgcagctgagtgcgatcggga

SEQ ID NO: 177028 - DNA, 340 bp, Glycine max
tactttctataccccctgttgacgtgcttaagccattttacttaagtcatttctggcttaacttaaaaataaaataaatgtccaccgaacgtttgaattgtattatccattaacttcggttaaaataaattccgaccgttcggtcgtgccgtaaccacgttggaaatcaaaaagaggtaaaaaataatgtaataatcaaaaagacatcttttagtaaaataaagcggaaaatcattgcgacgttctctcttggggattctcattttaatcgaattgttaatactaaaggacactacgctaaaacaactcgctagccagctctccacaaaatagttttgag

SEQ ID NO: 177029 - DNA, 407 bp, Glycine max
tgcatgatttacattctccccctttcttaagcaaattcttaattcttcttgacatcatcaaaatcttcatgatttacacaaatagttttgtctagttattttgctagaagtataccaattttatataccttcaaatttgcacatgcatttttcctttctaattaaaattatcttaatctgttgtaattaatggtaaaatttattttcttaatctattgtaattaatattaaaatttaatttaataattaatatttaaatgatagattaaatataaataatacataaacctcttatttttatttaatatatcatttaaatatttatttattagataaattttaccattaatattaattacaatcatgctaatatatattatttttaattatttatattttttctgatg

SEQ ID NO: 177030 - DNA, 454 bp, Glycine max
acctctaatataatgttcgtctctttcggcatatgcaaactacaccaccttttgtttctacgctagctagcactgtcttggatgcgtaccaggtagaacttatgccaattaaagctgcaccaattttaactgtgtctctgctaaattggcaccaacttattaccccctatattaaagacaaaataactccatctacttcaatcaaatattccttctttcatgatctttctttcaccagctagctatgcacccattccaaagttaatttaagttgatactgtaggttggtttcataattaatacttgtctgggtgtttttaagaaagattctttatctaaggaataatcgatcttgtaaagagagttcatataatttgactatattgtatatattcttaattagttcaaataagaatttttgtgtggaagaaatcgtgatcctaattataaatat

SEQ ID NO: 177031 - DNA, 426 bp, Glycine max
  unsure (1)..(426): unsure at all n locations
tactatcttaacacgtgaaccanacgttntcatgtacatttttttagcgacagtgcttaattaagtgcaacatattgctttggaagcaaggttacgatcaccggaaacaacggtgtctcttgatcggtatcaccggtttttttctgatggatttttttcaccatgatttcattcaaattgacaaattctagagcatgacttagtgtggagagaccaacttacatatttgtagggagtttgggccttggtatagggcccatcgccaactggtaagcctgttaccataaatattatcctacttttatgatggaaaggaataattgtccaaaataattatgtgtagagcaatgccaatgccaatgccatgcgtcccanagtggaaatcaactaggatttgcatttacgaaatanaatactgatttgatg

SEQ ID NO: 177032 - DNA, 463 bp, Glycine max
  unsure (1)..(463): unsure at all n locations
agctnttaaaattattctcgcctctntcttcttattgagatcaaggacagttggttgttgataatacagttttaaaggtgttttccaatgtttggaatttattggattaatgtctttttccgatactgaacctatttcaattgttttttctaaattttggtcactatcttcattaatgaaattaattaatttggaggtgcttcttgttaccatttttgaagttccttttgaaggttggggagtttcaaggatgactctaagtaaactatcaagcttgtttaataattcactattattgtcacctactccttctataacggacttgtttttccttagctccctaattgtttgttatccttgtcactaatcttgaaagggttgaataaaggtttctctatggagatatttgacggagatccttcaagagttttctgcttacgaattactctttgttttgatggac

SEQ ID NO: 177033 - DNA, 429 bp, Glycine max
tgaggtccctcattgcaaagatgtttttcaagatactatactcatctggcacttcaatattcaaacttcttgcatgatcgagaagagaggggaaagcaacttcaaacccgataggcatatgttctgcattttcatcctgaagcttgtacaaattctccttaaaaaatgacattcctgttacatatgaatgcatatatacacaatagaaacattaaattaacataaacgtgctgataaaaaaataacatttatatcataatactttactatttcccggtcctcttcttttactatggaatagaggtgtgaaagtattgcagaaaagaaatgattaagagtatgtatctaacaaaagaaatgattaagagtatgaaaatatctgggttaaaaaaaaaagagtacgacaatatcacagtcagcaaggaattc

SEQ ID NO: 177034 - DNA, 151 bp, Glycine max
aaaatcaaatacaagaatgcatcatgtgaggggcccaaaccaaacttacataaaacaatatctatagctaagaagatcaaatttttcttctaaagaaaaccttttaattaggtaaactatctcttcaccaataaaactcaccttatgaata

SEQ ID NO: 177035 - DNA, 421 bp, Glycine max
taacaaaacacatggaaatcaaattattaattgataaatgaagtcattcactcatgccatactccttaaaataaaataaaaaaaaaaagagtagaaactaaagctgtacagaccatattaactaaaagaaattcaagattgaatgatacataaacaaaaagcaatctagcatcaactgtcataaacacagattttatccaaatagaatacacttatacacccataatgagaaatgagacagccacaacctaaagtcccaaactaattgagttccaattctatcagcattttatacaacacacaacaatcccttcaattattatcactcaaaaaatcttataaatagggaaaggaaacagggttgtacctgtggcaccatgagcaaaatgacacttattgccaaaggggcaataccctgtca

SEQ ID NO: 177036 - DNA, 439 bp, Glycine max
  unsure (1)..(439): unsure at all n locations
agctntgagccaaaatcctgacacaccatatattttgtcccanggtgagaatgtcaattcttaccctcggaagcaaaaaaaaaggggagagggaaaatttccaatcaaagaggaagcataaaatgagagaaggaaaatttcccatcaaaggaaaaaaagagaggaaagggaattcccaatcaaagagtgggagaaagcaaaaagaaaagaaagaaaattcccaatcaaagaatgggagaaagaaaaaagagaagaagacagggaagaaagttcccgatcaaaaaanaaaataatatgcagaaaggtctttggaccggacaatatctgaacaatacagaattgtcaccaaatgaataaaaagaatgaaagggaaccatgacctanaatggtcttccccctttagttgccacgcaaaatcttgtgcgctaacaaacctttt

SEQ ID NO: 177037 - DNA, 430 bp, Glycine max
tataagaacaaaattgcctcaatcatttccaaatatgcatgtgaattaggatgcatcaacaagaatcaagccaaggctattgtgcaagcaatcaatggggcaaaacacaccaaatgattatgatgatggatggctcaaattctcacaaaggtaaaatcatcactttcaaattgagctttcaaaactatcatgacatgtagagaagaatcaaggatttcaagtcacaaaatgtcaagaacttttattttcaaaacacttacccatttcttgaacatatcctataattcaaagataaacatgcaaagtcgtacgtgcacacaaattgacccaaaatattaaactaaaaatccgacgaaactaacaacattaacaaattaacacaactaacaaattaacaaaaccaacaaaactagcaaaaccaaagaacact

SEQ ID NO: 177038 - DNA, 404 bp, Glycine max
  unsure (1)..(404): unsure at all n locations
gtcacctgccgcatgcaagcttgtcaanagggaagcaagttaaatactcttttcanagtaaaaacgttgtttctacttcaaaaccctttgaactacttcacatagacttatttggtgcctctagaactatgagtttgggtggtaattactatggcttagttatagtagatgattactcaagattcacatggactttgtttttgaaaaccaaagatgaagcttttgatggtttttgcaaacttgccaaggtcattcaaaatgaaaaaaggtcttaacattgtttcacttagaagttatcatggaggtgaatttcaaaatgagtctcttgaaatgttttgtgaagaaaatggaattcaccacaacttttctaccctaagaacacctcaacagaatggtgtcatgga

SEQ ID NO: 177039 - DNA, 386 bp, Glycine max
tgaaggtgtgtagtccaccatcttttcatagtagaatactagtaatgtgtctactatcattgttatcattttttctccgtcattgaggtgccacttgagcttccaggtctctttacctttgggcgtattctttgaaagatctgtgcccctttttgcacatgttctgttgttgcatcctatccggaaccatatcaaaattgtactgatactgcctaacgaaggcaaccattaggtccttccaagagtggactcgagaaggttccaggttagtgtaccaagtaacagctaccccagtaatattttcttggaaggaatgtatcagcaattcctcatcttttgcgtatgcccccatcttccgataatacatctttagatggttcttgggg

SEQ ID NO: 177040 - DNA, 400 bp, Glycine max
agcttcattgcttcatgatgatgaatcatgattgattcaaggtgttttgatgataacaaagatgatggcaaaaagcccatgagaatgatttcaagattgagtcaagaacaattcaagaatcaagagaaagattcaagagaagtttcaagtttcaagttttcaagaatcaagaataatcaagatcaagattcaagactcaagattcaagaatcaagaaaaggctcaatcaagataagtacaaaaaagtttttcaaaacattgagtagcacatgaagttttcacaaaagcttttaccaaagagtttttactctcgggtaatcgagataatcaattacccgtttactgtaatcgattaccaatggcaactttttgttttcaaaagctttaactggattataac

SEQ ID NO: 177041 - DNA, 407 bp, Glycine max
tcttctatatatagacttcatcttcaagtatctattgtcttacaaccggtggattcttcacggttcttcgtctgaggtcttgaaactgttagagcatttaatgcttgcattaaatgtacatcccttttttcatgcaaattccatgcttgataggttggcatgtcttgtacttcagtaagaaagtcacttcttccatcataataggtctgcactagcaaatcatgccttttgatgaagatcataactttcagactgtagacttcatttattcttcatagaactttgacaaatcccaggagaatgttttatgcaagagagaatcttagacacagattattaaatgacgatcttaaatgcactccttaatgatatgctagattgtcttatatggacgtatgtttgaaaac

SEQ ID NO: 177042 - DNA, 412 bp, Glycine max
  unsure (1)..(412): unsure at all n locations
agcttgttgacacctttctccggccaatttattggtaagnttcctattgttatactcaagaatctcttgctttgcaaatgatctatatgtttcacaccccatacatttgggtaactcattgatatttaatacaaacttttattatgcagattaacagggtgaagctccaattatgattaaaaaacagcgtgaaaaaacatttaagaaactacatttaagttttgtccatggaattaaactttcatatttgtcccttaaattataagcaacaatcactctaatcctgatttttttaaagggaaaaatatgcggacacctttacagactatgtctctttatatctcttatcctatcacagtatatattttcagctatgatgcctacacttttctctaggtgtcatttagctctt

SEQ ID NO: 177043 - DNA, 422 bp, Glycine max
  unsure (1)..(422): unsure at all n locations
acagcttcgatntaatcattcatgggtcccacccaagctagcctcttcgccacactgatttatgtaagcaaagtttgatgaagaccaacttcctagcataatgggccaaggaattttcagaagaccaactaacaactttgcttttattatttcaatgtttttaaagacctttatgacttgggccgtgagatctagatttgatttggagatggtgttcaagaagccccacatgattaagctctttttaggtgccaggaagtaaaattgttattgtatattgattttgatttgattaagggctacaaaaattataaatgactatatttctagttgttataatttactaaaccgctattaatttatgaggatcccaatctctgacattagtgtgattaaatgaactaaaccaattcatatcatgt

SEQ ID NO: 177044 - DNA, 452 bp, Glycine max
  unsure (1)..(452): unsure at all n locations
agctttgggtggatggtgtagatattatttgttaattctcaaatacaataacagatcatggtctcattgaagtacaaacccataccttccaagttctggatgtcgaagaagtgttcaatatggacgattacttcgttcttagtgtgaattaacattgtctcaatcttaggaatgtgctcttcatacgatgaggcatcacttccacttgacattgttggaaagattaaagcttttttggatagggtttttgtttaaggtttaacaacggttgggagagagaaagagtttagggttttcttcttcctcttcattattgccattggaagatgttgattcattgtcatcccaagtgatatattccgtcttcttgtggctgaatgaacccttantctttttctcttattggtgcttctcttggagacgggaaagttaccttaatatgacctatcttt

SEQ ID NO: 177045 - DNA, 412 bp, Glycine max
tgttggtatgtgatcaaagaagatgtcatcttatctatctctgaatttcattctcatggttccattcctacgagtgggaacacgtcatttctagctctaattccaaaaaaggagaacccacaagaattaagtgaatacatactcttattaggtgcatttataaaattattgatgaacttctagcaaagagattgagatgtattataggggtgttggtggatgacaggcaattcacgtttctgggagataggaacatgttagatggagtggtcattaccaatgaagtgattcaagaggaaaatcgttaagttaaatcatgtgtggtgttcaagacaaatcctggagtggtcattgtcaatgaagtgattcatgaggcctaccagtttggggccgatgcttctagactaactac

SEQ ID NO: 177046 - DNA, 408 bp, Glycine max
aatatgcacgagaaccaagaagcatgaacaagaatcaagccaacgctcttgtgcaagcaatcaatggggcaaaacacaccaaatgattatgatgatggatggctcaaattctcacaaaggtaaactcatcactttcaaattgagtcttccaaactatcatgtcaggtagaggaaaaacaaggatttcaaatcacaaaatgtcaagaggcttttcttttaaaacaattacccatttcttgaacatatcctataattcaaagaaaaacatgcacaggcgcacatgcccacagaattgacccacaatattaaactataaaccgcatgaaactaacaacattaacaaattaacacaacttacaagataacaaaaccgacaaactaccaaaaccaagaccactcccccccccc

SEQ ID NO: 177047 - DNA, 398 bp, Glycine max
  unsure (1)..(398): unsure at all n locations
ntctaaagttntttggtttttccataccttgaaaaaaaaaagtgtgctattcatttttctttctcttctccctttgctaaaaagaattcgccaaggactaaccgcctaaattctttttgtgtctctcttctcccttttccaaaagaacgaaggactaaccgcctaaattcttttgtgtctcccttctcccttgtcaaagaattcaaaacgacacagtctgagaattcttttgattcttccctttcccttatacaaaagatttcaaaggactaaccgcctgagatatcttttgtatcccccttcacaaagtttcacaggactagccccctgagatctttgtcttaacacattggagggtacatcctttgtggtacaagtagagggtacaactacttggg

SEQ ID NO: 177048 - DNA, 561 bp, Glycine max
  unsure (1)..(561): unsure at all n locations
cacgcgtccaccactactcacatanaantactatanntgnttntantntaacatnnnnannnaanacacccgacgaagcgnngattgatcccctngagaatcgaanccactcgaaccctgagacactctataaactcacgctcacaacagcaggcggcgcagaatacacatctactgagttcaggtcattttgtgcaacaaatggcacgaaacatcaagtgacagcaccctatactccacaacaacatgggggtggacagagaaagaatacgaccctctgcgaatatgctgagaagcacgaccaaagaaaagggttcaccaacccatctgtggggcgaagcaactgctactgcagctcatttgtagaacagatgtccaaccaagagagtagagcatgcacacccgaataagctcggcaggaatcaaaccgtgtgtgaaacatctgagaacgcttggtccattgtgccccatgcacacacccgaacaattgagtaagaagccagatgacacggctcaatccggcgtcacggccggatatcactaacaaggtgatacaaatcg

SEQ ID NO: 177049 - DNA, 295 bp, Glycine max
  unsure (1)..(295): unsure at all n locations
tctagtgaaggtctgagagaccatacaagtctcctaacgatttctaattatgtgggccattaagtgtatcatacgctgacaatagctaagaagcccatgaatttctttgggggcggagtaagtgtccgccatcgccttggccttggctaacaatcggggaagttcttgactcccgttcaaggtaagagcaaaccgattcatccacatggttgcctcttggtgtaaagagtctatcagcncttctctagcctatttcttcgcgtatatttgggcatactcgttcgcgaccctatgc

SEQ ID NO: 177050 - DNA, 374 bp, Glycine max
  unsure (1)..(374): unsure at all n locations
tattgtttaactactctntgagtgtgtgattctttatattccataaaacattgtgtttttgaaagtcatgagtggcttagtgaattggtgctggcagcttgaacatgcgaacttgtaacaattactgggaattggtcactacgaattttgagctganatttttactgcattntctagacatttggaaaaataattagaaaaaaagaaccaagtgatttggataaaaggaaaaaataatcataatcacacaagttggcgggaaaatcagtgtccaagataaatagtgaaagggaagtgtgcttgttgttttggctcanaatttgttctataattggtgcctattttataccaatcttagttctgacaattcaatt

SEQ ID NO: 177051 - DNA, 360 bp, Glycine max
ctagataccaacccaacctttgtgcccatgcttgtttcacgtcggaccctagaacaaggacacagaaaaggaaaaggccgaaacacccctaaaccaaattccccaccaaaattcaacttcctaaaagtcctattggcccatgattatgcatgttatcgttgatttgatatgaaatgatttgcaaagtcaaatcatgacatatctatggtttggaattaagatgatacacttgcatgagtgagattttatacactttgagtggctttcctctatttatatccacccaaagtatcttcttaatgccttttgaaaatgaaatgctaatatcccaacatctcatttgtgggtatgagacattct

SEQ ID NO: 177052 - DNA, 387 bp, Glycine max
tctcaaggaggtgagcttagttatgagaggggtgtgtgtagctaagctctagcttcttaaggaagttttctcaaagaagcttctcaaggaagttttctcaagaaatcttctcaaggaagctacctagtctataaatagaagcatgtgtaacacttgttgtaactttgatgaatgagagtcttatgagacaactcaaagttcaacttctctccctttttttcttccttcaatttcgtgctcccccctctctctttctctccctctttcttttcctccattgaagcatcctctccaagcttcttatccaaggctcatcttggtggtgaagctccttcttccatggcttattccctagtggatggcgcctcctctcacctcttctccttt

SEQ ID NO: 177053 - DNA, 466 bp, Glycine max
  unsure (1)..(466): unsure at all n locations
agctntatcaaaattaggcaaacaaagattatgttcattcataagcttatcttttaataaattaaaagttttctcatgcacatcagtccacttgaacaccacatccttttttacaagttcatttaaaggtgcagcaagtgaactagctaaaccacgaaaacttcttacctcattagcattcttaggtacaggctattccctaagtgcctttactttttcttcctcaacacttattccttttgagctagtgacaaaacctaagaatacaacaaattcatggcaaaaagaacacttttaaagattggcacacaatttattttctttcaaaacattaaaaataacatgtaaatgatcaacatgttcctctaatgttctgctatagatcaaaatatcatcaaaatacaccacaacaaatttcccaatgaaagcatgcaaaacatggttcattaacctcatgaaagtactg

SEQ ID NO: 177054 - DNA, 430 bp, Glycine max
  unsure (1)..(430): unsure at all n locations
tacgaacccaaactttntaaacttcaatgcaagaaaacatactcatgactaggaacccaaagtttggttttaggattagaaaagcatgaaaatagggacttgtttgtaaaaatttgggctgccccatgattggcactttgcacctaagtaacgtgggagatgcttttcaatggtgtgtagataagtgtgtaaatatatatggcataaaaatatgtatatatgtgaatatatggcatgaaaataccttgcaaagtgaatgaatagtaaataatgcatttcaaaaatgtatatttatggataggtagcgtaaaaataccttttaaaatatgtatatttgtggataggtagcataagaagcctttcaaaaaaaaaaatgtacccatgccaaaaatggcacaagaatgcttcccaaatgaatatatgatgtgga

SEQ ID NO: 177055 - DNA, 105 bp, Glycine max
cgcgcccatccccttctccccccagacgcacttgatgatcatagccgccccaaaacgaccgcccggccacccaccgagaaccgaggaccatcctttcacaccccc

SEQ ID NO: 177056 - DNA, 433 bp, Glycine max
ctcagcttattaagaggcttctagcacactccagacatcttctcatagatcccaacggtcagatcatggaagcgtgttttgtgaagttgcagaccacatttcgagacgatccaacggttaatgaaggccaggaagcgtttttaccgaggcagcttcatgtagctttctctagaagcttcattaagaggcttcctctagaagcttcctcgtggcttctttgagaagttttctcaagaggcttctttgagaagctacatccttatctatccatccctctattaactaaattaacttccttaaaaataattacggatgaaaataacgcaacaaataatcaaacatcaaacataattactaataatatatagatatatatatcagggtgttacacatcatatattgagacgctcgaaattgaacaatggaagctctc

SEQ ID NO: 177057 - DNA, 368 bp, Glycine max
tgtgggtcccaacagacgcaaatctgatcatcctactatgacgaccgagaaaactggtgcacatgaagagggtgagaaagagggagaaacccatgctgtgactgccattcctataccgccaagtttcccaccaacccaacaatgtcattactcagccaataacaaacctcctccttacccaccgaccagatatgcataaaggccatccctaaatcaaccacaaagtctgtctaccgcacttccaatgacgaacaccacctttagcaaaaccaaaaacaccaaccaaaaatgaattttgcagcgagaaatcctgtagaattcaccccaattccagtgtcctatgctgacattcttccatatctacttga

SEQ ID NO: 177058 - DNA, 424 bp, Glycine max
  unsure (1)..(424): unsure at all n locations
ntgcttgcttctacagcagcaaagtttccctaaggtacctacaatttttacgtgactttgttcagtgcagcacatatgcatggggacctgccgtgcatcttaatccaaatgtaggcatgggaacgatgcacgactttggctccaaagaggacttctcccgtaataaaaaataaatcactcggacacaagttacttattttaaaaataagatttcatttgaaaataattaataatgtaacgcgagtccactgatgatttcatatttttttaggtggttgcaacgtggaaatcagcatattggcaatgatgatctaatagttttttgttgcaaattggatatcatgaaacgacatgaggtaagaagatcgtaatgtattcgttaaacaataaatacaatgtcatgtttaagtgaaaattaacaatt

SEQ ID NO: 177059 - DNA, 320 bp, Glycine max
  unsure (1)..(320): unsure at all n locations
atcatttcggatgggaaaataaaagggttgctgcaaccaatttggttccatactaaccaccctgtggatccaaagttttcatggaaatattgaatttgactttatctttgttctttgggttttggaacaagatatttgatgtatgtcccaacaaaagtgcaccgacccaacttaagaaacaacatgcatggccttaaatacactaaacaatttaagggatgtttggtttgactggtttttattttcattttcactgaaaacaggaaatggtaataaaaatatgtttggttggattnttgaaaacatcttcagtgaaaatg

SEQ ID NO: 177060 - DNA, 428 bp, Glycine max
  unsure (1)..(428): unsure at all n locations
tgcanagctgaaaggacaaaggtacgtgggtgaagaatcgtggaaaaaggattgcttgaacatctgtgaaagcactgcatgaaaaaagaatggaaaccaacggtcataaatgataaaatagatccaaaaaactgtttttttttttcttataaatattctcttccgatgggacttttgttcaaaacattattgaatacgaaattgaattaaactctttttttctaacaaagattcacaccttaatttattgagttaggagggactaacccttattgctatacccaagctcccataatacgaaataaatcatttttgtaatagagaattaaatagctcaattttttaatgttaaaaataaaatagtgtggatatacctatgcttttttaccgttaaaaatgttttatattttaactatatattatctttt

SEQ ID NO: 177061 - DNA, 401 bp, Glycine max
agcttgatgtcattcagaagacactatgttgatttttttgaagactaaacatgcattgtttatgtaattgtattaattatgcgatataatttgttgtaacccattactaactaattaatattattaagtactcgtttggttaagcaaaaaaattgtcggtccaacaaaaatcatttacgcgtatagcatacatcattgtcataattgacaacacataatgacatgcatgcgtattaaagtttgagcgcgacaacacattgactgacttgactacacattttgaaggaaaaataaacacgaaaatgttcacgcgtgtctatttttttgtaaacaaagttaagcaatcgctcggtcacaaccatctatatatatagcagacacgactaataaatcacacatta

SEQ ID NO: 177062 - DNA, 382 bp, Glycine max
tgaatacaatgaaactcgctagcttagcaacactaagatttactcaattcgctcaagtttcattcgtccaatagattgatagtgttacaagactttattcgttttgtctaagattattctcttgtgatttgacaaccttaacacaaacatcttcaagctttatatggacttcagagcttcgatatgttgagagatcccagccagtcgttatctaatagctttgatgcttgacacgaagccactactgtgtagaaagagagtggggaccataaatactttctgcaacatatcttcagaaaagtacaattcgctagtgtcgcctagtgctcagagccgactttcaacgtacaaatcaaaaaaaatgttaacgacataagacaaa

SEQ ID NO: 177063 - DNA, 366 bp, Glycine max
gccttgaaccggaaatatgtacctgtcgcaagggtctgtgggttgtgctcatgtgccgaccaccatacatacctttgcccttccatgcagcatcctggagcactagagcagcccgaagcttatgctgctaatattgacaatagacctcctcaacctcagcagtagagatcaaccacaacaaaataattatgacctcttcagcaacagatacaaccctggatggaggaatcaccctaatctcaaatggtgtatccctcagcaacaacaacagcaacctgctccttccttccaaaatgtagctggcccaagcagaccatacattcgctcaccaattcaacaacagctacagccccagaaacaaccaac

SEQ ID NO: 177064 - DNA, 412 bp, Glycine max
  unsure (1)..(412): unsure at all n locations
ntgatctaccaccaccaccgccaccatcatcttagttttctattatgtttaacattattagtactttgatttctagccatgtatttggctatattattatgacatttgaacaatttagtatttcatttatttgcatagtatgattgaacaattatgaattatgttaaatgactatgtggtttttatatatttgatctattcatgttacttgcttcatgattggtttatatttttcaatgaatatcttgtgaatgattagtaatgtatgtatgttttatatttgttacgcactttggctttttgttgatgccaaagggggagagaaatggggattaaatcaagaactcacataagtaattaacttaatttcaagtgaagcatatactcaaaaacaaagggggagaatatggag

SEQ ID NO: 177065 - DNA, 450 bp, Glycine max
  unsure (1)..(450): unsure at all n locations
agctnggggtagagtaagtactgtgcagttttatatggtcctgacaaaatactcataactgtgagaaagttattgaaacttggttactagctaagaactgaatgtaatctcagtggtagaaacaagccaacataattntgtgtcttatgtactcctacttataactttgagtttgatttttttaaaatctctattaattagaaaaatttgttttcatcgtctgatcgtgcttttttttttttgaaaatctgttatatgtcttatgcaatgtttctttatataacaatcttgttcttttagaagaaagggctttaaaagtttataaaaatacaattcaagccctttattggtgatttgtctttatatattaaaaaaattaaataaaaattcaaagcctaattgtgaaaattaaaccttcaaaaaccaaatatttatgaatcccaagacaaa

SEQ ID NO: 177066 - DNA, 418 bp, Glycine max
tgacacattcttgataacaagacaaacttcatttgcttcttgtttgtgacaactttgttttcatccaaatgattttttgcatgagaatgttttaaataggaaaaaattaattttcatgagaaataaattttgaaaaaatatataatgcacaactaacctggtagaattgttgtctagaaattttcccaaattattataaagtgatatcataatatttagaaattttcttgcgaaaatactgttgtagggcaacaaaggaacaataattatgaaaaatagattcttgtaatttgtttggctcgagaaaagtatatgacatattattaaggttaaggaaactccctattaaattttataaaattcagagttatctaagtattttttatatttaaaaatagcatttcagaataattttagt

SEQ ID NO: 177067 - DNA, 385 bp, Glycine max
tgcaagcttcatactgcatattgatatgttaattcattgttgaaagaccaatccgacatcacttatcaacaagagtccaattcaatatggatacaattaatatgtcttagtctaattgtatgttgaagaaccacctacaactaagggtcataataaaaagagtgcagaaaagcaattgggagaattgaatgattaatttaacaaattgcaagacaagaaaaggaaatcgagtgatttgcataacatttccagtaaagcaatcaaggggagtccgaagggaaagttgatatgaatggctataagaaaggagttgggcagaagatatagcctcgataagtagagggagagtgctagttctctcatatgccatgtgttgtctttttat

SEQ ID NO: 177068 - DNA, 411 bp, Glycine max
tctgaaatatgaagtattaacctatcaaggctatcgttccctttaacatgaccctgaccattctcagaactccgcctaagtgaatgtacctcttgttcgtagtctcttattcctttggcaaactcatcacacaaattctccaaaaggatccgtgcttttctctctctttcaagatttctcaaacaaccagagaaggaagacttcacttcagaaagctccctagccagcttccgatgcaggctttctgaatgctgacgtaacctcctctcatcttctagctcttccctgattgattgaactgcagctttaattctaccatgttctttgttcttcctaataagtttgtcaattgtaatttcctttatcaagttctccacttcctgcctattcatttgattctctcgtagtaac

SEQ ID NO: 177069 - DNA, 316 bp, Glycine max
  unsure (1)..(316): unsure at all n locations
agctttgagccaattcaaacgactatattttttactctgatgtctganngagggccgtgcatatatcgagacgctcgaaattgaatgttgaagctctgagccaattcaaacgacaataacgttttactcggatgtctgattgagtcccgtaatatatctagacgctctaaattgaatgttgaacctctgagctaattcaaacgacactaactttatactcggatgtctgattgagggccgtaacatatcgagacgctcgaaattgaatgttgaacctctgagccaattcaaacgacaataactgtttactccgatg

SEQ ID NO: 177070 - DNA, 397 bp, Glycine max
  unsure (1)..(397): unsure at all n locations
tcaacattcaattntgagcgtctcgatatatgacgggactcaatcatacattcgagtaaaaagttattgtcgtttgaattggctcagagcttcaacattcaatttcgagggtctcgatatattgcgggactcaatcagacatccgagtaaaaagttattgtcgtttgaattggctcggagcttcaacattcaatttcgagcgtctcgatatatgatgggactcaatcagacatccgagtaaaaagttattgtcgtttgaattggctcggagcttcaacattcaatttcgagcgtctcgatatatgacgagactcaatcagacatccgagtaaaacgttattgacgtttgaattggctcggagcttcaacattcaatttcgagcgtctcgatatatta

SEQ ID NO: 177071 - DNA, 383 bp, Glycine max
agcttgaatgaattcttttattgggggttttcaacgtctatacattgccctgattgcgcctgtgcatgtcaagggtcatgtgccatctacatctctcatctttgtggtgactgaagagaccacatcatccatcgtactgttggtgacctcgtcaatcgactctctttccacgtattctgtaccttgtactggacttgggagttacattaactgtgtcatttgtcatctgaacaacgaccttatcatagaattagtgaccatagtgtttgcttttatgttggatgggaaggtgtacgccttcatcccttctgagtcgttagcacaacacgaactgtcttacctgtaaagcattgcatgacatactggaagaagctcagctcact

SEQ ID NO: 177072 - DNA, 154 bp, Glycine max
ctgtggctgacaaatgctatatagcagcttcataggtctaatttaggccgccccctctctccctcgcgggagacattatctatccctgctatctctattctagttgccgaaggtagggccaagaactcttatctttacatgctatttaagcata

SEQ ID NO: 177073 - DNA, 393 bp, Glycine max
  unsure (1)..(393): unsure at all n locations
agcttattctatttatagcattcgtcttgaagtatttgttgtctctcaatggatggattcttcactctactcttcatctaaagtcttgaggttgttagagcatttaatgcttgcattaaatgtacgccccttcttcatgaaaattccatgttgataggttgacgtgcttacacttcaccaagaaagtcattaattccattatagcaagtctacatcaacatagcacgtcttttgatgaagatcaacaattccagaatgtggactttatttattcttcataggaatntgacagatttaaggagaatattttttacaagagaaaatatttgacatagagtattaaatgaaggtattanatgttaggtcaaagcttgaagccctttgtttagtttt

SEQ ID NO: 177074 - DNA, 404 bp, Glycine max
  unsure (1)..(404): unsure at all n locations
tgtaacctggacacggttgatgcccaagatcacatctttttttcgaaaaaggcgtgcgaacgaaagtgcacaatacctacatatattttttatttttatttttatttttatttttattttttttgaggtattttgctacctaaacatgtgtataattttgtgagatatttttgctatatacatgcatatccaaggtatcttactacctaaacatacatatatatattttgtgaggtatttttgctatatacatgcatatctaaggtattttcactacctaaacatacatatatattntgtgaggtatgactaccttacgagcttgtgcttgttttatttaaattcctaggatcatggacaattaggtgtgtcctactatgaccaaagaaacaaaggtgatcaaa

SEQ ID NO: 177075 - DNA, 320 bp, Glycine max
agctttgaaccagaatgctgattctccattaaccttgacccagagtgagaatgcctatccttatcctcggaagcataacatgaaagcgaaggaccatttccaatcaaagaacactagaacgaaaattgtcaatcatagaaaaaaaatgggatgcaaagactttcccaatcaaagagtgggagagagaaaaatatgacagaaatgaaattcctccccaaagaatgggagaaagctaaaagataatatagttctctatcaaagaaactataagatatatgcacagatgtctttgcaccggacaatatctgaacattacagaa

SEQ ID NO: 177076 - DNA, 361 bp, Glycine max
tgcccagagaaggagtccacggaggaaatgcttaccatttctaaagactggagagcggtttctaatgactcctctgtggcttccacatcaggcatagaggatgggcagctcaccaagatgtctttctcgcctgagacgatgaccagatgcccttccactacgaatttctacttttggtggagtgttaagggaacaactaccactgagtggatccacgggcgcaccaacagacagctggacggggggataatatccattatttggaaagtaacttgacaggtgtgagggcctatatgtactgtgagatcgatctctcccctagcctctcggcgggtgccgtcgaacgctcgaaccaccattg

SEQ ID NO: 177077 - DNA, 386 bp, Glycine max
cttcttccaaactttggcttcataaaccttcttttgcccaccatcttttgccttcaaagtgatggtgtacaaggtaccaaaaaccacttgctgtttcgcagttaccaccttttcaaactccaaaaaggcattctgcatagccatttacaattcaataaaaataaaatataattcatatttaccacaaaataaaaagaaaatagaagcccgttcgtggttattgaaattgaccctaccaatctatttattccttgacataatggaaatgcaaatctatcctaacaatcaattaatttttggtgaacaaaattttgggggaggggtaatgccccagtacaagacagaaaaagcctccaagctcaaagaacattcacagaagaacttac

SEQ ID NO: 177078 - DNA, 425 bp, Glycine max
tccacaaaaggcatagttatttccagtttcctaacaatatcaaggaatctcgctagatggcagtctttgtccttcttggaaggtaccacaggatatggtacttccgtagcctcatttgaagctttttctttcttcttctctcttgctttctcacttctactcttttctttcccttctttatttttttcaactttttctttttcttcattttctttttctttttctacctctatttctttttcttggtcatttatttctttctcctcgaccattattggtttttcaccctcctgacttgtcacatttgttacctcttctttctttttctcagtgccatcctttacaacaatatgtttctccaaagccaccttatcctcatcctcaactaccaaatgcttcttgtttcttgttatcacaacattaca

SEQ ID NO: 177079 - DNA, 380 bp, Glycine max
tatttttttggaagctcagagcatgatagtgtgtcgataccattaactggtcacaggttcttaagcacgccgagggcatcaatattgtatttggaaagacccacgagaaggaaaaaactaatacttccatatggaagaagaggtcgatattgcttgatcttccatactgggatgatctagatgtcagacattgtattgatgttatgcatgttgagacaaatgtgtgtgatagtgtcattagcacacttgttaacattcacagaaagacaaaggatggtttgaatacttcccaggatctagtctagataggtataccagaccagctacattcaaagtctgatggtaacaaaatatactcgcctccagctggttatactttg

SEQ ID NO: 177080 - DNA, 426 bp, Glycine max
tcttacatagtccgcctttgcttgaccttctttatgcttaaaaacagaaacattaggcataggcaaaagatcaagaggagttagtgggttaaaaccataaacaacttcaaaaggagaacaattagtggcattatgaacaactctattgtaagcaaattcaacatggggtaaacaagcttcccaagtttttaagttcttcctcaaaactgttctaagcaaagttcccaaagttctattaacaacttttgtttgcccatcggtttgtggctgacaagtggttgaaaataacaatttagtgcccaacttgctccacaaagtcctccaaaaatggcttaggaacttagagtccctatcactaacaatgctccttggcaaaccatggagtctcacaatctcctgttggatcaagtggcctcagaataatta

SEQ ID NO: 177081 - DNA, 436 bp, Glycine max
  unsure (1)..(436): unsure at all n locations
agctntccgcagttgaacaccctagctagctatcttccaccaatttgaatctctaacgtcaaggttctctctgcttttgtcgccgacagattctccaacactctcacctgataccacaatcgtttctcatctcaatttttatgaaaaaactgtttgtagttttagcacgttcagtaattttcgcccgagggggttatttctttttctctttacaaaaaggggggattcttgttctaacgggttattaaaaatttcaataatgaagtgagggattaataattgatatatacttcctctatctctggtcctttattaagtaggtttgatattgtccttgttctcttggataccaaaaatcctgattgggatgtaatagttttatctcatattctttttggggtaatctttatcgctgttcaatgcatacaacttcctg

SEQ ID NO: 177082 - DNA, 427 bp, Glycine max
  unsure (1)..(427): unsure at all n locations
ntgcacgtatcagtcaagtgtatggaccatatcatagccaaagtgctcatcgataatggttccagtttaaacgtgatgcctaagagcactttggagaaattaccattcaatgcttcccacctaaagccgagttcaatggtggttcgtgccttcgacggcacccgctgagaggttaggggggagatcgatctcccggtacagataggccctcacacctgtcaagttaccttccaaataatggatattaaccccccctacagctgtctgctggggcgggcgtggatccactcagtgggagttgttccctctacactccaccaaaagttgaaattcgtagtggaagggcatctggtcatcgtatcaggcgaggaagacatcttggtgagctacccatcctctatgccttatgtggaggccgcagaggagt

SEQ ID NO: 177083 - DNA, 445 bp, Glycine max
catccattttgcttaatggttttcttcacaagctagagccttgtttcggtgcctaatcccagcttccaaagttgctgataactgttaaatatgagttgttttttattataaaaatatacatgaaaatatctttaaaatatttatttaacagttattttttacttaaatattagaaattgatatttttcttatttatggcttgtagatatgaaaaggagggataaaatccaaaaatatgcagaaaatatcaaaaatatgaataaggaagaattttgccatcaggtccaagtccactccaacaactataaaaaaagaatcaagccaagcagaaaagacacaccgagtctcagagcactctaatacacacctaaagtctgagaactctcccttaagaaaatcttcttctctctcatatttgaattccctttttccatcctctttccat

SEQ ID NO: 177084 - DNA, 431 bp, Glycine max
tcttcattgcactaatgctctcccttgaaacagctccttcaggccattttagatgtgatccacgcttgaaatatttttctgcacccttgctacatattgaagagcaaatgaataaaaaagaagttactacatttaaaaaatatatattaatgataggttttatacaaaaggtataaacacttagtcaaataatttataatttaattatattttaaaatatttttaaaatttactaatttattgtaaccactgtaatattggatctttaatggaatcttaaatattctaaccactaataatcagtctttatttattgataagaattaaatccaatatcaaagatttacaatttttccacgtactaagactcatttgataggctaataagcagcctaatatcatacttaaaaaattataataaaaaaatcaaa

SEQ ID NO: 177085 - DNA, 348 bp, Glycine max
  unsure (1)..(348): unsure at all n locations
agctctaagaaannttgcaacatcgtnttggatatttaacaagaacattctatttcttgacattggtaccttggtaattatattatttctcccatctctgatggaaagactggaatctttcatgtgaatatcatagccttttttgagtaattgtcccaaactcaaaatattgttcttcatatttgggacgtagtagacatttgatatgaattcatgtcttgcatccttcaaatggattatgatcttacctttttccttttataggaatattggaattattaccaaattaggcattgccacttactgactcatcaagatccacgaacatgcttctttttccacacatat

SEQ ID NO: 177086 - DNA, 403 bp, Glycine max
tcaaccttcggtggtcctttctgctccaaatcgtgaatgaaggacattttcggagtcgtgaagcgcgtctctacgtgtgggacttcgaaatttcaggtttgggtggacttctttctcctttgattttcgtgggtatggagttttgggagatatgatgggtagtcttgctagttttctgcttcatgatagttatttgtgaagaaacttgttgaaagcatgttgaaattgccatgtttggaagagttaaacatacccattctgttttagggtttttatgatgatgcttgtgatgttcatgtgctgaaattgcttatggaaaactgttagagatgaacggtataattaacctacggttagaaagtgaaaatgtggtgttatgagtggaaaaagagtgaattgttga

SEQ ID NO: 177087 - DNA, 450 bp, Glycine max
gcggcatgccagcttatattttactaaactgcgttgttttttttatatgaaaagaggattttgctatcccttaaggaaagaaaaaaaaaatgaaaatcaggtccttgagtgttgtcagtgaatgactatgagtgcacatgtgagaaaaaattggtcgtgttataaaaaaattcacaaacaacctttaacagtaaaacaaatcatccaacaccgagtgataaaatataaaggtataaagtatattattttattacttaatatatttaataaaataaaataataaaaatatgtttttatcaagtgtggtgtatcactggttctttgtctttctgtgggaataactttgttattaatatacctgtctttatttgaaattaaagaacgaaaaataaaggaaagaacaccgactaccaactctttgtttacctccctgtcctttcttaaaatacc

SEQ ID NO: 177088 - DNA, 414 bp, Glycine max
  unsure (1)..(414): unsure at all n locations
ntaagctctgcagtttatcttattaatagagttccctctagtgtgttaaactttaagagacctcttgatgtcatttctcatcatttcacccttaatcttgtcaatcatttaccaccccatatttctggttgtcatatatgtacattcgcatcctcaccaacaaacaaaattagaatctagagcaatgaaatgtgtttttgtgggatacaacaccactcaaaagggatataaggcctatcatccatctacaaaaagattttttgtatcattggatgttacatttcatgagcatgaaatgttttttcccttgaaaacacttcattcttcaccttataggggaggtgatttggaggtgcagaatcatgatagacttgaccaagatatcaggttatttgatattatgccaacaacaac

SEQ ID NO: 177089 - DNA, 403 bp, Glycine max
agcttataaaaatggatgatataaagaatttgaagaggtcatcagatgacttggtatttttagtttcattttttcccaagaaataacgtgtacctttcgtaaaagaattctgttttcgtccttttgtaaggaaaaaaaaaaaaagagattctgtttgaatttgattaaactattttctaaaaaaaaactattatgaatgataacttttttcttatcttaatattttgttttgctatatattaagattctaactcaaaatcattaaacttgtttataaaataagtatcttctacttccatcccagtaaaaatcccacatgaaggagttaagaaagctagattactttgtgactcttataaatataattaagatgaatattacgaacacatcctatgggtttatc

SEQ ID NO: 177090 - DNA, 292 bp, Glycine max
tagctaataatttccacagtgaatgacttttgttaaattttaatagaattagacattaaagtggttaattacaatctcgaactaaagatttattcatttggtaattatctaaacatggacaatactaaatttcctattcattttatctcatttcatttcatttcagcctcccttccaaacaaaggcaagtaaaaaagggggtttgacatcctaactggataatcgtaacgacaaacaccgcgagtatttacagcttgactgttgtacgtgcttgataagtgcacaacgttta

SEQ ID NO: 177091 - DNA, 382 bp, Glycine max
ggattcttaatcacctgcggcatcaagcttgtaggtaaagtccacgattgtttttgttgatgcaacaatggttagtcgtggctatacgagacatcttgccaaacaaagtcaagttagccataactcgcctgtgctttttcttccatgccatatgtagcaaagtcgttgatcctgtcaagtttgatgagttggaaaatgagaccgcaattatactatgccagttggagatgtattttccccctgctttctttgacatcatgattcacttgattgtgcatctggtcagagaaatcaaatgttgtggtcctgtttatttgcggtggatgtacccggttgagcgatacatgaagatcttaatagggtatacaaagaatctatatca

SEQ ID NO: 177092 - DNA, 401 bp, Glycine max
  unsure (1)..(401): unsure at all n locations
ntgattcctagnaaaaccatgatttctttgttagcccaatcatgttacaagcctaataaagtccgtagtgatccacattgagcatgtacatagcattgactgagatgatgtgcaaagttgggaattttaatattcagttgttataattcaaacacttttaccgagacacttatgggattgagagaaacactagccttgtgggtaaaattaagcccaggaaagcaagcgaattgaggaaagaagggctaattaagaaaagaagactaattgaggaaagaagggctaattaaggaaaatagaatatttaaggaaattaggctaattaaggaaagaatgactaattaaggaaatcagattaattcagaagtccactaatctgcacctataanagaagaagagag

SEQ ID NO: 177093 - DNA, 351 bp, Glycine max
agcttctacttatgtggcagggcgggctttcttcaccttcttgtctccaacgcgaactttgaccattgttcttccttcccgcgatgctccttttcatgtctgcttgagtgggcttatagcctaaaccatacttcccacgattaccttgggtatttatcagtctagttatgccgccattgttttttcctaaacccatcccgggctcataaccgttccccaacataactcgggccatcattaccgctgcatcggacagactatgctgcccaaagagggagtccacagaggaaatgctgaccacctcaaaagactggaaagcagtttctaacgattcttctgcggcttccacat

SEQ ID NO: 177094 - DNA, 416 bp, Glycine max
gtgcttgtacaatctccctctttttgatgatgacaacttctgaaatcaagaaacacacacacacacactttttcctagtcgatcactcacataaatttccattctccccctttgtttttgaatttatgcttcacttaaaattaagttaattactcatgtgagttcttgatttaatccctatttctctccccctttggcatcaacaaaaagccaaagtgcgtaacaagtatgaaacatacaaatacaactagtcattcacacaacaatcatggaaaaaatataaactaatcataccagagaacagaaaacaattaagcaagatattttaaccattcatcaaacttagaaacgttaagaaatataaaaaccatacataattgacataccccagaatagaaaaacaatcaaacagatat

SEQ ID NO: 177095 - DNA, 459 bp, Glycine max
  unsure (1)..(459): unsure at all n locations
attgttcccctgtccggcccgggatcctctgagtcacctgttgcatgcaagctttatgagaaaccattcaaacatatgtagtttcttcacaagactgaatggaggacgctttagtcgagagaccaccttgaataacctttattccaacctttcaagttagaggaaagagctgatcgagtaagtagggcacttagaaaaactaaatccctaattagaggcggaagtgacactcatagcgaattactaaaccagattactagtttgcttaaggtcaatgcagatacgtccccagcttctgaaaatacttctcaaatgggaacgagacgatccttcacaataactaacggcattaatgaagatagtgaccgagactacataaccccactgatataggaccagtgtagtaaagaatataagtcttaaatattccaacactggaaaccccctccaagaatatan

SEQ ID NO: 177096 - DNA, 359 bp, Glycine max
tatgaagcctatttcgcgcggctatctaccatacgtgtgttgcatctatactatgacaccaggtatgagaacaatgcacgaattctaaaatgcaacacttagcatacaggtcaatttgttaagaccatatagcaattgaattctaatgcatatataacgcattttatatatattcatattacccaagagtctacttttgcaatataactttattgttatcaaacgttctgtgcatcacacaaaggaaaaaactatgtgtagtatgtcacagatgatatacgtaaacagcatgtgtgcacaaacttttcacaacaaataatttacaactgactctaagagcccatactcatggaggatat

SEQ ID NO: 177097 - DNA, 440 bp, Glycine max
  unsure (1)..(440): unsure at all n locations
agctctgtaaanaaggaagcaatgttaaatctctcttcaaagtaaaaacgttgtttctacttcaaaaccctctgaactacttcacatagacttatttggtgcctctagaactatgagtttgggtggtaattactatggcttanttatagtagatgattactcaagattcacatggactttgtttttgaaaaccaaagatgaagcttttgatggtttttgcaaacttgccaaggtcattcaaaatgaaaaaaggtcttaacattgtttcacttagaagttatcatggaggtgaatttcaaaatgagtctcttganatgttctgtgaagaaaatggaattcaccacaactcttctaccctaagaacaccttaacagaatggtgtcatggagaggaaaatacatcccttgaaaaagagctatacttctctaatgacacaaagt

SEQ ID NO: 177098 - DNA, 404 bp, Glycine max
tgaaggtgtgtagtccaccatcttttcatagtagaatactagtaatgtgtctactatcattgttatcattttttctccgtcattgaggtgccacttgagcttccaggtctctttacctttgggcgtattctttgaaagatctgtgcccctttttgcacatgttctgttgttgcatcctatccggaaccatatcaaaattgtactgatactgcctaacgaaggcaaccattaggtccttccaagagtggactcgagaaggttccaggttagtgtaccaggtaacagctaccccagtaatattttcttggaaggaatgtatcagcaattcctcatcttttgcgtatgcccccatcttccgataatacatctttagatggttcttggggcaagtagtccccttgtac

SEQ ID NO: 177099 - DNA, 394 bp, Glycine max
agcttatcgcatagaattcattatctaatgttatattagaaggagatggggtctctcatcatacgagatttcagatggactttaatcctaatcccacagccgacctttttacgagatctctacttaacccttaggttaaatgatcagccaaattatgctgagttctcacaaacttcactgatatcacaccatgcatgattaactcccgaaccatgttgtgtctaacacccaattgtctagactctccattatacacttgactatatgccttagccaaagttgatatggtgtaaccttattccttttgttaagaattcagttcaacaagtaacaggctgtcaacatagtctctgcccgagatgcttcacttacacccgaatacgataacatggaa

SEQ ID NO: 177100 - DNA, 411 bp, Glycine max
tgtcatagtatgacatgtgcagatgaataagattaggagtaggcgatccacccgcaaagaacgagtcattaggacaatgagttatgatcaaatcatgaagaagtgagagactctagtaagcatgttctacaatatatagaaacggatttcaaattcttacaattagaaattctaagacttttaagcacagagaaacaacctaaggtgaaggaagtcagtgaataacatctattaaatattgtcaaattctttaatgatgtgtaattgtgtaaggattcataaggtaggaactccaatttctcacaattaagtagagtaagagattgcaatgcattcagcagaccatctcttaaggatgctacggaattaacgccagagatagttaagtctatgatgaaataggcggactcc

SEQ ID NO: 177101 - DNA, 441 bp, Glycine max
tttagtcacctgaggcatcaagctctaacttaggtgtacttaactctggactttataatacttatgggtaaagacaacagctcatctacaaaagtgatacccttcaattttgttatttttatttgttcgcttttaatcaagaccagttctgaagaggcagagcattacaaaatatatatgtccatgtccaaaggaaatagatcaaatctttgcaacatcaataatcaaagtcaaacaagcatcctcttaattcacccaacgtacttagacgtcaatttcctaatatatgctctaaaaaataatttactaccagaaaaattccattttcaagaaaaattaaaacacaagtggaatatttagaatggggaagctaagcacattatgactgattccctaaccaagatatctgttacaaagagaaggtgaggaggattgccacac

SEQ ID NO: 177102 - DNA, 418 bp, Glycine max
tctgttcttcgtacaacactagggctcatgtagtttattctgacctctctctttcattctctgcaatgcaagcgtaaaaatggctctctgtccgtgaaagcgtgctttgcgccattttcgcgcttatcgcgagtaattgaaatttggcttatcgccattctcgcgcctatcgcaaaagagaatatcttctcactgaacgagctgatgtctgcgtgagcacgtgatgacatggcagattctcttcaatattcatctcactcgctaagcgactgatgtctcgcttagtggttgagtctcgctaagtgcacggtccatgcttatcgagacaacaactttgcatcttcaatatgttctactttttacctgaaattgaagtgaaattacattatatgcatatggaaaacttctgatgagcaaa

SEQ ID NO: 177103 - DNA, 449 bp, Glycine max
tgcaagcttgcagatttggtcttcgccagtgtaatgttcaatgtgggtccgaaaagagggcaaatttgatcatcctactaggacgactgagaaaactggggcaaatgaagagggggagaaagagggagaaacccatgctgtgactgccattcctatacggccaagtttcccaccaacccaacaatgtcattactcagccaataacaaacctccttacccatcacccagttatccacaaaggccatcccaaaatcaaccacaaagcctacctaccgcacttccaatgacaaacaccacctttagcgtaaaccaaaacaccaaccaataaatgaattttgcagcgagaaagccttagaattcaccccaattccagtgtcctatgctgacttgctcccatatctacttgataattcaatggtagccataaccctaaccaaggttcatcaacc

SEQ ID NO: 177104 - DNA, 350 bp, Glycine max
atggctagacatgatacatgtcaaggtttggtttgtgtcattgataaaagggatgccccacattatttccatgacacaaatgcaaaaatgatgatttggagattttatgcaaaactggtcatgcatgcacctatgtggacactcaagtgtcatatttttatggtcatgtgatgctatggctcaagattcacttcctctattttaaatcaacccaatgtttccaaaatatgttcttttatccatttgtgcattcatccaagtccatttcgggcgtccgggaaaatttcacagcattcacccttcatgtgtagacacatttttcaataattggctatgatcaatgaattttt

SEQ ID NO: 177105 - DNA, 210 bp, Glycine max
gcagctgacccattatataagacttttattttttttaaaaggaaacactcaatataagacaactatggcttcttacaaatatggtgcactttattttttacctaattaacataagtggggggaaacctcgcgtcctgtggctttatcgtatataaaattaattaattacctttgaagagaaatctggttaagaaaccatataaaaaattc

SEQ ID NO: 177106 - DNA, 199 bp, Glycine max
  unsure (1)..(199): unsure at all n locations
aaaaaaaaaagagaaaatgtctctgcacaaaaanaaacggagggaaggagcaacagggctttgcaacaacaaagaaggagaacaaccgaaagacccacgctgacagaacaaagaaagaaaaagggagagccaagaagggcaaccagggaaggaagagcaaggggagggcggcacgaaccaagagggaggcgggccagca

SEQ ID NO: 177107 - DNA, 420 bp, Glycine max
  unsure (1)..(420): unsure at all n locations
agcttgcctgtccgatgcagtagtaatgttggcccgagttatgtnggggaacggntacgaacccggatgggtttatggaaagacaacggcggcatgactaacctgataaatgccaaaggaaatcgtgggaagtatggtttaggctataaacccactcaggcggatataaagagaagcatcgtgggaagaaagagcggtggtcaaagctcgcggttgaggcaagaaagtgaaggaagcccgccctgccacataagtagaagctttataagcgcgggtctgggagacgaaggtcaagtggtcgcgatatacgaagatgatgttccgagtacattggatttggtacgaccatgccctcctgatttccagctgggaaattggcgagtggaggaacgccccggcatttacgcaacgagcataatg

SEQ ID NO: 177108 - DNA, 501 bp, Glycine max
cacttaaaactatgcttatgttgctcattgactctagaatgctgcaaagaaggtcaaatatctttatggtgatctgcagaagaacatagaccacagactcttgctacaggtgcaaatttcttattcatggcaagctgagttactatgttgaccaatgcatcaagttttccctcaagctttttattttcaatagatgaagatgaatccatggccacttcatagactcttctaaggacaatagcatcatttcttgcactgaattgttgggagttggaagccatcttctcaatcaaattcctagcctcatcaggggtcatatcaccaagagctccaccattggcagcatcaatcatactcctctccatgttgctaagtccctcatagaaatattgaagaaagagttgctcagaaatctggtggtgagggcagcttgcacacaatttcttgaatctttcccaatactcatataatctctctccactaatgtgcctgatgcctgaa

SEQ ID NO: 177109 - DNA, 385 bp, Glycine max
  unsure (1)..(385): unsure at all n locations
tatacatngagctactcttgcaccaagcaagcttttacacttcagcatttaactgaaatattcccgatggacaaattaaactttcctccataactacagaataaaagccagagaataaaaaaggctaaccggatatttgaacgcataatttccactggaacgttatcttcacgaaatgatatagcgaatcacgagataaaaagagagagagttgaagtgtgttcacgtctcaaaggatgcaatcgatttcgacaggaggagcttgaaatgaaaggagagccaagagaaagtgttgcgcatcaacacgacggggatgaaaaacatcagaaatgttcaatgttggtgattgggtttcacttgtttgcgcggaagaaaccttataatc

SEQ ID NO: 177110 - DNA, 333 bp, Glycine max
caccatcacgagtatgtgaataaccgcggatcaactcggaacgcgaacttcactaccagttttaggcgcaacgcagatgtaatataatagagtgaacgaaatgaagacatgacttgcaaggcgaaacacagcagatgtgcgaccacgaaatacaattcgagctgtgacgtgactgatgcaccagatactgcattgaggtcgctacttcaaacaatgacatgactaatgcacattaaaagtccatgaaggaacaaacgttaattgctactacaacgaatgtgacgcgactattgagcacacgctgaaaaaatgaaagaaggtgaaatacagaca

SEQ ID NO: 177111 - DNA, 431 bp, Glycine max
agcttattctataccagcagcttctatttatgatataacaggagcagattcaatagctatatatattcacccagcagcggaaactgcttgagctgatatgcaaacaagaccggctaggcttacggtgcctatgatgattggtaagtgaacttgaatgcttgaaagagggtacccttcagaactacacctacttcatatcaatcgtagaggaagatgcagcaaatcccattaataatcaattaattagtggattttgaagagtaggcgggaatggcaaagttcttgttcaaataaaaaaagttctcattcaaatatatatatatatatatatatatatatcaccgacaacacttgttggactgattaccatgttgcatgcatgcctcgatatcaaagctatcatgttaggaaaataccactatgttctctac

SEQ ID NO: 177112 - DNA, 460 bp, Glycine max
  unsure (1)..(460): unsure at all n locations
ntatggcttcttcttatctctgcactaacaaccttctcttccttcctttntttcttgcttaaaagctttttgagtttgaaatcacgcgactgcacactgagcgcgtaaatgtgcttagcgtgagtaagcgaaccatgcgcgctaagctccattttgcttgactgcaggttctctaagctgcttcttcgcgctgagtggccattttcctgctaagcgacacaactcgctaagcgagcatgacgcgctgagcacaaaccattaggcttcaacttctctctctatcccttgcctgtatatctgcaaaataaaatcatcaaaacagtatgaattagcaatttaaggcacctactacataaaaacttggaggtgtacatctttattagtcatgcaataaaaatgggaagatgttgctaattcttatatgttttaattacataatctacttatgcacatcagttat

SEQ ID NO: 177113 - DNA, 417 bp, Glycine max
cggatccttaagtcacctgaggcatgcaagcttgcctcatagagggccagtaatgttcttgcgtccgaaggaactaattccgccccggatacgacagtcaccgctttatgagcattgtgcaccagcagcgcttcaaagccatcaagggatggtcgtttctccgggagcgacgcgtccagctcagggacgacgagtatactgatttccaggaggaaatagggcgccggcggtgggcaccactgtttactcccatggccaagtttgatccagaaatagtccctgagttttatgccaatgcttggccaacagaggagggcgtgcgtgacatgagatcctgggttaggggtcagtggatccccgtcaatgccgacgctatcatccacttcctgtgatatcctatggttttggaagagggcc

SEQ ID NO: 177114 - DNA, 395 bp, Glycine max
actaagcttgtgatatgggtaccgcatatgggactagtttgatcggcgatgggcaataactctcccacatccacaaatcatacatgaacccccatccccattgcccaccttaactgagctcacgtactcctacgtagcccttatctcttcctctatcactgggtccccatcaacccctcaagcttcacaattccaagcaattaatttcaaatatcatgaactaccctataccaagaaaacgggcagagagaaactctgccaaaacattcacatatacaacttcttactaaacccagaacattttcgtcgatcgtaacgtaatcactgaattacggagtccacatatatcactttaccgggactttaaaagttaaacatatgtctactttatacag

SEQ ID NO: 177115 - DNA, 512 bp, Glycine max
  unsure (1)..(512): unsure at all n locations
ggatccttaagtcacctgaggcatgcaagctnggaaccaatatttnncctatctctattccttcatntaactaatggattaagcaatacaatcactactttttgagcaaaacaacttacagcaaaaacaatacactttatctaaatcctttgaatacactagccatctttgatcatattttctccatttggtattactttttggtagtaaaatgaatatctaattggaccattgtcaacaattaaatctctgaagttgtcatccatatttttccattgtcccagatcataaatatttttagaaacttcatttgatgtactattgagctccttatttgtttctaaactatcttcttataaaatttcattatcctcttgttcttgactaggattaggactattcatattgttaagattttctacccttgaatgttttcattatcactattttactctaacgtattaatattatntggatattctagaggaggaattttctgcatatttgtatgt

SEQ ID NO: 177116 - DNA, 452 bp, Glycine max
  unsure (1)..(452): unsure at all n locations
tgaatctgagtaccctcctgatacactacggattatggtttcttctactaacanaaatcaatatgagatcgaatgagaagtggaggaaaatttattaaacgccctcattcatagatgccaatgccgtatgagagacacttttcactccattcatattgttgtgctgcttcatcatgtattttgggtatagcaggttccccctgtttcggcgccatatgcagcatatactgatcggtatccccatgctggcgcaatcccatacaattatcaagttactggccaatctgtatacactgcaccatctaatgctcctccttctaactatagtcgttatatgggtactaatactattttgcaatcctcacaccagccatacatgtggagttttttacatcacatcatcagtcgtaagactagagaactatcattattagtacatgttcggttatcat

SEQ ID NO: 177117 - DNA, 390 bp, Glycine max
  unsure (1)..(390): unsure at all n locations
agcttgtagaatggctagacattatacttgtcagggtttggntgggttcaaggataaaaagggatgccccacattatttccatgacacaaaatgcaaaaaaatgatgatttggaaactttatgcaaaactggtcatgcatgcacctatgcggacactcaagtgtcaaatttttatggtcatgtgatgctagggctcaggattcatttcctctattttaatcaacccaatgtttccaaaatatgttcttttatcaattggtgcattcatccgagtccatttcgggcgtgcggngaaatttcacagcattcacccttcaggtgtagacacattttccaaaaattggtatgatcaatgaactntttttggaaatcgtctcttttaaaagcatg

SEQ ID NO: 177118 - DNA, 369 bp, Glycine max
gctttcttcataagcaacagccttctggatgaaagatctggaatgcccatgtgggccatatcgctatttgcacccacctttttctaaatgcaccccctttcatttttttggtaattcttcatccgtaacgttacgaaactttactaatttcgttacgatacttattgttcttccgcgaggctacgaatccttatggattatgtatttactcttttgtatctttcgaagaagttacggaaactcacggattgcgcaaaaacacctcttttcgatgttccgcacattacagaatattacggatcgcgcaatgctgcttccttttgatattgagacgactcgtgactcatttattgtgcaacaaggacgcca

SEQ ID NO: 177119 - DNA, 457 bp, Glycine max
  unsure (1)..(457): unsure at all n locations
agcttgccaatagtacattattcctctttctagcaaaaacaaaaagttaaaaaatactttaaattggaatatatattcaaatctagcaacaaaatnactgttcattgcaatccagacctgttcgatagagtgtttgtcctctgtaagatgcccaccgtcgagtgaactcctccttatcttcttcaagatcttcactttttagtcgttcatcgaaattggcccattcatctacagtacattaatggcatacagtaaatgagtgcaataaagatgggtagaaatgtaagtaagcatataaaatactcaccaggatatatcttggttaggtagaataaaattgatattccatcttcattttccttattgagttcctcatcagaatataaaacatcttctttgaaatatggtgtcagaacactgaagcaacactcagataagttacaaatcatagtagcat

SEQ ID NO: 177120 - DNA, 471 bp, Glycine max
ggaattaaaactcactatacttaataactgccttcataacttgcttgattttacatttatttgggtattaatcatgtcatcaaatttgtgtgagtgtatattctttgcgatcaagcatcaaacatatcattaatattgtgctctttagattaaaccaacttcaataaatcttgtaaattcccatacttaaaaattgttacttgtaccactaacacaaactggatgcataatttaacctaccatcgtcgaccataacaaaattctacagtaaacaaaaatgtgtactaaaatgggacgaaatgacttcaatttgttgatgggtatccattcttgtaaatgcaacctatcgaaatggaatgtagaggacaataatgtcatctcgctattgggatcgtagtgaaaatcttcaaagcatagaatggtgtaggaacaaaggatgaaagtctgaaataaaaagcttcaagaccatat

SEQ ID NO: 177121 - DNA, 472 bp, Glycine max
  unsure (1)..(472): unsure at all n locations
agcttaccttgaattataattgtatcctttgctccctcttatgagctttcaaaatggaaccctgaacttacatgattatctccagaaaccttgcttagattctaggagagcatatggttcaaggcaaatttacccaaaatttgggggagtggagttaattgggatgtaaagaaaaaggtaaaagcatcatcacacacacaataaataaattgtgttgttaaaaaaaacaatgaaaggaaaggtgggctgatataataaggtcaaaagcaaatgaaagtgaaaagctagtgagcaagctaattgtattaaaaagatcacttggataagtctaggatttgggatctcttagaatctaagcctttgaatcctaaaaaaaccaatgatattttgtagccaaacctcactacaagcctgngaaagtccttctgattctgttngtacatttnttactatatggcatgagatgaagtgc

SEQ ID NO: 177122 - DNA, 474 bp, Glycine max
  unsure (1)..(474): unsure at all n locations
ggttctgaactcatcaaaacatttgctatgttctgctctttgtatatgtatcatttgcatatctgttggcttgtatagatttcctacatatgatgttctcctttgggaaagttctctaacgtagatgaaaagccactaaatgttcttcttatgggaatgctttgatgagatggcatgacaaacgtgtattccaaacattctagtgttagcttgttgtagcatgttgtgtttgttactattttttatttatttgaccttatgaatggtcaatctagctttcgatgtcttcaggagagttgtatagaactttatcattcacatttaggcaccagtattatgtcaattaaaccactacaacataatcaatcttcaaattattgtagttgtgttatanttgaggatataatgacatctttatcttgttcaccaatttcctctaagaataaaagtgtattagcttatgacttcttcatg

SEQ ID NO: 177123 - DNA, 463 bp, Glycine max
  unsure (1)..(463): unsure at all n locations
agctngaggaatctcaagaaaatgttattgatgtcattatcgttgncaaaatacacacgtgagcctacttagaggtaagggatgagttattcacaattgggaagtagtgagaacatgtgtagggatccttagagtatcaattagaataggtttttggggtgtttttgcaaattttgattctatccttacaattataattgtgaattatatatgtttgacgaaccaattgatgtcccaatgaaaaattgttgtgttctaaattgagttctttttattaacgtgaattatactctaaataatattctttaatgacttattttatacaaattattatcttattctatattttcccacgatgatgatcaacatgttatgtgtgtgtgtgtgtgtgtgtgtgtgtgtggggatatatatatatatatatatatatatatatatatatatatatantcactatatatat

SEQ ID NO: 177124 - DNA, 486 bp, Glycine max
  unsure (1)..(486): unsure at all n locations
aacgctgaatgtgattcaatttattngaaataaagttatgcattgtttgtatcattgtggcatgtcaataataaggacaaatgagagttaagttcttttgttgccgaacgataaggaaaatatatgaatattgaaatgatttttttaaaaattctataaacttatttaaacgcattattttggttcctataaaagtgcagacttgggatgagccttggtgcaatgacaaggtttaacctcatgattctatggtcaagtactcaagtaacagaaacaggtcctttgctcgtaggaatagggttcatgacttcatgtatgtgacactccaaactcccacaatagtgagagtggtgtgtttgaaattgtaagaatcttaataaaatactaagaatcatcgaanatacattatgntagattattaagagggattgtgaaaaaaaatatgtgaatccatgataagcaataaaatcgatgagtctgtgtgat

SEQ ID NO: 177125 - DNA, 441 bp, Glycine max
agcttatccttatggctggccttcggtcttcactccccgtgccactctggaagatttaagccaagcccctacttctgaggggcaactcccgccttatgacgactatcccgggcaagacgatgaggaaggagatacccatctcggccccctgctccacctcaaagatccgtccccacatgaactaccccaaccgaacatagtctgccatatcccggcctcacccacacccgtaaaagaatctgttcccttcgcggaagataagggaaagatagaggcgcttgaagagaggttaagagcagtcgtgggccttggcaattacccattcttagatttagcggatttatgtctcgtgcccaatatcgtcattcctcccaagttcaaagtgccagaacttgatacgtacaaagggacgacatgtccaaaggggcatcttctgatgta

SEQ ID NO: 177126 - DNA, 442 bp, Glycine max
ctccctaagagttctctcacgatgtgaaggttgagccatgttctcagtatgaaaactagtaatcgaatgctcaaaatcataatattcagaatcaccagcatcagaatgctcaatatgcttaaaatgaacagaatgaccaggatgcacactatgcctaactaatctatgaaagggtctatctatttcaagagtttgggagagcccaactagttgccacagtattagaattcttttctaccccaaatgcatacataataatagtcattctaatacccggagcaaaagttatggtcgtcttaagtctcgctaataacaagttcccaataattttgtctctgtcaaattcaaccacaccaagtgctcctagtatttttcacacaaaatatggatcaaaagaaactatcacacataaaatcagccgacaataacaactcttactatc

SEQ ID NO: 177127 - DNA, 435 bp, Glycine max
  unsure (1)..(435): unsure at all n locations
agcttaaggaggagtatggntagcaactcttaattttacattatttgattggggggaggggttcgaataggtctctatattaacagttctgtattttcttgtaggaattgagccctggacttttactcagaagttaggagatgctgttttcattccagctggttgtcctcaccaagtcagaaatctgaaggtaaagtgaacatacctggtgaatttgtttcatatttattgtaggcacaatatattgttttcttagaagtgtaggcataatagtatctttggctactacctgaaattaagcctaggtccttcattagcaaagcaagcctttgtagaaagtgaaaactgttgattcatctaaagttttcagttcacttgtgtattttttaacacattcgattacctctttgtattattggaattcttatttttatt

SEQ ID NO: 177128 - DNA, 434 bp, Glycine max
tctatactgtgtacaagaatgaagctctgataccacttgttattcatgtggcctcagatatcttaagaagggggggggggtgaattaagatatgccaaactttttcccctatatgaaaaatctatcatactttttactgaagatatgaattcccttaatgacaatcttcttaaatattaattcaaatgaagcaacctgaatatgaatgtaaagaaataataaataaaggagattaagggaagagaaaatgcaaactcgagtttatactggttcggacacacccttgtgcctacgtgcagtccccaagcaacccgcttgagagttccactaacttgtatattccttttacaagttctaaacacacaaggacaacccttcctttgtgttatagatttttacaacatagactcacagctcttatcccttaagaatga

SEQ ID NO: 177129 - DNA, 485 bp, Glycine max
  unsure (1)..(485): unsure at all n locations
gggatccttaagtgacctgaggcatgcaagcttgctacatactgttgtgctctattttctcatgtcaagcctcaatgcggctgaagccatagcatttctttaacttctgtagtttcatggcttccctcacttgttctgtatcaagccaatgaccatgttcggcatagatcgtattcagtaacgtgtaattaccagcgttatttggttctgatcttataagctgnggagctagcatttctgctatgtccaatctgccatgaagtttgcaagccgacacgagagagctccatattcttgcacttggtttcatgggcattgttctccgtatttccaaagcatattctagcttccctgaccttccaaggagatcgactaggcatgcataatgctctatagttaatggaatttcacaatctgcacgtacttgtttgaatatccgttgcccctcagctacaatgccagcatgattacaagcagataaaact

SEQ ID NO: 177130 - DNA, 412 bp, Glycine max
  unsure (1)..(412): unsure at all n locations
attgcatttggtactcgggctttggttatcatatgtgtgnttggttgcttgtgagtttacctttattttaccgactgggttacttagatgaatagtctttcttaattaccaacattctacatgtgtctgtttttagtggcacctgcatttataaaaacatcttgacactggtctgtgtgagatgctacatgtttcatttgttaatatttgcagttgagtcacagttaaatttctctttttttcaattgagcaataattggttccctccaccagaggcttctctgaaacgatctcatatacagaacctaatttatgatatatgtgaaaataattctttgcatgcacctactactgattgccttgacaaaggtcatccctctgaagatccttccattattgtcaatcccaaagt

SEQ ID NO: 177131 - DNA, 463 bp, Glycine max
agcttgtaggattatggggtacctatctcatgtggtactaggtggcggtcgggcgatggtgcacaacaagttttccacatccacaatgcgcgcataaacccaccatcccctgttgcccacctccaactgagctcacgtactcccacgtagcccatatcctcgtttctctcaacaccgggtccccatcaatcctcccaagcttccccaacatcaaagtaatacaacattcacacagcataagctatcacagccaagtaaaacagggcaaaggcagaaaactctgctcaaaacaccaaccaaaatcacagcttttctcacttaaagaccccagtaacaattccttcgatccaattcgttaaccgtttgatcgactccaaaattttactggaagtctatagtacatatgcctacagtttgaccgttgggatctactagaaaacatccagaactcattctgtactac

SEQ ID NO: 177132 - DNA, 471 bp, Glycine max
  unsure (1)..(471): unsure at all n locations
tgtctcatcgtttatgcgagacggagaccaacatgctatctatcatcgcaaagaagagttaggtctagccactgcccacgagcataggattgctgacgaatatgcccaagtatacgcggaaaaagaggctagaggaagggtgatcgactctttacaccaagaggcaaccatgtggatggatcggtttgctcttaccttgaatgggagtcaagaacttccccgattgttagccaaggccaaagcgatggcagacacctactccgcccccgaagagattcatgggcttctcggctattgtcagcatatgatagacttaatggcccacataattagaaatcgttaggaaacttgtatggtctctcagaccttgactagatatgacttcctttttgaaataaaatgagttggtcccatgtttctactccaaaaagcttgtgcaaatcaaatcactcctacantttatctctagca

SEQ ID NO: 177133 - DNA, 488 bp, Glycine max
  unsure (1)..(488): unsure at all n locations
agcttctgcgtgaagcaaccagttctcttgggcgagcatgttacttcaggcttaagccaccanctcgcttaggcgagcaggacggcaagctcctcccctattttgactataaaaaggtgtgggaggctgaaggaaggggttcaccaccctgngaaagcatatttcacttaaaattagtgaaaagaaggagaaaaaagaagaaaatcaaggtcgaggcgcttccgtaacgcttccgtaacattttgtaaccaaatccgtgaatgtttttcgccgttcttcatcgttcattgtccttcaaccggttagtttgcgatttcgaagctttgaatccattcttgctttgtatgttttcatcttcatctcgtctactttcggtattcttgttcttcgttttaagcgagttttgaccgatcattcgtaccgtaatctcacttaatcanccgttaaataaaattcaacttatcatttgtgtnggaatctcacttaat

SEQ ID NO: 177134 - DNA, 460 bp, Glycine max
  unsure (1)..(460): unsure at all n locations
tcttaattttagctgatgcagatgagtttgtggcttcctcatgcactcctctaatgactatagcatcatttctggcactaaactgttgggagttgcaagccatcttcttaattaaattcctggcttcagcaggggtcatgtctcctatggctccaccactggcagcatctatcatgcttctctccatgttactgagtccttcataaaaatattggagaagaagctgctccgaaatctggtggtgagggcaaatggcacatagttttttgaatctctcccagtattcatatatgctctctccactgagttgcctaatgcttgaaatatcctttctgatggtcgtgttcctggaagcaaggaaaantttttctaagaatactctcttgaggtcatcccagctcatgatggaccgtggagcaaggtaataaagccagtcctttgccactccttctaaagaatg

SEQ ID NO: 177135 - DNA, 406 bp, Glycine max
  unsure (1)..(406): unsure at all n locations
agcttcagcaaccatgcaaaagatgacttctttttgttaattagccatgtacttgtgagagaactgagagtagcttcatatatataaaaatcccctgactctgaccttcttagaattctgtagcttgcaagcaagggctaatctctaacttgcggaaattaaatttgttatgggaagagttgtttgaggcctaacgaggtaagaaaaaaaaaggaaggaagcttgtcccacatgaaaaataacctcaaaagatagtttgatcagtttctacagaaactgcaatttagtgagagttttttttttttttttgtgaacttaatgtgatgagagggtgggtggnggggctatctgtgtcacaaatttcaatggaattgagatcagtgcttgcatgtaaagcaattaacgt

SEQ ID NO: 177136 - DNA, 467 bp, Glycine max
ttttccataatagtacatataataaatctttataatactatgctttacaaagcaaacaaaatccattatttccatcaacataaaacataagtgcatgtttggttgggattgtttttggacaaacaattgcttatttttcaaaaaattcattcagaaaatggcaaacataagcaattatctctccataataagctgaatcaaacatgcactataccctttaaccggagcactgaatgcaatcatccatcccccctcccctccctgctatcttcattcataatacctccataaggcattttgccatattggccacttaactaaatcccctcagcaatcaaccaaagtgggagtgcagacaaactaacacacaaccatgccttccaactgagatattacatagtccattaccttctagagaaatgctaacaacatactctcattctataacacactctcaactatcgact

SEQ ID NO: 177137 - DNA, 396 bp, Glycine max
  unsure (1)..(396): unsure at all n locations
agcttttcgattcattctatgttcccgttgtggtccacattgtgtttcgtgcatttttattctcgttttgtttactttttataccccctgttgacgtgcttaagccattttacttaagtcatttctcgcttaacttaaaaataaaataaatttccaccgaacgtttgaattgtattatccattaacttcggttaaaataaattccgaccgttcggtcgtgccgtaaccacgttggaaatcaaaaagaggtaaaaaataatataataatcaaaaagacatcttttagtaaaataaagcggaaaatcaatcggacgttntctctttgggatttctcaatcttaatcgaatggattaataactaaagtgaaactaaaggctaaaatcaattcgcctagt

SEQ ID NO: 177138 - DNA, 486 bp, Glycine max
cgacactatataatactctcgcttatatcaagtggtaatcatagcacaagagcttcttgttttgctccttatacctccattaattatttttctttgccttctcttccattgtcatttcttcatttttctccatgtatctcctcacatgtcttgttctaaatgtttttaacatgatcctttagagtttccaccgattaaacttgctatagaaactagatgtgattttctatggttcaaatttcttgttcttgttcttgaaccatgaattgtgttgagtttaagttcctttgagttttgtcttgttattttatgtggctgaaacctaaaccataaaattcttacaaaaaatattaaagtagaagaaaacctcaaaaatctagagtgacttgttcacctattgtagttgtgtcatagaagtcatgtctagtcatgaaacttgtcacataagaattcttatgttgcgctgaatattattgttcttggttc

SEQ ID NO: 177139 - DNA, 437 bp, Glycine max
  unsure (1)..(437): unsure at all n locations
cttaagtcacctgcggctgcagctatattaggattattgtatgcttttganaagctactattcccccaaaatctccttcccttcgcttcctcctattctggattcttctggcttccataaccatcgtttgctttgcagagatcgaccagctactataacaaaaaatgtagcatttgactgaactcgaattgctctccaacattaacaaaaagctagctcaaggactatataaacacctttattcaaaggagttcattacaacgaaagataatagccaaaacatcctagcttttgattaaagtcttcttaacccaaacacattatgatttatggcaactctgtgtccatctcaaagaatatatgtaagcctcatatttatgtataacctcattgaagtgagcatccataacaagttatctacgttgccacatagaact

SEQ ID NO: 177140 - DNA, 348 bp, Glycine max
tgcaaatgaagatatcttatttgagatttgcgaaatctccagataacattttgtcggtctcaaattaaaaaggaaagagtcggtttaaactttcaatactcgtatgtacaccgtgattcttatcgataaattggacgaattgtcactaacccctcaattatatgtgtaacatcctgcttttttactaacgctatgttaatttaaacgtcctaataatacacctgtcttataataaagcgttatggatataattatatatagctttatcatatctctataataattatgttaaattttgtttagaatacttctactcgatcaatagcttatcaatatatcatgaaaatt

SEQ ID NO: 177141 - DNA, 478 bp, Glycine max
  unsure (1)..(478): unsure at all n locations
agcttttggacaaagaataagattatgttctaagagattcaaggcttggaaaggattgatgaataagtgttcaagattcttaaaatgcaaaacaaagccttgcttttatagactcttcatgtctagtcaagacaaccatttagaagagttataacttttagaaaaagttaaaaccaatttgaaaaagtcaaaaaccatttgaagagttacatcttttgatttaattcagaaacaatcactggcaatcgattaccaaatcagtgtaatcgattacacaaggcttttatgtgaaaggatgcgactcttcacatttngaattgaatttcaacgttcaaaggcattggtaatcgattaccaaaacattataatcgattacaactttttgaaattaattggaacgtngtaaattcagtgtggaaaacttttcaaatccattntgctactggtaatcgattacaatatattgggtaatcgatta

SEQ ID NO: 177142 - DNA, 310 bp, Glycine max
  unsure (1)..(310): unsure at all n locations
tgcttgtgtaagaatgaactgganaagattgattgtttgttgaatgaatgaaaatgcaaaacaaagccttgcttttatagactcttcatgtctggtcttgaaaaccatttagaataattattacctccttaataacttttatccaattcgaaatagtcagaaccctcttgaatacttacatcttttgattttcttataaacagccactggtaatcgattaccaaatatgtgtaatcgattacacaaagattttatgtgaaagaatgtgactcttcacatatgaatttggatttcaaatgtcacatgcact

SEQ ID NO: 177143 - DNA, 493 bp, Glycine max
  unsure (1)..(493): unsure at all n locations
agctntncttcgggggttgatgggttctgtctttttctttggcatgaaccgaggtcaaaccataaccgcaatcatttatcgattccccatttctgctgggtctggcatgttcaattaccaggctgttaccatcagtgacgatgaggatattaatggcatgttcgatgtctataaccgacatcaatgcttaagtggctttcagttgctcgtacaatacaaacaataaccttcttctatcgccaatgtcgaaacaaccattcaatcaccacagattcacgaaacaccatacactgactaccatactcaaacctaccatgaaggcccatcctcttacacaccaatcccatacacgaccacaaatgattattatgttcctcattctgaacccaccgaattcgatacccatattacttcataacacaactgcttgatggatcgtcaaaccactatgagatgactccccaactaaatgatccataacaactaaatgtcg

SEQ ID NO: 177144 - DNA, 490 bp, Glycine max
tactaagcttttatccatgcactagaacgcccttgttgaggatcctttactccgacagcatctatggttcctcgaacaatgtgatatctcacactatgtaaatctttaaccctccccctcttactaagactacagaatattcttgtaaattatgtccaataccaagtatataagcagtaatttcaaatccaaaggttaagtgtactctagtaactttatgtaaagcagagtttggttttttgggtgtaataatggaaaagttgacagataagtcacccttattgccactctacagaaccatacatgagattttcacttcatatggctcctcgttcaattcttttgaagtcattggatctgtttcctagttcagtttgagaatctctccccttgttctattttgttccgaagagtaactaggaccaattctgtcacgttgtcatggtccaatggaatactttcctttgttattattctcaaagaagaatat

SEQ ID NO: 177145 - DNA, 483 bp, Glycine max
  unsure (1)..(483): unsure at all n locations
agcttggcgctcctcagaactgctctgtttctctcaaaggcaaccacaggctcactgatgttgttcttcctgacgaggtagtttcgccgactctatctgttactgcttcatttcgtgtaattaatgaacttcaaacgtcaactgaataatgcgcattttggacaatgggaacctgcacaagggaattgtgattggaataaaatgatgtgaatatctgatcacgtaactgagtagatagagattgcattgcataaaagtagaatgtgccattggcatacttgttgtatgagttgtatttcctgccatgttacacaactggcttttcatatatgattaaaccatcactgcagtgattccttgattntatatgcatgggtcattntagcatattctttctttcttgtgtgcttgcagaaagactggagaaaagaaggtatagtcagccaagttaaagatcaaggcaactgcagatcttcttggaca

SEQ ID NO: 177146 - DNA, 487 bp, Glycine max
  unsure (1)..(487): unsure at all n locations
tcatcttcaattcaagaaggaagtgataaagaagatgtgaatgttatagaggaagatgatgatttcagttttttcgtaaagagattcaataaattcttaagaaacaaaggaaaacaaagaagatcatacttcaaaccaaagaaaagaggagaaaattcatcttatgttccaaagtgttaatgtaatcaaccaggacatctgagagttaattgcccaagtttcaagaaaagaatagaaagatctgaaaagaaaaccttcaatgataagaaagcaaagaaagcttacatcacttgggaatacaatgatatggatacattcgaagactcagaaaatgaagtcgtgaatctaactctgatggccaaaaattatgaaagcgatgaagaggtttctttgaagaagaagtggtaaattgatagtggatgctctaaacacatgacgggagatgcatcatagttcactcatatntctcccaagaatagtggacatg

SEQ ID NO: 177147 - DNA, 479 bp, Glycine max
  unsure (1)..(479): unsure at all n locations
cctgaggcatgcaagcttgtgtagattcagaagcgaaattgtttatacttgtatcnaagcgaaagatagtggaacttggtatgttgccaagaactaaacattgcctcggtggtagagacgaatctatataaaactcttaggatccttgcttctttatgatattagttgaactaactctgggttgagtttgattcgttacgaaaaagtgctttcaaactagagtaaagcttcatctaatttaaaaggtaatgagaaaaggttgttcttattctttgtctcaacaactgataactcggtgctgcaaaaatgctgatgaaaatttttaatatcataattcaattccctcttcttgaagctttagattacacctatcaatcttgtctggtctcaaccctgcatgcagaatttttattgtaancaaaagttatatttaaataacacattgaagacagttagcattattgaacatcctatagtgt

SEQ ID NO: 177148 - DNA, 290 bp, Glycine max
  unsure (1)..(290): unsure at all n locations
actcaagctaatgatagttgtaataccgcttaccctaatatgcacaatctactcattttacattnggagaaaaaagtgcatttgttaagaaaacaaattatacttcaaatctatagaaatttgggcaaaatctactttgttaattcaacatccttaaaataaaatgaactagttagaatctatgaacataatatccacatcattttaacgacgaatatttagtacatagacaaggtaacaatacttacttccaaaagttactgtgtccgttgtacaatatacaacaacta

SEQ ID NO: 177149 - DNA, 448 bp, Glycine max
  unsure (1)..(448): unsure at all n locations
atgcanaaagtgtgttgctttataggctcaaaggaatcacaaagtgagtttgttggatatttggactgccattcctttttaacaaatgatagcagctccatggtgaagtataaggtttctacactgaaactttggaaagcatggttgggttggtatcacataacatggaaattgaaaccttcacatgatagatagtagtgtaaagctagatattgtggtctagaaatgctttaattagctattgtttctatattgctggtttgcttcggaagttggcataaatcaatgatgcatagatctgtcagttggtgttccacgagtatagaatatatattattgttcttggagtctatgagggatgcacgggaaatgagtcactgtcatctgctcttgaattatattttatcggcccttgaattatattttgactgacatctcactgcctcac

SEQ ID NO: 177150 - DNA, 473 bp, Glycine max
  unsure (1)..(473): unsure at all n locations
tatcaaattaacacatcttnatagagttaaggtgagtatattattgctagtgtttcttcaacttgattctcaccaagagacaatatatatgggagcaacagttaattgaatatcacacatcttcaaagtgtggaaactggattgattggtataataattgggatttccatatttatttgcatacttcatgttgcagtacagaacactgtacagtccataaaaaaaataacaatacaagaaattataaatttaatcattatagaacaccacttgcctggaagtatggaatcagtgcctctggtgcaattgaatgaaatgcaagatctttatttttctgagtcttctcaagcaatgattttgaaccctccaaatcttgacaactattatgaaactgatccttcaatatgctgtttctcccaaagaaattaacaagaaaatcaagctggctttgatgtatatgtaacagcatatgt

SEQ ID NO: 177151 - DNA, 487 bp, Glycine max
  unsure (1)..(487): unsure at all n locations
ttaagtcacctgcggcatgcaagctttaccaaagagtgttattctcttggtttcgatcaccaggttactgtaatcgattaccagtggcaagttttgttttcaaaaacctttcaactaaatttacaacgttccaatcaatttcaaaatggtgtaatcgattacaagattntggtaatcgattatcagtgtgttcgaacgttgaaattcaaattcaaatgtgaagagtcacatcctttcacaaaaatgctttgtgtaatcgattagaatgatttggtaatcgattaccagtgataattnttgaacaaaaatcaaaagatgtaactctccaagttttttttaaaggttataactcttctaatggttttcttgaccagacatgaagagtctacanaagcaagtccttaacttgcatttagaagaacaatcattacaatcctttacaaccttttgaacctcctaacttgcctgaagttcatttgtgtctctc

SEQ ID NO: 177152 - DNA, 429 bp, Glycine max
tctcccctattgtgctataatagggggagaattatgtgttattggttcatcgcccttggcacttctctgcctctcgaaattgctaaggaaaattatttccgcgaagaatattcaagccgaggcgcttccgtgacgtttccgtgagtaattacgcgaatattctcgaccgttcttcaagatggatcattcgttcttcgttatcttcaggcttcaacaggttagtacctcaaaccgagctttttaattcattttatgtacccgtggtggtccacattttgtttcatgtatttttattctcggtttcatttactttttataccctcttttgacgtgcttaaaccattcatttaagtcatttctcgcttaatctataataatattaattccaccgatcgtggaattgatcatccgttatttggttaaatgaat

SEQ ID NO: 177153 - DNA, 505 bp, Glycine max
  unsure (1)..(505): unsure at all n locations
ctctgagtcacctgcggcatgcaagcttataatgggatttctctttattttactagcatcagnaattgtaacaaacttctctccaacatagcaagatcaagatccaaaacactgaggtgaaattggacttgctcattccagtcagagaagttaagcccattaaaattgacacatatcatatatgagaattcagtgaattggaaacatgtattgcataataaaattcacataattgttttgagacataaaacacatgtcatagatatgattcattcagataagggtcaatgtatatcgatgctctccttttggtgatacatcaacacacaacatacaaacatgatgatgctaataaaattcttaacattatttggcaattaaatatgcacccattagtagtacttatttaccttgggtatataaataaaatcaatgatagacataaatcgcctacaattatattaattaattataagaacaactagtcaacctttggacgatccat

SEQ ID NO: 177154 - DNA, 491 bp, Glycine max
ggaacttaaaactaagctgtccaacatccaagcaaaacaacattcatacagcacattctatcacagccaagcaaaaacagagcatatgcagaaaactctgctcaaacaccaaccaaaatcacagcttttctcacttaaagaccacagtaacaattccttcgatccaattcgttaaccgttggatcgactccaaaattttactggaagtctatagtgcataagcctacattgtgaccgttgggatctactagcaaacatccagaactcattctgtactactctttccacagccaaccacacacaagcattttctgcaccaagctaaaatcctgctgcacctattttgacagcaaaattctgcataagtgcagatttcgaaaatcacacttcccctcatccaatcttgctcaaatcaaatcctacaagtcccaaatcatgtatcaatcatgtctaaaccaaagccaagcttcataccacagcaacacaaaatc

SEQ ID NO: 177155 - DNA, 452 bp, Glycine max
  unsure (1)..(452): unsure at all n locations
agctttggagaaatataaatggttcattttnttcactcggacatccgaataggcgttaattatctagacgctcaaaattgaacagtggaagctattgagcaattcaaatggtcataactgttcactcggaggtccgattcaggcacataatatatcgagacgcccgaaattgaacaacggaagctcttgaaaaattcaaattggtcattttttacactcggaggtccgatcaggcgcatcacatatagagacgctcgaaattgaacaacggaagctcttgagaaattcaaatggtcattacttttcactcggaggtccgattcaagcgtataatatatcgagacgctcgaatatgataatcggaagctattgagcaatccaaatggtcataattgttcactcggaggtccgattcatgcacataatatatcgagacgcccgaatatgacaac

SEQ ID NO: 177156 - DNA, 423 bp, Glycine max
tcagaatgctagacgatatatttatgggaatagaggtaacaatggcggttatgacggaccgttgcataaccgggttgatggagtaaagctcaatgttcctcccttcataggtagaattgatccatatgcctacctggactgtgaaatgaatactgatcacgtatttgcctgtcttgactacactgatgcgcataaagtctagctagcatcagctgaattctccgactatgcccttgtttggtggcataaataccaaagagaaatgttgagagaggaacggcgagaggtagatacatggactgagatgaaaagggtgatgagaaaaaggtatgtgcccactatctataacagaaccatgcgacagaaactccaatggctgtcccaagggaatttaaccgcggaagaatattataaagagatgga

SEQ ID NO: 177157 - DNA, 491 bp, Glycine max
  unsure (1)..(491): unsure at all n locations
atcctcttagtcacctgaggcatgcaagcttgctagctggagagatagattaattgttaaataattaaatgagaaaccaagttgggtgaaagtgaggcgcaaccattatattggacttgaaggggtttatataggcacataagtgagaaaaactaattgatataagaaactagctagaagggaaattagaaaagtgatcgatatagctgtgattttgtgtttgtatgtggccacatgagagagagagcaatgatgacattggagtcatcatgattacaaagggcagcattagatgagaggaaggaagaaaagaaaagagggggtgggaatggtgaagaagaaaaacgcttcttctctctgtctaatttcttggcctctntgattgcctagttagtctatcatgctcaaacttgggtagtgggtaacgtatagatgaggagtggaaacaaaactatagtaatacactactccacccaaccttttttttaata

SEQ ID NO: 177158 - DNA, 465 bp, Glycine max
tgcttagttgcaaaaaacataacaagtcattcattgcctctgttacatgccattgcttgtatatgtggagcaaaagaccttatttcatatatcatttattaatttatgaaataaaagatatgtttatttataactaagagattaaatgtaattaaaaattctagttatagaaaaaaatagctagtatgtaattaataattattaattatgaataattaaaaattttagttatagaaaaaaaaatgtaagccaaaataataaatagtatgcaattatatttcaatagagtttctaaataaagcatgaaaaatatatgctatacaatgtagattattttacactattggttaatcataaaattttacgtatgatatatgtggtagattttactataaataccgtcacagctatattaatataaattctgattgattggcggtgttaatccttctactatgaccattt

SEQ ID NO: 177159 - DNA, 407 bp, Glycine max
  unsure (1)..(407): unsure at all n locations
agctttatgaggaagacatatctttattgtatcttaatggnctattcttctttcttttaacaatcggagtacatttcgttagaatgaaagtaccagttattaattagtaaataataaattagcaaaaaccaatttaacctgaacaagtaaaggcaaaaggtaaaaagggttttgtatcctctaaaatgagaggtgcaatatcaagataaagtgaaaattacaataattgggtaaaaaatcataaattaaaattatattaagaatacatatataacaaattataatgggttgttatatatatatatacatacatatatatatatatatatatatatatatatatatatataaggcatcacatatgctatttgtacataacatgatgaaaagttggtgattctaactag

SEQ ID NO: 177160 - DNA, 365 bp, Glycine max
  unsure (1)..(365): unsure at all n locations
gtcggtcacattgtgtgatggaatgtgtggttttgtngcctgngaaaaaggatccgatacaaacactgaacatatagtgtttactgaactaacctacatggacctatatgacctatcaagcatgcaacatttctacagggggagacatcctatagagtgtccaaaattgaagaagttgtcagtagggaaatgtaacgagaagctaataacattctgaaccggagaaaggagcaatgaagaatatgaagcagttctgtcagctgaaaaagtaagtcatatagtgagacatacacggagagtgatattgtaagatgtgtggcatacttaataaagatatagccctcctaaatataatatggattatt

SEQ ID NO: 177161 - DNA, 466 bp, Glycine max
  unsure (1)..(466): unsure at all n locations
agctngnccactttgcttctctgccatttccttgaatnnctagaaaattgagaacacgtcatctttttccttgatcaagtataaccacatcattctgttgtgctcatctacaaatgatgtgaagtacttgttcccacctagtgatggtacctcaaaaggaccacacacatctgaatgcacaacaccaagtacactagaagctctcattggcaaatgggaattaaaggaatttcttggttgcttgccaatgagacacacatcacacaccttctttgctacatttaattttggcagacctataaccatattattaattactaacatattcaaacttttgatattttagtgaccaaacctgagatgccaaagccagctcaattggtttatctctatagtcattaaacattgtacttctgatgccttaatgttggcttgaaaggtatatttcttgagagtggagatctca

SEQ ID NO: 177162 - DNA, 469 bp, Glycine max
  unsure (1)..(469): unsure at all n locations
tattgaataagantatatacactttttattctatatggtcttaatgtgtatttggactctcgagtgtatgtgtgtttgcccatatactcatccatttgcctccctagttactcaataaatctttattatatactctttgacaattttggtgccatctttttttgtacatatcagtgtattatttacgttgtacataataagctgtctatctgatataatcgatcagccaatccttgaaaacaaaattgggggtaacaagtttgtagtattctttaattaaactttttctttaacagtttccttaacagatgtatatattattgttttccaggctaacaaggaacagttagtgcaactaatgtttgaaacattcaacatatcatggttttatgcttccgaacaagcagtgttgtcactatatgctgtatgacgtatctctggatgcacagttgatattggtcatggaaat

SEQ ID NO: 177163 - DNA, 443 bp, Glycine max
  unsure (1)..(443): unsure at all n locations
agcttgctaacgcatggtagctcctaatatctcctacactntntggggtgggccattcttggatggccttgattttctcagggtccacttggaccccatttccaccaactacaaatcctaagaaaattatattatctacacaaaaggtacacttctctatattggcatagagagtgtttttcctaagaattgaaagaacttgccttagatgtcctaagtgatcatctaggctcctgctgtacactaaaatatcattaaaataaaaaactacaaatatacctatgaaatcccttaagacatgatgcataagactcataaaggtacttggtgcattagtgagcccaaaaggcatcactagccattcatacaaaccaaacttggtcttgaaagcgattntccaccaatcaccctctttcatcttgattnggtgataaccactttta

SEQ ID NO: 177164 - DNA, 469 bp, Glycine max
tcgtggagaggatgcttcaatggtggaaaagactgatggagagaaagagagaggggggagcacgaaattgaatgaagaaaatgggagagaagttgaactctgtgttgtgtctcacaagactctcattcatcaaaattacaacaagtgttacacatgcttatatttacatactaagtagcttccttgagaatctctcttgataaaacttccttgagaagcttctttgataaaacttccttgagaagctatagcttagctacacacacccctctaataactaatctcacctccttgagaagcttccttgagaagattcctatagaagctaaagcttatctacacacaccccctataatatctaatctcacccccatgccacaatacatgaaaatgtaaaataaagtccctattacatagactactcataatgccctgatatacaaggctgataccctatactactataatg

SEQ ID NO: 177165 - DNA, 467 bp, Glycine max
  unsure (1)..(467): unsure at all n locations
agcttcaagataaggccaaactcctatctaatatctgatttcaggcttaaataggaggctntgttcgtgctcgtgcgcttagcgcaactctgaaccacttagcacgcattagtgtatttcggcttagtgcggcttttctcgctcagcggatgtactgaagcggtgcgcttagcgggatggcccttcgctcagcgaacaagcacaactcatccttctttcagattcttcctcgcccttagccgaggaatgttgcgctcagcggatggctcgctaagccaacatattggcttagcaaaagggtgaaaatcaacacttcaaaagttagtcgtatttatcgactaacaatggggaaagggaaggttcccaaagatcaatcaaaacaagatcaaaaggttaggaatagagaatatgataaagagaagatggaagtctatgagactggctaatacaatagtgattacaaaaac

SEQ ID NO: 177166 - DNA, 450 bp, Glycine max
tctatatatgctgaaccatgttatcaataaacacaagttttgttttattcagaaaattagagtttatctcttttatcttagtgagagtgattctcctaaattcttgagtgattcaagaacaccttggctgtatcaaatgactttcacaacctttgtgtgttgccctcgctggaaagagtgattctttccttcctttcatcatcacccttgttctttcttaccacatttccagataatccacctctgcccagaattatctcgtggccataactcccattttacgcactcaaattaagtattcttgagcctaaattgaatttcaaaacgagacctttcacctcgttttggaatcacctcatttggagccctgtagtttcagttattgtcatttctatatttctgtccagccaccacttaacctacgttgtaccatcccattcatgcattgta

SEQ ID NO: 177167 - DNA, 471 bp, Glycine max
  unsure (1)..(471): unsure at all n locations
agctntcatttctcttttcatcatctctcttggtcggagttgtatttngggtttctgttagggtttatggtttaaatctatgtaaatgagtaattttaatgggtttttgtttgggttttgtttcactgctgctttttgagtttagggtctctacaacgttcgctattgctctttgagtttaggattttcatttcattctttacaacatcgacattgaagagtccaatagaaacggtattattttgctacccattttttttccttaagcattttcttggttttgttctttttcagtgagagcttctccatcgagagagatgcaaaggttttctctacaacattaaccccaaagagtccagtattgacctaagaaacagtattcttctgctacccagatctttnttttttccttaatcattngctnggttnntgtctttntcaatgaaagcgcttctctccatcgagagatac

SEQ ID NO: 177168 - DNA, 484 bp, Glycine max
acttgtacgttgatatgggtgtaagtgaacaaatataacacatcctataacatgaggtggcaaataaaccgtggaatgaatgatacaattatcagacaacacatctaaaggccttctaaagttaagcacactagaaggggttcaattaatcaaataaactgtagagttcacagccttaccccataaatgagatgagacattaccatctatcaaaagtgatcttgtcacttctaatatatgtctatttttcctcttagccactccattttgttgtggtgaataaggacatgtggtttgatgcaagatgccattagagttcatgaactctattaattcagtcttaaaatattcccctccattgtctgatctaatgaccttaatatatgtgttaaattgtgtagctatcatctgatgaaaggaacgaaacacatcacacatatcacttttatgtttaatcaaatacacccaagttacctgagtacaa

SEQ ID NO: 177169 - DNA, 418 bp, Glycine max
  unsure (1)..(418): unsure at all n locations
agctgaatcggacatccgtggaaaattatgttcatttgaattnctcaagagctgccgttgttaatttcgagcctctcgacatattatgcgcccgaatcggacatccgggtgaaaattcataatcatttgaatttctcgagagtttccgatgtttaatttcgagcgtatcaatatattaaaaccctgaatcggacctcagtgtgacaagttatgaccatttgaatttgacgagagcttccgttgttcaatttcgaatatcactatatgtgaagcgcctaaattggacattcgagttaaatgttatgaccatttggatttctcaagagcttccgttgttcaattctgagcgtctcgatatgtgatatgcatgaatcggacatccgtgtgaaaatgtatgaccatctgaatttctcaagag

SEQ ID NO: 177170 - DNA, 313 bp, Glycine max
ctcgacatacgcgtgagaagctctggccattttcatttcgccagagcttcccacactgatgtccgatcgtgtcgctttatttgtagcctggctcggacatgcacatcacaagctctgaacatattaaactggcgtgacctttcgcagttcatctccaatcaaatccatatgttatgcaccttaatcgcacatgcgcgtgaaaagttatgaccaatcgattctcgcgagatcttacatcggaaactccgagcgtatcgaatggtaattgcccgaacacgacatgccgagaaagcgcttaccattcgaaatgctc

SEQ ID NO: 177171 - DNA, 513 bp, Glycine max
  unsure (1)..(513): unsure at all n locations
gatccttatagtcacctgaggcatgcagcttgaacaaagtgctttcgatattgttttttgtattgnccaaaacagtttgaatggcgatgactagtggcacacatgtatgggcgacaacccttatcataagatgaacaaaggagaaggatagcattgtgggggacctccatacagactgagcaggttgcatcttcccaatctttcttctccaatgctttagaagagctcttcctaacattaacatctttcagattttttcttccacaagacaaaagatgtgggcttgccctgtgacctcgagccttgctccgcaacttaccaactttagccatcaacaaactgaacctgaaactgatcaaggaaagacaatcatcatagtagattcttttaaaaagcagagaaattctagcataataaattaaaatgatcattccaaacacaataaatcaaatgtctagattgacatgatatcatntatacgaactcgtagtaattgttaacagttacatcaat

SEQ ID NO: 177172 - DNA, 467 bp, Glycine max
actatatatgtattatctgggatctatagcatggatgactctctctatatccatctgaagtaaatgtacaacacgaatacgtttgataacgtgttccaaacaatgaatcacgctctcatgtattaacttcttgcatctgtccgaatatattggatacgttggcatcctactcgagccgaaaccacactatcagttactcttaaggaaggtgtaatttctattttggtattctagtttatttctcaaatgcaatttaatccttattaaaaggttcaattaaattctttaattgtaaagatggctaaattaagtccgtttaattagctttaatttggtcccatttaaaaccaaatttgatcttattgttaaaaatattcagagcaaatagaagataaatatgaccaacatgaacttatgtaataaataaaggacctatttgaaatctcagacctaattgaatcaatttt

SEQ ID NO: 177173 - DNA, 489 bp, Glycine max
ggacctaagcacctgagctgcaactttagagggaaaatgttcattttactttctactacatcatatgcaaacttgtcaaataaataataaagccatctcgactcaaagaaagtcatataagtctcatacaataaatatagaacctatatcctaatgtcacatcctatcaaagcatggtgtgcacgtgtcctctatcatgaggttctacatagtcatccacctattcatctgctcccccgaacacacagttcaagatcatcacacgatccatacacaaacagcaaactgggagtgagtgatcacattgctgactactatagagaaacaacacagcatatagttgcctaatacaatttacttagcatatctcacattatttcatcactttgacattcatcaatcacacttttcatccatcaatcacacacttttatcatcaatcattatacacaggaatcacacactccgatcaagacataataacacatc

SEQ ID NO: 177174 - DNA, 474 bp, Glycine max
tgatcaccattaacggtatagactctatccgtggtttttttatgtccaatttgaccattctggtctccaccattttgctctttcctgagccctgaacaatctctgtgattgtgtaccttttgtccataattaaaacaaatcatatcgttatttggacaatttgatgagatgtgccctggcttcctacatctgtaacaaatgatatgagtggggaaaatatagggtttgctaccactaccacttgcaaattccttaacaaaagtcctctaattgtcatggcgcgttccatattgcttaataggagtcgaatatggttttccccgatgttgaggcccattctttttatttctcattggacatgtactgctatattaagacgccctgtctcgggagtcttcatcccaacttcgacacatgttgacctaaagtgggaactgacgaacacgctgtgtattcacagcttgcttcacttca

SEQ ID NO: 177175 - DNA, 472 bp, Glycine max
  unsure (1)..(472): unsure at all n locations
agcttgttaagtactgggaattattcttgaaattntgtgcaagctgtccccaccaccagattctgagcaactccttcttcaatatttctatgagggacttaacaacatggataggagtatgattgatgctgccagtggtggagctgttggtgatatgacccctgctaaagctaggaatttgattgagaagatggcttccaactcccaacaattcagttcaagaaatgatgttattgtccttagaggagtccatgaggtggccacagattcgtcttcatctgctgaaaataaaaaagcttgagggaaaacttgatgccttggtcaacctagtaactcagcttgacatgaatcagaaatatgcatctgcacctgttgcaagagtctgtggtctgtgttattctgtagatcaccatacagatttcatccttctttgcagcaatatggagtcaatgagcaacctgaagcttatgct

SEQ ID NO: 177176 - DNA, 435 bp, Glycine max
gttgtccatgataccctctgtgtaaataaaagacttgtccctgtttacctctatgcaaattagacagcctcatctctcccttcctgaatacccactaaaaattgcctaacccccctgctgttactccataatttattctgcgataactgcttaaggcagctacatatggtcctaaatcactacagattcagttacgattaaccctttgtgcctaactagggtttcgaaacatcacaacagagacagaccattgaacaatggatgttcatcattaacatacaacagagacataccttcgatggaagcgcatacatgaactccacaaatgcgaactggacaatgtggttgcagtcacagaatcgcatcccagtttgcgacatacatgaactcatgcagaacgagatacatcaataacgccctgtgagtaccctctct

SEQ ID NO: 177177 - DNA, 509 bp, Glycine max
  unsure (1)..(509): unsure at all n locations
atcctctgagtcacctgaggctgcagcttaaaaaattaaaattattagtatcaaccatccaaaaacagttacaaacaaaaatcaatcatgcaacaacatcacaatagcaaaaaatcagtgaacgctagaacaaaatcactaaatagctttaaagggaacgaaccacttacctagaagacaattacccaacaaccggaaccaccaccaacaaaagaagtgaacggcagaagaacaccggaacaacaacaaccacgaccgaaacatgaacacgaacagacaaccgtaacacgagcatagacagaagaagaacacgaacggacaaccataacaacatcgtatgaaatgtaagaaacaaatgtactgtacggacaactaactttaggattttatagtaatagagttaacgggcatttcaactnttcgccatcggtgctgggtgcccaagcataaatgctaaatgcaccaagtaacacctaaagctcaatgcatggattaaagacttctcctta

SEQ ID NO: 177178 - DNA, 474 bp, Glycine max
ttcttgtggggtcttatgataataaactagagaatgctttaaattctaaaatgaatcacagcattattgttctaactctcatttgtgaaatgttgtcaaaatgttaaacaactcagatacatattaaagttagactcagacctgaaatttgcaaaagaaagattcgaaagaattgaaagttttgaagaggcaatatgcggcactaccaaaacaagaaaaatttagcatttaccagcagtaattggtattagctcttgtttatttgatttgggtaatatagataggtaccagggtaagcaggattttattacaaaagatatatctattgaagttttatttatttttctttaaataatttaatgtatataaaataattacgcatcatctttcttgtgttcgtaccttataattcataccatatagcagtattgttatgagaaaacatatgaacatctgaattgttaacattaaaac

SEQ ID NO: 177179 - DNA, 459 bp, Glycine max
  unsure (1)..(459): unsure at all n locations
cacctgangcatgcagcttagacaacttgaaaagcttaatcattttcaatattaaangnactaagatgcgacatcaagttaacaaccattacatatgtcacccaaaggagttaggcatgaaaaagccaaaacatcttctaaagcttcttcaaacttttccttgaactctacaaacttttatccttaggttgttccatgttgctgctccccctatctctaacaagagagttgtatcggcgaggtttctctaccccctactcaaatgtctaaacaaggaacaatttgattgtgtcatcaaggaactacatgaaggcatttgcaagatgaattcgggaggaaggtcaatggcaacacgagtaataagggccaaaaagtactggccaacccagaaaatagatctcattgaatttgtgaaatgatgtgtacaatgcctaaaacacgaatatctgattcattgat

SEQ ID NO: 177180 - DNA, 459 bp, Glycine max
  unsure (1)..(459): unsure at all n locations
ggatccttaagtcacctgcggcatgcaagcttcttagtttcagatgatgcatatgtgtntgtagctacctcatgcanctcctcgaatgactatagcatcatttctggcgctaaactgttgggagttggaagccatcttctcaattaaattcctggcttcagcaagggtcatgtctccaagggctccaccactggcagcatctatcatacttctctccttgttactgagtccttcataaaaatattgcagaagaagttgctcagtgtggcgtccctaaattaatgactggtttaatagtaataaattaaatagcagaaaccatgggaaaatttttcgcactgttatttatttcacgataattaatttcagaaggaaaattatcactatagagtcctgagtggcgagttcacaactctattcggattcatttctttttgatcactcataacctccaaacta

SEQ ID NO: 177181 - DNA, 451 bp, Glycine max
tcatgctgaactatgtatggcgaatctccattactggtgttctggacatacaagcgggcttgtaacaaatcttctacacttggagtgatcacctgcagtcctcttatacccttaccacccactctgtcatcatgtcgagactcatgaagcccaacacgtttatccttcactaagtattctgaacaaaattcaatggcttcgtctgcaatgtacctctcaacaatatatgcttgtggatgatatagattctttgtatacccttttaagatcttcatgtatcgctcaaccgggtacattcaccgtgtatgaacaagaccacaacatttgatttctctgaccagatgcacaatcaagtgaatcatgatgtcaaagaaagcaggcgaataatacatctccaactggcatagtataattgcggcctcagtttgcaacttatcatacatgactggat

SEQ ID NO: 177182 - DNA, 479 bp, Glycine max
  unsure (1)..(479): unsure at all n locations
atccttaagtcacctgaggcatcaagcttggcttataaatttctttatcttttgggagatagataagcacatttaatacatgttaaatattataatatctattactaaaaatcagggatttaattattcttatgtatttattattgatttgctataccctaatgtgattctattgtaccataatacaacacatagcattcaaatatattctctctatatatattntgattagaaggatatgaaatacctgactgagaagcttgggcttgtcatctgttgagatggagatttcatgcatatgcctacatcattnntagtacatagatgcttaacattttaaaataaacatcaaaattaatataaaacatttgactcgaaactttataaaccatattagtgttataaaggttncacacatcattcnaagttagataggcatacttgataagttcttaaatntgtattttacatgattcacc

SEQ ID NO: 177183 - DNA, 453 bp, Glycine max
  unsure (1)..(453): unsure at all n locations
ggaccttaagcaccgggctgcagctggaaggacataccccttctttgtcaangngnagccttcgtcaaactaggaagggttttgtatagcgaccctggcagtcaaattttgtacaaagtgttgagtttgcaggaggaagatatatgaggccttgtttgccaatctgataattaagcagtgatagaagaggaagaagtttccttagcatggattcctataaagtctgtgccacatgttcatcttttagcaaaagtatttaaaaactaattgaaaaagctatgcaaatgatctcctcgaaatccccggaaatgcatggtagcaaatgcaaaaccatctagaccgcatgtgttcggggatccaaacatactactactactatatactaattaacatcaattaacctattatgttgctggattctttnggtgtgttatccaagtagatgataacatg

SEQ ID NO: 177184 - DNA, 450 bp, Glycine max
ttataactgagcctgtgtcaaatattggcccattttattttttatcacgacagaacacaggtgaaggtggtggtgaagcatatcttggtgatgaaaaaatgataatctacactggtcctaatcctttgcataacagataagtgaacatttactctcctaaagtgtcttttttctgaccttgttattacaagctctctttgtaatctgtatatatataattttgtatcatttctgagttgattttacttctttacatgttctctcttccatttcttttcttgtaaaagtttttgacttatttgtcatggaccagtttcttctggtgtatcgtcaataaaccatatgtaagaatgtaagttatgtatcaaccaaatctaaacaaagaatttggctatgtgttccaattcataagctttggataaataaaatttatgattacacagaagtgga

SEQ ID NO: 177185 - DNA, 429 bp, Glycine max
  unsure (1)..(429): unsure at all n locations
agctntgcggattnggtcttcgttggtttaatgttcgattcaggnnnggaaagaggcaaatttgatatcctgctttgatgaatgagaaaactgaggcaaatgaagaggatgagaatgagggagaaacccttgttgtgactgtcattcctacaccaccaaatttcccatcagcccaacaatgtcataacttagtcagtatcagcccttctcattacccatcaaccaatcatccacaaaggccgtcctcaaatcatccgcaaggtttacctgccacacgaccaatgtcaaacaccacctttagcacaaaccgaaacaccaaccaagatatgaattttgcagtgaaaaagcctgtagaattcaccccaattccagtgtcctatgctgactggctcccatatctactngataattcaatggttgccataaccc

SEQ ID NO: 177186 - DNA, 469 bp, Glycine max
tttattgttatattttcaataagagcgttgattgtacgtgcttacttcttatttgaacctatattgtattaaaatattcctaattgtacatttagtcttaaaagaaattaaaattaaaggtgaaaatgagatggccttggacagttggacttaccttattgaagtcgtgcaagcatcattcaacatctgccatatttgattgtgcgtgtgggtcctacaaactgtcagtgtgaaaaccgaggtaggtagttgtaattgtaggaggacgggcatgcggcgcagataaaagaaggaagaaaggaagataaagcatattatattcaaaaaaactggacaaatgggtttgacaaaaatggccttaatttgaatatgtggcacaacatttgatgggactaaacatgttattttcgttagtctactcacaggtagataataaaattctatctttttatgcttattatatttatta

SEQ ID NO: 177187 - DNA, 483 bp, Glycine max
  unsure (1)..(483): unsure at all n locations
agcttgaggaatctcaagataatgtttgtgatgtctttatcgnngncaaaatacacnacgtgagcctacttagaggtaagggatgagttattcacaattgggaagtagtgagaacatgtgtagggatccttagagtatcaattagaataggtttttggggtgtttntgcaaattttgattctatccttacaattataattgtgaattatatatgtttgacgaaccaattgatgtcccaatgaaaaattgttgtgttctaaattgagttctttttattaacgngaattatactctaaataatattctttaatgacttattctatacaaattattatcttattctatattttcccacgatgatgatcaacatgttatgtgtgtgtgtgtgtgtgtgtgtgtgtgcgtgtatatatatatatatatatatatatatatatatatatatatatatttactatatatatatgtggtgtgtcatgcaaa

SEQ ID NO: 177188 - DNA, 482 bp, Glycine max
  unsure (1)..(482): unsure at all n locations
ngaatgtgattcaatttattngaaataaagttatgcattgtttttatcattgtggcatgtcaataataaggacaaatgagagttaagttcttttgttgccgaacgataaggaaaatatatgaatattgaaatgatttttttaaaaattctataaacttatttaaacgcattattttggttcctatatatgtgcagacttgtgatgagccttggtgcaatgacaaggtttaacctcatgattttatggtcaagtactcaagtaacataaacaggtcctttgctcgtatgaatagggttcatgacttcatgtatgtgacactccaaactcccacaatagtgagagtggtgtgtttgaaattntaagaatcttaataaaatactaagaatcatcgaaaatacattatgttagattattaggaagggatgtgaaaaaaaatatgtgaatccattgataaacatataattgatgagtcttgttgatt

SEQ ID NO: 177189 - DNA, 423 bp, Glycine max
  unsure (1)..(423): unsure at all n locations
cctgaggcatgcaagcttgtatgatgttgaaacccgcgagttcctcttcatatttgataatccnaccatggggagggtgtgtgtcaagcgcgtgtatctctaagtgaagggcttgcagaatttcaagatatgttacatgacaagtgcgagtagtgcagttcctgattctctaccagtacttgatggaaataatttcaatgattgaagggtaaaaatgaatgccatatttggctttcaagatgttgaatatgtctgaaaggtgggatttcaggaacttgggaagaatgctactgaagaataaaaggtagcccaaagagctcaagagacttgatagcatggcatatgtcttgatccaccaatgtgtcgatgccatatttattggaataatttccaaggctaacactgtaaagcaagcctgagaca

SEQ ID NO: 177190 - DNA, 468 bp, Glycine max
  unsure (1)..(468): unsure at all n locations
gatggctattgtaaacattgtctatacatataagtcgtttattgatattgaacgtgatgctagnggaagaacactgatattttgatggttgcttaaaatgcattacatttgttcctatggatgtatttacttctggactatgttataacctggaatcataaagcttttcaccccccttccccaattcaaaatgttgtgtagagtattttctactcttgagtttaatataattatatatacttgaataccacaaacatttctatttgtcctttcgtgcctgcatgaatatatatattaacagttacaaatgatgtttaacagagtcccagatggcaactcttagtcttcttggtgtggatagcgtactgaccactgttcactattctaacccatattgaatatggagatcatgtttccatatgagttattttgtcttgttaccaaatatggttatagcggctgatgcat

SEQ ID NO: 177191 - DNA, 439 bp, Glycine max
agcttgctagttgcaacctatcaaccatcttccttagtctattacaaaggaactaaaatcccaaatccattaacctctaaaaaatgcacacagatttctatttcctgttgacaaaactagtgttgttttggatgtaaaagctaaataccttggtcatgtagccaaagtagttaaataaccccacattatagtgcagtacctgacccctatatgctataatggtgcagcaaagcagctactacaccaaagcaaatagtttctatataacatgctcaaaactaaagtactcaaatcaaaactggagaaacaatgtggggctttggtggaaaaggattatagacaggctgacggacaggaaaatgcatatggtacatacaccaacaaagcatgaacaagtgtttggctgctggaaacttgagagagcatattgcacagagtg

SEQ ID NO: 177192 - DNA, 372 bp, Glycine max
acttatatgctacagcttgatggagaatgttctaactacacacattgaatgggtactctgttccaataaacacaacctattaaagtacctagcctatcacatatacatgtatctagaaattcacacgcgtgtacatcggcattaaatcttaaattatattcttgtgaatatcacatcgtgtttgctccctaagcctatgtaaatatatatcagctgagtggggtaagcacttaatcatttaacaacctgtattctcttccataaggatcattgaatattaagacaacacctggccgcacgcatgatcctatgaactctgtcatgactcacacctttcatcaataattgtccaaataagttatgatctacata

SEQ ID NO: 177193 - DNA, 508 bp, Glycine max
  unsure (1)..(508): unsure at all n locations
ctcttagtcacctgcggcatgcaagcttagctgaattcaactcaaattgatttgggtttancttaaccttggctagcttagcagaaataatcaacctcaggtaccagggttgtgcgctaagcgcttgaaactcgtggcttagcgcatgaaagattatgcgcttagcgaaaggactaattttcaaaaagatattctaagttttaaacttagtcctttcccaagaaattaaaacccttaatttcacattcaaagagaggttgatatgttccatgtaaagattattaagcaagttcctaatgatcaaatgcatgaaaaacaaacacaacaaagattaaaactgggttgcctctcaagaaatgcttctttaacgtcattagcttgacgctcttacctctctgggcaatctcatgttntggttctcaccttcagaacctcttgaccttctccattacctgcaagaaacattgtgttttgggcaggcttgtcttcacaaacaagtcgaagtcaa

SEQ ID NO: 177194 - DNA, 466 bp, Glycine max
  unsure (1)..(466): unsure at all n locations
acacccacatttcctattcccagagtctcttctgattcattcttntttcctacacctatactcgccactcctttcacagccaattaacacaaacgtagtccttcctctactacctgtgtttgtgtacgactttaaaatcaccgccacaaatccattttcatgatccatggatcgaacccaccgcaaaacatcctctcgacactcaaacacttacaaagaaatccacataatttaagttttctaccagtattcattttattaaatctctgacaaacattaacattataacctgagaagtgttgaacgcatccgaacaatcaacatgtggttctttcgcaccacatgcttctgcattttcataatccatatccgctcgttcagacattatttcatacatccactcatcttcgtgcatctaaccaaatttaacaaataatggccacacaatataattaggtatttaaaa

SEQ ID NO: 177195 - DNA, 456 bp, Glycine max
  unsure (1)..(456): unsure at all n locations
agctaagtatatgagcatggttatntttattgtgataaaatctttaacttaattatatattcaaattttagtacatctactganttgtatttgaagcacatgatgattgtttctcaccaaaaatgctatgctcatgatctatgttgcataaatttttgattgagtgatgatctggtcactcactcatgtgatgatttatgcaattaccagtttccgtaatttgctgggcaagaccttaatccaagaaccaacatttgataggataattgttgtctacaggtagatcttccttatatctcaaacttcttgtgaaatctcgaaatctaagaagcatactatttgttaggggagccagaaacatttcaatagaagaacgaggaatatatgtgatagcattcataaacattccaatggccgatatggaaatagttctcggagttacctatttgtgaagct

SEQ ID NO: 177196 - DNA, 262 bp, Glycine max
  unsure (1)..(262): unsure at all n locations
taaaataaaagaggaaattgtgcatctgatnacggaccataaaaccagcgtcgtcggaaaaatcaaaataagacgaggagctcttgcttctatgacttagaaacccagagtgtgagcgttcagataacatcgtacgcgtttgacagtgagacgacgacttccatggaacatcccaaccgtcgttttgaaatgggtaagatatgacaagggatcagatcgtctatgacttgtctaggagtggatctgacataggatagggcaa

SEQ ID NO: 177197 - DNA, 483 bp, Glycine max
  unsure (1)..(483): unsure at all n locations
agctnntaattttcttttagaatgtntgttgcccttccttcaacctcacttcctcccatactttttccattattgttagaagcttttctctttgaaccacccatttataactctaaacagtttagtgccttagtcaatgatgctattctttagaacaatagggcaatgatctgatacactcctattcaagacatgatgagagctcccttgccaagtgagtaacccattctttagatacaaatactctgcccaacttactctttacatggctatttggcttaaaccatgtatacatcctttgaacaatagggatgtcctctagctccatgtaaaaaatgaaaccattaaactccctaatgtcccttccaccaccattcgtatgtgaaaatattttcctctcctccaccttcctagctgcattaaaatctctcactccgccataacatccttgtgtcctcaagagcacacaaataatacacatta

SEQ ID NO: 177198 - DNA, 486 bp, Glycine max
gaccttaaatactaagtcttttatcctgatcctcactcagacacaggtatataatgtgttttccttaatttcatggtatacttgtaatcctttaaagtgaaaaatggaactttgtgtatagaaatgtctacagtttgtaacaatgactatatgttttaaaacacgtggtcttacttttacatcatgagcaaaggaagaaattgaatatacattcgttctttaataattttttgtgttgtattacatttcttaaaaaataataattgtatttttatctttaataaatgttattgtagtttcaactaataacaaatgaaaatattttatcataaaattaaaattaaaattattaatttatcgatgattaaaaaatgtgtcagacattattattttattacaaaacaatcactaatatcatatatgtgtttggaataaataatatatctaaatcttattataaatattaactataaaggttggtaataa

SEQ ID NO: 177199 - DNA, 434 bp, Glycine max
  unsure (1)..(434): unsure at all n locations
agcttctgaataaactaagatctatcttanttttagttaaagaaaagagataataaaagtgctttgaaaagtaactcacaccttcaaatctttgggttgtgaagatcttttgtgataagtgagttgtgtcactttcttgagttcaagaataacacctcttcagtcaagaaaggttttgcggaaaggattgatcaagttgtgtctatctttactcttggtttttgtgtatggttttacacatctttttttttttgtgcatgaatcacttaaggcatgctagaataggtgtttctagtttgggctcaggataggtttctcttaagctcttattcacagaggaccctagtgttgggtgcctaagtctctttttccagggtgggaactgtaaattgcttgtgattgcttgaaggattctatatgcattgtgaanatct

SEQ ID NO: 177200 - DNA, 388 bp, Glycine max
  unsure (1)..(388): unsure at all n locations
tgtctattgctggatgaagactcatgttgatctcaatctacttgtgttacaccctanatatacgttaactgtatattgatgtntaatgtatttctcgctctaagtattatgtgattgatttggatgagctgatgtatcgtgtgaattagccatgtgtgattttgttgaggtggatgttgagttatgtggagtcttattgacttacgtttaaattatgagatttcaagttctacttgaacatgttcggataataccatgatcccagacttattaaccgctggatcacctttatatttatactgtatgttcgttacccacgtcttcattttttgaccgttggcattttcaaaattaaactattggacatctcacttagtgcaagaaacat

SEQ ID NO: 177201 - DNA, 414 bp, Glycine max
  unsure (1)..(414): unsure at all n locations
agctngcaccacaagtatctaattctgttttttttttttgtacaaaatagagtatctcaccatcaactaagtccactaatatatacaataattactcataaggaagggatggaccttgattaggctcatctaatctacccaattaaactaaatacataaagcaaagcccaaattcgcaacccaattatttaagtgtagaggttatgaattccaagctcaatttgacccttgaaatggtagaattggcccaagcttaattgtgacaaatatgaagatctttttcttagctttccaaggactactaagatgatccatttggaattctgtagtgtcccataggctctacacaaggaaaataggtcaagcaagcacaaaatccgaaaataagcaacaattatcaatcacgttcaatta

SEQ ID NO: 177202 - DNA, 345 bp, Glycine max
ataaattctcgttaagagcaaattctttcttcctatgtgctatgtatgaacaccacacattttctaccatgtctatgaaacctttttcgagaaccaacaattagaagtttaatggcatgggctgccaactatgaaaaaattgtatcacaataaagcaacaatctgaaaaactcctgttaatgatgtattgtatgctgcccagccatatatcaatccatgtatcagagacatggatgcgatctagtctactattagaatgaacatgctacctatacctattatactgtgttcccaacgttgtgagatcctgcacccacatatcaaagatgaatgtgtttgaaatat

SEQ ID NO: 177203 - DNA, 414 bp, Glycine max
ttaatcacctgccgctgcagcttaggggtggttcactttttttctataccccatgatcatttttggcaaatactcgctcggggatcctgttctaaaagagaaaggctggtatttggtggctattgttgggcatatggaggctggaaatgcatggtttcgaaggatcattgatttgcgtttggcaatgatatgtccctgcattggctcatcggatctcaattcatttggggtgaacatgccattggatctgttaagataatgaacttcgggtggataccgtgtccttgctatttctgggtttatccgagtgggctttttgatggtacttaaatttctctttatgaaataaatatgtaccctgtggtcttttgcttctgtgtatacagactaattttcttcggattctcatactca

SEQ ID NO: 177204 - DNA, 372 bp, Glycine max
ttctataaattaaaaagtatctcttggataaactatgtgaaagaataatttataaaaattaacttatgtgtaaacttagctaatcttagcttgtaaaaacattatctctttatttcattaagtatttccgaagagtttatcatacatactgctgtcatattttggtgcagcatatattataccccgtgctttcttacgttcggttagcattattacttcgctttatactttcttttttacactaaagtttatgctatgacaaaattctctttattgtaaatgcaaacaataataataattgtgataaagatatcataaaataaatgttgtttatttgtgaaaatcgtaaattttaactcaatcatacgggta

SEQ ID NO: 177205 - DNA, 425 bp, Glycine max
caagcttatattgtatgtttgattgctttgaaagctattatccccaataatcttcttccctttgttatcttctattctgtattcttctggcttccataaccatcttttgctttgcagagatcgaccagttactataacaaaaaatgtagcattcgactgagtttgaatcgctctccaacattaacaaaaagctagctcaaggactatataaacacctttattcaaaggagttcattacaacgaaagataatagccaaaacatcctagcttttgattaaagtcttcttaacccaaacacattatgatttatggcatctttgtgtccatctcaaagaatatatgtaagcctcatatttatgtataacctcattgaagtgagcatccataataagttatatagtttgtccaatataacttgtgaaaga

SEQ ID NO: 177206 - DNA, 460 bp, Glycine max
tcatgtttcctgaatgataaagatttctcattgttttgcatatgaagacattctactgtgagatactgagaagataccacacaaaattttgtggggtttaaatttgaaatgacagagccggttctaactttcactaactgcacgtagatggtgattctcattgataaatttgatgaattgttactaatacctcaactatctgcgctaaatcttgttccttaatcacaacatgttaatttaaacgtgttaaaaacatataagtcttataataaaacgccatgtatataattatatatagcctctatcatatttgtataataactactttaaacctgtgtggagaataaccttaatcgatttatagtgcattaataatacacgaacatctgtgtctaataatagttctgctactacatagcaatgaatcttacttttatgaaagaacatctgactttaatac

SEQ ID NO: 177207 - DNA, 452 bp, Glycine max
  unsure (1)..(452): unsure at all n locations
tagtctggcctgatagcctctgtaaaaatcttcttcacttttaatcntaaatattcctttgctctggagtaggaatgtaatagaaaagtcaaaggaaaaagaaacatcaacatgaataggaaagccaataataataatgagaaatataaaggggcacatgacttacacctaaattgtagtaaaatcatacttgattataagaatacaagttatggagcagaaatgtgtaatcaaaatgtgatagttccaaaaaaaaatgaattgtgcccaaaaaataatataagtatatatacatatatataggcatgcctatcatgcttgtaaagctttttaataagcctaaacctggtctatttaatttaatagactgtgaaaaaagactgagcctaacccttttaattaaataagccagntcatgtcatgctatatgtatgccatgtcataagcccctg

SEQ ID NO: 177208 - DNA, 484 bp, Glycine max
  unsure (1)..(484): unsure at all n locations
agcttgagatggtatctggcctcagatttatatttgctaagagccaatttggtgcaattggccaatctgaggagtggtgcagacttgccgctgactacctgaattgtggccctctgcagtttccattctgttatctagggatgcctataggtatcaatcctggaaggaaggtggtgtaggagcctataataagaaaatttgaggctaagttgaataaatggaactagagaagcatttctatggctgacagaattacattaattaatgttgtcttaacagcattgcccttattntatatgtcttttttcagggcccctacaacaatgattaataggctcaatgccattcaaagacattttctttggggtggtaatgtagaaggaaaaaagatagcttgggtggcttggaatcaagtgtgtgctcctagagaaaagggagggttgggaatcaaagacatcaaggatattaatgaagctcttcttat

SEQ ID NO: 177209 - DNA, 483 bp, Glycine max
cttgcagatttggtcttcgccagtgaaaggatcaatgtgggtccataaagatgcaaatttgatcatcctactatgacgactgagaaaactggggcaaataaagagggtgagaaagagggagaaacccatgctgtgactgccattcctatacggccaagtttcccaccaacccaacaatgtcattactcatccaataacaaacctcctccttacccaccacccagttatccacaaaggccatccctaaatcaaccacaaagtctgtctaccgcacttccaatgacgaagaccacttttatcacaaacaataataacaccaacaaaaaggaattttgcagcataaagcctgtatggttcaccccaaattccgttgtcatatgctaaacttgatcccatatctacttgataattcaatggtagccataaccctatccaatgttcatcaacctccgtttctccaagaatacgactcgaacgcaacgt

SEQ ID NO: 177210 - DNA, 467 bp, Glycine max
  unsure (1)..(467): unsure at all n locations
agctntntgttctcttagaaaactatgtgttctttnttttatccttattttctctaaccattcttctgaggagtttctctacttgcacccttcttctaattcatcatcagatgaatcatcgactttaagtgctttggatgaacttctcaagacttgctctctggatgatgatgccttcttgttcttctggctattgaaagtcaaggacttttttctttcgagtccttcatcctactgaagtttatgaaccttgagggatatagaatcaagattctttaaagttctcagtgttgttacctgtggtctccacttcttagatagagttcttataattntgtcaatgtcatcataattatcacaagttttacctaaggatcttagttcattaagaatggtttgaaaacatctgaacatacattatatatctttgttttcttccatagagaagagttcatacttacgtgtga

SEQ ID NO: 177211 - DNA, 454 bp, Glycine max
gtggagaaccaagccaatcagaatgctagacgaaatatatatgggaatagaggtaacaatggcggtaatgacggaccaaggcagaaccgggttgagggagtaaagctcaatgttcctcccttcaaaggtagaagtgatccagatgcctacctggactgggaaatgaagactgagcacgtatttgcctgcaatgactacactgatacgcagaaagtcaagctagcagcagctaaattcttcgactatgcccttgtttggtggcataaataccagagagaaatgttgagagaggaacggcgagaggtagatacatggactgagatgaaaagggtgatgagaaaaaggtatgtgcccactagctataacataaccatgcgatagaaactccaagggctgtcccaatggtaattaaccgtggaagaatattataaagagatggaaatggcgttagtga

SEQ ID NO: 177212 - DNA, 475 bp, Glycine max
  unsure (1)..(475): unsure at all n locations
agctncatgatgaatcaagattgattcttagatgtttgtttgataaaaagatgatgaccaaaaagcttcaaagttcaagaacacttcatgataacaaagatgatgatctcaagaatcaaagaatgagttcaagattgaatcaagttcacttcaaggatcaagaggaaatntgatttcaagaatcaagaatcaagtttcaagattcaatttccaagaatcaagatcaagattcaagactcaagatttaaaaatcaagagacgattcaatcacgataagtattaaaaagtttttcataaaattgagtagcacatggatgtttctcanaacctttttaccaaagagtttttactctctggtaatcgattatcagattattgaatcgattaccagagcaaaatgattttaaaaatctttcactaaattacaacgtccaactgattcaaatgtgtatcgatacattgtttggaatcatta

SEQ ID NO: 177213 - DNA, 455 bp, Glycine max
tagctgtggagggtttccgtaaggctttatttgcaagatattatctttctctgatccaaagattcatctggggtggttagttctaaaaaggctctctatgttggagtgtatgctcaatcacaaaggatggcgtgatcactgaccgccttattttctattatctccattgccccctttggtgtctttatcttaatcttccccctcgcggatgcatcaaggagtttctttgattatggtcgcatgccatctataaagatgtttatttgcaccgattcactatacccatgtgtatgcgttttaccgagtagtccgtggaaatggtcgagcacctcactgagggattcatcacgaaattgatggattgaatatatgtccatattcccttcagcgggctttgactctatgaaatatttcttcatgaactctctatgacttcttaccaagttctcaagcta

SEQ ID NO: 177214 - DNA, 478 bp, Glycine max
  unsure (1)..(478): unsure at all n locations
agctttaaactcaattacaatagtcctattattttcaaaatggngtaatcgattacaagattttgtgtatcgattaccactgtgtttgaccgttgaaattcaaattcaattgtgaagagccacatcctttcacaaaaatgctttgtgtaatcgaatacaatgatttggtaatcgattaccagtgatatgttttgaataaaaatcaaaagatgtaactcttccaatggttttcaattttttctaaaggttataactcttctaatggttttcttgaccagacatgaagagtctataaaagcaagtccttaacttgcatttttaagaagatcaattattacaatcctttacaaccttttgaaactcttgagcatcttattgaagttcttcttcttcttcctttgccaaaagctctctaaagtgttctaattttctatacctcgaaaacataagttngcttccatcttttcattccttctct

SEQ ID NO: 177215 - DNA, 438 bp, Glycine max
tcacatttattatgtcccttcacacgggtgtaacaagtcttattttatcctcacatgccttaaatgttttgctatatattggtggtcttgattattattgatcaaacatttaacaagaatcgtgtttgttactgagacataaggtagtggtaattgatattttgttgagagacagcaatgttaatccctcgtaccccaaatgatgtatgtttaatgggtgacgataagctatcaaacaatgatgatgagctgtatgttatcaaactcgttgtggcttaacttctctttcggaggccgagttaagagcttaaagaccaatatgcaactggattattcttctattcaagcaaactttccaagttctttcgcttgcttattttggcttataactacatcaaataaaccatgtatcaagtgttccattgtgagataacatga

SEQ ID NO: 177216 - DNA, 481 bp, Glycine max
  unsure (1)..(481): unsure at all n locations
agcttanaatccattatggatgcttttttaatagtattctaatggatgcataagccaatagtattctaatggctcaaaatttgttctataattagtgtctattctagaccaatcttagttctgaaatttcaattgaaaagtagtgtgaaaacaagtgccaaaattagaggtttttgagtctttttttttactctactctagagtcattctaggtttctctttgagtcctagcttacttttatgtgtttttcattgctttaatcgttgaataatccttgaaaatttgtcttgttaaaactctattggtttagttttcatttcatttttttctctttatttattatttgnctctttgtttccttttttgtgaaattggaaatgaaaatcggttccatcaattgaagaatttgagtcaagaagcaaggagtcaaccaccttaagagctattggactaagaagtactccaaattcagtgacacac

SEQ ID NO: 177217 - DNA, 458 bp, Glycine max
tctaatgcttctaaaccaccccgtttctctccctcattggcttcattaaaaagccaaagtacgtggtaaacaacacaagagcattcatataatccaatataattaaatttcatagaatcattcataagtcaaaaccaaatatattccatccaaatataatccaatcataaaataccaagtgccaaataccgaaagataatgaaagttcagaaaatgataacttagaaaacatagccaaatacacgacttataataaacaataataataatctaaaactaagaaggtggtggaaggtcgaagcaccgacgaagataagtcacatcctcttcaagctgggtgatgcgggtatccatgccttcaaagcgaccatccaatgaatcgaatcgttcaccaacatatgtgcggaggcccgcgaactctaaaataacttcattcataattggctgatgaatcatct

SEQ ID NO: 177218 - DNA, 452 bp, Glycine max
atcctctaagtcacctgcggcatcaagctaactctcttgaggttcttttttaacgtagcttcctggcagtttcccttaccaataacccacattcgttaatgttaatctatgcacgcttcgtgttcgactaattgcctctaagcttaacttacgttcatgcttaatgaatgaagggttaattggtgtatgcgttgcctaattacatattgacaaccctaagttgattttctcttagtaaattaaaatagggttggattaagtggttaactgttagggacgaattcttcataacctaggacaagagaatggcttctgaattagaggaaacaacacgtttttactattattaatttcgtattccaattcgcttgttctttaattcacacaaaaaaactaccccccccccccattgttattattactgcaagtatattatgaacatttggttatca

SEQ ID NO: 177219 - DNA, 465 bp, Glycine max
tctgccactatttgctatatatagggggaggagtttatatgatatgggttcaaccttcttggcacttcgtactcacttgaaattactgaggaaaattgtttccgtgaagaaaatccaagccgaggcgcttccgtaacgtttccgtgagtaattacgcgaagattttcaaccgttcttcgacattcatcgttcgttcttcatcattcgtcgatcttcaaccggtaagtacccctaatcaagcttttgaattcattctatgtacccgtggtggtccccatgtgtttcgtgtacttttattctcgtttcatttacttttcgtactcccttttgacgtgctttagtcatttatttaagtcatttctcgcctaatcaaaaaatataataaatttccaccgatcatttgatttgaatatccgttaatttcattaaaatgaaatctgaccgttcgtcatatataaccatgtt

SEQ ID NO: 177220 - DNA, 487 bp, Glycine max
  unsure (1)..(487): unsure at all n locations
agcttagatgaagagtgcaacgtgtcttgttntattattttaaatcatattaattagatgaatttaaaatgcattgtattatgagtntatacggaaaagaacttacttaaaaaatggtgagtaaagtagtaaaccatgttacattaatggcgtttccataaatactcaattntagtatattacgtttttcatantttttatatagcgaacaaatatatatgctcgtatatgacttttaacttacaggtggtgctacactcatatttgacgctgagcttgtgggagtgaacgacaaaagtttaggcgaaggaaaaggaaacaacgaactgtagacaaatcataacaaatggatagtcgagcttttgctatcttagactaattttgttcctcaataatatgcttttatgacccaagggttaactgttttactatgaggctatattagaaagaattatcttggtgtacccctatcatctgaattcatctc

SEQ ID NO: 177221 - DNA, 452 bp, Glycine max
tgagaagctctgtgagaaatgagataatcaacttctgtttctttttatcaattaccatgttttagataatgcagaacaaaaagggatttgaacgaattaatcgattatcatattggataatcaattaaatcagttccaactgttgaaattataaatactctcacttattttttctcattatgaactcttgatacaattctatcttttagaaaatatattctaagaatcatctaagggaattactctgcatttcttcaagagattcaagttgatcaaaattctttcattcttcatcatgagttgatgatcaaaggaacagcttgaatatgcttgtgatttacacattaaagtgtattcaatccaattatgatttctttctactctcttaatcttggttatggataccaaaggtgtgttgagaagatatagtttcaactcttggaatatcttgt

SEQ ID NO: 177222 - DNA, 424 bp, Glycine max
agcttccattttcaattgggagcatttctatatattacgagactctgttggacatcagagtaaaaagttattgtcatttgaaattactcaaagcttgtgttctcaattttgagcgtttcaatatatgacggtacccaatcggacatccgagtaacaattattgtcatttgaatttgttacgaaattccgttttcaacttggagcaatttaatatattaggggactcaattggacatccgagtaaaaagttattgtcgtttgaatttggtacgagcttctattttcaatttggaatgtatcgatatattacgggactcaatcggacatccgtgtataaagttattgtcatttgaaaatgctcagagcttctgtatctcaatttgagcgtgtcgatatattatgggactcaatcgaacatccgagt

SEQ ID NO: 177223 - DNA, 448 bp, Glycine max
tgtgcaaaattcaaacgactataactcttcactcagatgttctattgagtcccggaatatatcgagatgctccaaattgaaaacggtggctcatatcaaattcaaacgacaataactttttacttggatgtctgattgagtcccgtaatatatcgaggcactcgaaatcgaaaacggaagttcgtagcaaattcaaacgacaatacctttttactcgaatgtccgattgtgtcccataatatatcgagatgctccaaattgaaaacggaaactcatagaaaattcaaacgacaataactctttaatcggatgtccgattaagtaccgtcatatatcgagatgctcaagaatgagaacacaagctctgagcaatttaaaacaacaataactttatactcggatgttctattaagtcccgtaatatatcgagatgctcctaattgaaaat

SEQ ID NO: 177224 - DNA, 427 bp, Glycine max
  unsure (1)..(427): unsure at all n locations
agctngnnctnngatttttctaagttcttttaacaagcttgaacaatatattngtccttcatttaactgtctttgggcttggcggccacgctcaacaaagtattttcgacacctactgtacgttgatttgaccaacgctgttatgggaatgttgcgacaatccttcaaaaccttattgatacattctgagaggttggttgtcatgtggccataccgacgtccttctctatcataagccatcgtccatttttcttttgaaatgcgatcaatccatgttgctatggctggactcagttcacgaaatttttctagattntgatcaaaaatgtgcttgcaaggagtataggctgcatcaaattagttatgaataagaaatttaagtatatatcaaaagtaaataaacttgaccatganatatgaaatctta

SEQ ID NO: 177225 - DNA, 477 bp, Glycine max
  unsure (1)..(477): unsure at all n locations
tcttgcaactnttcgtccctagcacaattgtcaggattctttctattcctgcactggacgagtcgaaccaaccaattccaaacaaggtcatattccattgacttttttggtcattgaatgcatgcattgatgcgtttgcattttgttaacccattgtgcaaatcgatggaacatggttatatggaagatacaaagggatgctattaattgcatttacataagatgaggctaaaaacatatttccattggtatttgccattgtcgagggtgagacagcagatggttgacacttctttttttttttttgcaaaacttgagaacacatgtgacaccacaacatggtatatgcttaatctctgacaggtatgagtcaatcaaaagtgcatacagacgacctgacaatgggtggacagtatacaacttgtcacatgtgttctgtattcgacacattnggtcaaaatataaaaaacaattcaa

SEQ ID NO: 177226 - DNA, 438 bp, Glycine max
agcttgcttgcccctggttgacaaaatgtgcagatgacgatgttagtctctgcgtgtaacgggctcgcttgcctctggctgacaaaaggtgcggataaccataaggtacctccgcatgtcatcggactcgccgtctctggatgacaaaaggtgcagaagacgatgttagtctctgcgtgtcaacaagctcgcttgcccctggttgacaaaaggtgtagatgacgatgttagtctctgcgtgtcaacaagcttgcttgcctctggtgggcaaaaggtgcagataaccataaggtacccctgtatgtcatcggctcactgtctctggatgacaaaaggtgcagaagacgacgttagtctctgcgtgtcaacaggctcgcttgcccctggttgacaaaaggtgcagatgacgacgttagtctctgcgtgtcaacgggctca

SEQ ID NO: 177227 - DNA, 469 bp, Glycine max
  unsure (1)..(469): unsure at all n locations
tgacaaagaaataaaaattatctaagcttgatttccgtctgcgcaagagttgcaatttgcattgagtcatagtgtaatttgtctctgtgtgagtgaactctatgcaaggttcactctgagtacacatatcccaagggaggttagcacactaatctatgaagttaacacactaatccaaaagattatgataaggattangccttgtaattccattggtccaaccatttcacctacaataagtgttgcttttttaaaagccaaagcttatgccaactctcccattttgttgaagcttttggagaaagaagagaccatatttttcttcttcttccaagttttaccaagttgtcttgagcccttcttccatcaagcttatgtaagtgacctccattttcaactctaaacttgattttcacttcattgtcttgctctattctcacttgtagtttcaaaatcttatgtttcactc

SEQ ID NO: 177228 - DNA, 482 bp, Glycine max
  unsure (1)..(482): unsure at all n locations
acctgaggcatgcaagcttcttatcattgcttaacaaagangtcngcttggttctaatannnccgactcagagaatagttgagaaaatactgatgactatccctgaaagatttgatacatccttggagaatgctaaagatataccttgatagaacttgtaaatggtttgcaagcctataagcaaagaagaaaaatgaggactgagggttctatggaaggagcattgcaagctaaattgcaaacaaaccaaggagagaaaaacaagtgggtgaaatacaagaagaaaaaggaactgtagccattgaaagttgtgcagatacaaaattaatttatgatgtttggtatgtacctgagattcatcaaaagttgttaagtgtgggacaattgattaagaaggagtataaagtcattttttgaaataagcattatctgattaaagatgtcaatgacaaggaatatctcaatatcaaaatgagaggtaa

SEQ ID NO: 177229 - DNA, 469 bp, Glycine max
atagtattcataattaagcaatatatttgtttgtttttatataaagctatgagtgaagcacagttcataacttctaataaattttagcaaaattttatgataaggaatagaaaattaaaaacatatgcttaattagtaaaaatacggaaagaaattaaaaaatataatcagatatgtattatatagaatgaaaagggaatagtttcaacaatatatcatgatattacatagaaataaaaattatttttataattttttcaatggtgttatttttgtgtagggatctataaactaaatttttatcgcaaaaagtgattaaaaatataagagaatgaacaaaacttgatttgttatcacaaaattggagtttaagagataaaataaattcttaagtggacggatgagcataaagtcttacgtcgtcataatgtaattttatttacattcgttatgttaaagtatacaacac

SEQ ID NO: 177230 - DNA, 468 bp, Glycine max
  unsure (1)..(468): unsure at all n locations
agctntcttgagaaaacttccttgagattgctttttgagaaaactnccttgagaagcttctttgagaaaacttccttgagaagctagagcttagctacacacacccctcttataactaagctcacctccttgagaagcttccttaagaagattcctaaagaagctagagcttagctacacatacctctctaatagctaagctcacctccttgagatgagaagctagaacttagctacacacccctataatagctaagctcacccccatgacaaaaaacatgaacatacaaaaaaaagtccttactacaaagactactcaaaatgccccgaaatacaaggctaaaaccctatactactagaatgaccaaaatacaaggtccaaacgaaggataaacctattctagtatttacaaagataagcgggctcatacttagcccatgggctcgaaatctaccctaaggctcatg

SEQ ID NO: 177231 - DNA, 462 bp, Glycine max
  unsure (1)..(462): unsure at all n locations
tgtgaagatatgatcacattntccagaggaggaaggaatccactgtttcttgcagacaagaacaagacagaagagacataatccagctcacatatatcagtgcacatcccatcaaccaaaatctgtatgaaaaacccagaccctaagaacctcaacaaaaatctgaactacattaaaataatatccaaaaatctttcaacctatgccatgaacaagtctagacaattgtgatgtggagacaaataggaaaggacatatttaattttgacacagaaacagtgtaaaagattntaatatgttgatttagagcaaagtttaatccttttagtttctaatttgagttttggtccctggaataacttttggtggttttagtgcatgtttggtttgtcatttgctgccttgcaaatgtcctttcacgctttccgcagctgcaaacatagaatgaagcaccctggtgga

SEQ ID NO: 177232 - DNA, 397 bp, Glycine max
  unsure (1)..(397): unsure at all n locations
taatatggtgcctatttccacctgccttgaatcctagtctatatgttcgcttcaaattccacataaaaagaaagtaaccatatgtcaacacatgaaatcccattaacctgatctttagaagagagacaatnttacagtacatgttacacaaaactatgtttagctgaatagttaggtttcatcttcttgctcatcatatgccgccagcaccacgaacagcacattcttgccctgcttaatctctgcaactggcaaatatggcgctctcattcctcctttttcgttttgaattggatgacatcctcattcatgcttattttttcctatattcattaagtcaaaagtggtcacatttgaagatctaatgctccagacaaaagaccacattatttgaact

SEQ ID NO: 177233 - DNA, 492 bp, Glycine max
  unsure (1)..(492): unsure at all n locations
tcatgcttgtccttcttctgcgccaaaccgtgacggaaagaccctgttttctcctttttcagacaccttttttctaactaaacggtttgaatgataatcaatatgtgattattcccgtttaaaagttcgctgtatgtatgcgctgactgagtagatattatatacaaaacatctattgccatggcattattatcttatcgtgtcatcgttatctccgtgttgtattcgttaggagcaaatgcggactacgatacgagttatagtttgaagaccgatatgacttgacatcatggcgacaaaatagggcgggaatatagatgagacctaatttccgtacgtcaataacaacaattgcattgtttccggtaaatgtgctactatttttcttcttcttttccagcagaggataactatngaactaagggatttcgtcttttaatgtacagatctataacattatagactctacacataacagaatgtcatattgtc

SEQ ID NO: 177234 - DNA, 486 bp, Glycine max
  unsure (1)..(486): unsure at all n locations
agcttgcccagagaaggaatccacggattatatgcttaccaccttgaaagactggaaagcggtttctatgactcctctgcggcctccacataaggcatagaggatgggcagctcaccaagatgtcttcctcgcctgatacgatgaccagatgcctttccactatgaatttcaacttttggtggagcgtagagggaacaactctcactgagtggatccacggacgccccaacagacaactgtagggggggttaatgtccattatttggaaggtaacttggcatgtgtgagggcctatctatactgggaggtcgatctctcccctaacctctcggcgggtgccgtcgaatgcacgaaccaccattgaactcggctttaggtgggaggcattgaatggtaatatctccaaagtgctcttaggcatcacgtntaaactggaaccattatcgatgagcaccttggctacgatatgtgccatacacttgact

SEQ ID NO: 177235 - DNA, 439 bp, Glycine max
ctcagcttccctcttgtacatatacccctcagccaaatagaatccatcttgtgcctttttcccataactcgtaaatgggagagaaatgttcatctaaagcatacaagtccctaatgttatcaaatcctaaaatttgagctctttgtgagaaaaacaatgtctgtctcctagagaggacatcaactaccacatttgtttctctctttatgtatttgataaaatatgaaaaatgctctatgtactctacgcattttgcatgccttttgtttaacttgttttgccctctaatgtactcaagtgattgatgatcactatgaatgacaaattccttggaaacaaggtaatgttcccaagtttggagggctcttattaatgcataaagctctttatcatacgtggggtagttgacggtggcaccatgatatttttcactataata

SEQ ID NO: 177236 - DNA, 501 bp, Glycine max
  unsure (1)..(501): unsure at all n locations
gaccttaagtcacctgagctgcaactgcttctacattcaaattgggcttatataanaaagntatatgacacaacccgaaggttttcctctagtgatggggctcacttggtttgcaagctcaagaaatcaatatatggactacaacaggtcaatagtatttgaaattccgtagtgtcatctcatcatttggctctgttgagaacagtatggatagatgcatataccacaaggtcagtgagagtaaaataatatttttagtcttatatgtggatgatatacttcttgcaaccaatgattttgggatgttacatgaagtaaaacaattcctttctaagaattctgacatgagggatatgggtgaggcagcatatgtcattggcatagagatccatagaaatcgatcttaagggattctcagcttctctagattaataacaatctataaagatttctgatgaaagattgtttacccaacatggcacctattgtgatagattcaat

SEQ ID NO: 177237 - DNA, 456 bp, Glycine max
ctaaggagatattcgtaattgcctaaatctatgattttctgttcttagtaagtaaactccagatttcattccccgtacatacacatccctcgttcttttattccattttaagaggactatataaatgataagagtgtataatatatcactaaaatatacttatgattcttcatttgtctttcaaataaaattcatttttttaaaatttcagtttggtctttttagttttaaatttggattaattttttccttctattagcttgaaactaacataacttacattttaaaataattaatttcaatgtaattaattgttctaattatcttaagacctacttatcaatttgactccaagttatgttaaaagattcaatttggtctccaaaattttaaaagatgtaactttgtcctcacgttgtttaaaaatatatcaattgagttatttccgttcattta

SEQ ID NO: 177238 - DNA, 481 bp, Glycine max
  unsure (1)..(481): unsure at all n locations
agcttgagactctnggcaattttttatttctattcacttaaaaagttgngactcttgataaaaatttcagaaacaagccacttgaagaattgtgacttttcgaaatgtatttttcaaaatcagtcactggtaatcgattaccattaaggtgtaatcgattacacatcaacagatgtgactcttcattttgaattttgaaaattaaaacatttagaagctctggtaatcgattacaagtgttgtgtaatcgattacacaagtttaaaatgatttaaaactgttaaacacaagttgtaactcttgaaattagaaatcttaacgttttaaaacactggtaatcgattattaccttntggtaatcgattaccagagagtaaaactctntggtaatgattttgtgaaaacttcttgtgctactcaatattttggaaaacgtctttagtacttatcttgattgagtcttctcttgattcttgaatct

SEQ ID NO: 177239 - DNA, 458 bp, Glycine max
caagaaaaactgctcttatcttctctgggacatttgaaagcaaaggaaaatatgggtgacttacaaattacaatcctaatccatttcctcttctgaatggcatattttcagtatgtccaacatcttattttttgcttgttcattatgctgcatttgctgaagctcctgaaccacattttctttcgtgaaggattcagtgcaacgaagactatgaacgatcaaaaactcacagcagttcataacaaacaaggatcaagattcagagtatctataaaagcatgtaagcaacaaccaatttgcataatcatacatatccaattgaatcataacaaattgccaaaataagccttgtcagaatatctggaccactcaatatagtaaagtatgcacaataaatgcatatggagatacatagatacaagcagatgaacaatgtagtttcactaccagatcaacac

SEQ ID NO: 177240 - DNA, 444 bp, Glycine max
  unsure (1)..(444): unsure at all n locations
ggatccttaagtcacctgaggctgcaagcttctcatatattatgctctttattttactntcgtgtcgacagtaatgaccattttaattttcgagagcattcggtgttcaattncgagcgtctcgatatattatccatctgaatcggacttccgtgtgataagttatgaccacttgtatttctcgagagcttccgttgtgcagattcgagcttctcgatatattatgcacctgaattagactctcgtttgaaaagatatgaccatttgaatctctcgacagatttcgtgtttaattcaagcgtctcggtatatatgcgccagaatcggacttccgtgtgacagttacgacatttgaatttctcggagcttcagttgtacatttcaagcttccgaattattagtcaccttcatcagactctcggttgaaatgtatgacttttgatt

SEQ ID NO: 177241 - DNA, 291 bp, Glycine max
tcattgcctaacaagccaacttacaacagcaagtttgtattagactcatcataaggatgcacaggtcaaagttgataatgtgaaaagatagtgtgaccaagtgaaggtgcaaattgcaaagaagaatgaaagttattctaagcaagccaacaagaataggaaggaagtgtgacttgaacctggtgatgatcctggacattctgaggcaaatgtgttccaagaaggagggaatgatgagaatcatgatactggcctatttaatgcttatggcccaagtggatattgtctaag

SEQ ID NO: 177242 - DNA, 465 bp, Glycine max
  unsure (1)..(465): unsure at all n locations
agcttgtgtcctacaatgctgtaaatctatcccattagtggggctgctcatgaagatccttacagcacctgagtgggactggttgtactcactacctgagaacaacattactacatggaaccagtgcataagtgccttcttaaggatatatttttctctcatgaagatggatcagtacatcaaggacattggaaacttcgtgcagaaggaacaagagactntacttgaagccttggaaaggctgcaagagataattagaagtttctcacatcatggcttttcacctcaaaggctagttcacattttctatggtggagtgtcctcacacaattggacaagtttggatgctacttgtgaggtgaatctcantttaaaaccccttactaatgacctcatgtgtagatacaaagactttgacttggattgtttgatgacgccatatgaattgtgatgtttgatacctta

SEQ ID NO: 177243 - DNA, 459 bp, Glycine max
tgccacccatctcacccaatcgagctcatctcgtctattctagtctggttgcttcctccataagcaacaaccttctggaggaatcttctggagggcccaagtgggcctggttgctatttacacccccatttttactaagttcaccccactgccttttttttgtgattcttttttcgtaaagttacggaaacttacgaatttcgtaacaatacttgttttctttccgtaatgttacggaaccttgtggattacataatcatcccctttttgacttacggaattttacggaacctcactaattgtgcaacgatgcttccattggatttctggtgtgtcatggaaccttacggatagtgcatcaatattctcttttggtttccggcacgtcccggaatttcacatattgcctaatgatgggtgccaagcaccttacatagaccaaacataattctcatgtca

SEQ ID NO: 177244 - DNA, 430 bp, Glycine max
agcttatagagattgtatagactcggtttatctccctcggggagtcattttgagggggtggtgtttcctgcatcaatgtatatgaggatgctgcagtgagtttaccttaacttttagaaatagttattctagtgcagccacaagttttagtttattaaaggccatgcagccaatacagaatttttatatgtggaatttatgcatatatattcgcatttataaacaccacctaactagaggtaagcatcaaagggttatataaagaaagttactgtaccagaaaaaaagttgcacagtagattgaggtgcgacagtgaagcatgcaaacatatcatatatgagcctagcattgaaatggaaattttgaagtaccacttaattatgggactgaagaatgataactttcattttgatgataagaagcatgaat

SEQ ID NO: 177245 - DNA, 452 bp, Glycine max
  unsure (1)..(452): unsure at all n locations
cctgagtggaaaaaggtgcttggtaccatcttgttctttcttaatacacaactttgaagactcgaccatcgtaccacaataccacatcacaaccctatttatgggcttgccctggttactatttagaggcatatacgaatccagcatgggccatttcaaatagtccagaattaaaacttctcaatgaatacagtcgctgaattatgttttatataagataaagaaaatgttccgaacaaccatataatgtaaagggtccaaaagtgattcacagttaaaaaagatgcaaaggtatcaagtcaaggaacataaaaccaaatgtgctgctgcatagacatcatatatcatggaaagggcgaaaattntattacccttgccgctacacaacatgaacaaactgataaataagatttttgagtgagataatcattacaataacaggacatgatcgg

SEQ ID NO: 177246 - DNA, 470 bp, Glycine max
  unsure (1)..(470): unsure at all n locations
agcttgcttctacaatctctcctcttttgatgatgacaactttngaaatcaagaaaacacacacacacactttttcctagtcgatcactctcataaatttccattctcctcctttgtttttgaatttatgcttctcttaaaattaagttgattactcatgtgagttcttgatttaatccctatttctctccccctttggcatcaaccaaaagccaaagtgcgtaacaaatttgaagcatgcaaatacaacgaagcatccatacaatattcatgggataatttaaaccaaatcatgaagcaagaatcatgaagcaagaaccatgaatagatcaaatatatagaaaccatatagtcaaataacataattaatatttgttcaaacataccatgcaaataaagaaatagtaaattgttcaaatataataataatatagattatttggataagtcactggcatctagcagtccta

SEQ ID NO: 177247 - DNA, 425 bp, Glycine max
tctaaacacaattcatcaaaatgaaatgatacttctttgttcatgagattgctcaaagggttggcatgcttataaaaatccttaatgaaatgcttgtaaaacccaacatgtcctataaagcttttgatgcctttgacatttgttggtagaggcaatttttcaatgacttccaccttggctttgtcaacctcaatgccatgaatagagattttgtggcccaatacaatgccttcagtcaccataaagtggcatttctccaaattgagaacaatatttgtttcaacacaatgcttcagtacaatgtcaagatttgaaagacataaatcaaaagaaaagccatagacaaagaagtcatccatgaacacttcaatactcttctcaatgagattagagaaaatagcaagcatacaacgctgaatgtttca

SEQ ID NO: 177248 - DNA, 423 bp, Glycine max
  unsure (1)..(423): unsure at all n locations
agcttgtctttgaaatgatctttgtgttttattgncattatagnnccttaattctcaatatttgttgcagcttacaagatagtataggtagtttcctagtatgacaatatactaatacataaaaagatgttcaactctactggtagattagaaatatgtggccctgaaactcaggtgtggagtacacatgaattgctttgatagttttcactgcaagtatatttcttcttcttgacttgttccttccatgtacttagtgtttcaacatttagctacctataaccaacctgaagtgcattatgttttctttattaacttacatggttatttcacctctagtttatttctatttctttttattacattgtctataactattccnccccccccctccccttttgatattaacctgtagaggaacat

SEQ ID NO: 177249 - DNA, 329 bp, Glycine max
acaaatttgtgtaatttgtgcgctcaaatctattatctcatgtggtcaattggatatatgaaattaacattctacatctgttatttggcactatgttacactgtccaacgcatcacaaatttttctttgatttctcttccccatagatttgaactggtttatatagttctacgttgctgggagtaaaatcaagattaaagttgcgtaagccatcaatgaagttaaaaattgcaactaacatatcgaacacatgatcttagcaaagcagggataactacaaaaatggaatgattacattcatggcaaacacattccaaatatggaaatat

SEQ ID NO: 177250 - DNA, 497 bp, Glycine max
  unsure (1)..(497): unsure at all n locations
ctctaagcacctgaggcatgcaagcntaagattagacaattgatgtatgattcttttcatgtatatatacacaaattcggcagatatgctctgatgccctatcaataacaataagggtaaaaaataatatgaaactttaaaaatgaattataacaatgataaaagtcatatttttaaaagaaaaatgttaaaaaatggcatagatataattattttaaaagctttcatttaaatgaatgagataaaaactaaaaatatttccctttgtaattcaatattaacctgtacatgtttatctcaatagatgataataatttttaccatgaaaacttcacatctttgcatcttgtgtatcttcaatccctcagattcatatatatcagcatgcattcatctaataatttcatcatattatgtataatgtatatacttatattaattataatgttccctctgacgtaatatatgtcattagttatggattagatagaatatac

SEQ ID NO: 177251 - DNA, 474 bp, Glycine max
tgtttagtaccacatctctgcttaccatgccaccttccttggattcctctgtgccaactgcactgctggaacatcaccacacaatggatcctaacacctcaccatggtgccccgacacaatcaccgttccctggagagctcgcgtctctccccaaacgatgccgcatatctttcacttacccaagatcacgccattcccaaacgacaacgttttgtccacagcacatacactataaaccccgcctacgcctctccccataccggaaaacaaaaatctaaaagttttccttcaaatacgacccctccttttgtcgcccgttcaagctccgtgcaatagacctaatagcgcgtgggctcagaaccccgtcatatacaacgcgccaccaggtgctgtaatttcaagaacaagaattccaccgcgtgcttaatggttaacgacccacagtcgatgacgctatcaactcctgtaagctc

SEQ ID NO: 177252 - DNA, 482 bp, Glycine max
  unsure (1)..(482): unsure at all n locations
ttaagtcacctgaggcatgcaagcttagacgactttgtgtgaaccgagttgaccttattattaattggacaagttttaatataatgtataagaaagtgaatctgagccttttacccctttgaaagacttgtatttaaaaatgttttaaaaatacttttaattaatatttaaatctttattcctttattantatatatgtgaagggtagagggtgtcacaagagactatataaacaatcttttaaaaataattcaacgggaaactagaaagaaaagtgagccaagaagcctcattgtgtttaagtgagctagagaccaaccggcgcaagctaaaaacctctataataggaaataccaacagagtctgctctcaacagataaagacaaaatctggaacatgataaataatagaataatcagcagacattagagaagccgtgtgttgcaagcaatcggccacctgattacnctcccaaagcacat

SEQ ID NO: 177253 - DNA, 486 bp, Glycine max
  unsure (1)..(486): unsure at all n locations
tcgtgcaattcatattcactatttcttctcccttccacttgcgttgcattataaagaaggccacagagactgacaaaaagaggaatcaaggaaaaagaaggaaagggcattgttacggttttgaattttgatacaaacatgtaataagatagttcatttaatatgaaaataagagaagataaattgttatctaatcatttagttatataaccatttaatctggtttaaatatttttttataataacttactgaattattagagattttatataatgttaaggagttggttgagtgaaaaagaaccaaaaatctcacaagtgacaagtcacaatttcaagctcttgtcatccttttggagatgaggttccatttaatcttttatagttgagttgattgaataaaatatgtaaattattatgaaatttttagtatttatgttttatgtgtatgcataaaanaatggtgtcatgtttaattgtctcata

SEQ ID NO: 177254 - DNA, 483 bp, Glycine max
  unsure (1)..(483): unsure at all n locations
ggatccttaagtcacctgcggcatgcaagcttctattgacagccactcatgacactatgtttcatgtcttcctccttngtgagttattgttgcaatggcatgtcgacatggcatccctacatcaaagttgtaaaatcagcacacatgtaggttaggaatgaaaaataaactataaagaacacaacctgttagttgccatactccacaagtgcatgtccattcacctaaattgacctcaaccttattcccccacatgtggacctcatatctcaggcccatgttatcaccacaccaaatgggagtccattgattagcaaaatgaaattctttttctagtcttttatactgcactggacataatggtccaggttttccagaaagttaaccttgcgggcagccatggttctcatgatataacttctaattccttcaagcattgtgataataggctcgcatctatactgcagaattctggaattgaat

SEQ ID NO: 177255 - DNA, 374 bp, Glycine max
aatatgaggacttttcttttctagtcacaatccaacttcactaatgtcaccccctcctacactatcgtcttgttggattcccatcgctccttcacctctggcctctcctccaccaccatctattctcatccctcatcaacaccatttttcgttcctcccctgtgcttgccaaacaatcatcatcttagtctcttactccgtggtcatcgacaccagtgttatgatctttcctgcaactgtgagagatgcttcgtctctgtattcgtaacattgtgttggtgaagttgatggttatggaaaaaaattgattgaaaggatgagggttatggtgatgggtctgttgatgaaacattgatggtgttgtaccatgcctg

SEQ ID NO: 177256 - DNA, 450 bp, Glycine max
  unsure (1)..(450): unsure at all n locations
agctngttgatggttatctaattgtnnttaagcaaataggatgcactcttatggctgatgggtggactgattgttgtaagagaactttcattatatttctagtttattggcctaaaggaactgttttcttaaggtatgtagatgcttctcatgtttccaaatctgctgaaatgttgcataagctttttagggagaaggtgttattatttgggcctgagaatgttgttcacatagtgacaaatagtgctgaaaattatgttgctgctggtagattattggaagttgacttttctaagttatattggtctccatgtgctacacagtgcattaatttgatgttggatgacatanggaaattagaggaagtaagtgagattgtgacacttgcttcataaattaccaagtatatttacaatcattgttatcattatacttgatgaaaaaatatac

SEQ ID NO: 177257 - DNA, 485 bp, Glycine max
actctgcttactcgggccattcctgcgaatgcgaacttttgtttctgttttttacaagaaatataacaatcattacaaacaatggccagtcaacacttctcatggcccgagtgtcaacatgcactttatgaaataatcatattggggccgtgctattttatgacacatacatatttgcacacaataaatatttgtgtgaagcatattacgacacctatccatgttcatatattttgacaaaccttttcatgctacatcctatatatatacacacacatctttttggaaggcttcttttgttacctactcacaaatacacatattttgaaaaacacttttacgcttcccatccaacactttgtaatgcacttcatgctatatatattcacattatgtcatgcattttattcaactttctgcaatgcattttattcaacattttgcatagcatttacatgctatatataattacatatatacatacc

SEQ ID NO: 177258 - DNA, 410 bp, Glycine max
  unsure (1)..(410): unsure at all n locations
agctttcataagtaaagccagtgttcacctcntcttcctangagtcctctcacgaggtggagatagaaccatgttctcatgatgataattagcagccgaatgctcaaaatcaaaatgtgtcagaatcaccagcaacaaaatgctcaaaatgcacagaatacacggaatgctcaaaatgcacagaatgatcaggatgcacactatgactaactaatctatgaaaagttctatctatttcaggatcaaagggttgaaatcaccaagatcgcccctagtcatgcactatatgtaacaaatcatgtatttctcaaacaaccaccaagggtaaaactaagggtaaaactactatgatatccaaatgagctgataatatgtgagcaacaccctataatcatgaatagatatcacaa

SEQ ID NO: 177259 - DNA, 437 bp, Glycine max
gcttgctaacctattatggatctgtgtgttgagctgttttccttgagttttttatgccacaaataacttctttgagtgttaaaacacagggttagccttaaattgtacgtatatcgaagtttctagcaaaagttatgaataaaacaagttttataacattttatatgataaaattggtcacgaatataatctaatagcgagagctgtatggactaattttattaaagttttgacctcaaaaaccagtttattaggtgtgaaaatgtagagtagcatataagaattgtgaacaaccgcttcccagatcatcaataacactgagaataagttaagagcaaaactgtgttaaactgagcaacgaagtgattctagacactatacaacttatcattggagaccgtgtatctagataaaggtaccttagaattatttattta

SEQ ID NO: 177260 - DNA, 496 bp, Glycine max
  unsure (1)..(496): unsure at all n locations
cttaagcaccgcagctgcaactgaaaagctgcatttctcaccttcatgataccactcttgacatcggacaacacttgtccatgcttgggggcttgaacaactcgtcatcttcctacttgtcaaagttactacccccgacatcagacaatctcccttgacgcaggacaatctccttcgacactggataatctctttcgcccgcaagttggtttagaccctgnggggcttatgtattgttcatggttcacaaaatacacgcggcacactacttatcactcagatgtacacgtcaaccctccacgtcagccctcgcacaggtgcatagacgatgtgcccttgtaactgggctccccaactaacagattatccctaacctcttattatttgaatatatagncatctggttatctcttgacaggtattcaaagctatacaatattttaaagaacaattattactagctttatctctagatatacattatctctaactttat

SEQ ID NO: 177261 - DNA, 476 bp, Glycine max
  unsure (1)..(476): unsure at all n locations
tgacactataatactcagctgtgactggctganatttttaattatcaaaacattgtatatattgtgagtcagttttggatggtcttctgaactcaactcttgggcattcaaatctttatattctcacacacaaatgtaaacatttgttttctttttgttttcaaatttaatggtgagtttaattaagagttaaccaaattttattgttcattctttagcaacaacgtcaatcttatatgctagctctcttatctttcattatattcctcattgtagatgttgtttngaatgaaatgtcttaagttcatttacctaaaaaaatcaaaattattaacacgttacataacatacaataactgcgtaaaaatcataaaaataacgcgacatatttgatatttaaaaataaaataagattagatgatatattaacaagttagtatattataattttatgataaatatttaacaaagagaaa

SEQ ID NO: 177262 - DNA, 333 bp, Glycine max
  unsure (1)..(333): unsure at all n locations
agcttgcatggctcactaagccttattttatacagagagctaattgtgcttaacgagactcctcgcttagcgcgacacactaaacaggcttagcgccatcaggcgcttagcccaaattgactactggaacttaattggcttagcgagcaagctcgctaagcccaattccaaaatagagaagatatagcacttagcgagacttactcgcttaacgcatgaacaaaaactcagaaaactaaattgctttcggcttagcgagactgacttgcttagcccaggcttattcactanaagaggttgggtggcttaacnagactaactcnccttaccacc

SEQ ID NO: 177263 - DNA, 436 bp, Glycine max
  unsure (1)..(436): unsure at all n locations
agctntggttcaaacgttcactattagttatatatcttctcaacatcggttatttagaacatttacatcggctctaaaaccggtgttgaatgtatcaatgttaacatcggttttggagaaccgatgttaacatgtatatgacaacatcggttctctaaatacccgatgtttaacacaatgaacaacagaaaaaaagtgtacgcatgatgaacgttgacatcggttttccagtaaaaccgatgttaatatgttatattaacatcggttttactggaaaaccgatgtcaacgttcatcatgcgtacaccttttttctgttgttcattgagtttaacatcgggtatatagagaaccgatgttgtcatatacatgttaacatcggttctccataaccgatgttaacattgatacattcacacccggtttagtaccgatgt

SEQ ID NO: 177264 - DNA, 449 bp, Glycine max
tacacatcttaaatatgtgattttgtataccatatatataatacaaaggggattgctattggcactacacatttttctaatggcactatccatgtgggtgcactatatccatattccataattgccccttgaaaaatcgcacaacggaattatgtttcttttgtgccattgtggagtgaaaaataaaaataacaacgaatgtacacttttattgtacacttccattgtgcaattgtttacccccaaataacacaacaaaatcatgatgttggtatgttatgtgattccaccaataaatatgtaacaaaagtatgatgttgtttgtaattttattgtcaccctactaagcaacaaaatcatgattatgttgttttaatcattacaacacaatcatgattgtgtgtatgttagttcttaaaaagaaaatcaatgttgatattggattaaca

SEQ ID NO: 177265 - DNA, 391 bp, Glycine max
  unsure (1)..(391): unsure at all n locations
agctcttatataattattttattttgtcttgncataaatacctgcttggatgcttcaaagttctgccatatatgctttctcatcctcattttgcaatctatttattatgcttgtgcttttatatatatatatgcacagctttcattataatttctgattgtggaaactctgctgcagtaagttttgtcagtaagcttgtatcttatttcaatggttgtgttattctaatgttcctcaataatgttagatgaattcaatttaaaaaatatataaagaaattctcttgtgcagactgaaattttatattngtggaagtggaagtctctgtcaatntaattgtattcccatcataatccaatatctttcttttaatatctctgtgtttttcctc

SEQ ID NO: 177266 - DNA, 410 bp, Glycine max
  unsure (1)..(410): unsure at all n locations
ggagtgataaagcagctatgtaatagtattctctctaatcttcttgnggaatcttcattgacagcgtaagacccccaacagactctcatccatgttcagtggaactctagacaaatgctcaggttgttcaaaaacagactatcctctggaaaagttggtaatatcagcaaactctattgttagactcacaatcaataatgacacataggaatcataagatttttttgcccattactatcttagacacattttacggtgtctttgtaaacagataaagcatatatgtggttctttaagagactttcgtgttgttcatcaatcaaaatttcatgttcacctctatgatttgcgtgatatatgcttacattaaatgctgctcgagataaaactctaattctgactggagaaca

SEQ ID NO: 177267 - DNA, 441 bp, Glycine max
  unsure (1)..(441): unsure at all n locations
atcctctgagtcacctgcggcatcaagcttggatgagtggaaaaatttgntgcttgtggtacactcaaacttgcctctcttgttagagttcttgctagatttaggttctcaagccttgtccatccagttcttatttgacttcaatccagaaccagaaaactttgtcttgattgagctgtactntataagcaattctctaggatgagtttgtctagactctatatgcattttctggcacctcatctgctactagtaataaataatacattaataaagtgaaactctaattctaacagcagaaaaatgccaaaaacacctaataaacgatatatatgttttctccaattataattgcacacataccatctaccaaaatttcaaaacaccgcatgacaaagactgctgcaatgaagccagcacgagtcctcttgttggatttta

SEQ ID NO: 177268 - DNA, 453 bp, Glycine max
  unsure (1)..(453): unsure at all n locations
tgtaggccttggatcttcttcatcaatggagtctttggcttcttgaagatcaatgacagnggaatggagaaggaagtaagatgattggagatgccacttcaaggagaagatgagtcaagaacaagctcaccaccataggaagcaatggataagagcttgaaggcatgagaagatgagtggaaggagaaggagagaaaaggcacaaacttttatgcctcacatgaggtgtgaactttgaagtgtaattctcaaatgatcaaagttgataaaatacacacacaatgcctctatttataacctaagtgtcacacaaaattggagggaaatttgaatttctattcaaatctcacttgaatntgaatttgaatttgtggagccaaaacttcactaattatgattagtgaatttagctatggttcagtcactaatccaagatcaatccaagatctcaat

SEQ ID NO: 177269 - DNA, 447 bp, Glycine max
  unsure (1)..(447): unsure at all n locations
agcttccattntcaattacaagcgtctagatatattacgggacgcaatcggacatccgagtaaaaagttattgtcgtttgaatttgctcacagcatctgttttcaatttcgagcgtctcgatatattacgggactcgatccgacatccgagataaaagttattgtcgttggaatttgcccagagcttctattttcaatttcgagcgtctcgaaatattagagcactcattcggacatctaagttaaaagctattggtcgttgagtttgctatgagcttctgttttcaattacgagcgtctcgatatactacgggacataatcggacatctgagtaaaaagttattgtggtttgaatttgctaggagcttttgttttcaatatggagagtctcgatatattacgggacacaatcgcacatccgagtaaaaagtcattgctttagaatt

SEQ ID NO: 177270 - DNA, 418 bp, Glycine max
tctcggcaatcctcattccagcgatcagataggtgtttgcgtattattttgaacaacggctcacaaatggcggagagctgcgatatgaatctggcaatataattcaagcgtcccaggaaacctcggacttgcctctctgtacggggttctggcatctcaaggatagccttcaccttttcggggtctacctctatccctttctggcttacaacgaaaccaagcaatttccctgatttgaccccaaaggtacacttagcggggttcaaccttaattgatatttcttaagcctttcgaacaacttccgcaggttgacaaggtgttcttcctcggatatagacttagcaattatgtcgtccacgtaaacctcgatctcttgatgcatcatatcatggaacacagctaccatggcccgttgat

SEQ ID NO: 177271 - DNA, 474 bp, Glycine max
tgaggcatgcaagcttacttaggaggaagaaaagaaatattatattgtccttctttacccaactaacctggtaaaattggaattaacattgctgaagtcaaactattttaataaatggatgtaaaaaaaatgagtttgtattccatacagtgcaagatgtgcacaaataacagtacaaataatggggtaagcatatctttagtatatatgagcgtttcaacagccaaaagttttgtacagaatttaaattgtattctctaatttatagaaagagaattgtgaagaaaataacatttaataagctcgcactccattattccactaccctaatgtagatgctttaacaatgttataacaagatgcttaattattataccacattgataattactgtttttaaaacatcaattacccctataattgccttattaatgacgttgtgggttttaattaagggaacttgcactatttaat

SEQ ID NO: 177272 - DNA, 308 bp, Glycine max
  unsure (1)..(308): unsure at all n locations
ntgtataatgagaaatagtccttcacacaagctcagaatatttgcatctgaagtccaagagctctgggcagattagtctggtacagctggaggtggagctgaagtacaatatgcacggatgctagttattggtgtaaaggaagagggaatatcagctactctgagctaggtcttcctcgtctctggaaaataaaatgtttggacatttgcattccaacagttctttatgatataagctaagacactggcccgtcttacgtcttcatacgaggtaagggcctcacatcccactcccctcgatccacaca

SEQ ID NO: 177273 - DNA, 286 bp, Glycine max
ctaagctgtaacactgatttataagaatatgatacccccttctcacaccctcttcggttgagtatgctggagctaagcaagtaatgactcttttctactggaaatgggatagagcttaaagaaaatgttagtggctatggttgctgatgttccatgactggtggaggcacaccactaaaatgaagaagttcgacaaaaagcgtttctgtatacacgtgcataggtgaacttttggcattgaagtgaactgttgcatacatttgataggaagaatggagttaacata

SEQ ID NO: 177274 - DNA, 355 bp, Glycine max
ataaagataatagacactgtgaataacttagtcattatagccattattcaatgtgcatattgcctatgcaataaacccgcgatgttaacaatgaagaaattaagatgagttagatagaaaaaaaatataaatgcaatcttttattaaaaaaataaaatttaatacacttgatgaaaaaaaatggaagcatgaaatactagctagtcacttactacacaaaactacaatctgaggaccaaaagaaactaaactggggcgggaaaaaacatatctctagggcccgaaaaataaaagatcgcttgccataaaaaacttttatctgacctttttttcttcttcttctacacttcaccga

SEQ ID NO: 177275 - DNA, 209 bp, Glycine max
  unsure (1)..(209): unsure at all n locations
tatgcgcatatctncctacgaacgtttacttgcacaagatattctattaactaagaacaatgcacccatatacaatcaaggtagcttcattacctagaatatttacatgtacttccaggtgcatatgttatatacaatacacccgcctccttgctaaaattacatacctgcatactccaaacatctcggggtaccaaaaattgcacatc

SEQ ID NO: 177276 - DNA, 362 bp, Glycine max
ggtctgaatagaggcaaatttgatcatcctactttgatgaatgggaagcctggggcacattgagaggattataatgaggaaggaacccatgttgtggctgccattccaaatttcccaccagctcaacaatgtcattactcaactaatatcatcccttcttatttacccaccatccaaccatccacaaaggccatccttaaatcaaccacatagcctacctgccacacatccaatgccaaacaccacccttaacacaaaccaagacgccaaccagggagggaatattctagcgaaaaagcctgtagaattcaccccaattccggtgtcctatgctaacttgctcccatatctactcgataatt

SEQ ID NO: 177277 - DNA, 484 bp, Glycine max
  unsure (1)..(484): unsure at all n locations
gatccttaagtcacctgcggcatgcaagcttagtgcgaagaaagcccaaacgaatctataggcgctcttagtgtgaaagcccgcgctaagcacaaagtcagcatgaaaagtaagctacctggagcctatataaggaggaagaagctgaagggaaaaacacaccaagtctcaaaggtttctattgaagatatccaaaccctgagcctatcctttatgggaaaccctccatctctagccattcctctctttcttgcttttagtcattcaaccccttcttccatccacattagcccctaaagtgtaaagtctctcatggctatgagaggctaaacctccactgttgggagcctagcaatcaatgcccttgtaatgcaactattctcattatctatntaatgtaatttagnttctattgggctctttctgctcttcatctntattggggtggctagccatccatgcattagtttttaggggttataca

SEQ ID NO: 177278 - DNA, 483 bp, Glycine max
  unsure (1)..(483): unsure at all n locations
tgtggttacgtgagcatgaactactaccaatatatagatgttatttacacaaatgagcacatcttanaagcttactccacacaatggtggcctcttgggaatgaaacgactattcctccttctgatgacgcatggacacttatccctgacccaactacaattcgtgcgaaaggtcggccaaaatcaacaaggataaggaatgagatggattgggttgaaccatctgagcaccgaccaaaatgtagtagatgtggagccgaagggcataacaggcgtcgctgtccaatgcaatctgagcgtgggagttgttcaaatcgttgatttatgtatgttagtcgagtgacttgtatntgtttaagttctcttcaatgtatngaatntgtcattagttagtaccattacttattttcatctgtctactttaattattggttataacattatttatggataaacatanaccctaaccactagccctcaact

SEQ ID NO: 177279 - DNA, 440 bp, Glycine max
  unsure (1)..(440): unsure at all n locations
agctttcaatcaatctcatcagggactgtttattcataataacatgaggtggaaggtgggggatggagagaaagttagattttggacagataagtggattaatcaagaggagtcgctagcagaaaggtacctcaggctgtttattatatcctcacagcagaatcacaccattaggcagatgagaactcanaatgacacgggctgggaatggaattgttcatggagaagactgctttttgacaatgaaattgacactgccatcagtttccttagggaggtacaaggacaaagcatacagcaacagcaaattgacatttgggagtagatagaagattcatcagggatttacacaactcgcagcgcctacaatctgatatgggaggaaattgctggtggccacaaggaggattggagtatggaactatggaagacaaagatac

SEQ ID NO: 177280 - DNA, 483 bp, Glycine max
  unsure (1)..(483): unsure at all n locations
ctaagcttatactctatatcattattttaaaatgtgggtctgatttcaaattaagttttcaaaggtttattatttggaaatattataacaacacctattccagaacaatctatatgttttgaaccatcaaaatataacaaccaaggttttattattcctacaaaacattctaaaatttctacatgagtatgatcaacgaaaaattttactacaatttctcctttgatagcttttagtggtacaaaatttaaagaaaatctagttagcaagagcctatttacctattctattatgcaatattgacttagataacataaattttatagaattattatgagatagaacttgaacatcaaaaggtcttatataatacaaagaataacctttcaataggactatatctagtttcagtattactcagaaattgattgagataataaattgcacattntatgtcattttcatcttcttgcaccagcatgc

SEQ ID NO: 177281 - DNA, 467 bp, Glycine max
agcttcatgatgaatcaagattgattcaattagttttgatttttacaaagataagcaagcctcatgatgaatcaagcttgattcaaagagttttgatgataacaaaaatgatgacaaaaagctcaaaagtcaagaatacctcatgataacaaagatgatgatctcaagaatcaaagaatgagttcgagattgaatcaagaacacttcaaggttcaaaaggaaatttgatttcaagaatcaagaataaagtttaagattcaagttccaagaatcaagatcaagattcaagactcaagattcaagaatcaagagaagactcaatcaagataagtattaaatctttttttctcaacaactgagtagcacatgaacttttctcaaaaaccttttaccaaagaatttttactctgtgggaatcgattactagattgttgtgatcgatcaccagatgcaaaatggttttaaaa

SEQ ID NO: 177282 - DNA, 291 bp, Glycine max
tcatgatgaatcaagagtgattcaaggagtgttgatgatttcttttattattactcacatctcaaaagtcaagatcacttcatgataacaaagatgatgacattcaagaatgagttccagattgagtcatgaacaattcaagtttcaagaggaaatttgatttccagaatcaagtttcaagttcgaagaatcaagatcaagattcaagactcgagattctagaatcaagagaagactccatccagataagtattaaacagttttttcagaaactgagtagcacatgaattt

SEQ ID NO: 177283 - DNA, 340 bp, Glycine max
  unsure (1)..(340): unsure at all n locations
ntctttattntgactgtagagaagagagaagctatagtaggttttatgtgaagagaatagagggtcacattacatatttgaagtgtttttcccttatagaatctccactttgatcattataagaaaagcaagggccttttctttttcttgtgctgaaagaaggcttagaaatggcatcaagagcaagacaaaacaaaaaggtccttcatttcacactttcgtgcactttctcccccctattttgttaccctcttgagtttcttcctcattcactgaactttttgtgaatatttttgcatttttaatctattatgtttgcncagtttttgtttttgttttg

SEQ ID NO: 177284 - DNA, 365 bp, Glycine max
  unsure (1)..(365): unsure at all n locations
agcttctataaaactataaatagagggagtgatntttctcccccttcacttattacaaactttctttcttctctggtcaaagatttttctcctaaaaaaatacaaaatggagtgctcaatgataaccctttcgagttattcctaggttcatggcaaagtcaaaacctattccactagtttctgtacttacatgtcgatcatctatttccttgaaggtgtcaaattttgccatgatgatcggccaggagtgatgttttttgagtcgtgtctcgctagtgagcacgtctttatgtgtgcctatcctatagagacacgtttcatgtacacgtctttataagttcaaagtggacattctctgagagttg

SEQ ID NO: 177285 - DNA, 384 bp, Glycine max
  unsure (1)..(384): unsure at all n locations
tactaagcttatacactactagtgctatttattgaacaaacattaagtatctaaagaagttccaacataacaacaatagtccaaacccaaacacaaaacaccaaatttctcgaaaccaaaccaaatgaaattttgaaaaccatacacacataaaaggattgattggaatttgtgtggtttagtgatgaaatttgtggtatacatttgcatatcatggttaagactaaaggattacgccatgcgttaggtaaggttattgctaaaggtttgcggagaggggatggtgatgatnttgacggtgctccccatcgccaaatgccgactgcattggcatgcatgcaactggtacctgtcattgttgacgatgttgtgctgcggtatctg

SEQ ID NO: 177286 - DNA, 369 bp, Glycine max
  unsure (1)..(369): unsure at all n locations
tgcttggnatgngaaaggaaattatggctgcaccatgtttggtctctggtntaggaagtgtcaaatgatatttgctagcagttctctggactaggaccgctgttaaaccttacatcaacttctaaacttttaaaaataatcacacgatttaatgtatgttccttctctttcttttataatatacacattgttttggagctggactaagaccaccttggttagtgcttttttgttcttgattggattttcaaaaattctcatacatttgctacttcaataattgaaatgttatttattaataaatataaaatttttaatcgactggtatacaacaacaaatcttaattaataaataaaaattatatttaa

SEQ ID NO: 177287 - DNA, 475 bp, Glycine max
  unsure (1)..(475): unsure at all n locations
tntttcactctgctntgatatagtcgcttatggctcatttcagccaatctcttaccctcgataagatttaattgatcaaagtgtgcctgggcccactctgtttcttccaatcctgactctactaggattcttaaagaaggaatctccacctcaaatgggagcacaacttccatcccgtacaccaaagagaacggngttgccccagtggatgtaagcacagaaatccgataaccatgcaatgcaaaaagggatcatctcgtgttaatccttatatgatacggtcattttctgaatgatcttcttgatgttcttattggcagcctcaattgccccgttcatcttgngcctataaggtgtggaattatggtgttggattttgaagtcctcacacatttccttcatncatcttgtttaaatggtggcattattggttatgatctctctgngtaagccatatctgcacattatctccttc

SEQ ID NO: 177288 - DNA, 460 bp, Glycine max
  unsure (1)..(460): unsure at all n locations
ccggatccntanagncacctgcggcatgcagcttgctgtggagcttctattgtggctgtatctttgagcttcaatgggggcctgtaatggtgatcttccaccatggagatgcagcggaagataaaggaaaagaggtgagaggaggcgccttccattaaggaataagccatggaagaaggagcttcaccaccaagatgagccttggataagaagcttggagatgatgcttcaatggaggaaaagaaagagagaggggggagcacgaaattgaaggaataaaagagggagagaagtggaactttgaagtgtgtctcataagactttcattcatcaaagttgcaacaagtgttacacatgctcttatttatagactaggtagcctccttgagaagcttcttagagaaaacttccttgagaagttagagcttagctacacacacccatctaaaaactaagctca

SEQ ID NO: 177289 - DNA, 400 bp, Glycine max
  unsure (1)..(400): unsure at all n locations
ntgagaaacatgtgataccttggcatcatcaaaacattttgcttgatcctttgtctacaaaaaagataaaatatataaaaggcacaaaaagacataaagacgtaaaagggaacataagacaaattgaagtcatcttttcgcactcggttaaacgctgccatcctttgtgacggacgcgtggggtgctaataccttccctgtgcgtaaatacaactcccgaacctttcacttaaagttcgtagaccacgtcttttccgatttttcctacgttttcctcaaataaacgttggtggcgactccgcgcatattccttccttggaagatgcgcccgtgagtctcgcgtcgccccccccgccgaagggtaggttgtgacagttggcgactccactggagacctttg

SEQ ID NO: 177290 - DNA, 438 bp, Glycine max
  unsure (1)..(438): unsure at all n locations
tttctttgcttcatattatgaacttggaaggtttgcatgttgaaatgcatcttgcaagagctccaaaatcactttcatgactttgtcactcatcccacacatgcatttgatatgaaacaatttcaccaaaaatgacaaccttgaatatttttaaccttcatgcaagggttgttctacatcttttgctaattcataaaacattttggcttaattcctttcctgagtgtcgtttggaaccacatcttcatccctatcaacctctacatttagagaaatgggcacttcatttgtatgctgcctaacaactccaaaagcatcattaatcatatnctagataagatcttcaataatgttgtcttgaactacattgtatgcaagacattatgagttttttacttctagacctcccatgtacaccaaaacatgtacctactggaa

SEQ ID NO: 177291 - DNA, 305 bp, Glycine max
  unsure (1)..(305): unsure at all n locations
tggttgggtgcaatttctcatacaacaacctctctggtcttatttcttccacaaaaattttccgaagtatggctgtaagcagctntattggtggtaacaatggcctctgtggtgcacctctcggtgactgcagtgatccagcttctcgctctgatactcgtgggaaaagttntgattctcctcatgctaaagtagtcatgatcattgcagcttctgttggaggtgtttcactcattttcattntagttattttacattttatgagacgtcctcgggagtcaattgattcctttgaaggcactgag

SEQ ID NO: 177292 - DNA, 409 bp, Glycine max
tgcaagcttcaagggccgaaagggatgagtttttggtttttgtacgatattagaagacaagttgaaggcttgtaaaaggtcgaagagaagtttgactgaacagctgggtagaatggaaaaggatatgttgacaatcatcgaccagtataaagaaaagctaaacctagctgctagccatgggtagagactagaggataagcatgtgaaggtatcagctctgcaagtagaaatggaagcaagggagagggtgataaaatcattgcatggggaagctgtgaaatggatggatagattcgctctcactttgaatgggggttgtcgcaacctacccttcggcgggagggcgacgcgtgactcgcgggatgcgtgttccatgaaaggaatacgcgcggagtcccaccaacgttta

SEQ ID NO: 177293 - DNA, 325 bp, Glycine max
  unsure (1)..(325): unsure at all n locations
tgtacctggaagaacttgttccctggagctattgagaaaagcttgatgattntagagcactgcaagataagggtctattaaggatgcaaaatgggtgtgtgatcaatcaattgtgcctgcagtataagccaattgaggaggaacatgcttgcattttgatgatgacaattcacaatttattttgaagagaccagcaatgacatcttatctggcagtcaaagactgtaaaagatggcattccatcggttttaatggcatcccagattttggatcttgtgtcatttagtttaatttgactctaacattaactagtttggttatttaa

SEQ ID NO: 177294 - DNA, 397 bp, Glycine max
  unsure (1)..(397): unsure at all n locations
ctgagtctctttggaatcgtgaggtagtaaataattttgtattaatccaagactcttctntatagatttacttcattatttntttattaaccaaaacataagtgattgtctccgtaaaatgtaagataaaaaccaaaacaaccgatacaatctgaatcataaaaagtaaattaaattaattcaaatgtgatattttgtataccaattatcgaaagcaaagcaattcttttatgagcaaatgaaatactaatatttttacctcagataagatccaaaagttaatcaatcacaaacacccctacgagtgatcattgaggaagattaatttgagcattggtttgtctatttattcaatgcattaaataaatgagagcttaaaanaacacgttggttgacg

SEQ ID NO: 177295 - DNA, 425 bp, Glycine max
  unsure (1)..(425): unsure at all n locations
agcttaacccaaaacccattaacttatctttttaggtagactttgaatatatcttcgcacgaagcactaccagaagagggatatgcttgaactccaagaagacatagatatgctagctcttgccctgaatactttttaagtttggtggaacccctctaatttcctgaagatgctcacaataactcacatcaagacttcttaaacgttgaaattcttttatgcatccagcaaggaatgtgaaattattgccccgtagacttaaagtttccacctgagcaagctgcgtgaaacttgttgaaaagaaatcattatgcaagaggcttctattggcactaaacttatctaccttntgacgatactattgagcctactttttccaccccatgcaatatacagtctccaatgaagacagtttatgcattatg

SEQ ID NO: 177296 - DNA, 381 bp, Glycine max
  unsure (1)..(381): unsure at all n locations
taagcttaacaccgaaatcgtgaaagctcctctgctgtagctttccaaaacaagaaaaattactgttatatgaatacatggttaatggaagcctagactccttcatttttggtatgtaatatgaagaacgcttagcttggtgcactctgatttcttttatttcagtcatattatgcggcttactaatcttgaaacattaatattcaacaacacattttcattgcaataacaacggatcaacaataaggtaaattgctggatcggcctcaacgcttccacatagattgtggaattgctacgggactnttgtatcttcatgaggattcccgattaaggattattcatagagatctctgagcatgtcacgtcttacttgatgat

SEQ ID NO: 177297 - DNA, 401 bp, Glycine max
  unsure (1)..(401): unsure at all n locations
gctgatggcttcttaccgttccaagcttcaattggagtcttggcttttacaaacttaattggacatctgtcgagtatgtaaacagcagtgtaaactgcttcaccccaaaatgtgttaggtggtcccttctccttgagcatcgatttagccatcttcataactgtgcgattctttctttcggacactccattgtgttgaggagaatatgcgactgtaagttgtcactcaatgccttcatcctcacaaaatctttcaaactcgcgagaggtgtactctttgccgcgatcacttcttagtacttttatccgttttccactttgattctcaacaaggtccttgaactttntgaatactccaaagacttatgattnttctttnagaaaatatacccatgtcattct

SEQ ID NO: 177298 - DNA, 468 bp, Glycine max
  unsure (1)..(468): unsure at all n locations
agctntaaaatgcctaattaaatgtaattataatgcttgatgggtaaataggaaatgaaatgaaattttggggaagaatntggtgatggccgaatgtcctatctaatacacaagaatttgttttttttatcactttagtaaaggttaagatgaatttgtaaaagttagattaaagtaattaactaaaaaggactaaataaattaggctatgattggtaaagtgttttagtattaatcattaggaaaattgaataaataagtaaagtttttataatgagtattatattaaccttagatattctttttaaagaatcagtatagatattctttttaaagcacgtatatttatatgaaattaaacacgatgctctttaggaacattcctaaagtttgatatcattaattaggtgttaatggtaaaaattataaatagtttcaaaaaaaattatacctatcaagaaataaata

SEQ ID NO: 177299 - DNA, 474 bp, Glycine max
  unsure (1)..(474): unsure at all n locations
ntagtgggatggtnatagatgttttcggcacacatcttgctagacctaaagcataaaatgttagatattacatgatggactaatgacatccctgaaaaatcacaagtttaattgtcaaatattaatttttgtgggccttatgccttgcctggctaaaattgtccagagcaaaataagtataccttacactaatgtagtgacataatgcatggttggtttatgtgtctaaatatatctttggactttaaatataattttggacacaagcattttgataatttagaaactgtctgctttcagccttcaactcggtcatgatacttgaaaggtctacatggcaaaacatgaatacaactaatactgactntatcagtactcacattatactagaaaatagaaatgcttctgcagagaaacagatgtattcatcctacttgaatatgccgatntactttntttgtgcatgaatattct

SEQ ID NO: 177300 - DNA, 450 bp, Glycine max
  unsure (1)..(450): unsure at all n locations
agctntttcatggcccaggcaagctatattctattctgagcgagctagggtctagaaaatccagaaaaataccctttttgttggaccttgtggcctcaataacttacgaaggggtgaattaattttccactaacaaacttttaacccccttctaaaagagataggctcagaatgcagaagaagcaacaatcaatttaagaatgttctttaaacatgcaagacacaattgattgcaacaaaataaataagataagggaaaagagaatgcaaacacagttttatactggttcggcaaattccatgcctacgtccagtactcaagcaacccacttgagattttccactccctttgtaaaaaccctttacaaagtctgaaccactcagggacaacccttcccttgtgttcagcattccttacaacttaagagactctcgatcccttaaacaatc

SEQ ID NO: 177301 - DNA, 456 bp, Glycine max
  unsure (1)..(456): unsure at all n locations
ttagatgtctccatgaagtgcatcaacatattctcaagattattatttctntcttcttcatattggaggtaaggttgtaacttttgctcccaccaacaattttccatggagtaactctggccaacctgaatctctagatattgaattgattattcattggcattgaagctagcttgggacatttccatgaattacataaacacattctccatattagaaattctttttttttcatattgattgtaagggtgtaactcttgttcccaccaagaattntccatggagtagagatgccaattattattgaaatgctttccttcacaaaaatcacaatttactagtggtgggtgaatgaccttaattgtatgctttcaacatgctcaaactatctctntaaaatatcttccatggaccaagtttttctgaggttccaccctgccaccatcaactcacaag

SEQ ID NO: 177302 - DNA, 439 bp, Glycine max
  unsure (1)..(439): unsure at all n locations
agctnngataaatnatatgggccatctcttatatatatatatatatatatatatatatatatatatatatatcaacttaacctcatgtagtcgataggtgtatttatagaaatttccaaatgaaaagctcatatgctcgaagtcactttcaagcagggacggaggcacgctggaatggccggaatctatcgatatattcgatgcaaatgaaagtttatctaatatgaatatataaaaatcaaattttacacaaaatatttatacttatatattttttaaatggtccgatgttatataataaaaaatatatttacaatgttaatagtcagtttcgcattctaccacgaacactcatgaatttataataaaaactagaatttacggtaattatatgtttattacaaaaaggctaattaattatatgctaaaaaattattat

SEQ ID NO: 177303 - DNA, 382 bp, Glycine max
  unsure (1)..(382): unsure at all n locations
gacctataaaactaagctntcaccgtgtcttttagctgcaaatgagcagtgcatgttgtgatgttaacatggcagtgttcgcaagggactagccacatggctgtgcatagcaagcccgcaccggtactgaggctacaaagtgtgcatgttagaatccaattgcgaggtatgggacatgaatccaacattggaaatatgggattctagtgtgggatttatagagccttaggctcttcaactacaatgcctagcttttgtggtatggttctctcaacattcttataataatgatactgatatttaactntatgctacacaattcatagatatttgtcaagtagctgaacggtttattttatgccaaattgtaaatcattaaaag

SEQ ID NO: 177304 - DNA, 447 bp, Glycine max
tactcagcttctcaggaggtgagcttagttatgagaggggtgtgtgtatctaagctctagcttccctaggaatttttctcaaagaagcttctctaggaagttttctcaagaaagcttctcaaggaagctacctagtctataaatagaagtatgtgtaacacttgttgtaactttgatgaatgagagtcttgtgagacacaactcaaagttcaacttctctccctttttcttccttcaatttcgtgctcccccctctctctttctctccctctttcttttcctccattgaagcatcctctctaagcttcttatccaaggctcatcttggtggtgaagctccttcttccatggcttattccctagtggatggcgcctcctctcaccttatctcctatgtctttcgatgcatctacatggtggaaaatcaccattaaaagacctcattga

SEQ ID NO: 177305 - DNA, 450 bp, Glycine max
agcttatagaagttggttaaaacaatatttctattgtggcgagcggcatcatataaagattcaattgcatttaggagttatctttccccataacttttaatttaatgagtacgaccctcgtgctcgagaggtggatccaaattcagtcgtttacctagaggcatactcttgagacctaggtggaaaagagatctattgaaaccccctataagtatctggagagacaactacggatacaaatttactattagcaaaagtggctaatagggtgaacgaaaataagggtttgttacatggaaggaaaaaaaatatccttccatgatgctgtcacaaaagcaaaccaactctacgaggacctgcaccctttataaatcagttcttgtctctccaacttcttgcacctacctggacccttgcaaaatgagattgtaatttagtacaggcacgggt

SEQ ID NO: 177306 - DNA, 468 bp, Glycine max
acagcagatcttagtaatgacccactaacctagaattataattacttaatgccattaacctagggaattaaaaaaaaaaaacaaaacttaatggctgagtgtaactgaaattgtggcaaccaaaagtcaccccgaacagccaacaagtcagccaccatttggtctcccaaaaggctgatgcctaggttgccaattgggcccttattacaacttgaactaaacctaactaaagcacttttagttgattcacccataacatatttttggtcagccaactatacaaggattgggccattattttgacaaactaaacactctaaaattgagacaaagtggtgtcatttattcctcctccatttgggccatgatacaactcacaaccttgtactttacttcttgacacttgcgcttgtattcatatagtatggacaacactttgtgaagagcatccattgctttccttgctct

SEQ ID NO: 177307 - DNA, 150 bp, Glycine max
ccttaggcgcatttgtgtataccttcaagtgataaactgattgaagaagccctctatagaatctgcattaacaacaacacgtcaaatatggcgtgaactccctaggtcacattgttttagaacctgttacatttcctggttagcataaaa

SEQ ID NO: 177308 - DNA, 228 bp, Glycine max
gctgatgtataacttcttaaagggtcttctgaaaaagtgcatttacacgtgcaggaaagaatatgactacctatgttaacatggagcttagccgcttcaggaacctgggacttggctttgatacgcttatcaaggatagggacacaggctaataaaactattgtcgagcaagagtaatgctatgaactatcgtgcagattatcttcatgtattcattatgaatacaaa

SEQ ID NO: 177309 - DNA, 476 bp, Glycine max
  unsure (1)..(476): unsure at all n locations
cctgaggcatgcaagcttagcaaatggacctgggtgttgcctatttttatcatatcttnccgaatactcatcacctctatcatatctaataattttcacatttatgtctaattgcccttttacttcattgtagtaaatttctaaggcatccattgcctaagaaatctcgggcagtaagtagacataaccgtaacgtgaataatcatcaataatggtgataaagtatcattcctttccgaaataactaacatcaaaaggtccacaaatatcagtatgcacaatttcaagaagttgagtgcttcttgtagctcttttctttgtatgttttgcttgtcttcccttaatacaacccacacaaatatttagatccataaaatctagataaggaagaatttcattctttattaatatnttcatcctttctcaaaaatgtgacctaaacgtttatgccacaaaanaacagatcgttcattcac

SEQ ID NO: 177310 - DNA, 470 bp, Glycine max
  unsure (1)..(470): unsure at all n locations
ntaaataggctctgaattcacaacgttgcacttagcgctttcctcgcgcttagcgcgagtaagtggatttgagcttagcgccagtcgtgcactgagcctggctaaagacaagcgcattgatctcgcgcttagcgtgtggccttgatattgatgcactgccagattcttctaccgtgctaagcgagttgaagctgtgcttagcggtggatgcgcatttagcccactgatgagctaagctcaactgtcacttttagcacttcatgacttagcctcattttcacctgaaattgcacatatntcatcattaaatccaatggacatattctagagacaacttataccataaaacaagaattatttacaaaaatcactacaaaataaccataaatggggcaactatacaagtcttggaagatgttttctatacaaaagttagtcgtataagacgactaacaaactcctctaaatta

SEQ ID NO: 177311 - DNA, 306 bp, Glycine max
tttgcggcaaaagagggattatggggcattattactaccatcaaccctttcagattcctcttttttttcagggaattgggtatgaggtgcgcaaaatcttaatcttcttttatttcacttgtctctgcataagttatcacacaaaaagatttttttctcttaccttaatgaatgtttaccaaaaagcaaatgatcttttctctgatttcttaccttcaaaccatgctacataacatcgataaaaaacaacacttaattagcggacataatcacattgtaattgaataaaatcctctcattcattag

SEQ ID NO: 177312 - DNA, 369 bp, Glycine max
cgtgggattatgtgatagtgatattgccagagatgttgttatagaacaagcactaccggatttgtatattttatgggtgattgagtttctacacggagttctaacaagcgaggcattgtgacactttctacttgtgaagccgagtatgtagctgcaacttcttgcacatgacatgccatttggctaagaagaatgttggaggaacttcatttgttgcccaaggaaagcactaagacctatgttgataataaatctgctcaagagcttgctaagaatacggtgtttcatgaacgaagtaagcatatagatacaagggattcatttcattagagagtgcgttgccacaaaagaagtagaattgactctgtg

SEQ ID NO: 177313 - DNA, 467 bp, Glycine max
agcttacccccactattacccacaccatatatcatatctatcaatgttaagaaaatgacatcgacagaaatgcagttgagaagggaaaggggcctaagctctactggtgatgacaagttttcccctagccatcgttgtcctaataagcaacattttgtcctacagtgggaagaagaggatgatcctgcatttcaaccagatccaccagacgaggttgagacagctggtgaccccagcttgcaagatcatcatttgtcttataatgctttaaaaggctcatcaggtcttggaataatgaagtctcaaggatcaataaatggattgggagtgcagattctactatatagtgggagattaaataacttcctcctacctagactaactcaatgccatgagttacctgtagaccaattcctaatttgcaggtttgcttggaatggaaatgcttgactgtgaaagataattca

SEQ ID NO: 177314 - DNA, 392 bp, Glycine max
tctggttgttcaattgcttcagattgtagcacataagggcaaaggtctgtgtggtggtcaacagaggagcatagaccacagactcttgcaacaggtgtagatttctgattcatggcaagctgggttactaggttgaccaaggcatcaagttttccttcaagctttttatttttagtagatgaagatgaattcgtggccacctcatggactcctctcagaacaataacatcatttcttgcactgaattgttgggagttggaagccatcttctcaatcaaattcctagcttcagtaggggtcatatcaccaagagctccaccattggcagcatcaatcatactcctctcgatgttgctaagtccctcatagaaatattgaagaaggagttgctc

SEQ ID NO: 177315 - DNA, 435 bp, Glycine max
tcattgttcagacttcaaacacccgccattagtttcttatttacaagtccaagttgttttcgcacttggtctttatgcctttgctttgatttgactttgttactcgatattgtctaataaattgactccttttgctgtttgccttagaaggcacgaaaatgtaagactgaccaagagttacgttttcgttcaattaattttctggttttcacactctaattaagcttctttcctttgtatctgttcctgttgaatgttgattacagatcatcaaattcacgttcacatggttgtgattctaaaagggttattagatttgaattttgattatttgaaattgctgtgttctgcttgtgtcaatgtgggtggcgcatatggcgcaagaatcaagtaaccatataaaatccattctctatccttaagaaaatgaaatga

SEQ ID NO: 177316 - DNA, 412 bp, Glycine max
  unsure (1)..(412): unsure at all n locations
caattcaaatgtgttaaccctctatctagangaatatgagctngaaattgaaaagtgaaagtaattatgaacatctaaagtagaagacataaaatccgtgggaactggttagcatcatccatcattctatccccagaagcatcacaatcaccaaacgtgcatggggaacttgctggctaaatcattcccacatgtcatataccaattgcaatgagcttctgggttatggaatagattacactttcattgagaaagggattaatctgcactttgattttttttttcttattcgaaattccacacttgctttctacttattaatactttgttggttacaggagaaaaaaaagagaagatacatatttagctaaaagaaagggctcatttacacttttgccatcttttttttaat

SEQ ID NO: 177317 - DNA, 424 bp, Glycine max
  unsure (1)..(424): unsure at all n locations
tcttagtttcagatgatgcagatgggtttgtatctaccacatgcactcctctaatgactaaggcatcacttctggcgctaaactgctgggagttggaagccatcttctcaattaaatttctggctttagcaggagtcatgtctccaagggctccaccactggcagcatctatcatacttctctccatattactgagtccttcataaaaatattggagaagaagctgttctgaaatctgatggtgggggcaactggcacatagtttcttaaatctctcctagtactcatacaggctctctccactgnagtgtctaatacctgagatatccttcctgatggttgtggtcctggaagcanggaaaatttcttctaagatactctcttaacgtcatccaactcgtgaggaccttgagcaaggaataca

SEQ ID NO: 177318 - DNA, 348 bp, Glycine max
  unsure (1)..(348): unsure at all n locations
cgattgtatacctattcacaacatcaccgtgagggatagacatcctatccctaaacttgatgatattgtagaagaacctcatgggttttgtggtttctccaaaatagatttggaaagtggtaccatcaaattagaatgagagaagctaatgaatggaaaaccactttcaaaactacgtttggactatatgagtggttggtcatgccttttggcttaaccaatgcaacaagcatnttcatgcgactcatgaaaccatgtttgaggcactttattggcaaatttgnggtgattactttgatgatatctaatttatagctaacaatggatgccacttatacatgtaggagt

SEQ ID NO: 177319 - DNA, 483 bp, Glycine max
agctttcttgagaaaacttccttgagaagtttctttgagaaaacttccttgagaagctagagcttagctacacacacccctctcataactaagctcacctccttgagaagcttccttaagaagattcctaaagaagctagagcttagctacacatacctctctaatagctaagctcacctccttgagatgagaagctagagcttagctacacaccccctataatagctaagctcacccccatgacaaaaaacatgaaaataaaaaaaaagtccttattacaaagacaactcaaaatgccccgaaatacaaggctaaaaccctatactactagaatggccaaaatacaaggcctagacgaaggaaaaacctattctaatatttacaaagataagcgggctcatacttagcccatgggctcgaaatctaccctaaggctcatgagaaccctagggcctttccttggatctctagcctattctact

SEQ ID NO: 177320 - DNA, 455 bp, Glycine max
  unsure (1)..(455): unsure at all n locations
atgctttaatggaggataagaaagagagaaggggggagcacgaaattgaaggaataaaagagggagagaagtggaactttgaagtgtatctcataagactttcattcatcaaagttacaacaagtgttacacatgcttctatntatagactaggtagcttccttgagaagctttcttaagaaaacttccttgagaagcttctttgagaaaacttccttgagaagctagagcttagctacacacacccctctaataactatgctcacctccttgagaagcttccttgaaaagattcctaaagaagctagagcttagctacacacacctctctaatatctaagcttaccttcttgagatgagaagctagaacctagctacacgccccctataatagctaagctcaccccatgacaaaatacatgagaatacaaaaaagtcctactacaagactactc

SEQ ID NO: 177321 - DNA, 466 bp, Glycine max
  unsure (1)..(466): unsure at all n locations
agcttggaaaaacaaggagaatgagcgtctttcatggatgtattagcattactggtgtttggggtggtgttgtttctgaatctatatggacttgtggatttggctacgtgcctttcttgcttatcaccatagcaaggaaagcctgattgttgctgtgttagacgatatatatgatacgttcgaactgagatgtgagaagagtagtgcaaggattatttgttgtacacttgctctttatgtagggttggtgtcccatgtccttaatcatggaagcagatttgtctgtcctctacaaggtcatcgcatgtgcttgggaaaaaacaaattaaattaggaagatttgttggcaggcacgacaagatcctccattagttggttcccatggtggaaaaaagaggtagtgngggtattgtgttcaagtgaaggatttcatatgatgcaatcctaccccgcaagggcattggat

SEQ ID NO: 177322 - DNA, 483 bp, Glycine max
acctatgatactaagctaacaggaagaagaattcaagtgttgagaactagcaccattgattatgaagaagaaaattcatataaagcgaaaaccataatacattcaacaaagatatttaaaataaggactcaagtgttatcagcaagattgaaaaccaaagactactttattcaagtagagaaaaaaaaagtgttaggtgacactctcccctacaaatcaaacactactgatattcccaatttaatgtgtttgtgtgtagagagagtatcataggcagccaatggggaagcttacagataaagttgtgccattgtatatgctgtctgggttatggacagtgaatccccagtctggaacatgaattccatacagtaaagctaagtaaacgacaagtatacatgccccaaccagcctgaaatttaataaatatatgttaaaagcatatcgtaaggcataaaccgaagcatatttacaactaccatg

SEQ ID NO: 177323 - DNA, 396 bp, Glycine max
aactattttctaatccgttaattagcaccaagagtctgagacagttcctgccaagttttatgatgcttctattgatgaaaagcacttgaaaggtattatataaggtgggggagctgataggcaatggttggaattctcaaaaatttaatttccttttcctccacaattgtctttagagactatgtaattattttatctgacagataaaagctcttccatggatgctttgctcactttggctgacatgtgtctattggtatcaacacttacaatggaatctggtaagaaaggatgttttggttatggaacatgtacaaactcacttgttcacataccaacagagagagttcatatgcatttatattaattcactcaataagatatatttgctcattt

SEQ ID NO: 177324 - DNA, 480 bp, Glycine max
  unsure (1)..(480): unsure at all n locations
ntctagtggcaccccctttntactaagttcacccatttctgtccttnntttgtgtcttttgatgtattctttttgaaacgtcacagaactcatggcgatgggcgtttaagctttccaaagcaatcgatcgaggtccgtatgcctacaaaaaatagggctttgatagtccacttacacccctccatttgctaaatgcacccttatntttgtgttcttggccggtttctttccgaaacttctcataaccttacggattccatggcgaggggtgttaaacttttcagagtggttaaacgaggtccgcatgctgacaaacaaatgtccccggatgtaattaggttatgacagttgcccctctttacttatcntttattggagataaaagggaagtaaagataagtcactatttttgttcgagccaaaactttgcctgactgaccaactagctccgacagcgatcgtgatgtctctcatgctatc

SEQ ID NO: 177325 - DNA, 456 bp, Glycine max
  unsure (1)..(456): unsure at all n locations
agcttgattatactggttcggcttcttttcgttcctatgnccagncctcaagcaacccacttgagattttccactctctttgtaaaactccttctacaaagtctgaaccacacagggacaacccttcccttgtgttcaagaatcctctacaacaagagacccacagtctcttaattcctttttagaaataagaaggagagaagacgagatctctcttaaaagagatagatcgtacaatgaagatcaatcaaaattccttatcgaatatgcaagtggttgaccaaggaatctttttgagaagataagacatctcagttcaaacaaactctcttaatcttttgagaggataaaaccatgttgggcaatgaatactctctttattatcgtgcttccacgccaccttngaatggtccgtcataaaacatttgaatagatgtgactcttgaatattatttc

SEQ ID NO: 177326 - DNA, 336 bp, Glycine max
  unsure (1)..(336): unsure at all n locations
agctgccattnttcaatttcaaacgtctcgatatattatgcccccgaatcggacatccgtgtgaaaaattatgaccaatcgaatttctcgagagctcccgctgtccattttcgagagcctctatattggatgcgcttggttcggacttccgagctaaaagtcatgaccatttgaatttctcacgaatctccgttgcccaaatttgagcgtatggacttgtgtatcgcacgaatcggacatccgcgagaacaggtatgaccatctgaatgtctcaagagctaccgttggtcagtttgagcgtgcaatattaattcgtctgaataaacatccgtggaa

SEQ ID NO: 177327 - DNA, 381 bp, Glycine max
tataatatatcagtacgctcgaaattaaacaacggaaactctcgcgaaattcaaatagtcataactattcacacggatgtccggatcgggcgcttaatatgtcgagaggctcgaaattgaacacacggaaagctctctgagaatatgcaatctggtctaacgttttcacactgatgttcgattcatgcgaataacatattgagacgctcaaaattgaacaacggaagctcctgataaattccaactgtcataacttttcacacggatgtgccattcaggtccataatatgtcgagaacctctatcttgaacaacgagagctctttagaaatccacatggtctctaacttttcacacggatgtccgatttaggcttataata

SEQ ID NO: 177328 - DNA, 410 bp, Glycine max
  unsure (1)..(410): unsure at all n locations
ttgattggtgaatttacttcgcggtaagtcttttcaaagatgtggtagtaccaattattttgaattttaaatgcatacatcattattatattgcatagctaaaaacaggagggaaattgggtcctacttttacttttaaatgaaaaatggtataatttgtgaaaaaatgcttgttgaacgtttctacaaaacacagaaaatgagatgacattaattataatcagatgttgtaataatgtagatgtacatgatgtgtgtggaaagatgtgctttgatctgtcatgtataatatcatttgttttagcgagttcatctgttttatcagtcaaacttaaatttccctcccatcttttccnncacattttacttgttgcatgcattccacanaagcatagtatctagataaagaa

SEQ ID NO: 177329 - DNA, 363 bp, Glycine max
tgttagagacaactgcaccaatgagccttttgctgtcaattttattgagagaggccagaaggtgttcttcatcttctttaccttttcaatttcagtttcattttctttttctttgttggtaattatttattatttatctgggtttgtaatggtttgagtgtgtgattttgtttgtggtttactgcggaaatatgtgctgcagattgacgagcatgtccagagggaaatcatgaaccacagatcattgaaacaccccaatattattagattcaaagaggttagtaaaagtaaacttatgctcctaataatgagtaaaaggatatcttttattttcagctaaatgataaaattctgcaaaatagt

SEQ ID NO: 177330 - DNA, 377 bp, Glycine max
tcttcaatacgctgacgatacgatattctttggagaaacatctatggcaaatgtcaaaactgtaaaggttattctcagaagttttgagttggtttctagattgagaattaattttgctaagagcaaatttggagctattggtcaatctgaggagtggtgtcttcatgctgcaaactacctcaattatgttttgctccaatttcctttctgctatttaggtattccgattggtgtcaatcccaaaagaaaagtggtgtgggatcctatacttaggaaatttgaggataggctgaacaggtggaatcagagaaatatatccatggctggtagactcactcttattaatgttgtcttaacaacattacctttgttctact

SEQ ID NO: 177331 - DNA, 355 bp, Glycine max
ctgaaggtgcgtagcccaccatattccgtagcagaatactgtgaatgtgtctactatcagtctcatcgcttgtgtttgtcattgacgtgccactttgagctgacaggatctgcagcttcgagcgtattctttgaaagatttgtgccccctttttgcacatgttctcgaaacgttgtactgtcactggctaactaaggccaccactaagtccttccaagaatggactcaggaatgttcctagatagcgtaccaagttacagctggccagtcagactttcttggaaggagcgcatcagtaataccttatatctcgcgcatgccccgatactacgaggatacatctttacatggttct

SEQ ID NO: 177332 - DNA, 460 bp, Glycine max
  unsure (1)..(460): unsure at all n locations
agcttataagaacaaaattgccttaatcatttccaaatatgcatgtgaattaggacgcatcaacaagaatcaagccaaggctattgtgcaagcaatcaatggggcaaaacacaccaaatgattataatgatggatggctcaaattctcacaaaggtaaaatcatcactttcaaattgagctttcaaaactatcatgacatgtagagaagaatcaaggatttcaagtcacaaaatgtcaagaacttttattttcaaaacaattactcatttcttgaacatatcctataattcaaagaaaaacatgcaaagtcgtacgtgcacacaaaattgacccaaaatattaaactgaaaatccgacgaaactaacaacattaacaaattaacacaactaacanattaacaaaaccaacaaaactagcaaaaccaaagaacactcccccctcccatacttaaacaacac

SEQ ID NO: 177333 - DNA, 472 bp, Glycine max
tccgaaagagatcaacagtcagatagccacactctatatcaactagctgcagtggtgctcttttgctttcatccctcattctttcgagtgaatcaacagctgcagccccaacctcaacccggagaccaggatactgcttcaagtcctgtaaaatcagccaaactatgtattaactgggaaaattgtgaaccctatagaactaagaattaatggaaagaaaatattaaagcccatgtatatgtaaagtaaaagtcagtaaaattccaaaccatcttagtttaatcatagataattacaaaatcatgaagaggtcaaaggtcatcagttccacattaaagacttatcaccattactttggaaaagatagatgcattatcattcacaaaaccaatacaaaattcgtctacaaggagaggcaggttcattgttatggaaaagctaaaaccatttgagaattggcaaagaaaatact

SEQ ID NO: 177334 - DNA, 453 bp, Glycine max
agcttcattaagaggcttcctccataagcttcattaagaggcttctagcacactccagacatcttctcaaagatcccaacggtcagatcatggaagcgtgttttgtgaagttgcagaccaaatttcgagacgatccaacggttaatgaaggctaggaagcgtttttaccgaagcagcttcatgtagctttctctagaagcttcattaagaggcttcctctagaagcttcctcgtggcttctttgagaagttttctcaagaggcttctttgagaagctacatccttatctatccacccctctattaactaaattaacttccttaaaaataattacggatgaaaataacgcaacaaataatcaaacatcaaacataattactaataatatatagatatatatatcagggtgttacacatcatatattgagacgctcgaaattgaacaatggaagc

SEQ ID NO: 177335 - DNA, 396 bp, Glycine max
  unsure (1)..(396): unsure at all n locations
gcttattgcatgggcactcccctttgtctctcatgttcattcattctttttttattttgcatttatcactttttttttcattaaaattgaattntgcacgggaactaatctagtttagtatctcactcgtacaaactacatataagtaaaaaataattaattttgtactaattaaaaaaaatagtggatattatttaatcttactaatttcaaatagactaaaattagttaattttttatatttaagtctattatataagatgattcttattttgtttatatctaaatccagagtatgtgtctgggtttgtggcttttgtttgacaaagaaaaacatatgcccgagatataaaaatatgaaactatctgagcttttaagttatgtgtgaaactgtc

SEQ ID NO: 177336 - DNA, 383 bp, Glycine max
  unsure (1)..(383): unsure at all n locations
ntacagcagaatttagtaatgacccactaacctagaatttaaataacttaatgccattaacctatggaattaaaaaaaacttaatggctgagtgtaactgaaattgtggcaaccaaaagtcacccccaacagccaacaagtcagccaccatttggtctcccaaaaggctgatgcctaggttgccaattgggcccttattacaacttgaactaaacctaactaaagcctttttaattgattaacccaaaacatatttttggtcagccaactttacaaggattgggccattatttagacaaactaaacactctanaaattgagacanagtggtgtcatntagtcctcctccatttgggccatgatacaactcacaaccttggact

SEQ ID NO: 177337 - DNA, 416 bp, Glycine max
  unsure (1)..(416): unsure at all n locations
aataacaataatgcatattttgtttgatgataacaatgaggacaacaaaagatgatgacacaggtgaagaacaaaaagctctaaagatcaaagaacaactttagtgaatcaaaaacatctaagtgaacacgacaggttgtattcgattaccagtagcgaaatgagtttgaaaaagttgttatactgatattacaacggtccaaatatattcaaaaggctgtaatctgatacaatatttgggaaatcgattaccagtgtccctgaacgttgaaattcaaatctaatagcgaagagtcacattgtttcactcaaaagctttgttaatcggagacacttaattggcaactgattaccagtgactgttccttganaaccaaaagatgtaacctttcaaaaaggtgtggactacttcaaat

SEQ ID NO: 177338 - DNA, 293 bp, Glycine max
  unsure (1)..(293): unsure at all n locations
ctaaagaagctatagcggagctgcacatactctcttaatagctgagctcagctgcttgagatgagaagctagagcttagttacacacccccgataataactaagctcacccgcatgaggaaatacgtgatagatctaaagacagattcctactacaaagactacttaaaatgcctcgaatgacaacgctaacactctatgctactagagggggcaaaatacaaggcctatgcgaatgaaaagcctatgctaatatttataaagataagcgtgctcatacntagcacatgggct

SEQ ID NO: 177339 - DNA, 467 bp, Glycine max
  unsure (1)..(467): unsure at all n locations
agctttagtgcagttggttgcaagctaatattcttatttcacaaaatttcagggctcatacacaagcaacctgttccacaccactagataaaatatacatgagatatatttagaagcaaagaatacttctccagcatatttgttaacttctttaatttcctgaatttctgattgagggttagagtctttctgttcaagtggtgcatatataatatagacttgagaaaactacattcaaacaaaaactgaaacctaagcttgtttcataatatgtaaacctaatatgaggttcagagatgtgaaacttaaatggtgatgaattgcacgatgtgaacattgcctttgattgtgtctgtggtattgattctatgttttctctctatcctganaaattaaactaagcaacagttccgcgtgtctaatattcttatttagtatactttttatgaaatttcttgagagaacta

SEQ ID NO: 177340 - DNA, 348 bp, Glycine max
  unsure (1)..(348): unsure at all n locations
tataaatctcagctaactcacttncaaaagctagcttaagagaggaggattgtttcctgagtcttataaggagtaggcatgttaacagtttttttgggcttgagtgtcatactgacaatcctgatggggttgaagtgtgttttaacaacccctccaaaaaaataagctaccaccagtaagcctcttatacaatcctattgcttcttaatcttcaacctttaacacagacatttgtgagaatggttaaaattttcattccatcttaatcttgacaacttttaattntgccaattgaaaagtacctatactaaagaactggcacccaatggtttttacagttgaacaagg

SEQ ID NO: 177341 - DNA, 391 bp, Glycine max
  unsure (1)..(391): unsure at all n locations
agcctccttgagacctaattgaacaagatattttactgagtttgaaagnaatatccagcatggactataacactgtagaatcaataggaccttgaatattaactctcacagtagtttatacttttgcaaattgtaagggccgaaagaccttgagacagaagcagttcagattctgcgcaagggcatctttggctctttcttaaatttcacaatttctctgtagctggccttcaattggaaggaaacagagtggaaaaatcttatactatagctatgtgaaccaaacttggagaacaaaaatatctgaagtgggaagcaagcaagacttaacaaagagcacaaaaattgatgatcatgtatgaaaatgaatatgggggaatattcctcagga

SEQ ID NO: 177342 - DNA, 324 bp, Glycine max
ttttgaaggaaatattctttgtacctggaataagcatcgacaaaggatacagaatatttataaccagcatgtgacgtcaatgagaaggtgcccacacatctgtgaaacaagctaccaacgaaagtaaacagaaacagaagtgtgagatggtaatctatgagactttaccatacagcttgaagagcaataacctaagaaatacttatttgatggagaaacgttacactgaatgaagaccattagggcgacctaattcaacgtgcgagcgactatctgtactacaagaagaaactacagaattggaaaccgcgctagattattatt

SEQ ID NO: 177343 - DNA, 447 bp, Glycine max
  unsure (1)..(447): unsure at all n locations
agcttcacatgtctacatggactcgtccaatgaaacatctacttgatcttgaaggggtttctcaagttttaaatgatcttttgatagattcttgaaatctttttgtaggcttttgtaagcttttgagagaaaaaatgagttagatagaagctcatgacaagtttttctaagatattcagggtcgttgaaatttaccttcttgatttgattcagactcttgggaagctacattntccatcaggcatatgttggcttcttcatcaagttcattagacgaggtgttgttcaggtcctcccaggtacttataagacccttcttttctctagtctcgatgaatttcttcttatcttaactcttctccagttctgggcattcaaacttgagatggtccaggcctttggcactcgtagcaaatatggagctnttgggcttttcttttcttttct

SEQ ID NO: 177344 - DNA, 358 bp, Glycine max
  unsure (1)..(358): unsure at all n locations
ngcatgaaacgccacatgcataaacacaatatgtgatttattttcattgacactgtcacattgctagactcggaagagctagaattcttcatttagtaacctgtcacaataggattaaatgaatgatacagtaaaaaaacacatttaattttgcattgaggttttaacactattaaataaaaaacaaacacatacaattgcaatatttatttatttaataaaacatattttacaactaaacatgtacagtaaaccaagaagcctattcaaaacagatcaaatccaataaaaatccacagaagcggagaaccttctaagaactaatacacccaacaggctctgtacaccaactcgaaaa

SEQ ID NO: 177345 - DNA, 391 bp, Glycine max
gacgatcctgccattatcgtgattacccatttgcaccgcaccaaagtcacccgcttggtaggatgagaagaaacctccatgtgccgtaacatggaaggaggcaccacacatgacaatccaagaacctatatcactagcaatgtttaggatattaccttcaccaacgagacataacaaatcttctgttgaaacaggacagaagattcttccttcacgctctttgttgggtgacttggactggctaacgatactggccctttgatctctctgaaagacgacatttattttcatgtggccatccttccatagaaaacatcaactttgagcggattagatctcctcagaagatcggatctgaatttatacgccacaatctattccacccgatcta

SEQ ID NO: 177346 - DNA, 446 bp, Glycine max
  unsure (1)..(446): unsure at all n locations
tgaggaaacaaattagcatactcacaaccaaaggagaatctctatgatttgtccttggtttgagaatggaaaaatgaacaccaataacacaaggtctaaattctagtctcacgggttatacaaagagacatgacaaatgcttgtttttttttagagccgcaaccgtataggaatgtttgcaggtagcatcattgcacacgtcacacagagaaaaatggccaatgcatggggacaatgactattgaggaaaagtcttacaagaaaggtcattaatctaatgggaatgaagctattgaatccccgtatctaacaccatatgtacgaataaaatataacgaattggtaaagaacaaactactgggtcatatatcanaagacatgatatgagcctaatgactacggaaaacaagacacgcataatctctcgcacaggaattagttccata

SEQ ID NO: 177347 - DNA, 459 bp, Glycine max
agcttgtttatattattgcaatcttatttttatatcaaattatgagacgcccatatataggagatgtactcagtgccagagtcatttttattccaaagtgaaaaaagtaaatttagacaatttatacaaccatatataaattatcgaaattaaaagttttatgaagttgaaaaatcacttgtcttataaaaacgcagtaacttacatgttttaatattaaccattttagataatatataatgatgaatattggctcatcttacactcacacatcttactctgtcacacagtctctcattaaatatgcctcatgagaatagtatttatttccccaacttattcttaaaaaaattattatagagacggtagaaataaattacacataagaacttggacaagtttgacgtgtgatataaaataaaaagggtagcaaatacgggataggacattccctgcact

SEQ ID NO: 177348 - DNA, 354 bp, Glycine max
  unsure (1)..(354): unsure at all n locations
tgaatgaccattgtataagccataggggatgtgcaccagctcgtnatacatggatggttttatttttgaatctttagcaagaaatgactaatgtagatatagccaaaaatggtaaaaattattctttgccaaaagtggtgaatcttatcttaaacgtctaaattaatgtgttaactttctagattattgtactaatctttctagggatatgtgtactcaaagtaaacctcatacaaattctactcacaaagagataaattacattgtgactcaatgcgcagtgtaattcttggatagatggaaatctagttcagaacatctttttttggtaagcttcactaaactattcacgta

SEQ ID NO: 177349 - DNA, 423 bp, Glycine max
agcttcataagtgagatcaggtgcatcatctccttaagagtcctctcacgaggaggaggttgagccatgttctcaatatgaaaattaacagtcggatgctcaaaatcagaatattcaaaatcaccctcaacagaatgctcaaaaatgcatataatgaccaggatgcacaatatgcctaactaatctatgaaaggttctatctatttcagggtcaaagggttgtaaatcacctggattgcccctagtcatgcactatatgcaacaaataatgtgtttctcaacaagcacctaacaaggggataaaactacagctatactcaaacgatatcaatatgagcagaaattgtgtgaggaacacccaaaagtcatgaataggtaggacaaaaaatttcaaacaaaaattcaaagtctaactatgaaaac

SEQ ID NO: 177350 - DNA, 330 bp, Glycine max
  unsure (1)..(330): unsure at all n locations
tcaggctgctcaattgctccaggttgctgcatggaagggtctaggtctgtatggcggtcagcagaggagcacaaaccacaaacccttgcgacaggtacagatttctgattcaaggccagctgggttaccaagttaaccaatgcatccagtttgccttcaagcttcttagtttcagatgatgcagatgggtttgtagctacctcatgcactcctctaatgactatggcatcatttctggcgctaaactgctgggagttggaggccatcttttcaattaaatatctggcttcagcaggagtcatgtctncaagggctccaccactggcagca

SEQ ID NO: 177351 - DNA, 363 bp, Glycine max
caatcattacgctcttcattgagtgattaacctcccgaactatgatgattgtgtcccccctgccacccaacaacaaaactccactacatcgagctcagcaaagtatccatcaccatctttaatctctaaacctgaatctttgataataccttatatgacacgttgcaaagactaataggaaaaaattttccaatcttaaaaactctctcaagcttcataaggaaagtgattagggtataattcacatgtttaacctcggtcaattttgccaactggtggcaaataataatacataatgagtgcccccatatatcccacggctctattaaaaaagggggattgaaacattctcctaagggattg

SEQ ID NO: 177352 - DNA, 371 bp, Glycine max
tcatggtgaatcaaaggtgagtgaaagggggtttgatgattacaatgatgataacaaaagatgatgacaaaggtgatgacaaatagctcaaagatcaatcaaagaacaactcaagtgaatcaaagatcaatcaaagaacaactcaagtgaatcaagaacaattcaagagttcaagataagaatcaagaagaattcaagacttaagaagaaagtctagagacaagaatcaagattcaaggttcaagatctcaagaatcaagaaaaagattcaagactcaagattcaagaatgaagagaagactcaatcaagataagtattaaaaagtttttcaaaactctgaatagcacatgagttttgacaaaacctttta

SEQ ID NO: 177353 - DNA, 478 bp, Glycine max
agcttttgaaggacgtcacgacccccagatggtttatctacaaagccttgcaaaaggcgggcatgattccctgcagcgggcacaaagaagatttttgcttaatgcatccgggtgtactccatggcatggaaacatgttcggtagtaagagatctattacaacagatgatagaccaaggccgacttgaggtcggcagtgagagggaggaggaacaacatgtatacatacagtcagcagatgaagaaggacctaaaaagcctaaacccttggtaatacacttcaccaaggcatggctccccaaagacctcaacacccctcgacagtgtcgggcagtagatctattatgtttccttacgagaacagctgcatagttccgtggaggtatgcccctccgggcggtaggaaggaagaagctatcgatatcatctcactatcggctaaagtgaccaatatcaccgggctgagcggcataacctgc

SEQ ID NO: 177354 - DNA, 314 bp, Glycine max
  unsure (1)..(314): unsure at all n locations
tctnttctagaaagttccttcactagttggagttttgaatggtcttatggggtagaggttggtatcggatgttcagcangtggatnttgtggacgattcatggtgaccatgtgatgatgatagcgcgatattagtttgtaaggtagtgagtgatggaaaggactgatatagactgcctatagatattgtgggggatcatatcggtacatgatattctaaggggctaagaagacacttggacttggagaatgacatctctgtaggagcatactgtggtaaagcttgtgagacgcctataataactatgcagattg

SEQ ID NO: 177355 - DNA, 455 bp, Glycine max
  unsure (1)..(455): unsure at all n locations
agcttgaacattatctccctttgggttcgtatgttcttccatgcacggaatccagtgatcatctcgattacaatgcacccaagagaccatatatctaacgctggttcaatctgaccaacgatcgattctggcgacatgtaaaaaggtgtccctctaaacttgaccttcccatactcagcatttgcatcttctctagtcttggacaacccaaaatcagcaatcttcagttgataccttgcatgatcatcaaatgaaggaaagagaaggatgttgtccggtttgagatcacaatggacgactccttntcgatgaatgcaagaaagccctttgagaagcatacgagtgtagactcttacttcactatccgatattggccccttcttgtttactaaaccaagaagagaaccataaggagcacactccatgaaaagatggatgtcacataatttctctca

SEQ ID NO: 177356 - DNA, 392 bp, Glycine max
tcaggctatgacttcatgttgctcaccctatctctatatctcacaccacatattctcctcatgttagcctttgcctttgagttccacccatattttagtgcggaccaagaacctgagaagattatactcgttctttacggatgggttaagctgactggattggaagcaagaaaaaaatactccctccgttactatttacacaaggtcgccgacgaatttaagctaattaagtgttaacacgcactaatatcggttgatgagacattaagaagtaacagtcacagttattaaaaatagtatctattatgaatcatcaatcatcaatcatcactttatatattatcttatgtatcaatgataaaataagattttatcacataacaatgactatg

SEQ ID NO: 177357 - DNA, 293 bp, Glycine max
acgaatgaaaaaactggggccaataaagagggttgccatgagggagaaacccatgcctgtactggcattccttgtccgccaaagtttccaccaacccaacaatgtcattacttaaccctttttctttcctaccgcccatttatccacaaaggccctccctaaatcaaccacaaagtttgtctaccgcactttcaatgacgaacaccaactttagcacaaaccataaacaccaaccaagaaattgaatttgcagcgagaaagcctgtaaaatcacccccaattcagtgttctat

SEQ ID NO: 177358 - DNA, 413 bp, Glycine max
  unsure (1)..(413): unsure at all n locations
tctccatgtttagagatntctagaaagataaaggtccaagttccagagagttttgagagcttttgttgtgcaaagactggcagagaactgagcttgaagaggaggccatcctgagagcatgagatgagtttgtgagtgattgtgaggttttagaagtggaagagacatcctcactacttgtatttcttcaatccttcatttttctcttctctttgttctaaagaaagcttccgagatatggagagctaaatcctctgttggttcttccttgtaggtacttgatgtaaatacctttatatctatttaatgatngtttatgtgttctctgcgctatcagtatgtcattttggtatgctattgccttgatcacttacatgaatgctgttgtaggatcattcacaatgggaactggt

SEQ ID NO: 177359 - DNA, 485 bp, Glycine max
  unsure (1)..(485): unsure at all n locations
agctngtaggattatggggtacccatcatatgtggtactaggtggcggtcaggcgatggtgcacaacaagtnttccacatccacaaagcgcgcataaacccaccatcccctgttgcccacctccaactgagctcatgtactcccacgtagcccatatcctcgtttctctcaacaccgggtccccatcaatcctcccaagcttccccaacatccaagtaactcaacattcaaacaacacaaaccatcacagccaagaaaacagggcaaaggcagaaaactctgcccaaaacaccaaccaaaatcacagcttttctcacttaaagaccccagtaacaattccttcgtccaattcgttaaccgttggatcgactccaaaagtttactggaagtctctagtacataagcctacantttgaccgttgggatctactagcaaacatccagaactcattctgaactactctttccacagccaattacacaca

SEQ ID NO: 177360 - DNA, 329 bp, Glycine max
  unsure (1)..(329): unsure at all n locations
ctttgcgtgaaaggttgtgactctttatatctgaatntgaatttcaacgttcaaaggcactggtaatcgattaccaaaatattgtaatcaattacagccttttgaaattaattggaacattgtaaattcaatttgaaaactttttcaaatccattttgctactggtaatcgattacaacaatctggtaatcgattaccagagagtaaaaactctttggtaaacatgttttgagaaaaaccatgtgctattcaatttttgagaaaaaccttttcacacttatcttgattaagccttctcttgattcttgaatcttgagtcttgaatcttg

SEQ ID NO: 177361 - DNA, 433 bp, Glycine max
agcttcaacattcaacttcgagcgtctctgtttattataggactcaattagacatccgagtaaaaacttattgtcgtttgaatttgctcagagcttcaacattcaatttcgagcgtctctatatattatgggactatatcagacatccgagtaaaaagttattgtcgtttgaatttgctcagagcttcaacattcaatttcgagcgtctccatatattacgggactcaatcagacatccgagtaaaacgttattgtcgtttgaatttgctcagagcttcaacattcatcttcgagtgtctcgttatattacgggactcaatcacacatccgagtaaaatgttattgtcgtttgaatttgctcagagcttcaacattcaaattcgagcgtctcgttatattatacgactaaattagacatccgagtaaaaagtt

SEQ ID NO: 177362 - DNA, 340 bp, Glycine max
  unsure (1)..(340): unsure at all n locations
ctgagcaaattcaaacgacaataactntntactcggatgtgtgattgagtcccgtaataaatcgagacgctcaaaattgaatgttgaagctctgagccaattcaaacgacaataacgttttactcggatgattgattgagtcccgtaatataacgagacgctcgaaattgaatgttgaagctctgagccaattcaaacgacaataactttttactcggatgtctgattgagttccgtcatatatcgagacgctcgaaattgaatgttgaacctctgagccaattcaaacgacaataactttttactcggatgtctgagtgagtcccataatatatcgaga

SEQ ID NO: 177363 - DNA, 453 bp, Glycine max
  unsure (1)..(453): unsure at all n locations
agcttcttttggcaaatcctgggccagctgtgatatacaatctntatgaatccagttntgccaacacgattggcgaggacaagatcttcctcactgttgcagaggttgttgcatattgttctccaaagctggttgaggacccttgaaaaatataaatgaattttgttgttggtctacaaaaaaaaatggggacccatatatagatgaaatgttgtggggaatagaaatagagactagaagttttcagtttacttgagttagctagtgaacgatatatgaagaagaaggtgtgaaggatgagaattcatatgacattggtcactacaaaaagctatagtagaagaaaggggcctatccgattctgctactgtctgttagtgctactactagctccaccattcttatcttaaaagtgttgaaattaaattccaacaaaataaaacagagataaag

SEQ ID NO: 177364 - DNA, 417 bp, Glycine max
  unsure (1)..(417): unsure at all n locations
nggctnggctcggctcattgttggatcaagtggtctcatattaattaagaagggagttgaattaattattactagacctttactaattaaaatttacccttcttaggcttttactatgttgttaagaaagtaaagaacagaaatataaacttaaccaaaagtaaaagcggtaattaaagtgcacaacggaaattaaagagtgtagggaagaagaagacaaacacaagagttttatattggttcggcaacaacccgtgcctacatccagtccccaagcgacctgcagtccttgagatttcttttcaaccttgtaaaatcctttacaagcaaagatccacaagggatgtaccctcccttgttctctttgaacaacctagtggatattaccttcagtagaactgatccacaagaatgtac

SEQ ID NO: 177365 - DNA, 271 bp, Glycine max
  unsure (1)..(271): unsure at all n locations
agcttgaatctaaataataaattttgctatataaaanaatacccgatacgggttggatgccacaatatgaggaaccatcggaaaggatgaccttctttagtatatatggctntgtcgtgctggcgaaggtgtgttgatttggcaacactgtcgcatcgtgcttcaccccagggaagagaaaagggaggttcaaacaaactataaaagggatatgggaagaggaagaggaggggaagagataaaagacgaagaggagagggggataggggaa

SEQ ID NO: 177366 - DNA, 398 bp, Glycine max
  unsure (1)..(398): unsure at all n locations
tcgacaganacatagagagataaatatcgtctatcaatatatatttcatttatatctaaacctatcatggtctattaatagacatctactgaaatattctcacgcttgcaggatacaagtacattgaattgcaaaaaaatatatggaaggacatgctcatataacttaaccatggcattcagacataataaaaataacgtctaacgagcgctgatctatggtaacctgaaaaagagtngcatctttgcattcatgtnttgcatctaactgcacatttccttcctcaaaataatgggcaccaacctgaaaatgggttaaaaaaaataatgtttaagagcctcgcatcgcgtcattcacatcaatgcatacaaagtgtacataacattacctcgctttta

SEQ ID NO: 177367 - DNA, 416 bp, Glycine max
agcttggatagtgccctaacttgtcatcttataacaaaacattggggaaatatgtttctttgaaatttttgaaaccatagcattttcgctggtggagaatttgtacccttacttccctagcatgacaagattgaaaccatgaagattcctgaagcccattccatacctctttgttcttgcctcatagccatattttccctagatcaaccagttgattcctcttgaagaactcatgttagaacgcccatagaaactattcatcattttttgcatttcatcctccaaagatgttggcaaaagatatacgctcatgcaatacgaatggatttcctgagcacatgatttaacaagaacttccttactagctttggaataatgtattttgccgagtgatgaatctactccaaatttaccct

SEQ ID NO: 177368 - DNA, 422 bp, Glycine max
  unsure (1)..(422): unsure at all n locations
ctttccatactcaactntggcctatgcatccttatgctgtttctcttngggctcgttgttgtaagttggcctgttatgcaatgaaacttctaaaaggagatcaacttgatgttctatgcttcttgaaggtggcaatccatgaggaatctccttgggaaagacatctttaaattcctgcaataagggttgaacactacgagaaacataaatagttaactgattagaattatcattctctctatctcttgtgtatcactccatctctcaagtgtatcactcttccttattctattcctctgtggngcctcactattgtctctctcttgttctctcttttctctccttatgatttggtcatcacacacttctctaagggatagaggattaacaataactttctggtcatggtgctggaaagaaat

SEQ ID NO: 177369 - DNA, 384 bp, Glycine max
agactgttcgcacatagtgcgcgtgtattatatccactccacatggatcgaagtaaaggagagcttcaaccctataacgctacgtggcggacaaaagtgggcagtaaacttgaatggacgtcattgtcaatgcggaaggtattctgcgcttcactatccatgttcacacattattgcaactggtggttacgtgagcatcaactactaccatatcttagatgttgtttacacaaacgaacacatcttaaaagcttactccgcacaatgtgggccttttgggaatgaagcggctattcctccttctaatgacgcatggacactaatccctgacccaactacatttcgtgccaaaggtctgccaaaatcaacaaggataatgaatga

SEQ ID NO: 177370 - DNA, 348 bp, Glycine max
tcttataagctgaaccatcttatcaataaagacaagttgtgttttattcagaacattagagcttatctcttttatcttagtgagagtgattctcctaaattcttaagtgattcaagaacaccctggctgtatcaaaggactttcacaacctttgtgtgttgccctcgctggaaagagtgattctttccttcctatcatctccacccttgttctttcaaaccacaattccagaaaatccacctctgcccaaaattatctcgtgaccataactcccattttacacactcaaattaagtgattcttgagcctaaattgaatttcagaacgagacctttcacctcttttgga

SEQ ID NO: 177371 - DNA, 381 bp, Glycine max
aacgatgacaaacgagtgaagaaccgtcgaaaacggttgaaacctttgcgaaattctccacggacaacgtaacggatacgtttcggaagcacctcggtttagattctcttcacagaaacaatttttccaagcaaattcgaaagagagaaaagtgcctaaggggctgatcccttttcttcttacttcctcccctataatagcaaaaaagggaggaggtgcctgcatcttcgccaggcgagccatgtgcttcctccaaaacaacaccttcggaggaaattctgggggccaatggcctggggcttttcacccattttactaatccccccttgtgtttttgggattctttctaagaacggactacaatatgtacatctttttttt

SEQ ID NO: 177372 - DNA, 263 bp, Glycine max
ctcatatagaaactgaccttgttcttactatattgcctcacagcagaatacgatcttcgtatggatctctcttcgaacttaaccgtcctatgcatgtgctttacggactctaacctagattcctcttgcttatcaatataaaaagcttacagcgggcggggaacgaggactatcagggagtagggataaaacccacttacaacctgcggagatgacagcttggagggcctatgatccattattgtaagcaaattctactgacg

SEQ ID NO: 177373 - DNA, 417 bp, Glycine max
  unsure (1)..(417): unsure at all n locations
agcttcacaactagatactatcttcactattntattcttgnncggncgctcaaattaaatgcattgttctaattttttgacattgctatttttctttgaaggggaaaacacacccaactcaattttttatgcttttgatgtccaccccaacccaattatgtgtgtttaagctgtattagcaatgtgatttgttatantttgtggaaactgggaatttaattctgtaattgtctgtttgtgtactgggctggctttattgcagaagcaaaggagacactctcttgttttgttacttccttttctctcactttggtgtcttacagatgaaaatgtatgcttctaccatttttgtttgttttcaaaattaatacactaatttcaattgaacctttctctttatattggatatcattgatg

SEQ ID NO: 177374 - DNA, 359 bp, Glycine max
  unsure (1)..(359): unsure at all n locations
ntacttcaatattttccacatcatcaatgatcttattaaaatcagtccattgctcagagactggctcttgattctgtcatcttgaaggtgtacaattgttgtttcaagcatagccgatttgcaagggactttgtcatatacaatgactctagtttcaaccacattgaagctgatgtcttttaccttgcaacttttcttaaagctttatctctaaaacatagaatgattacacttgtggctatatcaatcattgctaatatctcctttgtgcttacatattctgacatcttttcttcttctctaagagcttctgcacaaccatgtagaatcaagaatgcttccattttgattctacataa

SEQ ID NO: 177375 - DNA, 479 bp, Glycine max
  unsure (1)..(479): unsure at all n locations
nttagttacaagcacaatcacacacaaaatcaactctctaacgattgttgaaccctacaacaaggaaaaagaaaaccccttttgttaaaccctataatagagacctgaaaaacattttttttagaaatcaatcatgaaagagatcaccaaatcatagtgatttaaatcttcttagcacatgattgaacacaagacttagcctagtcttcaatcttttagacaaagatgtgaatcttgttgatctccattacttcagcttaaaaaccctctcaacgaagataagtcttgaaaatagaaaatgatttggaagcttaaagactcaatgaaaggccaactatntataaaagtcttgtaatataaaatatttaatcgattaaactgagcatgtagtcgattaaaatattcttatttgacttgggtttacctaaagaacaatataatngattatgatcaactggtatcaatttaaattgacacta

SEQ ID NO: 177376 - DNA, 400 bp, Glycine max
atctcgaagagaggaagtgtggtagagtgtattcttcctactctaattcgcggaccacagagtggcacctgcagatatgtcgcgtgggtcaggagaccttgtggacgtcaagtggggtgctattgttccaaaccaagctcgatctatcacaaccctacccatactatgtcagtcagagagaacctgtgatgttcctaaacaagctagctctctgtagctaaccgattatagaacaaaaaccacaaagcaaggaggcttgtgtggtggctggccatctttgaatcttgagtgatatctggaatatggcctctcggaatcgattaccacggatgtgtaatccgatttccaaggatgtgcatcatatactaggcttcaaatgaaacagtatgtgaggggcctt

SEQ ID NO: 177377 - DNA, 324 bp, Glycine max
tctagttacaagcacaatcacacactatatcaacctctaacgattgttgaaccctacaacaaggagaaagaaaaccccttttgttaaaccctataatagagacctgaaaaacattttgtttagaaatcaatcatgaaagagatcaccaaatcatagtgatttaaatcttcttagcacatgagtgaacacaagacttagcctagtcttcaatcttttagacaaagatgtgaatcttgttgatctgcattacttcagcttaaaaaccctctcaacgaagataagtcttgaaaatagaacatgatttggaagcttaaagactcaatg

SEQ ID NO: 177378 - DNA, 445 bp, Glycine max
  unsure (1)..(445): unsure at all n locations
gttgcgtctaggcttacctatggcgggccttgggtttgacaagcctttggagaaaagaggctcaccaagggtgaaccttacgtttgataagcctttggagaaaagaataaagacgcgtctgtcctgggttttggcgagtttcaccaagggcgggtcttgggttttgcgagcctttggagaactgagactcaccaagggtgaaacttggtttgatgagcctttggagaagtgagactcaccaagggtggaccttgggttttgtgagcctctggagaaccaagactcaccaagggcgaaccttgggttttgcgagtctttggagaatcgaccagtgacgtttatcttggattttggcaaaactcactanaggtagaccttgngttttgtgagtctttgagaatcagactcatcaagatggacctggtgttacaaccctataagttac

SEQ ID NO: 177379 - DNA, 332 bp, Glycine max
aactaagctttaacggcctacgcgttgcatgaatgtttcattctttccagccattatgactgtatagagatgatgcgatgatggatttattattaatgtaataccatgccttctttggcggctaaaaaccacctatcattgcacaagccatatgaaaacatcaactcaaatgaagatcacactaaccacacaaaatcgaacctagatatagaatctccttgcagcctaagatgcgaaagagaagaaggctaatacccttttcgtgtcaccatacggaggaggtacaataccagatatggaactctcatcttcctcgtccaaaaaacaagaat

SEQ ID NO: 177380 - DNA, 464 bp, Glycine max
agcttaagctccttctactgcacaagactcttaatatttgaagagtatccttatggaaccttcacccgacaaagacactgacaaaaagttatcttctcctttttggacaaagtatggcaagctgggggtaagtaaattttcttcccatcagaccttggatgcaattgtgatcgtatccccatttcagcttgatcttgatgggtattcaagccatcttttgtcttgccttgaatgttaaggagcgtcccaatcacactgtcataaacatttttctccacatgcataacatcaatacaatgtctaacgtctagatcagaccaatacggaagatcaaagaaaatggacctcttcttccatatgcaactcttacttttatccttcttttgggtctttccacatacagtattcaggtgttgaacccgctgatatacctgctcaccagtcaatgttatcggctcaatatc

SEQ ID NO: 177381 - DNA, 292 bp, Glycine max
  unsure (1)..(292): unsure at all n locations
tgtctgtatcattcccattgatagtcatagctgtagattcataatcattttcctcattcctttcaatatcttgttttgaaccatttgcagacttgttagcattactggccggcgtggcttntccaagattgctgccttcagcaccaccacaaaacaacgcagtttgagggaagtcgggaatatcacgaaggctatgatcattaagaggaggagaagagtgtgtatgcttgcactctttgtgttgagtatcatgcaccatatgcttgcgtttccgcttacgatgttttcttga

SEQ ID NO: 177382 - DNA, 439 bp, Glycine max
  unsure (1)..(439): unsure at all n locations
agcttcttgagttcttggtgcattcagttgttccttaatggactgtgtgcacccattttggtagtagaaagacacttttcaattcactctgatagaatagctatttaatggcactgcttaggaggtacatcactgattgcatcaatatttgtatttgcttaagtatgttgtctggggttcgataactagtcatgtatatggataatactttgttaggagggacaagactcatttcggtgatctctacctattgaaaggatttagtcttggaaaattgaccgggggatattcttggtacaaaccaaaaaatatntgcaactaccaagacattttccatctgtaaatntcatttgtcatactgagatttcatttgtagtggtcattcagaattgtttacttgagttattatagcagaacaggcactgcaatagtcagtaaa

SEQ ID NO: 177383 - DNA, 361 bp, Glycine max
  unsure (1)..(361): unsure at all n locations
tgaagccttgaagatttgtctntaggtcttagttntggtttgataattntataatgtcaaacaagtttaatagatatgacatttgtattgattgttttagactacgcatgatgtttgatatagtttaagttttcttatatacatgcttagtatggatcaaagatgttagaaaaatagatagatctctaagctttttaagaacaatgagtttacacagtgtaatctattgcaaggttttataatcaattacaaagttttagaacaagcaacataactctcttctacttgaaatttgacaagttctgacgaattaatcaattaccactttcagtaatcaattacagaagccagttttagaata

SEQ ID NO: 177384 - DNA, 485 bp, Glycine max
  unsure (1)..(485): unsure at all n locations
ggatccttaagcacctgcggcatgcaagcttgtatagttccccaatntatgggtattttgtagtgacttttggaaataaatcttgttttatggttaatgatttctctagaacatttccattgaatttaatgatgaaatttgtgcattttcaggtgaaaaataggctaagttttgaattgcaaaatgtagcagttgggctaagctcaacagttgggctaagcgtagatttagcgcgcttagcgcagaggagaatctggcagagcatcaggatcaaagttgcgcgctaagcatgagatcagtgcgttaagtgcagcaggtgccttcagccaggctaagctcgagactggtgctaagcccaatttcacttacccgcgctaagtgcgagggtggcgctaagcatagcgtcgcgattcagagcctatnaatgtctgtcttggcagaattanggaataacttttacagctttacacacctttaggacagtg

SEQ ID NO: 177385 - DNA, 322 bp, Glycine max
  unsure (1)..(322): unsure at all n locations
ttccacgaatagatataggagggacgccgcgactgaagggactagtgccgctcccgagtttgatagccactatttcaagagcgctgagcaccagcagcgttttgaggccatcaaaggatggtcgttcgacagagagagacacgtccagctcagggacgatgagtacacagattttcaggaggagatagctcgccgacattggacgtcgctggtcactcccgtgactaagtntgacccagatatagtcctggagttttattctaatgcttggcccacagaagagggagtgcgggacatgcggtcatgggtgaggggtcagtgg

SEQ ID NO: 177386 - DNA, 425 bp, Glycine max
  unsure (1)..(425): unsure at all n locations
agcttctcgatatattatgctctataatcctacttccgtgtgataagttatgaccattggaatttctcgagagcttccgttgttcaatttcaagcgtctcgatatattatgaacctgaatcggacttccgtgtgacaagttatgacaattttaatttctcgagagcttccgttgttgaatttctagcttctcgatatattatgcggctgaatcggactttcgtgtgaaaagttatgaccattngaatttctcgagagctttggttgttcaattcccagcgtctcgatatattatgcacctgaatcggacttccttgtgacangttatgaccatttgaatgtcacgagagcattcgtttgtcaatttcaagcatctcgatatattatgcacctgaatccgacttccgcgtgacaagttatgaccat

SEQ ID NO: 177387 - DNA, 297 bp, Glycine max
taccttatcacataaaatcaccttatataaagacaactagcctgatttttctaatggtggtagaggttgaagcagcaggactgtaaaaacataccggactcaattccacaaaaaccctcccctgaccaaaacaacactgaatggggatcagaccagggcccctaatcgggctattgggctataactaatcacctcattttaactcaacttgcataaaatctacacagtcatcgttcaattatccactgcaagcgctcaaagaaatgttgaccacaaaagtgaccaatccatgacggc

SEQ ID NO: 177388 - DNA, 425 bp, Glycine max
  unsure (1)..(425): unsure at all n locations
agcttctgctaaaagtgctgagtcttgttattatacagcttgcctctctcactcaccttttgttggatcttggatagactctggtgcttccgatcacattgctgggaatccctcacttgtcttcaatttgtcacaaaccaaatcctcccaccacataaccttagcctatggatctaaaacccctgttattgttattggacagtccacccacacccnctccttatatttaaacattgttgactccctttaatcttggtactgttagcctactcacccaaactcttaattgctctattacctttctttctgatactttttgtataaagaccgaacgacaggaaggatgatcgacataggatatgagtcacatgggctctactacttacactcaataacaggtgttgcatgcaccactattgagtctc

SEQ ID NO: 177389 - DNA, 401 bp, Glycine max
  unsure (1)..(401): unsure at all n locations
ttggcctgnaagagcgtactgtccgaaaaacgccagtactttctttcatcgtagtcagcgccaggtggctggggtttggctaccaccggttaatgccttcttttgctggcgtacgcttcgaaatgggtaacgacagctggcacagatttgtggcgttaaatgatgaatccgccagcgtagatgccagtttcgattttacgccggtatggaacagtatgcctgccggagccagcttctgtgtggcggtgccgtattcacacggtattgccgaagagatgctttcgcacatcagccaggaaaacgacaagctgaatggggcgttagacggtgccgcggggctgtgctggtatgaatactcaaaattgcaaaccccgctgtttgtcggtcagtatgatggcact

SEQ ID NO: 177390 - DNA, 430 bp, Glycine max
agcttcgcctgggcgctgacgattgtgttttaatgcaacggatcgtggaactcgcggccgatcactttaacatcgacacgatcgcctgcgcgatatagcgggcgatcggtgaaaatatacaagcgggtgatgtagatttcgctttcgtagaagaagtatttggagacaaaaacgccgccttcatcatccttacccagaatgtatgaacgttctggcgatatatgttgaaactgcaaggaaccgctgtcatcggtcacaccgcgggttatcacgccaagaccgttggtccacaagatctctgagccgagcttcgcttcaccctgtgttttacccgcggtcacaccataagcttttgcctgacactttgtaatgcgcacggtattgtaacaacaccatggtgtgcagatcccccaacatgtctcaaaagaca

SEQ ID NO: 177391 - DNA, 341 bp, Glycine max
  unsure (1)..(341): unsure at all n locations
cggaatngcatntggacacctattttgaatctcctatgctgtacctacatacataaaacagccccaccatcccaattttacaaaatcatattcatacaccattggggcatttcaccgaacacttggtgagcgcatgtttggacatgaattgcaggagaataggagcaatgtggcatgccccattgcttcagaatacaacctaggcctaaggccttttcattcaaatcctcaattcaagaaaacaagcaccaaagcaaaccaaaactacctcacaaatataagcatgttctcacaatttaaggaccaaaagatgaagaaaacacatcaatgggaagcaaaaa

SEQ ID NO: 177392 - DNA, 456 bp, Glycine max
agcttacatatagctggaaaaagcgaatgttgttcctgttgaagccacctcttcaacactggaagtagcccatgaggacaaagtctgaaagaaccaaaatgttactcatcactaaagaacatagagcttatcattgattaacaacaaataaaatttacaagcatacaatctcatgaagttaattggagtgttcatgaatgaaatgttctggcatgatgtacaagggagcagataacacatgctcagcaaatccaccaattgcaaattacaaagttgtctatgctgaattgaatcattgattccagaatatgtggtgattaatcaagtgaagcactactagttccctaattaagaggaatatgaacataaaagagaagaaccatgatggttccagcagcagatgcagctcttgctgttgatattctcctgataaaacaagcatatgatcatccaaca

SEQ ID NO: 177393 - DNA, 323 bp, Glycine max
ctcagcttgtaagttctggcttgactcatttaagtaatcgagtttaatcttaagtatgaattcgtttatataattaaacaaatgagcttgattgaacatttacatccctatgtatttcaaagggagtctccctagtttcatttaataatgaaataagtagctatgtgaattggaaagaaaagtatggaaaacaaaattgcaaaatagtttaactaagcataactaaataattgagaaaacctaattgtaacatccctaatttatggacattagtaatatataaaatagagaccttttatggatactctttacttataatagta

SEQ ID NO: 177394 - DNA, 442 bp, Glycine max
  unsure (1)..(442): unsure at all n locations
agcttaccagaagcgccaatcagtggactttgttngttggcgatttgtctgagctatcatgagtaaagatcgtttacccactcattaatacaactagcttattgctagaaaaatcgagtcatattcatagttctaatgctttcaatgttaatttccttattgtggtaatgcttcttctgatgatgagatggcttttgatctgtggatgaatcttctccaccccgaaaaggatcctgcagtgcaagattgaccaaagttgacccaaaaaagtcattcgtgtccatttttttacaaaggagtacacttttttgaatggaaatgaccttctaaggagactgcattccctactagcaatgtgttgattgatattttagccaaattctattgttaaaggggtaaaattgcaatnttatctttattggtttttagtcaaattctatcg

SEQ ID NO: 177395 - DNA, 329 bp, Glycine max
  unsure (1)..(329): unsure at all n locations
tccatangaagggtcgcccctgtgtggatcagactctgttaaaggagttttacaaagagagtggaaaatttcaagtgggttgcttgaggactggacgtaaacacgggaagtggccgaaccagtataaatcaagtttgcattccttctttccttaaacttcttttatttattgctatttatcttttgctttaaagaagtttattttgaattgtcttttgagtaattcatgttaagggtgcattgttaatccaaaaagagagagtgaaagtctaattggggaatagtctttgtattttaattcaaccccccaccccttcttaagataactg

SEQ ID NO: 177396 - DNA, 436 bp, Glycine max
  unsure (1)..(436): unsure at all n locations
ttaagtcacctgcggcatgcaagcttngccttgactcatcgttgccttgaattgacatctctaatgatctttcttccttctccattctcctgtcattgatcttcaagaaacaaaggacttcattgatgaagaagatccaaggcctacaagctccacatggagctacatcaaggaggaagcacactaggatattgatttacatttttataataatgctatcccttttaatgttgccaacaatgcatagtttaagaagatgcttgatacagtttcctagcatggtccaggatttgtccctttatcatacaatgatattaggatgaaggagaaaactcatctgtctttgaagaatcatatagcttattggaagaaatctagatgtacaataatgacagatggatgaactgataggaggaagaggaggactatnttaaaa

SEQ ID NO: 177397 - DNA, 408 bp, Glycine max
ctagtcgaacaagataatccagacatgtcaaagaattgtgtgttgaaaaagcataacaagactatctgtgattggtttaaagatacaatctttgtatatgagaatgcttcagagacattaagaaagctagcagatgagcctaaaagaaatgttataacctggcaaggatacgacataaacaagtattcattttacacaaaagcataagatgaaatttgggaatgacgccaatccctgtgtagcttccatcccttactttgggttcattgatgaaatttgggagcttaactatgtcaaatttactgtatttgttttcaaatgtaaatgggttgacagcaacgctggtgtgcgcaccgatgatataagatttatgctggtagacctaaagaaacttggttaccacaatga

SEQ ID NO: 177398 - DNA, 402 bp, Glycine max
agctatatcaaacagagaaccgtccacataccctgatatcatagaaatccatgatattctgtccttctgaacaccttcttgctccatccgatcaaacaactccttggccttaaacaaattgccattttcccaataaccagctatcattgcattgtaagatgctgcaaatttccttgaaaacctggaaaacatttcgaaggcactttttatatcaccactccttctatacatatccactaacccattcacaacaaatacattagagaagaactcttgtctaacaacatagccatgcagttccttcccaaggtgtagccattgcattctcgcacaagccagaaaaacactcaccagtgtttgagcatttggtctcatccctgttctaccaccattcttgcagca

SEQ ID NO: 177399 - DNA, 374 bp, Glycine max
  unsure (1)..(374): unsure at all n locations
ggctcacgttgcttgcaccgcatatcttgtgcacattggtgaatntctgaggctcttctggtgggaaatatggcgcgaaaatgcaatccggcatgcatttccttctcaggaacttgcaggcagcacagggagagttagagtagctagatgaggccatgatcttcactgcagtaatgccgattaagaatcaaacacgtgcaactaaaataagtattttttttcaataaatatttaaataaattgacgcgatactctcagaaacgttggaataagtacttatgagtgattatagtctttaattcttatagcagcaactacgagataattcattggatcgagagatagagttgctagatgaggccatgatcttcact

SEQ ID NO: 177400 - DNA, 369 bp, Glycine max
  unsure (1)..(369): unsure at all n locations
tcgtccgaagatccctcatgtaagactaggcctatactaaatagcattattgtaacagcataattaaaaccaaaacttaacccccagatccctcatttaagatttagtttcgatcttgcttcaatcaagtnttaaggcaacagtacctttcccaatgctaaagtcacctaactatgcacacaaatgggtgatcagaccaaaagcatacaaacatcaagcattgcatgaagcattgaacacaaaaaacacaatcaattagatattatgtatttacatcaactgctcattagaaatccccaactagggtgtttagccagccattacaaagaaaccctaacaataaatgagattaatagcagagaataatag

SEQ ID NO: 177401 - DNA, 284 bp, Glycine max
tgagttcctgtcttggattggcgacctgcctctgaaatcactgggaaatggcagtgaggaacgcccggatttaccacaacctaagaaccttacgttaaaacttatgttggccagcttaagtttttttgtaaagttgcgctttgtttgaattaaaacaagatttctcattgtcctgtcctaccttctcatcattgcatgttacttcttttttaaacggcagattccatgaacgagtcccagaaggactaatacttggaccctctataacttcgagcaagaatgaa

SEQ ID NO: 177402 - DNA, 259 bp, Glycine max
  unsure (1)..(259): unsure at all n locations
tctcgatatattatgcgcctgaatagacttgctgtcttagnttgacctatgaatttctcgatgtaaatgcgcctaatcggacttcgcgtgaaagttatgtccttggaattctcgatagcattcgttgtcaatttctagcgtctcgatagattatgcgcctgaatcggactttcgtgtgacaagtcttgaccgtttgaatagttcgagagcattcgctgtgtaactttgagctctctcgatagattatgcgcctgaaatg

SEQ ID NO: 177403 - DNA, 483 bp, Glycine max
  unsure (1)..(483): unsure at all n locations
agcttcatgatgatgaatcaagtatgattcaagtacttttgatgatgacaaaaagcccaaaagaatgatgtcaagattaagtcaacaagttcaagatcaagattaaagaaaagacatcaagaagaatcaagattcaagagaagatgaattcaagattcaagagaagaaaccaagaagcaacaagttaagacttcacaagggaagtattgaaaaagatttttcgaaaaccaaacatagcacaattttgttttacaagtggacatgcgattcgacgagatggactcaaggatcaccaaggttgaaggtgatgtcacttatatccgcacatgctttgatctaccaccaccaccgccaccatcatcttagaatttattatttttaatattattagtactttgatttctagccatgtattgggctatattattatgacatgtgaacacttagtatttcttttaatattntcttagtatgactgaacat

SEQ ID NO: 177404 - DNA, 338 bp, Glycine max
cttgaaagttgtttgggaaagcaagttcagcttcttgattggatcttgattcatctacaatccaatcaatcgtagctattcaaatcgtaattggtgatggcatcccttcccttcatttttattgatataatatcaaaagctctagctacatcctcgggagtatctgaagtagacaaacatatacatgtcttacattataaacttagacaaatatgatatatttactgcaatgtgcatgcaaacattgtctattgattatgcatatacctagcctacacatgaaattgattatgcaaacatatatacttactaggtaccctatacctagcctagacatg

SEQ ID NO: 177405 - DNA, 337 bp, Glycine max
atatacggttccgcaactgtttaccttcttgtttatcttcatgcaacgcttcccattttataacttgtaacacttaattttctgatcccaatctcgttagctttctagcaacacaaaatgagcgccatctctttcagttccacccatttgcacagttggaaaaatcccaaggcacttcatttatatatatatatatatatgtaatcttaattttgttttgtaaaatgtagtattctgtgccatacaatgtttccttatgtatatattagcatgcaggacacgattttgcattgattctgtactttttcttattcttcttttggcggcgaaatgtgtt

SEQ ID NO: 177406 - DNA, 281 bp, Glycine max
cttcatctagccaagattatacaaaggtgttacttgagaatctatctgtttctaattatgtgggccatcaaatctatcatgtgttgacagtaattgattagcccatgaatctcttcgggggccgtacacattactgccatggcttttgctttggctaatagacacgggaggtcttgactttcattcaaggtcaaggcgaacctatccatccacatagtcgctacttgatgctatgcatcatcactcttgtcttcttatcggcgtacacttgtgcaaaatcc

SEQ ID NO: 177407 - DNA, 440 bp, Glycine max
agcttagctgaattcagatcgaattgaagttagcttatctcaaccttggccagcttagcggaccaaatcagcctcagatgcaagggttgggcgctaagtgcatgagactcgcagcttagcgcatgaacagagatgtgcttagcgcgaggcttgcgcttagcgaaaggactatttttcagaaaatgttttctaagttatttttttttagtccttattccaagaatctgaaacccttatgttaaacattcaaagattggctgatatactcctatgtacaaattatatagcaagttccaaatgattaaatgcatgaagaacaaaattaatagaaattaaaattgggttgcctcccaggaagcgcttctataatgtcattagcttgacgcttttacctcactgggtaaatcatatgtttggttcttactttcagaacctcttga

SEQ ID NO: 177408 - DNA, 369 bp, Glycine max
  unsure (1)..(369): unsure at all n locations
ttgagggtgtgtagcccaccatctttcatagtagagtatcgataatgtgtctaccatcacgatcatcgtctccctttccatcattgggggtaccacctgngccgccagatccctccaccttttgggcgtgttctatgaaagatccgtccccctttttgcaagtgttctgtagttgcatcctatccggaaccatatcaaaattgtactgatactgcctaacaaaggcaaccattacgtccttccaagaatggactcgggaagattccaagttagtgtaccaggtaacagctaccccagtaagactttcttagaaggaatgtattagcaattcctcatcttttgcgtattcccccatcttntgacaataca

SEQ ID NO: 177409 - DNA, 440 bp, Glycine max
tgtcaagcttgagcaaaatcaaacgattataactttttactcgtatgtccgattgtgtcccgtagtatatcgagacgctcgaaattcagaacagaagctcttagaaaaatcaatcgacaataactctttaatcggttgtccgattgtgtcccgtagtatatcgagatgcttgaaattcataatagaggctctgtgcgaaatcaaacgaatctaactttttacacggatgtccgattgtgtctcgtagtatatcgagacgctcgaaattcaaaatagaagctccgagcaaaatcatacgataataactctttactcggatggccgattgtgtcccgcagtatatctagacgctcgaaataccgaacacaagctctgagcaaaatcaaacgacaataactctttactcggatgttcgattgtgtcccgcactatattgagat

SEQ ID NO: 177410 - DNA, 480 bp, Glycine max
  unsure (1)..(480): unsure at all n locations
tgtgacaagttgatatccccaaaccaaacctgttagacacaatcctaagagggtccccagnggccaatctccacaaacacacagccaccctttgcctcacaggaatagcattcctcaaagtggtgtcttccttcacaattgcagaattcaattcgtcacaaatcatatcaaaagtttctcttcccatcctaaaagcctttctaaactcttcttcaagaaaatcctctttgttgcatccatcccaccatgcccctgaacgatccttcacccacagccttctctgtgagcctcccacaccagatttcaccccttcatcactaccaccaccaccctctccctatctttcgcacgctaccaccggcaccgcacgtgccatgccgcgtgacttcttcctcttcaccctctctgactcctcgacgtggctgtaatactcgtcaagggtggaatagtactgaagcatggcctttgttctcttcttgt

SEQ ID NO: 177411 - DNA, 405 bp, Glycine max
  unsure (1)..(405): unsure at all n locations
agcttgtagaatggctagacatgatacatgtctatggttnggnttggtgcaaggataaaagggacgccccacattatttccatgacacatatgcaaaaatgatgatttggaaactttatgcaaaactggtcatgcatgcacctatgtggacactcaagtgtcaaatttttatggtcatgtgatgctagggctcaagattcatttcctccattttagtcaacccaatgtttccaaaatatgttcttttatcaattggggcatacatccgagtccattttgggcgtccggggaaatcttcacagcattcacccttcaggtgtatacacatctgttttcaaaaactagctatgatcagccgattttcttttcaaagaagagttggaggtcatctttttcaaaagcatg

SEQ ID NO: 177412 - DNA, 403 bp, Glycine max
tgagatgaagaagtgtacaagggcgatacttcctgcttttattcgccgaccacagagtggtacctggagatatgtcgcgggggtcaagagacctttgggacgtcacgtggggtgctattgcccaaaaccaagcttgaccaatcctgacccaacccgaacatagtcggtcagtgagaacctgtgatgtacctaaacaggcgagctgctggcagtcaacagataaaatgaacaaagaccacaaagcaaggaggcttgtggtggctggccagctgtgaaacttgattgatatgtgagatttggcctctggtaatcgattaccagtctgtgtaatctattacacacaggaatgggtcactggtaatcaattaccagctatgtgtaatcgattacacagtgcatattt

SEQ ID NO: 177413 - DNA, 418 bp, Glycine max
  unsure (1)..(418): unsure at all n locations
agctngtatgcatgattaggatgtttattatcctcaaagctgggaggttgggaaacataaacttcctcttcaacgtatccatttaggaaagaacttttgacatccatttggtataacttgaaacccataacacaagcataagcaagtagtaatcttacggcctctagccttgctattggtgcataggtttcaccacagtctataccctatcattggttatagcccttggctactagccttgcctcattcctagttatcaaaacatgttcatccaatttattcttgaacacccatttagtgccaatgatgttcatgactttataataaggtaccaattcccatacgtaatttcttttaaattgttcaactcctcatgcatggacattattcaaaactcatcttggattgccacttatat

SEQ ID NO: 177414 - DNA, 348 bp, Glycine max
  unsure (1)..(348): unsure at all n locations
nggacaggtgttaaaccaaatgtatcacattntatagtatttgggtctgtttgttataggcatgtgcctgatcaacttagaacaaagctggatgataaaggagaagtgatgattatggtgggttatcattcaactggtggttacaaactagtgaatcctgtgaacaacaaaattgtgataagtagagacatagtatttgatgagggaaaagcgtggaagtggagtgaaaagagagagagttctactggtgtagaacaaaatctgtttgatgtgcctgctggtgaaactgagtcagacattgagggtgaaacagggccagttgaagataatgatgatgaaggtggtagt

SEQ ID NO: 177415 - DNA, 326 bp, Glycine max
  unsure (1)..(326): unsure at all n locations
ctaaagaaacacatcgaatttatgataattaatatatatttccattcacccttttatattataaagatggtaatcgacaaattccactctttgggtgataaggagccatgagacctttggtttattgattttattctgggntcttaggtatcattacttagggatattaaggagtggcatgagctgaaggctaatgtggattaactatttagggccagatatcaagagaagaaatttttcaagcgaagaagaggaaagtatcattaagacgcatgagttgctgggaacaggtattataggatgattctattcagactaatggctta

SEQ ID NO: 177416 - DNA, 308 bp, Glycine max
cgtaatagaacacattgcataaatatcctggcatgcatatatattttctgctaccgcatctaaagatgtgaacactgaaacagtgacagtaattcaaaattcagactattggctactgagaaaataattcctgagatgcttatcatgatagagcgctcaggatatggtggtatctttgaatggataaatatttcatggtatccatatttatgcttaatttttgttagatatctgtatttgttaattgtcaatgtcatacacttcaattgggcttctgatcttatctaatgttggatgacacattgcta

SEQ ID NO: 177417 - DNA, 502 bp, Glycine max
  unsure (1)..(502): unsure at all n locations
ctcgaccggatcttaagtcacctgcagctgcagcttatacaattacaatcctaataaccttacggattgtgggttcatacatatatttttttaaaaaaatttaaaaatatgttttacgaattaatttaaaattaatggtccatgcaagactcaaatctgtgacttttgtgttattagtacaacactctaaccaactgagttaataatcaattatgttataaaatgattaatgttgttatatataacactaaaatttctaatgtatatntaatatacatataagtttacataataaatttatgaacaattttgtgataattaattttgttctaatatatttaatgcaccaaaattaattgtcacacaaattaaatttgtaaattacatgtacattaaatatacatntaaatttntattgttatatataacganattaatttatttataatataattgacctattagctcaggtagttagagcgtcatgttaataatgtaaaaa

SEQ ID NO: 177418 - DNA, 401 bp, Glycine max
  unsure (1)..(401): unsure at all n locations
actcagcttagggccaagcaactcanaatctaggtatctaaaacccctcaattaagtggattttcaaggtttgagaagtgaaaatgagactgggaaattttggagcaaactctcatctcacacaagtctataacattaatctaaactcgctcaaactagttttacgaggaaaactctaccaaatcaaaatttgactcctcaacacccaatttaccctagaaatgactcttgccttcactttggtcactcattttcctcctttgcacagcccaagctttctcacagtcctaaatgacatttcaaactaggattaactcactctaacctccaattaccactaaatccagatttggcttttcaaatcctcanagcatcacactnttccactcatatcactacat

SEQ ID NO: 177419 - DNA, 460 bp, Glycine max
cacctgcggcatgcaagcttctatgaaggctggatctttgagcttcaatgttgtccttcaatggtgatttccaccatggagatgcagcagaagacaaaggagaagaggtgagaggaggtgccatccactagggaataaaccatggaagaaggagcttcaccaccaagaatatgccttggataagaagcttggagaggatgcttcaatggaggaaaagaaagagagaggggggagcacaaaatggaaggagttaaagaaggagagaagttgaactttgatttgtgtctcacaagactttcattcatcaaagttacagcaagtgttacacatgcttctatttatagacgaggtagcttccttgagaagctttcttgagaaaactttcttgagaagcttctttgagaaacactccttgagaagctagatcttagctacacacacccctcttataactaagctc

SEQ ID NO: 177420 - DNA, 457 bp, Glycine max
  unsure (1)..(457): unsure at all n locations
tcatgagagagtcaaagatcaaattgagaggataaatataagctatgctaaacaagccaacaaagggagaaagaaggttgtcttcgaacccggagattgngtttgggtgtacatcataaaagaaaggtttccggaacaaagaaaatcaaagcttcaaccaaggggagatggaccatttcaagtgcttgaaagaatcaatgacaatgcttacaaagttgagctgcccgatgagtataatgttagttcaacctttaatgtctctgacttatctctttttgatgcagatggagaatccgatttgaggacaaatccttctcaagagggagagaatgataagaacatgaccaagagcaagggcaaggatccacttgaaggacttggaggacctatgacaagggctagagcaaggaaagccacggaagctcttcaacaagtgttgtccattactattgaatat

SEQ ID NO: 177421 - DNA, 405 bp, Glycine max
  unsure (1)..(405): unsure at all n locations
agcttgctctaaatntacattgatgtttgtatttatgggaggaggttgtatgtcatttttgttttaagagtagtgtcccactggtaaaactgactttccaaatgtttgccttcgcaggaaatggccccgaggaagctcgcctcaaagaggtccaggaaggacaaggcagccgaaggaactagttccgctccggagtatgatagtcaccgctttaggagtgctgtacaccagcagcgcttcgaggccatcaagggatggtcgtttctccgggagcgacgcgtgcagctcagggacgacgagtatgctgatttccaggaggaaatatggcgccggcggtgggcaccactggttactcctatggccaagtntgatccagaaatagtcctttgagtttatgccaatgct

SEQ ID NO: 177422 - DNA, 453 bp, Glycine max
tgtgaaactctttgagaaaaaaaagtccaaattatgcattgagatagagacaaatgctagcaaaaaagatacccttcttaagaacttttatgagttggaaaacagactgaaagatcttcaaaaggatcggaaggaacttaatgaactacacattaataagaaagaagaaagatatgatctttggagatagtgtgcacaagcacacaaagattttgatgaactcaaagtgagtaaacacaatctttgggtggaatgtgaagaactaaagaaaattgcaagtttcctaaaagatgagcttctaaagcatcaataatttataggtcaacctcaagatgttgtaaacttcacgaggaaataaaaaccttatagactacattatccaagtttgtaatggaacaaacaatcttatcaagttgttaggaaactgtagaagtctactgacaatctagaatg

SEQ ID NO: 177423 - DNA, 457 bp, Glycine max
  unsure (1)..(457): unsure at all n locations
agcttggttctctttggtctcttccacagtcaaaaatctcaaanaaaaaaactcaacaacctcctctccatttcgagattcagctttaaataggcaagtccgttgagaggcgcacgcttagtggaagataggctcgcttagcgcatgtaagtgacttctggcttagtaccaggcatgctcgctcagcctggaggttcaagcggtgcacttagccaattgattctcgctgagcacatcatgaaaactcatctgcttccaggatcttctacgtgcttagccatgaactgctgcacttagcggattgtaacgtcccattttttttcgtatataaaattntagagaataatgatgttttataattaaataaataaagaaaaatagttataataaaataatggtttgagagaaaataagaagggtatttattattcatttgatggagaataaaatagagttt

SEQ ID NO: 177424 - DNA, 323 bp, Glycine max
  unsure (1)..(323): unsure at all n locations
ntattcacgactaggcaattaaagatattcattatggatgatcaagactgtctataaagtcttagaaagggtatattaaatacgaagggaattccagttgaagtagcaaaaggtttggccaagaattataagttaaaaattcttttacaagaaatttactctctggtaatcgattaccagaggatgtaatcgattaccagtggccaaaactgatttacaaacagctattaaaatttgaattcaaaatttgccctgtgtaatcgattacacatatatggtaatcgattaccagcagtttctgaacgtgtatcattcaattttaa

SEQ ID NO: 177425 - DNA, 429 bp, Glycine max
ttcacagcacaagctatcacagccaagcgaaacaaagcaaaggcagaaaactctgtctaaacaccaaccaaaaatcacagctttttccacttcaagaccccagtaacaattccttcgaccaatttgtaaaccgtggatcgactccaatatttttctggaagtctatagtgcataagcctacattctgaccgttgggatctactagcaaacatccagaactcattttacattactctttccacaaccagcaaaaatacatggatttttctgcactcgtgcagaattctgctgcacaagtttacagcataatctgcacaaagagtatattttaataccacaccttcctcatccaatcttgccaaatcaatcctacaagtcccaatcatgtttcatcatgtctaaccaaaatcaacttcaaacaccgaacac

SEQ ID NO: 177426 - DNA, 251 bp, Glycine max
cttcgttctgaattgagcgctcggaaatttcggatctatagactgccccaaacagttggggtgcattgctctagcttatgtttgtatctagcggttaattattactgcattcattccgacatcctagcaaaagtcatgcatctgacttgattagagcctggtaccaaaattgagcgtctctaatcctggggtgccaaacctatattctacaaaatgatgacgtgtctgactacgcatgaataagtgctcaa

SEQ ID NO: 177427 - DNA, 397 bp, Glycine max
  unsure (1)..(397): unsure at all n locations
aggaatctacaaagcaagattgatgatggccgtttacgaggaaatgttttggccccgccacttccttttagtgcctgtcacttatgaagcatttttcttcagtaatattttacgaatttaccaaactaatgtaatgtttgaacgggttatgtccacaacttcattctccgttttcatcatttttgtattacctgaattgacatttgggctaaggtgtgattaagcaattagtacacgataacactatcacagaccatcatcattacatcatatgtnttgttatctatagttgtgttactcactctaacaaattggtaatgcggctgctcttggtataatcatccattttcgtcttgatagctcctcctccgaatcagataggggattctgccctcca

SEQ ID NO: 177428 - DNA, 403 bp, Glycine max
tgaggactgtgtattatgacagcgaaaaaggaagcacacggttttgtttgaacaatatcatgatggcggacgcacattctgatgatagagaggggcatcttatccacaatcacgtctggctatgtcctctacttcgtctctcggtaattctactcgtgcagatcatccaggaggaagggaaacagtgatcaacttggatcaccaagtgcaacctatgattaatgtaccttcttctctattcgttaccttctgatcatgtcgaaatgtctgcattaatgctcgcctaacgtagctaatataagtgctgtctgggtgagcacagcaaatctctttatgattttttcgatattcactactaccctcttgagagttccttttgatctcacatacacagaaacatttt

SEQ ID NO: 177429 - DNA, 395 bp, Glycine max
attaattattctctagatttgaatatcaccttttcaccatcagagttgacagtgtcattgttcgacggttggcaagtgcaccggatctcgcaagtagtataaaacggtaagaactgagtatcgaactctcggggaacttgttttacttggtaaagatgtggttcagtaagtaagcgtcttgttataaaaggtttatgtgtagtatggacacatgtgtaaactaactaaacaaaggtaaataaaaggtgagcagtggtgggtgcgaaagtagatggtcaacatgttggtcttcctactaggcgactgatgctactaaagatgttctctacctaacagcgttcttgtgttctatgatgtctcctggactgctaaaccccgatgtctcatgcatgttt

SEQ ID NO: 177430 - DNA, 425 bp, Glycine max
tccatcctaagaaaattgttaaggctgactaatctgatattaatctttcattgtatataatatgtaaataaaaagaaaagggatgtcagtttgttagttttagtcagctactgttgtttcttggctgttaggttattgggtagctgtctataataaggcacgtctgtcgtattttagagagaccaaatgataatcacatagtgcagagcatatttccttgagctctttgtttctcttcccttctatcctctctattccttttcttctctctttgcctctttctttctctgtcattctgtttctttctctttcccacctaaatcctataacagttggtattcagagctggctgtctacggccactagaccagaatctcttcattcatgggcacagaaataacatcacagacagtgatgcgtgaaat

SEQ ID NO: 177431 - DNA, 423 bp, Glycine max
  unsure (1)..(423): unsure at all n locations
agcttgaatntaagatcaagttgacatcatttctanttttcttaacactatatgggttcaaattagattgtgcagcttattcaaatccgttccttgtttactatgacatttttgggaagctagaatgatgaaatctggaatctttacttcatcagcttagctgaagattagattagggtttcctacagccaccacactacattacagaacaagatcactcgttgatgcttcttccagagaaccctaatatcgtgttcagactaaaataaactttcttatgctgtgaaaactgaagatatcatgataaggactcagaccacccacgcccacagagacccactatttggaaagtatattctaggaaaaataggacttaaattttaataaatgtaatggtagaactcgatttttgagagaaaacct

SEQ ID NO: 177432 - DNA, 477 bp, Glycine max
  unsure (1)..(477): unsure at all n locations
tactaagcttcagaataagatggcctcagcaaattccttatttccagatatgtattctatcaatagacctccaatctttaatggagagggttaccactactggaaaacccgaatgcaaatttntatcgaggcaatagatctaaatatctgggaagccataaaaatagggccttatatacccaccacagtagaaagagtttcaatagatggtagttcatcaagtgaaagcataaccatagaaaaacctagagatagatggtctgaagaggatagaaaacgagtacaatacaacttataagccaaaaacataataacatctgctctaggaatggatgaatatttcagggtttcaaattgtaagagtgctaaggaaatgtgggacactcttcgataacacatgaaggaactacagatgttaaaagatctaggatatatgcactaactcatgagtcatgaatatctagaatgaatgcaaat

SEQ ID NO: 177433 - DNA, 483 bp, Glycine max
atcgcgatccttgagtcacctgcggcatgcaagcttcttctaggttatccagaccaatttttttttttctgaaacctcaacaacttgaacatccccacccatctcctctagaagcaagccctctgaagcaagctgcagtttaactttttcagaatttgcacctgctttatcacatttgttaatggcaactacaattggtacaatatttgcttttgcatgagacatggcttcaagtgtttaaggcatcagaatgaatgcaaacaaataaaaacttgtaagaatacctaagtataatgcttcaacaatggttttaaataaaatatttatccaaacctacctactcatactttaggcctagtcttctcgggtacttttccctttaatctttctatgcatagagcatactatcaacgaacacaaaactacttaacagacaatatcagttagaagaagagaataacaatcataaggaaatgaatgagt

SEQ ID NO: 177434 - DNA, 477 bp, Glycine max
  unsure (1)..(477): unsure at all n locations
cttgaagaagcgtcaaagcaggaagtatgggtcaaggtaatggtttattatatacacatgatcgagaaaaacaacacatgggagttagtaaatcgtccccatggaaaagatatcattggggttaagtggatctataagacaaagctcaaccctcatggcaccatacagaaacacaaggcgaggctagtagctaagggttgctcacagcaacccaaaattgactacaatgagacatttgcaccagtagctcgtcttgataccataagagttctaatagctcttgcgtcacaaaaaggatggagtatccatcaactagatgtcaaatccgccttccttaatggcatacttgaagaagagatctatgtggagcagccacaaggattcgtgtctgaaggcanagaaagcaaagtgttaagactaagaacagcactctacggtttgagcanacaccttcagcatggtatagcaaaatccatc

SEQ ID NO: 177435 - DNA, 401 bp, Glycine max
gaaattccaagaacatggaatgccatccacttgaagttatacttcagttgacgtaatgcaagaccagaagttgtactttttttcctacttaagtcttttgtcccaaaagagaaaaatcaaggttttggcttgagaggttttaacaagacacatttgggataacgaagggaatttgtactcaatcaaatacattgaataaaattctacatcccttaatttttataattttcttgtgtcttcaagacaggtacatccatggtcatagctccacaggctcaaggtctgcccttggtgagtctcgccaaaatacaggatggacacgtcactggtcatttctccaaaaggtttgcaaaacccaaagtctgcctttgtgagtcttataggtatctctccaaggatca

SEQ ID NO: 177436 - DNA, 402 bp, Glycine max
ataaaactaagctggggctagtatggcttaatgctgcaaacttcattgtattcccttaagctacttgcgcaaccttgttcattcttcttgtgtgaaaggaattggagtacatattcatttatccattctttaaagagaaacaagatgacaccacatagagctgaagatttagtatttgttcatagcaacctacgacttctctcaaggaatactccacaatatcatcaagaggaaactaacatgtgggatgtagctggagatgattctgggtcacttgatgattgtggtattcttgaaaatgctagttcgtctttagatgaaccacagttagagggtgtctttttcaatgatgatggctagtttgtggaattctcgaagacttgaagttgctaattcatcatc

SEQ ID NO: 177437 - DNA, 459 bp, Glycine max
  unsure (1)..(459): unsure at all n locations
cgaccttaagtcaccgcggctgcagctttatcacaaatgctgaatttttttttgtccaacaccttaatggtctctttcacttttgtcggttaaaatgaacatttcaaaagtctaactgtgtaatcgattactagaaacctgtaatcgattaccagtgaaaaatttcagaaaaagatttttgaaaagacacatctcttcaaatcattttgaaaaggaacgaagggcctatatatatgtgtttgttttcaaaatgcaagagagagatattccaagagaaattcattgtcaaatgctctctcaacaactcttgtgcaaacacttgcaaatctattgagagttcatctaggaatttcaaattgtagtatacactctataggaggcagatgtttctgttcttctcaaaaagtcaattgtaatcaagagactggtngtctcttgaattgtgaatttcctgaacac

SEQ ID NO: 177438 - DNA, 442 bp, Glycine max
  unsure (1)..(442): unsure at all n locations
gcttaagatgatattcagattcaaagtgtttactttctgccttaattatagggaaaactcatttatcttagtaaaaaaatagaagaaaatacgttaaagtcttgcttgaagatgcagcaagtaggccttggagtaaagtgctacctagtcaaagggggaacttatgctagctcggccatattggtcctagtcacaatgtgttctgtaaatggtttagctttctcaacattaaaatccagccaagcaaatcagcatcaacatacaaaaatacacacaaaaaactataacttatacccaatggctagttcaaaagtaattgttagttttacaccatgaaattctgatactggggacagatgtcgtacaggatgtcacgacatcacgcttcagaacatgcagattgtattngactgtatgaacagnattaaacaagtaataacac

SEQ ID NO: 177439 - DNA, 264 bp, Glycine max
tatcatcattcatttgagctattgttttctggacttaactcatctatttagtattaattaacagcgtatagtgttatgaaatctagttcgaaactaatgaaaattcaaattacctcattaaaagtgcactatgtcaattatatagttccaaaattcaaacgacgcgttacttaagtaatatataactccttccgtcccatattaatactcaaaccgactggtctaagtaattctatttttctattccggttcttaattttcttt

SEQ ID NO: 177440 - DNA, 265 bp, Glycine max
tcagatggactttaatcctaatcccacagccgacctttttacgaaaactctacttaaccctttggttaaatgaacggcccaattatgttgagttctcacaaactccactgatattacaccatgcatgattaactcccgaaccatgttgtgtctaacacccaagtggctaaacttcccattatatacttgactatatgccttagccaaagtattctgactatcgcacctgatagacatgggagggataggtttgggccacaatgga

SEQ ID NO: 177441 - DNA, 375 bp, Glycine max
  unsure (1)..(375): unsure at all n locations
atgtgattgaaaacttcctttactaatactatttcagggttgggacgaagttaagtttgtaattttaaaagtcatatatacatcggataaattatcaagctttaaataattatataatttgaatatgtaaaaacattagttaccacctttttcaaataacaaatatatgaatagtgactgaacttgaataaagagaaaatataaaggatcaatgctcgtatcaatacacagattagcatacacaatcacaatataaacgctcaattgattntttttcctactttgtatacgtagtagtgctcaagaaacactagtagagcatttctttttctaaacattttggagaatacctaaggtctaggtagaagctaaaac

SEQ ID NO: 177442 - DNA, 406 bp, Glycine max
  unsure (1)..(406): unsure at all n locations
agcttctaaggaggtgagcttagttaaatagttgtgtgtgtagctaagctctagcttctcaaggaagttgtctcaaagaagcttctcaaggaagttttctcaagaaagcttctcaaggaagctacctagtctataaatagaagcatgtgtaacacttgttgtaactttgatgaatgaaagtcttatgagacacacttcaaagttctacttctccccctcttttattccttcaatttcgtgctcccccctctctctttctctccctctttcttttccttcattgaagcatccttccaagcttcttattcaaggctcatcttggtggtgaagctccttcttccatggcttattccctagtggatggcgcctcccttctnctcttntctttggcttccgctgactccat

SEQ ID NO: 177443 - DNA, 480 bp, Glycine max
  unsure (1)..(480): unsure at all n locations
actcagcttacagtcatatagtggggttgatcgcttttcattttgttgttatctgggaactctaccccctgcatttaccgccttcaaagttgctacctcattcttggatatttcctataaattacacggctttccaggaagcctcgtctcagaccgcgaccccatctttatcggtgcattttggagagaacttttcaagcttgctagaaccacgttacggatgagcaccgcttatcatccacaaacggatggtcaaactgaagttatgaacaaggtaatcgaacaatacctccactctnttgttcacacttgaccaaaggattggcacaaatttcttagtcttgtatagtggtcgtacaatacttctctccattctggaataggcaccacattgtatgagatcacctacggcaaaccaccgccatcactttcacgttatcttatcgggtcatcntaaaatganggtgttgactcactcat

SEQ ID NO: 177444 - DNA, 430 bp, Glycine max
  unsure (1)..(430): unsure at all n locations
agctttacatcagattgtagtaatgttccttcttcctagaattaaaagaacttaatgccactaacctagggaattaaaagaacttaatagatgagtgtaactgaaattgtggcaaccaaaagtcaccccaacagccatcaagtctgccaccatttggtctcccaaaaggcttatgcctatgttgccaattgggcccttattacaacttgaactaaaccaaactaaagccgttttagttgattaacccaaaatatatttttggtcagccaactttacaaggattggaccattatttagacaaattaaacactcntaaaatgagacaaagttgtgtcatttagtcctcctccatttgggtcatgggacaactcacaacctttgactattctccttgaaacttgggcttgtattcaaatagtatggacaacac

SEQ ID NO: 177445 - DNA, 392 bp, Glycine max
  unsure (1)..(392): unsure at all n locations
actaagcttaagagaagcataggcgtggaggagttatctttgataccatgtcagatattaaagtgaagaataaaaatagattgaaattcattggtgaatgtgctacaagaaatgatgtatatacaaaggattgaaaactaaaaaagagtaactaattaactatatatatgtcataatagtttgacaactaattataactaaataaagctatatttacaaccgaatcgtgatatacaatgatacttacaacatcttgcttcttgcacacagcttatcttgaaaagttcanaaatgaggcaatgacattggtatatcattcagaatcttccttatcagcctgtgtattatcctcttacaatcctcctcatgcacattnttcctaaccacttcac

SEQ ID NO: 177446 - DNA, 425 bp, Glycine max
agcttgtgccagaggaaattcttgttctcttgatttgttaggctttcaagtccgcgtttagtgtaagagaaaacaacaccaataaaaggactttaggtgtcaaaagagttaaggatatcttaaaaataattcatatagatatttgcggtatcttccttattgattcatgaaatagacaaaggtattttattatgttcatagatgattactctttatttaattgatgaaaagtctcaatctctagatcttttcaagtttttcaaagttgaagttgaacttcaattatgaaataaaattaaggttgttaaatctgactgtggtggtgaatactatggtagatatgataataaggtgagtagcatctagagcccttcgtgctttttcttcaataagtgtgaaattgttttgcatatacaatggtgggc

SEQ ID NO: 177447 - DNA, 403 bp, Glycine max
  unsure (1)..(403): unsure at all n locations
cgagtttaggaaagtaaggaatggtctgctttgcttatcgagttagcacccagttagtattaagtaggaaatcattataatcccttgaacctaagtgagaagtatgaagtaagtataccaaagggaggaagatcgttttgagggaagagagcgagaatcgaaggtaggtaaatcatgtattcttgagagtcacgtgtggactangattgatagagcgttgaagtctcgaaacttatacctcttttcttgaattggcctatggtcgaaaaagagtcggccattgtggcaatccgggtttcttatgtatgtttgctcatttcagaatatcagtagtggcctctatgatattatccaactccaaatagtatgtcattcacattctatttatcgtgagatgtcactt

SEQ ID NO: 177448 - DNA, 362 bp, Glycine max
cagttgacttactaattgattgaactttgtgatgtggtcatggagatctcctcccatgtccattttgagttgatacaactccatcttcaaacagagacgattggttagcgactttgatgcataaatattctcgagcttctcccacaaggccttcggtgttgtctccttcaacacgtgttttatctcgggagcaaaggctaaccaaattgtgctcacacccctcatttggatcttagtccactcaatttcatttatagaagccagtctttcatcttctaatgcctgataagaccttactgaccaaaaggtcttgataatactctgcaaatcataaaattatttttcagtaaacaacagatctc

SEQ ID NO: 177449 - DNA, 478 bp, Glycine max
  unsure (1)..(478): unsure at all n locations
atggtctagtgtgaagaaattaattatcagaagggggtctttttaatctacgtcctcccattttgaatgtattttattttttactcgagtgaacacagaagtagacacaagatcctgaggagacacatcctcacagaaggctccataaacttcatcctacacagatttttgtggacatctctctcctcctgaccttatcaatcttatgaaaatctcacacganagcatccaaatcccatctattggaattcacaagaatagagaatagataattgacttcaaaagcagtttgaagcaaccacgagtccatgacgaacaacaaaattaacttcaaaacctcgataaagaaattgcaagttaatctaccgaataaatagataattaaacagtttgaagcaaccacgtagacgaatagagaacctaactcgtacacacaaaagcataaaactctgctacgtaacagcatacacaatttcat

SEQ ID NO: 177450 - DNA, 407 bp, Glycine max
aaaaacgatcacaagctaaatcctaaaagtaagagtgggaagagtctatattcagacaattgaaattaggtcagcaaggatgggcatttaactaaccacacagtttattcgaaacaagaaaataagaagtgtgaagcataaaacggtgagaaactgcttataagatatagttgtcctttgaagaacaactgtgcctttaacggcagagaatggcttagttcttttagttaattttctagcactttaggtttatctttaacaggatgttttatgagttgtttaaaatcaagtaatattaattaataagcttttattattggagtagatgattttgctacttatataaataattgttgcttcattcttaccagttgaaaaattattttttaattataaaatttaatatg

SEQ ID NO: 177451 - DNA, 410 bp, Glycine max
  unsure (1)..(410): unsure at all n locations
taacgaactctgattatntttaaatagctaccattgaactttttcttctatttgtgatgctcaacatgataataaatttaacttcgactttcacgtcacataatgtaattatatgtttaaaactattattcatcaacttacacgattgtgtctctgaagagttaccctttgcaaatttaaaggggaccaggtgtggcgaagtaacacgtacacaaggtcataatatatagactggcaatgaaatgcaatggtacctctataagccanagaatgtaatgtgtacaataatctaagttgtatgcatggcagcatgtatctcttagtatcatattaaactactactntaagatgtagaggccagttgacaataaaaaaacctacttaattaaatatctcaacaaaaatataaa

SEQ ID NO: 177452 - DNA, 386 bp, Glycine max
  unsure (1)..(386): unsure at all n locations
cttattctattatcaacacttttcttcaatttatttttattatcctaaaaacaatgtatttttgtttaaaataaattaatttcatgttgttaaatgcatgtttttgttgttttacatttttataatcactgcatacgctaaaattcttttataattaatctcggaatgatgctccactaaaagtcaaatttggtcctagaaaagactcttgtcatgtgcctttatatattttcctttttttccagttttatattattgagacatggtgagggtgaatattaaaacccaacaattgttaatcngaaatttcggttntgattatatttcacaaaatgatatacatagctatcnttcagttttgaatattaagacggtcatgggttatg

SEQ ID NO: 177453 - DNA, 466 bp, Glycine max
ctaagctccttcaactgcacaacgctcttaatattggaagtatattcttgtggaatcttcacccgacgaagacactgaagaaaacttatcttctcctttttggacaaagtatggcaagctgggggcaagtaaattttcttcccatcagaccttggatgcaactgtgatcgtattcccatatcagctagatcttgaagagtattcaagccatccttcgtcttgccttaaatgttaaggagcgtcccaatcacactgtcacaaacatttttctccacatgcataacatcaatacaatgtctaacgtctagatcagaccagtacagaagatcaaagaaaatggacctcttcttccatatgcaactcttacttttatccttcttttgggtctttccaaatacagtattcaggtgttgaacctgccgatatacctgctcaccagtcaacggtatcagcgcaatatcatgct

SEQ ID NO: 177454 - DNA, 460 bp, Glycine max
tctaagcaccgcggctgcagctgttgagtactggaaagatcaatataattgtgcaacctgtcctcaccaccaaatttctgagcaattccttcttcaatatttctatgagggacttagcaacatggagaggagtgtgattgatgctgccagtggtggagctcttggtgatatgacccctactgaggctaggaatttgattgagaagatggcctccaactcccaaaaattcagtgcaagaaatgatgttattgttcttagaggagtccatgaggtggccacggattcatcttcatgtactaaaaataaaaagcttgaaggaaaacttgatgccttggtcaacctagtaactcagcttgccatgaatcataaatctacacttgttgcaagagtctatggcctatgttcttctgcagatcaccatatagatctctgtccttctttgcagcaatctggagtcaat

SEQ ID NO: 177455 - DNA, 453 bp, Glycine max
  unsure (1)..(453): unsure at all n locations
gcttatccaatgaagaatcaacaagcctgatatattccatgatgatatgctcagaacacgtagcttgtgcaattaagataaaacatgactccattcccgtccttttgcagatatttctaaaccatctagatacaatcctgtgatatctgtaaggttctgaaacattgctatgtgttggcttgttatgtggaattaggtgagttatgtttaagtaagccgtatctcatttatatgatatgtatatctagttgtcttgtttctctattcgtaggaatatgataactcactccatgtgtgttgtttgtgtttggatcctgtgatgatcttgaactttgtgttcaggggagtagatgactnaggtgaattgtttaaggaatcttatgctacaggatgtcgggacacaatgctctgataggatgtgacattgnggtataggtttctatattaattgat

SEQ ID NO: 177456 - DNA, 473 bp, Glycine max
  unsure (1)..(473): unsure at all n locations
tncaatcaaacaactgagataatttatcagagtattttgtctcttaatcacaaaaataggaaaactaatttatcaagctttgaggttgagcaatccacatttataaatcatattcttgtttaagacatgcacaatatggctaaagtgaatgctcaaatgctagagtttaagaattcaactctctttggaatccagccaaacttgtttgtatgctttcatacacaaagtagaagtaagttcaacaaaaattaatcttttcctagtttgttcttcttgggaattctgaattgtgttcgagattttagtctcttagtttcttcagtgtaatatgttaacatctatggaaattgactntataatgtggattccaacaacatatgtatataacattcgtcacataatatctgtacgtcgatataataatgctaaatgtgactctcatattgattgctattaactntaatcgttcctac

SEQ ID NO: 177457 - DNA, 455 bp, Glycine max
  unsure (1)..(455): unsure at all n locations
agctcaccttctggtcctcctcatagttgttttatgagaaaacatgctctattntcatctcccactccaagtaggcctctggatcattctttcctttaaatggaggaatgttgagtttaataccatcaattcggttttgtctaggaacaccatcattccctcttctcctcctttcttcttcattatgatctctattctccatttgatccaacctctcatggagcgcatcatctcgttgtttcattaacctctccaaatgttgcatcaaagcttgcatttggaattgcgaaagccccactccatcattaggattagtacctgacatctcaaacaaacaaatcaaacgtaacaagacaattatagttgctgtttgaatacctcacccactcaagtgtatcacacaattatggcttttctctaatgaaacactcttgccttntaccactctaattccc

SEQ ID NO: 177458 - DNA, 452 bp, Glycine max
  unsure (1)..(452): unsure at all n locations
tctcagctttcctccttttataaaagagaattctgagactcatacgttgtcaaaaaggccttgagggggatctaagtgctctgataattcattagcatattcatgatttggtggcatgctcaccactgtttgtttctttacgaaactcaccataactaaaaaagcaaaaaggcacccctataacacccgatccaaaatcaagatggataacaaagagggagtgcatgaacagatgaaggccgacatgtcggctntaaaagatcagatggcttctattatggaagccatgctaaaaattcaaaaatcaatagaagacaatgctacgtcagccgctttcaatacagctagggaaacggaatcgatgctacaacccacaatgaacttatggccggacagaagcgcgacagggttaaatcggaggtatagtcctcaagcctacccttatgggttgc

SEQ ID NO: 177459 - DNA, 283 bp, Glycine max
  unsure (1)..(283): unsure at all n locations
cagcttggcaattcaacgacattttttttttctcgaggccggggaggccggcaatatnagaaactcaaattaatggtgaccccgttccattcaaggacattaacttttactcggaggcaaatgagtctcggaataatccggacctccaaattggatggtcacctatgagccaattcaacgacataaccttttactcggatgtctgttgagttccgcatatatcgagacgcttcaacttgatggtgcagcctgaccaattcaacgacatactcttactcggatg

SEQ ID NO: 177460 - DNA, 421 bp, Glycine max
  unsure (1)..(421): unsure at all n locations
taaacattcaatttcgagcgtctcgatatatgacttttttcttctgacatccgagtaaacatatattgtcgtttgaattggctcacaggctcaacattcacatttgagcgtctcaatatattacgagactcaatcagacatccgactaaaaagttattgtcgtttgaattggctcaaaactttaacattcaatttcgagcgtctcgatatattacgggactcaatcatacatcctagtaaaaagatattgtcttttgaattggatcagaggttcaacattcaatttcgagccgctcaatatattatgggactcaatcagacatcngagtaaaaaagtattgccgcttgaatcggctcagaggttcaacatataattacgagcgtctcgagatattatgggactcaatcagacactccagta

SEQ ID NO: 177461 - DNA, 438 bp, Glycine max
gcttgaatagaatgggctagctttttgttattatactcttaccttgggttcacaacaagcttgggttttatcttgtcttggggagctccaatgtggatgaagggttacattgttacttgaccaaggtatccctattttgctttggattatgcctttctttgtcagggactttatgtttttcttccatttcttgttttcgctacttgcaaaaatgtcaatttatttttactttgcttctcgattacaaatatttatacaaaaaaaaatataaatacacctgaacctttgagaacaagaaattaagatggttttgtaattattgctgaaaataggaaatggaaatagaaatattttcttaaaattgatccttctgttctcaaatatattctcatgtttgtggtccacttcacccttgttatcaaacgttatctcctttta

SEQ ID NO: 177462 - DNA, 271 bp, Glycine max
  unsure (1)..(271): unsure at all n locations
ntacaacagattttagtaatgacccactgacctagaatttttattacttaatgccattaaccttgggaattaaaaaaaacttaatggctgagtgtaactgaaattgtggcaaccaaaagtcacccccaacagccaacaagttagccaccatttggtcttccaaaaggctgatgcctaggttgccaattgggcccttattacaacttgaactaaacctactaaagcccttttagttgattaaccccaaacttttttttgtcagccaatttac

SEQ ID NO: 177463 - DNA, 402 bp, Glycine max
agcttagggatggaacacttacttgtttttattaacaaaagcgcaaaacggaatcaaaaatgcgaaaaaggatggccctagggctgcaaactcgtcaatcccgtgggtatggcttttgaaaggggggaaaagaagtttttgaatgttaaaacgccccccctttcgtcattcttataatttggtgcaggggtggctcgcccaggcgagcccagctcgcccagctaacctgcacatttttttttttttctgaggggaatattaaccatgtcccctcccttctcatggattagcatcttgcctaacttgaacttacttaggttagaattaggcgttgattacttatttttttactttttaaaacaaacaaaaagtaaaagaaagctgccaaatacaaaggatacg

SEQ ID NO: 177464 - DNA, 389 bp, Glycine max
  unsure (1)..(389): unsure at all n locations
tagaaactcaagcttgagcacattgttagtccaagcataaatgtggaatgtattctttcacataccattaaaggtggagttcaccaactaaatcctccccataatggatgacatagatcctttccaagaaattattttacatctaattctatctgtaagaggtctaagatgacaaactttgggcttgccaaggaataagggaactcccaaataggtgaatggaagactgctaattntgaatcccaattatttttttatttatgcaacctttctagtcgccatatcacccagaaagaacaagcatttctcaaggttgatgtgttgaccagaggctcgagcataatcattaaacaaattcataagattcgtcaaattatcttgggtcccta

SEQ ID NO: 177465 - DNA, 351 bp, Glycine max
gcttctaagccctgtttctcttctcttttggttacattaaaaagccaaagtatgtggcaatcaacatagggcagacaataagaatcagatatgaataaagttcacataaccattcacaagtcaaaatcaaatataattcagtcatgaaatactaagtgccagatagttaagtataactaaagttcagagaataatgacttataaacgtagccaaatacacggcttaaaataaaagagaataatagtctaaatctaggaaggtggtggaaggttgaagcactgacgaagataactcacattctcttcaagctgagtgatgcaggtatccattccttccaagcgagcatcaat

SEQ ID NO: 177466 - DNA, 409 bp, Glycine max
tcagaaaaaattagaggctctattaatcattctgggttccattggttatgcaggatactttgcatctagcatcctaaaccgatgcttcaaaacccgtgactggttattacacattcactgaaatgaatcgagcccataggtaggagcatgaaatcaaagtacaaaccttgtgaatatatagaaatctctctatgctctctaagaacttcttaggcgatgaatcatattcagggctgtagtgtggacagtagtccattgaaagatcatctaatctcgtaatgaaatcatccacgggaagtggaactgatgaatgtgacacgagggaatcatcctctgccgctatgtagagagcagttctacccaagtcaacacaccggttgatacaaatgctggtttccttttcaatatc

SEQ ID NO: 177467 - DNA, 317 bp, Glycine max
attattaatttagcttataaaatatattaaatgaaatatatattaaaattgttgatatccatttatgatattcatgttgttaaaaatgtacaagaaaaaccacaatcaactatatagaaaaaatgaaaatctagcattatgacctattgcaagattagtttggtataaatagtcactaagaaacatgtagtaaatgcaaaggagagattgaatcaatggaaaaataaaaataaaattttgactaattattcatttggagatatggggatgcctatgtaaatgtcaacataattgaggaaaattttattcacctacta

SEQ ID NO: 177468 - DNA, 458 bp, Glycine max
  unsure (1)..(458): unsure at all n locations
ctaagctntttggagcacaaacatgggaccaactcattntatttcatatttgaatcgtatctaatcaaggcctgagagaccatacaagtttgctaacgatttctaattatgtgggccattaagtctatcatatgctgacaatagccgagaagcccatgaatctctttgggggcagagtaggtgtctgccatcgccttggccttggctaacaagcggagaaattcttgactcccgttcaaggtaagagcaaaccgatccatccacatggttgcctcttggtgtaaagagtcgatcacccttcctctggcctctttttccgtgtatacttgagcatactcgtccgcgattctatgctcgtgggccgtggctagacctaactcttcttggtacttggcaatgagacaagcttcttttggaccttgaacaaagcantaactcctctttcagaaccatgctat

SEQ ID NO: 177469 - DNA, 380 bp, Glycine max
  unsure (1)..(380): unsure at all n locations
agaacatcgngtaagggtatgttggacgagagctggacagttcttgagtgagttgcatgaacatattgaacgttcgggagtttcactgtgattggattgattcgtttatgggaatgaagattgtgcaaggagcaggttacgtgatctgtagcccctgaatctaatatccaggaggtgagagacgctttgaaagaaagagacatacctgggtttgttggagtattgtcgatgcatgatgagattgaagccacctgtctgggttgagtgagtgccgtgttccctgcggatggctcctggattaaggcaagaagtgccttgtactgctcaggggagaagcgaacaaactcatgagactcgtgatgctgagcttgatcatcagt

SEQ ID NO: 177470 - DNA, 373 bp, Glycine max
  unsure (1)..(373): unsure at all n locations
aagctttagatgatctttggatagattttttaaatctctacataggattctataagcttttgaaagaatagatgagtttgatcaaagctcatgatacgctttcctaagagactcaaggtcatcaagatttaccttactatcctggtctgattcagatcttttagaggttttgtcttccatcaggcatatgtttgcttctttatcatcttcattagacaaggtgtcgtccacgtccncacgtgcacataagccccttattgtctttagtcttaaatattttcattntattttgattcttctctagatctgaatattctgacttgaagtgttcagggtttctgctctcatactagactacggaacttttctcttt

SEQ ID NO: 177471 - DNA, 390 bp, Glycine max
cgtattccgtcaaggtctgagagaccatacaaagttcctaacgatttctaattatgtgggccattaagtctatcatatgctgacaatagccgagaagcccatgaatctctttcggggcggagtaagtgtctgccatcgccttggccttggctaacaatcggggaagttcttgactcccgttcaaggtaagagcaaaccgatccatccacatggttgcctcttggtgaaagagtcgatcacccttcctctagcctctttttccgcatacacttgagcatactcatccgcgattctatgctcgtgggccgcggctagacctaactcttcttggtacttggcgatgatagctaacatgttggcctctgtctcgcataaacgctgagacaagct

SEQ ID NO: 177472 - DNA, 438 bp, Glycine max
  unsure (1)..(438): unsure at all n locations
actaagcctttattttcttgcttcgatacattcaactcaccttgtgttgtttccaatttagtgatgtgtaatttcagttcgctttttagctttttgtttaaaatagcaagcctttgagcttcctcgtgcatttcattaaatgcttctaaaagttcttcaaaatcaggatttacctcaatttcttcatctgttgatggatcattcatggactttgtcattaagcatacattagcaatttcttcatcacttgaagagttggaggttggtgacgcactatcttaccaagctatgtagactttcttttgttttctggcctttnttcctttcttatcaccaacatgttttctaaggtagataggacactcagattttatatgaccttgcttacaacatgtgcagttgttggtgttgttctcagtcttggaggatntggagaat

SEQ ID NO: 177473 - DNA, 454 bp, Glycine max
  unsure (1)..(454): unsure at all n locations
cgagaaaatcaaacgacttaacgtttactctttgtttctttgagtcccataatatatcgagacgctcataatttaaaaaagaaactctgagcaaattcaaacgacaataacattttactcggatgtccaattgaatcccataatatattgagacgctcgaaatttaaaacagaagctctaagcaaattcaaacgacaataacattntactcggatgtgctattgagtcccgtaatatatcgagacactcaaaatttaaaacagaagctcatagaaaattctaacgacaataacattttactcggctgtccgattgagtcctgtaaaatatcgagacactncaaattgaaaacagaagctccgagaaaattaaaggacattaactttttactcggatgtcttattgagtcccgcaatatatcgagacgcttcgaatttaaacagaagctctgagc

SEQ ID NO: 177474 - DNA, 246 bp, Glycine max
gggtcctcctactgagtaaggtgatgccattaaaagatgttttctaattaaagatgttcttgtgttctatgctgaggacaaaaataccaaacactgattcctcgagagtttggactaatttaaatcaaactttgttcacagatccctcttgttgaacttagcctaatttaaacaacattatactcacaacataataaacaaaactaaaaccctgcacattatccttagtgtcgcaacaagcccttt

SEQ ID NO: 177475 - DNA, 378 bp, Glycine max
  unsure (1)..(378): unsure at all n locations
tggtgatcaaaggaaagaccattttgttcttctctttgatgctgancggcttagccatggagtagtaagcacctcttcttcctcctttgggttccattttcgtttttctcatagaacacgcatggaagctcatgaaaaatctttgtttttgggttcttggctctatttgtggtcatttttggatttaggtgatgttgatgggatgggcttgttgttggagtggaggaaaactccttctttggacccaaagctcattcctttctgctccttcttcacaaagttctctttttagttctatggaggtaagtgaagctatcatgtggnttgattaatgctttgatcgcgccatttatactttcaatgatgatgctttggcgt

SEQ ID NO: 177476 - DNA, 418 bp, Glycine max
  unsure (1)..(418): unsure at all n locations
agctntggaccaggaatggtagttggtcctttcaagaatcggcgtaatggagacagaagaaggaccctcacttgggtgaataaaataaggactggaaggattcaaggtagggtctgtggtgacagtgccagaaccagcatcatgcttaggagagctggacgatttctttggactgataggaggcgtgtctaacatttgggaaggaaaggcagagctccaagagggagctctgataccataaaagaattggtgactgaggtataacagatacaaaatgattctgaagaaataagataaaaaaaaaaactgtcattgctctacctatatttacagctcatactattctagaatgatcctagcagatgttatttacaatttgaggtatctacaggatttatatgggccaaattatcatgga

SEQ ID NO: 177477 - DNA, 443 bp, Glycine max
  unsure (1)..(443): unsure at all n locations
ctagttaggagagaccaactacagaagagaagaattgttttatcttctctaaatcttttaaagtatagatggatcaaatgatagttctagagaatccataggtgatgaagtgattctcatgtccataaagttcaagcaaatgatgaaagaggaaggagagttctagcattcctcaagaaggaaggacattagattcaagaagaagtacaaggaggaaagcaacgagatcacctgctttgaatgtgggaaacctggacatatcaaggataagtgtccccaactgaagaaaattgatgctctagttacaagaaaaaagaaaagtctgatggtcacctaggacgactcaaacaatgagaaaagtagtaactcaaacaatgagcaagtccagatctgtcttatggaagatacaaacaanaaagttggtctgaatctaatacctttta

SEQ ID NO: 177478 - DNA, 413 bp, Glycine max
  unsure (1)..(413): unsure at all n locations
atcttaagtcacctgcggcatgcaagcttgaaacagtaagtatagaaggggtttttcttgtttnttttatctgngtaaatgacaatctgcatcaaatttcaagaattagttgtttgaggtgctatatggaaaaatgatactagaacagagaacaggtgagttaaaacaaaaatcttaggggattagtttactcaatgtgactgattctggatgatggataaaagtagggctgtttttactaattactgaaagatttataccagctcatctatgaacctgttgtgtatcattgtaacgagggtacaattttttcctataatctctttttcccaactattgttatccttacaattttttttactaccttatactcaaactgagatttgtgaatcccnctaccccacttattgcat

SEQ ID NO: 177479 - DNA, 356 bp, Glycine max
gggtaaatcaactaatattcaaacacagctgcaagttgaaattaagtaagagagaccaccacccatccaaaaaactgaaacaccgattaacaacagtaaaaaacacattccaatgtaacaagtttggtcacaatctagactccaccagaaacacaatcagaaccccttcaacttcatctcaatccccaaacccaggaaaggcaatctaggggtctgttctaccaaccaatagctgagcttcacaatgaggcgcacaaaaccaaaaacagacaaaaccaaccgagagaatctcaaaccaaacagaatacagaccgaatatgagactgaatctagccattcaatgaagcaaaaacgct

SEQ ID NO: 177480 - DNA, 450 bp, Glycine max
  unsure (1)..(450): unsure at all n locations
agctttaacctcatcgtccctacagtctttttatttgggagccaatccaatccttgtgttcggactctcagccacttatgatagccgccgatgatcccattactgcttcccctaagctctctgtcctttcttcacgccgcatcccatgccttgcgaactccttggagtaccctcgcgttgtggtcactaaaaccccgtgcgatgaaaggcgtgatgctttcgtctaatggcgctcctctcatggggtagccaagctgtcttatggtgagaacgggattataattaatacaaccccttgttcccatcaagggaacatttggacatccttcgcatgaagatagaatcttgattcttccttccttctagcgagggaaccaattaacagacgcccncccatgctagccaagagttggtcccaattcgcctttcctttntcgacgcacgagcgga

SEQ ID NO: 177481 - DNA, 356 bp, Glycine max
aactttttaatcatgaattttctttttatgaagccgagggtaagatgataaaagtttttaagtaaacgaagagcaatgcttgcatcaatcaaaaggactgaagattgttgaagatgaaaatcgactcaatcactgcattcaacagtggatgcaaaggtgcgtggtgctacaagggtggctggtgatggttcattatggcaaacgatgaatctacaaggatggcctgagctacagtaaagaagaggaaggatggttggggttgcaactataaagaggaggatggataagggtaccgtttgttaaaaacgtaaaacgttattgatgaaaaccatcttttttttattttgaaaatgatg

SEQ ID NO: 177482 - DNA, 286 bp, Glycine max
tgagataccatgcttcaacaaggtaacctaaatgatacaaggacagcatgatccatccttttcaagtttcaatatactaatagtctttaaaacataaaattataaaagaattaagaatttgcacatgatgtacaagggatttaaattaaacaaggaagcccaaaatactggaaaattgctaccgaagacaaaaaaagttaatgaaatatttaaaataagtagtcaagacaaaatgcactagccaataatactattactaaccaagaccctacgaaaacaacatatg

SEQ ID NO: 177483 - DNA, 445 bp, Glycine max
  unsure (1)..(445): unsure at all n locations
gaaaacttccttgagaagctctctttatttatactttcttgagaagcttctttgagaaaacttccttgagaagctagagtttacctacacacacccatctaaaaactaagctcacctacttgagaagcttccttgagaagctagagcttagctacacacacccatctaaaaactaagctcacctccttgagaagcttccttgagaagctagagcttagctacacacccctataatacctaagctcacccccatgacaaaaaaaacatgaaaatacaaaaaaaatcctactacaaagactactcaaaatgccctgaaatacaaggctaaaaccctatattactagaatgggcaaaatacaaggcccaaaagaagaaaacaacctattctactatntacaaagaagagtggacccaaccttggcccatgggctcaaaaatctaccct

SEQ ID NO: 177484 - DNA, 435 bp, Glycine max
  unsure (1)..(435): unsure at all n locations
gctttgagaatattcaaacaacaatatctttttacacngatatccgaaggaggcatggaatatttcgagacgctcgaaattgaattcggaagctctgatcaaattcaaacgacaataactttttactcggatgtctgattgaatcccataatatatcgacaatctcgaaatagaatcttgatgctctgagcaaattcaaacgacaataactttttactcggatgtctgattgactcctgtaatatatcgagacgcttgaaattgaatacggaagctctgagcaaattcaaatgacaataactttttactcggatgtctgattgagtcccgtaatatatcgacacgctcgaaattgaatgttgatgctctgaggaaatacaaacgacaataactttttatctcgatgtccgatgagtcccgaatatatcagaccct

SEQ ID NO: 177485 - DNA, 358 bp, Glycine max
gggtttgggtgcacatgagaaaagaaaggtttcccgaacaaaggaaatcaaagcttcaaccaaggggatatggaccatttcaagtgcttgaaagaatcaatgacaatgcttacaaagttgagctgcccggcgagtataatattagttccaccttcaatgtctctgatttatctctttttgatgcagatggagaatccgatttgaggacaaatccttctcaagagggagagaatgatgaggacatgaccaagagcaagggcaaggatccacttgaaggacttggaggacctatgaccagggctagagcaaggaaagccaatgaagctcttaacaagtgttgtcatactatttgatacaa

SEQ ID NO: 177486 - DNA, 334 bp, Glycine max
  unsure (1)..(334): unsure at all n locations
ctgaaagctaacttctcaagggagtatttgctaatgaagaggaatgcatttgtttacatcttcaagctgtctcaagttagttttagctagcgtttaaatgcaattatgtttgattattatgttttttacatgactttcacgtgtgatttttctccttctgccactagcttgcactgatggcagtggtagcaatgacagtattcctgcgaactgagatgcacaaggattctgtggataacggcggagtttacaccggtgctctttttttctctatagtaatgatctntgttaatggaatggctgatatttctatgacggtagcacagcttctata

SEQ ID NO: 177487 - DNA, 224 bp, Glycine max
gaaattactttgcatgaatcctgacaattataggtgaactttctggctacatacattctaggttagaatgcctcattagcaatgtctgcttagatgcacatctcagggctttgccactatgtccccctttatgatctagctacagcagacaaggatatttagatgccttaatccttatctttaaaagctctcatccttttctaaaacaagaaatggatacaccc

SEQ ID NO: 177488 - DNA, 400 bp, Glycine max
tccctggattttatctatattaggtagctttgttagtaagcttgttcaaaagggcagcagtgagttgtcactgtcactgcccttctctctccatcttgtactctatatatatgtctttttttttaaatgaataaagaagtgagagaaaggagggaatttctccttcagtttcaagtgctaacactctacaacacttcactcagcctttctaatctacccctttgtaggtagccctttccaagtcatcggcaaccagctctaataccaattgataagcaccaaagcacttgggaaaccctcgcttaaaagcttgttgagaagggccagaaaccaaaccacttaagtactccaccaagcatcccatattgcacgatgtgggactaaggcatcccataacacc

SEQ ID NO: 177489 - DNA, 409 bp, Glycine max
  unsure (1)..(409): unsure at all n locations
catcaacatatattggaatgaaaaatcttgaattaattgtcataccacctgtaatcaacaatcttgttattccacttaaggaaacaattagaacaatttatcccctaccatctaattgttgcaaaaaatcgctctccaaataaaaaaatttcttattctcttgtatccatacaagaagaaaagtctaccaagattttgattaacatttaacatgattgtgtcatatatttactttngtttaaaagtcattgtagaagtcaaaaatctatgttctttntctatactttctcattcataattaagctcatcatanatgagtctattttggagattccaaaatcaatgtcatatatgccctaagcatacattcaaaatcactcaaactcttnngtttgtctacaacaatctt

SEQ ID NO: 177490 - DNA, 384 bp, Glycine max
  unsure (1)..(384): unsure at all n locations
tacctgacatctcaaacaaacaaatcaaacgtaacaaaacaattatagttgctggttgaatacctcacccactcaagtgtatcacacaattatggcttttctctaatgaaacactcttgccttttaccactctaattccccttgagttcttaggcaattcaagagattatggtcacaacaaagaacaattcaccaatatgtgtaaggtaaggctagagagacaaggaaaaggttaaccaagaaaaaggctaacaatgtttttaggcacaaatgaaggaaataaaattcagaatttaggaattcaagtaacaatccttcatgcaaccaatatattaccttaaagagatatatntttttttaaaagtcttcaagcatgaaccattc

SEQ ID NO: 177491 - DNA, 480 bp, Glycine max
  unsure (1)..(480): unsure at all n locations
ctaagcttatgctgcanatatntacaatagacctcctcaacctcagtatatatataaccacagcagaacaattatgacctctccagcaacaaatacaaccctggatggaggaatcaccctaacctcagatggtccagccctcagcaacaacaacagcagcctgctccttccttccaaaatgttgctggcccaagcagaccatacattcctccaccaatccaacaacagcaacaaccccagaaacaaccaacagttgaggcccctccacaaccttccctcgaagaacttgtgaggcaaatgactatgcagaacatgcagtttcagcaagagaccagagcctccattcagagcttaaccaatcagatgggacaattggctacccaattgaatcaacaacagtcccagaattctgacaagctgctntctcaagctgtccaaaatcccaaaaatgtcagtgccatttcattgacgtcgggaaag

SEQ ID NO: 177492 - DNA, 390 bp, Glycine max
cacttttatttcatggagggtcgtttatctggaaacacactttattctattctatatttttggtatattctatatcggtaactaaattactcttaatatcgatttttaacgataagagacgattttagtgtgttaaaacaccttaaatataatgacccgtagcaaacttagcatcataacaaatataatttgatataatataatatagtatctttcatgtgatataaagcagatttattatattaaacattatataatgtaacacaagtacatatttttgtaagagattaatggttatcaatcataatgtcaaataattttatataattatctaattataaattcttttaaaataattatctgattaaataatcatggacaacttttacc

SEQ ID NO: 177493 - DNA, 448 bp, Glycine max
acctgaggcactgcagcttggatcctatggctagaatcgcattctggctctttttttaaatccttcatgccatccctatacatataaaacagtcccacaatcccaagcttacaaaaccatgcccatatgtcattgaggcatttcaccgagcacttggtgggcgcatgttttgtcattaatagcaagagaatgggggcaatgtggcaccccccattactccaaaatgcaacatacgcctagggccatcccatacaaccccctaactcacaccaatcaagcatgaaacaaagccaaaattgcccccatagacttgggcacattcccacaatttagagcaccaaaagaagaccaaaatacatcaatggaaagctagaaagctaaaggatgagatacttacttgatggagtgagtagcaacactaagaatggaagcaacagcacaaaaatag

SEQ ID NO: 177494 - DNA, 328 bp, Glycine max
  unsure (1)..(328): unsure at all n locations
gaagagaaagatatattccgtcatggccagtgtccaatagaatgattgtatagtccatgacttccatataggacttaaaactaaataagttatgtattactaaacttgtgacttaaactttcttgaagagaataattatcaaacaacatctactaagggaatgctagcaacttcttgctatcactaatttccttattggctgataagaaatctgctgtgaacagagatagattaaacttctttggcattagattagaatatatttaccnccgatgacctattaaattaataacttgacacttacaaacagaggcaacaatgcttttat

SEQ ID NO: 177495 - DNA, 450 bp, Glycine max
  unsure (1)..(450): unsure at all n locations
gatccttaagtcacctgggctgcagcttgacttgagtataagagatattatatgtgaccatggcatgaatttgaaatgatcataaaaaatttaggaatctatctttcaatcttctctcaacatcattcaatatctttcaactctttctacaaaattttctgattcatttctcttcatctttctaaaagtttttgttcaaacactttcttttccaagaaaagttctttgttcaaaaacttgtgctattcatatttttcattctcttcttccttttccaaaagaacgaaggactaaccgcctgaattcttttgtgtctctcttcttccttacaaaagattcaaaggactaaccgcctgagaattcttttggttcttccctttcccttaagcaaaagatntcaaaggactaaccgcctgaaatatcttttggttcccctttacaaagattcaa

SEQ ID NO: 177496 - DNA, 472 bp, Glycine max
  unsure (1)..(472): unsure at all n locations
tctatctgtggattcactnttgatcacaactgtacttatattgtttaacattagtcaccacaaaaggaccaatccactttgacctcaacttaccactcgtgagtccaagcctagagttatacaataaaactttctgtccaaccacgaagtccttcttagcgatcaaactatcaaggaacttcttggtcttctccttgtagaatttggaattctcataggcttctaaacggatctcatctaactcacttagttgtaacttcctttcctttccagcttgatcaatagagaagttgcaggtctttacagcccagtaagctntgtgctctatctctacaggaagatgacatgccttgccaaagacaactcgataaggagacattcctgtgggtgctntgtaggcagtcatgtgcgcccaaagagcatcatctagcctggtggctcaatcctttatgttcggctgcacaatcttctc

SEQ ID NO: 177497 - DNA, 307 bp, Glycine max
cctcatgaaactttcttcaattcttgacacccaattccgaccttcttcagccaacaaatcttcctccaactatacccatttgttttcctcccactctcatcctcccgccaaagaaacactttttgcaatttttcaatatggttaacaacatcataaggaatcttgaataaagacatataaaatagagggaaggatgaggttaccgagttaatcaaacataatcttcttgcaaatgacaatgatttatgcttccatgacttcaaccttttagctgctttttcaacaatcggtctccaagtctccattt

SEQ ID NO: 177498 - DNA, 431 bp, Glycine max
ttttttttccccaaggattctgagcgcaatgaccctgaggtatgttgatcaatttcacacttattttctgccttgccatttatcgatttttcttattctaaatatgccacgagtactggcccaatggccattttaacatgatccagcactctggtgatactgatatgcaactaagaaacctatagggttccctaacatgaagtctacaacataagcataatgcgcatacttgataagataatttcttaacaataagataaattaattggtagacaactctgataaatgtttcctcatatctcggttcctgtcgaagtgaaatactccatctgattatctattctgcaacatcctaaactcatcgtttgtttgacacaattatatcattgggcatatgcaatatgatgaaagaatattatatttgaatactc

SEQ ID NO: 177499 - DNA, 396 bp, Glycine max
atatgggctacgtgggagtacgtgagctcagttggaggtgggcaacaggggatggtgggtttatgcgcgatttatggatgtggaaaaacttgttgtgcaccatcgcccgaccgccacctagtaccacatgtgatgggtaacccataatcctacaggcttgagatgaggaagtgtagaagggtgaaacttcctgcttttattcgttgaccacagagtggtacctggagatatgtcgcgggggtcaggagacaatggggacgtcaggtggggtgctattgcccaaaacctagagggagcctgggagaccctcgaaggaaacacgaggtgccgatttcggggcacgattcgatttacggctacttcattggtgcatccagatgaaccggcgcgtacgct

SEQ ID NO: 177500 - DNA, 218 bp, Glycine max
  unsure (1)..(218): unsure at all n locations
acttttaaattggagctttcaaactattatgacatggtgagaagaatccaggatttcaagtcacaaaatggcaagaacttttattttcaaaacaattacccatttcttgaacatatcctataattcaaagaanaacatgccaattcgtacgtgcacacaaaattgaccccaaatattaaactggaataccgacgaaactaacaacatttacaaattaa

SEQ ID NO: 177501 - DNA, 291 bp, Glycine max
agaaagaggcacacagagggaagaggcagagagagggaagcggaaatgtgcgtcgcccgaggtgagagagagaaagtcacaataaaagctaacgtacaactgtctcatgagagagaaagtcacaataaaagctaacgtacaactgtctcatgagagagaaagtcacaataaaagctaacgtacaactgtctcatgagagagaaaaagaaaaaaaatgtaacattcaataacgacgtttttccaaataacccgtctctaaactcataattttaagacggcgatttcaaaacc

SEQ ID NO: 177502 - DNA, 369 bp, Glycine max
  unsure (1)..(369): unsure at all n locations
ccacaccccntccgtcactcccacaccaaagaccactccttcttttagttgttcacacctcgctcactgattcttaaaaactccaaagatggtgatgaagaaaaaccttctcttctcactttcacttctcctaatgggtctctgcacttaatctcaaaccaccccagcaccatcacctttctcaacccccaccgacatagtcagaatcctcaaaaaagccggaggattcaccaccctaatccgctctttaccacacacaagcgtcaccccagacaacggccaactcctgactcaaacacggattaacagtgtttgaccaaaccacaatgcctccaaagcctaaacctggtttctaactcccttaacacc

SEQ ID NO: 177503 - DNA, 391 bp, Glycine max
  unsure (1)..(391): unsure at all n locations
tctgtatggtggtcaacagaggagcacaaaccacagacccttgcaacaggtacaaatttcttattcaaggccagctgggttaccaagttaaccaatgcatccagtttgccttcaagcttcttagtttcagatgatgcatatgggtttgtagctacctcatgcactcctctaatgactatggcatcatttctggcgctaaactgctgggagttggaagccatcttctcaattaaatntctggcttcagtaagagtcatgtctccaagggctccaccactggcagcatctatcatacttctctccatattactgagtccttcataaaaatatnggagaagaagctgttctgaaatctgatggtgggggcaactggcacatagtttcttaaatc

SEQ ID NO: 177504 - DNA, 341 bp, Glycine max
gacagaggagcataaatcacagagtctggcgacacgtgcagaattttgattcatggtcagttgggttaccaagataaccaacgcatctaatttaccttcaagcttcttagtctcggctgatgaagatgaatttgtggctacttcatgcactcctctaatgacaatagcatcacttctggcactaaattgatgggagtttgaagccatcttctcaattaaatttctggcttcagcaggggtcatgtctccaagggctctaccactggcagcatctatcatacttctctccatgttactgagtccttcataaaaatattggaggagaagctgctcacaaatct

SEQ ID NO: 177505 - DNA, 447 bp, Glycine max
  unsure (1)..(447): unsure at all n locations
gcttcaccttctggtcctactcatagttgttgtatgataaaacatgctctatnttcatctcccactcaacgtaggcctccggatcattctttcctttaaatggaggaatgttgagtttaataccatcaattcggttttgtctaggaacaccatcattccctcttctcctcctttcttcttcattatgatctctattctccatttgatccaacctctcatggagcgcatcatctcgttgtttcattaacctctccaaatgttgcatcaaagcttgcatttggaattgcgaaagccccactccatcattaggattagtacctgacatctcaaacaaacaaatcaaacgtaacaagacaattatagttgctggttgaatacctcacccactcaagtgtatcacacaattatggcttttctctaatgaaacactncttgcctttccactct

SEQ ID NO: 177506 - DNA, 475 bp, Glycine max
  unsure (1)..(475): unsure at all n locations
tataagaacanaatngcctcaatcatttccaaatatgcatgttatttatgaagcatcaacaagaatcaagccaaggctattgtgcaagcaatcaatggggcaaaacacaccaaatgattatgatgatggatggatcaaattctcacaaaggtaaactcatcactttcaaattgagctttcaaaactatcatgacatgtagaggagaatcaaggatttcaagtcacaaaatgtcaagaacttttattttcaaaacaattacccatttcttgaacatatcctataattcanagaanaacatgcaaagtcgtacatgcacacaaaattgacccanaatattaaactaaaaatccaacgaaactaacaacattaacaaattaacacaactaacaaattaacaaaaccaacaaaactagcaaaaccaaagaacactcccccccccccccatacttaaacaacacattgtcctcgatgtac

SEQ ID NO: 177507 - DNA, 437 bp, Glycine max
  unsure (1)..(437): unsure at all n locations
ctcctcgnnggttcttatttaccttctggntgggtcatatagttgtcttcctctaaatccccatgcaagaatgcaattttaacatctaactgctccaagtgaagattctttgtagctactatgctcagaataactctaatggtagtcatctttacaactggagagaagatatctgtgaaatcaagtccttgtttctgctgaaaccctttcaccacaagtctcgccttgtatcttcttctaccgtcagattcttcctttagcctatagacccacctattttgtaacgctttctttccttctggaaatttagttaaagaccacgtcttattattctaaagggatgtcatctcatctttcatcgctagcctccactcaatagtgtcattcccctgtgtagcctcactgaaacattctggctcaccagcatcagttaaaag

SEQ ID NO: 177508 - DNA, 474 bp, Glycine max
  unsure (1)..(474): unsure at all n locations
taagtgacctttataaggaatgaatggattattcgtattgcatttcctctaattttaaactatgctgaatatcatttatatatgtacttttacctgactggcagagtgtcagtggaatttgatttgttcaatttgctagcagacatgtggggattactcgcacgaaagtttgcaagcctcgtatgatgcaagatgttttcatatagtagtttttcttatcaaacagttagcttagtgagaaaaggggacacgtgaaattaaacctgaatcagaatgaactacatcatcagaacattgtaagagcccctatattttagagccattgcattctacacacagttcanagcaggcttttggtgcaacgtctttctcaaggacaaacaccaaattagtaacacctttatttatttttgtctcccattgaggcatgaggacccacttgagcttatttcttcngtatacttccttcagttt

SEQ ID NO: 177509 - DNA, 382 bp, Glycine max
gattctatcttgaacatcttgaactcattctttgattgacctttgagctttttgtcatcacctttgttatcatcaaaacatctttgaatcaatcttgattcatcatgaagctttgcttctatgtaacatcctagaaattctacccagaattttggaaaacgatgtattttgaatgattatatatataagtattatccagtgtatatgcatatatgttcttggtagaagtaggaatagtggaggcaagatatgcgggataggctaattaaggaaaagaagtccataactgggaggttatgggttaattcttaattaattagtctaaaaatcatcgttttgcgtgcgacttataatttaacgaaaccaacctctgaaccacgct

SEQ ID NO: 177510 - DNA, 447 bp, Glycine max
  unsure (1)..(447): unsure at all n locations
acatgcgcaattcattgagttatattngtatttattggtgnatcttagtctttatctttccatatgtacatcaatgtagaggtaggaagattgtttctaaagtatcctcgttttggtttaatcaattactagctatctataatcgattactcagttcagttgagaccatgtctgattttcataagtctctgctttaatcgattatcaggtgatcataatcgattacttcattcttggaagtgttcccagaagtcatcaagaaaacattaattgattaaatcaagaatgtaatcgattacattgttcttgaaaattntacaggtttcacgaagaacactttaatcgattgaaatgataatctaattgattacttctttgaaataaccaattacattggaaatttaatcgattacatttgttcaatcatattttctctataaatagtca

SEQ ID NO: 177511 - DNA, 346 bp, Glycine max
ttcttctcccctgcttgtgatccatcatcagacaaatcttcctcggcatagacctcttctccatgctcaatccctgatgaaaatgacatggatctctttcctagaaaggtcactccccctgcatcaacattaggaaaccggtatcagtcacagaatatctgagtgtgtcgtctgattcttagtttttagagagagtgtaccatgatattcttgaggtgcacacgttggtagaattgaggtgagggatggtggaggttgatgatgatgaccatcatggtgaggagcttggagcatgaaatttgctgggaagaaagccatctcattgcaggttttatggctgccacaa

SEQ ID NO: 177512 - DNA, 323 bp, Glycine max
aaaaacatggaccctaacctgtgcattgtcaaatccaagccaattagggctttgattgaaactagaggaggaaaaacaacgagttacaagtaatgtattacagggtgattcccagcaacaccgaactccttagtaagatttgaccatggccaagcttctggatgactttctccgtactgaggaaaagtcgaaagagctaacttaaactgccccgcgttcacaaggtcaacttgtgacttccagggcgatgttggtcccgtcatggcttgcttgtacctccccttccttttctttgccaaagaccaagttcttttacgcatctc

SEQ ID NO: 177513 - DNA, 453 bp, Glycine max
  unsure (1)..(453): unsure at all n locations
agcttgcatagggacagtcgattngattctatatctctcgcattatatatcacttgtcctgatgggtggttggaagggcccacgtgttccccattgattggtttgggtttattgataatattcttctcaattatgatctgcttccttgggtcttgcctgactcttgggattgtaactgtatcccttcttactcttttattcttttgtttcccattggatgatctctccactattgttggtgcaacatctttatgggccccacttgcagtatcatgagcatttaaagtgatcggattaatcttctctttcttctcatttagatgagattggcactgatntttaggattcccatctttattccccttggcttgattcttgttggttttgttatgggggttgcgcttaactacgagccactcnccatgcaaaacatcctcttcattattggcaaca

SEQ ID NO: 177514 - DNA, 459 bp, Glycine max
  unsure (1)..(459): unsure at all n locations
gctggaatcatttatcctatctccgaaaaccttggtttgtttccgtccaggtagtcccgaagaagaccgacctcacagtgatcaaaaatgagaaggaggagctgattcctactcgggtgcagaacagttggagagtctgcattgactataggaggctgaaccaggttaccaaaaaggaccattttcccctgccattcattgaccagatgcttgaacgcctggtaggtaaatcccactactgtttccttgatggttnttctggttatatgcaaattactattgctcctgaggatcaggaaaagaccacattcacctgccccttcggcacttttgcttataggagggatgcctttagcctgtgcaatgcccctggtaccttccagcggtgcatgaatagtattttcagtgattctttagaanaatgcatagaggtgtttatggatgatttcactgtatatg

SEQ ID NO: 177515 - DNA, 281 bp, Glycine max
caatcaacaagcttatgagagagtacattctctttgctaaaatgttgtaaataaatttgttttgttgacaaaacctttcttaagcgtttcaagttactagtacagtatattgaaaatgttgagtcaccttgactgtgtatttaatgaatcatgctgtctggaaatgtgcattgtgaacagagattcaaggaaagaaaagttaatgaacagaagtatagcagggaccgatcaagtacggcagtcactttattcttaactttgcatgtggagtccatatgtaa

SEQ ID NO: 177516 - DNA, 227 bp, Glycine max
aaccaacacaacaattattgacgggcattggtacgaaaacgctgtaacggtgagaacacacgtggaaaagcaaaaccccgtgttcctaccatgcgcgaggcttaccaggacacgaggaagacacaaaccggttgtttttactctttaccagaagctcgggagcggcttagaggcatgacgagtcaaggcaataaaagtgaaggtctttttgtcaaaatatacaaaac

SEQ ID NO: 177517 - DNA, 406 bp, Glycine max
  unsure (1)..(406): unsure at all n locations
ttcgggttcatatctgtctcttaacataacccgagccaccatcaaagtggaaccagataagcgtggctccactggaggagattccacataagcattgctcacaatttctagtgcttggaatgacatttccaacgactcctctgcaacctcaacatatggcgtagaagacgagaaaattaccagtatgtcttcctcccctaacactatgaccagctgcccttccaccacaaactaatttctgatgcagcgttgacgggaccatcccaaccgaatggatccaaggacgacctaacaagcaactgtaagcagggcttatgtnccattattggaaggttatctgacatacgtggggctcgatttgaattgngagatcgatctctcnccttacatctcggcaactaccatc

SEQ ID NO: 177518 - DNA, 455 bp, Glycine max
  unsure (1)..(455): unsure at all n locations
ntttggagtagaaacctgggaccaactcattntattttttatttgaagtcatatctagtcaaggtctgagagaccatacaagtttcctaacgatttctaattatgtgggccattaagtctatcatatgctgacaatagccgagaagcccatgaatctcttcgggggtggagtaggtgtctgccatcgccttggccttggctaacaatcggggaagttcttgactcccgttcaaggtaagagcaaaccgatccatccacatggttgcctcttggtgtaaagagtcgatcacccttcctctagcctctttttccgcatatacttgggcatactcatccgcgattctatgctcgtgggccgtggctagacccaactcttcttctacttggcgatgatactaacatgttgtctctgtctccataacgctgagacagcttctttgaccttgaacaacatc

SEQ ID NO: 177519 - DNA, 410 bp, Glycine max
gctttgagccaattcaaacgacaatatctttttattctgatgtccgatggggtcccataggatatcgagacgctcgtaattgaaaacggaagctctaacaaaagtcaaacgacaataacttttaacttggatgtccgattgcgccctgtaatatatcgagacgctcgaaattgaaaacggaagctctaagaaaagtcaaacgacaataacttttaactcggatgtccgattgagtcctgtaatatatcgagacgctcgtaattaaaaactgaatctctgagcaaatacaaacgacaataacttttgactcggatatccgattgtgtcctgtaggatatcgagacgctcgtaattgaaaaccgaagctcggagaaaaatctaacgacaagaacttttaactcggatttccg

SEQ ID NO: 177520 - DNA, 336 bp, Glycine max
ctaagcttagctttaattacgagcgtctcgatatattacgggactttatcttatctcccagtcaaaaggtattggcatttgacatttcatatagcttccattctcaattccgagcgtctcgatatattaaagggctcaatcggacattcgagttaaaagatattgtcgattgaatttgctcagagcttccgttttcaattccaagcgtcctgatatactacagggctcgctcagacatccgagtctaaagttatcgtcgtttgaattttctcagagcttcacgattcaaatacgagcgtctcgatatactaccggactcaatcggacatccgagtt

SEQ ID NO: 177521 - DNA, 441 bp, Glycine max
agcttgtaattgattacacatatactgttatctatttccagagcaagatttcagaagatattcttaacagtcacatctttttatgtggttcttgaatggctatcaaaggcctatatatatgtgacttgagacacgaatttgctaagagtttttcaaaacaaaaaggtcttatcctcttataaagcaaaatcgttttatcctcttacaaattccttggccaaattacttgtgattcaataaggaattatttgagtgctcaaattgttcaatctatctctttcaagagagatttcttcttttcttcttcttcattctgaaaagggattaagagaccgagggtttcttgttgtgaaagaattctaaacacaaaggaagggttgtccttgtgtgtttagaactttgtaaaggaatttacaagatagtggaactctcaagcgggtt

SEQ ID NO: 177522 - DNA, 424 bp, Glycine max
  unsure (1)..(424): unsure at all n locations
tatctgatcacggagaagctagtgacctctagatggttgttgttgttggtgtcaagccttttccttaacaagcccttttctctggcttcatcaggtatgagacaaacgtgtggctttatcttctacaaagggtgctgaggaaatttggacatgtttagtgcatcccatgccatccaccatagtgtctcacgtatgaggcgtctgatacagagtgggtagagtggtagcaacatgtcatttaatgggcgatgctgtgccacccaagggtccttgggattgcacccctgactatttgccttggtgttattgggtttcccactcctatgccattccaccagaggagggagagccancacgtcttcttgtacatttaccgcctattctaatacagctactcgctatgcaaccacttgcagagtatgta

SEQ ID NO: 177523 - DNA, 403 bp, Glycine max
  unsure (1)..(403): unsure at all n locations
agcntttatagttttcgaaactctctttttttatccatcacattattcaacccctcttttagtgtttttcaggtacttcagttggtatcagagtttggcctctaggtttagctcttaacaaagtagaggaaagaaaactcttgaaactatggaagaaggatttgatggaagcttgcttgaaaagcttctatggaggttggatctttgagcttcaatgaggtccttcaatggtgattttcaaccatggatatgcagcgaaagataaaggagaagaggtaagaggaggcgctatccacgaggaaataagccatggaaggaggagcttcactaccaagagagtgccttggataagaagcttagagaggaagcttcaatggaggaaaagaaagagagaggagggggg

SEQ ID NO: 177524 - DNA, 411 bp, Glycine max
ttaagagaatgcaacaagaaattccagtctaaagtgtcatatgctttgataatgtgtgtcttaagggctagattaccactgaagctgtttttgtctaataaattgattgcttctgaagttaagcacaagcagtcttgaatatgtttaaccttgatgaaacctctttgctgctgagagacaatttggggagcaactagccaatttatccccccaaaacttttgttattactttgaactgaaaattggcaagtgttatggggcaaaacagctcaactctatcagcttgagggactctatgaatcaacaccaaaacactggagtttaagttaggagccatccttgctaaaaaaaattgagggttgccttcaaaacatcagaccgtattatatcccaataatgctggtagatatg

SEQ ID NO: 177525 - DNA, 404 bp, Glycine max
  unsure (1)..(404): unsure at all n locations
cataacaacgaataggatgaccttgcaatatgtcttgcacccatgcatggcctgtttgttggttggttatgcacaactctttacatagatttttttattgcatattcacccataaacacagccacataggatgcttgctccataagttcatcattttcattggtatttgattcaaaattttcaaccaagtcattcatttttgacctgtatagaaacaatattacaaaatacaacatatatcaagatacacatgataaaacataagttcattaccaaccataatatggttcgttacaagccaaataagaaacataanccaaattgataacaaaacataatatgagttcaatagaacatgactcataccaccataagcaaacatctaagcactagtacataatagt

SEQ ID NO: 177526 - DNA, 449 bp, Glycine max
  unsure (1)..(449): unsure at all n locations
gcttttggttcagagctacttttgaatattgtttgaagaaaacactctgtccaaaatggatcatggtcacttgatgatttcctgtgagtccatagaaatctccgagttttgtccatccagccagtatagttgggttcaccagatctttgttgcatataacatagtgcatgctgtcattactatctaacagatgccatgtatcttctagttaatccttccatcttacagcaaaggacctacttacttcaccataaggctacatttaaagtaaactaatataagcaatactgatgtgttatatcatgtcatgtttatttgagaatagtcttgaaattcctaacctgatccttaatatgaattgtgttgaatatttcctctggttttttgtaatcttcatcatgggcatagccattttcattcaatatttntttttatcttcattcatcatt

SEQ ID NO: 177527 - DNA, 444 bp, Glycine max
  unsure (1)..(444): unsure at all n locations
cttaagaattatggccttatctaactactcgtttcccgatggaaattctataaatagacctcctatctttaatggagtgggttaccactactggaaaacccgcatgcaaatctttatagaggcaatagatataaatatttgggaagccatagaacaaggaccttatgttttccctctataatagccggaagtgcaacaatagaaaaacctatagcagactggactgaggaagaaagaagattagtacaatataatttaaaggccaaaagtattattacatctaccctaggaatagatgaatactttagggtttcaaattgtaaaagtgctaaggatatgtgggatacactacaagtaacacatgaaggcacaacagatgttaaaagatctaggatanacactctaactcgtgaatatgaactctctacgatgacatataatgaa

SEQ ID NO: 177528 - DNA, 406 bp, Glycine max
  unsure (1)..(406): unsure at all n locations
aaacaggngaggcgcttgattgagataaagggttttgattacttgcgccagggctatcatcttgtggggtgttaattgcaagatctagctcttcttcacttgggatgctagtcgtaacaagaatcatacaaactatgattaaataaaataaatcaaagaaattaatttaactcggcttcttagaacatgtttagttaaaaaataaaaatcattaataaagatttcaatttcaaagatatgaaagaaaaataaaattaagaagcacattgccatactcgatcgaaccctcttcaagaaagcctttaagagctttacaaagattgcctccatgtttctgcagaccaattaaacaaaaactcagaagaaatattaaaaaaatgcacgaaaaanaaaattaaagtgagta

SEQ ID NO: 177529 - DNA, 371 bp, Glycine max
  unsure (1)..(371): unsure at all n locations
ataccgnggaatgatttatgctcataacttctcatgtgaagccttgcggaaaggtgtcttcattgccggagcggttttcgttgttgcaaccatgattcttaacgtatactattacatgtacttcacgaaggcaatgacaacaccagtttctcataaggcaaatcgggtgagctccactgttggaatggctggatatgcatgatggactatggctgaaaagggtaacaaattgagtcttaatttcagtggatatctctatgattgtcactagcaaaacggtgattntcagtttggtttttcttaagtgtttataatgtttttgtggatgttactggtcagaagcaatttatagctatatctataaatatcgt

SEQ ID NO: 177530 - DNA, 458 bp, Glycine max
  unsure (1)..(458): unsure at all n locations
ttaagcaccgcggctgcagcttatgaaagactcaggatactcttcattttggaataatagtacatatgcatttaagtacaaagatttacctttttcttttcagatccatgtttaatattacttgagccaggcttgtcaggcgaaacaactctggatcttctacaaacttttgccactgctgacgaagtctatcattgattgttaaaaaaacaagaatggagtattatttatcaacatttaatcaagcaggaaaaacatattaactagttaacttattttcatttgggatatcataatttacatagatataataccaaaataatttcacccagcacaagaggagaggaagttacaagttattataattataaacgaagggtgcatatgataaactgcaatttttttaagtaatacattagctatatttctatgtaataacanattcatcacacccactg

SEQ ID NO: 177531 - DNA, 466 bp, Glycine max
  unsure (1)..(466): unsure at all n locations
actaagcttgacatcattnntactgtgccacagctgtcctcacccataacttgaattgatagcctgatattcagcagtgatcgtataggattccaagtcagctcatttgctgcaaactatctcactgagcaactcaacatccccaaacatagacttgttcctcttggctcaccacaagaatatgctgttgcccttgaaagcagaactgttgcagctggggtggatgaacgaccctatgtagaactctttctttcaaaccactgccaattctcaattatgggccaagagttcaccaaaagtggatggggatatgtgaagtgtttttagaattacttactggtacctttctcagggtgtagtctctatgtacttttgtgcactaactaactaatgcaaaagcaaaacatatgtttaaggatgaaatctataatcggaggcagaaacacacttccttcctttacttctt

SEQ ID NO: 177532 - DNA, 366 bp, Glycine max
  unsure (1)..(366): unsure at all n locations
ccttcagaaacctgccgcatgcaagctnngcatgaaagtcatagacgaaactgtgtatcttttccaactccnatacaacataagagaattgcttcttttataaaatatcgaagaattgatgctactagtttcttgccgagtctttatcgcctttgcataggggcacgtcattttcattgagcgccggaaatattgtatgaatgatgttagcaatgaagctcaagactctctaagttctgcagatggagttcctgtacaagataaagaaatacacttctctcacatcagctttgattctactttttatctggctgatttgtcttaaatactgtatgatgctgaaaacgattcaataggagagaaaag

SEQ ID NO: 177533 - DNA, 343 bp, Glycine max
ctactctagcctgagtgttttatggatttctggagcctgagaaggccttgcttgagatgcgtactgaatgtgttgtgtagcttatggaccagtgtatcacttttatcataaataatatagattaaaatgacaattcatgtatccgaattcaagagagactcttgattggctgcatctaagtcaagcaaactccattatttagcactaaaatgaaatcgaaggagaaaaaatccacgatcgtgaatgtgaacattacgggtaaaaaaaaaaacaaaataacgagaggtaacaatatttaaatgcaaacgatgacttagaacgtgataagttgacactcatatgc

SEQ ID NO: 177534 - DNA, 435 bp, Glycine max
  unsure (1)..(435): unsure at all n locations
ctgaagtattgtgggataatttgtctgttccattangctcttaatgtctttagaggttacttcctcaaaaccccaggttttcataaacaaagaaaccgaagcggcggcagagccgcacaggatcggtgaagggagaagagagaaagatgaaaaatagaaatttattgaatttagaaaggagcgcttacaaaaatcttgtttcagagcacctctcttcagaaacctgaaaaatggctaaatgaaagggtgcctcacaacatgcttgaggactccttatatagccaaaaatctaagaccggtagttgccggtagttntgaccgggactatntgactgtttgttacaagacnaagtagtttgaccgggactttaatggctacaggacaggtagtatggtccagcattaattacatattaattacaaacagacgggttt

SEQ ID NO: 177535 - DNA, 464 bp, Glycine max
  unsure (1)..(464): unsure at all n locations
tatgaatcctattttgccatgttatctcccacatttgtttatcatctctactacaataccagttgtgaaaacaatgcacgaattctaaaatgcaacatttagcagaagggccaatttgtaaagttcatatagcaattcaattctaatccatatataacgcattttatatatattcatattccccaagagtctacttttcaaatataattttattttcatcaaacggtatatgaatcaaacaaagtaaaaaactgtgtgaagtatgtcaaagctgaaatttgtaaaacagcatgtgagggcaaactttcaacaccaaataatatagaaatgactctaagagcccatactcatggaggataacctgccaaaccanaattgacattaaagaaaatagaaactctcaataccttgagagatctgaagtcttctagagttcaagaaaatgcacaacacaatggattgat

SEQ ID NO: 177536 - DNA, 394 bp, Glycine max
  unsure (1)..(394): unsure at all n locations
gacttgatcttggattagtgagctgaaccataactaaagttcactaatcataattagtgaaattttggctccaaatttggctccacaatttcaaattcaaattcaagtgaaatttgaatagaaattcaaatttcccaccaattatgtgtgacacttaggctataaatagagtccttgtatgtgcttttttttaactttcatcatttgagaattacacttcaaagttcagacctcatttgaggcataaaattccatgctccttctctccttctcccttcactcatcttctcataccttcaagctcttagccatggcttcttatggtggtgagcttgttcttgactcatcttctccttgaagtgacatctccaatcatctttcttcttcntcatat

SEQ ID NO: 177537 - DNA, 339 bp, Glycine max
agttaaaaattaacaatttttattttttcttataaaatatggagggagaggtgtaatatactatatcgactataattactcttaattctgagcgcatttgaactgaacttactgtcaaaggctatgtttacaacttgcattttagttctaatttagttcggaaaggtaaaaaaataaataaacacattgtactaaacaagtgtcactcaaaatattactatctctaaaaaagaaaaaagatcttccaaatacagttctgaattgtacttactaaaaggtctctttaccttgtcatatgatgttacaacttgattcgattgttgagcggatgttaagaaa

SEQ ID NO: 177538 - DNA, 393 bp, Glycine max
  unsure (1)..(393): unsure at all n locations
gcacaagctatcatagccaagcaaaacagagcaaangccgaaaactctgcttaacacatcaaccaaaatcacagcttttctcacttaaagaccacagtaacaattccttcgatccaatttgttaacccgtggatcgactccaaaattttactggaagtctatagtgcataagcctacattgtgaccgttgggatctactagcaaacatccagaactcattttgtactactctttccacagccaaccacacacaagcatttttctgcacttgtgcaaaactctgctgcacaatttcacagcagaaattctgcataagtgcagatttcggaaatcacactttctctcatcaatcttgccaaataaattctaccagtcccaatcatgtatcaatct

SEQ ID NO: 177539 - DNA, 454 bp, Glycine max
tggggtacccatcacatgtggtactatgtggcggtcgggcgatggtgcaaaacaattctccacatccacaaatcacatataaacccaccatcccctgttgcccaccttcaactgggctcacgtactcccacgtagcccttatccttgtttctctcaacaccgggtccctatcaatcctcccaagcttccacaacatccaagtaattcaacattcaatcatcacaacctaacacagccaagaaaatagggcaaagacagaaaactctacctaaaacacaaaccaatatcacaacttttcacattcaaataccccagtaacattctcttcattacagtccgttaaccgttggatcgactcgaaaattttactggaagtctctagtacataagtctatattctgacgcgtgggatctgctagaaaatgttcaaaccccatatgtactacccttttca

SEQ ID NO: 177540 - DNA, 437 bp, Glycine max
  unsure (1)..(437): unsure at all n locations
agctttaaaaacgatcacaacccanttcnttcataacacgtcaaggcttgtagggtctacatgacaacatcacatccacaattacagccgcattttttgcagtaccaggatcacaagaaaacagaaacccgaaccacaatttaaaaacatgcccatcatatgaatccgtaaactcttacctgaactttaccattgctagttccaacagcaaggtgtgtaccacgctgagcccagccaaccgaacaaacgaggtcatcaatccccaagtcacataatttagtaacctgcacaatcacatcaagacagaacaaattacaaaagacgaatctctcaattcgcataaacacgacaccagctaactcacatcactaccacagaggaattaaagttccaaattaatcctatgcattacattcctcanatcaaataataaaaaa

SEQ ID NO: 177541 - DNA, 463 bp, Glycine max
  unsure (1)..(463): unsure at all n locations
cttgcttccatttncgtcgagcagaaagcttctgctgaacatggatgtctttcttttcattggtttcactttcgtgttgagcttccaaactcattttgctcaaggaagtgaactacctcgtaccacaagcagttcaaaaacatatattatccatgtgaaggggccacaggataagtcactagatcaaacagaagatttggagagctggtaccattcattcatgccacctactattatgagctctgaggaacagcctcgaatgatttattcatacctcaatgtgatgagtggttttgctgcaagactcactgaagaagagttgatagctgtggaaaaaaaggatggcttcatttctgctcgtcccgaaaggatactgcatcgccaaaccacaaataccccacaattnttggggctgcagaaacaaacgggattgtggaaagaataaactctggaaggggataat

SEQ ID NO: 177542 - DNA, 352 bp, Glycine max
acacagattgctgcataaaatattaattgatcagctagctaaattttgttgacatcatcccaaaatacaccagccaaaacacacaacgacaaccccaacttacagattcaaactctgtaggctcacttgagccaagcattgaccgatcatgttcagtggtaatagacaaagattgctgcataaaatattgattgatgagtcaactaaattttgttgccatcattgcaacatacaccaagaaaaacagagaaagacaatgttagctcacagattcaagcattgtaggatcggtcgactcaagtattgaattctcgatcttgctacatggctaaatgatatatgaatcgacaat

SEQ ID NO: 177543 - DNA, 277 bp, Glycine max
tatatgctgaaattgctgatggaaatctgctacatatgaacggtagaactaacctacggttaaaaagtgagaatgtgatgtcatgagtggaaaaagagtgacgctttgagaattggaagggtaagtctgaattctgtggtcaatggaggataaagtgagctaatcctcacttgaaatgtcatttacgacttatgagaaagcttggactgtgctatagagaacaacatatgaccaaagtgaatcccagagccatttctagggcacaaatgggtgttga

SEQ ID NO: 177544 - DNA, 389 bp, Glycine max
accatagattccttcttcgagctccaagaaattggtgctgaatcaattagaaaaacaaatccaacagggctcttcctatcacgtttggctccacaccaatcagcatctgtatagccatatagatttcttgtattttcactatggttaatggtcatcaaaattctgttagacaagtggcctcatatatcttaagaaggggggttgaattaagatattccaaactacttccccaattaaaaatctatctcactatttattcaagttatgaattcccttaatgacaatcttcttaaatattaattcaaataaaacaatttgaatatgaatataaagcaataataaataaaggagattaaggggaagagaaagtgcagactcagatttatact

SEQ ID NO: 177545 - DNA, 391 bp, Glycine max
  unsure (1)..(391): unsure at all n locations
ctctcgagtcttgaattgttcttgattccatcttgaacattttgaactcattctttgattgacctttgagctttttgtcatcacctttgtcatcatcttttgttatcgtcattgttatcataaaaaaatctttgaatcattcttgattcaccatgaagctttgcttctacaagtttttgtgaattacctacaagagaaatatatctcanatatggaggcaaaactttaagttccaaatttggttcttctatcttctttctttcaactcttcaaaaagagtctagtgctaaggattctccctaaaagcantgtggaggcannattgcatctctttctccttcaattcatntaatctctaaacttcttcagtcaatggtttctccagataatc

SEQ ID NO: 177546 - DNA, 400 bp, Glycine max
  unsure (1)..(400): unsure at all n locations
gcgggccaaggggcaccacaaggttcccacattcacaaattgggccttaacccaacattccctattgccaccctcactgagctcacgtacttccacgtagcccatatcctcatttctctcaacaccgggtccccatcaatcctcccaagtttccccaacatccaagtaactcaacattcaaacaacacaaaccatcacagccaagaaaacagggcaaaggcagaaaactctgtccaaaacaccaaccaaaatcacagcttttctcacttaaagaccccagtaacaattccttcgttccaattcgttaaccggtggatcgactccaaaattntactgtaagtctctagtacataagcctatattttgaccgtttggatctactactaaacatccagaactc

SEQ ID NO: 177547 - DNA, 380 bp, Glycine max
  unsure (1)..(380): unsure at all n locations
gatgaccaaaagctcaaaggtcaagaacacttcatgataaccaagatgatgatctccagaatcaaagaatgagttcaagatgttcaagattgaatcaagaacacttcaaggttcaagaggaaatttgatttcaagaatcaagaatcaagtttcaagattcaagttccgagaatcaagatcaagattcaagactcaagattcaagaatcaagagaagacttaatcaagataagtatgaaaaagttntttcaaaaactgagtagcacatggatttttctcaaaacttgtttaccaaagtttttagtctctggtaatcaattaccagatggttgtaatcaattaccagtangcaaatgtttttgaaaagttttcaactgaatt

SEQ ID NO: 177548 - DNA, 376 bp, Glycine max
tctgaaaaaaggcgaatttgatcattcttcttagaccaatggaaaaactggggccaattaagaaggtgagggataaggaaaaacccatgctgggactgccattcctgtaccgcccagttttccaccaaacccaacaatgtcattactcaatcaataacaaacctcctccttacccaccacccagttatccacaaaagccatccctaaatcaaccacaaagcctatctatcgcacttccaatgacgaacaccacctttggcacaaaccaaaaaaacaccaacaaaaaggaattttgcagcaaaaagcctgtagggttcaccccaaattccgttgtcatatgctaaacttgatcccatatccactcaataattcaatg

SEQ ID NO: 177549 - DNA, 414 bp, Glycine max
cgccataatacgtcgcggaatgttttcttcagcactaccccgtatgagagcaccgttgggcgcaaaccgtctaatcctcctgactacatcgtctggtccccaaacttggatgcaagacaagacatgcttaaggaccgtgaggaaaccttccacgtgattcccaaaaaagctcctcaaagctcacgcagctatgaaactatttgctgactacaaacgccgagaggccccgcaccaagtgggagactgggtattgctcaagcttcggccacgacgacaaggttctgcaaaacgggcatctgcgaacgagggcaagttagctaagccgctctatcggtctctcaaagtccttgagcacataggatcagtggcttatatatacaacttccaacaccgctcgcatacatcctgtttcca

SEQ ID NO: 177550 - DNA, 290 bp, Glycine max
caaccatggataggacctctcatcctagcactcactataccccaaataataactaccagcatattcggcctttacacagccgctaggtcttttatgaacaatacaaagacaatatacaacagattctgagtcgtcacaccttcgcagaaataaatcacacattctcaaaccacaaaatctattaaaaaaaacacgatttagtgcttcacaaaccgcttccttcttctttggcgaattacctattcagaaaaattcagtcaggactaaccccaaccagtatcgtatataag

SEQ ID NO: 177551 - DNA, 304 bp, Glycine max
aaccatcaaaccatggccatatataactgaattagaatagcacaaatcccaacagggaagaagttatatcagattccaacacctcatgatataattatttacccaaataataccaatagagaagtaaaccttctttggttctatttcctgcaaaatcgtcaagcatgcatgcatgcaaagaatgaaatactcatttgtattgtatgcttatatatcttatgctgcaacagattgcttctcctcataatatcaagattaagagcttgcagcaacttatgccaagattctgggatacctcctggca

SEQ ID NO: 177552 - DNA, 335 bp, Glycine max
gcaccctttcccagcgaaactttgtttcctttcccaagtgggaaattttttaatacacgtggatgaaagatgttcttaatcgaatggctacaaatagagtttgcttgtagactgtttacaagttaattagaataattaaggacaaaaataatgtatattaaaggtcacctccattgaaaaggtcaccttcgggcgattgccgacgtggtatcgacaaagcaaggttccgccggagacgccgcatcgccatgaaccactccccgttcacgctctgaggatcggcggaggactaaaagagtaacttcgagctatactatgatggcttcgacaataat

SEQ ID NO: 177553 - DNA, 397 bp, Glycine max
ggatcttcccacttagagtcaccatgggaaacttcatgaacaagcacaaactaataaattagttttaatatagatgttgaattaagatactgtttctgtaaagacattaactgaatagtattgacttgactggtgcagctattttgtactcaaaagaagccaaatagaagtcatctacttttttctttggtatcataaagtaggcataagacttttggcaaatagtggttgattttagttgtttgttagcatataatggattcatagcagctggtaaaagagacacccaaattaaagccatgacaactaaagtttagcggataataacttacaactcaatgacaaatagaacacaaccgcattttcaagatttaccttatgcgaagaaagactcgca

SEQ ID NO: 177554 - DNA, 373 bp, Glycine max
  unsure (1)..(373): unsure at all n locations
tggacccttcatgcaagtgcttcctctatgcagtcttcttctaaattaaaggctagctcttnctgtgtgtggatctatcacttcttggctttgcactctccgtggttatggaggcatgtttggtgtgtgtgtgccccatcgtgtcacagagcttttttttttttttatctctgccaaaagccttggacaatagacaccgactatagtgctgatcgtgcattgattcctcttcttgccatctatcatcattgtcggggcaccattcccttctcacttcacgtgatgcctgatgttttttttcataaggggaaatgccaattgaactaaactttcttgggatgtatcacgtattggatggcgcccgaatgctctt

SEQ ID NO: 177555 - DNA, 379 bp, Glycine max
  unsure (1)..(379): unsure at all n locations
aaattcaataaataggcctcctatttttaatggagagggttaccactactggaaaacccgaatgcaaattttcattgaggcaatagacttaaacatttgggatgccatagaagttggaccttatgtacccaccatggtggctggaaatacaatagagaaacctagagaagagtggtctgaagatgaaagaagattagtgcagtataatttaaaggctaaaaatattattacttctgccctaggaatggatgaatattttagggtttcaaattgtaagagtgctaaggatatgtgggacactctacaagttacacatgagggaacaactgatgtcaaaagatctangataaatactttaactcatgagtatgaattattt

SEQ ID NO: 177556 - DNA, 367 bp, Glycine max
  unsure (1)..(367): unsure at all n locations
gtccaagcttcaattggggtcttggtttttatagacttaactggacatctggtgagtatgtaaataacaatgtagactggttcattccataatgtgttaaagtatcccttctccttgagcatcgatctagccattttcataactgtgcgattctttctctcggacactccattntgtngaggagaatatgcgactgtaagctgtcactcaatgccttcatcctcacaaaatctttcaaactcgcgagaggtgactctttgccgtgatcacttcttagtnactttatccgttttccactttgattctcagcaagggccttgaactctntgatactcaaagactttgattttctttataaatataccat

SEQ ID NO: 177557 - DNA, 447 bp, Glycine max
  unsure (1)..(447): unsure at all n locations
agcttcaagaaaaagatggcctcatcaaattctttatttccagaagggaattctatcaatagacctccaatctttaatggagagggttaccactactggaaaacccgaatgcaaatttttatcgaggcaatagatctaaatatctgggaagccatagaaatagggccttatatacccaccacagtagaaagagtttcaatagatggtagttcatcaagtgaaagcataaccatagaaaaacctagagatagatggtctgaagaggatagaaaacgagtacaatacaacctaaaagccaaaaaaataataacatctgccctaggaatggatgagtatttcagagtttcaaaatgtaagagtgctaaggaaatgtgggacactcttcgattaacacatgaaggaactacagatgttaaaagatctanngataatgcactaactcatgag

SEQ ID NO: 177558 - DNA, 417 bp, Glycine max
gtgaattctcacaaatggtcatatcaattatctataataaatgttcttagaccatgattttggctgcaacatcaaggtttttagaccgattgcgaccacaatcggtagcagttgtcagtgatttaccgcaatgtcaagaatcatgacaaaaccgtgtgagtgagaccacaagtaaaaaccttggactatatatataacactagaaatatcaagttcaccacagaaatttttaaacaatgagaatttgatccataaacaaagaagagaaaaagaaagggaaattattaaagaatgaataaatgagggtcactaatcacttataggtgtcacaaaccgcttccacaagcttgggtgatcaagtgaattctcacaaatggtcatatcaagaatgctataataaatggtcttagaccatga

SEQ ID NO: 177559 - DNA, 401 bp, Glycine max
  unsure (1)..(401): unsure at all n locations
actggccctctcttaattgtctttgggcttggcgaccacgatcaacaaagtactttcggcacctactatatgttgacttgaccaacgctgttattggaatgctgcgacaatctttcaacaccttattcacacattctgataagttggttgtcatgtgaccatatcgtcgtccagatgtatcgtaagccatgctccattcntcctttgagattcgatcaatccatcttgctatggctggactcaattgacgaaatttttctaagttttgatcaaacacatgctttgcaggagtgtacgctgcatcaaactatgtatcatcaaaagttgtacgtagacatgaaacctcaaataaattaatgtataaaatanaccttacccaatttcttgaacatctctttttg

SEQ ID NO: 177560 - DNA, 432 bp, Glycine max
  unsure (1)..(432): unsure at all n locations
agctcttcctgtaagaaaagaggatagntttttttttttttaaagcactncacttgcagctcccggctagggttctcgtgggggtgaatcttccagtttccggtgaaaggttctcaagatgggacaaagttgtcatcttgcttttccttttattttatttgctaaaaaaagtctaattaaataaccttgattgcccttcccaaatctcacccatccaactctataaagtaagatccaacgggtattaagaagggtaaaattgatatttccaattaaaaaaaagacaggtgcacgggcgtagaattcttttattcaatttcgattttagtctttaaactagtattaaaccgtgcgcgcctttgataatgtcttaaaattataagacttactaaaaatatttttctaaatcgaaagcataacgtaaaataaata

SEQ ID NO: 177561 - DNA, 405 bp, Glycine max
  unsure (1)..(405): unsure at all n locations
atattatgntaaattagtcaagttaaatatatttttgctcaccaacaaattaatgcttgaattttggttttatctttaacaattttttttatcctgataaatttaaaatttgtttttatctctaaatatatttagatagtgcttttaaataagaaataagatgatttggagaatactttacggataaaaacaaaaatttaattttatcaccgataagaatgtaattttttttattgaaaacaaaaaaaaatgatcatcagaaataaaaaatatatttaagccatttatttatttattctatttattatgatcctgtgcctgtccctggctacattaaaatctgacatgtaaaatgtcttgatgcatttgcagatgaagtgcgtaatgaatgaagtcctaagacta

SEQ ID NO: 177562 - DNA, 448 bp, Glycine max
  unsure (1)..(448): unsure at all n locations
agcttcatcctcagatccctctggtggattttttttaatttaaacagnctctcgtagggtgaagactaactaaaactaagcttcgtcctcagatccctcttgctggactaggctcagctaaaatagcttgcggaagtttagactaatttaacctaagctttgtccttagatccctcttattggactagactcagaccaaacaacattattataacagtatatttaaaaccaaaacttaatccgtagatcccttattttagactaagtttcaatcctacttccatcaagttctaaggcagcagtacaagagcatgcaatctttaagcattgaaagaagcattgaacacagaaaacacaatcaattagatataaagtaattacattagttgttccttagaaatccccaataagggtatttagccagccattacagaanaaccctaacaat

SEQ ID NO: 177563 - DNA, 463 bp, Glycine max
  unsure (1)..(463): unsure at all n locations
ggaccttaagcaccgcggctgcagctggtcgaggactacccgtgatttctattatcgatgaaaacgaatgaagaatgtcgaagaacggttgaaacctttgcgaaattcctcacggaaaacgttacggaaacgtttcggaagcgcctcggcttagattttcttcacggaaacaatttttccaagcaaattcgaaagagagagaagtgcctaaggggctgaacccttttcttcttcacttcctcccctatttatagcaaaataggggaggtggttgccgcccagctcgcccaggcgagccaggttgcttcctccagaagcaacaaccttctggagggcccaagtgggcctgggtgctatttgcaccccncaattntactaagtacaccccctctgctnttttttggtggattctttttcgtaaagtacggaaacttacgaatttcgtaacgatacttgttttctt

SEQ ID NO: 177564 - DNA, 451 bp, Glycine max
  unsure (1)..(451): unsure at all n locations
tgacactatgaatctaagcttgaataaattnaacatgtttttatgcataaaatatgtatgactcgcacaaggacaacacagtagcaacagtgggctagtggttatgattacaaagaagatttaaatatttttatagttttggtttttagaagaaaacaaataaactaatgcaaagagagatttgagcaatgatacgagtgactaggggttatgattcactagtgacaatttttctcaatcccaatcctattgaaatttcttcttcaattaattgtcgatttctaaaatcaatcaaagcctatgatcaaggttagaggatgttctttaccctaaatcaataccccaatgatcgtcggcctatcaatttaagtcaaaggatataatcaattctagggatgatcaactagagattaactaatctattgaagataccctaatagtttgatcatac

SEQ ID NO: 177565 - DNA, 417 bp, Glycine max
  unsure (1)..(417): unsure at all n locations
ngcttacttgcgagattcttttgggattttctatccaactgtgttgatccattgcgatagtaccgcgactattgcaaaaattgagaaccgttattacaatggtaagaaacgatagatacgtcgtaagtacaacactgttagagaattactcaacaagagctattagagtggatcacgtacgcactgatgataatttagcagatcctttgacgaaaggattagctagagagaaagtccataacacttctaaaagaatgggactattgcccttactgcgatgatcattcatgatggtaacccgacctaaatgactggagatcccaagaactaggttcaatgggtaataacaagttatgaagtgatatgagacgaacatgctgttattagtgaaagcagcatgattcctgaagtaacaag

SEQ ID NO: 177566 - DNA, 429 bp, Glycine max
  unsure (1)..(429): unsure at all n locations
gtctcacgaattggtcacgtgctcatgcttatctatttgttagccgngggctatacgaagaacagtcttggccaaacaaaaggtcagggtaagcgataacctcgccttgcgcctttttctttcattgctatatgtagcaacagtcaattgatccacatcaaagtttgatgagttggaaaaatgaggccgcaattatactgtgccagttggagatgtattttccccctgctttctttgacatcatgattcacttgattgtgcatctagtcagagaaatcaaatgttgtggtcctgtttatctacggtggatgtacccggttgagctatacatgaagatcttaaaagggtatacaaagaatctatatcgtccagaagcatctattgttgagaggtacattgcagaagaagtcattgaatttgtcagaatat

SEQ ID NO: 177567 - DNA, 263 bp, Glycine max
  unsure (1)..(263): unsure at all n locations
ctcatcgataatggttcaagtttaaatgtgatgcccaagaccaccttggagaaactttcttttaatgtgtcacgtctaaaaccgagttcgatggtagtaccagctttccacngtagtcggcgggagggtgatgggggaaatgatatccccattcagataggcccccacacttgcaatgtggctttccaagtgatggacataaatcccgcctccagcttgcttttggggaggccatggattcacgcgctaggagtggtcccttc

SEQ ID NO: 177568 - DNA, 404 bp, Glycine max
  unsure (1)..(404): unsure at all n locations
tcagcttgtggattggtcttcccagtgaaaggatctactttttctgaaaagagcaaatttaatcatcctgcttggacgaatgagaaaactggggcaaataaagagggtgacgatgagggagaaacccatgctatgactgccattcctgtacggccaagtttcccaccaacccaacaatgtcattactcaacccttctccttacctaccgcccatttatccacaaaggccatccctaaatcaaccacaaagtctgtctaccgcacttccaatgacgaacaccacctttagcacaaaccaaaaacaccaatcaagaaatgaatnttgcagcaagaaagcctatagaattcaccccaattccagtgtcctatgctgacttgctctcatatctacttgataattcaat

SEQ ID NO: 177569 - DNA, 359 bp, Glycine max
ttttttttattgtattccgcctcctcacaaaggttataagtggttgtcttcaaccggcagaatctacatttgtaagatgtccggttcaatgaactaaggtttccatactctgacttattttccctctttctctaactcagtaaagaatcttgattcctatttcagcccttgtcctaattggtctccaccatctgtgagtcttactccccaaccatcctaagtgtctacttcccactcctctcctgcaccttgcattacccctgatttttctcctattccagtcacccttcctacagtctcccattatgtttctcacaatcttgaccctttgagtgcacttctttgcatcctctaacatc

SEQ ID NO: 177570 - DNA, 239 bp, Glycine max
ctgctgctacctaccctaatcgtgctttattgcagctccccttctgatatctgggaattccgtgggtgctaatcctacaaggagggccatctgcgatcctgtcataacgaagttcgatgctaaactgaccaagtggaatcagacacatatttctatggctggaaggatcacactcatcaatgctcgtctaacaccattacctcttttcttcttgacctttttcagggccccatcaccta

SEQ ID NO: 177571 - DNA, 435 bp, Glycine max
  unsure (1)..(435): unsure at all n locations
agctntntggagtagaaacatgggactctctcattttatttcagaaagtcgtatctagtcaagatctgagagaccatacaagtttcctagcggnttctaattatataggccattaagtctatcatatgatgacaatagccgagaagcccatgaatttcttcgggggcggagtaggtgtccgccattgccttggccttggctaacaatcggggaagttcttgactcccgttcaaggtaagagcaaaccaatccatccacatagttgcctcttggtgtaaagagtcgatcacccttcctctagcctctttttccgcgtatacttgggcatattcgtccgtgaccctatgctcgtgggccgtggctagacttaactcttcttggtatttggcgatgatagctagcatgttggtctccgtctcacataaacgctgagac

SEQ ID NO: 177572 - DNA, 162 bp, Glycine max
cgagcaataaaataatgttatgtttaatgaatctaaaaacaacttcttgagtcgcagtaaccaatggcttagcttccacccatttttgtaaataattagtggatactaaaataaaaatatgccttttagacaaagcccaataaacctcatcaatgacaccca

SEQ ID NO: 177573 - DNA, 373 bp, Glycine max
  unsure (1)..(373): unsure at all n locations
ttttttactgatnacaacatctaaagaaagattggacatctcatacatatagactatggatacaacatattactactgatataaaaacatgccatatattactgcattatacaactatacctaaaatgaaatgtgaaatgtctacaatattaatcgattataaataaaatttaagataaagattattattagcattataaaatatatttttttttaattttagttttgcaaaatataataattttaattctctcataaattattattctctgaagataatgtaatatgtcacttcatggctcttgacgtaagatgcctacatacactacatattaccacaagtatattatctttatcttctataatatgatgc

SEQ ID NO: 177574 - DNA, 442 bp, Glycine max
  unsure (1)..(442): unsure at all n locations
tatganatagttgttggtttggaagtatatatttttatttttttattatggaataaatattttaaaagtgtatatatatcatggaatatctatttcataataaaaaaaattatatttcaaaatagttgttttataatatatacatgtactttcaaagcaagtatttcataatagaaaaaaaaattcctttctgaataactattccacatattttggaatgtgatgttttctattatgaaataattatttcataatacatatatattttcaaaataattattctataatagaattctttttttctagaaaaattattccagacaagttattatataatatgattgttttattatgaaataagtattctataatacatatatacactnttaaaacatctatttngcaatagaaaaattcttttaacaaaattcttctaaaatga

SEQ ID NO: 177575 - DNA, 438 bp, Glycine max
  unsure (1)..(438): unsure at all n locations
agcttcanaatccaaagatctaatccattgttttgtttcataaatgggattgcctcacttgtgctattatatttcaatgcaaaccattcttttatatcctgttcgtgtgtagggaaacttaagctttttgtgtcttctttaaataaagatctcgtggtagagaccccaactagtggttctgtgttaacttctaatgtgtgtttgaatttcctcgtggaaattgttgatagaacattcttgattgatctaatttgtttgcctttgagcaacattgatgttattcttggtatggactggttatcttccaaccatgtcttattaaactattttgataaaactgtggtgtttgattattctagaatgagtaaggacatgatgtttatctctatcaactaagttgtgacatctttaaaagaaaatgctcaagtgtacatgatc

SEQ ID NO: 177576 - DNA, 352 bp, Glycine max
  unsure (1)..(352): unsure at all n locations
ctctcaagcaagcttncatcatgtcggtgtattggttttattgttcttacctccccaaaatagaaaaatctctcaatgaatacatattttctagctgtcgccttctaatggttttcataacaattctaacctgtataatttgtgagagatgtattatttttagttgaaaggattcatgcttgatgtgaaccattgttgcaattgtggaagaaattangtggcttgaaaattttgacgcggatcatgtgtcataaaattatgccttgtngagttttgggattctgtggatggaatgcattattccattcatgctctttcatgtgtgatctcaccctcgtgcaagaatactcta

SEQ ID NO: 177577 - DNA, 417 bp, Glycine max
  unsure (1)..(417): unsure at all n locations
agcttattgcaattatttatgcaattaattttatttcaaatgaaatctattttcctttaaaaaaatgaaatcactttaaatggcagaataattattttttgatgcacatagtaggtgtagtttttataaacagtcattcatcgtgattataatatttttaccgttgattgagactaattgtttgtataaattaatgttaaattggttatcaaaaattaattaataattattcttatacgtttattcgaatataagtttcccacaaaaaattaattcataatcaatttaacaaaaaaaaaaaaagccaccaactaatggtaaattgcaatcaacatcaaatacgcattntaatcatgataattattatttaatttattggatgtgttttacgtatgtgcaagaaaaataactcatttg

SEQ ID NO: 177578 - DNA, 428 bp, Glycine max
  unsure (1)..(428): unsure at all n locations
tccatgcttagtgtttggccgagtagtctattcttattatggagaatatggcggatctaattaaggtaagagggaaaactttatcttctactataaagatagagatatttccaaatatcgaaagttattgaatagcagaggaaagacaagataaaatcatatctttccttatttatattatcttacaagggagattaagatcttataatccaatttcacctccataaaaagggtcatcaaggttccggctagccaactcttgatccatcctatattatgataaatgttataactncacaccgctaacttaagcattggagtgtcttcacaggtatgtcaacttttaatcccacctatattntgctagtcaaacatagaatagaaatacatactaaaggacacatatgtattacataaatttagagaca

SEQ ID NO: 177579 - DNA, 383 bp, Glycine max
  unsure (1)..(383): unsure at all n locations
acctgcggcatgcaagcttcttaaatagattatggctgtttcattatantgatgcacaccatgtaatcggagttatgtgattgaatagtttttacctctgaaattctggcatctggaaactcataagtgaatactgaaaagtgtgttcttgtgggaaacatttctgtggttgtgagacggggagggagcgtggaatagaaaaccaaggaaacagatattctaagaaaccttcttatatcttaaatctggatgaattggacctccctattatgcaaaccttacctccttttattccattgtgttgtcataggcatgttgttttgtcgagtggtgcacactttgagtccttgatgttccatcatttgtagtgatccctaagcccc

SEQ ID NO: 177580 - DNA, 314 bp, Glycine max
ggaaaaacaataaaaaaacccatgccttccaattctcggagattgtcattcccatgcctcatgatggaaatattgctggacatgtggcctcacgtatctcaaaaaggggtgaattaatttctcactaataaactcttaacccccttctaaatgaaatagactccgaatgcacaagaaccagcaatcaatttaataatgttctttaaacatgcaagacaaaattgattgcaacaaaataaatgagataagggaagagagaatgccaactcaattttatactgggttcggcacaccctcgtgcctacgtctagtcc

SEQ ID NO: 177581 - DNA, 279 bp, Glycine max
tccagacttcttctagctccaattcatcagtgggctttccttccgagtccagcatcttgggatgttcccactcttcgatgacagctttccaggttctgctattcagtgatttgaggaaggccacccttcttgctttccagtattcataaatggctccatcaagaattggtgggctgttcactggtcctccttctttctccatgttcatcagaagttatctccctagatctcactcagtgatttcgagtgcccgctctgatccaaatgaaattctgatac

SEQ ID NO: 177582 - DNA, 413 bp, Glycine max
  unsure (1)..(413): unsure at all n locations
tcattgttgagtnntttctttccttttcacgctttgtttctctctctataaganatggctccgaagaagctttccgtgaagagatctacgagggacgttgtggttgaatggaccagtgccgctcccgagtttgatagccaccgttttaggagcgccaaacatcagtagtgtttcgaggccatcaaaggatggtcgttccacagagagagacgcgtccagctcatggacgatgagtacacagaatttcaagaagagatagctcaccgacattggacgtcgctggtcactcccatggctaagtttgacctacatatagtcctatacgtttatgctaatgcttggcccataaaagaggaagtgcgggacatgccgtcatgggtgaggggttagtcgtttccttttgacgcagatgc

SEQ ID NO: 177583 - DNA, 410 bp, Glycine max
  unsure (1)..(410): unsure at all n locations
agcttaaagtatgcccgagtcattcatccctatgagatgntgttgaagtattggcgatcggaattgccattccttggattatagggttgaaccaagctcatgcttttacaaaaaggttcatcaagtcaagttgaaatatggaagtaaccgtcttgcaaaattggggcaaaagatgaatcgagtcacatcaatgcttcgtctacttccaaacatatttaggattattgatgtccttgttacttccagtttcaccttgacaaagatgtcatggaccatgttgaaaatctaaattgattcaaccccatatcctgcgtaaatatacgcaatacttcgactgtacatcattcgcatgcatccatgctgttcattggctgcatagctcattgcattctttccttgaaaaataaaat

SEQ ID NO: 177584 - DNA, 483 bp, Glycine max
tggtgtgagaaagcatggaagagtcagtcttcctacttttatttgttgaccacaaagtggtacctggagatatgtcgcgagggtctggagaccttgcggacgttaggtggggtgctattgcccaaaaccaagcttgaccattcccgacccaacccgagcatagtcagtcagtgagaacctatgacatacctaagcaggcgagctcctggcagtcaaccaataaaagaacaaagtccacgaagcaaggaggcttgtgtggtggctggccagctatgtatcttgggtggtatatgaaaattaccctctggtaatcgattaccattcgtgggtaatcgattatagggtttaaaaatggagacaggatgttaagtagcttcctgtaatcgattaccaattgtgtataattgattgcacagtatgatatggcactggtaatcgagtaccagttgtgtgtaagtcgatacatagcgttacccgctactg

SEQ ID NO: 177585 - DNA, 467 bp, Glycine max
  unsure (1)..(467): unsure at all n locations
gcatggaagagtcagtcttcctacttttatttgtgaccacanagggacctggagatatgtcgcgagggtctggagaccttgcggacgttaggtggggtgctattgcccaaaaccaagcttgaccattcccgacccaacccgagcatagtcagtcagtgagaacctatgacatacctaagcaggcgagctcctggcagtcaaccaataaaagaacaaagtccacgaagcaaggaggcttgtgtggtggctggccagctatgtatcttgggtggtatatgaaaattaccctctggtaatcgattaccattcgtgggtaatcgattatagggtttataaatggagacaggatgttaagtagcttctggtaatcgattaccaattgtgtataattgattgcacagtatgatagggcactggtaatcgagtaccagctgtgtggaatcgattacatagtggtacctgctact

SEQ ID NO: 177586 - DNA, 363 bp, Glycine max
catgcaagcttaaaggcaatgaaaggattaacatatggtttatttgtgtcattattgatacgtaagattgttcctcacattcttgagaaatgtaaggacccatgttctttctgtataccttgcattattgggaacaataaatttaagaatgccatgctagatctaggagcatcaattagtgtcatgcctctgtccattattaaatctttatctcttggacctttgcaatctacatatgtggtgattcattaggcaaatagaaatgatgcttacctcgcaagtttcatagaagatgagctatttctggttggtgaacatatttttcctgcagatatttatgttcttaatatggaaagcggaatt

SEQ ID NO: 177587 - DNA, 378 bp, Glycine max
aatctggtgatccattaatttattatagtatatcttaacaattctttctccaatatttttttttcaaattagaataacacaacaaaaagaacagacgacatatgatagataaaccatgatgggttccatacgtacaatggaaattggagaggcaattttaataataataaaatttcatatttgcagtggaataaaactcctaaatgttataattagtgttcatgcataatcaggagaaaataaagcattcttgaagtatcatataatttataacacatgatctgatacgacatgtaaaacttttaagggcttcatagattaacaatcataaaaaaccaacataatcttgaaacctatgattctcacaaataataaatg

SEQ ID NO: 177588 - DNA, 441 bp, Glycine max
  unsure (1)..(441): unsure at all n locations
tgcacagaaagctagaaatgaaatatagaactcgtgccttctatggatgaatgtaaggctaaccgaggaaccttggaaagaaaacaagagaganaagtaataatgtgaaggaatgaattgcatttaattgaaaacttacacataacagttggttgttacagtttatatagttagttgtgataataactaacttaactaactatgctaactctagatacaagttttctaactctagttacagacttaaccaatgctaagagtccctctcaagataagcatgcatatcgaacattcctagaaatgtatatcaaacattcctagcttggaaaatagaaactgaanagcaccacgcattaaagccttagtgtatatgtctgctacttgtagatggaatgggaagcaattttacaaggtcattcaaaatcttctctcgaactatgt

SEQ ID NO: 177589 - DNA, 114 bp, Glycine max
aaaacttcagtttcgtaactttactaccctaaaaatctaactcccgaaagtatagctttatcttaatatgtaaaatgcagcacaattgttcaatagtcagttcactatattctt

SEQ ID NO: 177590 - DNA, 295 bp, Glycine max
tcttatagactcttcatgtctggtcaagacaaccatttagaagaagtatcacttttagaaaaacttaaaaccaatctgaaaaagtcacaaacctttctgaagagctacatccattgacttattcatacacacgcactggtaatcgattaccccactagtgcaatcgattacgccaatcgtttaagtcgaccgatgtgactcttcacatttgaatctgaatttcaccgctcaccggcactggtaatcgattaccaaaacattgctatcaattacacacttttgaaaataattggaa

SEQ ID NO: 177591 - DNA, 429 bp, Glycine max
gcttgcggatatggacttcgttattgtatagatcgatgtgggtcccacaagaagcaaatctgatcattctactatgacgactgagaaaactggggcaaatgcagagggtgagaaagagggagaaacccatggtgtgactgtcattcctatacggccaagttttccaccaaacccaacaatgtcattactcagtcaataacaaaccttctccttacccactacccagttatccacaaaggccatccctaaatcaaccacaaagcctgtctaccgcacttccaatgacgaagaccacctttagcacaaaccaataaaacaccaacaaaaaggaattttgcagcacaaaagcctgtagggttcaccccaaattccgttgtcatatgctaaactcgatcccatatccactcaataattcattggagccataac

SEQ ID NO: 177592 - DNA, 399 bp, Glycine max
cttacctattggtggcaatcttacttgcattgttactgtttctagcctaaacttagtttgattgtgttctaaatcatcaattatccatgtttctttcaacaatgtcgtatttcttaatttaactctgtctaatactaagttcctaagagttcgatacttggattcactccgtttaattttaaatacttgacgatccagtgcgctgtccggcaaaccaaatttcccttaaacatatttgtataaagaaaaagtggaccacaaagtaactacagggaaaatccaacaataaagataactctttttataagtcttattatataacactcggtatttaaataccgatgttgtactttaaataacatcgatttttaaaacatatgtaacgaaatactttcaacg

SEQ ID NO: 177593 - DNA, 365 bp, Glycine max
  unsure (1)..(365): unsure at all n locations
catgcaagcttngaactacaatgagagaaattgttgtttttcttcacgggtggtgagtggagcgtcatgttatagttgccagatcagggagacatgagtcgccagaacatgagaagccgtttctagaaaaggaaattcaaatctcttagattttgagagaatttaaacatctaacattttaattgattaaaataccatggtaaagtatcatacttcacattcattttcaaatatcctatccacacaagatatcttcttatgaaccaatttacatcccataaaaaaagtgaatcatcttgtgtaatatctctattctaacacataatattatgaagaattcttctctttttacccacacctctata

SEQ ID NO: 177594 - DNA, 363 bp, Glycine max
ccttcccttgtcacgggaagccggaaggtacatatcaccttcttaattgtacacatggggcactgcgcccccaaatgcgcaagtaagaagagataattttccgggttctcgtgtccgtaaaatgcattcatatcatgcatcgcataagcatctcttctaacatcataatggacatatcctgcatttgtccgttatcatattccaacctcacattttgcatgagtcatggcatcatcatgcatatgcgttcaacaaactttttgatttgaaaattgcataccatttgtttcatgtatgctcatccttacgttttcctctacaaaacacaaacaaaaagggggaagcgtgacacttacactacat

SEQ ID NO: 177595 - DNA, 451 bp, Glycine max
  unsure (1)..(451): unsure at all n locations
gttaacagaatccactttggtcatggaagttgataataatgtggatgtgcagatcctgatacacaatattatgcaaattggagcatcaacagatcctgaatataagcaagcacatgcattttctatttacttagctcagcccttgctagctacctctttggctttactttcttacaactggtattcactgatgtatcattatcatttcatttgaaaccttttttgatagagtagttttacttacagtatggtcttcttgttccaggtatccctcttcagtttttgttggtgatacatatacatactttgctgggatgactatggctgtgattggtattttacgccattttaggtacatccttacttttatctggcaataatcttaatttggctatcctatctgtgtttttggtgcanactangcatagaatcatagatatactgcggactc

SEQ ID NO: 177596 - DNA, 254 bp, Glycine max
agcttatataaatatttatatttataagtctcataatcacttaatatatctaatcacaaggaaaaaaattaatctttcatctttaagttgaaaagggaaaattgttctatcttacccggaccattaaaagaggttttatttaatttataaaaaaaaagtctccccacagcttgtttaactgccatatcctttatgtgatgatgaccctaaaaaaataaaaaagtattcaaggaatgttactttcctcattcttc

SEQ ID NO: 177597 - DNA, 427 bp, Glycine max
  unsure (1)..(427): unsure at all n locations
tctcttctcatggcttagtattttcttgaaatttcaactttcagaggaacttgcatgatagtgaaactactgaactagacttcctgaccaccttacgcttttacagagttacttgattctagtaatatcttcccagatcaaatagaacaatgtggatttcccacccacactctaagacgtatctttaccattgtctgattaaaattattgcaacatcttccatganatttcctattggacatccatctgatttgagtttgatccagccatttgggtgtgtagataataaatctttgatttagtgagtcctcttactatattgctgcttcctagttgaactacaccaacaactctaagacaggaagtcttagcttactgattctgggatttttgcacaggtgttgatatcagtatgaacacacatttg

SEQ ID NO: 177598 - DNA, 352 bp, Glycine max
tcataataatctttatttgctatggattctgtaatttatacatatgattgttactattatacttgacctttatgtgaaaataagatatgtgacaacgtgaataacggaaactccctctttttgggtgtattgatgatttactgaaaagttttataataaataatacatgaactgacattgtcattcaatcacaaacttaatagtcatactaatgatgattgtgacagtgcatgcctaattgcctataaaactcaagtttaacatgttaatacccttgctattgcctctatgattcctcaatttggccttaactaccatcgttaaccattcaagatgatgtataaaatgatct

SEQ ID NO: 177599 - DNA, 468 bp, Glycine max
  unsure (1)..(468): unsure at all n locations
tatgcgcatatttccctacgaacgttcacttgtacaagacatcctattaactaagaaaaatgcacccatatacaatcaaggtagcttcattacctagattatttacatgtacttccaaggtgtatttgttatttacatcacacacgcctccttggctaaatttacatacatgcatactcaaagcatttcggggtaccaaaaattgcacatgcgctcatcttggtatttctaatacctatacatatacaaacttcatgatgaatcttgactacctacgcaataaggtgctacattntcatgctttttttttcaagtttntgctacctaaagccacatgcaaattcaagcatattttcctttgctgactaanattgtattcaaattagaaggtatatattcttttgtaatatgttttcttcacataacatgcaacacatttatatatattttttgtgagacatttgacta

SEQ ID NO: 177600 - DNA, 375 bp, Glycine max
  unsure (1)..(375): unsure at all n locations
aacctggattcacagnggagctcattcaatggaggcattaatgctaagttaattcctgttttaaagaaagagctgaacgctctggacgctggtatctttgacccaattctgaatccatctgaagcgtacctcaagaagtctcttcacgaaccaatggggcatgctactaatgcctatgaatgtatgctgacgcacaaagctatagtgaaatggttaaaggaaggggacagaaattcaccttacttccacacgctgataaatcataaaagaagacataatgctattcaaggattgatcatcgatggggaatgggttcaggaccctactagagtcaaaactgacgcctctaatcatttcaaagatagattttctgag

SEQ ID NO: 177601 - DNA, 272 bp, Glycine max
  unsure (1)..(272): unsure at all n locations
agcttcttatccaaagctcatcttgngggttaagcttcttcttccatggcttattccttaaaggatggcgcctcctctcacctccttttctttgacttccgctgcatctccatggtggaaaatcaccattaaaggaccctcttgaagctcaaagattcaccctccatagaagccccacaagcaagctttcatcaacatggccgtgtttaaacatcccaaacaccaattatgcccttgctaccccctccgaccaaagcatattttttctaaaa

SEQ ID NO: 177602 - DNA, 445 bp, Glycine max
actcaactttagtgtgggattgaaatatagagcgaagaagagatgttagattatctaattcttctcatggagaagatgacgggtatgaacaggatgatggatgaacgaggaatgaaatatacggagagaagaaatcatagaagatatggaggtagacaaagagaggaaaagattgagggagtgaacgtgaagatccctacttttaaagggacttatgatccaaaagtgtatcttaagtggaagatgaacgttgagaaagtctttgcttgctataactacaatgaagaaaaaaatatcaaattggcctccctggagtttgagggatatgccttactgtggtggaatcaagtgacgagtgatgttgacaggatgacaatgcctctgattaatacttgtcaagtaatgaatagagttttgagagagagattcgtgccattctattatg

SEQ ID NO: 177603 - DNA, 366 bp, Glycine max
agcttatggccaacagataatattccaattgtttgtatattctttttatcaccaatacatctcagaccatgaaagaaaagatcatgctctccaatagagtctttgcttagattgggtcaaggaaatatcttggagtcccatctatcattggcataggaaaagcatatacaccattagattggcataaatttatctaaagtagggaaggaagtcctcgttaatcccgtgctcaagttatcccctattattgtatgagagttttcttgctcctaaatactctttaagatgacgttcggaagatgatgaactcattatggtggggacatacaaagtgtactcgcaaaggaactaatttgttatcttggg

SEQ ID NO: 177604 - DNA, 455 bp, Glycine max
  unsure (1)..(455): unsure at all n locations
tgttgaattataacctncatctacctttctttaggatgtatgagagtgtttacgccccggcgttacttgttaatatggatgcgtaaatctaaccggcaagtgtaccgagttgtgcaagtaataataaaatggtaagaactgagtatcgaactcagggaacttgtttcatttggtaaagcatcattctgtaagcaggcatgtgtgcaaagaattgattatcatgaattaaaaacaatcgtggtttctattctaatcaaaacagtaaatgtgagcaagtgggtgtgagaacaaatatgtaaaagtgttgggtcctcctactgaaatacttgatgcaactaaatgtatttctctatttttaaggttattcctgcgttctatgctgagagctaatataccaaacaccgatgtctcgtgagtttgcactaattctaattaaacctcattctcagatgtct

SEQ ID NO: 177605 - DNA, 416 bp, Glycine max
ctaattcatctttatctaatgagttcactttcattctcttccattctttcatgtctctcttcattgtaccaaatagaagctcaaatacttcattaaaaaagaatagaaccttacaagagaaatctttattataataaaaaagagaaatctatatgagcaaggtaactgaaaaagttacttgtcgcttcccaatggccgcctaatgatcaaaagggaataattccttttagaatttatcaaatgggagcaacatttgaattaatatcccaacagcattaagttgtaggttgtttttacaacttttggttatgaagtcacaaaaaattcgattgtgttttttattgaagcgaaaactgaacaactttatctttaattttaatttttatataagccctccattttttatatttattgaa

SEQ ID NO: 177606 - DNA, 283 bp, Glycine max
accggtagcgaatgtcattctcacatgcagttcgaggtagctcaaagtcaaaatgagctactagagccgtagttactcggaaggaatctttgttagatacgggagacaaagtctctgcggcatccattgcttctctgagagtgaaccctttggcaaaaagccatgcggtgatgtctactcaaagctaacttgtgagtgttacctggtgttaagaacacactctacatccaaagggttgtacaccactacgagaactgctcgagagccccagactgcattttat

SEQ ID NO: 177607 - DNA, 402 bp, Glycine max
gatgacatggtcttcaccgacatattgatcttattgggtcttaaaagaagcaaatttgatcatcatgcttggataaatgccaaaaaaacaaaaactagggccaattaagagggtgagaatgagggagaagcccatgctgtgactgccatttctatacagccaagttttccaccaacccaacaataggcattcttagccaataacaaaccttcttcttacccaccggccagttattcacaaaggcaatccctaaatcaaccacaaagtctgtctaccgcactttcaatgacgagcaccacctttatcacaaaccataaacaccaactcaaaaatgaaatttgcttcgaagaaacctgtagaattcaccccaatttcagtgtgccatgctgacttgcctccata

SEQ ID NO: 177608 - DNA, 479 bp, Glycine max
taagcttataagaattggcaaagggataaaagtaatgatacatttgttattgtatttcacacctcaacttgatattttattctcatactcattctacattaactaacattcattcattttctatgtgggacctataatttcttttttgttcctgtgctcttgtgtgtagaagaatgtcttgcagtgagctctcaatttttgttggttatacaattgccttaaattggttatacaatttttattgggactgtttctagcataactgataagaggttcaatctccatgtcgttgaggaacatataagttagaacacatgacatgaataaagattaagagccatgttaaataaaggaagaacttggttcaggtgtagcattttaaatatggcaatgttagaaactggttcaggttcacgttcagctcaatgctgcattgttgtattgatgaacagaaagaatgcatatattgagttgtgact

SEQ ID NO: 177609 - DNA, 436 bp, Glycine max
  unsure (1)..(436): unsure at all n locations
tgtgcaaatcaagtcactcccgcatattatctgtggcattcattgcatgtnggnctcgtcctttgtcacgggaagccggaaggtccatatcaccttcttaatcgtacacatggggcactgcgcccccaaatgcgcaagtaagaatagataattgtccgggctctcgtgtccgtaaaatgcattcatatcatgcatcgcataagcatctcttcataacatcataatggacatatcctgcatttgtccgttatcatattccggcctcacattttgcatgagtcatggcatcatcatgcatatgcgttcaacaaactttctgatctgcagaattgcataccatttgntttcatgtatgctcatacttgcgttatcctctacaaaacanaaacaaaaagggggaagcgtgaaacttcacactacattcttagtttcatgt

SEQ ID NO: 177610 - DNA, 412 bp, Glycine max
ggacccaagtacctgggctgcagctttattaagcgaacatttattttatactttagttgagtgttattcagaagaatagagtttattctttttatcttagcgagagtgattcttctaaattcttgagtgaaacaagaacacattggctgtattaaaggactttcacaacctttgtgtgttgccctcgctggaaagagagattctttccttcctttcatcttcacccttgttctttcaaaccacaatttcagaaaatccacctctgcccataattatcttctggccatatcttccatattaccgcactaaactaagtgatttttgagccttaattgaatttcaaacgagacgtttcacctcggtttaaatcacctcatttgaggcctgtgcttcagtattgtcatttctatat

SEQ ID NO: 177611 - DNA, 412 bp, Glycine max
actagcttttcccagatatgatattatcctcctagcacttgagattttcttctttcgaatcttgctggggaaaaaatacaatgatattaatttcttcattaaaaacaacgttaaagtgaagaaattctaatcattcttagccaaaattgactatcaatgtaacttagattgcgtagttatcatgctacaagttggatatttatggccttctatcatcaaggatgtccatgatcatgtgcttcattgtgatcaatgccagagaacagagagcatttcacggagaaatgagatgccatcgcagaacatcatggaagtaaaagtctttgaatattggggcattgattttgtggctcctcattcgaacgcttatcggaatcaatatatcttggctgttgtgattatgtgtctaaat

SEQ ID NO: 177612 - DNA, 317 bp, Glycine max
ctcccaagcaccaagtcggagatccaaagtaaccttgttacctaccttggtatactgctggagggacatgcacatttcaaaaaagaaaatttgttggagaatcggaaaagaaagtatgctgatgaatctacatcatcagggaattgttatttccttgtataaaaggttgactatacagatatttctatttggacttcggatgaagtagggggcaacaatattttttttaacattttcccttttcataaatttatggatacgtggaacctgtaaaagaaggtggcttccataatacccttccttaaacaatgttgaat

SEQ ID NO: 177613 - DNA, 177 bp, Glycine max
  unsure (1)..(177): unsure at all n locations
tctagccaaacggacttaccttgaataatttctttgatatgtctctttgagccttgtntccctttccttgttttaaagctcactacaagccttaagtgaaaaaccatgatatcaccatattcttaaggaattttggagttttggaattgttttgggaataagtgtgggggggggggg

SEQ ID NO: 177614 - DNA, 385 bp, Glycine max
tacgcttgggggatctgggatggtgaggggttatatttttgtttacagaaagggatgctggtaaggaataggaaagtaatactatgagttttgcagtgctcttctgcttcaaaggccaacagaagaagaggagcaggggtgccgaaaatgttaaggtgagttgttgcaaaaatcacccttggtactttcacttcatttttgtactcaaatctaatagagtgctataatttttatagtttaaaatagtatggctggtaacttgaattggggaaaatgattttatctttgcttatgctacctgggtaatgattatttttaatttatagaaggctagttttttttggcaaatttattttaatttgaaaatttttaattgagtacatta

SEQ ID NO: 177615 - DNA, 349 bp, Glycine max
gagccaacttaaacgacaataacttttttctcggatgtctgaaagaggtccgtaacatatcgagacgctcgacattgaacgttgaagctctgagccaatataaacgaccataactcttttctcagatgtctgattgagtcccgtaacatatcgagacgctcgaaattgaatgttgaatctctgagacaattcaaacgacaattaattttactcgaatgtctgagtgagccccgtaacatattgagacactcgaaattgaatgttgaacctctgagcaaattcaaacgacagataacttttttctccgatgtctgattgagtcccgtaacttatcgagacgctcgaaatt

SEQ ID NO: 177616 - DNA, 391 bp, Glycine max
tttgagcgtctcgatatattacgggattttttcagacatcagagaaaaaaggtattgtcgtttgaattggctcagagcttcaacattcaattttgagcctctcgatatgttacgggactcaatccgacatccgagaaaaaagttattgtcgtttgaattagctcaaaagttcaacattcaatttcgagcgtctcgatatgttacgggactcaatcatacatccgagtaaaaagttattgtccgttgaatttgctcagaggttcaacattcaatttcgagcgtctcgatatgttacggggactaatcagacatccgagtaaaaagttattgtcgcttgaattagctcagagattcaacattcaatttcgagcgtctcgatatgttacgggac

SEQ ID NO: 177617 - DNA, 302 bp, Glycine max
  unsure (1)..(302): unsure at all n locations
agcttgactaagcgagttgattttatccttattttcactctagntattagtcaattcgattaagaatgagaaatcccaaagagaaaacgtccgatagattctccgctttattttactaaacaaaagatgaggtgttgattattatattattttttatctctctttggtttccaacgtgggtacggcacgaccgaacagtcggagatcattntaaccgaagttaacggataatacaattcaaacgagcggtggaaatttatattatttttaagttaagcgagaaatgaacttagttaaatggc

SEQ ID NO: 177618 - DNA, 266 bp, Glycine max
tagaccaatttagactaagcttcgtcctcaaaatcctcttggtggactaagcttatattaaacaacattatcatcacaactgtggaagctagcttcattgcttcatgatgatgaatcaagattgattcatgatgatgaatcaagattgattccatgtgttttgatgataacaaagatgatgacaaaaagcccatgagaatgatttcaagattgagtcgagaacaattcaaaaatctagaataagagtcaagagaagtttcaagttc

SEQ ID NO: 177619 - DNA, 271 bp, Glycine max
tcataaaaatcaactgtattctgggtataagctcttcgaggcacatgttctctccttatgaggctatgtgcctactaccaaaagcacctgtaacatcggcttattaacatcggttttgacaaaaccgatgttaagttaaacgcggtggcatatttgtaaataaagtatccttcttaacatccgctttccaaacaaccgatgttaattcatacacgctaacatcggtctttcagacattgatattaactaatgatgttaacatcggttcttc

SEQ ID NO: 177620 - DNA, 278 bp, Glycine max
acatttatctatacactcccctaatagaaagatttcattagtctgtatcactgaattgaaaaactctttctaagaagctatcctaatatgtatatattcacctgcattatggcggcaatctacaaaatttgctaaggaccctaaaagctggaaagcagcaccccaaatatattggtctcttccgtcacctttaatattttctgaccatccaaagaaacctggtgataagaacccctcacccccttataacaagcttataaatgtgctagacatgaatg

SEQ ID NO: 177621 - DNA, 473 bp, Glycine max
  unsure (1)..(473): unsure at all n locations
cctgataagaacttgatccatgagacatatntcatagatggttgatatttctcagagatggactgagtatcttgacagctcacgatcaagggtcaatcacccatcaccggtgaattgtatttttgtggaggagagcatttcaatgacaattgtcatctctactccatgaaaaattcttggtggggacaggagttacacccttacaatcaatatgaaagaactcctaatcttgagagtgtgtttacagaattcatgacatgccatcctagctctacaactaatcaaaactcaatgcaaaaccaggaaattcatgttggccagagctactccatggaaaattatcagtgagagcaagagttacaaccctacaatcaatatgaagaagaaataagttctgatctggatatattgttgatgccattcaggaagtcactgaatctactcaacaagcatttataagtctataaattcaa

SEQ ID NO: 177622 - DNA, 295 bp, Glycine max
  unsure (1)..(295): unsure at all n locations
agcnttataagtgcaggtctgggagacaaatgtcttttggtctctatatgtgaagatgatgttccacaaactctggatgtggatcgaccgtgccctcctgacttccacctgggaaattggcgagtggaggaacacccccgcttttacgcaacgagcataatgtaaacctttacggctgttaaagctctatagttgggcctacgcttcagagatttcattttgttaaagcgttgtgtctttcgctntagaatctataatacaaggagacttcttcatctcgtgctagggtctaccc

SEQ ID NO: 177623 - DNA, 97 bp, Glycine max
tatcatttgataatacattacctgtattgtgagcgctactaaactgcccaaacctcatctttgggcgatgctttgaagaacgagaccttttatgaca

SEQ ID NO: 177624 - DNA, 390 bp, Glycine max
  unsure (1)..(390): unsure at all n locations
tttcccctctccccccncccagaggcctgttgtgcgtgccgcncggaacccaagcggctgcactgaccgtaccaataactttgttttgaaatacccgaaaacacagagcgttgctcacttggcacgcggatcagggaaacataaggagccttagaactacaccccgggatattgctgggcccacgggggggtaaactctgtcaatctatcaatcacgctccatctggaaacctgaagaaaggtctataaagaaaatccaagaggagagggattggaccaaattttggaactctacaaaaaacctggtgaaaacaagaaaaaaaaagttacaacactcggaagacgaaaattgaaactgatccaacaattacatgcataaggataaaaaaa

SEQ ID NO: 177625 - DNA, 457 bp, Glycine max
  unsure (1)..(457): unsure at all n locations
aactaagcttggtaggtgaaggtcctcctgacacgagccctatntactattatgattagacaagttctacgataattgtgttctttattttccgttgtggaccttatttagcaactaattctgttagcttagttgttaactatctggttctggctagttgtatagttaggtacaactaactctagttagcttatgttctaaccataatttagcttgtgtatatagctaatcttgtaaacattcagttgaattgataagaagatcattccagaaattgatttttccctccaatttctgttagagtctctttcatggtatcatccctgtacacgaagctatcttcattcatcattcttccgcctttctctatatgagattcagtttccttctttgatccttcttgacttctttcttatcaaccatggttgttaacaatcagcattcaactttcgatcac

SEQ ID NO: 177626 - DNA, 318 bp, Glycine max
tgacatttacctggggttattgatattgataattccaattctagcaaacaacaacgccagtgacttgattgttaatatgtcgctgtctgatagcgttaagaagagaatgagaatatctttatttatatatttctattttgacctggaaatatgtaaatctttctttcatttgttccatgaaagattttccaatctttcttataataagtcaacaatttccaattttatattctaaaacaaaatatcatagtaacaaaggccccataaattagaatagactctttcttttggttctggatctatcaatagatctatata

SEQ ID NO: 177627 - DNA, 476 bp, Glycine max
tgatgctacacctcatagagaagatgagcttgctgatcttatgagatagccacctgacatgacggaggaacagaaatgttggtgcagagaggaccgtgactagtagtggtgagatgcagcggactactatgcctgttccgttctgacctaaagcgattctaaacagacagatggaagatgtggataacgagatcttacagactcttgggagagtacaggtgaacatacctatgctagatgccatcagacgcatgcgaagatatggcacggctataaatgaggtgtgcactctcaaaaggagactctaaggctatgatcaagataaagcggcactattttgatggttactatgccgtgacacgagaggaatgttctgggaatcgtctagtgaataattgtggtgggggagtacacagtgtgataatgcactggtaatcgattaccagctgtgtgtaatcagatacatagggttaccc

SEQ ID NO: 177628 - DNA, 414 bp, Glycine max
tgcagcttgactcatgaaaaagtgggttagctccaagggtggtgagtggagcgtcatgttatagttgccagattagggagacatgagtcgccagagcatgagaagcgttttcgagaaaaggaaattcaaatttcttagattttgagagaatttaaaattcttacattttaattgattaaaataccatgtgaaagtatcatacttcaaatttatcttcaaatatcctatctcaacaagatattttcttatgaagcaatttaaattccataaaaaaagtgaattatcttgttaaatatctctattccacacataaaatatgaagaatcttcttttttaccccactctatattaagacaaagtttctctttgtcaagaaaatgtttaaaactcccaaataaaaggttattttttttc

SEQ ID NO: 177629 - DNA, 434 bp, Glycine max
  unsure (1)..(434): unsure at all n locations
tgtgcaaatcaaatcactcctacattgtatctctagcatgcattgtatgttggnctcttcctttgtcacgggaagccggaaggtccatatcaccttcttaattgtacacatggggcactgcgcccccaaatgcgcaagtaagaagagataattttccgggttctcgtgtccgtaaaatgcattcatatcatgcatcgcataagcatctcttcataacatcataatggacatatcctgcatttgtccgttatcatattccaacctcacattttgcatgagtcatggcatcatcatgcatatgcgttcaacaaactntntgatttgcaaaattgcataccatttgttttcatgtttgctcatccttacgttttcctctacaaaacanaaacaaaaagggggaagcgtgaaacctcacactacattcttagtttcat

SEQ ID NO: 177630 - DNA, 291 bp, Glycine max
tcacctgcggcatgaagcttgcacccagctcgcaggcgagttggtagcttcctccacaagcaacagccttctggaagaatcttctggaaggcccaagtggtcctggttgctatttgcacccccatttttactaagtacaccccctgcctttttttttgtgattctttttcgtaaagttaccaaaacttacgaatttcgtaacgatacttgttttctttccgtaatgttacggaaccttgcggattacataatcatcccctttttgacttaccgaatgttaccgaacctcac

SEQ ID NO: 177631 - DNA, 463 bp, Glycine max
  unsure (1)..(463): unsure at all n locations
ttacatggagctacatcacaacctccgcaaaaacaagaaaataagcttgcccaacaaatcaaaggtgtaaccaacaccattgctagcagattttcctataaagggaagtccaatcagtcccgtaagcatcacctccataccatttgggacattgacatcaattgtgttgatgcaccatcaccacgaagtctccttcccatcatatttacaaaaagagacttcaagggcatcaaccctatcaaccaggacaaccctatggttatcgccatcataattgccaacttcatagtgtccaaggtcctcattgaccaaggtagctccatggacatactatactagaagacattctagaggctcgaagtctcatttgatatagtccagccacactctggaccactcctcggctttgctggagaanaagttgagaccaaaggctacatcgacctaatgactaccttcgatc

SEQ ID NO: 177632 - DNA, 264 bp, Glycine max
agcttttatgatctgtgtgcacaataaattctctgcccaataaataatgtctccagtgctgaatacaaagcacaagggccatcaattccttctcatagacagattttgccagattcccattagataaagctttactgaagaaagcaataggttgtctctgctgcattagaacaacacctatacctctaccagccgcatcacacttaactttcaaagggtaatcacaaattggaagaattagcacagggggagaagtcatgatcc

SEQ ID NO: 177633 - DNA, 466 bp, Glycine max
  unsure (1)..(466): unsure at all n locations
tttacatgcatgtgcacaccatatttactatactttgatcaactgatacaatctatttgattgaaaagataatttatactactcttctaatgtagtggacaactaaaattaaaataatataatagaaaatactgctaaagccattcaaatcaagtaattttgaatctcaccattactatcacgcatgtcaaagagaaggagaatcagacatcgtaatgcataacacaacgaaacattaaaagaaaacatgcttcctaaagccaaccaaggtaaaaatgtattcatatttcgtgaactttttcaaaattataagacacatataaccatatataaaaacatggtggaacaatctgaccacatgcacaacacagaccacacattatttcagaaaatgagttngtaggaaaacctaataatgcactgtaataacaccgtaggtgcactaagataacaagggtgtcatgac

SEQ ID NO: 177634 - DNA, 247 bp, Glycine max
  unsure (1)..(247): unsure at all n locations
ggtattataggacaagttgaacgcttgtccaaagttaaagaagagcttgttctaatatttgagcacgacagaagagaacatgtgggctatcattgactagtataaactgaagctaaatctatctactacccatgagcaaagactagaggacgagtatgcctaggtgtctgtcctgcctgcggaaagggaagccacggagagagtgattnattcctttcacacagaagctttcatgtggatggatagg

SEQ ID NO: 177635 - DNA, 441 bp, Glycine max
attgaattaaaatgttcagaaactgctcgtaatcgattaccaaatatgtgtaatcgattacatagtgcaaattttgaattcaaattttaatagctggtgtaaatcaattttggtcactggtaatcgattacatcctctggtaatcaattaccagagagtaaatctcttgaataaagctttttaacttaaatttcttggccaagccttttgctacttcaaataggaattcccttcctatttaatatacccttcctaagactctagaaactgtcttgatcatccatcttgaatatctttaatttctttgtcttgaataaagctttgagaaacaagtgatcatccattggcaagtgatcatccatttgcatcatcaaaacattcagcttgatcctttgtctacattatgttgacaccagagcccatcgccactaattactaatc

SEQ ID NO: 177636 - DNA, 255 bp, Glycine max
gaccaccaccaaccggcgaatgtcaccactgggcccgccatccactactccgcttcttataaactgatcgaataccacagaaaatcaattaaagtgaacaacaataccttcattcagaacaaaaatccaaactaagcaccacatcctgggcttgttgggaaaccaccaccaccgtgcaccaccgtggaccacgctgcaccaccaccgccgacgaccgccaccaccgtagtatccaaccactccttctcttcttat

SEQ ID NO: 177637 - DNA, 374 bp, Glycine max
agcttatctaaatagatgctaattaaaatttattatttggatttatttttaaaataaatacctgttattccgaggtcatatccaaaaattagaccactggatgctgcgacgatgcaagtgatgacaactgagagtgttatcttgccgtggaagccattggctgaagaagcatcaacggcgaatccctcaatggccatcttggtggctttgctctttctgtttaccacaaaatgctaaatatatagtcgctaattagctctgtatataaagatgttgataataaaaatgtgacaaacaagactatgattaatttggttagagaatgctaaattttataaatatttgtcttgattcttcataccaaaaaaaaataa

SEQ ID NO: 177638 - DNA, 459 bp, Glycine max
tgaaaactttctaatgactaatgggcgacgtttctcatgtaccttctcaattaaggaacattaatgaaaagagatatgatatttacacaataacattataatatatatatatatatatatatatatatatatattatctattattacttatttttatgcgcttctctttatatctttctcttattaaaaaatgtataatttaacgtataaatatgttttctctaatcaaaggcaaacgaggaacgaggctttggatggtgtagaaagaagcaatacaaggcttgcgactcaagtctcctaattaactaaacgtggtgtagatcgttgtagcgtgtttgaatggatgtgagtataattgattctgtataaaattaatcttagttaagatagatttaaagtaatataatctagttctagatatctttattataaaatcaagctaaacataaaattcactat

SEQ ID NO: 177639 - DNA, 413 bp, Glycine max
  unsure (1)..(413): unsure at all n locations
ctgcaacttgatagagcttgcttagttcctcctttgtgatcagtctatatatgtacgtgtatcttagcttggatgaatacagccgcattcttcctctaataaaatcacaactttgtagtatatactatatagtgttatagattaattgtactggagcatggtacttgaatgttcattaatacntcgcccgaataatttattgtatcgcttaaataaattatgaaaaacgctcgtctgtatgagtaaagagaggccagaaaaaaagctaagatcgagaggaaatattaagaaatagtttgtatgagtatcattactcataaattattatcacatgttagtataggagttattaagtatctgcgaattttatccaagtcaatttatataaatggtcgatttatatatgcacacgt

SEQ ID NO: 177640 - DNA, 277 bp, Glycine max
  unsure (1)..(277): unsure at all n locations
gaaagctctatatcacaagatattctatttactattcctcaattctcattcttgcgcttctttctattgatcaataggccggctcctatgctaaataaacccaccaaaccctttttgtccctaatagcatgggttgaatttgacgtttgagaaaacgagtgaattgaatcatggcaggagcttccttttcaaggggctaaatctcactgacattttgaagtcaaggatcgcttgcctgcttntagaaaaaaacggtacataacgaggcatgtctacc

SEQ ID NO: 177641 - DNA, 366 bp, Glycine max
ttcgcgcgtatgacagccactcgaccacgtttgaagaatacgagacccttaatcctataacgcaacgtggcggacaaaactgggcaggtaacatgaatggtcattactgtccaagcagaaggcattctgcgcttcactattcatggtcacacattaaagcagcatgtggttacgcgagcatgaactactacccgtatatagacgttgtttacaccaatgagcacatcttataagcatactccgcacagtggtggcctcttgggaacgaagcggcatctactacttctgaggaggcgtggacactaatccctgacccgctacgattcgagcgataggtcggccaatatctcaaggacaacgaatgag

SEQ ID NO: 177642 - DNA, 268 bp, Glycine max
  unsure (1)..(268): unsure at all n locations
aacttccacataggtgtaccatgccactgtttgttcagctatactgtcttganagaagtgcattaacagctttctgtacgtataatatgcgcccatccttctgcaatacatccgcagatgaccttttggcacgtcgccctttgatttatcaaaatctggttctctaaacttgggaggaatgatgatgttaggtaccacacagcgagtttcttaaccggtgcggatggagacaggaagtggcatactatgcttggttggggcaactcat

SEQ ID NO: 177643 - DNA, 370 bp, Glycine max
  unsure (1)..(370): unsure at all n locations
ttcttatccaaggctcatcttactggtgaagctccttcttccatggcttattccctagnggatggcgcctcctctcacctcttctcctttgtcttacgctggatctccatggcggaaaatcaccattaaaggacctcattgaagctcaaagatccagcttccatagaagctccacaagcaaacttccatcaagtggtaatcagagcacaagagcttcaagtaggtgctccttaaacctccattaatattttgctttaccttctcttccattgcttttttcttcatctttctccatgtatctcctcacatgtctcgttctaaatgttgttaccatgattctttagagtttgcaccgattaaacttgctata

SEQ ID NO: 177644 - DNA, 220 bp, Glycine max
aacatcactgacacgtctactatcattggtatcatctccccctccatcattgggggcactacttgagaagctagatccctccacctttgggcgtatatcttgaaagagtcatgcccttccttacacatagtctggagctgccttctatccggagccatattaaaaatgtactgatgctgcctaaagaaagcaaccattatgttcttccaagaatggactc

SEQ ID NO: 177645 - DNA, 474 bp, Glycine max
  unsure (1)..(474): unsure at all n locations
ntgaaattggcatctgaagtctgagagctctgggcagtttagtctgctaaagctggaagtaggactgaagtagaagatgcagggatgccaactattggtgcaaaggaagagggaacatcagctactctgagcttggtcttccttgcctctggaaaattaactgtctggtcattcgcattccaacagttccttatgatataagctaagtcaatggtcggccttaggttttcataggaggtaagggcctcagatcccactccccttgatctatacaaggctgtgattaaagctgggaagtctaagcgaggagagttagactgagccatcatggtcatttgtctggagatcaaaccgccaatgttcatgtccatccttgtgattaagccatagaccaacctagctctgtttgtgttcaaatctgaagtgcgggaggtaggagctaggttngagtacgagaagacgctctatgtctaa

SEQ ID NO: 177646 - DNA, 462 bp, Glycine max
  unsure (1)..(462): unsure at all n locations
tgaagggcatgaacccaccatgcgctcatatatgatttttgtgtagacgncnaccatcatcggcatgatctgcttttccatcattgcgggtgccacttgagttgccagatccctccacctttaggcgtattctttgaaagattcgtgcccctttctacccatgtctatagttgcatcctatccagagccatatcagaattgtactgatactgcctaacgaaggcaaccattaggtccttccaaaaatggaatcgagaaggttccaagttagtatgtcacgtgacggctaccccagtaaggctctcttggaagacatgcgtaagcaatttttcatctttcgcgtacgcccccatcttctgacagtacaatttcaagtgattcttaagacaagtagtccccntctacttatccaagatccgcaccttgaacttcggacggatgatgatgtcatgcactaggcat

SEQ ID NO: 177647 - DNA, 352 bp, Glycine max
  unsure (1)..(352): unsure at all n locations
agctcataagcttaaaagtcgttggaactcatacatacagatgtgtgcggcttgattaaaccaagctcacttggtgagagaagttattgtgttctcttaattaatgatttttcaagaaaaacatgggtatatnttgaaacataaatcataagtgtttgagaatttcaagaagttcaaagcctttgttgagaaggaaaaaggtcttaagattgaagccatgccctctgatcatggaggagaactcacatcatatgaatttcaaaagtattgttgggaccatggaatttgaagactattaactgtgctgagatctctccaaccaaatgcagtggttgaaaggaagaataaaaaa

SEQ ID NO: 177648 - DNA, 235 bp, Glycine max
cctcctctataaatagaaggttgtgtaacacttgtaggaacttttatgaatgagagtcttgtgagacacacactagagggcaacttctctccctttttcttgcatcaatttcgtgctctcccctctatctttctctccctctttcttttcctgcattgaagcatcctctccaagcttcttatccaaggctcatcttggcggcgaagcatcctcttccatggcttattccttaatg

SEQ ID NO: 177649 - DNA, 313 bp, Glycine max
  unsure (1)..(313): unsure at all n locations
agccaangcaaacgacaataactttttactcggatgtctgatagaggcccgtcatatatcgagacgctcgaaattgaatgttgaagctctgagccaattcaagagacaatatctttttactcggatgtctgattgagtcccctaatataacgagacgctcgaaattgaatgttgaacctctgagccaattcaaacgacactaactctttactcggatgtttgattgaggcccgtatatatcgagacgctccaaattgaatgttgaagctctgagccaattccaacgacaataactttntactcggatgtctga

SEQ ID NO: 177650 - DNA, 437 bp, Glycine max
tttagtaatgacccactaacctataatttaaataacttaatgccattaacctagggaattaaaaaaacttaatggctgagtgtaactgaaattgtggcaaccaaaagtcacccccaacagccaacaagtcagccaccatttggtctcccaaaaggctgatgcctatgttgccaattgggcccttattacaacttgaactaaacctaactaaagcccttttagttgattaacccaaaacatatttttggtcagccaactttacaaggattgggccattatttagacaaactaaacactctaaaattgaaacaaagtggtgtcattctggtacgaaaattgaccaagaggagttgaatatcaacacaagtgacattcaaagggaagttaatggcgtgggggctcgttggaatcctcatcaacggcgtgagttaattact

SEQ ID NO: 177651 - DNA, 200 bp, Glycine max
atagcttggaaagtctctatcctcaagcttgagtgagccaccgtagagtgagccaattttgtaaacacatccttgtaactctactattcatttgtatagtggaagaatctccatttggagaattataatcgtgtgctcccattactacctttaattactaagtgtctatcttaaactttacaaagcgggaaagtctgagt

SEQ ID NO: 177652 - DNA, 383 bp, Glycine max
  unsure (1)..(383): unsure at all n locations
gagttttggggaagaaatggggtgaaaatggcttcacccctcccctttttaaattttcacgtcagacacgctcgcccaagtgagctgatgattttttctttttttgcaaagctgtggtgctcattgctatatttttttttctaaaaatcctataattgcatataaacttaggcgaattcacgatataattcaaggaaatgaacaactatgaaacaggaaattaaaaagcaaagttagagatattaggctgcctcctacgaatgcttctttaacgtctttagctggacgcaggatgatgatngatcgatcctgggtctagcacctgttcgtacctgcccctaagctaggacacagaaagtgtcatctgcaaaatatgaagaata

SEQ ID NO: 177653 - DNA, 386 bp, Glycine max
tgtgatcgattacacacatactgttatcgattaccataatagattttcagaaaatatcctcaattgtcacatcttttcatttggttcttgaatggctatcaaaggcctatatatatgtgacttgagacacgaatttgctaagagtttttcaaaacaaaaaggtcttatcctcttaaaaagaaaaatcgttttatcctcttacaaattccttggccaaaacacttgtgattcaataacgaattatttgagtgctcaaattgttcaatctatctctttcaagagagatttcttcttctcttcttctttattctgaaaagggattaagagaccgacggtttcttgttgtgaaagaattctaaccacacaggaagaattgtccttgtgtg

SEQ ID NO: 177654 - DNA, 448 bp, Glycine max
  unsure (1)..(448): unsure at all n locations
tttttctcccttntttttccttcccccccccagggcctgaatcttcgtgccggaccctaagcactgagctgcaactgcccctatgtctttctttccctccaaatatccctgctttttaatgaaaccacccttcttcaagacaccctatgcgatatcgctttattgggtttcaacaaaaagaagaaagaatatctttttttcccctcctaacaaaaaacagggacaatgagaattgaggattcttctgttgtgttgcggcggctttgtgcgtaagttatgtaatgaaagccaagcaagcgggacgatgatgtttggtttccgcgataatataataataccaacagtgcgatccctccgttggcgggtaataatggcgtgtgggacccataaccctaagagtgtttcaaattggatggtactgcatctaccacattcttcccggagtata

SEQ ID NO: 177655 - DNA, 453 bp, Glycine max
  unsure (1)..(453): unsure at all n locations
ggaacttttaaagcctntatatattaaatttgttttgaaccccgcaagcaaatcggtaagaggtttgaagttgtgtatctaatcggtaagaaatcaggtttatatcctacaatatcgngagtttgaatctcttgatgtgagaacccgttagtggataattgtaagttgctctgtgaattcaaatttaatacaatgaaaatgtgcaaaattctaatgtaaaataatccatatataattaccgcgaaatattgaagagttaattttatgtctatcgtatgtaacgtcaactttatgccatcagactcaacaacaccaaccttttattgttaggacaacattggagctacaccaagaacaaggaggaaagatggtgcacatttgaaattgttacacaaattatcttattcgtggttttgagatcttaatatgctcgtaactaaatagacacaattt

SEQ ID NO: 177656 - DNA, 378 bp, Glycine max
cagcttgttaaagaactgaagaaaaatccataacatttcttgtctcacatcgttcgcgtgtatgacactcactccacaaggttcgatgtacaggagagcctccaccctataacgcaacgtggcggacaaaagagggcagtaaacctgaatggcccgcattggcaatgcggaaggtattctgcacttcactatccatgttcacacactattgcagcttgtgggtacgtgagcatgaactactaccaatatatagatgtgtgttaatccaaagagcacatcttaataagctactccgcacaatggtgggctcttgggaatgaagcggctattcctccttatgatgacgcatggacacttatccgtgaccaactacagttt

SEQ ID NO: 177657 - DNA, 416 bp, Glycine max
  unsure (1)..(416): unsure at all n locations
ctgagtcttgatgtaaatattctttanttttctatttaagccgncctaatgggnggactgcttctatatgcacttaattcttgcatgtttttggtctgatcatccatttgtgtataaagctaggatttttagcattggaaaatggcttgaatccttagaactggatagagcggggctagattactgtattgtctggacacgcagtgcaaggactctagtttttaatatgctgtgatcttaatactgttcacttagactaagttcgacgaaggatccgagaacgaattcgtcgaacgaagtttaattagaattagctcattcacgcgagacattggtatttgggataattgtcctcaacatagaacacaaaaataacattagatagagaaacacccttaattgcatcaagtcactta

SEQ ID NO: 177658 - DNA, 209 bp, Glycine max
  unsure (1)..(209): unsure at all n locations
cccaccagcagcatgcaagcttccaagattgaacgaaagagttcaatttctgcctgtcatttattnccctacacgggcaatctaatacacacagcaaagtctgaaatcccattcaacagcgggtgggacacagttttggccaccggccaccgactaccacagagcataatccttcgaaaaagactttctaacttaaatttcttggccaa

SEQ ID NO: 177659 - DNA, 218 bp, Glycine max
ccgattatacatttttgatgagctacaagactccgatgcagatacctttgtgattatgtttgggaaagagatgatcagcgcggaggccttactggaccaagatctttttatagccaaccatagcgacagtatgcttaggacaacattggcctaacggttatggtacatgcctgggaaaagctttatcttcgtttcaaataaccaaactactatgactg

SEQ ID NO: 177660 - DNA, 435 bp, Glycine max
  unsure (1)..(435): unsure at all n locations
gcagctgcaacttggcaaaaagcgctgccaaccttctgtttttataantgcactgtggagtggactctctatctattcaacatcaagtaacactccacgaacctcggcgactgcaaggatgaattcctcttatcggcgcttgcacatctactagaccacagctttcttttgcttaacaacatatatcagctggtgaagcaggccctcaagcctcctcctttcaaaggcaagcctgacaagacgacgaacatcatctccatgtgcaatcaaattagccagaaccatatcctcccgaacatactggactcataacacgtcccaagagtcttattccatgataccgaatccctgaattttacacacaatcctatataaccaaacaaactagctatcaaatgaatatcagaactaacattccgattaatgttattcttc

SEQ ID NO: 177661 - DNA, 402 bp, Glycine max
  unsure (1)..(402): unsure at all n locations
tcaaagctggctgggggaggggtnnagggtgctttntttttnttagatgccatntgnaaaatataagacaaacacaagagattagtacaggttatttttcacaaaaacaaaaaaatacaattgaaattttgactgggcgcttagcgcaccatgttgtgcttagcgcgcgctgcaagctggcgcttagctcgaagacacataaaacattctttttctgcaaaatacgcttagcgcacaactgagcttaacctaagtctacaattttcaaaaccataaacgattggagcttactgagtatgttggcgcttaactcaccctcaacagagagacactcacgcttaccgcgtatggcacccttagcctgactacaacaaacttanagatagtgacggagtcgagcct

SEQ ID NO: 177662 - DNA, 402 bp, Glycine max
  unsure (1)..(402): unsure at all n locations
gccacaacgagacgcctgtggagtgggagttggagctgttttgtcacaaggtgggcaccctattgcttattttagngaaaaaaatcatggtgccacccttaactaccccacctatgataaagagctttatgccttactaagagaactccgaacttgggaacattaccttgtttccaaggaatttgtcattcatagtgatcatcaatcacttaagttcattagagggcaaagcaagttaaacaaaaggcatgcataatgggtagagtacctagagcaatctccatatgttatcaaatacaanatgggagatacaaatgtgcgagtagtgccctctctacgaacacacattgtttgctccaaggagctaaattttaggatttgtaaccttanggacttgcatgc

SEQ ID NO: 177663 - DNA, 270 bp, Glycine max
cgaaacacaccagtcttgtagacgcggagttttatttgagcaactgcgtgtcttacaaacccccgctgcgttctgtggtagaaaactaactttaagagtactcacccaaataaaaaaaaaacaaactcttagagtagcaagttgctgagagaaatatacatcctgtgttagcccggtagaatacatgcgttggcggatcaaaaatattaatgggaaagcaccccaatcccgggatggatgtgggctttttaagccccaaaaaaaaactac

SEQ ID NO: 177664 - DNA, 474 bp, Glycine max
  unsure (1)..(474): unsure at all n locations
aaaactaagctggcacctttataagagccgacgaggtaatcttttattcngattcagaacagcgtaaggaaatatttccatggatgtaatttctcatgtcatcccaccatggcaaactccgctccttttttggtggcagaataagtggaccaggattcctaacacttagattagccctccgaagtgctacggtgaaagcataactaacatcagcaaaagctggttcataacccactccatatgacacctcacctttctggaaatgtatcagcaaatctgagtatgtcttcaatggtggagtagtaccactagctgatcgaagcatgcgaacctttttccatctccaacatagacatcttgatacatttgaggctgagagctagttgcctagttgttataaatgaatgacaagaccatgaaatggaaatctattattagatctgatttcacagatataactgagaagaagatttt

SEQ ID NO: 177665 - DNA, 241 bp, Glycine max
  unsure (1)..(241): unsure at all n locations
accatatacacttgatcaccccaaagttttctgaaatntaagtttcgatgggcttgattttcaacttgattctttataattgtctactatctgaaggtgatactccatattatttattgctttcaataattttctatcatgtatgcatatatacacattatttgtgcattatcattgagattgtgtgtctataagcaatacttgatcccatggcgcaccacagagaggagttacatttccc

SEQ ID NO: 177666 - DNA, 417 bp, Glycine max
  unsure (1)..(417): unsure at all n locations
gcatatagtaattgtaacaggtttatgtgtattctgtcatttgggcacttcttgtgctgttgacttaatatacaagatcttttgcctattttttttaaaaaactaacaaaagttgataaaaaaattataaataattcttttaatttttgttttaaaataatattattaatagaaaattaaatatcaaaaaattgatttgaaacaatataagtttatttaatttaattatactcttcaagagaaaggaaaattttatttaaaataatattagtttactaaaaaaattgatttaaacaaaaaaaaagaatnattgctattcttttctacatacaaacttattgtcttggtttttttaagatgataagtattaaaaaataatctaaatttagaaatataaatatgtcatttatattcatg

SEQ ID NO: 177667 - DNA, 422 bp, Glycine max
agcttacccccactattacccacaccatactccaaacttatcaatgttaagagaatgacctctgctgaaatgcagttgagaaaggaaaggggcctaagctttacttgtgatgacaagttttcccctagccatcgttgtcctaataagcaacattttgttctacagtgggaagaagaagatgatcctgcattacaactatatccaccatacgaggttgagacagctggtgaccccactttgcaagatcatcatttgtcttataatgctttaaaaggctcatcacgtcttggaataatgaagtttcaaggatcaataaatggattgggagtgcacaatctactagatagtgggagttcagatactttcctcacctacatagctcaatgctgaagtacctgtataccaattctaattgcaggttt

SEQ ID NO: 177668 - DNA, 453 bp, Glycine max
  unsure (1)..(453): unsure at all n locations
tagactatattgtagaatcttgagcctttgttctcaatgtttaagtcggncttatcatagagggggtctttatgctttcttcaaatatcgagaatgcattttgtaagtacaatgtttttcctaatgatatgattgaggcttcacaccagtaatgtggacttatcatttactaaaagtattaggattccagacaaggagaaattaccaccatatacatcttgtgtaacacccaatttttgcgtaatataaattaaaaaagattctatttaaaaataaatagagttttaggaaaataatgagattttcgtaattaaataaataagaaaaaataattttattaattaaaataatgattttaagggtaataaaataattatatgttcttataaaataaaatgaatatttaatttattcatttgattgggagaaaatatagttattttataaaatata

SEQ ID NO: 177669 - DNA, 313 bp, Glycine max
  unsure (1)..(313): unsure at all n locations
aaaaattttctttaacctgtgagaatgcgtttttggaaacttttagtatttgttaccaaaaagaccacaattcaaggtttcctttctcttgcatcctattaccattggcaccgacaccaatttagtgtcaacacattattttctcatgatgactctcatgaagtatttatgaaacttcctcatggcataattttataagactntgactttgtcttggtgtgcaaactctgaaatccttttatggattgaaagacgtcggccctcaatggaatgcaaaactaacttgagtgcttctaattttaatatacataat

SEQ ID NO: 177670 - DNA, 457 bp, Glycine max
  unsure (1)..(457): unsure at all n locations
tgctacatgtgatgaanattataataatatcgggagttggtaaaatgcattctcaattgatatcatgtagttttgtgatcctggatgtcttagtgtattgagacttgagagttttttgctctttgcctctctgatccctggttcatacttcatagtctgttggagggtcaagttggcctatatgcgataaacaacattacagctntcttatctgcaagaattntaatactttcaggtaatgacaattttgagagcagcttctctctatgcaatcaagcttttttgaaacaccatccaaatagtacagttagtgaggaccaactggtatccaaggcccacgcatgggccttttcaaacacgtcattcatcactgggttctggtttcagtggctcagctgaaggttggatttgaaattcacgttntgatgatgcatgcatatagcattaatatatctat

SEQ ID NO: 177671 - DNA, 326 bp, Glycine max
ttatgtgcaaagaagcatgtactaaatagccattatctagctaccatttgggaaaaagacaatcatgaatgcattggtgttttgataccatgattttaaacttaaccacctgcagaagtttatgggcaaagggtaatgttcttcgtagagctcagttggccttacaaatgagaagagaatacctaatcttctttggtaggacataggaattgcagtgagaatggaggctcaaagaagacgtcatgtgaaataagaaaggataagaaaatcattctttataattaccaatatggtagcatatagcaagaagaaacgtttgaacggga

SEQ ID NO: 177672 - DNA, 380 bp, Glycine max
  unsure (1)..(380): unsure at all n locations
caacaagcttgtaaagaacttagganaaatcaataacaagctagttcgcacatcgttcgcgtgtatgatatccactcgacaaagtttgaagtaaaggagaccttcaatcctataacgcaacatggctgacaaaagtgggcagttaacttgaatggccattattgtcaatgcggaaggtattctacgcttcactatccatgttcacacattattgcagcttgtggttacgtgagcatgaactactaccaatatatagatgttgtttacacaaatgagcacatcttaaaagcatactctgcacagtggtggcctcttgggaatgaagcggcnattcctccttctgatgatgcatggacacttatccttgcncaactataatt

SEQ ID NO: 177673 - DNA, 480 bp, Glycine max
  unsure (1)..(480): unsure at all n locations
gcttctaaggaagtctctcaggaagctacctaggctacaaatagaaacatgtgtaacacttgctgcaactntgatgaatgagaaacttgtgagaaacacttcaaagttcaacttctctccctctttttctccttcaatttcatgctccccccttctctctctctctcattcttttccttcgttgaagcttcctctctaagcttcttatccaaggcactctcttggtggtgaagcttctccttccatggcttattccctaatggatggcacctcctctaacctcttctcctttatcgtctgctacatctccatagtggaaaatcaccattgaaggacatcattgaagctcacagatccagcctccatagaagcttttcaagcaagcttccatcacaacataccttcacaaaccanattcaatctcaattctatgacattcttgggagagaaaagcacttagaccatcgctaacttgaaatt

SEQ ID NO: 177674 - DNA, 147 bp, Glycine max
tacttctctatacgcctgacttacgacgattactcctatcgacttactaattacatatactgcactgtgtcaaacatattgaagctttgatcttcgtgaccttcagattgagctacattgaagacaacgcgacgtataagtgtgagg

SEQ ID NO: 177675 - DNA, 385 bp, Glycine max
  unsure (1)..(385): unsure at all n locations
accttctgaagacatgtgtcttaaaccaaaaggggagagctttctttcattgatagagttcacttacgacaacaagtttcactctaccattggcatggctccctatgaagctctgtatgcgacaacgtgtacgacacctctatgttggcgtaaagccctgaaaaagacctcaccttacgacttgaagcggtacaacaaaccaccgataatggaagttgatccaagagaggatgaggactgctcagagtatgtacaagacgttatcaggataacaggaggaaacacttggaattcgaggttggtgagcatgtattcctgagagtcactctgtggactggntgtaggcgagcattgaaatcccaagaactaacacctcgcctcatcg

SEQ ID NO: 177676 - DNA, 325 bp, Glycine max
cattatttccatgacacagggagcaaggatgatgatttggaaattttatgcaaaactggtcatgcatgcgcctatgtggacgctcaaaagtcaaatttctatggtcatatgatgctaaggctcacgatccatttcctttatcttaaaagagcccaacgattgcgaaatacgctctgtcaacaacttatgcatctatcctagttcattacaggcgcccggggaaattttacaccattcaccctgacgtgtagacacgtgtttcttcaaacacggtatgatcgtgattctttttttcaagaacattggaaatatttttttaaaacat

SEQ ID NO: 177677 - DNA, 419 bp, Glycine max
  unsure (1)..(419): unsure at all n locations
agagagcacaacggctaaacttatccaagtggccattctaatacaattagcttgctcactagcttctcacttccatatgcttttgaccttattacatcagcacacattttctttgattgcttttttaacacaacttatttatcgcgtgtgtgcctatgctattacctctttctttacatcccaattaactccactcccccaaatttggggtaaatttgccttgaaccatacgctctcctaaattctaaacaaggcatctggagataatcatctacgttcagggtttaattattgacaaatcattcaactcataaagagtgcanacggtacagttatcattaaaggtaagctttttggtcaaatgcgtgcgtatgcacaatcatggcctccatcatgtcctcatttatacatctcattct

SEQ ID NO: 177678 - DNA, 368 bp, Glycine max
atgactgggacaaggacttccaaccacctataccctagccaccagactatcaagacagaacacattaacatcaaaatcttacctatattagtcatcaccgactaaactcataacgcagacatgtttgaaagcaaggcactcactttaactttgaaaatcccacctaccgccaagcgatgaggactaaacgcccattgcttttaaagctgtgtcagcgaatctcacataacaagtatgctgtaagcaatgactatgacaatcattcgaaaaaatcaattatgcatacattatagggaagcagtgaacgacacgcgacacataatactaaagaaactcatatccttcaactgggattcttctcgcaagtg

SEQ ID NO: 177679 - DNA, 439 bp, Glycine max
  unsure (1)..(439): unsure at all n locations
ggacctctaagncgactgcagcatgcagctncagctagtataatttaagaatatttttcttgaacactcatgttatatcaaggcaaggttgatgaaggcatattgcaatgccaaggtgcatccctagttaccaaacaggtcatagcctttctagttaggctctcaaattggcaccctagaattatcttcttattagaggtgttcatgttaaacatatttacctacagttgaagatgataggtacatattaaagacattcacctacagttaggagatagaagtataagttaatgacttttacctacacactatacataataggtaaaaccaatagtgacagacaattagtcgtcattatattgccttctcaaagttgaccgtagaaacttccgttggacaaagaccatcatacatttcccttcgaatattgttatttata

SEQ ID NO: 177680 - DNA, 361 bp, Glycine max
  unsure (1)..(361): unsure at all n locations
actaagctggttcgacggcttacccgctgaagatcgaagaacgatttataatttatgaanaacggccaagaacggctgaaacctttgcgagattctttacggaaaacgttactgaaacgtttccgaagcgcctcggcttacattttcttcaccgaaacaattgttccaatccaattcgacagatagagaagcgcctaatgggctggacccctttcttcttcacttgcttccctatttataacaaaatatgggaggtggttgccgcccagctcgcccaggccgagctagctctgtcatgcgagcanggatgcttccttcacaagcaaccgccttctggaggaatcttctggagggcccaaat

SEQ ID NO: 177681 - DNA, 464 bp, Glycine max
tgtgccacaacacataagaaatgaaaactattttgatttatagaaattatcaccggcatttgaaaccaacagtggctgaaagaacaaagggttccataccctttcccgtatttccaatcccaaaaagtttctctctttatgagttcttttagccagccacattaaaaacctgccactgcctgacattgtttacaacaacatataagctggaacaagtgcacttataggtttctcatgtagtgaaatgattaatcgatccttgtcctacacgtaatagaatcttgatgtcaaaagaaaaaaaactatgaaaataattggaatatcaacttcaacaacatattttgggtacataaattaaaagggtcaactactcaactccaacctcagtactagtacgtaagaaacacatttcattcattgcaacttccacatacatgatctgtgccagtccttaacagacacac

SEQ ID NO: 177682 - DNA, 370 bp, Glycine max
  unsure (1)..(370): unsure at all n locations
gttttctcccccccagaggcaccctttgcgctggacccccggaccccacnatcgcagctcaaccctaaaacctagcacgtgttttcgtttttccctccccgccttaaacttgataaatcactccctcccgtatctctcctccgggaaagggacagtcactgccttctgcaaacgggccccaaatgaacaagtcataactgtcgcttattttatcatgtcaaatgagaatccacctcattgacgaaaaggacctccacctgctcttatcccgggaaaactctcccggctacaggctccaaaaaacccaagtccaatcctttttgacggtagacttctaaacctaagaagccccccgccaatacaaactgca

SEQ ID NO: 177683 - DNA, 378 bp, Glycine max
  unsure (1)..(378): unsure at all n locations
aaactaagcttgtgcaaatagantactgctacatctgaactctagcattcatattttttctctaaccactcctcaagtttggatctttacggaaaaacaccataactaaacgcgcctccagggatccctatcgcaccctaaccaaatctagaaccatgggtgatcaagatgagaccctagaacacatgaaagctgacatgtctactctgaaagaacaaatggcctcccttatagaggccatgttaagtatgaaacagctcatggagaagaacgcatccactgccgccgctgtcaattcggctgtcgaagcacaccctactctctggcaactactcaccantcttcctcaaacataataagacagtgaatggacacact

SEQ ID NO: 177684 - DNA, 242 bp, Glycine max
ggaaacaaagatctgtttgttcacctgtatcttccacaaacaacggtttatctacatttcactgtataacattaattacttttccctgacgcctcttttactatggaagggtcccgcatgcaccataaattttaacaaagagacttcatctcaagttgcttccttgtatttatattatctcctctccgaaaggcttgaaaagctctctttgttgcgtcacaccgtataagtaaactttaatt

SEQ ID NO: 177685 - DNA, 434 bp, Glycine max
  unsure (1)..(434): unsure at all n locations
atgttgatgggactcaaattgcgattgtttatgtagctacatccatcttcctaacatattttaaatgttggtgaaataatatcaagtgacaaatgtttgaacatatatgtattacaattatggatgatgtaagtaaattccttatttcttcactattaattaatattcattatgatatacatgattatcttttttaatttcaaatttcattaataggtttatggatgagtggagttcaagcttgggtcatggttccgtgtatgcattccttgagccacagtccttacaatgcaaaggatagacatggtgaatgccaacaatacatttaaacatggcttaaggaatccaaacgagaggtgtacctcggagcttacttgcatcagtaagtcatatttatcaaatgactgtaacaatgnttttgttatcctatctaa

SEQ ID NO: 177686 - DNA, 336 bp, Glycine max
gcaagccctccaaccataataaattaatgtagttgaattgcaaaaatcatgccatcaaattccctgtccaccgccaagtaaataaattaaattcacatcacatatttgggactaccctgagataaatttatacatattacacttgtccccactcttattatctactccatcaggaattctttgacaaactatataataagaaaattaaactattattacgtatctttgccaatattagggacattaagattatcattaacttgacccacttaattaattggtcagattcatccgcttctacataatatcatacgctggcatatatttagacctact

SEQ ID NO: 177687 - DNA, 299 bp, Glycine max
  unsure (1)..(299): unsure at all n locations
tcacctggttcaagcacgactttatttctgcttttgttggcttgccctgcatagctcgcattnttcttttcaatttgagccttcacttgctcatgaagcttcttcacatactcagctttaacctgtgccgtcttatgcttaaacatagcaatgttaagcatagacaacccatcaagaggagtcaaaggattaaattcatacactatctcaaatggtgaataattagttgtgctatggacaacccgactattagcaaccgtcacatgaggcacacatgcttcccaagatttaagaatttt

SEQ ID NO: 177688 - DNA, 411 bp, Glycine max
agcttcttatccaaagcacattcttggtggtgaaacttcttcttccatgacttattccctagtggaaggagtcttccctctcctcttctcctttgcctttcgctgcatctccatggtggaaaatcaccattgaaggacctcattgaagctcaaagatccaacctccatagaagctccacaagcaagcttccatcagctaactagattcgtttctgagtaagaaccatagaaatggcaaagcaacacaactaattacaatcatatcacaattctagctctccaatcattgcaacacaatgcataatatgtcatacatactaagcaaaacactcagcactagggtgtggtggcatgaaataagattggtgtggcataacactatacactaagcaagacaactatatactcatg

SEQ ID NO: 177689 - DNA, 328 bp, Glycine max
acgaaatgcacacgtcttaaatctcatttatgggtatgaggaattctatctgtatgttttcattccccattagccgcattgttttttgaaaaaaaatgcgtgttgttttgatcgggatgggggtgtgtttctttaccaagcgtgttcgcattttagcgaaagatgtcaagactttattgtcttttgtctttacatctcgacacttcaatgtcttctgtctttacatttcaagactacaatgtcttttgtctctacattcctagacttcaatgtcttttgtctttacattctcagacttccatgtctttagtctatacattccgagact

SEQ ID NO: 177690 - DNA, 410 bp, Glycine max
  unsure (1)..(410): unsure at all n locations
agctngaggaaaaacttgaagccttggtctacctatgtactcaccttgccatgaatcaaaaatctgcatctgcacctgttgcaagagtctgtggtttatgttcttctgcagatcaccatatatatctcaatccttctttgtagcaatctggagtcaataagcaacctaaagcctatgctgcaaacatttacaatagaccccctcagcagctaaatcaataacagcagaataattatgatctttcaagcaacagatacaatccatgttggaggaatcatgcaaatctgaaatgggcaagttctccacaacaacaacagtgtgtccctcctctccagaatgttggtgtccaagcacgccatatgttcctcccctattcagtccagcaacaacaacacaaagacacaaaaatt

SEQ ID NO: 177691 - DNA, 449 bp, Glycine max
tttatatttttgtttgcaaaattctaatttttttgttcaaagagcacattctaagatggttctctgaaaaactgtcttataatatctatattctaagacagtttttgagaaaaccgtcaaaaaccatcttagaatccataaaatatttttatttttttgtataaaaaaatcattctaagatggttctatagagaacctccatagaaagtgtacccttctaaaacagtttttaactaagaaccggcttagaatggtgcactttctaaggcggttctctatagaaccgtcttagaataatatcattttctaagacatattttgtggaatcgtcgtagaaagtgcagactttctacgacatctcctacaactatggttaataaccgatgtaaaatgtataatctaactgatgtaaaaagtactctttgcagcagtggttcatctctcatgaa

SEQ ID NO: 177692 - DNA, 263 bp, Glycine max
tgtgtgacacttgttgtcactttgatgaatgacagttttgtgagacacaactcaaagttcaacttctctcccttcttcttccttgaattattgtgctccccccctctctatttctctccctctttctttttctccattgaagcattatctccaagcttcttatccaaagctcatcttggtggagaagcttcttctttcatggcttatttcctaaaggatggggcctcctctcacctacttttctttatcttccgctgcatctt

SEQ ID NO: 177693 - DNA, 402 bp, Glycine max
  unsure (1)..(402): unsure at all n locations
gttgaacagggacgcctcccatcatctgtgggaagggcatagttttgggatctggttgaacacgacactgatccttggaatcttggtggagnggtatctgtgacgttcaaagacactatatcaaggagaanagtactacagtagaatattaagctgagaattcaaagatagttagaaactgcacaacttgtcaatgtaaatcattattatagaaggatatataaactagaaagcggaagtggcagatgaaaatgtcactaacatcacgtgtgcttcactccagcacaaattccaccaccctctctatattgtgcctgaaaatggcacgtggaaacanaactcttgttgtcaagtcacgtgctgtgatggtggatcatttctttccatagacagtatacctct

SEQ ID NO: 177694 - DNA, 460 bp, Glycine max
cccaacctaagattaagttttaaattttatctttttacatgcccaactctttgtttgtgatctgtattgattgttgcatcatcatgcatcatgcatcatcatgtagaggcaggaaaattgtttctaaagttacaaacttcttcagtgcataaaactctttgtctaaatcgattaccaagctattcgtaattgattacacgagtcctttgaagcttgcaaagagatcctcgtctcggtttaatcaattaccaattaacagtaaccgattacacagttcaattgagaccatgtctggtttttcatgagtatctgctttaatcgattaccaagtgataataatcaattgaaagtgttccctgaagtgattcacaactctctaatcgattaaatcaagaatctacacgattacatctgtcttgatagctgtccaggtgttggaaagaacactctaatcgattac

SEQ ID NO: 177695 - DNA, 379 bp, Glycine max
  unsure (1)..(379): unsure at all n locations
gcttctataatactggtacgaatacnggaagaagcaacaactatactctcattgaaagactgagagagttaagaaaaccctaaaaccctagaaattcagaattcagctgaagaagaaggaggaaccaatggacttcgacgagtacgaatacctggagaagacagtggaggaagacatagattcctccaagaagaagaaggacgtcaccgacaagagcgagaggagttaccgaaagccccgcgacgtcgacgacgatctcgacgccgatgacagaaagagcaagaggtctaaggtcgacgacgagaacggcggttccaagagagatcgcgacagagacagagagagagaccgtgaccgcgaacgttcctctggtcgtcac

SEQ ID NO: 177696 - DNA, 474 bp, Glycine max
  unsure (1)..(474): unsure at all n locations
tatgtttaacacactgaacatggttaanaattttctctgttttaaattactatgctcattgacttctggccacgcgttggttttgctggagaggtaaccagctactttgaaatattattcattccctattggccattgggttctgggaagctgctaagcaacttatattttgcatgatatatctgaatgataaacgtaacagctattaaatcttttacgttaattgcataatttcttttacctgcagtcaagaggacgggctcaagatgatgaagcaatcgagaaaatgttaaatgacttgtctttgattaagaaatttgaataaatacgccagagtgtgtgatacaatgcttgttggtaccgtataacacatcacttgactgcaagcaaacattcttgtggtttgattacagaaatgcttggtaattatatttagtttattttgtgaagtttatcaagaaggattttgacaca

SEQ ID NO: 177697 - DNA, 332 bp, Glycine max
  unsure (1)..(332): unsure at all n locations
agcttgaccaacaaccatatacagattgttttattatttacctaaatnactcttaaccatccattctaaataagaggatcaaaattactcctctcatgttctcatttctcaattgactatatatgtgttgaaactctacaaaaaagaaaaaggatttgtatattgactttataaaatattacaaaaaccactgagatcttttaccagaacagtatttatactgatgagattcagtaatacttactaaaactcactgtcaacggactacatttataaattaaccacagttaggtactcatatacacttactccgcctccccctgcaaactcta

SEQ ID NO: 177698 - DNA, 476 bp, Glycine max
  unsure (1)..(476): unsure at all n locations
ttagtntataagtaatcgacaaagatttgaatagctaattatgttgtaagcaaatctcacttaaatctcatactgtctaataatctaattttaaatcatgtataacacttatataaaactagacggtttattcattctcttagaatcatatacataatctttttaagcaaatggaaaattaatgaagaaattgagaaaattttattgacacaattgatagagaagaataaaaataaatgaagagtgctacttatattacttcactccaagatatgagtaaaatatattcttttaaaattttcactgtctacaaacgtgtctttttgaatattactagttgtacatgtatgtatattagcattgctgtgcgatactcgaacaatacaaaaaggagaatttcataaaagctgtaatctatactccgcataagatgcatacactaattagaaaaagaaatatacgcacattattctaca

SEQ ID NO: 177699 - DNA, 443 bp, Glycine max
  unsure (1)..(443): unsure at all n locations
aagctggatgtaaaaatgtacttattgagttcttatttatcaaacttacggtagggtaaggccacttggaatgtgattgccaccaagctttaagaacagaagttgtgtcaccaggaagtttcccagctcttctcttgcgcaagatttcctctcttatatctacaattttctccttataaccctgtatgataaaaattaaaaaagtaaaaagaggtcaatcatatgggaaaagatttgagaaggggaaatgaacaaccatcaacaattcaacatcccttacctgtttcagttcatgctntaattcttgtcttactcgctccatgagggacctctcgctctctgtaggaacaagagggccaaaccccatgccatctgccccatcgaaactactatcanagagaatggcatcactatctacttggtcatcttcatcatcagacatt

SEQ ID NO: 177700 - DNA, 400 bp, Glycine max
  unsure (1)..(400): unsure at all n locations
ctatgaaactaagcttgcttcggattgcaaagccccctcctcttttagtttatttcctgacatcccanacaaacaaacttaacgttacaagacaattatagttgctgtttgaatacctcacccactctagtgtatcacacaattatggctcttctctaatgaaacactcttgccttttaccactctaactccgcttgagttcttacgcaatccaagagattatggccacaacaaataacaattcaccaatatgtgtaatggaaggctagagagacatggacaaggttgaccaacaaaaatgctaaccatgtttttatgcacacatgaaggaaataaaattcagaatttatgaattgaagtaacaatccgtcatgccgccgagatattaccttaaagagat

SEQ ID NO: 177701 - DNA, 278 bp, Glycine max
agcttcaatcatgcctctttgtatatttattatcaaatactgcgaccttgacataaatattgtctgatagagttttcaagaacctgaaataagcgtgtcttcaagaacgcttgaataagattgagcctaacaccacccaaaagcttataacaaattcaaatgtcatactcatgtgaaattcaccactggaaagtgaatattcatcctctggaacttcaacatttggttcttgtgctagccccttatcaatacacaatttctcaagaggcgggccacaa

SEQ ID NO: 177702 - DNA, 446 bp, Glycine max
  unsure (1)..(446): unsure at all n locations
atatcaataaaaccatacaaaatatgtcgtttgtgaaaatntatggaactctagaaatggtttataaaaaaacgaccaacaaaaaacatttaaaaacatcttataaaatcaaacacaacaattctgaaattattaagccaccgcttacatttccgttgggtttcatttttggagaagaaaaggagaaggaaatagagcaaaatcactatcgagtagttatcctcatttacaacattttttagtgtcttcctgaaacaaagaaatttcaaaggaatcgatacagtattttcaactctacatattgtgttgcagcacaggtacggngaagctcatttgcttgtttggatacttctaatttgggctaaaaattggctgtgttgggatcgctatcgtgtggaaaattaagaagttgattcattcttaagcaacacatattgtatgggatg

SEQ ID NO: 177703 - DNA, 290 bp, Glycine max
ctcttgatataagttctatcctatctaattcttttcctttgtaatctgtccacgatcgtgttttattcttggtctgctattggcctcaaatatcttaagaaagggggggggggtgaattaatatattccaaactacttccgccattatttagatctatttcactctttattccagttataatatccctttataaagaacttcttatatattgattcacataaaacaatttgaatattaatataacgccatcataaaccaatgagattaacggaagagaaagttgctactc

SEQ ID NO: 177704 - DNA, 472 bp, Glycine max
tctggttcctggcgataagttgcaaagctatgaagattctaccatgcttaattatgatggttatttttgttacatctgtactttaggaatagtaaaaacacatggtgatttgtgattgaaatttatcaactaaaatatgctagtaaataatacattcttgctttgatttttagcagagatccacatatgatgaatctttgaatatttgcagtgaactaaatgatactgttattgaggcacaactaaggacaagacaagttccacctcggcttccaaccaagactgcaattgaaagttatcagcagtcaactaatcgactgctcattttggtatgctgtctcacaatgaagctcgagacttctctgaatacatctttctgtttccttgtcttttactccttatctgagttctttctacaggatactgcttcatttctgaatagatatagtgaaatctagagtgcaactgaaca

SEQ ID NO: 177705 - DNA, 325 bp, Glycine max
agctagcactatccgtgaaattctgtgatgttgcggaagtcgaaaagaagttttttgcgcaatccgtaagtttccgtaacttcttcgaaagctaaaaaagagtaaatatgttatccgtaaagattcttaaccttgcggaaagaaaataagtatcgttacaaaattcgtaaagtttcgtaacgttaccgaaaaagaattaccacaaaaatagaagggggtgcatttataaaaagggggacaaatacaatctggcccctttgccttcaaatcttctccaaaagtgttgtttggagaacaccttctccctgggcactggtgcaacttt

SEQ ID NO: 177706 - DNA, 398 bp, Glycine max
tctacttatgtggcgggcgggctttcttcatcttcttgtctccaacgcgaactttgaccattgttctttcttcccgcgatgctccttttcatgtccgcctgagtgggcttatagcctaaaccatacttcccacgatttccttgggtatttatcacgctagttatgccgcccgtgttttttcctaaacccatcccgggttcataaccgttccccaacataactcgggccatcattaccgctgcatcggacagacaaggctgcccaaagagggagtccatggaggaaatgctgaccacctcaaaagactggaaagcagtttctagtgattcttctgcggcttccacataaggcatggaggatgggcagcttaccaaaatatcttcctcgcctgacacgat

SEQ ID NO: 177707 - DNA, 326 bp, Glycine max
cgagctgcagcatgcagctttattggcaatgggagggcagttggctatttatcttgtaccaccctggcctagaattttaatctctaaatatggtgggtggaaagaggaactttacttcccaatggtggcacgacctgaagagcattctttatacacaacatcatgactcgtttattgatgatttaaaatggacggtgggaagggggctcactatcactctatggaaagataaatggatggaggacaactgtaatttccaaggaaaatatccgcaaatatatttgataaacacacagcactatttatcaatcacatttattggagaa

SEQ ID NO: 177708 - DNA, 443 bp, Glycine max
ttccctggactctactatgggctatattccttggcacccttaatcatgttcaatttgttggtaagtttaggtcttttaatccaaaaaaggaaacttggttaccatgtgagagtaatttggataaatgaaaatagttttggatgttatatgcatgagtatttcaatgcttgcactactacgaaagtgtgttttttatgacaggcgttctacttttgtaattatgtgtctgaaaaatccttttatgatgcacattctaagacggttattgaaaaccgccttagaatgtgtgttcctcataaaaaattatgacggcgtttattaaaatccgtcggtatctcaattgaattcaaaagcccaattaatacgagtccacgtgcaggcagcatattaacttctgcgacctctcgagctcttgagcttccacgacctcttgagcttccatg

SEQ ID NO: 177709 - DNA, 308 bp, Glycine max
  unsure (1)..(308): unsure at all n locations
agctttantcttcatgttgctccccctatctcttattatttccccctttctggctctgatgatgccaaacttgaatatgacattgagtgcatttggagggtccgagtcttgaaaataaaaacttaattttcttagtcaatcctgaatgcttaagaaaatatcaatttatatcatcatcatatatcttactatatatatatatatatatatatatatatatatatattatgaccaccagcttgtcattgcatacaaaagaataatgttcaaacttgagatcttgtggttcctaaaatactcctatttgt

SEQ ID NO: 177710 - DNA, 458 bp, Glycine max
  unsure (1)..(458): unsure at all n locations
ttgaaggtgcgtancccaccatnttccatagtagaatactggttatgtgtctactatcattggcatcgntgtttttgtcattgaggtgccactttgagctgccaggttctccacctttcagcgtattctttgaaagatttgtgccccctttttgcacatgttctatagttgcatcctatctgaagacattatactgacactgcctaacgaaggcaaccactaggtccttccaagaatggactcgggaaggttccaagttagcgtaccaggtaacagctacccagtaagactntcttggaaggaatgtatcagtaattccttatcttttgtgcatgcccccatcttccgataatacatctttagatggttcttggggcaagtagtccccttgtacttgtcaaagccagcaccttgaacttgggaggggtgatgatattggggtctatgaacaactcttt

SEQ ID NO: 177711 - DNA, 295 bp, Glycine max
  unsure (1)..(295): unsure at all n locations
agcttgagatgaggaagaggtgaaaggtgaaacttcctgcttttattcgtgaccacagaggggtatctggagatatgtcgccggggtcaagagaccttggggacgtcagggggggtgctattgcccaaaaccaagcttgaccaatcccgacccaacccgggcatagttggccagtgagaacctgtgatgtaccttaccaagcgagctcctggcagtcaacatataaaaggaaaactataccacaaagcaaggaagcttgtggtggctggccanctgtgaattttgtgtaatatgt

SEQ ID NO: 177712 - DNA, 479 bp, Glycine max
gcgtctcaatatattattggcctgaatcagacatccgaatcaaaagttatggctgtttgaatatgccatgtgcttcgatgtttaattctgagcatctcgatatattatgcgcctgaatcgggcatctgagtgaaaagttatgccatatgagttagccgagagcttcgttgttcaatttctagcgtctcgacatattattggcctgaatcggacatccgagtcaaaagttatggcagtgtaaactttgcatgtgcttccatgtttaattttgagcatctcgatatattatgcacctgaatcggacatctgagtgaaaagttatgcacctatgagatagctgagagcttacgttgttcattttggagcgactcgatatattattggcctgaatcggacatccgagtcaaaagttatggccgtttgaatatggcttgcactctgatgtttaattcttaacatcttgatatactatgcgcctg

SEQ ID NO: 177713 - DNA, 287 bp, Glycine max
gatgctacaacccatcaatagtcatcatcttctgaaaaaaaaaccacctttttgtttctaaaaggaaaaaaaattcccagcctaacgagctacccaaagcgaatctgatttgcgggcttttcatttctgtataaatcttcaatcctccaggaaaataacgctcccccatctgtttataatcatatggggcacaagtgaaccaaaaaaaactggcgagaaaattgagggttgaagcttggtagtggaacgtgtcctacaatattattatggccttgcttctacggaga

SEQ ID NO: 177714 - DNA, 376 bp, Glycine max
catgttctcagaatgcgccaaatcaaaatgctcataatcagaatgctcaaaattataatgctcacgatcacgatgttcacaatcaccaataacagaatgcacacattcaccagttatggaatgcccccaatgatcaaaaggtataaaatgatgcctaactaatctatgaaatgtcctatctatctcaggatcaaagggtcgcaagtcacatagatcgcttctatcctacactacattcagcatgcacacaactagttgccttgtcatgtaaattaacgtgtaagttcgactacagctaccctcaaatgatatccaaatgactcgaaatctgtgagcaacctataaacgatagaagatacacaaaaaatccgacaaa

SEQ ID NO: 177715 - DNA, 413 bp, Glycine max
  unsure (1)..(413): unsure at all n locations
acccttagtacttataaattacatctgtttatttacctttnccattctcgacgttcatatgtgtgtacgggaaaattgggattgtttaatgtttgacacaagatattgtgggcctacgattttatccaatcccattactacaagattgagagatcttttcaataacatgtagcacgagatttctttatcataacaaatgaaattattgggcacgtttgtgaaaagatggtggtccatatgcttctattctccatgacttgggttctctaggctttgtgccgggaaaaaagacactgtcacctgacctttcccaattnccttatctattaagcaataattgccaatattcattggatctaagacactgttgtctcgagttacttcatttaacatggtttgcatacgaacaggct

SEQ ID NO: 177716 - DNA, 431 bp, Glycine max
  unsure (1)..(431): unsure at all n locations
ataaattggtgagctttctcatttctcataaaacttaaccatnaagcttacctcttcaataatgcaacatctagcactttctctcaccagtagtagggacttagaataaaaattggattaatcaatgttagtgctagcaaaactaacaaaagacttgttttccccatttgaccttcttcatgggatctctaatcacaaaggtaacccacaccattgtttggtttcaaggggcttaaggctcattcccctcgatgtttctaatatcatatttcttcctaggggttttgtcagaggaattgctaagtttccttctaccttcacataatctatgaaaatagggtcgttctttagtcagtgctctaccacagtatgtcttaagtgtatatgtctattttttcgcattgtaagtttgtgtctagctataactatta

SEQ ID NO: 177717 - DNA, 462 bp, Glycine max
tctaaactctatacaagaatgaagctcggattacacttgtttgacaagtggcctcagatatcttaagaggggggttgaattaagatattgcaaactatttcaccaattaaaattctatttcaatttcaatgcaagttacaagttcctttaaaaatgaactcttaaataatgattcaaatagaacaatctgaatataaatgtaaagcaataataaataaacgagtttaagggaagagaaagtgcaaactcatatttatacaggttcggccacacccttgtgcctatgtccagtccccaagcaacccgcctgagagtttcactatcttgtaaaatccttttacaagttctgaacacacaaagacagtcctttctttgtgttcagaattctttacaacaagagaccctcggtctctcaatctctcttgaaagaaatagattgtacaatctgagcacttaattaat

SEQ ID NO: 177718 - DNA, 182 bp, Glycine max
ctgatttcaggcgttaataagtgactctggtcgtgcttgcgcgcctagcgcaactctgaaccgcttagcgcgcataaatgaatttcggcttaacgcatgcttttctcgcttatcgaatggactgaagtggtgcgcttaacacgataacccttcgctcagcgaacatgcacaactcattcttc

SEQ ID NO: 177719 - DNA, 365 bp, Glycine max
aagttcataatgctcactcaccaatttgagggggagtaataacatatatgggataatgtaaagacaaatatcatatgaaggaatttaattgtgattttaaaatttttctaaatctttttcgaaagataaaactatcatttgatataactttgaagatatataaataacggctttcacaaatagattctttcaaatgatattaatgaattttgtaaaacatttctttaaacaacataatcaaattcaaacttaagtcagcttaatgaaaaattgagtttttattggtgacccctcctcagcttgaagcctagctacctctgtcctttgcctcgaatacttattagagacataaacctcactaaaat

SEQ ID NO: 177720 - DNA, 422 bp, Glycine max
  unsure (1)..(422): unsure at all n locations
agctttgctcttgtgctcacaggatctggttctcaaacatcaaaggtaggcgcaaaagaggttgtgttgatctcgccctacatactttatctacgttgaaaaatccatccatttgcgatacttaccctcgcagatgaaccctntgattgaaagctcaatgaatactccaaagagctctatagttcaagttccactaataacctccaccacgtcttgcaatgaccacccaatgttggtgaagaaccatggcccaacgaccgtgaatactcacttaagcacacgtacaaagtgaagctgtgaaggtaccttcaccgcccacctcaattagcgttccagatgccccgaaacaaacacacataaacattaggcttttcagagaaattttcttacacgcctgataaaaaacaaaacaaagcgctgtt

SEQ ID NO: 177721 - DNA, 345 bp, Glycine max
cctgctccattctttctttcgggccctctttgtttctcgctctaatgctttgaccgcagtcatgttgacatctcttagcttgtcacactccttccggaccctagtgactgtgatctttaactttttcttgaccactctcgttctttcaagctctgttttcaaagcttgcacttcttcgctttcctcagggacttcaacttttttcccacttggaccttttagctttgggagccaagatatcccttgcatcctagccttcaatcacttatgatagccgcctatgaccccattgttgcttcccctaagctccttaatctttctctttcactatgtcccacactttat

SEQ ID NO: 177722 - DNA, 395 bp, Glycine max
tcatgcttaactatgtatggcaaaacttcattactgttgttcaagacatacaagtgagcttgtaacaaatcttctacacttggagtgatcacctacagtcctcttgaacccttaccacccactctgtcatcatgccgacactcaggaagcccaacagctttagccttctctaagtattctgaacaaaattcaatggcttcttctgcaatgtacctcttaacaatagatgcttccggacgatatagattctttgtatacccttttaagatcttcatgtatcgctcaaccgggtacatccaccgtagataaacaggaccacaacatttgatttttctgacccgatgcacaatcaagtgaatcatgatgtccaagaaaacatggggaaaatacatctc

SEQ ID NO: 177723 - DNA, 313 bp, Glycine max
taaaaagatgaaggaatacaacattttggagcttttttttggatagcaaaggtggattttattaaataaaaatacccgaggatctaaagatacattaaagttatagataagcgactagatatatgaatcaggctgtgtattagtctgatcaattcagaattctgaacaacaaatacaacaccttgccccatagagtttttgtttcctaattgcaaaaaccatctattatgttgctagacaacatcttggagttgatttctttctactaagccgtgaccaacatcagatgcaagtactatatatatgcccatgc

SEQ ID NO: 177724 - DNA, 385 bp, Glycine max
  unsure (1)..(385): unsure at all n locations
actttaccctaagacctcttggaataacagatctcattcatgacaccagtagctagcgcagggcccttcaaattattccctacggtagtcaaaatatcctagaaagaagaaccaccgtttgggttatgccacacgtacactactgaacaatacttactcacattgcacttctttattgcataagctatacattgcggagtcgagtcaaccaaagaaaacgagagatcataccttgaagtcaagatcccaatacctcccttgagacctcgagcttcatacagatattactcatgcacaatatgtttcaatcttaataagatggtttttccatctactgatgattntaaagaactaaaacaagcgcattataaattaaagaaatgat

SEQ ID NO: 177725 - DNA, 174 bp, Glycine max
aacgatttatagacgtgtgttacactatgaaaatgtgtcatttgtgggctgtggagaagtatacacaagctattaatagcttctatattaacctatatcgatccaagcacacatagaatatactgcttgattacatagaagtagaacgagtctttctgtgtttatctaagactc

SEQ ID NO: 177726 - DNA, 407 bp, Glycine max
  unsure (1)..(407): unsure at all n locations
cgaatgaatcaaaagatgtaactcttcaaatgagtcttgactctttcaaattggttgtaagtttttctaaaagttataactcttcaaaatggtcctcttgacaagacatgaagagtctataaaagcaagactctgttttggattcaatttattcattcaatctttcaaagaatctttctatccaatcaattcattacaatcctttacaagccttgaatctctttgaacttcttcttcttctntgtgtcaaaagctttccaaagctttctgggttttctaaaccttgaaaacttgcgctattctttcttttcatctcttctccctttgccacaaagaattcaccaacgactaaccgcctgaattctttttgtgccttcttctccttttccaaagaccaaggactgctg

SEQ ID NO: 177727 - DNA, 488 bp, Glycine max
  unsure (1)..(488): unsure at all n locations
agctntactgactagagactactatgcattttatatctttttgaaagnattnngctcacgccatatgctattgaaaggaagtgaaacaaatattatgactgatctatgttatgacagagttgacaataatttgaactatacagctcgctaatatctaatcctggtgattggagccatgacccatccaatgcaaattatttcttatactttcgagagcctcatctttntataggttcatggtcaaatcaagtatctntagtatccggtgtcatgttctatatacatatatgcctcgcttgaacaacttttctaggtggaaattatgcattagatactacgaataaattttggtgttacagaaattacgtacaattaactaatggcataattagtcacattctccattcgagactatggcatntgaatatgngtaatgtatgcccattttatgctttattttatttggttagatacatatactctgtatt

SEQ ID NO: 177728 - DNA, 481 bp, Glycine max
  unsure (1)..(481): unsure at all n locations
agcttgnctggcattactcatatcatagtttgataatgttatgagacggctnngnnggtgagttgtatcaattaacttgctatattgaaccttcatgtgaagcttacactgaatgtaactctcattatttataccttggctgattggatgtgtgaagttctgagtaagatgtctaggaataccatgtgtcatgaatcaactattccaaaagcttaagctattaggtaaagacacgtgaatggttatatattatatttctaacatgccctctcatgtacattcctttaggcttgaggtgtggacaatgcacaggtctacctaccttgtgctaaagttaaacctatagttttttcatttatgataggggacacagagaacaaagtctcgctacttggcataaaggctctgtatttttttctgatcggcaacagttcatatatatataatattagatcagacacgtggtctgttgatatcacct

SEQ ID NO: 177729 - DNA, 401 bp, Glycine max
  unsure (1)..(401): unsure at all n locations
gacaaagangatgacgaagggcccaaagaatgatttccagaccgcgtcacacaagttcaagatcaagtttaatttcaagtttcatgagaagaaatcaagaagattcaagaatcaagagaagatggatttcaagattcaaaagaagatgatttcaagattcaaaagaagatgaattcaagattcaagagaagaaatcaagaagacttcacaagggaagtattaaaaagatttttcanaacacaacatagcacaattttgtttttcaaaagagtgtttctcataattttcaaaggtactagagtttttactctctggtaatcaattaccagttctttgtaatcgattaccagtggcaaagtttgatttcaaaagttntcaactggaattggcacgttccaatt

SEQ ID NO: 177730 - DNA, 439 bp, Glycine max
gatttactctgagtagggaatctatacttcctaagattgtgtttattctaattccctcattaagaactagctcattgcttcctgtattgcttttatacgcatacacctttgtttggttctctatttgggtcctaaccctctcatgcaacttctttacaaactccgacctacatgtcccttctttatgtataaaagaagtgtctcgtgggaggagaattaggcgtaacggtgtcataggattgaacccataaactacctcaaaaggggattgcctggtggtcctatgaaccccacctgttgtaggcaaattttacatgacgaagaacttattccagacttatggttgcctttaaataacccttaaagggggatagaaactatcactacctctattgcctatatctgggatggcagggtgacaaaaaactatttccactta

SEQ ID NO: 177731 - DNA, 102 bp, Glycine max
gaaaggaccgaaaccaccaacgatgggccccccaaacgaggaccggcccgagcaaacgaaaaaaacagaaaaaacaccggccaaaagacgaaacacaaccca

SEQ ID NO: 177732 - DNA, 398 bp, Glycine max
agacgtggggtagtcatgactgcttatgaaaccaattaattgtacaccaagagaatttcaaatgagacctccaaacccaacatcaccaagattgccaagcgagcctccctcaacattgagtttgacaaagttatcaggggggatccatttgatgtagcggcattgcttattgacaacatgcttggaaaagaccttctagatgtcatggaatgttgatttagacttgttgatcaggaaccacaaagaacattgcttgtcatttaaaacaacatcatttttggacctccaaagaaaccaacagatggttgaaaagagttggcatctatcaccttgtgtgttcgtttcgaaccattgagagttgatttagccttagttcacttagttattagtcaatcaat

SEQ ID NO: 177733 - DNA, 396 bp, Glycine max
ggccacccaactcgcccaggcaagcaaggttgcttcctctatattcatcagccttctggaggaatcttctggagggcccaagtgggcctggttgctatttgcacccccatttttactaaatacacccactgccttcttttggtgaatcttttttcgtaaagttacggaaacttacgaatttcgtaacgataacttgttttctttccgtaatgttacggaaccttgcggattacataatcatccccttttttgacttacggaatgttacggaacctcactaattgtgcaacgatgcttccatttgatttccgatgtgtcacggaaccttacggatggcgcattaatattctcttttgatatccggaccgcacagaatttcacaaattgcctaatgat

SEQ ID NO: 177734 - DNA, 187 bp, Glycine max
gacgacggagaggacgcacatttatacgtgcagccctacgaagccagaaccaagaatcacccagctgacgtaccaaacaacgaagcgcacgagaaaacgcatgctcaatatccagcaaggagagagtacctagccttcgacccagggcaaaaacctcaccagaaagagccgcacaaacgagacaaaa

SEQ ID NO: 177735 - DNA, 392 bp, Glycine max
ctataagcgcgggtctgagagacaaaggtcaagtggtttctatatacgaagatgatgctccgagtacattagattcggtacgaccatgccctcctgatttccagctgggaaattggcgagtggaggaacgccccggcatttacgcaacgagcataatgcaaacctttacggtttaaaagctctatagctgggcctacgctgtagagttttcccttttggtaaagctctgtgactcttggtgctgacttcataatacaaggatctttctttatgctggcctacgtctctacccatcctcattcatttgcatgttgacttccttttctgaaacggctgatccgatgacgagtcccgcgaaggttctaatacctgagacccgccctatcgacttc

SEQ ID NO: 177736 - DNA, 381 bp, Glycine max
tgacactctgaatactctcgcttctacttccatggcttattcactagtggttggttccttctttctcctcttctgctttatcttccactgcgtctccatggcttataatcaccattgaacgacctcattgtagctcatagaatcagcctccatacaagcttctcacgtaagaatacatcaagtggtatcagagcacatgagcttcaagaggtgctccttaaacctccattaaccgccattcttgattgttcatttatctccatgtatttcctcacatgtgttgcgtggaacgctgtaacgtgaatctttacaatctccactaattcgacgtggtatagaagctacaggtgagtgcctatggtttaatttcgagtcctgttc

SEQ ID NO: 177737 - DNA, 345 bp, Glycine max
  unsure (1)..(345): unsure at all n locations
ttctttaaaatgagaagttcaattcatcgtatttatacgaggtgaatgagaaaaatattaacaattaaagaaaaaattattgcttccaaatgttatggacaaatatgtttttaatccttgcaaaatgagcgagttttaattctgacctctataaaaatattatttatttgttattcctctaaaacttgaaatggtcaatttggtccttataaattaacaaattgtggtctttgtatttatagggtttactattntttaatccctaaactgttctttatctacttttaatcattcaagttctcgttccagccaaaattgtaatcccttagctntattttcatccta

SEQ ID NO: 177738 - DNA, 410 bp, Glycine max
ttcattcaattcaatcgacaacactgtaggtcacatcagaaacaaccactgaatatcattcaagtctatgttcaatcatgcttcttacatatctacaaacgtactactgaaattctagatttgattgaaatcgtaagataactaaaacatagtcatgaattgacctaaacattctataataaactgttcatagtgcagaaattaaaaattccgatcctgtgagtgaacctgtgcatgctgattctagaccaacattggtgcaaatggtggatcttgaacaatgggctgatcacgcactgacgctggatcatatggctgtggatcattatgaaccgtacctgtgaatgattgagaatgggctctactgatgcacctcctcctgacactaccacatcagtctataaacaaac

SEQ ID NO: 177739 - DNA, 429 bp, Glycine max
  unsure (1)..(429): unsure at all n locations
agcttcggtattccatttcgagcgtctctatatatttctagactcaatnggacatccgagtaaaaatttattgtcgtttgaatttgctcagagcttctacattcaatttcgagcttttcgatatattacgggactcaatcagacatccgagtaaaaagttattgtcgtttgaatntgctcagagcttcagtaatccatttagagtgtctcgatatattacaggactcaatcagacatccgagttaaaatttattgtcgtttgaatttgctcagagctacaacattcaatttcaagcgttccgatatattacgggactcaatcagacatccgagtaaaaagttattgttgtttgaatntgctcagagctncggtattccatttcgagcatctcgatattttacgggactcaatcagacatccgagtaaaa

SEQ ID NO: 177740 - DNA, 481 bp, Glycine max
tggagcatattcatacgacaataactgtgtactcggatgtctgtttgagtcccgcaatatatcgagacgctcgaaatggaataccgaagccctgagcacattcaaacgacaataactttttactcggatgtctgattgagtcccgtaatacatcgagacgctcgaaacggaataccgaagccctgagcaaattcaaacgacaataactttctactcggatgtctgattgagtcccgtaatatatcgagatgctcgaaatggaataccgaagctctgagcaaattcaaacaacaataactgtttactcggatgtccgattgagtcccgtaatatatcgagacgctcgaaatggaataccgaagccctgagcaaattcgaactacaataacttgttactcagatgtccgactgagtcgcgtaatatatcgaaaagctcgaaatcgattgtagaagctttgagcaaactcaaacgacaataacc

SEQ ID NO: 177741 - DNA, 391 bp, Glycine max
  unsure (1)..(391): unsure at all n locations
gggtccgaaaagaggcaaatttgatcatcctactatgacgactgataaaactggggcaaatgaaaagggtgagaaagagggagaaacccatgttgtgactgccattcctatacggccaagtttcccaccaacccaacaatatcattactcagccaataacaaacctcctccttacccaccgcccagttgtccacaaaggccatccctaaatcaaccacaaagcctgtctaccgcacttccaatgacgaacaccacctttagcacaaaccaaaaacaccaaccaagatatgaaattngcaacgagaaagcctgtagaattcaccccaatttcagtgtcctatgctgactngctcccatatctacttgataattcaatggtagccataaccct

SEQ ID NO: 177742 - DNA, 322 bp, Glycine max
  unsure (1)..(322): unsure at all n locations
gcttcacctttgaactatacccctgtgccaaatagaantcatcttgttgccttttttngcccacaagccttacaaatgggacacatatgttcatctaaagcctacaattacctaatgctatctaatcctaagacttgagctcttacggagcaaaacaacgtgtgcctcctaaagagggcatcatctaccacatttgtttttcccttttggtatttgacaacatatggaaatttctctatgcaccctacccattttgtatgccttttgtttaacttgctttgccctctaatgtaattaaatgattcatgatcactatgaatga

SEQ ID NO: 177743 - DNA, 435 bp, Glycine max
  unsure (1)..(435): unsure at all n locations
taatagtgaccnatgaccgttgttttttctgctatcttggaaaagtgcatcaacaacttttcatccctagaatgcgcccncatcttgcgacaatacatcttcagatggttcttaagacaagtcgcccctttgtacttgtcaaaatcaggtaccttgaattttggggggataacgacgtccggtaccaagcaaagatccgccatgtccacgaacggatagtcgccaaagccttcaacaactctcaatctctcttcgatgagatcgagtttccttctttcttccgctgccgggggtggtccttttgtggacaagaatattggttgtgctgtgaaggtgggctaaggcagtatgttgtgtgcccgcccctcgatggggaccgtggggtagaaatcgatgtctcctttggcacagtctctatgatcctcggaacctcgt

SEQ ID NO: 177744 - DNA, 461 bp, Glycine max
  unsure (1)..(461): unsure at all n locations
agctntgaattcattcaatgcacccttatgggtctattcttgctctgnatgttttcatcttcatctcatctactntcggttttctttttcttcattttaagtgattttcgaccgatcgtttaagccataacctcacttaatcaatgttaaaatgaattccgaccgatcgtttgcattgaaactaatttaatcgcctttaaaataaaattcaaccgattgtttgtgttgtaacctcgattaatcattaaaaaggcaagtttcaaaccggacatttactttgaaaatgagttaggaaataaccaagtaaaactaaggctaaaatcaactcacaaatcaagcttttgcccgcaaaaaggtcattttaaaccgtttcaaggtccaacgccttaacggtcttttacttttattggattaaaatgaaccgttaanagtctaaaatcaaacaccccgcataacttttt

SEQ ID NO: 177745 - DNA, 385 bp, Glycine max
  unsure (1)..(385): unsure at all n locations
ntctacaacccaagtattattttttaccaagcctcttctatttgtaaataagtcagcaaattttttgaaggttaagtgcacacaaacaatgctatcattgtatagacgaatatctgacttaagcacaattttgttctactctcaggatttacaacatattttgagagtttttataacttagaatttatttaaaaagggcttgaaggtaggagagaatgctttattcaaaagtttgtgttcttcaaaaacttctagtgtttatagacttcttcaacatgtaatcattatctctaaacggtcttcaaaatgagtctgatctttcatcagaagaaggtgtatgttggtgcattaaatgtgtgtttgttccttgctaatacaccaatct

SEQ ID NO: 177746 - DNA, 406 bp, Glycine max
agcttgctgagatgtcactaatacattttttttgtattttgtccatataaccagcagtataaaacgggaactcaatatgtcttccagatcaacattctataaaatgggaactcaatatgtctttatttacttttttctatcaggcagatatcatatatgtttcatctattagattaaaaattaacttttgtagtgtattattctcacatacaaacaaaaatttacacataaaaaaatcaaacacaaatttttgtgttaaacaaattatttcttcatatatgaaggttgcgcttacttttacatcaaaggccaattgataatagggaaacgggagatatatattccaactatcgctaaaatagtgttcctgatgattcataacttatagaaaaaacatgtgatctat

SEQ ID NO: 177747 - DNA, 344 bp, Glycine max
  unsure (1)..(344): unsure at all n locations
ggtcatgtnaaacattcgttatcgattgaaaatatactttttactgagttctttacacacatcacgcactacacggaggcaccaaagcatgcaatactgcataactatctgggtttgctatctgtccttgcgtcacacgataccactgcttactgtacatagatggacgtccttattttatgtattctgaaagctgtgtgaagtgagcatttgacacttaaacctttgggttcaaatcataaagcacattcttcaacaacacatattttaagatcaaatctccccaatactcactctttgcaatcaatatctgttacaatgtaacaatatgtatcctcaattgt

SEQ ID NO: 177748 - DNA, 458 bp, Glycine max
  unsure (1)..(458): unsure at all n locations
taagtcacctgcngctgcaagctggtcttagcataactgctcatgctcnntcttattgcttattatgaaatcgatgtgttattatgtcttgatcggagtgtgtgattcttgtgtattgtgattgatgattgaaaggtttgattgatgatttaaaagtgaactttgaatgataaagtgataaaataatgtgaaatatgctaagtaaattgtatttggctactatatgttgttctttttctctattaggaatgtgataactcactccctcgttgttgcttgtgtttgaatcctgtgatgatcttgaaccttgtgttcgggggagcagatgactaggtgaagtgcttaaaggaaccttgtgctgaaggacgtcgggacacaatgctctgatatgatgtgacagtggggcatatagtttatattaatcgcataatgttagtctattttactttatctcactg

SEQ ID NO: 177749 - DNA, 405 bp, Glycine max
ctagcacttacatatttcatatgaattaagttgtgatttctactgataatatcatcacttatgtgagtgcaaatacaccaatacaagatacttctgacagtataaaattgtcaaaaatttctcacaacagaaaaattaaagaaattgcgatgtgttcaaacttattatattctcagttacttctgacatgtcttgatatatatatagtttaacagatttaccgaaagaagctgatactttcattttctgcattattggcttatttaataactttgataagctattcatactctatgattatgattgtatcattaccaccttgatccataatcaactaatgcaatcatcggcattattcaaataaaccattgccgtataattgctgccatatgaaattgagaatga

SEQ ID NO: 177750 - DNA, 360 bp, Glycine max
gctgatatgttggggaagtgtttcatcttattgctcgtcatgaagacgacaacctttaatcgatgtgtgctaaatataaaccgactcgttaaacatttatttcgccctgtgaacaagagctatgctcgacatatcttctgcgtatctaggaaaaaaagaaagtgaattgtattctctacgaaaaaaggaatcttatgttttttctttacgtctttatgtcaccaacggcgttgcccccgctcgtacatacttcttcgtgccatgagaaaattaaacttacatagctctctgggcctaacacactctgagctgtgagttgatttctctcgaacgattcgtctaattggggacacaagtcct

SEQ ID NO: 177751 - DNA, 446 bp, Glycine max
agccagtaaaatccttgcaacttggttttctttactcagtacaaatgaaaacgctgttacacatacacatacacacacttataaatcatatagcgtctatctacgcttacaaaaatcagaagacgtatgttagcatctatcaccctttatgttggacaaaataaataccttctttttccatgtacatctagcatgttttaaacgatactcgcataattttattctatctaacaaatgctaattatggaatgacacaaaagctccttttctatttcccactatcgtgtctcgcatgaaatctagtggctcctacatatgcttttctaaattcgccccaagcttcattttggaataacaaaatctaaatttatcatgacctaatagtgggaagaaaatcaccactccacaaatgttgatcatattgaagctaaaacatccaacgtcct

SEQ ID NO: 177752 - DNA, 442 bp, Glycine max
  unsure (1)..(442): unsure at all n locations
gcaagcttatgcattcaatatcctaatgagggtgttttcatatgttctcaagactggactaatacatctgctgcccaagtttcatggtcttgcaggtgaagatcctcataagcatcttaaggagttccatattgtttgttccaccatgaagccccctgatgtccaagaagatcatatctttctaaaggcttttcctcattctttggagggagtggcaaaagattggctctactaccttgcccctagaaattcttccctgcatctaggaccactgccatcagaaaagacatttcaggcatcaggcaacttattagagagagcttgtatgagtactgnganagattcaagatattgtgtgcaagctgtcctcaccaccagatntctgagcaacttcttctgcaatatttctatgagggacttagcaacatggagaggagtatga

SEQ ID NO: 177753 - DNA, 322 bp, Glycine max
  unsure (1)..(322): unsure at all n locations
gcttcctctatacctattgaagataattctccatgcataatgngaccttctctgaggaaggttgtctgtctctcatcaataagagcagatataactagcctcagtctatttgctagtaacttggctatgaccttgtacatacagccaatcaaggagattggtctatagtcatcaaaagtctgagggtgattaattttgggaattagagccaggaatgaagcattgctgcctttagggaagcaaccatggacatgaaactcatctacaaatcttctgaagtcagaatttaccacctcccaaaattctttattgaaattgaagt

SEQ ID NO: 177754 - DNA, 365 bp, Glycine max
  unsure (1)..(365): unsure at all n locations
tgctagccagaggctntcctcctgatttgatcacttataatgtcttcattgatggtctccacaagttgggcaacttgaaagaagcaagtgaacctgcgaagaaaatgctctacaatggactngttccacatcatgttacatatactagcatcatccatgctcacttgatggctgggcatcttaggaaggctagagcattgttccttgagatgttgagcaaagggatatttccttcagttgtcacttacactgttcttattcattcatatgcagttaggggaaggctgaaactcgctattccgcacttttttgagatgcatgagataggtgtacatccaaatgtgatcacctacaatgctttaatc

SEQ ID NO: 177755 - DNA, 425 bp, Glycine max
  unsure (1)..(425): unsure at all n locations
tccttatagtcacctgcggcatgcaagcttgagatgatgaagtgtagaagggttattcttttctgctnntattcgnagaccacagagtggtacctggagatatgtcgcgggggtcacgagaccttggggacgtcaagtggggtgctattgcccaaaaccaagctngaccaatcccgacccaccccgggcatagtcagtctgtgagaacctgtgatgtacctaaacaggcgagctcctggcagtcaacagataaaaggaaccaagaccacaaagcaaggaggcttgtgtggtggctggccagctatgaacttgattgatatgtgagatatggcctctggtaatcgattaccaagggtgggtaattgattacaaggcttaaaaatgaagacaggaggctaagatagtctctagtaatcgattaccaa

SEQ ID NO: 177756 - DNA, 343 bp, Glycine max
ctgaaatagcttatggcttgagaatcaatatctgctgaatgccttcttgcagcaaaaggacatgctgaacaatggaacatatgtgctgctgatatcttgaactacggaccattgcagatccctctctgctacctatggctgcctataggcgttaatccgaaaaggaaggcggtttgggaacctattatcaataaatccgagactagatagaacaaatggaggcagagaagcatttcaatggctggtagaatcaccctatcgaatgctgccttaatagctttgcccttgttatacatgtcctttttcatggccactctagcagtaattaacaagctcattacca

SEQ ID NO: 177757 - DNA, 338 bp, Glycine max
accatccttagcagatcatgggtaaatgaagttcttaatgtacaagagctttcctcaccttgataatatgcttagcagatctgacaacaatttcattattacaaagatcccacagatgaggtagatgtttagtccctccagccacctttacagaaaagtgggcattcagaagtaataaaagaattatcaaaagtacgcaagcaaaccaccatatatattaaacggagcgtaattcactttatcagctccaaaaagaataattacagcagtatttcagtataccaaaatacacagtgcttacttggccaatatagcgaacattaattccatgagcatgc

SEQ ID NO: 177758 - DNA, 376 bp, Glycine max
  unsure (1)..(376): unsure at all n locations
ggatcttaagtcacctgangctcaagcttggttaggtacacccttctgttgttatgacaattgcactccatgtgttcaagaatagccaaacaagaagtcctatattattaacacgctaacgcctaataatgtaacttataagcagtagcagcaaaaaaatntatcaagaggacacatatggagactgttgacaacataccttcagccagtcatacatagtcaaagatgttgttgtgcaagaccaatctagcacgcatctcaattcataaagaaaaggtatagcacgatatagtcgaaaacccaaaacattaattcgagaaacactacttgtcaaaaactgcctgtacaaagtgctcttgtgtggaataccaaaatg

SEQ ID NO: 177759 - DNA, 435 bp, Glycine max
tctataaaaatatttctagaagaaagaaataataagattttctattttatgagtttttttataaactaaaataaattattcattagttaatttataaatatcacttgattttttaaggaaaatatgagaaattttttataaattagttgataaaaaatcattttaactcataaaagattttatcttatttttttaattaaaagtatttttaaagaaacttatcaaaacaaccactataaaacagtcttaagacataaactatgaacaacaaaggttatagagtctagtgagttggagaattgaagatgcatatgcagatggaagtgtgctccaatcgctcttttctcagctttgcaagaatctctctctgactgcgtcagcctttgtgctggtcgtacttccgaccgtcttattaccaaatgacgaacccctttc

SEQ ID NO: 177760 - DNA, 455 bp, Glycine max
  unsure (1)..(455): unsure at all n locations
ctaaccttcatgggtttcttcaaggtaaccatgattctaagctttttccttggtagtttaagcttatccttgcatcattttctgactttggaaccaccattgtatgttttacgcttcctttgaaaaaccctaaagaaatagactttatgaaagttatcctttttctgaaatgggtgctattttcgtgaccttcaatgaaccccggtcgcattggcgtgatcggaacttcaaaatgattcttccttttgagaacccgaaataccccttagccttttcatgtagtaacatgagtataggactcacgatatcgttgtcaactttatttctgaaatccattgtatnttccttcattttgacgtatagagacttgcgttggaccgacaagcatgaatgagatagagacctctaagtgacacatagaggaaaccggcatggagctcacgataggtgaggag

SEQ ID NO: 177761 - DNA, 289 bp, Glycine max
gtatcatcacctttacccacccgagaatgcttggtggtctatcctaaacagaagattggtacttcacaacatcgcatcattgttttgccctctaatcacgagtgttactaggtgcatccatcattattgttggtgcaccgcacttatataaaaaaatgatataagcgttcttgcctgatcttgctactaggatcaaggtgttctaaacaaaaacaagcatctcctataactaccaagacatcaaagaatcgttcagacgcgactaactgtaatcaacgatgccaataac

SEQ ID NO: 177762 - DNA, 424 bp, Glycine max
agtcacctgaggcatgaagcttgagcgggctaaccaatgtgacctttttataatctaggatcactctgttttaggcatatccctgatcagttaagatggaagctagatgataatggtgaacaaatgatcttactcggatatcactcaactagaggctataagttgtttgatccgaagagtaagcagataataatcagtagggacgtggtatttgatgaatctagaagctggaactgggagcagaatactgaaatgaagggaccttcaataatgataaggtcagaagaggaagaaactagtgaagggaatggttataccactcatagagaagcgagactccagagaaatgcacccaaaccagctagattcaagggtttgagatgttgtttgatgctgatgtaagtgcagatgggaatcttgtaca

SEQ ID NO: 177763 - DNA, 409 bp, Glycine max
atactcaagcttctatacagccatcaatagtccctgtgtgctttttatctttcatctttacataaggatcttgaacatttctccctccaaaccttgcaacaaggctaccttaaaattgtgctaagccaaaggtgcctcagctactcttatgtattgtgtggatcgatggaattacaaaaggaaaaaaaataattgctctttaattggttggctagagtaaaaagagaatgaaaagaaattggcttaattactaagcatacaacctttccctctaatattatatattataattatataataaaaaaagcacaccaaagtttgttgtacaggggctgccatctctttctcttgtcctctgggtggtgaaattgatatgcatgcattgtgttacattctcgctgctttattt

SEQ ID NO: 177764 - DNA, 382 bp, Glycine max
taagcttggagctaccttatggacaaattgttggtattgaccataacctagatattgttgatcaaaagacttaaatgagcagagagaggtagagtctttagatacgatttgacttagctatatcttgtaagccatgatagctgatgcctaagtgaaaatcccttaaatgttgctttatggttaagagtagacctttaagcattatagacatgattggatgtgagatcaccttaattcattagttggtatgttgaagtcaccacgaactttgacgagatccggatgtataattgaccattcttgtacccatagagtcatatcgcaggaagaaatttttaagaggaacgagatcttgagttagaaggtggcgtctatgaccaac

SEQ ID NO: 177765 - DNA, 337 bp, Glycine max
actaagcttacaagcccttgaccttggctggtatctttcatcttctttactaaatgagcatgggcttgggtgataaatggacatggtccttcctaatggatcctgcatgtgagccttccaccatatgtgcttcaaacgacacctttctcaatgtgtaacccatggcagtgcgcccgatatgctgaagttatatacataggctgcctcatcaattgcatcaactatgtgcagcacatactttgttttgtcacctgcatatgcacccattaattcatctaattaaaaacatgactaatgtcattaatttgtactatgatctataattaagggttaaata

SEQ ID NO: 177766 - DNA, 107 bp, Glycine max
  unsure (1)..(107): unsure at all n locations
aaaaaaaaaaaaaaaggaggatgtgtgctgcaacaggaaaaaccaccacccggcgcccacaaaaccgcttccanaaaaaacacacccggcaggaacccaccccacaa

SEQ ID NO: 177767 - DNA, 385 bp, Glycine max
  unsure (1)..(385): unsure at all n locations
aatttcaacgntcaagggcactggtaatcgattaccaaaacattgtaatcgattacagctttttgaaaataattggaacgttgtaaattcatgttgaaaactttntcaaactctatttgctactggtaatcgactacaacaatatgataatcgattaccagagagtaaaaactctctggcaaaagtttttctcaaaaatccatgtgctattcaaagtattgaaaaaacttttaatacttatcttgattgagccttctctttattcttgaatcttgagtcttgaatcttgatcttgattcttgagatcttgaaccttgaatgttgattctcgttttagactttcatcttgagttcttgaattctacctgattttattatgaaccta

SEQ ID NO: 177768 - DNA, 457 bp, Glycine max
  unsure (1)..(457): unsure at all n locations
ctgcagctgtccatttcttaattatattttttgttttttcttctaagattaatgtcaaatccgcttgataaaaaactataactgaatgaatggcaaacgtaacatttctaattcatttcatcaatatgtttgtatataagttgcaatggatattctctcattccaatgcataaaatgcaaaagtaacaaaattattatttttgcattttatgcattggaaaaatagaaattaagttgataaagtctccacaaacacatgctatatnntggagttttcttttcattctaagctttccatgttgttgcatttgtcaaacgctaagagatatttggtttaagataatatnnttatttacttttcgaaaacaaaaaatgaaacaagaaaataataataattttataactatttctacaaactcttaaaaatacgaagcaaagaaaaataatgtgtcacttt

SEQ ID NO: 177769 - DNA, 322 bp, Glycine max
ttaacagagttgaccacacacgcatatagatgacgaaatgtatatccttctttgataattatgccacgaatgaatatgattctcaaatcaactgcctaatttcttactcctaacctaacttgagatcaaacaatatcttcaagctcaacattcatgttggcgatgtaaccgcaagatgactattatcccaatgcgcgttctgctttcgcatgcgaattaagccgtgaacccaaacttaccaggattgtcttcctacttgcctgataaaggaaccactttcaatctttcggattataggtcatcgtgggcttggatcacctta

SEQ ID NO: 177770 - DNA, 389 bp, Glycine max
gcctatttggtggtcacttctctaccacaattatgggtatgcctaaatgtctttatctgaaaagagtttctaacttcattctttgcacagtagatttccccatcacaaaatgccttcttgcattttgctctagcccctctgttatcattcttctttcacttgaactccctgcccatcaatatgctatactcccttcagggcagattaaattcatctagagtaccaaactccatccctaattcaacttctgtcaccaacctcactactttgactatattgaggatagaactcaacatccttatcttcatcatcactactaatggggatattaagctcctctgaatgataaccatctgtctcaacttcagcttcaacttcattcatcatac

SEQ ID NO: 177771 - DNA, 387 bp, Glycine max
tatccttatggcttgcctccggacttcactccctgtgtttttctcggaagatttaagacaagccctacttttgaggggcaactcccgccttatgacgactatcccgggcaagacgatgatgaaggagatacccatctcggccccctgctccacctcaaagatccgtccccacatgaactaccccaaccgaacatagtccgccatattccggcctcacccacacctgtaaaagaatctgttcccttcgtggaagataagggaaagattgaggcgcttgaagagaggttgagagcagtcgatggcctcggcaattacccattctcggatttagcagatttatgtctcgtgcccaacatcgtcgtccctcccaagttcaaagtaccgggc

SEQ ID NO: 177772 - DNA, 460 bp, Glycine max
  unsure (1)..(460): unsure at all n locations
tgcaagcttttattctaatatagagatccaaattcgtctttattgtcngaggctnatgggattaagatggtcattgactattccctattttatgatttaacccaattgccaagcgaaggtgtaccatttgaaggtgcattgattgatgattggaagtttgatttctttgtacatgatgcccgccggttggtttgcacctaccaagcggatatgaccggaatgcttcttgccggttcattggctattgaaagtcgcatcctccattaccttattgttcgcatcttgcttacgagatcttcaaacctagcttaagtttctgaagaagatcccattgtcatgtgggcctttcataaaggtatacacattgattgtgcacactcttgtagatatcacatgcataatgcattgcgattgaatgctccatagccttactcttatcttgttaccctttttcttcaac

SEQ ID NO: 177773 - DNA, 438 bp, Glycine max
  unsure (1)..(438): unsure at all n locations
ttctttgagcaaagcanaggcttgctctcgtttttctcttcatttaaatgccacattcttcttcactagctcattgagaggtgatgcaattgtagagaaattatgaacgaaccttctatagaagcttgctaacccatggaagctcctaatatctcccacactttttggggtgggccattcttggatggccttgattctctcagggtccacttggaccccatttctaccaactacaaaacctaagaaaactatattatctacacaaaaggtacacttctctatatttgcatagagggtgtttttcctaacgactgaaagaacttgtctgagatgtcctaagtgatcatctacgctcctactatacactaaaatatcatcaaaatatacacctacaaatctatctatgatatcccttaagacatgatgcataagcctcat

SEQ ID NO: 177774 - DNA, 459 bp, Glycine max
  unsure (1)..(459): unsure at all n locations
agcttattattattattattatcnaccagatttcttaacacgagaagaatatcttctttattaatacaatttattgtatatgcacggaccaatcaatattcgaatnttaattaaagaacaatattatggattaagggacaatattacctctatgttngtgatcgtttctcacacaattggcattaaatatcacactttattaccaacgggattttctcgttgggacatcaggtcatgtaagaagtttcatactttcagcattaaataatttgttattctagtttattggttatgtcgaattcatgctgttatccaacgttcgagtagattgattgaacgggtttttatggatattaaataattttgagagttgacatagacaaaaatgaagtagtcaatcgacaatatgtaanataaatcgacaacccaaatgactgattcagnnttttatcataatga

SEQ ID NO: 177775 - DNA, 431 bp, Glycine max
gtagtgatgatgatctgcaacttcactatacttctttatcttatagactctctggatatttatcctgcccaattattgatctgagtcatctgacattgctttcatggcttgataggatgtccttggaattaactctttcttcattgatccaatgtgtaaatggatgggtgcaaaattattatgggcactgagcaatcttattcgactttgtttgcatggcttgcactgctatcactaaccctatttccataagagattattctggaaggatagaacacgttattggagcaaatgaacaatcaacattgcttcctggttgcgttgttcttataggttcctatgcggaacgacaaagctttaatttcacactttactttcctataatcacccaattctttccttattaacctcatcatcaatctacttcgatt

SEQ ID NO: 177776 - DNA, 343 bp, Glycine max
ccccaattctacgtcattggagatttccgcttggactgatgaggtcaaagaaagggatgataaatacgtgagttctctcagaacggtgtcttttgatctgcaagaggtgcctataagagtccctcctgatagatctttggctccccagtggtacactctcgaatccgaaacctccgcggcaaatgacgtcatgctcgcctgttggatccggactcacgccgactatgctcttcatgatgcttggcagtcccacttcagcggtttgatacctgagacaatatctaaagtgtatctttctacctagctcttgtatcttagactaacgtgtcatcatacccatgac

SEQ ID NO: 177777 - DNA, 456 bp, Glycine max
  unsure (1)..(456): unsure at all n locations
agcttataagaacaaaattgcctcaatcancttctttatgcatgtgaatngggacgcatcaacaagaatcaagccaaggctattgtgcaagcaatcaatggggcaaaacacaccaaatgattatgatgatggatggctcacattctcacaaaggtaaaatcatcactttcaaatntagctntcaaaactatcatgacatgtagagaagaatcaaggatttcaagtcacaaaatgtcaagaacttttattttcaaaacaattacccatttcttgaacatatcctataattcaaagaaaaacatgcaaagtcgtacgtgcacacaaaattgacccaaaatattaaactaataatccgatgaaactaacaacattaacaaattaacacaactaacaaattaacaaaaccaacataactagcataatcaaagaacacttccncccatacttatacaacac

SEQ ID NO: 177778 - DNA, 410 bp, Glycine max
gtatacaagggagcaaaagatacaagtatcattctttgttagatatttggtcacaagagcgtgtgtgtatacaattcatggacttcatcacgttctgagttatacaaatcattctacaattcaaagatttatgcaaagatcattattcacagttagtcgtccactcatagagtatggccacactctcaccggtttttggttcaagctttcctttcacaatcagtctgtttagtgactaaccattcctttataaattcacactcttgttctttctctgttcaacatgcacttttgcttatactcatgaaaaggaacacaaattccatcaaaatcatgcatgtcacaatagcatacaccatttgtcacagaatgataaagtgttcactgcatgtcataaataaaagtaaact

SEQ ID NO: 177779 - DNA, 379 bp, Glycine max
  unsure (1)..(379): unsure at all n locations
gctgctcgtcttggaactctcacttctgttcncttttgtaaaggaatactggtactccttcactccaaattacttgatagttcccctcacattaatgatgtttatggtatgttttaactaaacacttagttcataaacttagaatttgatttataaccaagagagaatttaacccaatctcagtgaattaaataggatgtgtgagtcgctataaacttcatgctacattttcatttatgtatatatatatatataaacacgcgtttattaattttatctagaccatagaaataatgagtttggatcctctcccatcgatgtatccacattctctgtccagcaacgagcataagttcataaccattggatacatgcattc

SEQ ID NO: 177780 - DNA, 385 bp, Glycine max
accttaaaactcagctgtattggcctacttcgaaaactgctttctttttctctaccaagtgggcacattatttcgttacgactccacctcggcgacatgtgcacccatagatctctcctattatccacatggctcatttcaacactctcgctggatacattcagtcgaaagtagaatattcatcggatccgctcagcactatcaaaatacattaatcacactcgttcctgtacactgatcaatgttaagagctaataccgccggaaatccaatgttaagaactattttctgctcacttaccaaatgcgcttgatcctggtcaacaaactgattatcatcccatattctctaactattatcatctatatactcgggaatgtccctc

SEQ ID NO: 177781 - DNA, 231 bp, Glycine max
cactcggaccaaaattgtaaaaaaagacccaagcgattgggactaaagaaaaaaatcagaataatcacacaagttggatgaaaaatcagggtccaggaaaatacaagtgaaaaggaagtgtgctcgctgactgaactcaaaactatttccataaatggggcctactttataccactcctagtcctgaaacctcaatcgaaaataatgatgaaaacaagcgccacaaataca

SEQ ID NO: 177782 - DNA, 303 bp, Glycine max
  unsure (1)..(303): unsure at all n locations
tcatgagtgtcacacaaccccctcaatcgtatagcatattattgtttcatttaacactgtttaccagattactcacgtctncacataactattgctataatgattcctcatctcttactactttttatggaagcaatgctctccaagataattttgatgatgcccaaaactcaagtcaagaatcaagagtcacgaaagttttaagaatcaaagattcattctatcaagagcaagtttcaagaatcatagagtcgttcaatcaagattcaagattcaagtaaagattcaagagaagactcaatc

SEQ ID NO: 177783 - DNA, 397 bp, Glycine max
tctcgtctttctcaccttatctagacgccctcgccctcttttctcttctttctttctcgtcccctatcaaatgaagtaaaccaagttctggaaaacctaaatgcctccttgtgccctaaatcaccgagatcttcaagcattggtcagcgtaccgttctctatcaaacaaaggatttggttccaagcattttcagaaattgcactacaatcaactacgctggacacatcaaaccctactggcagagctacgtatcatacatttatcctcatgataataggcgttccacaaactactacaaatccaaaccgcgtgacgatggatggcgactggtacaaagctaatttaccacctatggctcgaactctaagccacttcaagtaaaaaatacctattccg

SEQ ID NO: 177784 - DNA, 277 bp, Glycine max
  unsure (1)..(277): unsure at all n locations
aacgaagacaacgtaaaaaaaaaaagagggagtgatgaactgaacgagaaagaacgaggacaacggcngcggacagtctcttcagcnccaacacggggacccgaaacggacccagaacaccacgccacaaccaccgacaaaacggcgcacaccccacaggacgcaagggcaaaccgctgaaaggccacccagcacgaccacaaccaggggaaacaacgcaacaagccccaacagccgcaaaccaaaacaacgaaacgcaaccgcgcaaacacaaggc

SEQ ID NO: 177785 - DNA, 386 bp, Glycine max
tactaactgcctgtccgatgcagtataatgatggccgattattttttttattggtacaacaccgaagggttatgcaaagaaacggcggcataatagctcgattaatgcaatgaaatcggggaaatatggttatgctataaacccactctgcggattgaataatacactcgggaagaaaatcctggcaaagctctcatcgagacaggaagttaagaagcccgctctgcacataagttgaagctttatatgcgcggtctgggaacgaatgtcagtggcccgatatacaatatgatctcccacacatttatttggatgaaatgcccttctatttcacctggtaattgtaagttgagacgccccgcatttatctccaacatatgtaacct

SEQ ID NO: 177786 - DNA, 368 bp, Glycine max
  unsure (1)..(368): unsure at all n locations
agccttgaacgccttactgcttctgctacttgctttgtgccagnnnagtcagtatggtagcagttcctgaaattgtggcgagaaatgtggcattcctgataaatctgtcgtggctgtcaacttctataggagtgtgctagagacaagatcattatggttataactcggctgccaggatatccgggtagattggatctatattgtgttgtattgcatgcggactcattgagtccttaaggtatggaggatggtctagaacacttcaatccataattcagttgcttaatttaaagattgggttttattataggaacatgttgaatgtacaccccacatttggggtgacaaggtgttgggaagagagatat

SEQ ID NO: 177787 - DNA, 334 bp, Glycine max
  unsure (1)..(334): unsure at all n locations
ncaaatctccatacataatctgcacgcgtgctatttggtttatggttcaacgtatatacatattatagaactgtttgtgtcactccattaacgcggcggccttttcggactttggaacacacgcaacaagacctctacactaaactccggaaagcgctccccgaataaaaataccgcaaaagcacattcgcaggaataaaaaaaacaaaacagtatgtcgataagtactttcaaaaacccattatggtgcatcccaaagagtactcgcaggaacacaaaaatcaacacaatattttggaaagtactctccacaacttatgactgcgtattacgg

SEQ ID NO: 177788 - DNA, 384 bp, Glycine max
  unsure (1)..(384): unsure at all n locations
agctcggnatgaaaggctaagctcattcctagttcataatggattcactagaggaataatggacactacactattcataaaggccgagaaaggaaaacttcttattgttcatatctatatagatgacataatctttggtgcaacctcaaaaaggatgtgcaaggatgtttctgagctaatgaaaggtgatattgatatgagtatgatgggtgagctaaatttattccaagggctttaaattatttagaaagaagattggagactcatncaccaagagaagtacacacacgacctattgaagaggttataatggaggaagccagacctatggctacccttatgcatccttccacaattcattgtaaggatgagaaatgtaatgat

SEQ ID NO: 177789 - DNA, 445 bp, Glycine max
  unsure (1)..(445): unsure at all n locations
gctgtgaaatgtcgagaagaaatcacattgcggtcatcctttctttgtggagaacgagaatgcatgtgtacatgatggtgatgatgtcaaatacaaatctaacaaggctgcttcatatgataagcatttgcttcaagattaattcaagattgcttcaacaaacaaagccttgtttcaagattcactatagaccaagccttgccttataacaaaggaatcacagccatgcaaggctctggtaatcgattaccacgaagtgctatcgattaccagaagacagggttgacatatagctgttgaaaaaggttctgaatttgattttcaacatgtaatcgattaccatatgtctgtaattgattaccagcaatggaactttggaaatccatantcataagtcatataccctcaaattataactgtgtaatcgattacacaaacatttgta

SEQ ID NO: 177790 - DNA, 446 bp, Glycine max
  unsure (1)..(446): unsure at all n locations
tgtactccagtcatccataaacttatgtggaacattcttctatgaatatcgntaatcatatatcataaggaatattagttatgagttaataaaaaagagattgtgtaattcaatttacttacatcatccgcaactgtagtatagatatgttcaaacattcgtcacctgatattatttcagttacatctgcatgtataatgaataaagatgcttgtacattaggaataccaaattttgtctcatcccacgacaactcaacaagcttttagtaaacatcaaacaagttcttaatcaattctcccaatggatcaactgtagtaactatattggacctttcaaaagctacaatctgttttgggacacgattatgtgaatcctatatggctaatgaatataacaattacgctaattttatgaaacaattttaacaatgtttcattcactca

SEQ ID NO: 177791 - DNA, 485 bp, Glycine max
  unsure (1)..(485): unsure at all n locations
gcagcttttggctaagtggctatttacaatcttttatggtctntatcatccttagatttatgcattcattccataattcagagattcatgccaaagccatcacccaatgttagtcatttctctcacaattaagatcacactctcaccgggttacggttaacgcattccttcacaatcaatctgacaaatcgactaaaattctcagtcataatcctaatttcatgttctttatcttctaatgactgcatgcttgttcaagacaaaagatctatgcattccacttcactcaattcatacaatttcttcattcaattcaatcaaaaacactgaatgtcacatcaaaagtcaaaccactaaataacattcaattcactgttcaatcatgcctttcacaagctacacacatactgaagtataaaattgactgagatttaacagctgaagcagaaacataaactatactataaacataataaagataaact

SEQ ID NO: 177792 - DNA, 298 bp, Glycine max
atccatcactctagcttagagatcctatcgctatcttgtacagtacacagacctatgtaaatattctctaataatgcacggaattaataatgagttcatgaaaaataaatgcaaagaatctgcacttacatcactaattccaccaagtcgacctctaataacttggataaaagaatactcctccttgccatcttcacgccagttggaaccatccaactacaatagaataagggcgaacacacttcaagaaccactgggcaattgcccagaaacactatactatatgccatgcataaca

SEQ ID NO: 177793 - DNA, 473 bp, Glycine max
  unsure (1)..(473): unsure at all n locations
gcttactcgatttattatttntattttgcttataagcctctccaagatacaaccaatattctctagaccattgtagacactacctacgtgattttttcaaaatccctcttccaaaattgaccatcagtagtacctatagctggacttccaaaattacttgttgtattcccaaagaactctagaaccaggagtcactagactactctcatgttctatttagtagctcctactaccaaacacacataacaacctattatgttccccaaaaacttcagaagtaacaatcacctatctacttttttgagatctttccttctaagcctagggggtggacaaacacttgttcggatttggcattaatggctccacctagagtgcttttggctaggaagtccattcaattaggtggtntttctactgacctctaccctatacntttgacaatcattctttgcaatatttcctatggatat

SEQ ID NO: 177794 - DNA, 483 bp, Glycine max
  unsure (1)..(483): unsure at all n locations
tgtaagattatggggtacccatcacatgtggtactatgtggtggtcgggcgatggtgcacaacaagttttccacatccacaaatcacgtataaacccaccatcctctgttgcccacctccaactgagctcacgtactcccacgtagcccatatcctcgtttctctcaacaccgggtccccatcaatcctcccaagctgtcccaacatccagntaattcaacatccaaatcatcacaaactaacaaaccaagcaaaacagggcaaacgcagaaaactctgcccaaaactcaaatgaaaatcacagctttttctcacttatagaccccagtaacatttccttcgttccaattccgtaaccgttggatcgactcgataaatttactggaagtctctagtacataattctacatttttaccggtgggatctactagaaaacatccaaaacgcattatgtactactctgtcacaaccagacaatcata

SEQ ID NO: 177795 - DNA, 358 bp, Glycine max
gattctgatgattcagctccgattaaagtgttcctcttggtgtgggggttcaacggcaagcaatgacaacttaccgcggtcaccgatggtcttgggtggtggaaaatgaggtattagggtttgggtggcattttggataagagaagagtgaaaaatcatgtttttcacattgaaaatgtatttataacttgcaaatctctcttagcaagctcatcttgctaatccggagtccacttttcatgcttagtgcgagaatttgtgatagcacaacttccactacactatggcttgcttagcgcgctcctgctcgctcaacaaaattctctctcgggttggaattgcgcttatcatgccatgc

SEQ ID NO: 177796 - DNA, 393 bp, Glycine max
gacccagttataacgtgccacgttagcatacaaattggttatcttctgttttcaaagacggtctgttaaaaccggtctcgtaaagcattgttcaagccggttttaaagtacccgcctttaaaaagctataatgatctacaaaaatgtcaccgctttatttactacatcggttgtcgtatgaccgacgtaaaaacagtgacgtacaaaatctctgttctagtagggtggcattgtcaacgatcatatagcagtgttaggactttccaaatgctatccctccgatgatgtggtcgattatgatattcgatcccaggaattgaccattatatgatgattgtcgcgtcgttctggccatgaagcatgaacatgcaatcgaaccgatgatagcgccta

SEQ ID NO: 177797 - DNA, 491 bp, Glycine max
  unsure (1)..(491): unsure at all n locations
agctttagcttctcaaggaagttttctcattgtttcttctcaagggaagtttcttaagaaagcttctcaaggaagctacctagtctataaatagaagcatgtgtaacacttgttgtaactttgatgaatgagagtcttgtgagacatacttcaaagttccacttctctctctcttttattccttcaatttcgtgctcccccctctctttctctccctctntcttttcctccattgaagcatccttccaagcttcttatccaaggcttatcttggtggtgaagctccttcttccatggcttattccctagtggatggcgcctcctttcacctcttctcctttgtcttccactgcatctccatgggagaaaaccaccattaaaggacctcattgaagctcatagatccagcctccatagaagctccacaagcaagcttccatcaattccttctnctcttctcagcatctcacactcactctctactcaataat

SEQ ID NO: 177798 - DNA, 450 bp, Glycine max
tacacaaagctgagaaatcaagtgatcatcaattccaattcatttgtggagtgaacaccaattttatacatatacattgcttgcttgtatcttgatttcaggacttatattgtcatcattcaaaaatggggagattgtataagtcaatgacttcggtgtcttgatgatgatttgacgcaaatgattcaaatgcgctttccaagtttaaattcatcacaatgattcaagaatacaatccacaacatcaagatgatcactacttttttatgaaacgaattcctaattgatatagcaaaatgtctggccaatctatttaagctaaaaagagttcttcacacacttactctcctggtatccatctccagacgatgcaatcaactcccgtggtccaaaatgttacaacagctattaaaatttgaattcaatttttactgtgaattgatacacata

SEQ ID NO: 177799 - DNA, 455 bp, Glycine max
  unsure (1)..(455): unsure at all n locations
agcttatgcacggaanatgtaattatgaattttatatgcctgaagaaacaccatttcctagttaaccatgcattaggtaccatgttcaattattttgttttgttgttggttgtttttttttttttttttttttttagaaatgggtttatgatcccaacattngtggctcatggtgcctaacacatgcaactaagaaggtagtgtgaagtttcacgcttccccttttttgtttttgttttgtagaggaaaacgcaaggatgagcaaacatgaaaacaaatggtatgcaattttgcatatcaaaaagtttgttgaacgcatatgcatgatgatgccatgactcatgcanaatgtgaggctggaatatgataacggacaaatgcacgaacgatatgttcattatgatgttatgaagagatgcttatgcgatgcatgatatgaacgcattttacggaca

SEQ ID NO: 177800 - DNA, 248 bp, Glycine max
aaccaaacacaacgacgaaacgaacagcgcggcggaagaaacaccaagggaaaaacaagggaggaaaagcaaaaaccgaaaggagcagccaagacaaaagggcgcaaaacaatagacaacaggaaacacagaacagcaagcagagcaaagggcaaaacaaaaggaagacaggaaaacaagcccgccagaaaaaccagaaaggcgggaagcatcagacgacaaacctacaacggagcaaacgcagcaaa

SEQ ID NO: 177801 - DNA, 405 bp, Glycine max
  unsure (1)..(405): unsure at all n locations
ctaacaggtagggctagcaatagtggataacgctaatggcctgaaagtcaaggtcgacgacgctgccataacaaactactggctgctacaatntcactttatgcgtactccttaaggtaattggacctcttagtagctctgtttggcctgttagtgagcttgctgatttctactatgtntgctcccctattgttattgctatgactagttaaaaataaatgttcccattaacaaattatcttttatttaatttaatcctaagtagctctctttgggcctcttagtagctctctttggcctcttagtagctttctttactttgtgttattataagaattgaacatcttgattgttgaaatagggaaagaaagaataaagaagtcatgttctaccaattgattatat

SEQ ID NO: 177802 - DNA, 328 bp, Glycine max
agacctcacagataaccagcttgtcaccatcaggggcaaacacaccaatgatatatgaggatggctcaaatctacaaagtaaaacatactttaaatgagcttcaaactatatgactgtgagaaaatcaagattcaagcacaaatgtcaaaactttatttcaaacattacccatttgacctatctatattcaagaaacatgcaaagcgacgtgccacaatgacccaatataactgaaatcgacaactacacatacaatacacactacaatacaacctcaacacaaacaaacctcccccccctataacacacatgctatggccataaaat

SEQ ID NO: 177803 - DNA, 404 bp, Glycine max
  unsure (1)..(404): unsure at all n locations
ntgcagatntggtcttacccagtgaaaagatctatgtttgtctttataaacgcgaaattgatcatcctactatgacgactgagaaaactggggcaaataaagagggtgaggatgatggagaaacccatgctgtgactgccattcctgtacggccaaatttcccaccaacccaacaatatttttactcagccaataacaaactttctccttacccaccacccagttatccacaaatgccatccctaaatctaccacaaagtctgtctaccgcactttcaatgacgaacaccacctttagcacaaaccaataacaccaaccaagaagtgaattttgcaacgagaaatcctgttaaattcaccccaatttcaatgtcctatgctgacttgtcccatatctacttgat

SEQ ID NO: 177804 - DNA, 213 bp, Glycine max
tgagaatggaccaacttgtcagggggcggcagggccacagcttctatcacagccgcaaaccactcccgtgccacccacgaccagacccacgagccaacccgtcttcacacggcccataaccttaacgtccacatcaacaacaaatcacccacagcacacagcacaacaagcaagcgaaacctgtaacaataaccaaacacgttttacgaaaac

SEQ ID NO: 177805 - DNA, 199 bp, Glycine max
tctccggagccacataattgtgactgctcacgcccggttcggtttttccactctagatgtcggaactgtgatacatgattctctaagacaacaccctcaagcaatgcactccattctcaccccggctgggagccccatgaatgaactgcggtgtcattcatgagaccggatattcgagctaggggctgacacgcatgat

SEQ ID NO: 177806 - DNA, 448 bp, Glycine max
  unsure (1)..(448): unsure at all n locations
tgcagctgcttatgcatgtgcctggagancttcatcacctgggctgaaacgttcttaatcttgaatataacaatatgttgggggtcagagaaaatattacgaagatgttatcaactattaagagcaatgtgttagtaagcaatgtatggctttattaggaccgatatatncaaaagatacaccattccaaaattttaatgatgtttcttgagaaagagaataatctggcctgttatgtgtgagcaaggactgtgataagatgcttatttttaagatgacagattctgtggctaataagtacggttgcattggtgtgattagtgcaacagaaatgatggaacttaaagaaatcttaacagataattgtattaattatttagccatttaggaatacattatttatgaactggctagtaaaatatggtatatgcagagtgtagtctcttta

SEQ ID NO: 177807 - DNA, 273 bp, Glycine max
  unsure (1)..(273): unsure at all n locations
taaaaaaaaaaaagaggagtgatgctctgcggcacanaaaacagctgagnngggaggaacaaagagaccaggccctctcctttcatgtngcacgaccaaaccatacaggggtaagtaaacacctactactcacgccttcgaatatatttcggataccctgcatacaccagctgcggggggcatgaaagcacgcactcaggggaccccaacgaagaccatattcgccgatgggggatgggattggggaggacaaacgggagaggaaaagcctgc

SEQ ID NO: 177808 - DNA, 477 bp, Glycine max
  unsure (1)..(477): unsure at all n locations
agcntggacctaatgcatggntaactagtgttatgacgttntctttgggccatcttaatctcataattacattttccatgcatagcatacgtattcctgagtctttcatctctatgaaatgttgtcaaagtattggcgatcaaaattgtcattccttgngttatagggttgaaccaagctcatgctnttacgaaaaaaggttcatcaagtcaagttgaagcagggaagtaaccatcttgcaaaaaatatggggcaaaagatggatcgggttacatcagttctttgtctactgtcaacatatggttgtgccaatntacaaaatanaacttgaggactattgatgtcaatggttttccaatttcactttgacaagacgcgactggaccatgttatttaatgaaaatctatattgattcaaccccgtgccctgtctaanaattgtagtacttcaataatgcatcattcacatacatccat

SEQ ID NO: 177809 - DNA, 463 bp, Glycine max
ttatggaaagctaaatcctccgttggttctttcttgttgtacttgatgtaaatacttgcatatctatttaatgatgttttgtgtgttcactattgtcgcaacctacctttcggcgggatggcgacgcgtgactcgcgggtgcgtcttccaagataggaatacgcgcggagtcgccaccaacgttaatttgaggaaaacgtcgaaaataccgaaaaagacgtgatctacgaacttaaagtgaaaagttcgggagttgtatttatgcacggcgaaggtattatcaccccacgcatccgtcacaagagacgacagcctctaattatatgtgcaaacatgacttcaattgttaagttcccttgtacgtctttattcccttatatattgtttatctcttcgcgggcgacgatggtatttaccttgctcctacgtatcccttacttggataaaggaatcagacctacat

SEQ ID NO: 177810 - DNA, 480 bp, Glycine max
  unsure (1)..(480): unsure at all n locations
agcttgaatagacatggtttcgaatctttttttcacaatcaccgtattttgtntatgcattccttgactaccttantttgtttatgcattctctaactatgttttacaatttgaactaccaagggttataaggttcctaaattctcaaaatttgcaggagaattaaaagaatctactatagaacatgtgacatgttttcaaatagaatgtggtgatttggccattgacaaatttctcaaaatgaaatattttcctagttctttaacaaaaaatgtttttacttggttcactattataccaccaaattcaatatatactngggcataacttgaaagatgttntcatgaacatttctttagagaanaaactaaggttagtctcatatagttgacaactatgaggcgtttcaatagtgaaacaattgaagaatattaaatatggtttaaaaatgaagcttggtgtatactcaaattctaacat

SEQ ID NO: 177811 - DNA, 472 bp, Glycine max
tctagcataacataccaattatataaatgcgcattcttttacgtagttactacaaatgaacatgcattatgccatgcctaaagaagaggatgcatttattgcatgaacaaacacttcaacctctcttgttaatgtcctacacaatacaatgcacccctattttatacgttggaccaaagcaatccaactgataagtgaaattttcataacaaccctctctacaaaagctcaataattaacagccccttcttccccttatggcaagatcgtgtatatattattatgcgtaattgcctatagtcacctaagaactaatcaatcaaatgtcaaacacataacctgaaaagtatacctctctttcccttatcatataccactccgacgtgatcactatccccttccttcttgatatagtctttcttatgcacaattttctcttgctcgaaagagaaagatccaaacgaacaataac

SEQ ID NO: 177812 - DNA, 485 bp, Glycine max
  unsure (1)..(485): unsure at all n locations
agctngtatctcaaacctatcatgcatatatttagtctcttgactctcctctgtaatcagaatttgcattcactntcaataaacaaaagttacttttctctcatgtcatatttctatagatcctgaaataaaaagtgatcagcacaacaaagtaattaaaggcatgggtaaatatagcaatcaattacattatctcaaaagcatcaacaaattaaacaataggaacattaacaatttaagggcctttttagctagggaaaacattttctatctttagatataattacaaaaatgccacacttgttttacgttgtttctagttctcaatatttcatacatgagatagtgaaaacaacatctaagaagataatccttacgtctcatattatatattatntagtaaaaaaggcagctcaagtagctatcattacgataaatcatctatatctatataaacananagtcatacttagtgttctaatgat

SEQ ID NO: 177813 - DNA, 406 bp, Glycine max
gacacttaaatctcagcttgtgacaaggaagaagaagaaaagccaaagtacgtcgtttcaatgtggaaaagatgcttgcaaaggttgtaagtgttgctcaaatgcaaatcaaggtcttgcttttatagactcttcatgtctggtcaagagaaccattagaagagttataacatttagaaaaacttgaaaacctttggaagagttacaacttgtgattttgttcagaaactatcactggtaatcgattaccaaatcagtgtaatcgattacacaaagcttttttgtgaaaggatgtgactcttcacatttgaatttgaatttcaacgttcaaacatactggtaatcgattaccaaatcattgtaattgattacaacattttgaaatcaattggaacacttgtaattc

SEQ ID NO: 177814 - DNA, 448 bp, Glycine max
  unsure (1)..(448): unsure at all n locations
ataaatataaaaaaaaataatttatccatttaacctcaaatgtttttatatgtttaaactaaaaatgacaatattgttataattacttagcttcaatatanttttacttttacaaatatgatgttattttatcttactttttaaaatttaatctttataaaactntaaattcacaaaatgatcttttttcactatttattgataatgtgatattatttggtgtgaaataattgaatgcatagcactactaattgaaacacaacnataatttaaaacaacttttaagaatgatattttaaatctctatcttaaaagtgaaaattatgattctaattttaaaaaagaattaggatgaaaaaaattgtctcatcatctgatccagttttaaagttcattttttttactataataaattttaaactacatgcggataacatctatttcagtt

SEQ ID NO: 177815 - DNA, 475 bp, Glycine max
  unsure (1)..(475): unsure at all n locations
gtacctttctttntccaatactcacaaaaatatcatctttgttttttacctcatgtcatgatatgaagaatgtgttttgctacaaagtactgatactttaatttgcttcatgcatctatatctgataccaatatattgatatatttcactggtacatatatgtgaagtgaccaattctttaaaaaaattatgataatcaaatatagtgacgtgtaacatagaagtaaggataatatagaaatataaaaagtatagtttctcgatgaaccaaatatgaaaattgtttcgtctatagataatttcaagatagaaatgagattgatcattgatagttccattcttatttgtgatcaataggaanaaacgaactacaactttgttgacttgtgtctaagtaatgtctaagaagtatgtatgttcttcaatttaccgcattgcagttgtatatttattattgccttatcaattcttacat

SEQ ID NO: 177816 - DNA, 134 bp, Glycine max
ccccggcactaacaaccgccaaggacacagcatataacaaggatcgaagccgcgaacaaaagggcgatccgacaacccccgaactagagaaaagagacacccaccggccccgagacacgaacccagggagcaga

SEQ ID NO: 177817 - DNA, 287 bp, Glycine max
  unsure (1)..(287): unsure at all n locations
tcccaatcctattatcgtatttctaaaaaataagggagtgtgttgatctgcncgcaaaaaaccactcatcaaaaaaaaggtcttcgtgccacaacccagtggggccaacaaacaatcttttgatacgaagaattaaaagccccaaagagaaaatggaaatcagacaaagaagtacaggggcagacagtatcactcggaccatccggtaaactacatgaaaggccctctgcaaattaaacacagagtacctgcaaccataactagcaatcccggttaatgcccgcgaa

SEQ ID NO: 177818 - DNA, 207 bp, Glycine max
acatcacaatgatgactcatacctacccaacaccatacgatcaatcgtcggcgctgaattagcatcggataacaactaaaatggttgttattgcccgcaaacccatgcgattgctgttaaatacacgaccaaatctttgaaaaatgctatattcaaggtctcttggtctaggcaagatataacagttcgacttacccaccatatttt

SEQ ID NO: 177819 - DNA, 465 bp, Glycine max
  unsure (1)..(465): unsure at all n locations
tggaatcgcatttgtgcacctattctgaatctcctatgctgtatcttcatgtaagaaacagtcccactctccgaattgtacaaaatcatattcatacatcattggggcattgtaccgagcacttggtgagcgcatgtttggacataaattgcaagaggatggggacaatgtggcatgccccattggttcagatgacagcataggcctaagaccctgtaactgaaatcctcaactgcagataacaggcgtaataaacataccatatctaccccacacatacaagcccattcccacatttttgagcaccaaaagatgaanaaaatctaccagtgggaagctaaatacatcaaggattggatacctcactgctggattgaccagaacacgtacacgaaggcaaatgtaccataacggcttgtggagcagaaccacacctcctaaggcttctttgatgaggggtactcc

SEQ ID NO: 177820 - DNA, 226 bp, Glycine max
  unsure (1)..(226): unsure at all n locations
agctntataagcgcgggtctgggagacgattgtctattggtcgtgatatacgaagatgatgttccgagtacataggatttggtacgaccatgccctcctgatttccagctgggaaattggcgagtggaggaacgccccgacatttacgcatgaagcatcatgtaaacctttacgggtttaaaagctctatagttgggcctaagccctacagtttttcttttggtta

SEQ ID NO: 177821 - DNA, 258 bp, Glycine max
actaagctgaaagagaagtgacaatgggaaacttctgctttatttttgacccagagtggacctggagatatgtcggggggtcaagagacctttggacgtacgtggggtgctttgcccataccaatcttgacaatcccgacctgccccggcttatcactagtgatacctgcgagtcccaatcctgcgacttttgcctcatcatataattggacaaaaatacacatcacgacgcttgatattgggttgccaccttaaact

SEQ ID NO: 177822 - DNA, 435 bp, Glycine max
cttaacgaaggaagagaataagagagatatttgtgtgctggaattgaaggacattagggagagaagttgaactttgaagtgtgtctcacaagtttctcattcatcaaagttatgcaagtgttacacatgtgtttatttatagcctagcatatgggaagcttccttgagaagcaaggaaggtagcttccttgggaagctagaggaagaaagctttcttgagaagctagagaagggctactcataccccttcaatagctaagcttacccccatgccaaaatacatgaaaatgtgaatgtatgtatacaggttttgatgatgccaaaagaatctacttgataatggttgtaatcatacaaaataaggagaatgtgaatgtatgtatacaacgtattgatgatgccaaaagatattacttgatatttggtgtcatcatc

SEQ ID NO: 177823 - DNA, 417 bp, Glycine max
ctaagcttaagccaaatcctactaccattaccttgcccttgtgtgttgtccatccttgctctcagaagaagacacataaatgaaagttcccgatcaacggtcggaagaaagctatagatgaaaactcccaatcaaagattgggagaaagcgaaaaaagaaagacaattcccgatcaaagatcgggagaaaacaaaagaaatttgcagaaaggtctttgggccagacaatatctgaacaatacagaattgccaccaccaaataaggaaagaaacgaaaccacgacctgaagtggtcctctccctttgattgccaaccaaaatcctgtgcgtgagtgactctctcacctccgcactaaactaaaatagaataagtataggccgaaacactcagatgctaactcccctcctaaacactat

SEQ ID NO: 177824 - DNA, 455 bp, Glycine max
cgaggatcataacactattaaggacaatgaactctttattgtaagcgacataccaaatatcgaaagtgatcggttcattccaatggaaaccgcaacacaactttaaaaagactgagttgatgatactcttcgtactcataaacctggtgtacgtgatactcccctcaccatctaaagcggttgtctctcgtctttaacaatattaacaccacttaccttgccactatttatatctttcatgctcgaactaaacttctaacccatagacattcactctgcacatgtaaaaaacgcctcaattaatctccttcaaatcactatatatgctactaccattcttcaacgtgcttatgttctctaccaaacctttgaatcttttatacacacacacacaaaaataacttagcatccactaagtacgcatgctgtccatgtacaactcgtacatggcttca

SEQ ID NO: 177825 - DNA, 427 bp, Glycine max
  unsure (1)..(427): unsure at all n locations
cttaagcaccgcggctgcagctttgcttctaaaaacctgtttgttttttccaccttgtacaagcctagtaaagtccttcagattcaattcgtgtgttcttgactgtatgatatgagatgaagtgcaaagattgagacttatgttggttgttgtctgatggataagcctaaacacttgtgcttgagtgaaacagtgaccgtgaggctttgggtgatgatccttccttgatatccatcattcttactagcttatttcagttgtgttccttaataatgatgttcacatctttgaaaagttgcatgtcttgtgagaagctgggatgaagcattgtatgtcattcatttcatgtgattgaattctttggagcanacaccttgtgaataaccactactgatttgcacttgaggcaagtgactgtcttttttac

SEQ ID NO: 177826 - DNA, 311 bp, Glycine max
acttggcatattctaaactagcactatttgtttgactgtgaaaaactttaaaataatcctcgaaaaggcgatttggaaatgtatttgtgaatagtactggaatcgattacacatcacaaatactgactttattttgaattgaaaaattgaacgttacaactctggaatcgattacaatgttgcgtatcgattacactagtcaaaatgatttttattgtaaaccaagcgtacccgtgaaattcgaatttactttgaaacactggaatcgatacatcttcgatatcgatccagaagtaactcttcgaatgatt

SEQ ID NO: 177827 - DNA, 449 bp, Glycine max
  unsure (1)..(449): unsure at all n locations
gctttgccgaaaagtcacttaaattgtttaaggtccaacgcctcaaacggtcctctttgcttttatcggttaacatgaaccgttcaaaagcataatatcaacccatatactctaccgctttgcaagaactacacagatctgatttcctcatcgcatatgaggatacgtatgagcaaaagccccgcttttgtcgaccaccccaagagatcgttaatgatccaacgccttaacatttctctcctttcaaaaacaagagatcgttaatggtccaacgtcttaacgtttctaaaataagagatcgttaatggtccaacaccttaatgtttctgtcctttcaaaagatcgtntaatggtccaatgccttaaacgaatttttgtgcgggtaaaatcgatcttgcggaaaaagatcaaaacaacttaaccaacgtntagttctaatataactacgt

SEQ ID NO: 177828 - DNA, 381 bp, Glycine max
gacacttaaaactaagcttagattaattacataaaataaattcttttgttgttttcactttggtatgattaattataattggcttgcatcaagtttttaaaaatggttcccattgtaattgcgattgaaaataaagatttagagtattggacttattacaactatatatgattgcatcaccatatttttgtatttctacccataaaaatgtaccaaagggatacttaattaaactcttgttatacatattcacattaaatatataattctcaaataatttctattaaaataaatatttaatatgtaataaatatcagcctttgaataatatctaccaaatattatactacaaaagaacataatttctcatttctaaagcaa

SEQ ID NO: 177829 - DNA, 280 bp, Glycine max
  unsure (1)..(280): unsure at all n locations
accacagaaggaggaaagaataacaaaagagggatgtgtctgcccggccaaaccacccaaaaangcgaacaaggcccctgccgaaaaacaacggcaggggggacccccaaaggagaaacgccacacccacaaaagggcacacaaaaaaaaacaaaccgagcagcacaaaacacgacaaacgagagcacagaaggaacaaccccccagcccaccccgagggaggagggcaacaagaaaaggggaccaagggccgaggcaacgaaggaaagccccgcccaag

SEQ ID NO: 177830 - DNA, 321 bp, Glycine max
tctgttcttgcactccctcttcgttatccatcttacttttggatcgagtggtatatgggtgcctttgcgctttcttagttatggtgagttccctaaagaaacaaatagtggtgagtatgctacccaaacatgaatatgctaatgaatgatcaaagcacttggatccacctcaaggccgtttttagataacatgatgagtttcagaacttctctttttataaaaaggaacaaagctttcatctagccaagatcatacaaaagtgttacaacagaacctaatggttctaatatatgggccataaatctatatgtgtgacagta

SEQ ID NO: 177831 - DNA, 315 bp, Glycine max
accatgactcccatgttgcttttcttacatgctgtatggatgaacagcatcgccctataaattttgtacttgcaaaaaaggcccattttactggcccgttgatatgcatttcccctgcttatttgaataccgactcacttgatgggttcttggcaagaaataaacggcgtggctcatttattactggggtggtcccgccggacagtatgaagattataatgctaccaaacatcttctctccaaagctcacgcgcggtaggacattcatgatcctatctttgttatatcattctattggtaatccaggcctctatc

SEQ ID NO: 177832 - DNA, 254 bp, Glycine max
ccaccacataaaagggtgcaaagaggaatgccaaagaaaaatagaaagagatctgtttatgaggacaatgtcacaggacataagctaaaaaggaaatttggtgagtttacatgtggaaggtgtggccaaaccaatcataacattataagctgtaaaaatatcggagtttctgttaggacaaaaaaatatgttgcaccatccacttcagatgatgatgaccacctattatcttaagatgaacaagctttgaatga

SEQ ID NO: 177833 - DNA, 363 bp, Glycine max
tactaagcgtgaggactaatttgaaaaaaaagaattctttttatttaatatgattcggcaaactgctgaactggctatgtggtaacgtgtatcacctcggaagaacaatttgagggtcctcatttttaaacatgaatgtttggtatatccacacttccaccagtgtgatgtgtacgtccaaccaccaaaaattttcaacagtttaataaaagcggaaactaccaccaataattgcgaagagggctcggttacttattggtgtttttccgtccgcgaccaccatttatttttgttcacatacaagaaatccatttgtaccttatttatcacgtgtagacggacaatcctcgaacatatttacgc

SEQ ID NO: 177834 - DNA, 242 bp, Glycine max
tcccgcgagccacacagtcacctgccgcatgcaagcttgcttgtagtgcttatatggaggctatctctttttgtcttaatgaggaccttgagtggtgaatttcctgcgccgatatgttgcgcatgacaaaggacaataggctatgcgtagcgccattctctatggtataagcgctgtgagatagagcttcaccagcccaatcagcgtcaaataagacgcccgtaaggacagcttaatgtgtg

SEQ ID NO: 177835 - DNA, 307 bp, Glycine max
  unsure (1)..(307): unsure at all n locations
agctngcctgccagctggcccgacgacttgtttgtttcctacagaagcaacaccctgctgtatgaatcttctggagggccgcaacgggcctgtgatctatttgcacccctatatatactaacaacacccccctgcctctgttttggtgattctttattctgaagattgcagacactaaccatactcataacgatacttatttactttccgtagtgttactgaaccttgcggattacataatcatacccttttttgacttacggagtgttgcggaacctcactatatgcgcagcgaggctaccatttg

SEQ ID NO: 177836 - DNA, 409 bp, Glycine max
  unsure (1)..(409): unsure at all n locations
agctngnctggcatgactcatatcatagtttatattttcatgagaggtctttgatggtgagttgaatcaattaacttgctatattgaaccttcatgcgaagtttacactgaatgtaattctcattatttataccttggctgactggatgtgtgaagctctgagtaagatgtctaggaataccatgtgtcatgaatcaactattccaaaagcttaagctattacgtaaagacacgtgaatggttatatattatatttctaacatgccctgtcaagtagattcctttaggcttgacgtgtggacaatgcacacgtctacctaccttgtgctaaagttaaacctttatttcttttcattagatgatacgggacacagagaatcatagcctacgctacttggtcgtaaaggct

SEQ ID NO: 177837 - DNA, 465 bp, Glycine max
  unsure (1)..(465): unsure at all n locations
agctngcttctacaatctcccccttttgatgatgactttctttgaaatcaagaaacacacacacacactttttcctagtcgatcactcacataaatttcaattctccccctttgtttttgaatttatgcttctcttaaaattaagttgattactcatgtgagttcttgatttaatccctatttctctccccctttggcatcaacaaaaagccaaagtacgtaacaaatttgaagcatgcaaatacaactaagcatccacacaacattcatgaaaaaatataaaccaaatcatgaagaaagaaccatgaagcaagaaccacgaatagatcaaatataaaatccacatagtcaaataacataattaatatttgttcaaacataccatgcaaataaagaaatagtaaatggttcaaatatcattataaatatagatatttggataagtcactgacatctattagtcct

SEQ ID NO: 177838 - DNA, 312 bp, Glycine max
  unsure (1)..(312): unsure at all n locations
aataggaacgttgtagattcaatatgaaaactttttcaaaacatnnnnncctcggaatcgattacagaaatctggtattcgattaccagagagtaaaaactctttagtaaacatgttgtgtgaaaaatcatgtgctactcaatttttgagaaaaaatcttcatacttatcttgaataagccttctcttgattctttaatctcgagtcttgaatcttgagatcttgaaccttgaatcttgattcttgactcttaactctcctcttgagtcttgaattcttcttgattctatctcgaactctttgaatggtctt

SEQ ID NO: 177839 - DNA, 417 bp, Glycine max
  unsure (1)..(417): unsure at all n locations
agctttagctcgtccttcaagatcatgcctttgacccatgatgattcctttcacctcttcagagcttgagctcactattgttgccctataaaacccctcaaaactttgctttggtcgtgttcttcttttcgggccttcttggtttctcgttccaaggcttcagcggtggccatattgacgtcccttagttcatcatactcttttcagactttgatggctatggacttgaacttctcttcgactacccgggctctttcaagccttgcctttagggcttgtacctcatcactttcttccgaagctttaacctcatcatctctcatagtctttagatntgggagccaatccaatccttgtgttcggactctcagccacttatgatnagccgcgatgatcccattactgcttcccctaagc

SEQ ID NO: 177840 - DNA, 418 bp, Glycine max
  unsure (1)..(418): unsure at all n locations
agcttgtcatctctcagactggcttagtgtgcttgttatatagaatgaaatcagaatcatgaatttttagacaaatattctacccggaagagcaagcactctaagtgatgtttaataaatatgttatagataatttgttgaaaactcggacaaataaaattctatccatgaaagatgaaccttaaagaaactacaaattaatggatagcatatgttcatagatataattaactttttacagtaatccacccttacatattaaatttgaagtttaattttaaaaataactcatcattctaagtttttcattttcaaaanaagaaattgagcattctcctttntactaagtggtgggcatagtgtcaaanaaatacgttgctacataatattttaaaattaggtgagaaatgtacataaa

SEQ ID NO: 177841 - DNA, 176 bp, Glycine max
gaaaatacaacacaaaagggaggaagatatagaacaaaaaaagaaaaagggataggaaaaaagtaaagaggaacaagacagacaaagggaaagaacagaggatgaaacacaagtacagaaaagagacagaacgagaaagtgaaacaagtgttaaacagagaaggaagaaaagggag

SEQ ID NO: 177842 - DNA, 451 bp, Glycine max
  unsure (1)..(451): unsure at all n locations
agcttttggggtagctacagcgctctttatgttatggccaagtggcattcgcaagttaacagtggaaagtgatttcaagattgtgattcaatttactaatcagggtgatgttatgcatctttattggtccttggtggtttttatttgtcattaagttgtcaaaattcaaaaagagtgtaagtttgtgttagcaaacttagttgcaaactatatagttttaatggctgactgtcaagttagttttaatggctgactctcatgttacttcctatacacacccacccccgcaccccctcctacattctaaaaatttattttaattttgttaagctcgaagactaagtacgacaacactttatacacattataaaaaattattttataatttttttaagctcanaaaacactttatacacacattatanaaaaaaattataatttatttaagctc

SEQ ID NO: 177843 - DNA, 437 bp, Glycine max
  unsure (1)..(437): unsure at all n locations
tgcaagctttatgggtgagctctttaatgctatgtaacaaggatcacttgactcgaagatgatataagcttcatcaggcgttgcttcgatccccgaccgactcttagttatttttcttatgttttatttccttaagctttgtggttatttctttaagccttgtattttggcttttattgcttaataatttggttattgttgtcttggatgtttaccattttgttttgctgcgcgtttggttattttagactttgttttggatgattaagacttgcttggtttattctatggattgaatcagtttatggatgcattatgctatgattttgatgttgccttagttcctttctccaggtgtttntggatttttgttgttgccaaagggggataagaacaagggtagaattatcatgaacttangcataaattctaatctt

SEQ ID NO: 177844 - DNA, 137 bp, Glycine max
ctatttcccttttttttggattgtgactgttgtaaataacatccaagatgctgaacctaagttgcttttgttctattttacgggagtgaattggttataaaagatacataaagatttaattggttaagtaaatatgc

SEQ ID NO: 177845 - DNA, 434 bp, Glycine max
  unsure (1)..(434): unsure at all n locations
agcttcctgcatcttgttacaacagcttttcttctctttttgggattcttctcagtatttgccccaaagctgttggatgacttctcagctaacagcttggccagttgacccacctaaatctcaaggtttttcaaggctgactcagtactcttatggttggacatggtcacttgcatgaattgagccagggtttcttccagtttggtagtcctctagaaaatattaggcccttgttgaggcggcctgttggaaggtccaccctggtccttattgaattgatttccagggtgtgatctccattgcccttgctgattgtagggaccttgctggaatcctgaanatcctccttgattgtatccttgtctctgttgatttcccatgtaactaacttcccgcgtttgttcttcaaaaggaatacaatggtcggattcatg

SEQ ID NO: 177846 - DNA, 343 bp, Glycine max
  unsure (1)..(343): unsure at all n locations
ctccgcgtacgctattgctctctcgaccataacctcagttttactctgagaatgcaacaagggaatcgtcccnnnnccccacaatgtgaatataagcatgataactttactttctggctttgaatctcccctagagctgaaacataaaaattcgatgttgaaaagatagctatcaaagtttctcttgaatcatgactatctatgattaattaaatgacctttatttattctgagtaaatactattcacataattaagttgatattcaacacttgacaatccgatgatttcataagggtattcaacaatatcaaccaacctcctccaaggcccacacatgtttt

SEQ ID NO: 177847 - DNA, 227 bp, Glycine max
taaatatgcagttaacaagatgtcttcccctattatgcgctaactgctgacgctatcatatatcgtctacctataaccattgatcattatcacacaccttctcaggatgaactctccctccttgcttgagaacatgcccaacacccctgagatgctccaacgaacaaacgttgtaggcttacaatataaaaagggaaagcatatcactctttaacttttgcaagaaa

SEQ ID NO: 177848 - DNA, 393 bp, Glycine max
  unsure (1)..(393): unsure at all n locations
agcttaagaatagtttggaagatgttcttatatagatgcttttgcatgtatattgcagtcaacgtgtgtagcaaattgaattctagaaactaacaagcaaactataataccctcattcttgttttctttgttatctttggcataaatataattaatgcaattttctaaaggttgtctgaggatgatttcataaattaataatttagggggaaaagttctaattggtatgatgataagataattaacattgacaaaagggaaaaatatcacataaaatataaaagggccgagacaaaattatatatataatgttattatgtgtnttttgtcgagaaatgtccaaaccgcggaattgtggaagaaacaggggcgtgtacttaagcaaacagaaac

SEQ ID NO: 177849 - DNA, 221 bp, Glycine max
  unsure (1)..(221): unsure at all n locations
accaatcaacaccaaaacaacaccatagaaggttcccaaagacatagaggcaagcttcccttacctacaacatccacaagctatgtctttgaaagagatacgggatcttgagctccatccaagggatttcctaaaggcaacaacaccatcgcaccacaaacatggaaccaanaccaaaaacatcactcaatttaaggttctatatcaaaaacccatcatgg

SEQ ID NO: 177850 - DNA, 456 bp, Glycine max
  unsure (1)..(456): unsure at all n locations
gcaagctnctttataaatgagttcagtttatattattttttttatatgagtagctagtttaactagtaattttatctatcttgtagcttttaactatcttatccattgattttgtcaaagacacccagtatctatctgtcaatgttaatttcctgttttattcttgagagatactactagtattgtacaatgtttctacatgagctgcgggtcttaaaagcgtcaacttgacagtatgtgattctagtttgttcattcatgagctttatgtctctgaggtattaattagtgtatagtttgttcacatactaatcatgatgcacttttacttaagttgagtattttatccctcttattataattatcgngaaggaataaaaantaatattatcataattttttgaagtaacattaagcacttttgttattatatcttttatcatattaatgatgaat

SEQ ID NO: 177851 - DNA, 484 bp, Glycine max
  unsure (1)..(484): unsure at all n locations
gcgatccttnagtcgaccgcggcatgcaagcttctttgagaacacttccttgagaagctagttcttatctacatacacccctctaataactaagctcacctccttgagaagctttcttgagaagattcctaaagaagctagagcttagctacacacacctctctaatagctaagctcacctccttgagatgagaagctagagcttagctacacaccccctataatagctaagctcaccctattccaaaaatacatgaaaatacaaaaaaaagtccctactacaaagactactcaaaatgccctgaaatacaaggctaatccaattggggggtaggattgcatcactttagcagcgctagcctaatcctcttggagtcttctatccaatacccttgggggtaggatngcatcactttagctcaattcatgcaagtgtcaatgtctaaccaaaagagcatggagtctgcaattaagaatctggaag

SEQ ID NO: 177852 - DNA, 233 bp, Glycine max
agatgatgctgatattaacacaatgttaatgtgtaatcatgaattttcgcctgttggtccgattgagttattatgtagcattgctagaaccccagatgatattttaaacttacttcaagctactatgacccctacttatgatgccctgctatattacaatgggaggtgaaacatgtcacgccaaaatgagtttgttgggtactcgttcataggataaaaatccgaaaaagttt

SEQ ID NO: 177853 - DNA, 198 bp, Glycine max
cgcctatcaccgtaacctgaagaaagccgtcaatcctcccttactaaacgatatctggcgattgtggtgggggatactgcgcaggcttgcgcttaactgcattactacttctcacaaacacaaagccttaccgttttcgatgttaaaacaaatcggagctgcaattaccggcctcagctgcggctattaaccccgttt

SEQ ID NO: 177854 - DNA, 438 bp, Glycine max
  unsure (1)..(438): unsure at all n locations
agcttctaaagacgttatctgatccgataaatattggtggtgcttctctatctcggnatctcttgctcacaagtcatgcacttcattctttatatattccatatatttgtttgtgaaggcagatgaatctgctagtgattgtgagtatgcgctactgtgcttgcaacaccatgcctggaagcatcaatagatatgtgctatatcttaattccacttcatctcaatgtgtacaatagaaaacttgtttgctatacaagtctggattgaagactggcaagctcatgaatatttttctttgtcggtaggtttatcacgttccacccaagctgcaactatcatgttcattctggaacaacgcgagatcaaaaccggagtcagttcctacgccatgcactgatcgtttgagtatatgaaacagttgttcatttattccgtctg

SEQ ID NO: 177855 - DNA, 466 bp, Glycine max
  unsure (1)..(466): unsure at all n locations
agcttgcaaattagggacagaaaaataggtctctttttttcctatgaacttttgttttgggttaatcagaaaccaattaaatccatgaaatcacaaagagaccgcgagaatnttaaattttaattatggatgcaccgatttcccttataaaaccatgcataccaattgcagctacctatctatctatatctggattatatagtttcaattattaaatttatatatagtatgatatacaattaacttagatttttttttgacaaaaaatgcaattaacttagatagtattattaaacattatattgttagaataaatatatttattaaatttaataaatacaatatatgtntattagcaatttcaaataataagagaattcaatatactacaataaatattttaattccaataaaataataattcctaaatttaaagaatcacaaaacactaatgcaaaataatttt

SEQ ID NO: 177856 - DNA, 438 bp, Glycine max
  unsure (1)..(438): unsure at all n locations
agctntgatgcaacatatggagaggttaattgttcttcgagatgatgcgctccatgagaggttggatcaaatggagaatagagatcataatgaagaagaaaggaggagaagagggaatgatggtgttcctagacaaaaccgaattgatggtattaaactcaacattcctccatttaaaggaaagaatgatccggaggcctacttggagtgggagatgaaaatagagcatgttttctcatgccacaactatgaggaggaccagaaggtgaagcttgccgccacggagttttccgactatgctcttatgtggtggaacaagctacaaaaggagagagcaagaaatgaagagccaatggttgatacatggacggagatgaaaaagatcatgaggaagcggtatgtgccggctatgtactcaagggacttgaattcaagctc

SEQ ID NO: 177857 - DNA, 180 bp, Glycine max
acgcttcccctttcttgttttgtttgtcaggaaacgcaggatagcaacatgaaaacaaaggttgcatttgcaataaaaatttgtgacgctatgcatgatgatgcatgactatgaaatgtgagtggatatgatacgacaatgcgaatgtcattatgatgtataaagatgctatgcggctga

SEQ ID NO: 177858 - DNA, 423 bp, Glycine max
  unsure (1)..(423): unsure at all n locations
ccggatccttnagtcacctgccgcatgcaagcnttgagccaaaatcctgactcacctatttatcttgacccatggggagaatgtcaatccttaccctccgaagccaaaaagaatagaaggaaaatttccaatcaaagaagaatagaaagaatatcttcaatgaaagcaaataaagaaaagaaggataattccccaatcaaagagtgggagaaagcaaatagaaaagaaaggaaattcccaatcaaagaatgggagaaagtaaaaaaggaagaagaagaaggaaagaaagctcctgatcagggatcgaaggataaacataagatatgtgcagagaggtctttagaccagacaatatctgaacaatacagaattgtcaccaaatgaacgaatagaaggaaaggaaaccaccgacctaaatggtct

SEQ ID NO: 177859 - DNA, 447 bp, Glycine max
agcttgtgcatcaattggatcgggtattttttctagcaggtaaatgctgcagtggttaagcatggatttgagtccaaccttcctgtcatgaattccatactggacatgtactgcaagtgtcattgtgcatctgaggaaaaacaattattctctgaaatgactcataaagataccatcacatggaataccttgatagctggatttgaagcattggattccagagagtctctctgcatattttcgtgaatggtatcagaaggttttagtccagattgcttctcatttactagtgcagtaggtgcatgtgctaacttagcagttctgtattgtgggcaacagcttcatggtgtaattgttcatagaggcctggataacttagaaatatccaatgcgcttatttatatgtatgctaagtgtggaaatatagctgattcacataacatattt

SEQ ID NO: 177860 - DNA, 173 bp, Glycine max
gcaaaagacagtttttaatgctttccattccaatagtaaacaagggaattttgactcaagcctgtattcaatcttttacatattcattttaactcccacccaccctaataaaagaaaactcttaagtgtaggaaagccaccttaattaccattacccctagcccactttaatt

SEQ ID NO: 177861 - DNA, 427 bp, Glycine max
  unsure (1)..(427): unsure at all n locations
agctngngctaagcgagtcagtctctctatcttaaggcaatttggngttctgaaaaattgttcaggtgctaagcgagtcatactcgctaagcacaatttcttctctatttttgaataaggcctgctcgctaagccaattaagttccagtggtcaagttaggctaagagcccactggcgctaagcctgtatagtatgtggcgctaagcgagtcatactcgctaagtgcgattggctctctgttggagaataaggcttagcgagccatgctcgcttagccattgtgttgtgttagctaagcgagggtgtctcacttagccagagtctttattttcctgttgtcacgctaagcgcgctctgtgcgctatgcgtatcctattattntctgaaggcgcgctaagcgagtcagtctcgctaaacaccagtcta

SEQ ID NO: 177862 - DNA, 285 bp, Glycine max
ggaaccaggtcttccggatggttctctggaagaacttcttttggaagaagaaacttaacattccggaacaagttattctggaaatgtctctagaagaaccttggttcagaataacaaaatgctcttccgaaacaagttcttccggagacaggaaatttttttaaaaaaaatttgtgaataaggtgtggtttttataattaagttgcgatgttaatgaagaaatattatgttgatgtggacgaaaaaatacttaaattataatacgtaaatttggtataattttgt

SEQ ID NO: 177863 - DNA, 382 bp, Glycine max
  unsure (1)..(382): unsure at all n locations
tcgagttntattcagagaattataggttatctcttttatcttaangagagtgagtctcctaaattcttgagtgattcaagaacaccttggctgtatcaaaggactttcacaacctttgcgtgttgccctcgctggaaagagagattctttccttcctttcatcatcacccttgttctttcaaaccacaattccagaaaatccacctctgcccagaactatctcgtggccataactcccatttgacgcactccaattaagtgattcttgatcctaaattgaatttcaaaacgagaactttcacctcgtattggaaacacctcatttggagcccatgtactttagttattgacatttctatatttctgttcagccaccacttta

SEQ ID NO: 177864 - DNA, 342 bp, Glycine max
  unsure (1)..(342): unsure at all n locations
agcttctagccaaatggacttaccttgaattaattccttngatagcccttttgagccttgtttccctttccttgttttgaagctcactacaagccttaagtgaaaaaccatgatattaccatatccttaaggaattttggagctttggaattgttttgggaataagtgtggggggtttttgtttcattggacaacttgttttgttggctatgcttcatgatgtattttgggccatacttgatgtacattgtatattggttaaatgttggacatgctgaatgaaatgttgtttctcaaaggctaaaaaaacaaaaaaaaaaatcgaaaaaaaaaaaattcgaa

SEQ ID NO: 177865 - DNA, 447 bp, Glycine max
agcttcctctctaagcttcttatctttgtctctctcttaatggggaagctcctccttctatggcttattccctagtggatgacgcctcctctcacctcttttcctttatcttccgctgcatctccatggttgaaaatcaccatcgaaggacctcattagagctcaaagatccagtctccctagaagcttctcaagcaagcttccatcaccttggtcaataacaattccacaccttgtttgcttatcttcactccttgttacgtcaattacctttttccatggctctaaccccatgattatcattgtttttttttgttttagtaagcatatgcatgatatgaggtttgtggataggttttcttttatttcttttagtggaaggatttgtgtatgagtttaaagttcattcatcttacataatttttaaatattactcaaaaattctta

SEQ ID NO: 177866 - DNA, 467 bp, Glycine max
  unsure (1)..(467): unsure at all n locations
ccggatccttgagtcaccgcggctgcagcttcatagtttctagtccaaagctcttttgtggctggccctttgcttcttgactcaaattcttcaagggatggcaccaatcctcctttccaattccctatacggcaactcacaaacaaggaaacaaagagacaagcaataaccaaagaccaaaaaaatgaaatgaaagctaaaccaataaagttttaacaagaaaaattttcaaggattattcaacaattaaagcaatgaaaagcacacaaaagcaagctaggactcaaagagaaacctagaatggctctagagtagagtagaaaaactaaaaaaatgactcaagaaacctctagttttggtacttgttttcacaataattttcaattgaaatttcagaacttagattggtataaaataggcaccaattatagaacaaatttcgagccanaacaacaagcacactttcc

SEQ ID NO: 177867 - DNA, 177 bp, Glycine max
aacacgctgaaattgcaatagtctcttttccttttacagagaatataccaccattcccaattctgacctttgagacattagttggcttcaaatccttgaatagaagcttatcatatgtcatgtgggtcttacaaccactatcaatcaaccaacatgtagaactacttctcatcgaat

SEQ ID NO: 177868 - DNA, 457 bp, Glycine max
  unsure (1)..(457): unsure at all n locations
agctnttgcaagctggcataatttatcctatctctgacagccaatgggtgagtcccgtccaggtagtcccgaagaaaaccggcctcaccgtgataaaaaataagaaggaggagttgattcctacttgggtgcagaacagttggagagtctgcatcgactataggaggctgaaccaggttaccaaaaaggaccattttctactaccattcattgaccagatgcttgaacgcctggcaggtaaatctcactactgtttccttgatggttttttctggttatatgcaaatcactattgctcttgaggatcagaaaaaaaaaccatatccacctgccccttcaacacttttacctataggaggatgcctttcggcctgtgcaatgcccttggtaccttccagcggtgcatgattagtattattagtgactttttacaaaatcgcatacaggtggttatgga

SEQ ID NO: 177869 - DNA, 153 bp, Glycine max
aaacatacctcttctcagggttctatccctcattaactagaatttccaagatagtccaaatctcggcgtaagaattacaccacaggaagcaagtcgaaaatggtgtggttggaataccgagaaaatattttgacgcaaaagcaagagtctcgg

SEQ ID NO: 177870 - DNA, 429 bp, Glycine max
  unsure (1)..(429): unsure at all n locations
agcttgntgccctgctagtttaannaagttttttcttttctcttttttttgtgtctagctgcttgtaaatgaaatgtctggtttgtgataaactggtggtgtttctcaggtccaagtccaaccagtacccaaacacatccctgatccaaattgagggagtgaacaccaaagaagaagtaggatggtatgctggcaagaaaatggcctatatctacaaggctaaggtgaaaaaggatggaagccattaccgctgcatatggggcaaggttacgaggcctcacggcaacagtggtgttgtccgtgcaaaanttaagtcaaaccttccacccagatcgatggtaataatctgacagggctgtttntattatgctggctttctttatggtatttgactttcttgagttttgatgcattccagggagctcgagt

SEQ ID NO: 177871 - DNA, 172 bp, Glycine max
  unsure (1)..(172): unsure at all n locations
tgcgggcgcgccttatcatccgttagcccttgaagaagagccgttaaatcgtcgtattataagcgaatcgngcgattgaggtgggggatactgcgcacgcaggcgcttctacagcatcacaacttctcgacgaacaagaaggcattaccgttttcgatcttaaaaccaaact

SEQ ID NO: 177872 - DNA, 430 bp, Glycine max
  unsure (1)..(430): unsure at all n locations
agcttctaatttcaatttctagaccaaaatctatttattaacatctgggtcattaatgagttgaccattatttgaccagagaattttctctgaaaatccttattctttctagactttagcttaaaaacttaacagtttaaccatgcctaggtatcctatggtaacatctcattttttaccatttcaatagtcaaaaaacactacccaatcgcacaacaaagtattatcattgtttgtaacgccctgaactttcaataaataaaaatagatgtttgatgtatttcttgtgttatttgattacttgattaatttgaatgagttgaggtattatgtgaattaaccatgtgtgatttgcttgatgtgaatgttgagttatgtggacttttattgacttanggttgaaatatgagatnttaagttntacctaaac

SEQ ID NO: 177873 - DNA, 281 bp, Glycine max
  unsure (1)..(281): unsure at all n locations
tattaagatattacaaactatttccctcaatttcaacattctatctctgattccaatacaacgttcaaggccccttnnnnntgagttctaaacaatgattcaaattaaacaatctgaatataaatgtaaagcaataataaataaaagagtttaagggaagagaaagtgcaaactcagatttatactggttcggccacacccttgtgcctacgtccagtccacaagcaacctgctcgagagtccactatcttgtaagatccttcacaagttctgaaccacac

SEQ ID NO: 177874 - DNA, 378 bp, Glycine max
  unsure (1)..(378): unsure at all n locations
gcttcagcctttgatgatgaagtacctgttttagaaagagagggttgatgagattcgaaggctcaagaagaaaagagaagagcttctttctgctntacaagaggctgagagaagatatgatctggctagagctgcagacctgcgatatggagcaattcaagaggtggaaactgcaatacaacaacttgcagggagcactgaagagaatctgatgttgactgaaactgttggaccggagcaaatagctgaggttgtgagccgctggaccggtataccagttacaaggcttggccaaaatgaaaaagaaagattgattggacttggtgacagattgcacagcatagttgtatgacaagaccaaactgttatgctgttgct

SEQ ID NO: 177875 - DNA, 453 bp, Glycine max
  unsure (1)..(453): unsure at all n locations
agctnggttntgggcaatagcaccccaccttatgtcctcaaggtctcctgacccccgcgacatatctccaggtaccactctgtggtcaacaataaaagcaggaagtttcacccttcaacacttcctcatctcaagcttgtaggattatggggtacccatcacatgtggtactaggtggcggtcgggcgatggtgcacaacaagttttccacatccacaaagcgcgcataaacccaccatcccctgttgcccacctccatctgagctcacgtactcccacgtagcccatatcctcgtttctctcaacaccgggtccccatcaatcctcccaagcttccacaacatccaagcaaaacaacattcaaacagcacaagctatcacagccaagcaaaacagagcagaggcagaanactctgccaaaacaccaaccanatcacagcttttctcacttaa

SEQ ID NO: 177876 - DNA, 158 bp, Glycine max
gaggcaaattctcttaagggggaggggattatgccatcctccctaggaagggaccaatcactagagccatgaacaagaggctccaagaggattgggctacagctgttgaaaaaagccctacggatctcatgaaccttacgggagatttctgagcccat

SEQ ID NO: 177877 - DNA, 390 bp, Glycine max
agctttaacctcatcggccctcacagattttatatctgggagccaatccaatccttgagatcggactctcagccacttatgatagccgccgaggatcccattactgcttgccctaagctctatgtcctttcttgacgccgcataccatgccttgcgaactgcttggagtaccctcgcgtgggggacactaaaaccccgtgcgatgaaaggcgtgatgctttcgtctaatggcgctgctctcatggggtagccaaactgtcttatggcgagaacgggattataattaatacaaccctttgttcccatcaagggaacattaggacatccttcgcatgaagatagaatcttgattcttactttcttctagcgagggaacacaataacagatgc

SEQ ID NO: 177878 - DNA, 449 bp, Glycine max
  unsure (1)..(449): unsure at all n locations
agcttgccagtctgatgcagcagtaatgatggtccgagttatgttggggaacggttacgaacccggaatgggtttgggcaaagacaacggcggcataactagcttgataaatgccaacggaaattgtgggaagtatggtttaggctataaacccactcaggcggatatgaagagaagcatcgcgggaaggaaaagcagtggccaaagctcgcagttgagacaagaaagtaaaggaagcccgccctgccacataagtagaagctttataagcgcgggtctgggagacgaaggtcaagtggtcgcgatatacgaagatgatgttccgagtacattggatntggtacgaccatgccctcctgatttccagctgggaaaatggcgagtggaggaacgccccgacatttacgcaacgagcataatgtaaacctttacgggtttaaaagctctat

SEQ ID NO: 177879 - DNA, 216 bp, Glycine max
tcgcacaagatattcttctacctaagaaaaatgcacccatgcataatcaaggcaccttcgttacctagattatttatatgtacttccaaggggtatttgctacctacatcacatgcacttccttggcgtaatttacatacatgcatactcaaagcattttggctaccaaaaattgcacacgtgcacattctggtatttctaatacctatgcatata

SEQ ID NO: 177880 - DNA, 398 bp, Glycine max
  unsure (1)..(398): unsure at all n locations
caacaactgaggcatacggtatngcttccatttgcttccgttccagatcatttttaggacattgtgcgagactaaatgtgtctcctttctgaatcggaacgggagatgctgagcacttttccatcctaaatctctctagtactgtattgatatatgccttttgagacaagcctaacaatccttgtgatctatttcggaatatttctatccctatcacatagacttgcctcacccatattcttcatttcaaagttactagaaagaaacttcttagtctcatgaagaagaccaagatcattagttgcaagcaatatatcatcaacatacatgactagaaacataaccttacttccactggacctcagatatacacaccgatcaacagtgtgttcttaaat

SEQ ID NO: 177881 - DNA, 425 bp, Glycine max
  unsure (1)..(425): unsure at all n locations
agcttactgggcagtgaagacttgctacttctctatggatcaagctggtgaggaaagaaagttgcaactgagtgagttagatgaaatccgcctagaagcctacgagaatgccaagttctacaaagaaaagaccaagaagttccatgatagcatgatagttaaaaaggacttcatggttgggcaaaaagtgttattatataattctaggcttggactcatgagtggtaagttgaggtctaaatggattggtccttttgttgttactaatgtttttccttatgggacagttgagatcaaaagcgactccacaaacaagagcttcaaggtcaacggacatcgacttaagccattcctcacgaatccttctttagtggacgtagtggtggaggagacnttcttactccaccctacttcttctcaccatg

SEQ ID NO: 177882 - DNA, 115 bp, Glycine max
gcacaacaaagtttttcacattcacaaagcgcgcataaacccaccatctcctggtggcacctccagctgagctcacgtatcccacgtaggccatattcttcgttttcttaacaac

SEQ ID NO: 177883 - DNA, 388 bp, Glycine max
  unsure (1)..(388): unsure at all n locations
gagctattgtatagataagctagtttgcagtcagctttgcaatagcttcttcaatatgctccatgtttgactntgaacaggtagacttagccataatgagtctctcaataaaagcaccaaatatgttatgaatgcaagaatgaatcctaggtttcgaggactacgaacctccttcaataacaaaaagtgaaaatgaagcaaatggattgatgcacgacaggagacaaaatggctgacaacatattccttcctatcactactacaaaagcgacattcaaagatggttctaatggacattcaaagacggttgtggaactatctttgaagccaacaacgataaaagtgttgacgaacgatgacagttatgtaaaaaaccatcttaaaaatg

SEQ ID NO: 177884 - DNA, 251 bp, Glycine max
ccatcaaaaagggggagattgtagaagcaaagcttcatgatgaatcaagagtgattcaaagatgttttgatgataacaaagatgataacaaaagatgatgacaaaggtgatgacaaaaagctcaaaggtcaatcaaagaatgagttcaagatattcaagagatcaagaattcaagaatcaagaatcaagagatcaagattcaagactcaagattcaagaatcaagagaaagcttaatcaagatagtatgaa

SEQ ID NO: 177885 - DNA, 452 bp, Glycine max
agcttagcgctgaacaaaaattctcaaaatcttaatgtctaaacacttgtcccgcttagcgcacagacacgcttagcgggctcatcacttacgttcatcagcagggatgaacgtgcttagcgcgacatggtccacttagcgcgttcatttggaaatccaaaattttgacagctgagatgaataagctaagcgcacaggcgcgcttagcacgtcaatcgcgatttccaaacaaaaccgcaggggtcttcacccctttcagccgcattgcccctaatgggcttctaggttacctaaaatcctacattgactaaccctaaaactaataaccttaagctaacaacatacaactaagaaaacaataagtcatctatcctaaagtttgaagaatgcaaaataaaaatagaaatgtgctaacttacttggattgttcttgaaatgaagcaatgaagatg

SEQ ID NO: 177886 - DNA, 207 bp, Glycine max
gggtgtttttcctaaggactgaaagaacttgtctgagatgtcctaagtgaaaatctatgctcctactatacactaaaatatcatcaaaataaacaactacaaatctacctatgaaatcccttaagacatgatgcataagcctcataaaggtgcttggtgcattagtgagcccacaaggcatcactagccattcatacaaaccaaact

SEQ ID NO: 177887 - DNA, 451 bp, Glycine max
agcttccatcacaaagactactcaaaatgttttttaatacaaggctaaaaccctatactactagaatggccaaaatacaaggcccaaacgaaggaaaaacctattctaatgagaaccctagggccttcccttggatctctggcccaatctacttggagtcttttatctaatgcccttgtggggtaggattgcatcaccttctctctttctccctccactcatcttctccctccttcaagctcttattcatggcttcctatggtgatgagcttcttcttgactcagcttctcctcgaagtggcgtctccaatcatctttcttccttccccattccgcttccatgatcttcaagaagcaaaggactccattgatgaagaagatccaaggcctacaagctccacatggagctacatcatgtggtatcaagagcatcttcatctaggtgatgttc

SEQ ID NO: 177888 - DNA, 155 bp, Glycine max
gcaataagtggaactgcacaagttcgattttctggccttcgtttaaggagttgaggaagccagctttgaggttggaaaaggcagaatcatctggtgcaaggatggttatgccaccactctttggctgtatgagctgtgagttgatgttgttcatg

SEQ ID NO: 177889 - DNA, 464 bp, Glycine max
  unsure (1)..(464): unsure at all n locations
tgcaagcttgccacccatctcgcctaggaaagtttggttgcnttctccanaagcaacaaccttctggagaaatcttttggagggcccaagtgggcctggttgctatttgcaccccctttntactaaatgcacccccttctatttttttggtaattctttttccgtaatgttacgaaactttacgaatttcgtaacgatatttattttcctttcgcaaggttacgaatccttacggattatgtatttactcttttttagctttcgaagaagttacggaaactcacggattgcgcaaaaacacctcttttcgacttccgccacatcacggaatttcacggatcgtgcaagcctgcttcctttcgatttctgagatgtctcgggacttcatttattgtgcaacaaaggacgccaagtatctcatagcggctaacgcaaggttgcatgtcatcaagtaataatccccg

SEQ ID NO: 177890 - DNA, 247 bp, Glycine max
cacgaaaaacatgtatacctatattctaaacatatctcaactaagtcacgaacatcaaggagatgccttattacaatgtgaataaagctctagctaagttcttcaaatgactttattcaattcaatgagtccataaccactgcacatatgaatttcatgatgagtagtcacctactgcgaacaaaatataaagtgtgtgagataaaagtgtctataagtgaccgtgtataccatgcggcatcaaata

SEQ ID NO: 177891 - DNA, 453 bp, Glycine max
  unsure (1)..(453): unsure at all n locations
agcttgatttgacattctcgagggccacgatngggtcatttacaaagnccagngngcggcgagcggnggcagtggcaaatgacagagtagctggggagaaaaggagaggtggtgataaggtgacaaaaagaactttaaagatcatttaatgtatcatcatttaacgtagttgttaagtcatcattaaaatcaaaacaaaaataaataaaaaaatctttaaaggattaaaataaaataaaaattatattttttatagattatttaagcctataaaatatatttcatacttataaagaaagttgaaggatattgttggagtatttagaattattctttaggaaaaagagaataaattactctaacttcttttttatattggatttttatttaaaattatttaaaaattataatttcacaacaaaaagatatataatnntttattttataaatatg

SEQ ID NO: 177892 - DNA, 254 bp, Glycine max
  unsure (1)..(254): unsure at all n locations
cttgtaacttgtaaggtgaggactaaccaaactntatttaagcaatatctctagttgatggggactaaaccaccaccttttggcttcaattaatgacctttagttgtacgtgggttatacgggaaaagcataataacctcctagtttgtgaattggtcaatgttgcttcttctaacatcgcccttggaagaanaaagatgctgatcggatgagctatctcatgcaggccacacatgtcttattcaattctaatc

SEQ ID NO: 177893 - DNA, 278 bp, Glycine max
agcatgatagctatgcaagatttaagatctttctctttattgtcctaagcaaagttcccaaagtcctattaacaacttccgtttgcccatcggtttgtgggtgacaagtggctgaaaataacaatgtagtgcccaacttgctccacggagtacttctgaagtgactcatgaacttagagttcctatcactaacaatgctccttggcaaaccatggagtctcacaatctccttgaaaaacaaatcagccacatgggaagcatcatcaactatttacatg

SEQ ID NO: 177894 - DNA, 462 bp, Glycine max
agcttctcccctattttgctataaatttgtgaagaagtgaagaagaaaagggttcagccccttaggcacttctctctctttcgaatttgctaaggaaaattatttccatgaagaaaatccaagccgaggcgcttccgtaacgtttccgtgagtaattacgtgaagattctcgaccgttcttcaaagattcatcggtcgttcttcgttttcttcagttttcaattcattatatgtatccgtggtggtccacattttgtttcatgtatttttattctctttttcatttactttttataccctcttttgacatgcttaagccatttatttaagtcatttctcgcctaatctaaaaataaaataaatttccaccgatcgtttgaattgtatcatccgttactttcgtttgaaatgaattccgaccgttcggtcgtgccgtaaccacgttggaaatcaaaaaagagg

SEQ ID NO: 177895 - DNA, 139 bp, Glycine max
ccacatgtgatgggtaccccataatccctacaagctcgagatgaggaagtgttgaagggtgaaacttcctgcttttattgttgaccacagagtggtacctcgagatatgtcgcggcggtcaggagaccttggggacgtc

SEQ ID NO: 177896 - DNA, 353 bp, Glycine max
tattcatgggagtaacatttatattctcaaatgtttagtgaggaaagaaagaaaatgaataggatccaaaccccccacgaaattgccttaggaggattattcatagcaatgttagcattaaaggaactgctatgttggagactcaactaaatggcatcaatttgcctcaaaatacgttgaacgatatcagaggaattatgtctcacattctaaaaaatgagcacattcctagaaccccaatattctgttggttgagaaaatatgaccgatattgctgttatataaaatttgatcaagttaatggaaatcacaatgtctagagataaatagaggactcttttcaaaagctagta

SEQ ID NO: 177897 - DNA, 454 bp, Glycine max
  unsure (1)..(454): unsure at all n locations
agctntcataagtgaaatcaagggcaacctttttttttttgtcctctcacaaggttgaggttgagccatgttttcagtgtgaaaattagtagttgaatgctcaaaatcagaatattcagaatcaccaacaacggaatactcagaatgctcaaaatactcacaatgctcgaaatgcatagaatgatcaggatgcacactatgcctaagtaatctatgaaaggttctatctattttaggatcaaagtgttgtaaatcacctggattgcccctagtcatgcactatatacaacaaataatgtgttctcaaacaagcaccaggggacgtgtaaaactacaactatagtgaaacgatatccaaatgagctgataatttgtgagcaacacactaaaatcatgaaaagatagcacaaaaattttcagactaaaattaaaagtctaactatgaaaactgcta

SEQ ID NO: 177898 - DNA, 138 bp, Glycine max
acattcctagcttagagagaaacaagacaatcaaatatacatattatgtgcatgagataccacttgcttaaacatatcttacgtaatgttaccactttgtcattcaaaagtcacttttcaatcatcaatcagaataca

SEQ ID NO: 177899 - DNA, 443 bp, Glycine max
caagctgtcttttcatattaaagggcatttttttttttttttgcagatgctccctgttttgaaggtgaacttcatgaactctcaagatgccttccaactcctcccatgcaagattttcattctcttgcttcttgaatggatgtggtttttggttcccacatcttgggaaacctgtctagaatcttcaggtttatttgggccttggagtatgtttgttcaagagcttccaaattgtttagaagaacttgaagtcttccaaacatatcatccacaaactctccatcctttatggtaaagctttcatagtgtttggtcagagtcgcagccttcatcagtataacatctttagtgccttcatagtttatgctcaatgagtcttagatctctttgacagtgttcagtctacagatcttattgacccattctttgacaaagcacatgtc

SEQ ID NO: 177900 - DNA, 375 bp, Glycine max
  unsure (1)..(375): unsure at all n locations
agcttctcaaggaagctacctattctattttagaagcatgtgtaacacttgttgtaactttgatgaatgagagtcttgtgagacacaactcanagttcaacttctctccctttttcttccttcaatttcgtgctcccccttctctctttctctccctctttcttttcctccattgaagcatcctctccaagcttcttatccaaggcttatcttggtggtgaagctcattctttcatggcttattccctaggggatgacgcctcctctcacctcttctcctttgtcttccgctgcatctccatggtggaaaatcaccattaaaggatctcattgaagctcaaagatccagcctccgtagaagccccacaagcaagc

SEQ ID NO: 177901 - DNA, 163 bp, Glycine max
acaccgcttcaggtcatctgctaagcgagaaaagcacgcgctaagccagaattcactaatgtgcgctaagcggtccataagtgcgctaagcacacgagcacgaactaggctacctatttaagcctgaaatcagattttataaagagagggtggatttggattc

SEQ ID NO: 177902 - DNA, 465 bp, Glycine max
  unsure (1)..(465): unsure at all n locations
tagaccggatccttaagcaccgcggctgcagcttaaaagctaaacatctttggtgtgatgatgaatngnctcaattgaggaggtcttggaggcatgagatccttacaaacattgtctcgtgtaaagctaattatggatgatgatggagtagagctaagcagagaactgggaatgctgacgcaattaaagaacttagggttgaattatgttaagaaagaacagggaagtgctctatttgcctcaataaatgagatgaaaaacttggagaaactacatattcaaacaattggaggctttacctatgagggaagttcaataagttaccaaagtgaatttcacaactcaaaaatcttgtgaagttgtctttggtaaacatcaagctaactgatgatcaattgaaatcattacaaaaccctgacatatttgtggttcttgacatcaaccatgtgcttatgaagctgaatg

SEQ ID NO: 177903 - DNA, 419 bp, Glycine max
agcttaccgccacagagtattctgactatgttcttgtgtggtggaacaagctacaaaaggagagagcaagaaataaagagccaatggttgatacatggatggagatggaaaagatcatgaggaagcggtatgtgccggctagttactcaagggacttgaaattcaagctccaaaaactaacccaaggcaacaagggggttgaggagtatttcaaggaaatggatgtgctcatgattcaagcaaagattgaagaagatgaggaggtaactatggctcgatttcttaatggtttgactaatgatatccatgatattgttgagctgcaggatgttgttgaaatggatgatttgcttcacaaagcaatccaagtagagcaacaattaataaggaaaggagtggctaagaggagttttaccaac

SEQ ID NO: 177904 - DNA, 458 bp, Glycine max
  unsure (1)..(458): unsure at all n locations
agcttcaactcttaaagtaccaccctaacactctttccaaggaccactccctaactgtaaaccccatgtgtctctcttgacctttntaaacaccccatttttttcttaaaagaaattaaaaaggattatatttaaaaataaatagagttttagaaaaataatgaagattttggaattaaataaataaagaggcaaataaaataaatatatgttcttaaaaaatgttttatttattcatttgataggtagtaaaatagagtttatttttataaaatgataaaatcactaccacaaacatggtcttcaacgatgcaagttttattatggttgtacaaaaactgatgtcataagtaaagtggtagcattttttgtaataactgtgaaatttaaagaggattttatcataatcttctttgaaaaatgaatacgacatcggttctacaatgcgaaaatacaat

SEQ ID NO: 177905 - DNA, 200 bp, Glycine max
  unsure (1)..(200): unsure at all n locations
ataaggcaccatgtttttaccattgatgtctctaaagatatgatacaacacaattatcaattggtaggtctctgttaatataatcataatcctttatattatntattgttgacttcttatctgtaatcaccgtgtgtcttctaacctaggttctgccactagaggcttcaatctatttaactacatcaaacaaatatatg

SEQ ID NO: 177906 - DNA, 445 bp, Glycine max
  unsure (1)..(445): unsure at all n locations
agcttgggaggaatgcctgccctatgcctatttctttgtcccctcttaatttgttacctttgcctaacatttatgctatggtgaataaagatggactttctaaagccaattttgttaagactttgcatgagaaggggaaagcacaaattgagaaaaagattgaacaatatgctagatattccaaaagtgggagaaagaaaatggttatcaaatggggtgattgggtttggattcacttgagaaagaataggtttactttcaaaaggaaatctaaacttcaagaaaagggagatagtccttttcaagttttaaagcgcatcaactataacgcatataaaattgctttaccacttgactatggtgtgagaaacactnntaatgttactgacttgactcttcgtgatgtaggtacctttgacatcaattcgagggcgaattcttccca

SEQ ID NO: 177907 - DNA, 129 bp, Glycine max
gaattgatccttctattattaaaatactcggctaaccacgctttggtgtggggtagaaccaaattaaatgacctctatactcattcggagtgagagctcattacttttggagatcttttagggccacat

SEQ ID NO: 177908 - DNA, 455 bp, Glycine max
  unsure (1)..(455): unsure at all n locations
agctntcacctctgcatcctccacctccgacattcatttattttgcaaacttgcccttcccctccatcaaacaaagtcggagatgatggcattntagaagatgatttttcactgtgaggaaggaatttggacctcgaaacccaaacccaatatcagatttgttatgatgccatagcgacgttcgcgtctccttctcgttgggagacacattgaccttgaagtcatcttccctaaactcaaaggagtggtgaggcaatggaggcgacggacaaggttttagaggtgccaattttagagaggaagaaggaaggagtgtctactatgacaacaaagaagagagtgagaacaaaggagttggagacaatagaaatcctaaaacaaacactaggttttgaagatgcaaaatatgataagctaaaagaaataaactaaaatttttcaatacaaaaattaaa

SEQ ID NO: 177909 - DNA, 454 bp, Glycine max
agcttcaacaacacaggttttggcttatgtttcaagtgaagtgaagtgctaattgacgaaatcagatttctgtttaatcgttcacaagaaaccagaatcaaaatccgttgcaaaagaaaaatgtaggaggaagaagactaagagtgaggctgaaaaattatgcacgagattaaaatattgacgaaatcggaaggtttagtggcggtggaactaagtttgcagcaattatagattacgaggttgtcaggaaggactaaaaaaattgtaattgtggtggccggtgaggtgacgcatgtactaaatttctttctcacggtgagagatttgtcgagctctcccatcctagacgttgccctccaaattagatagtaaacatcttgtctaggataataatcacatttgattgagttaagacttcaatttaacgggcacaaatgtgaaaccgaatacatgc

SEQ ID NO: 177910 - DNA, 276 bp, Glycine max
  unsure (1)..(276): unsure at all n locations
aattatgagtctgagaatctagagaaaggagatgatgatggtgttatctcttccacttcatccagcgaagtacatccacctgtttacactggaatttggtaaacaaccgctagtctaagataattgcttgcgagaccaactaatgaatctcaagagcatgtcaattatgtggttgctttaaaatgtcacggntnttgatgttcatcattgcaacaaacgcttactggttcgaaatttacgaaagaaaaattggttaacagaatcgaatgctggagt

SEQ ID NO: 177911 - DNA, 427 bp, Glycine max
  unsure (1)..(427): unsure at all n locations
agctngcctcaaagaggtccaggattgttttgtatcttaaggaactagttccgctccggagtatgatagtcaccgctntaggagcgcggtacaccagcaacgcttcgaagccatcaaggggtggtcgtttctccgggagcgacgcgtccagctcagggacgacgagtatactgatttccaggaggaaatagggcgccggcggtgggcaccactggttactcccatggccaagtttgatctagaaatagtccttgagttttatgccaatgcttggccaatagaggagggcgtgcgtgacatgagatcctgcgttaggggtcagtggatcccgttcgatgccgacgctatcggccagctcctgngatatccgttggtgttagaagagggccaggagtgcgagtatggccacacgaggaaccggtctgat

SEQ ID NO: 177912 - DNA, 451 bp, Glycine max
  unsure (1)..(451): unsure at all n locations
agcttgccaacccaaggaagctccttatatctcttatactttntggggtgggccattcttggatggccttgattttctcagggtccacttggaccccatttctaccaactacaaaacctaagaaaactatattatctacacaaaaggtacacttctctatatttgcatagagggtgtttttcctaaggactgaaaaaacttgtctgagatgtcctaagtgatcatctaggctcctactatacactaaaatatcatcaaaataaacaactacaaatctacctatgaaatcccttaacgcatgatgcataagcctcataaaggtgcttggtgcattaatgagcccaaaaggcatcactagccattcatacaaaccaaacttggtcttgaaagcatgtttccactcatcaacccttttcatcctgatgtggtgaaaccactttaagatcaattt

SEQ ID NO: 177913 - DNA, 270 bp, Glycine max
gttgacaagaattcttaaactaagaaaatgcccctatcaataaggaccttcgtacctaattattatatgtacttcaggtggattgtacctacatacacgcatttctttgtaaattaatacatgctactcaagcacttggcataaaatagatactgccatctggattttaaactatacacccacgtctgagaaattgctattacaccaaaggtacattctgcttttttaggttttttttttctaccaagcgctgcaatcagtttttttttg

SEQ ID NO: 177914 - DNA, 443 bp, Glycine max
  unsure (1)..(443): unsure at all n locations
agctntaagagtgattcctttcttcttcttatcattttcttcatgtggattcaatctcattaattccatttcttgttcctataactttccaaacaaagtggcaagagacatgttagatagatctcgtgattcagtaatggttgttaccttgggtttccattccctgcttaagcatctcaaaactttatttataagatcttcatttggaaagatttttcctaaagatgcaagatgattaattatatgagtgaacctcttttgcatgtcttgtatgctttcatttgtattcattctaaataattcatattcacgagtcaatgtatttatcctggatctttttacatctattgtaccttcatgtgttacttgtagggtatcccacatatcttttgcacttttacaatntgataccctaacgtactcatncattcctaaagcagatg

SEQ ID NO: 177915 - DNA, 348 bp, Glycine max
  unsure (1)..(348): unsure at all n locations
cacaatgcgcaggatagatgtctaaaaatttcaacattacattaacacatgggtgaaggaatcacaacgagaagcatacttatgagcttacttgaatcggcttgtgnnnngtgctagtacgttcaaaaaaatatttgcattatacgtacctaattatagttctggactttagggcacaatggaagcttgttgttgtgtgtccatgggacaatactattgtttggttttgttctttgcgtaagaagcctgatgttaacactaaagctacaattaacagggtatgttaaaattataattcattcattggataacaattgtaggatatgtatacaagaatttgatgttata

SEQ ID NO: 177916 - DNA, 275 bp, Glycine max
cgcgcgaaaaaaactaggaaatattaaatgatgtcatcataggaccttgttcgacgattttctttatctggggacactgctccactaaccaaacctgaggttaaccacttcttactgtatacaaaaaaaatattattaatgagtgctacattctctaaaaggaagacggcctatcactacttgagagcccattatgttcgcctacgatgcacaaataacccgctagtgctaattcaatttcggggttatgaaactatcctcccgccaaacttgat

SEQ ID NO: 177917 - DNA, 436 bp, Glycine max
  unsure (1)..(436): unsure at all n locations
agcttggccaattttcttcaattgttntatctatcttaccattcctgaaaagatntaaacaacacatgtcatttctatggtagcaagaagaaagggagacttttgcaatcaataaactaagacagtcttgcagcaaaaaataccaagagttactcctatatatattgtttgaattttttaagttatcaattatgtatttatgttatcaaatcttataagatttcttaattttgaatatgatataaaatataattagaatacatattaattcacactatcgtttattttgaatcagaatctactgtattattaatataaatatttaaatcataaatatcattgataatagttttctttaatatgaacaaaatatatatatatatatatgtatatcaatatattaattagtagtatcaattaaatatgaatgcattaa

SEQ ID NO: 177918 - DNA, 459 bp, Glycine max
  unsure (1)..(459): unsure at all n locations
agcttggccatccataagggcttctcttatttattttntccttcactctcatttgtgcttcgtggcaaaaggttcaaattaataaggatccaacgcaagtatgttgagggcaattttcacattttctttagggaccatgtttggggtgtttcttacacggagggcacaaaatcttttaccatatgaagggcttcgaaagttttcccctaagaatgatgttaacaagaaagtccttgtaagacattctaaggtggaacaacaaagccgagaatgatagatagatatcccgtgctgctttctgaaactgaagatacgaaagatgaaaaaaagtatatatggtgatgtgtaggggcataaatggttatctatgaattaagtcctatgctacattattggatntgtgggcagacatgcatttctgggaatgaactgtatantaaactaatgtagaaatatgta

SEQ ID NO: 177919 - DNA, 462 bp, Glycine max
  unsure (1)..(462): unsure at all n locations
acctgcggcatgcaagctntggcaactagacaagcagaagtggtttgcttcttactgctcatgtcatctttatgtgttgtgctttttggccattaactcttcttcctccttccccgtttgggcttgcttttttttgtcttcttttgctgctcattcataattttttcaatcttcatcaactatacccttggctagccttttttttttcctccttatgatgacgtcttcgtccattggaggagcctccttcaatgtttgttccatcaccaccttcatatcttttgggttgcttttgctgaatttatgttccttagcatcaaccaaacctttgactataatgatgtgcttagagtcttcgttcatactatgaaagacatgataaactccttgatcccaaagcattttatttatccgagcagcaaatagatgtcgtctagtccacctaagccctttagatttgga

SEQ ID NO: 177920 - DNA, 356 bp, Glycine max
  unsure (1)..(356): unsure at all n locations
ttaagcaccgcggctgcaagctgcaactgctctctccatntggattatatatgttatnngaatgaaataaaactaagcaactgagggaaaagtttttctcctcacatattcaaagctttaagttggtaccagagcgggtcgtatccaccgtcgtccgcgccgccgtccgccaccgtccgccggccgtttcaaccggcgactacagggttttgtgcgcctcgaggagcgcaactcagcgcaactaaccgctgggccaggagcttccccacgcgccatcacgcgccatcttcgtgcgcgccaaacgccggcgcgtgaccaccacgcgctcgcctcgtcttaccggaaacgcgcgcgtt

SEQ ID NO: 177921 - DNA, 462 bp, Glycine max
  unsure (1)..(462): unsure at all n locations
agcttaaaacaataaaatatattntaatttaaataattctatttaaatatattatttgtataaaactattaattaattatttttttataaatatgacttttaaagtaactatttgaaagtaaataactttaaattgtattataatctataattaaatgacaatgtaaaattttatatcttaatatatttcaattcaattcatattttaatagaaatttttatcaaactagaacaacaatcatgcatctgacaagattaaaacaaaaactataatttaaatgcaaataaaaaaaatcaatgctaagaaaatgttgtaaaaaaatcagcactcaacatgtgtattaattttggaaactctatgtcacattnngttctcttgtctttgtctattacacaacatgtcttcctcatctgtcaaagtggtagtgcactacgatggtcaaatcatcaaaacggatgaag

SEQ ID NO: 177922 - DNA, 457 bp, Glycine max
agcttctcggctcatactgggaacgcctctatttaacacccgtgcagcctaaagcacccacccagagggaagctccccaagttccaactccgaacacgactcgaccggccggtaattccaacacaacaaggaacttccctccgaggccatttccggaattcaccccactcccaatgacgtacgaagatcttctgccatccctcatcaccaatcatttggccgtggtaactcccggaagggtcctcgaaccccctttcccgaagtggtatgaccctaacgcaacttgcaagtaccatgggggtgtcccggggcattccgtcgaaaaatgcttggcccttaaatacaaggtccaacatttaatggatgctggatggctgactttccaagaggatcggcccaatgtgagaaccaacccgctcgccaatcatggagggggagcagttaatgcagttgagtc

SEQ ID NO: 177923 - DNA, 450 bp, Glycine max
  unsure (1)..(450): unsure at all n locations
agcttcttatccaaggctcatcnnggttttaatctctttcttccatggcttattccctagtggatggcgcctcctctcacctcttctcctttgtcttccgctgcatctccatggtggaaaatcaccattaaaggacctcattgaagctcaaagattcaacctccatagaagccccacaagaaagcttctatcactaaagctagaaatcctaacttaacaacctacaactaagaaaaagcgaaatcatctatcctatggtttgagaaataacaatgcaaatgaacgatgcaagagaacttacttggattatgtctgtgcaaggaaatgaagcaagcagatgcaatgtatgatttggaagcaagaaaatgcagtagcagaggtagaggtaactttgggtatcacccanagtgcctcatccttnggcttnnttttaaaaaaactgaattcgca

SEQ ID NO: 177924 - DNA, 419 bp, Glycine max
  unsure (1)..(419): unsure at all n locations
agcttagataaaaacattgaacgcatgtntatattcttttatagataataaaaatatttacatcaagtactcagtagaaattctcaacaaaggattttagccctccattacaagggagtagctttcacaaataggagaagggtttcagagaaaataccagattacaaagcaatggggatgtctcctccacctctacctccacctctaagaacctagaaaataactctaaaatctataatctacctaaaagttaggacctttgcttccttgctcagcttttcctctgttctctacacataattcgcagtcaattcagacctctttcacgtcatcacgctctttctcaattttttatgtgcaaatcaggcttaaaaagggctttctgacctcgaaggcgtgcttagcgcgagtaagtggta

SEQ ID NO: 177925 - DNA, 209 bp, Glycine max
tggggggtttttgtttcattggacaacttgttttgttggctatgcttcatgatgtattttgggccatacttgatgtacattgtatattggttaaattttggacatgctgaatgaaatgttgcttctcacaggccatagagtaaaaaataaaaatattccgaaaaaaaaaaattccaccaacaaaaacagaacgcctttagctgagtgaa

SEQ ID NO: 177926 - DNA, 451 bp, Glycine max
gcttgtcttgcttgatatatgcaatttttatatccctaaacactctcaaatttgagtaatctactggttttccactccaaagttccattggggctttaaaacctaatgcagaaaaaggacatctattgattaggttggaagtagttgtaacagcttctccctaaaaagtttttggtaaacccacacttagtaacatgcatttgaccctttctaggatggttatgttcaccctttctgccaagccattctgttgaggggtgttagccactattttatgccgttgaactcctaatatcctacaaaactcatttaattgctctgaaacaaactccaggtcaatgttagttctcaaacgtttaaccttggtttccatttgagtttgtatctaagtataccattccttaaatttccaaaagtgtacttttattttaatgacaagatccaactcttt

SEQ ID NO: 177927 - DNA, 154 bp, Glycine max
aattgttaacacttaagaagagattaattcatcatcatccgctatgtcaatatatgacaatctctatacaatataagggtcaacatgctatgcaatgcattcaatatgcaatatgcaatagcgggagtgatatctttctctccccttttggatt

SEQ ID NO: 177928 - DNA, 458 bp, Glycine max
  unsure (1)..(458): unsure at all n locations
agctttgagccaaaatcctgactcaccanatactcttgacccagggtgagaatgtcaatccttaccctcggaagcaaaaaaagaatagaggggaaatttccaatcaaagaaaaagagaaggaaaatttccaatgaaagcaaaaaaagaaaagaaggaaaattccccaatcaaagagtgggagaaagcaaaaaaagaaaagaaggaaaattccccaatcaaagagtgggagaaagcaaaaagaaaagaaaggaaaattcccaatcaaagaatgggagaaagtaaaaaaggaagaagaagaaggaaagaaagctcctgatcaaggatcgaaagaaaacagaagaaatgtgcagagaggtctttggaccggacaatatctgaacaatacagaattgccacccaaatgaacgaaaaagaaggaaagggaaccacgacctaaaatagtcttcttcctttgatt

SEQ ID NO: 177929 - DNA, 211 bp, Glycine max
cccatgcaagatcaacaatattgaccatgtctagctcaagaagccaagaattctaaaattaaattgtcttttgaagcttctacgattagtcccatggaggtggatgattatgggtgaatgatcagactttgctgcccagccattaataagcttggagttggagaattaatcaaaccattcaagagttgctagttctttatacaaccatttc

SEQ ID NO: 177930 - DNA, 461 bp, Glycine max
  unsure (1)..(461): unsure at all n locations
ctgcagctgacatgagataatagatgtttttttatactccatttccatccatgcaaaagatatgacatgtttaggtttaaaatatatagatgtatattttttaaaccatttcccatcctgattgagttttatcatatttgggtcaacctatgaggaacccatcacattnttctataattttaatttacttatatattgtaaaatattaattttatatttacaattgaaatttattttatattttgtttcttgaaaaaatatctaatttggttgctatcatccaccattgataaaatatcatttaatattaaaatttacatattgttgttctttattaatatacaaacatttagntctattttctttataatctgaatatatgatatgnttcttattttgtaaaaaaacaaaacttttagatcatgttgtgaagaatattctaaatctattatcatagatct

SEQ ID NO: 177931 - DNA, 386 bp, Glycine max
  unsure (1)..(386): unsure at all n locations
gaaccacatttgattttgcaacattgtaaaggtgaccgggcagaacaaaaatttgagactgtggcatcagattaagctactaaaatttnnttggtgccataagattaagttacctagtgcatcggcgagaccaagaaagttcattcaaatgctcacgcttcattttatctctctcagccttgtgaactctcctggggagtttcctttggttcttgttactgggacaagaccttagcacatcaacatcaagcctacagaaactgaatccagacatttgaattgaagctatttgttcccataaactactcatgccngagacattgtacttatgggatacacttaaatggagcatcatgggaaaaaacctctattccatatttgaatat

SEQ ID NO: 177932 - DNA, 434 bp, Glycine max
  unsure (1)..(434): unsure at all n locations
agcttgtattaataaataataggtcctatttgtggtgcttttcctaatatcattttaatcaaattagcatggtcaactgcaataataacctcacacggcctcttgtttgtttgtgttcacaagtttacatagtgttgtttatgagctttttactctattttcttggctcattgttctaatgaaacactgcaggcccaaacgcctcacttgaagaattggtagattttataggtgttgctcaaatggcaaaggctgaagatgctcttctgcctcctgaagaaaaggtagcaatgtaaccatattagtaatctttggatgaacaaaatagaaatttattgcatttaattntctgtaaaattttccttcaaattatctagtataatccatttgttgttcccccctcccccctttcctttatctatcacatgtttaag

SEQ ID NO: 177933 - DNA, 289 bp, Glycine max
aacattattaatttcattgtaatatttaaaaacctcagttgtttttgtaaaacaacaacagtgataggaatctatatattaatatcaataataatctttacgaaatgcattttatttcacaagctgatggtttaagtattaattttattataaaaaacttcggagtagaactcacttatttatgtgtaaataatcaatcgaaatcccccttatttatgattaagaatacgcaacgcatggtcaaataactaacaactattttgggtttacatactcaaaccaactttta

SEQ ID NO: 177934 - DNA, 434 bp, Glycine max
  unsure (1)..(434): unsure at all n locations
agcttagagaggaagcttcaatggttgtttagaatgagagagggagataaaaaaaaatggcctgggaatgaaggaaagagagggagagaagttgaactttgtgtctcacaagactcttattcatccaagttaccacaagtgttacacatgcttttatttatagcctaggtggcttccttgagaagcttacttaagaaacttccttgagaagattcctttagaagctagtgttacacccctccaatagcaaagctcacccccatgccaaaatacatgaaggaagaaagcttccttgagaagcttccttggggagcaagtattacaaccctccaatagctaagctcacccncacgggaacacacaccccttcccaaaatacatgataatacaacaaaagtccctactacaaggactactcacaatgccctgaaata

SEQ ID NO: 177935 - DNA, 361 bp, Glycine max
  unsure (1)..(361): unsure at all n locations
agctttgtcctcagatccctcttatgggactattcatgattaaacaacattattgtaacaacatatttaaaaccaaaacttaatccgcatatccctcttgttggactaagtttcaattctgcttcattcaagttcaaaggcaacaatacagttcccaatgctaaagttacctaactatgcacacaaatgggtgatcagaccaagagcatatggaatttaagcatagaaagaagcattgaacacaagaaacacaatcaattagatattaaagtaattacatcatttgttcattagaaatccacaacaagggtgtttatctagccattacagaannaaccctaataataataatgagaataca

SEQ ID NO: 177936 - DNA, 205 bp, Glycine max
  unsure (1)..(205): unsure at all n locations
accccataatccaacaagcttgatgtgagaaaacgctgaagagtcaatcttcctacttgttggtggatgaccacagagcgcgacctggagatatttcgcangggtcaggagacctttgaggatgtcatgtggggtgctattggccaaaaacaagcttgaccaattcctatctaacttcgggatagttactcagtgagaaactgtg

SEQ ID NO: 177937 - DNA, 418 bp, Glycine max
  unsure (1)..(418): unsure at all n locations
cctactgaatataaattagtcatatccaacaacacatcctaataacaaaataaaacaagaaatgggtcttcactnttcttcatttttatactggatctttatcagcagctttccttctagtgaaccttggtgttggcatgaaaagtaagggtgttgttggtgggccatccacaacaagtaagtctattgttgaagtgtctaaaatgttgttttgtttgggtgcgtctctatttatcattcttcttccacttgaactccctgcccatgaatatgctatactccctcaaggtagatttaaatttaggcagagtaccaaacttcatccctacttccaacttcatttcaccaaatcgactactttcattatattgaggataaactatgtgaacatctcatcttcatcatcactactaatggg

SEQ ID NO: 177938 - DNA, 444 bp, Glycine max
  unsure (1)..(444): unsure at all n locations
agcttcaagaaaaagatggcctcagcaaattctttatttccagaagggaattctatcaatagacctccaatctttaatggagagggttaccactactggaaaacccgaatgcaaatttttatcaaggcaatagatctaaatatctgggaagccatagaaatagggccttatatacccaccacagtagaaagagtttcaatagatggtagttcatcaagtgaaagcataaccatagaaaaacctatagatagatggtctgaagaggatagaaaacgagtacaatataacctaaaagccaaaaacataataacatctgccctaggaatggatgaatatttcagagtttcaaatntgaagagtgctaaagaaatgtgggacactcttcgataacacatgaaggaacttcagtatgttaaagatctaggataaatgcactaactcatg

SEQ ID NO: 177939 - DNA, 246 bp, Glycine max
gaccgttcttcgacgttcttcattcgttcttcatcggtcttcgaatcttgaacgggtaagtacctcgaaccaagcttttcgattcactctatgtacccgtggtggtccacattgtggtttgtgattattatctcgttcatatactttaatacccccctgtgacggcttaaccattttattaaggcatttctcgctaacctaaaaaaaataaatttcaccgaccgttgaattgattatcgtaacttc

SEQ ID NO: 177940 - DNA, 458 bp, Glycine max
  unsure (1)..(458): unsure at all n locations
agcttgcatgatccanagcattactgctgttattatctgagaacttggaatcaaaagatcaagaaaacacgtcatgcgtttcaatgtagttggcaaacgctactcctgtgctggccgagaacccaatactaacccgagcattctccaagttcactgtctcggagaggatatagcttgctctttgtgaagcaaccaacaggcttgtggatcttgggaataaatttgtatgtccaccattcaagtcatcatgtaatcaattctagttttaataataaaatattattttgttatcattatcatatttcactcttagattaaatagtccatttgataatgttcttaattaaaattaaagacttgttattataatagagattatgataatgagaaacacagttttttaatnttaatttaaattgttcttggtcataagaaatattgaaataagacatctgtgg

SEQ ID NO: 177941 - DNA, 200 bp, Glycine max
agagggcatcagctgccatatttgtttttcccttgctggagtttataacatatggaaattgctctaggtactctacccatattgcatgccttatgtataactcgctttgccctctaatgtacgtcagtgattgatgatcactatgaatgagcaatcccttggaaacaaagtgatgttccaacgttggagggctcttataa

SEQ ID NO: 177942 - DNA, 422 bp, Glycine max
  unsure (1)..(422): unsure at all n locations
agcttgaacccaaaccgatgagagtgtgatctttttctgtgagtgaacgactagctgtgactaataatctttgcatcaatttgtgaattttagaatgaaatttataaatgaggacttgatgaaggccatgattgtgcatatacaagccttttgaccaaaaagcttaccttgaattataattgtatcatttgcaccctttgtgagctgaatgatnttgtcaataattgaaccctaaacctgaatgattatctccagataccttgtttagattctaggagagcatatggttcaaggcattaccccaaatttaggggagtggaactaattgggatgcaaagaaagagataaagcatcagcacacaacaaataagttgtgtgttaaaaaagaanaaagaaaaagaaagcaatcgaaggaaatgtgt

SEQ ID NO: 177943 - DNA, 241 bp, Glycine max
agtcgtattcaccgactaaaagtggcccaggaattgataaaagcaaactactatcccctcactcgggagcgcaagcctggattaagcattaaggacggaggaccttgagttctttgaaggcgtagatgtagagcccaaacttatgataagaaacacaaactccatcacaatcatgcactcaatttaaaataaaagcatacaaccattttcacaaaaagataaaatggtttatggcatgtat

SEQ ID NO: 177944 - DNA, 349 bp, Glycine max
ggggggggcacgaaattgaaggaggaaaagtgatgcaatcctccctaggaaaggaccagttaccaaagccatgagcaagaggctccaagaggattgggttagaactgttgaagaaggcccgagagttctcatgaaccttagggtagatttttgagcccatgggctaaagttgggtccacttatctttgtacatattagattaggatttcattattttttttatctttgtatttaggactccataatgtaggtagggtaccctagaaatataggatttttcagcccttgtattttagggcacctagactagtttttgtattcgggatagttttgtaatttcacatgcact

SEQ ID NO: 177945 - DNA, 278 bp, Glycine max
atcttcttcatcaatgaattcctttgcttcttgaggtttgattgcgatagaatataaaacgagaaagatgaatggaaacttcacatcaagtataagatgggtatacaagaagctcaccaccatatgaagccatggataaaagcttaaaggtagaagaagatgaatgaagggagaggaagagaagagcatgaaattactggctctaaagaagtctgaactttgatagtgtaatctcacatgatcaaagttgaaaaatgcacacacatgaactctattta

SEQ ID NO: 177946 - DNA, 428 bp, Glycine max
  unsure (1)..(428): unsure at all n locations
agcttctgcgtcgggaaggtgagcgtttgngttatttggaagaagaagccatgagagagagaatgaaagaatggatatactgtgtgtgttgtgaatgtgacgtgaaggggatggaacatgaggctgggaaaatttgagggatggatcttcttagtgcctcaatagattctttattttttctagccacgaggggataaggatgaaatgaatttttttttttttgacttttacctacactatgacaaacaattgtaggtataagtatttttttgacttttacctacactaatttatgtgtgtaggcaaaagtctccgtaagtatatgtcattttttttgtagtgattgtcttatcctcttaanaattccttggccaatacacttgtaattcaataaggaattatttgagtgcttcattgttcaatctatc

SEQ ID NO: 177947 - DNA, 190 bp, Glycine max
ttcagtctaactagggattgaggcttagtaatttaagctacaacataaaacacaagagcatgattgattagagaaatatctttatatacatcagctggtttgttagaaagacccaacaatcttacctactggtggcaatattacttgcatttttactggttgtagcctagacttaggttaatcctactct

SEQ ID NO: 177948 - DNA, 449 bp, Glycine max
agcttgtgttagatccctccaccaaacattttgttttcctgtgctcccttgttcatcaagattcctccatccaccatatttggattccaaaactctggtccacagctctcctttttcttgcattaattgccacttccattttccaactagtgcaagggtaaatgtgtcaatatccttgatgcccaagcctcccttttcttttggtaagcatactgactcccatttaatccacgcaatctttatgtggtctggtccaccaccccacaagaatcttcgctgccaccttaagaatttgtccaccactgattttggcaccctgaaaaaagagaaaagatcaattggaattgatgctagcacagcctgtatgagtgtcactctcccctctcatgatatatgtcacttgaagcttcgattatgtgaggaagaaaactgttcactcactagcttac

SEQ ID NO: 177949 - DNA, 429 bp, Glycine max
  unsure (1)..(429): unsure at all n locations
agctntagctgttagggcctgtagcatgtttgttagctcttttattatttaaatgttaccgacgtcttggttgaaatggattctgaagttgctttgaacttggcctggtggggatgtaaatntttctcaccattgcttttctcttgtctggagcatcaaggagctagttggcacatcattttcttgctaagtatggtcattctgtagactttgatgttcaggttttttcctgtccccttgccccctttgctcccatccctcggggaagaatcttagcgaattcccttccctgctatgaatgtgtaatctgttttgttgggctttgccgtttatttcatttataaaaaaacaaaagaaaaccagtttccacacggaggatgactactgatatgcacagtgttattaattgccatggttattntattctga

SEQ ID NO: 177950 - DNA, 210 bp, Glycine max
cactctatctatttaatataatcaagtacctgcctaaaatttaaactcaaagacacgggtgaagcctatataactttatatcaattaatctacacacttgataataattttaaaagtatattatatcttttaatacatatctttttctcaagtgtatgcttctgtattaggagttaaaaatatatactacttacttaacaagcctttatt

SEQ ID NO: 177951 - DNA, 393 bp, Glycine max
agcttagatattgattacaggctcttgtggttttatctgctgcaggttcctgttgtccaagcaagctcgttaattaaaaattaatgatggaaattttaataactccatacacacataaacacatgcactttttaattttgttttatttttatagaagctagatcaaatgaaagtgatggaggtgtgaactagacatctatacaagtctcttttatgtgttatcaaattttggtttgcacaatgaggatggttaatgatgtttcataaaatttgtctcgttcatatatcaataaaattgtaacaaatcttgaaatgggtttactaggagttctatatattttactagtcccataaaatgcacatatcacaacacatttagggcacttacttgag

SEQ ID NO: 177952 - DNA, 423 bp, Glycine max
  unsure (1)..(423): unsure at all n locations
agcttgtaactcaatatnncnnctcttattttgtttnnnnnnnacagataaaagaatcagacacatccctgtcatagatgaaaagggaatggttggcatggtgtccattggagatgtggttcgtgctgtggtgcgcgagcaccgacaagaggtggagcgcttgaatgctttcatacaagggggttattagatatgatgatgaaaatttctcaagggcactcaagctaatttggattatgtaataagcttgagtgcttgtaaatatgttatggccacagagccttcttgtttgctttcatgtaatttcagttntatggacattaacccagtggagtagcagcatgttaataataacaactggatgcagtttgaaatttgtttgaatcatgtttcactagtgagtgcatggaatggacacaggtt

SEQ ID NO: 177953 - DNA, 291 bp, Glycine max
agactccattctgctgccttactcactttgtgttctttactccattgagatgacttaatttgtactttttaaattaacttcattggaggattaattccatgctcgcgttctattctttattttattatgtggggagcttctttctagacttgttctagtatttagagttggattcactggtagtttgtaccttgtgccttgctttattattactgtgctaaattacctttgccccttattattatgttgcaatttcgtatttaaccctataaaatttctattattgatctt

SEQ ID NO: 177954 - DNA, 456 bp, Glycine max
agcttgtaaaataaggaagcaagtttatatctcttttcatagcaaaaacattatttctagttcaaaaccccttgaactacttcacattgatttatttggtccctctagaactatgagtgtaggtggaaattactatggctcggtaatagtggatgattactcaaggtttacttggaccttgtacttgaaaaccaaaaatgaagcttttgatgctttttgcaaacttgccaaggtgattcaaaatgaaaaaggtctgaacattgtttcaattagaagtaatcatataggtgaatctcaaaataagtatcttgaaatcatctgtgaagaaaatggaattcaccacaatttttcaacccaagaatacctcagcaaaatggtgttgtggagaggaaaaatagatcccttgaagaagtgcaagaacccttctaaatgaaacaagtctacctaagtactttt

SEQ ID NO: 177955 - DNA, 112 bp, Glycine max
gaaagcactttctaagcctgatttgcacagaaaaaaagaaagagggtgacaacgtgaaaaaggtcagaattgactacgaattatgtgcagagaacagaggaaaaggtgagca

SEQ ID NO: 177956 - DNA, 456 bp, Glycine max
  unsure (1)..(456): unsure at all n locations
agcttatntatgttatgtgtcctctaatatttatattttatatctgatgagagattgtattctaaattcttaatcattcttttgtgtggatcatgtggtattacattatttttttaaatctcttaattttcttattccaataatatatcttattttgagatttcaaattatttttttatatctcacaagagactcaccttttatatttataaattatttcaaaataatgaaaaaattaattttatatcttttaattttaaaaaaataaaattataacacgtttcggttatgtagtgagattntattgtgcatgatacagctcactatatcntatggtgcacaaccgctacatttttaacgcgaagatctttaaagttattctacaagaaacaaatctccaacatgcacatctgaagggaacttccactacctgaatcttgaaaaaacaaatcttca

SEQ ID NO: 177957 - DNA, 443 bp, Glycine max
  unsure (1)..(443): unsure at all n locations
agcttangagcatacataacttacacatttgttgttggtctcttaagatgagtacattcacacttactcacatacttattnttatagttactcttctaactctatatacttatttgaggtcgtaatctttgattctacatatttttctttttgccctcctaataaagatgatccaaatttaggaatttatcataatcacatctatgacgtgtgtctgcttcagattttagtaaatacaacagtaatttacgatatttattatattgattaaattcctgtttttcatgtttgcacggcggatcatttctaattatatatatctatttgaacgagcgaagacatttatcttataaattatcttttgtactcataacaaaaatcattctcaatccatgaattcatatgcgtgtgagtttcaaacttagtaactacaatgtgttata

SEQ ID NO: 177958 - DNA, 175 bp, Glycine max
tttcaatagcatctttggatatgggaacaatgttaagcgagaccgtttcttatactcaaaatacaagacgctatcttaaaatggccttactgccactctctttgccggattgttccaatcttttttgcgtgtataaagtattaaatcatacacccttgttttgatctgtattacg

SEQ ID NO: 177959 - DNA, 439 bp, Glycine max
  unsure (1)..(439): unsure at all n locations
cggatccttaatcacctgggctgcagctatcttgggattaagaactattgtttattgaaaagggaaagttcttctcaagctaatatctaggaaaatacttgctttgaataatgtgctacatgttccctctataagagttaaccttgcttctgtancattgctgggaaaggttgggggtaaaggtttcctttgagtctgataagataattatgactaagaataatgtatttatggggaagggttattgtgatcaggtctctttgtactcaatgtttcttaagtgattaataagaatgcatcttcttctgcttacttgattgattcttatgatatatggcatgctagattaggacatgtgaatccaacatatgttatgaagatgcaacaactaggtttaattaatataagtaatatacaaaataagaaatgtgaaatatat

SEQ ID NO: 177960 - DNA, 452 bp, Glycine max
  unsure (1)..(452): unsure at all n locations
aatagaatgagagagagataggtggagctcgatattgaaggatgacaagacggagagaagctgaactctgaattgtgtctcacaagactctcattcctcaaagttacaacaagggttacacatgcttctatttatannnnnnnnacttgcttgagaagcatgcttgacttgaaaagcttctttgaaaagcttcctagagaagctagatcttagctacacacacccctctaataactaagctcaccttcttgagatgagaagctagagcttatttacacacacccctataatagttaagctcaccccatgccaaaatacatgaaaatacaaaaaagtccctactacaaagatttactcaaatgccctcgaatacaatgtccanaagaaagaaatacatcatttaatatttatcaagaagaggggagccaacctttgcccatgggctcataaat

SEQ ID NO: 177961 - DNA, 455 bp, Glycine max
  unsure (1)..(455): unsure at all n locations
agcttatgctgcaaacatttataatagactcttttatcagcaaaaccaacaacaacagaataattatgacctttcaagcaatagatacaatccaggttggaggaatcatccaaatttgagatggacaagtcctccatgacaacaatagtctggccctctttttcagaatgttgttggtccaagcaagccatattgttctcctccaatacagcagcagcagtcacaacaaagacaacaagcaactgaggctcctcctcaaccttccttagaagagttagtgaggcaaatgaccatccagaatatgcaatttcagcaagagacaagagcctccattcagagtctgacaaatcatatgcggcagatggctactcagttgaaccaagctctgtcccaaattctgagcaantccttcacaactgtgcaaattcgaaaatatagtgccatcacctgagtat

SEQ ID NO: 177962 - DNA, 455 bp, Glycine max
caagcttccaagttttaagttctttctcattactgtcctaagcaaagttcccaaagtcctattaacaacttccgtttgcccatcggtttgtgggtgacaagtggctgaaaataacaatgttaggcccaacttgctccacagagtacctctaaagtgacctacgaacttagagttcctatcactaacaatgctccttggcaaaccatggagtctcacaatctccttgaaaaacaaatcagccacatgggaagcatcatcaacttttttacatggaataaaatgagccattttagaaaacctatcaacaaccacaaaaatggaatctctaccattgcttgattctggccgccccaaaacaaaatccatggataaatcaatccaaggatactccgggaatggcaatggagtatcaatccatgaggcttaccttagactatgccttatacatacaatgc

SEQ ID NO: 177963 - DNA, 433 bp, Glycine max
  unsure (1)..(433): unsure at all n locations
agcttaagctccttcaactgcacaaggtncttattatttgaagagtatccttgtggaaccttcacccaacaaagacactgacaaaaacttatcttctccttcttggacaaagtatggtaggctgggggcaagtaaattttcttcccatcagaccttggatgcaactgtgatcttatatccatatcagctagatcttgacgggtattcaagccatccttcgtcttgccttgaatgttaaggagcgtcccaatcacactgtcacaaacatttttctccacatgcataacatcaatacaatgtctaacgtcaagatcactccagtacggaagatcaaagaaaatggacctcttcttccatatgcaactctgactattatccttcttttgggtcttcccaaatacggtgttcaggtgtngaaccacgtgatatacct

SEQ ID NO: 177964 - DNA, 257 bp, Glycine max
agtatgagcccatttatattcgtacatattagattaaggtttcattattttttagccttgtatttaagactccatagtgtagggaagggaccctagtaatgtaagaatttttagcccttgtattttagggcacctagactagtttttgtattaggagctagtttttaatatcacatgcattaaatgcactatctgatgtgtgggtgttgagagataaactttattggattgggagaaggcccatccatttaattttg

SEQ ID NO: 177965 - DNA, 442 bp, Glycine max
agcttttgctacaacctttatctccccctttgttaacatcaaaaagccaaagaactcggaaatcaacacagttataacaatggagtagcaagatataagtatcagagtattaaatccaataagccaaactcataatcaaggaaataatcaaaccagaattcaaataacataaaatgtcaacaaccacaaaatatccaagactgaaacacaagaaaaataagcaaagtacttagcataataatgtaaattctaagaaactaaaagccaaaatacacggcttataaaagataaataatcagaacctaaaatctaagaagacggaggaggtggtggaagatcgaaactctgacgaatgtatccgacatcctcttcaagctgtgtaagacgaatgtccataccggcaaagcgtgaatctaacgagtcgaagcggtcaccaacatac

SEQ ID NO: 177966 - DNA, 175 bp, Glycine max
gaaaggaagaacacgaccaaaacaagttttgaggggctttatatggcagcaatagtgagctcaaacttcgaagaggggaaaggaaatatcactggtcaaaggcctgatctggaaggatgagctaaaggcttgctttatgtctaaaagaaatttgttccaacagttaaagtgagac

SEQ ID NO: 177967 - DNA, 397 bp, Glycine max
  unsure (1)..(397): unsure at all n locations
agcttcttagaccagagaattcagatattcttatagggaaaattccatttttaatcctttcaaattctgtgactaaactcgattaatgttatattttttagattttaaaaatttattttaaatttgaaatgaaagtaaaaaaaattagaatcgtttgataattttataatttgttaaatttaaaaatcattttaaagtttttatagtagtatattgtttatcattaaattgtaataataataaaaagatagataaaaatgaaaagcataaaaaatatctgtgaaatgatttttaagataaagagaaattaactttcgaaaaaatctattcgacttaaggagaagacnaccttaanacagattgagtcaaatttgtaatttaattaacttatctaatc

SEQ ID NO: 177968 - DNA, 455 bp, Glycine max
  unsure (1)..(455): unsure at all n locations
agctntaatgggtatttgttatgagtagaatttttgtagtttcttgcatgttaacaatgaagaattgtccgatagtgttgagtgtctttccattttattattttttattcaacaataaaatcatggacattggtgtttggagttggtggaggcattattaatgctcggttttggctagataagaaaccgatggtaagggagaaatttatggcaagacagaaaaattgtccaagttcaaagaaaaggaaatgggtacatcacatgaaaaggttgcgagaaacctccttaatttgaacattgccgatgaggaagcttgctagatgaaatgattgatgagaatatattatattggttccatatccttcgcataaaaaaaatatntttaatcttataacttactattttntattntctactttttatttttgtagaatattntttatatttgattctta

SEQ ID NO: 177969 - DNA, 145 bp, Glycine max
actgaccatgttgcttgctctttaaattcttctccacacacaaacaaattagtcccataatagttcaattttctactagtcaacaagtgatagccatacattcaagaactgtgaaattttatgactctctataccttgaaaatgt

SEQ ID NO: 177970 - DNA, 417 bp, Glycine max
agcttagagaagagacacatgtattcttctttgcttgagcatattgatattaatgtcaagcatttcgtccttcgagataacgatcctgagaacttgaataaattacagcccataaatcaaccaaattagtgcgatccattttgttctttaattaatcatccactgtggcaatatgatccacaattagtggggttaagtttatacacaagtcatatcaaaataagaaaattttaagtttatgcaaaacattggatattattcctcaaaatatattaaaatgaatgacatatatgtggcattttcgttgtgaagaataacatttcctccactgacacctcatgtataggttgcagccagcatgcatgcaatgagatatatatggatgaaagcaacaagtacgtgtctgagttgaacttg

SEQ ID NO: 177971 - DNA, 400 bp, Glycine max
  unsure (1)..(400): unsure at all n locations
agctntagacggactataccacgctctttgatccgggacggagaaagatctatatataggcttgctcagggtccagagaggaacactatagacttggatcaagttaagtgtgttaaggatgaagaaggcaaagtcttattgcatgaaaaagatatcaaggaaaggtggaaggcgtatctccacaacttatttaatgatggatatggatatgactctagcagtctagacacaagagaagaggaccggaactatcagtactatcgtcggattcagaaacatgaaataaaggaagcgttgaataaaatgagtaatggtgaggcggtggggccagacaacatacctattgaagtgtggaaaactcttggagatacaggtcttgagtgggtcacctacctcttta

SEQ ID NO: 177972 - DNA, 419 bp, Glycine max
agcttcttttggaccttgaacaggcaacttatttctctttcaaaaccatgctatgtgctcgcgactagtccctctcttcccttcgcagcttgagttcactattgctaccccacagagctccgcgaaatttattccggccataatcttccttgcgagccctcttggtctcttgttcaagggctcttgcggtagttgcattctcttcccgtaatccggaacactccttccgaatgtgtgtagcggccaacttgaacttctccttggcaagtttcgcctttcctaactcacttttgagagcttggacttcttcgtcctcttccggtgcttcaaaactctcttcgctgatgacttttaacttggtgagccaatctaagcctcgtatatgaactttcaaccattcatggtacccaccaatgatg

SEQ ID NO: 177973 - DNA, 209 bp, Glycine max
ttataaatttacacaagtgtacacatgcttctatttatagtctaaggagcccttcttggaagctagagttacacccctccaatagctaagctcactacctgccaaaatacagaagggagaaagcttccctgaaagcccccctgcgagcacgtgtacacccctctataactaagttactccccccccccattcattgtatacaaataaaa

SEQ ID NO: 177974 - DNA, 291 bp, Glycine max
  unsure (1)..(291): unsure at all n locations
gatcgagttcgggaatatatcgagacacttgagaatgaaaacgaaaactcgtagcaagtgcataccgcaatcacttttaaatcgtccgaaatagattgacatgctccaatttgaaaaagaaagttgatagcaaattcaaacgacaataactttntacacggatgtccgattgagtcccgtaatatatcgggatgctccaaattgaaaacggatgctcctagcaatttcaacgacaataactttactcatatgtcgacagaggtcgaatatattgaacactgcacatgaaac

SEQ ID NO: 177975 - DNA, 332 bp, Glycine max
  unsure (1)..(332): unsure at all n locations
gcagctggatttctttagtaggaattttttttttttatggagccaaacccaggccccctcattaagaactaactcctttcttcctctattgcccttagatgaatacacctttgtttggttctctatntgggtcttaaccctctcatgcaacttctttacaaactctgacctagattccccttctttatgtataaaagaaatgtcaagtgggaggggaatgaggtctaagggtgttaagggattgaacccataaacaacctcaaaggcgattgcttggtggttctatgaacccccctattgtangcaaattctacatgaggaagatactcatc

SEQ ID NO: 177976 - DNA, 461 bp, Glycine max
  unsure (1)..(461): unsure at all n locations
ttatggaaggatatgactcttacaattgatgttgatatttaacgttcagatacactggtaatcgattaccaatatcttgtaatcgattacaccattttgaaatcaattggaatgttgcaaattcagttgaaaacttttgaaatcaaactttgccattggtaatcaattacaagaaattggtaatcaattactagagagtaaaaactctggtaacttagaaaattttgagaaaaaaactcttttgagaaacaaaattgtgctatgtttgttttttgaaaaatcttttcaatacttcccttgtgaagtcttcttgatttcttctcttgaatcttgaattcatcttctcttgaatcttgaaatcaaacttctcttgattcttgaatcttcttaatttcttctcatgaaacttganattaaacttgatcttgaaatttgtgactccatcttgaaatcattctttg

SEQ ID NO: 177977 - DNA, 234 bp, Glycine max
  unsure (1)..(234): unsure at all n locations
gtggtgatgagttaatggagggtgtaatacaagatgtaagtgatgaataagaggtgtatgaaagcgaaaaatggcttaaaataaagaagaaaaaaaatgagtgttgaaaatgtcgaanaaaaaaatgagaaaagccaagaacaagagaaatagttttaaggagagagatgatgaggtcttatcttttaagacctagagtcaaataacgagagaagcaaagaagggaacacctag

SEQ ID NO: 177978 - DNA, 264 bp, Glycine max
  unsure (1)..(264): unsure at all n locations
gtagccgctcttgggctcagaagatccaaatactttccctcttattactagctattttgaatgctttagttcctgaatgtacaaccttcaaactattgctcgttcccctctttgagaatgagaaggatcttcataggacttcatccaactgatgtttgtcgccagtttcatcatccaccacccttttcatttcctccttatcacncttgctgatgttcaacccacatcgatgcctccttaacttcataccttgtcttatcccaa

SEQ ID NO: 177979 - DNA, 287 bp, Glycine max
tcctaaatagaagctcgactaaaatgtctaaactgaagtatttaccacaatttaactcttcatgattgtttctcgttctataagctctatgacctcgtgctaaacatggatatattacttgcatcttgagttatctcatccgttccataaaaatgcatacactattgagtaactcctttgttgttagtcatggtgatctattcatggttgttaattcttggtaagaagttaattaactcttggtacttttaattaaaccataatatgtatatgcagagattgatata

SEQ ID NO: 177980 - DNA, 287 bp, Glycine max
  unsure (1)..(287): unsure at all n locations
tgcagcttccaaatcaagaattttatttctatcgcacaagccatcacaggccagaaaattagggcaaggcagaaaactctgcccaaaacaccaaccaaaatcacaggttttctcacccaaagaacccagtaacaatttcttcgttccaattcggtaagccgtggatcgactcaaaattttactggaagtctctatacctaagcctacattgtgaccggtgtgatctactagcanacatccagaactcattctgcacaactcttttcacatccaatcacacacaagta

SEQ ID NO: 177981 - DNA, 358 bp, Glycine max
  unsure (1)..(358): unsure at all n locations
tgagcttagctacacatacctctctaatagctaatctcttctccttgagataagaagctagagcttagctacacnccccctataatagctaagctcacccccatgacaaaaaacatgaaaatacaaaaaaaagtccttactacaaagactacttaaaatgccctgaaatacaaggctaaaaccttatactactagaatggccaaaatacaaggctcagacgaaggaaatacctattctaatatttacaaagataagcgggctcatacttagcccatgagctcgaaatctaccctaaggctcatgagaaccctanggccttcccttggatctctagcccaatctacttggagtcttcta

SEQ ID NO: 177982 - DNA, 356 bp, Glycine max
  unsure (1)..(356): unsure at all n locations
tgcagcttatagcgcggcgggttatttgtttttggtcgcgatatacgaagatgatgttccgagtacattggatttggtacgaccatgccctcctgatttccagctgggaaattggcgagtggaggaatgccccggcatttacgcaacgagcataatgtaaacctttacagttttaaaagctctatagttgggcttaggctttagagtttttccttttgttacggctttgtgtcttttgtttttgaatntataatacaaggatctttcttcatctgttcctacgtctctacccattctcattcatttgcatgggttacctcttatttctgaaacggcagatccgatgatgagtcccc

SEQ ID NO: 177983 - DNA, 429 bp, Glycine max
gatgatatggtcttcaccgaagaaaggatcatagtgtgtcttaaaagaggcaaatctgatcatcatgctttgataaatgcaaaaaaaaaaaaaaactagggcaaatgaaaagggtgagaatgagggagaagcccatgctgtgactgccattcctatacagccaagtttcccaccaacccaacaatgtcattactcagccaataaacaaaccttctccttacccgccgcctagttatccacaaaggtcatccctaaatcaaccacaaagtctgtctaccgcacttccaatgacaaacatcacctttagcacaatccaaaaacaccaaccaagaaatgatatttgcagcgagaaagcctgtagaatcaccccaattccagggcctatgctgacttgctccatatctactgataattcaatgtagccataac

SEQ ID NO: 177984 - DNA, 326 bp, Glycine max
  unsure (1)..(326): unsure at all n locations
ctccattaaaaatgtntttattatattatttcatttcattaaattctaaattagtgggagattgttggaaaatattttcttataatttaaaatttaaaattaaaatatattttctttatcaattatgttttgtaaagataaaatgcctttagaattagtctatgtgaaaactaaaaacatctcattacttctatttatatattaatcttaggaagttatcttttatttagtcaaattcctttgtgaacttacaagtctttaaaaataggaagtttgttgtttggtttttattttatgttgtttaatggtattgtccaagtatttta

SEQ ID NO: 177985 - DNA, 400 bp, Glycine max
  unsure (1)..(400): unsure at all n locations
tctgaagctgaacacaggcagctgacttgctttattatatgaaaaggaagaagctgcagcaagatctttggtcagcagcccaagctcacgagtctttattgaggcanaaggcgagatcgcgttggattaatgagggggttagatatctcgatattttcacctggtgattaactcccatcgaagtttatagctttttccaacagagatttcaagaaactatgagcagcagaccagttttgaatgacacctcttttcaagaaacatgttctttggggaggctactatgaaaaatgtcaagactatcacaattgatttgagagcttttgaattgtcatcacgacttaaaataaattatgggaagagcggctntggggtgttgggccaatctgaacaatggaaa

SEQ ID NO: 177986 - DNA, 419 bp, Glycine max
  unsure (1)..(419): unsure at all n locations
agcttgcaaactgtacctgcgaccgaacttttgttggtttctatcctggcccaagtttatcgtgggctgaagcactggttccgcttccctaactgcattggaggcggttgccgtggcattatcctctagagttttctggagttttagcatggcctccgtgataaaagccatttgatcttttaaggccgatagatcggccttcatctgctcttgcacgccctcttcattatccattnttctggattgagtgttataggggtgcctttgtgcattcttagttatggtgaactccctaaagaaacatacaacggtgagtatgccaccaaaacatgaatatgcaaatgaatgatcggagcacttggatccaccccaaaggttntttagataatgtgatgagttcagaacttctcattttataa

SEQ ID NO: 177987 - DNA, 390 bp, Glycine max
  unsure (1)..(390): unsure at all n locations
agatgatgacaaaaagccggggagaatgagttcaggattgaatcaacaacacttcaagaatcaagagagaataagttcaagattgaatcaagaacgcttcaagaatcaagaggaaatttgatttcaagattcaagaatcaagaaaagactcaatctagataagtactaaaaagtttttcaaaacattgagtagcacatgaattttttacaaaaccttttaccaaagaggttttactctctagtaatcgattaccagtagcaaagattgttttcaaaaagctttcaactgaatctacaacgttccgattgatttcaaatggtgaatcgattcaatgatttggtatcgatancaggtgtttgacgtcaaatcaatccaatggagagcacatc

SEQ ID NO: 177988 - DNA, 390 bp, Glycine max
  unsure (1)..(390): unsure at all n locations
cttgaacaattcaaatttttttggatgcatcagtaagaaaaaacataagaatggcattcttcttgtcaagtccttggagagtggttcttcatggactgttgtcacaaaattatgtaagaaatgtattgaagcacatttttaagaccccaaatttttctgtaaaaccattagagcatgttctcaggctctcatcaatccttttaaaccaaattatcttccatttaatctacttgtcgctcacttgaggttcttttaatcttctgacatgaccaaatcaccttaggagaggtcttatcatcctttttcttatagngcttctcgaattatctacctgatacatttgtcagtagtcaccttaggaccgtagtttcactacttgatctctatctc

SEQ ID NO: 177989 - DNA, 451 bp, Glycine max
  unsure (1)..(451): unsure at all n locations
ctatcaagttcgngtgctggagttgggccacgtgttttgctttttcctaaactccattagcccctgttccaaacttttagaaagtcgctttattgccacttcttgctgatcacttagcgttccctgaaggtgtcactatatcacttcttattctgaaagtttcaaatttaagcaagcaaattaattctttgtcatacacatggaagctagcctttctcttggcaaaatttgccaaatttatcccctgtcctgctcctgaaatttgcacatcactcttgtcattgtacaccaacatgttaacaatacagatttattcgcatgtgagtgctgttgttgacaatccacacaaacaggaaaagatcatttgcatcattttcttgcacacctcgggtctgcactatctcttttgtttgtttccactattcacatactgaagtattgtatttcccta

SEQ ID NO: 177990 - DNA, 291 bp, Glycine max
  unsure (1)..(291): unsure at all n locations
ctttgagcttcaatgaggtcctttaatggtgattttccaccatggagatgcagccgaagacaaatgagaagaggtgagaggaggtgccatccactatggaataagccatggaagaaagagcttcaccaccaagataagccttggataaaaagcttggagaggatgcttcaatggaggaaaagaaagagggatagaaagagagagggggagcatgaaatngaatgaagaanaagggagagaagttgaactctgagttgtgtctcacaagactctcattcatcaaagttacaa

SEQ ID NO: 177991 - DNA, 344 bp, Glycine max
  unsure (1)..(344): unsure at all n locations
ntccaagtnntatttgatgatgccgaagacttttatctgaatcaagagtcaaaataagttttaagaatcgaagactcgttcaatcaagaatcaagattcaagtgaagattcaagatatgcaagaacttcaagaaaaacatcaagataagtataaaaagacttttcaaaagaaaagattgaataacacaattttgtttaagagactttttcaaagaaaaatctttttccaagagttttactctctggtaatcgattaccagaaggcagtaatcgattaccagtagccaacattctatttaaactaatttacaaagcagtaatcaattaccatgatcatgtaatcg

SEQ ID NO: 177992 - DNA, 366 bp, Glycine max
  unsure (1)..(366): unsure at all n locations
atacaacatgcttatgagattccaaaatcattttttctttttttttattaaaataattatttggtatgacacacattatgaattagaccctggatgaaaaaactcaagttttagtccttataaaagcatataaggactaaattttaagtaagggtaggacttcatatagtgatgtggtcactggtagttatagtggccactgcggctgagctgttacacccacatcatgtgatgtggtctacaattaaaaacagatttgaagggtatgactttagattgtgataatccagtttgttctgatgaattggttgcctaagaatactggngtttcactggtaatggattcttttcctatcatatatatca

SEQ ID NO: 177993 - DNA, 329 bp, Glycine max
  unsure (1)..(329): unsure at all n locations
aaacaaagaacaatgttgttaagaactgaccggtcatccaaccgttcgaggcacaacgttagcgggtgattgatcggattactaggtcagatgaaaccggtttcactcaataaacatttaaaatactatatagttaacataatctaattattttatactctaaatttttgaaaaatattagcaatttagcatattatnttatcctataatttcattataaaaaacaaacaagtatcaaaaagctatacatcttacacatatggcatattattagtagaaagtatctttattctctatgttgacgtgctacatgttgtggagaacaactg

SEQ ID NO: 177994 - DNA, 211 bp, Glycine max
tctgatccggagaacaagcataatgtgctgggcaacaactccattgtcttgaagaaattttgcaaatggacctggagctctttcatgctctgtgtatttaccatattacttcccacctctatctagatctcaccatcttaatctgtgttccacattagttctcaacttctgccttagaaactgtacaggcatctagagcttcattcttaga

SEQ ID NO: 177995 - DNA, 312 bp, Glycine max
caactagcgctatctgtcgaagtagtgtttgagctaccatttgctgccatgtccatggtttccaatccataaaaaactcgcattgttccatctatttgttgctggttcacacaaggaaatatactggaaaagttcacaaacccttgaaatacgtttgatgtgtgacacgtgtacgtgcttatcatgttcattaatgtggaggggtgtcaatcatgtaactggttttgtgataacgaaatgtcacgtgatgagtgttgcgaattcatggcgcgggcactgactatgttgttcgggaagtgatcgctgatgatg

SEQ ID NO: 177996 - DNA, 369 bp, Glycine max
  unsure (1)..(369): unsure at all n locations
agctcattgntgatgccccaaatagctctcgaaatttgnctcggccatgctcttccttgcgagccctcttggtttcttgttcaagggctcttgccgtagctgcattttcttctcgtaactcggcacactctttctggacgtctgtagcgactaacttgaatttttctttggcaagtcttgcttttcctagttctgtttttagagctcggacttcttcatcctcttccggagcttcgaagttctcctcattgataattntcaacttggagagccaatctaaccctcgtgtacgaactttcagccattcatgataaccaccgatgatgcctttacgaatgcccctaagttctttatctttccttaacgggc

SEQ ID NO: 177997 - DNA, 381 bp, Glycine max
  unsure (1)..(381): unsure at all n locations
ctatacttgtagcaccactcattgttttggtgaggaaccatgttccttcatgggaagatgctcacgaaatgggttttcagaccttactctactctaacatacccaacaccactaatatatatgtttctattctttttacaagtgttgagggaaggagcccacactatgaagaaccttgggagttgaggtcaaatcctttccaaggtggaggggatgatgcaatcctacccgccaagggtattggatagaagactccaagaggctcgggctagagctactaaagaaggacctacggttctcatgaaccttanggtagatttttgagcccatgggtccagggtggatccactcttctttgaaatattaaatagatttttttct

SEQ ID NO: 177998 - DNA, 365 bp, Glycine max
  unsure (1)..(365): unsure at all n locations
tcatgaatctttagtagcagggtctaactttgcatgcaacaaggaaaataatgaattntctgcatgactgcatgagggattgttggacacactaccaaaaactcgtgcaacccccctagtgatgacaaaatctgtctgtatcagctactaataaatatgcattcaatattaaaacacctactgaccttgataattgaatgtggaacattccggaatagtacagatccccaatgtcttgttntacanactcaaggacatgggaaaaacaagatagcaaaccccaacaactcattccangaagaaaaagcaaccttcaccagcctcaaacccatagcatcagaagcaagcaccacacccattcaatc

SEQ ID NO: 177999 - DNA, 433 bp, Glycine max
  unsure (1)..(433): unsure at all n locations
gttagctctttttatttatttgcatgtagcttttcttattctccctccgatattatntagaagaccccaatttgaaatgatattnttttttttataagaatcaatttataatatttcttatattaattatttttagactagaaatgtctctaattaaaattgaaagaatgtattgaccaacaattaaaagtgaaaagagtattaatgacaagaatagttttggaaaaattataaatttaagataaatttattgttatgaactaaaataatcattcttcttaattgtgataaattaggtacttgggtcttatatataagatcagatggattatttgaaaaatattgttgattctttcatgatatcaaagttaacgtggggattttatcattttgttaccatcttcttctgaatactagcataatgggaggggtt

SEQ ID NO: 178000 - DNA, 381 bp, Glycine max
gagaagggttcaaccttcttggcacttctcattctctcgaaattgctgaggaaaattatttccgtgaagaaaatccaagccgaggcgcttccgtaaccgttctgtaacgtttccgtgagtaattacgcgaagattctcgaccgttcttcaacattcatcgttcgttcttcgttttcttcagtcttcaacgggtaagtacctcaaaccgagcttttcattcattctatgtacccgtggtggtccacattttgttcatgtattttattctcgtttcattcgcttttataccccttttgcgtgttaagtcattattaagtcattctcgctaattaaaataaataatttccccgatcgttgattgatcatcgtaattcgataaat

SEQ ID NO: 178001 - DNA, 419 bp, Glycine max
  unsure (1)..(419): unsure at all n locations
tctagaaccctagctggttccaaaaatcaaaccacatgttgattaagttagataaaatattttttatttaactacatgtctttaaatttaaatcttaaatatataatcatattaaatatttagagaaagaattttaccgtgtataataactctatcgtctatgattttaattcacaaaagatttcaatcctaagagcaacttaatagaaatacactacactacccaaatatacatggtggtatctagctcgacagatatttatcaaaataataataatacatgtcgtcttaatcttagattattattgattatgtaggctctagcttctcttaattnttttcctatcatgcatgtttcctttgttggtggtnngtgtgctggtattattattattaatattaaatatatcatagattat

SEQ ID NO: 178002 - DNA, 396 bp, Glycine max
agcttgtatatctgaaagataaatcaattgtttcttttatgcattctgacgtctcctacgtacataaaacgccgtttactttataaatatagcgtcttggtcttggatgtgatgtcatattgagtgctcattgcttcctaattttcttttgagctagttccttttcaaagttgaacctacacatgacgggagtacatagaataataataaaatgttagttaagctaataataaaattcttctttattagtttcttaattgaataaaaataaaataatagatatatataaataatttgataaaagagaaaaaaataaataaaggaacaaaaggcaaacaaactgttgaatcgatatggaaacccttagaagcagcttagcctataaaatagaagtag

SEQ ID NO: 178003 - DNA, 464 bp, Glycine max
  unsure (1)..(464): unsure at all n locations
ctacgctcataatttttattaaaaaacggtgaagtgagattttatattatatatcaattaaaacctctatttttttagagcattgaagatacttctattttatagaagaacagtagataagagtttagattaaaaagaaaatggaccacaaagcacaccgacaggtaatacctgtctctttctctagtttggaaattcaaagttcccatttaatttttcagtttgtcacatctgtaatgcagaaacaggacctaattgtttatttttaaaaatttcaacttttaaatagaaatacataacattaatatataaaacttattaaaaaaaaattagaatcttgtataataatagtaaagtcactgtagaagatngattcctcaaaaactagataagaaaggatacacaaacatcgaactaaaacctgactgtttttagaagttngtggtgcatctaataaaatttac

SEQ ID NO: 178004 - DNA, 360 bp, Glycine max
  unsure (1)..(360): unsure at all n locations
gcttctaaactttatacaagaatttatctctataccactngntagacaagtggcctcatatatcttaagaagggggggttgaattaagatattccaaactatttcccctaattaaaaatctatttcactttttactcaagttatgaattcccttaatgacaatcttcttaaatattaattcatatgaaacaatttgaatatgaatataaagcaataataaataaaggagattcacggaagagaaaatgccaaactcagtttatactgggtcggccacacccttgtgcctacgtccagtccccaagcaacttgcttgagagtccactatcttgtaaatccttttacaagttctaacacaca

SEQ ID NO: 178005 - DNA, 361 bp, Glycine max
  unsure (1)..(361): unsure at all n locations
tgtacgcacatcgntcgcgtgtatgatatccactccatttgtttgaagtaaaggagagcttcaaccctataacgcaacgtggcggacaaaagtgggcagtaaacttgaatggttgtcattgtcaatgcggaaggtattctgcgcttcactatccatgttcacacattattgcagcttgtggttatatgagcatgaactactaccaatatatagatgttgtttatacaaacgagcacatcctaaaagcttactctgcacaatggtggcctcttgggaatgaagcggntattcctccttctgatgatgcatggacacttatncctgacccaactacaattcgtgcgaaagtttggccaaaatc

SEQ ID NO: 178006 - DNA, 327 bp, Glycine max
agctttatgttttcctaacacactatttttccctctccccctttttgggtgaaaaactgatttggaagccaaatacagataaagttcgtaagccgcacaattcggctaggagtgttgttgatagaattcagaagcctcgtgcaaggcaacgtatctaggttccccattaaattaaacaaaatgtgtttaaaagcctatcttggaaggaaggaaaatctactggtttgaagcctagaattacagggcctaagttagtcaatatgcggcaatctatgttgcataaggaagagagtcaaaagttgaaagtataaagaagccaaattcata

SEQ ID NO: 178007 - DNA, 322 bp, Glycine max
ctgcttttattcgttgaccacagagtggtacctggagatatgtcgcgggggccaggaaaccttggggacgttaggtggggtgctattgtccaaaaccaagcttgaccaatcccgacccaacccgggcatagtcagtcagtgagaacctgtgatgtacctaaacaggcgagctcctggcagtcaacagataaaaggaacaaagaccacaaagcaatggggcttgtgtggtggctggccagctgtgaaacttgattgatatatgggatatggcctctggtaatcgattaccaagggtgggtaatcgattaccagggcttaaaat

SEQ ID NO: 178008 - DNA, 370 bp, Glycine max
  unsure (1)..(370): unsure at all n locations
tagtgagtcttatgcaattgcaatgcattgttgtgatatattttatactgacaatgtttgctacttgaaattaaatcttaacatgtagagaaagcaagatatttcatcatcaaatagttatacataattttaaacaagatatagatgttcaaacttcaaattctaagcacttgtattcttacctacaataagaggttttagagcacttactttttaggaagtttgtagaatgttttacacaaaagagaaccaaaccaccaaagaatagcaagaggcagcagcagcacttacaactgaaaacatgcaagcattttcatagcttcaaagtaattaanacaacaaaaattgaagcataaaaaggatgatcaat

SEQ ID NO: 178009 - DNA, 303 bp, Glycine max
atcaaattatggagatcgtggtatggtattgtaagtgacatccttggccagagtggatttgattgggatggcactaagtacatgatcacaggtgagaatgaaaatgcttggaatgaatattgcacttgaagtattctttaatatggtgctaatttgtattcaaaagagattggatttgactttttcttttgtttccaattgcataaatcggctaaaccgtttcgattcaaggtgctttaaaattgggatgatataatgaatttgtgtgctaaagaataagggcaccgatattgagcctaaact

SEQ ID NO: 178010 - DNA, 418 bp, Glycine max
gctctattctaaatttcaggtctcttattttagaacttcatccttctgatgtagactctaatgccacttcattctaatgttggatgctctcttggtatcccttgatatgtcttctattaaagcccttattgtcttgcacttttccaagttcaagtacttagaaggaagcactcttcattatgtagataggcttcaaaggatcgtctaacgcttttactcttgacaatagttttgagacaacatttatgagtagtgttttgagcacctcaaagtgtacacacatatctgcttcttaagaatatttagcattgaaacactttagtatagtgttagtcatcacataatcccctcatcttacaaagtgcattgctaatgatttgcataattaaaatagggatgtggatcaacacaaatactc

SEQ ID NO: 178011 - DNA, 424 bp, Glycine max
  unsure (1)..(424): unsure at all n locations
ctgcagctagctaataagctaaattttttttctacttgagccgagtctagtcttaaatgagggatctatggacgaaactcagttaaagttagtctaaaccaaagaggcttgtctaaatcgggcctagtctaacaaaagggatgatgtaagctccattggagcttctaggccttggatcttcttcatcaatggattcctttgcttcttggaagatgaatggcagcggaatggagaaaggaagagagagaggagatgccacttcaaggagaagatgattctagaagactctcaccatcataggaggccatggataaaagcttanaggaagaaggagatgaatgangggagagggagagaaaacacgannattgtgctctaaatgactttgaatctgaagttaatattcaatgatgaaagtcaaaaa

SEQ ID NO: 178012 - DNA, 391 bp, Glycine max
  unsure (1)..(391): unsure at all n locations
cgcaaagttatgtctcatatgttggatcgagtggtcttatattaattaagaaatgggggttgaattaattattcctaaaactttaccaattaaaaattactctnttaaggcttttacttttgttgttaagagaatatggaatagaagagaaacttaacggaaagtaaaagcgaaaattaaatgcacagcggaaagtaaaagagtagggaagaaggaaacaaacacacaagagtttttatactggttcggcaacaacccgtgcctacctccagtccctaagcgacctgcggtccttgagatttctttcaaccttgtaaaaatccttttacaagcaaagatccacaagggatgtnaccctccttgttctcttcgaaaccctagtggatgtacc

SEQ ID NO: 178013 - DNA, 275 bp, Glycine max
  unsure (1)..(275): unsure at all n locations
cacagtgcacattttgaattcaaatcttaatatctgttgtaaatcagatttgtgccacttagttatcgactacatcctctggntaatcgattaccagagaataaaatctcttaaaaagacttttttacttagattacttggccaaaccttgtgctacttcaataggaattcgcttcctatataatatactcttcctaagactctagagactggcttgatcatccatcttgaatatctntgatatctttgtctgaataaagcttaagaaacaagta

SEQ ID NO: 178014 - DNA, 407 bp, Glycine max
  unsure (1)..(407): unsure at all n locations
aactacgcttctaatcctgattcaaccaattggacctcacttgctgtcacttttggatatgctgctccaggttaattccttctatcattttttctctgatggtcttctaccataaaaaatacataatatagttaacaacatttcatgtctatttcaagaatgttacctaatacattataactttttaattttctacagaacttgcatacacaatggaagtgaatgataaaagcgatgtgtatagctttggggtattagcattggaaattgttcttggagagcaccctgtagaatttataaattcttcattatggacatcttcatncaatgtcatggacttaacatttgacattccttccttaatgacttaagtagaccaacggtctccttatgctacaaatcttgct

SEQ ID NO: 178015 - DNA, 302 bp, Glycine max
  unsure (1)..(302): unsure at all n locations
gctttggagaaggctgttttctctcttttgcttagccaatctgctggcttagcgagcatccgctaagcgcaacattcctgggctaagcgtgaggagaatccagaagaagatcagttgtacaggttcgctaagcacactgcttcatctctctaagcgcactgctttagttcatccgctaagccagaaaggcacgctaaaccaaaaaggtgcgctaagccaaaaatcactaacgtgcgctaagtggtccattggtgcgctaagcgcacgagcacanaacaggccacctatttaagcctgaaatc

SEQ ID NO: 178016 - DNA, 378 bp, Glycine max
  unsure (1)..(378): unsure at all n locations
tgngattgcatttgggcatctattntgactttcctatgctgtctctacatacataaaacagccccaccatcccaattttgcaaaatcatattcatatatcattggggcatttcaccgagcacttggtgggcgcacgtttggacataaattgcaagagaatgggggcaatgtggcatgccccattgcttcagaatacaacataggcctaaggccttctcattcaaatcctcaattcaagaaaacaagcacaaaaacaaaccaaaactgccccacaaatataagcatgttctcacaatttagagtaccaaaagatgaagaanacacatcaataggaagcaaanaacatcaaggatggaatacttactttgtggagtgaat

SEQ ID NO: 178017 - DNA, 432 bp, Glycine max
  unsure (1)..(432): unsure at all n locations
agctntgattgatcaacactagtcctcatttcttcacattgccatcgccatcgccatcgccattgtcgtgctcttttcttgttgttggatcattctcagcattgagactacttgtttcaatcccatggctgatacccaaagaaaccaattgtctttctttcaactctaaagcatgcctaagttgcaactcattttctaatctctctgccaactctttgtccttctctactatggctaattcagattccttgagacactattgaaggcgatcttttatgtttctcaaatcattgagtacctcttcatggttgctctcaagaaagctgctntcagtctctgtatgaacaatgcttagacaaccttcaagttgcatcactgctaactcatagaactttatatctcattcactgctcgagactcctgtttcacctc

SEQ ID NO: 178018 - DNA, 325 bp, Glycine max
  unsure (1)..(325): unsure at all n locations
gaatctgatccaacagtagttagatggcaaactccatcaagcccagccacattaatgtccgggtatatagcttgaagttatggatttgtgttggatgaaattccacatgatccataaaagcccacgatccaatgaccatgattgttgcgaataagaccggccaacccatccttgcttgagttatcaaaatagctaccatcgacgttgagtttgtgtcttcaagctgagatggttgccactggatgagcctttgttgttgttgactaacatttttatcgcaggtcctggtaactatttngagtaaactaagaatctggttcatcac

SEQ ID NO: 178019 - DNA, 425 bp, Glycine max
ttaagcaccgcggctgcagcttcttgagaagctcttaagggtttctattgtagctacatgaaagctgtcttggtaaaaatgcttcccagcttttgttaaccgttggatcttctcaaaatttggtctccagcttcccaagacacttgtccacgctctgaccgttgggatctttaagagatatcttgagtgtgcgcgatgtttccgttcccgagagcattgctcacttgtgcgttttgagccttgtagtccaagtagcttaagaaaaatgccatttcttctcctttctttcttccaaaaccatttccaacgttccaagttctttctccatcacccacaaccaccattagccaccacaaaccgccgtttgtctccgtggaaaccccacaccgatagaaacccttcatcaaagcggatcttcaacttgc

SEQ ID NO: 178020 - DNA, 392 bp, Glycine max
  unsure (1)..(392): unsure at all n locations
ctaagctccgacgatgcttcaatggaggagaagagagagggagatattttagaggggggagcacnaaattgaaggaggaacaagggagagaagttgaactttgagttgtgtctcacaagactctcattcatcaaagttaccacaagtgttacacatgcttctatttatagactaggtagcttccttgagaagctttcttgagaaaacttccttgagaagcttctttgagaaaacttctttgagaagctagagcttagctacacacacccctctcataactaagctcacctccttgagaagcttctataagaagattcctaaagaagctagagcttagctacacatacctctctaatagctaagctcaccttcttgagatgagaagctagagc

SEQ ID NO: 178021 - DNA, 387 bp, Glycine max
gctacccaccatgtactgaaatgaacttttttattattaaaatggaaaagcaagaattaaattctaaatcgctcgggtatatagagcctttttttttttttttgacagggagacttggattagttgttataattaaatcaacaattaggtgaaaatagattaggtggatttatatcatatagtagtagttctattacttgcacatgaccaataacctataagtgtccaaccattatgagggaaaggatttccaaataattagcattcgactcacaaaaaccttacttgaatatatgagaggctctaattggtaggacatccactaatccagacgtcgtgttcatcatcatctccattggaaataggtctccactaccaagataattg

SEQ ID NO: 178022 - DNA, 441 bp, Glycine max
  unsure (1)..(441): unsure at all n locations
acacactatgtagacctaaatgattacttacattcattgntnatttattgggattcattatgcgatataattcattgtaacccgtcactaaccaattaatattatcaactactcgtttggttaagcaaggaaattgttggtccaacaaaaatcatttacgcgtacaacatacatcattgtcataattgacaacacataatgacatgcatgcgtattacagtttgagcgtgacaacacattggttgacttcagtacacattttgaaactagcagtcgctcgacaacacattggttgacttgactacacattagcgacaacacattggctgacttgactacacatttacgcgtgtctatttnttttgtaaacaaagttaaacaaaggctcggtcacaaccatctatatatatggcagactaggctactaaatcacacattatc

SEQ ID NO: 178023 - DNA, 347 bp, Glycine max
tacctactatagttatagatcaagtacagggcaacatatattttcattaaagattaaaaataaattttaacaaaattcagtaggtaataattaattaaaagttttattctctttaatcccaatcatctctcttccattttctgtggaagatggagttgctagaaagcaaatgcaatctgaaatcataaatcgttggaaaaagaaaacagatctggaagggagggacacatggagtgatgctgaagaacatgaaaaaaaaagaagtacttagtataaattacaaagattaagttacatatttaaatggataatcgggacttgacctcttataatagctaccatttttt

SEQ ID NO: 178024 - DNA, 389 bp, Glycine max
agtacaagttatgtgctcctggagaagttttttttatctcctacacacattcaattcataaattaactgctcaattcactttaccttgttgttatttttcttattttaccaatgtttatggagaagtttattcagacaagagtagttgttgttgttaataggtttggagcttagtgttttgatggaaaattattgttttgatatggatgatgtttggcttaaccttgacctgttactgttttttatggcttcagggctttggacgattgggattcttctcccccttgcatggctgatattttcaggtgcatgggaaaggcatctcgatccgccttgtgtgccattgcgaggcatttgcgtcttaaaagcgagtaaagaattgggattgt

SEQ ID NO: 178025 - DNA, 260 bp, Glycine max
tctcgcgcttaacgcgcgactttgatgctgatgctctactaaatactcctttgcgttgagcatgctgaagcttcccttaacggtggatatgtgcttggctcaactgctgagcttatcccaattgctaatatttgcaattcaaaacttagcgtctttttcacccgaaaaatgcatagatttcatcattacatccaatggaaatggtttacagacaacacttaccataatacaagatttatttacaaaaatcactacaaaat

SEQ ID NO: 178026 - DNA, 411 bp, Glycine max
  unsure (1)..(411): unsure at all n locations
ttgaggatntggnctttgccagtgaaaggagcgatgtgtgtctttantgaggaaaagttgatcatcctactatgacgactgataaaactggggcaaatgaagagggtgaaaaagacggagaaacccatgctgtgactgccattcctatacggccaagttttccaccaacccaacaatgtcattactcagccaataacaaaccttcttcttacccaccaaccagttatccataaaggccatccctatatcaatcacaaagtctgtctaccgcacgttcaatgacgaacaccacctttatcaaaaccaaaaacatcaaccaataatgcattntgcggcgagaaagcctgtagaattcaccncacattcagtgtcctatgctgaccttgctccatatctacttgactatcaatg

SEQ ID NO: 178027 - DNA, 230 bp, Glycine max
  unsure (1)..(230): unsure at all n locations
gagccccgntaccttggggtgtttgaagctcactacaaacctcaaatgaaaaaccatgatatcaccatatccttaatgaattttggagctctggaaatgtcttgggaataagtgtggaggtttttgtttcattgtataacatgatttgttggccatgcttcatgatatattaagagccatacttgatatacattgcatattggttaaatgttggacatgctgaatatgat

SEQ ID NO: 178028 - DNA, 205 bp, Glycine max
  unsure (1)..(205): unsure at all n locations
actcaactggtcgcccatggatctgctatgaccgctttggatgcgtaaaagtcgtggttctgatggttcttttatttgattatgatctgaagaattctcatgaagacttgtnggtattgtagatgaacttgcgcggtccttccaattttgatgcccgaaccagcatgaatcanagagcttcaagacttcttctgcattcatgatg

SEQ ID NO: 178029 - DNA, 452 bp, Glycine max
  unsure (1)..(452): unsure at all n locations
tggtgtgaccgnngcaccgtacctagagtataatatgttctttatctcaacacaacagcacaaacgacatcattgtcgccattctctgatttctctctccgatatccaaagaatccaaaaaatggtatcaaaagtgaagagaagcccagtgaagtccatcaaggacctccgcaacagcaacaaccacagtaaccgtcgctggcgcaggaaaacctccattaaaaatgtagtggcggcgtcctccgccggcctggccaccatccgtcgccgcatcacgaaactcttcttcaagatcgcgcacctcagcaccagcgcccacaagaaaaaagcaacctcgtacaatatcctcaaaaagaccaaaacaacaaccgacgaacacgaacaactcgacacattcgccgaaccctcttgttcgagacaccaccacggctctctcttcgtcgtcttccttc

SEQ ID NO: 178030 - DNA, 393 bp, Glycine max
  unsure (1)..(393): unsure at all n locations
agcttggaggaagaaggagatgaattatttgataggaananaanagcacgaaattttgtgcttaaaaaagctcggaaatctgaagtttaattntcaaatgatcaaagttgaaaaaatgcacacacatagtctctatttatagcctaagtgtcacacaaaattggagggaaatttgcaattctattcacatttcacttggaattgaaattgaatttgtggagccaaattttggagacanaaattcactaattatgattagtgaattttagatatggttcagcccactaatccaagatcaagtccaagattctccactaagtgtgcttaggtgtcgtgaggcatgtaaaacatgaaggacatngcacaagtgtgactatatgatgtggcaatggg

SEQ ID NO: 178031 - DNA, 475 bp, Glycine max
  unsure (1)..(475): unsure at all n locations
taacagtattacaaatctcaatatacgtngccaagtgtttgtatggatcttcattatgtataccatgaaacaaattactctatattagctgtatcaatgaaggtgggtaagttaagttttgtgcctgaacctctggtagtgcaacacttgagaaatattgcggcaccgaagtacttgagtaatcttccaaggtcactcgtcgaggttgctcttcaaccattatatcataccctaatttcgttcggggacacttgctatcgactgtcgaaccttgtttgttccctttgggaccctcaaaacaagcatttttgcgtaatccataaagtttcgcaacattccagaagtcaaaacaaccattggtgtgtaattcgtaaaagttcacaacattccaaaaggaaaagcaagcaatcgtgcgtaacccataaaagttcgcacatttcagaagaaaacagcgcatcacatggaactcgtaaag

SEQ ID NO: 178032 - DNA, 408 bp, Glycine max
agcttttaaataaattaagcccggtttctatatatctatgagtagaggaataccctgcaacttggccatttgtaagccatggccttcaatcatccacaatggagtagtttaaagatcttatccatgcttcagctcccaaaaaaagaacattcaggccatgatcgccactgttagcattatacaaaatttatttgcgtgtgaaattcaaatttgcttgtactactccttccctactaatttttttatcagcaaatgttagtctttgttagctcttagatattgtatactgcttccctacttggtcggcaatatagtacaatattcctgtgcagcatatgaacatacgctaagaacatagacctgtatatcagtgaacgatagccttttctactaagattgacatgatac

SEQ ID NO: 178033 - DNA, 358 bp, Glycine max
  unsure (1)..(358): unsure at all n locations
ccaccctctgcgcggatgtgctattcttgttttcccgaatcaccctccccctgtcgtatcttggcctgttaacgaaaagtttcttccctccgatatatatgttggtgtcaagctgtgtttccagtcttcgttcgtcctggacctctgtaaaccttacaaacccgaatctgtggccttccttgttcttatacttgggaataaagactttccatacctttccccatttctgaaaaatcttccatagatcattctccttgaccccttcagggaatctagagaagtcgaatgtcgtgacatcttcgttgtttctccgtgtcaactttctatcctgacgtttgaaggctgctctatncactct

SEQ ID NO: 178034 - DNA, 295 bp, Glycine max
  unsure (1)..(295): unsure at all n locations
ttccnnccaaaaggaacacacaatttatatgctcccgngggatgattacccaccatgatcatctcaatggtcttgtcatctaagttctttcttttctcatctaggacatgtttccaacaaggggagccaaaaattctgaagtgactcacccttggcttctttcctgtccatgcttcttctggtgtgatcttttctagcttctttgtaggtgatctattgagtatataggtagctgtggtgactgcttctccccaaagttcctttggcagccctttcaattatagcatactcctca

SEQ ID NO: 178035 - DNA, 354 bp, Glycine max
  unsure (1)..(354): unsure at all n locations
tgtcccaagncncatcaatacttataaaagcgctatctcattttcacttgatatcctgttatcaaatattggtataggaaatggtgaaaacaatattcttcattttctgtaatatttgaaaacaggaaacaaagtgaaaataacatgtcaattgttattaaaaacagaaaacatattcttaaaccaagagaggctcttagaatttgaaattggcttaactgaggcaaaattgacttcttgtacgagaatgttngagaaactgaaaaatttgcatcatgttaattatataccagtccctattttctactactggttaaacttggattgcattaacatgatttctgnacaagttgt

SEQ ID NO: 178036 - DNA, 378 bp, Glycine max
acaccctttgccaaaagaatcctgctatgcaaataacttttgcagtcttcaaggccttctctgtattcctctttcggtattgcaataacaaccacataacccttcaaagcttataaatatgtttacatatggcaaatatatataacagatcactatacatatatagaataaaagtaatacacaagcaagatactcaaactcatgaattccaaattggtcctaaagtatacttaagcaaatacatatattttatatatgaaattgaaatctaaaacaaaatcactacatatggatccctatatatatatatatatatatatatatatatatatatataacacacttgaatcttattacatatatcatataatttatatt

SEQ ID NO: 178037 - DNA, 342 bp, Glycine max
  unsure (1)..(342): unsure at all n locations
tgcctcanagaggtccaggaaggataaggttgtctattgaactanttccgctcctgagtatgacagtcaccgctttatgagcgttgtacaccagcagcgcttcgaggccatcaaggaatggtcgtttctccgggagcgacgcgtcctgctcagggacgatgagtatactgatttccaggaggaaatatgtcgccggcggtgggcatcactggttacccccatggccaagttcgatccggaaatagtcctcgaattttatgccaatgcttggccaacagaggagggcgtgcgtgacatgaggtcctgggtaaggggtcagtggatcccgtttgatgcacatgc

SEQ ID NO: 178038 - DNA, 209 bp, Glycine max
ttgacaatgacattcattgggcttacatattttcgaaatgaattgaagatcttacccttaccttttccttttataggagtcttagaattatcaccaaatgagaaatcgtcacttattgattcatcaagatccatacacatgcttctgtttcccacattatgttgcttgcactagtgtcaacgtaccatgtgttatcttggctaccttca

SEQ ID NO: 178039 - DNA, 347 bp, Glycine max
  unsure (1)..(347): unsure at all n locations
ggacctcatcaattgttttctgaagagagagagcttacgatagcaacgtagtgaccgctacactttnttctgattgtttaaaaatatatcttaacctgttgcagaacttatttataacctttgtcgtgctatttatggatggttcactgaagagggagcgaaatcaagcataattcatccatcttataataaaatactaaaaacttagtcatatctgtatcctgcaaggttcccaattctcctttaatctatattctaatgggctaggatagccaaagtattgagcgtatttaacatgcattgaattaggtgcctggagatgtagacagcgatgttataatacccct

SEQ ID NO: 178040 - DNA, 448 bp, Glycine max
  unsure (1)..(448): unsure at all n locations
agcttaaacattatactttgagcgtctttatatattactggactcaatcagacatccgagtaaaaagttattggcgttngaattggctcaaaggttcaaaattcaatttcgagcgtctcgatatatttcgggactcaatcagacatccgagtaaagagttattgtcgtttgaattggctcaaaggttcaacattcaatttcgagcgtcccgatatattacgtcactgaatcggacatccgagtaaaaagttattgttgtttgaattggctctgaggttcaacattcaatttcgagcgtctcgatatattacgggactcaatcagacatccgagtaagaaagtatggtcgtttgaattggatcgtaggttccacattcattttcgagcgtctcgatatatacgggactcatcagacattcgagtaaaagttattgcgttgaattgctca

SEQ ID NO: 178041 - DNA, 418 bp, Glycine max
  unsure (1)..(418): unsure at all n locations
catacgacaataactttntactcggatgtctgtttgagtcccgtaatataacgaaacgctcgaaattgaatgtttaagctttgagccaattctaacgataataactttttactcggatgtccgattgagtctcgtaatatatcgacacgctcgaaattgaatgttgaagctctaagcctattcaaacaacaataacgttntactcggatgtccgattcagtgacgtaatatatcgagacggtcgaaattgaatgttgaacctatgtgccaatttaaacgacaataactttttactcggatgtctgattgagtcccatcatatatcgagacgctcaaaaatgaatgttgaccctctgagccaattcaaacgaacataactttntactcggatgtctgattgagtctcgtatatatcgag

SEQ ID NO: 178042 - DNA, 374 bp, Glycine max
  unsure (1)..(374): unsure at all n locations
agctttaagtatatntactacctcaatctttacttatttttccgaatcccttcttcaccaagtttgcttcttaaccaagtttggaagaaaaaggaaaaaattaatatatatatatatatatatatatatatatatatatatatatatatatatataagaagaaaaataagaatttaaagaacatcttaatgttatatataagttaaagcagaattttggtctttttatatatatgtttttatcaatctggtcccttaattaagttttaaaaattttcactttaatctcatacagtgtctttggcaaactaaatnggtcattatatcagctttgttattctaacacgtgcgatttgacttactngatatctcgta

SEQ ID NO: 178043 - DNA, 392 bp, Glycine max
  unsure (1)..(392): unsure at all n locations
ggagcttctatggaggctggatctttgagcttctatgaggtccttcaatggtgattttacaccatggagatgcagcggaagacaggaatagaggtgagaggaggcgccatccattaaggaataagccatggaagaaggagcttcaccaccaagatgacccttggataaaaagctacgagatgatgcttcaatggaggaaaagaaagagagaacgggagagcacgaaattgaaggaataaaagagggagagaagtggaactttgaagtgtgtctcataagactttcattcatcagagttacaacaagtgttacacatgcttctatttatagactangtagcttccttgagaagctttcttgagaaaagcttcttgagaagcttctttgagaaa

SEQ ID NO: 178044 - DNA, 454 bp, Glycine max
  unsure (1)..(454): unsure at all n locations
gcttaanaacaactcttttacttctggatgttatatgactaaaaacaacctcgtcaaccacaccaatggtgtctaaaaaatagagttaaaatcagtaacgaaaaaaaaacacaaacactggtgatgaaattagaaatgtaaatctagttgcactaacatactaataggccagcaacgacatccgaaaaatttgcaaatctataatttttaaaaggaagcccatcgaattcacactgtctgacaaccgtaactccaataaatgtcaatttatatggatgatcacaaactctgtactgttcatcattcatgctgactctaaaattgtgcatcacataagtacaacctttcttcanattcattntccatgtctntaacttgtcttgcttacanaccacatggatttgatcaccctgtgaatcataaaaatatctaattaacgggctacaatagagac

SEQ ID NO: 178045 - DNA, 426 bp, Glycine max
  unsure (1)..(426): unsure at all n locations
tgtggatatctcanagtcccagagaacagaagagtcctatgtactgtgattaaaaataaaaataaatatgaatagataaacaaataaatcaattaacttatgcatagaataaagttaactttcttggataattgggtctttcggtaatgcgggttttttgtgttgctagcctagtagacacttgtaacatgtcttccacctgtttgacgaaactccccatcttggtttcacgcaattgttctcactctttactgaagaaatgttagcaacgtattctttatactgctattaattgagacttgggtcattntgtgatttttgataaaatttagttaataataaaaaagttagttataatgagattagatagtgtgttctagtatccttcttataatagtaagggtatggtgatgattattctaagtg

SEQ ID NO: 178046 - DNA, 445 bp, Glycine max
tgcagcttctgaaagcagggatgagcttccttttaagctagaggaagaaaccttccatgagaagctagagggtagcttccttcgaaagccaggaagaaagcttccttgagaaacttgagggggctactcacacctctccaatagctaagctcaccccatgccaaaatacatgaaaataccaaaaaaatctccactataaagacttctcaaaatgccctgaaatacaaggcttatacactatactactagggtacccttaacttgtacccttaatttgtagggtaccctacaaacctaaaatggtcacccaaaagaaggaaatactattctaatatttacacaagaaaagtggacccaacccttggcccatgggctcagaaatctaccctgatgtcatgagaaccctgggccttctttagagctctagtccatcctcttgagcctc

SEQ ID NO: 178047 - DNA, 402 bp, Glycine max
  unsure (1)..(402): unsure at all n locations
cttgaactaactttctaatagatgttaatgttggtacactgtttttatcctaagaanaaatgtagctcagtgttataattttgaaaaataattcgtctaaaagatcaaattgtttctcttgattaaattattttataactaaatgttgttttcctgtaggttgtccttgataaagagaaacacattgtcatagtggacataaaggttgatgatggtattgaaattgtgtctgaacttatcaacattacataataatgtgtgtcatattcttttaagaattttgtatccaccctacctatatttttaacaagttttgccattttgtacttgtacttgctctttcttgggcatttctttattacatggtgttgacctaagatgtatttaattttccgttctcta

SEQ ID NO: 178048 - DNA, 472 bp, Glycine max
  unsure (1)..(472): unsure at all n locations
cgggatccttaaancacctgcaggctgcagcntnaactattgtgatgacttttttatttcaaagaaacaaatgacatgagcatgatgattgattggcgtcccagtacgaagaaattacctgattattgtttatcctaggatcaacccatagtgatgtgaagttgttggagaagaggtgcaaagttagatgagatctgtgtcactctgctaacacaatacacttcagtgtactcagtactgtgtcccatgtttactgttttgttttcttgtcagctctgtatattacttatcatatgctngacacgtttttctcttaattctctaatattaattataattccatgagcaacggtgganggcggacttggaaattttctgtgacgcaatacataaaacaatagtttgaatgatactgtagcgatacttttnttattgatattataatgataacttgaatgtagcattttcaatc

SEQ ID NO: 178049 - DNA, 304 bp, Glycine max
aactttatttttgacggatatcacgttatatcatcttatcattgatagcttctacaatagaataggaaatatggtttaaacacgtaggactaacataaacaatatagcagccttagctaagctatgaaccgctatattaactcgtctcctaataagcttggattaatagcacggaatttccctgcatcattgaggatagaacccacttctgagatgtcacatgtgctgctcatgaagcagccattgcaataaaccataaaactctccctccaagactgaaaccagacgctccagaatcatcatg

SEQ ID NO: 178050 - DNA, 427 bp, Glycine max
  unsure (1)..(427): unsure at all n locations
gcttgcttagctcagcgggggctgcaactaattttgctttgctcangaaagctcggcttagcccgcggctatcaccaaaaaaattggttaagttacctggacttagcgattcagcctcgcttagccacaggtagttcaacaagaggatgagtgttcatcctcaaaagatgaactcgcttaacgcggtaagcgcgcttagcgagttcttcaaataacgcttatatacaatgagtattgatgaactcacttagcgcagcattctcgcttagcgagttcatcgcgttttccagaaaatgcaaaaaacacagcttggtttcttgcatttttcgagcctctaaaggcatatcagacatgcagtgtgtgcgccatanctcattcagtatacaggcatacatagccctaatcttaaactactttctaacaaaca

SEQ ID NO: 178051 - DNA, 355 bp, Glycine max
  unsure (1)..(355): unsure at all n locations
gatatggggtacccgtcatatgtgggactatgtggtgatcgggcgatggtgcaaatcaactcttccacatccacaaatcaaacatgaacccaccatccccaattgcccaccttcagctgagctcacgtactccgacgtagcccttatcctcgttcctcttagcactgggcccccatcaacccctccaagcttccacaatatccaagcaattcaatntccaaacatcatgaactaccctaaactaggaaaacagagtaagggagaaaaatctgcccaaaacacattcacatcttacagctttccttactcaaataccccagaacattctctttgtcccgatcgtaaccgtggatcg

SEQ ID NO: 178052 - DNA, 468 bp, Glycine max
  unsure (1)..(468): unsure at all n locations
atccttaagtcacctgcngctgcagcttctccccctgttgcaggtttccttcccctgtttggatagnttttattttgcgcttttaatttatttaatgtatataaatttttatatcttaatatatatatatatatatatatatatatatttatttttttttgcagataggcagtttatatttttttaatggatttatttgtaaaggtaattattattagtttgatagtgtgttacatttttagagctctgttatatattcttttgtaggtagataagcagtttaaattgatatatatctttagtgcttcgtttttgaatttataataatataaaatcgttaattaccgctaaagaatattatagataataataattgtatttacatactatagtaaatggtaatatttaatatatatatatatatatatatatatatatatatatatctctgcatatacgcagcctata

SEQ ID NO: 178053 - DNA, 394 bp, Glycine max
tcttctatcagctaattaatatgtgtttaccatcttttatgatcaatgtgaaaggataagcacaaaactgaaggtaaaaagatttctattaaaactgaaatcacattataaagtcaagaaaataatgaaatagtatgaagcattagtcttctactaatacaaaaccaaataaactacacagtttccaaaaaggaaagctatgcatctgttgcaatttgtaagagactaagatagttatcctttcttagttgagcaaagaaggatatcatcgcaaagttgacaatactccttctgctatattcaacattgttaaaggaaggtattatggaagacaacttcctttacagtttacactatccataaaattatgaaaagggaaaatgttaaaaaaaaa

SEQ ID NO: 178054 - DNA, 382 bp, Glycine max
  unsure (1)..(382): unsure at all n locations
gcttaaccctagaggggatggactctttttgttttggagaggancaataacaatgcctataagttggacctcccagaagagtatggagtcagcaccacttttaacatttatgaattaattccttttgcaagtggagttgatattgaggaggaggaactaacagatttgaggtcaaatcctcttaaaggggaagggaatgatgcaatcctccctatgaagggaccagtcactagagccatgagcaagaggctccaagagaattgggctagagctactgaagaacgccctacggttcttatgaacctcatggtagatttctgagcccatgggccaacgttagatccaatgatctntggacatattagactaggatgtcattata

SEQ ID NO: 178055 - DNA, 367 bp, Glycine max
  unsure (1)..(367): unsure at all n locations
tcgactacataattggttgtgagacaatgactattttattgaggagtctatgctttaatcgaataccatgtgatataatcgatcacttctttttctacaagtgcttcagaagtaaacaagaactttttaattgattaccttgagtatctaattgactacattgttcttgagttggttccagttttggaagaacactctaatcgataaaaagataatccaatcgattacttcattgaattagccgattaccttatagaatgaatctattataggcacgtataaatggtttctctattaatatccacccttgcgttntctctaatagcacaactntttaagcttctgaagagctaggatcacatgttgt

SEQ ID NO: 178056 - DNA, 406 bp, Glycine max
  unsure (1)..(406): unsure at all n locations
gaccttgaaactacgcttttanagaagccacgaagaagctgctggagaaagcccttttttgaagcntttagagaaaactacatgaagctgcctcggtaaaaacgctgcccagccttcgttaaccattggatcttctcgaaatgtggtctgcaacttcacaagacactngtccatgatctgaccgttgggatctttgagaagatgtctggagtctgctagaaatttccgttcccgagagcatctcttatttaagcatntcaacctttgctttcgtgtagcttaggaaaaacgccatttcttcttctttctttcttccaaagtcatttctaaagttccaagcactttctccatcacccacaaccaccattagccaccacaaaccatcattgttctcacaccgagagga

SEQ ID NO: 178057 - DNA, 436 bp, Glycine max
  unsure (1)..(436): unsure at all n locations
agcttctacttatatggcagggcgggctttcttcactttcttgtctccaacgcgagctctgaccactgttcttccttcccgcgatgcctcttttcatgtccgcctgagtgggcttatagcctaaaccatacttcccacgatttccttgggtttttatcacgctagttatgccgccattgtctttgcctaaacccatcccgggttcataaccgttccccaacataactcgggccatcattaccgctgcatcggacagacaaggttgcccaaagagggagtccacggaggaaatgctgaccacctcataagactggagagcggtttctaacgattcttctgcngcttccacataaggcatggaggatgggcagcttaccaagatatctttctcgcctgacacgatgaccaaatgcccttcactacgaatttcagcttt

SEQ ID NO: 178058 - DNA, 394 bp, Glycine max
  unsure (1)..(394): unsure at all n locations
atatagggggagaaaacggatgcatattttatctatatacaaattgtttgttgcttgcttgaatcttgatttcaggtattgtattggcatcatcaaaaagggggagattgtagatgcaattggctttgatgttttgatgatgatcatgatgatgtgttgccaatgatgccaatgggcttttcaagattgaaaattcaagacaatacttcaagaatacaagtcacaacatcaagatgatcactagaatattatgaagggaattcctaattgaattncaaaggtttggccagtgattaaaataaagtgttttcaaggtttactctctgtaatcgataccagagatgtatcgttaccgtggccaatcatttatacactataaaattgattcaattta

SEQ ID NO: 178059 - DNA, 312 bp, Glycine max
agcttatgctgcaaatatatacaatagactcttttaaccttagcagcaaaatcaaccacagcagaacaattatgacctctccagcaacagatataaccctggatggaggaatcaccctaacctcagatggtccagccctcaacaacaacaacagcagcctgctccttcgttccaaaatgctgctggcccaagcagaccatacattcctccaccaatccaacaacagcaacaaccccagaaacagccaacagttgaggcccctccacaaccctccctccaagaacttggaggcaaatgactatgcagaacatg

SEQ ID NO: 178060 - DNA, 367 bp, Glycine max
  unsure (1)..(367): unsure at all n locations
tgctagagctntcatcacaagatgtattgatggcacattttatttntttgtccaagcaattgaaagcattgactgaaacactaagtaagttgccaactcaaatacatcctacacaatctttaccatttactgttttgcangttgcanggtgtgccatctgtggtggagctcacgattctggctgctgtgtccctgttgcaacctatcctttggcgggagggcgatgcgggactcactggtgcatctttcatgggaggaaaatgcgtggagtcgccaccaacatttattcgagaanaacgttggaaaaatcggaaaggtgtggtctacgaactttaatcgtgaaagggtcangagttatttttacaca

SEQ ID NO: 178061 - DNA, 338 bp, Glycine max
  unsure (1)..(338): unsure at all n locations
actgggaactcaaagataattaagacgttatatttgtccctcttttctcttttaaggatgaatgaaagattaagtgatactattgttggcggatatgattgagaaatttattgattttttgcagaatgattgagaaattattcacagttntattaaagtatgtcgaattctgatcagacgcaaagtttgcatgattgaaacttaaaacctctttttttcgatgtgaagaattaaaaccccgaattggagcatttttcatggaaaaaaattcagtcacttcctgcttgcnatttcaatgatccatcatatataaaggggttagtatgagaaatttattt

SEQ ID NO: 178062 - DNA, 387 bp, Glycine max
ataagaaaggggcacagctacttactgggcctctactttttacacccttgatgctcgatagtcctgttatcatatattcatttatgcactacaagttaaactgtcattgtaagttgctgtaatgaggtttattatttgcttattggcacagcatgttactctagctagcttaaaaaggtgtaggatttggaatttagtgtgtgggtaggatttattgattgtagtgtggccatgtcattatgtagtgtttacagttacagcttcattccaaatggccctgtatgcttacgaaattctcagttgaatcttgtcaaagtaaggaaaccacagtccagacgttttacttttttgaatgatgagcaacttgattaactgatttcatatcac

SEQ ID NO: 178063 - DNA, 437 bp, Glycine max
  unsure (1)..(437): unsure at all n locations
agcttatgcacgagaaagtgaagtatgatttggatatgcccgaaaaaacaccatttcctagttaaccatgcattacgtaccatgttcaattatttttgtttgatgagaaaccggtttatgatcccgacatggttggctcgtggtgcctaacacctgaaactaanaatgtagtgtgaagtttcacccttccccccttttttgttttgttttgtagaggaaaacgcaaggatgatcaaacatgaaaacaaatggtatgcaatttcgcatatcaataagtttgttgaacgcatatgcatgatgattgccatgactcatgcaaaatgtgacgcttgattttgataactggacaatgcacgatatgtcattattgatgtattagaaatgcttatccatgcatgatttaatgcattctccgacccagagcccgtaaataattt

SEQ ID NO: 178064 - DNA, 337 bp, Glycine max
  unsure (1)..(337): unsure at all n locations
gagtcaaacaagtttcaagaatcaaagagtcattcaatcaagaatcaagatacaagtgaagattcaagagaagactcaagatatgcaagaacttccagaaaagcatcaagataagtataaaaagattttttcaaatttaaacatgaagagtcacatctattgatgtgtaatcgattacactagaatggtaattgattactagtgactgattntgaaaaataaattgcccaaagtcacaatttttaaagtgactagtttctgaatattttttttcaagagtcataacttctaaagtgattagttttcaaaagagtcacactttttagtgactagtttc

SEQ ID NO: 178065 - DNA, 410 bp, Glycine max
  unsure (1)..(410): unsure at all n locations
catgcagcntctaactttatacaagaattatttcttatccacttggnggacaaggggcctcatatatcttaagaagggagaggggttgaattaagatattacaacctattttctcaattaaaaattctatttaactttctattcaagttataaattcccttaataattaatttcttaaatattgattcaaatagaacaatctgaatatgaattggtgtgccatcattttcttctattttctaaaccctttttgcaccattttaattattgattggtcttaattgtcaattaattaggcagtcttattaatttggctcatttagctaattcgatgcttttaatctacattcaggaattaatgaaacattgcgctnaatccggaattttgttgtggacttaagaggacaaat

SEQ ID NO: 178066 - DNA, 452 bp, Glycine max
  unsure (1)..(452): unsure at all n locations
tcagaccaaagcaacacanaatctaggtatccaatatttctcaatttaatggattttcaaggttggagaagtgaaattgagaatggggtaaatttggagcaaactctcacctcacacaagtccataacatcaatttaaacttgctcaaactggatttacacctaaaattccaccgaatcaaaatttgactcctcaacacccaaattttaccctagaaatggctctttgttcactttggtcatttgtttttctctctagcacagcccanactntctcataagtcctaaatgacatttcaagctaggattaactcactttaacctccaaataccactaaatccagatttggccttccaactctcaaaacctcactctttttccactcataacaccatattctcactttctaacgctaggttaagtgctaccttcatctctaacactnttcataa

SEQ ID NO: 178067 - DNA, 183 bp, Glycine max
  unsure (1)..(183): unsure at all n locations
cacaaagggggcaccaaagaaacctatgagctggaacccaaagtcaacaaagcgcgatccatcttactangagtatgtagatgcctctgaatctatgaaaaataacaattcgttggtgagacgtactgcatcatcctctgagcaaccgaatcaaagaacgatgatgcncatgttggatcaagt

SEQ ID NO: 178068 - DNA, 359 bp, Glycine max
tcccgacccaacccgagcatagtcagttatttataacctgtgatgtacctaagcaagcgagctcctgacagtcaacagataaaaggaataatgaccacaaagcaaggaggcttgtgtggtggctggccacatgtgaactttgattgatatatgggatatggcctctggtaatcaattaccaagggtgggtaatcgattacaaggcttaaaaatgaagacgggagactaggatggtctctggtaatcgactaccacggcgtgtaatcgattaccaggcttgaaaacgaggtcaggaagctaggagggcttctggtaatcgattaccacaggggtgtaatcgattaccacgcttggaaatg

SEQ ID NO: 178069 - DNA, 356 bp, Glycine max
  unsure (1)..(356): unsure at all n locations
agcttgccgccacggagttttccgactatgctcttgtgtggnggaacaagctacaaaaggagagagcaagaaatgaagagccaatggttgatacatggacggagatgaaaaagatcatgaggaagcggtatgtgccggctagttactcaagggacttgaaattcaagctccaaaaactaacccaaggcaacaagggggttgaggagtatttcaaggaaatggatgtgctcatgattcaagcaaatattgaagaagatgaggaggtaactatggctcgatttcttaatggtttgactaatgatatccgtgatattgttgagctgcacgagtttgttgaaatggatgatttgcttcac

SEQ ID NO: 178070 - DNA, 406 bp, Glycine max
  unsure (1)..(406): unsure at all n locations
tctcgatataatatacgcatgaattggactgccatttgttatgttatgactatntcaatttctcgagagctttcgttgttcaattcgagccttctcgatatattatccaccggaatcggacctccgtgtgataagttatgaccatttgaatttttcgagagcttgcgttgttcaatttcgagcgtcttgatatattatgcgcctgaatctgacctccgtgtgacaagttatgaccatttgaatatcaccagagctttcgttgttcaactctgagagactcgatatatgatgtgcctgaatcggacttcgcgtgataagatattaacatttgaacttctcgagagcgttcgatgttaatttcgagcggctcgatatataatgcgactgaattggacctccgcggata

SEQ ID NO: 178071 - DNA, 404 bp, Glycine max
gctggagaggatgcttcaatggaggttattaaagagggagagaaagagggagggggagcacgaaattgaaggaagaaaaagggagagaatttgaactttgagttgtgtctcacaagactctcattcatcaaagttacaacaagtgttacacatgcttctatttatagactaggtagcttccttgagaagctttcttgagaaaacttccttgagaagcttctttgagaaaacttccttgagaagctagagcttagctacacacacccctctcataactaagctcacctccttgagaagcttccttaagaagaatcctaaagagctagagcttagctacacatacctctctaatagctaagctcaccctcttgagatgagaagctagaacttaactacacaccccc

SEQ ID NO: 178072 - DNA, 396 bp, Glycine max
  unsure (1)..(396): unsure at all n locations
tatccatggttgcaaaatcattgtctatatgtataatatacaacactttttagatgttgtaataatgtatgtgttcttttcatcccctccattttttttgtaagaccgttgtctattcacatgaggcaaaaaacacttaagcattgagatgtatagaccatagtttataaaatattgatattttataccacatgtttctaagcttgttttgaacgcatcaaaatacttgctcttgatctgctcttaatatattgcactaaaacatgtagcaaatatgttagtcatcataacattctccatcaaccttataatttgcatgggtaatggtttatcataattaaaatcttctgatgtggattcaacaataacaggtatgnttccaatgccaacgagtat

SEQ ID NO: 178073 - DNA, 199 bp, Glycine max
tttttttttctaaccatacagggggggtgtacatatcgaaccgccttctttttacacagagaagcactcatacctgaatgcaactataactctatggaaccacccttatttttcgctcggggcccgcttatctcaatggcgataataccgataaaaacctccctatgattctagtgggtttggtatgattttgtttcat

SEQ ID NO: 178074 - DNA, 359 bp, Glycine max
gctttgaaagctgagctaaaaaagacattagtatagaatgagaagctgaaggtggcagtcactagagttaggaaagaatgtgataagctgaaagatatcaacatgaccgtggctgaagcgctagagtgggaaacaaaaaaagacagaaaggaagaatggagcaagaacaagttctgaagggctttgttaggcagtagtaatgagctcaaacttagaaaggccgagagagacaaatcaaggatggatagcatgatgttagaggataaattaaagagttttcagatttcaaagagaagtttgaaagagaaattgagcaagatggaagagaatatattgataatcattgatcaatgtaataa

SEQ ID NO: 178075 - DNA, 396 bp, Glycine max
  unsure (1)..(396): unsure at all n locations
agagattataaatatgtgaccattgtatgagtttcaagatcatcaatcatctttgaatcatctatctttcaatcttctttcaacattcttcaatcaatcttttcaactctttctacagaattttcggattcatcttctcttcatctttcttcaagtttttgttcaatactttctctttcaagaaaagttttttgataaaaaacttgtgctattcatctttttcattctcttctcctccatgtcggccttcatctgcctttgcacctcctgaattcttttgtgtctctcttctcccttacaaaagaatcaaaggactaaccgcctgagaatctnttgattcttcctttcccttaaccaacagattaaaggactaccgcctgaatatctcttgttccc

SEQ ID NO: 178076 - DNA, 413 bp, Glycine max
tctgatgatatggtcttcacagacgaaaggatcgaggtttgtttttttagaggaaaacttactcatcctgcttggacgaatgaaaaaactggcgcaaataaagagggtgaggatgaatgagaaacccgtgctgtgactgccattcctatacagccaagtttcccaccaacccaacaacgtcattactcagccaataacaaaccttctccttacccaccacccagttatccacaaaggccatccctaaaacaaccacaaagtctgtctaccgcacttccaatgacgaacatcacctttagcacaaaccaagagcgccaaccaagaaatgcaatttgcagcgagaaagcctgtagaattcaccctcaattcagtggcctatgctgacctgctccatatctacttgataattcaat

SEQ ID NO: 178077 - DNA, 241 bp, Glycine max
aagtcgtaccaacaagaaggtggaattttttttctgcgccttgcctctttcgcctgtcttcatgcatatatatcacatttttgtcccacatggcacagaaaaagccgagtaaaatttctgataaaaaatatttgctgccatgctatggaaacatctttatgaaatttatctcatcgcattgggtcgttcttccctctaaataacattcctttttttttatccgaagggaaaacagtttgaa

SEQ ID NO: 178078 - DNA, 306 bp, Glycine max
gcggaaaatagggtttgaggctatctggatggcggactgattatcacaataaagagttgcaggttgaaggaaggggaccggaaaatcatgaaggaggtaggtgagccactgaagttcacacgtagtagaaaccaaggctctatactctgcctcagatgaactgcgagagaccgtagattgcttcttggaccaccaggaaattagagactcacccagatagactgagaagccagtgatggagcgtcgtgtgtcgcaacatcctgcccaatcggagtcactgaaagctttgagagtgagtgtaccttg

SEQ ID NO: 178079 - DNA, 451 bp, Glycine max
  unsure (1)..(451): unsure at all n locations
tccatcatacttatacgagtcatttttttgcnagcttaaacaacttgtgtgatcaattaccataaggttgtaatcaattaaaataaagagttttgccttcagaagaaattttctaactttagaaattttcttctcactcatgatgatgcatgacgcactaatgatatgttaaagactaagatgcaacattcaatataacaagcaatacaaatgccagtcaagagagttaggcatgtaaaagacaaaacttcttcaagctcttctccaagcttcaagcttaagtcttcatgttgctcatgttgctcccgctatccctaatagaggcaacaaaataataatgcatattctatcccactaacccttcttttgcaagtccttctaacaactcttatgtatgtccttcaaataggggtccacaacaacaaccaacacgagctcaactttgataaat

SEQ ID NO: 178080 - DNA, 382 bp, Glycine max
ttagaatctacgctactccccacattctctgccttatgacctattagggtgcttatatgtgtgtgcgtgtgtgcgagaggatgcttatgcaagattaggttttggaggaaactcatcctctatctgtcgaattatcatttgccatcagtttgggtctattacctgttacttcgtgtttgaaaactgccagctgtggaattaaaaactctggactctctgaataggaagctggagaccttgaaaggagtagtgagaattctaatccactaccaactggactactagtttagaattttattttgcgttgtgctatggttcttaagctcaatggcatcgtggtatattcactatagaaaatgcacaaaccagcttgtatgatgtg

SEQ ID NO: 178081 - DNA, 364 bp, Glycine max
atctgtgttatcttagtgagagtgattctcctaaactcttgagtgattgaagaacaccttggttgtatcaaaggactttcacaacctttgtgtgttgccctcgctggaaagagagattctttccttcctttcatcatcacccttgttctttcaaaccacaattccagagaatccacctctgcccagaattatctcgtggccataactcccattttacgcactcaaattaagtgattcttgagcctaaattgaatttaaaacgagacctttcacctcgttctggaatcacctcatttggagccctgtagctacagttattgtcatgtctatatttctgggcaggcaccacttaacctacgcttta

SEQ ID NO: 178082 - DNA, 334 bp, Glycine max
  unsure (1)..(334): unsure at all n locations
atgaatgacattgactaggagagnctcngctctgtcaagcatcaaccaccaaatttggatactctgggcgagagagccaagcatcaaccaccaatttgcttcaactcaaaagcaaaaggatatggtctgagttatgctggtaaagaacctccaccaaagcttgagggaaaagggatcttcaatcaggattcaccatacatttgtctagcttcttacgaacatgagcgccattctaaacattcttccactaggtgaacccccccccccccccacacacacaacatgcatatcaatcatgtcataatgatccaaagctgacgtcataacactagct

SEQ ID NO: 178083 - DNA, 410 bp, Glycine max
cgcctgtccgatgcagcaagaatgatggcccgtgttatttttttgaacggctaccaacccggaatgggtgtacgcaaagacaacgacggcataactagcttgataaatgccaaaggaaatcgtgggaagtatggtttaggctataaacccactcaggcggatataaagagaagcatctcgggaagaaagagcggtggtcaaagctcgcagttgaggcaagaaagtgaaggaagcccgccctgccacataagtagaagctttataagcgcgggtctgggagacgaaggtcaagtggtcgcgttatacgaagatgatgttctgagtacattgtatttggtacgaccattccctcctgatttccactacgaaattgcgagtgaggaacgccctgctttacgcacgagctaatg

SEQ ID NO: 178084 - DNA, 380 bp, Glycine max
agcttcaggttgctcattgactccagattgtctgctagaaggacaaagatctgtatggtgatctatagaaaaacatagaccacagactcttgcaacaggtgtagatttcggattcatggcaagatgagttactaagttgaccaaggcatcaagttttccctcaagctttttattttcagtagatgaagatgaatccgtggccacctcatcgactcctctaaggacaatagcatcatttcttgcactgaattgttgggagttggatgccatcttctcaatcaaattcctagcttcagcaggagtcatatcaccaagggcttcaccactggcagcatcaatcatactcctctccatgttgctaagtccctcatagaaatatt

SEQ ID NO: 178085 - DNA, 430 bp, Glycine max
  unsure (1)..(430): unsure at all n locations
actaacgctgaagacatgacgacccatcaatgtggactatgtgtgttgcgggcgatggtgcacaacaagtgtttcacatgcacaaatcgcgcataaagccaccatcccctatagaccacctccaactgagctcacgtacttccacgtagaccatatgcgtcgttctctcaacagcagcgtgccatcaatactcccaagcttccctaacatccgagtaattcaacattccaacagcacaaactatcacagtcaagagaacagggcaaaggcagaaaactctgcccaaaacaccaaccaaaatcatggctgtttccacttaaagaccccagtaacattttcttcgttccaattcgctaaccattggatngactctaatattatactggaagtctctatacataaggctacgattatactggtgggatctgct

SEQ ID NO: 178086 - DNA, 230 bp, Glycine max
gacatacgaaagttactttattatcacttactcaaccaaaattcaatgtgtcctaccaacaaaaaattggttttcacaccaaataaccttgggagatttatataaatagatcagcctgattaataagcttaatacctcgggttggaatctgctaatacactcacgcggtttaaacgtacttgtgtatttccattgatttgatgtgattttactgacataattcaacctga

SEQ ID NO: 178087 - DNA, 244 bp, Glycine max
catttattagactaatttggtgattaaaggaaggaagaaaatcaacaagaccgtgcaatcgaatatctttcattattaaaaactaacaattaacatttgttaataaaatagacaagaaatcattttccatacaaaatcccaattagattcttgaacaatgaattctccataaggatggataatgaaatgataagaggagaagatgaataaaatccttctcaatgaagacgagcgagattgaaag

SEQ ID NO: 178088 - DNA, 296 bp, Glycine max
gcttgactccttcaattcggtttggccttggtttttcattcatttctcctctcctttcttgctcatgacgttcacgattctctaatcactcaattctttcatacaactcctcgttgttctctctcaatagttttgcatttgagaattgagagcatccaacaagaatctttgtgccccatctaattgatgttcaccaccacctgacatattcaaaataaaaattataatagttataaagaaaatagaacctcaccacactcaagtgtaactctcaaatatggctttttttttttaat

SEQ ID NO: 178089 - DNA, 388 bp, Glycine max
  unsure (1)..(388): unsure at all n locations
acctgccccatgcaagcttcttagtctcagatgatgcagctgattnttantctacctcatgcactcctctaatgactatggcatcatttctggcgctaaactgctgagagttggaagccattttctcaattaaatttctggcttcagcaggagtcatgtctccaagggctccaccactggcagcatatatcatacttctctccatattactgagtccttcataaaaatattggagaagaagctgctccgaaatctgatggtgagggcaactagcacatagttttttaaatcgctcccagtactcatacaggctctctccactgagttgtctaatacttgagatatctttcctgatggatgtggtcttggaagaagggaaaattttttc

SEQ ID NO: 178090 - DNA, 181 bp, Glycine max
tgggccttgtttctatttgcacccccatttttaataaatacaccccctaccttttttttggggaatcttttttcgtaaagttaccaaaaactaccaatattcgtacaaatacttgttttttttcgcaatggtacgggaccttggggattacataatcatcccttcttgactaaggaatata

SEQ ID NO: 178091 - DNA, 384 bp, Glycine max
  unsure (1)..(384): unsure at all n locations
ggagatgaggaagtgnagaaaggtgaaacttcctgcttttattcgttgaccacagagtggtacctggagatatgtcgcggtggtcaagagacctcggggacgtcaagtggggtgctattgcccaaaaccaagcttgaccaatcccgacccaacccgggcatattcggtcagcgagaacctgtgatgtacctaaacaggcgagcttctggcagtcaacagataaaaggaacaaagaccacaaagcaaggaggcttgtggtggctggccagccatgaacttgattgatgtgtgagatatggcctctggtaatcgattaccaagggtgggtaatcgattacaaggctctaaaatgaagacaagaggctaagatagtctctggtaatc

SEQ ID NO: 178092 - DNA, 252 bp, Glycine max
agggagaagaaagagacaaaaagaaagagaagaaaaagaagagggaaagaaaaaaaaggaaaaagagagagaaggaagggaaaagaaagagaggaagaagaaagaaaagaagaaaaaaaaaagaaagagaaaggacgaagagaagaaaaagaaagaaaaaaaaaaaaggagagaaaaagaaaaaaaataaaaaaagaaggaggaagagaaatgaagaaaagggaggaaaagaaagaagaaagaaaaaagagg

SEQ ID NO: 178093 - DNA, 364 bp, Glycine max
  unsure (1)..(364): unsure at all n locations
atcataagctgtgaattcaaagaaaatatgtacataagaatataaataactacatgtatgaaattatntacaggaatcctactgttcattatattttggataagtactaaaaacatttatccaaatttctcttctatacattccttcccaataatggtaaagtcatcctcctgcacactatcaattgattgcattggcttgtgtaagattcaaaatattaaattttccctatcttgggataaatatgacacattatattattattggaccacaacttgaaatgaacaggaacgacccaaagattatagcagaacttgacagaattaagactaacaataccaagtcaaaaatctaaatttacatg

SEQ ID NO: 178094 - DNA, 422 bp, Glycine max
  unsure (1)..(422): unsure at all n locations
gctcccccgttccaacgcaatatgaaagacggtgatccttgtatatatgtgtgctctgttgatgtacacttgttatgatgaaagaaatgacttccttactgaagtacaatacacattatcctatcaatgtgaactttgcataaagaagagacgtgccaatggacttagacgaagaatagagtgaagaattcaactgttgtgagacaacaaatacttagaaatgaatatcatatatagaacgaactctgaagaaataagacacaaataatctatgtgaatcactttttcttgtaaagctttgtggtaattatagtacatatataagctgtcacaatgtctcttatatcttaagagaaaagactacaaatattgagtgatatatccgttcgaagacaatcacatatntcagtcaatatgcaatc

SEQ ID NO: 178095 - DNA, 352 bp, Glycine max
ctgcagcttcttaaaagaagtcaaataatttatttttctaccatacctctctagagcttagctaccttcttgagagagaagctagagctaactacacacctcctataatagctaagctcaccccatgacaaaaaacattgaaaattcaaaaaaaaagccttactacaaagactactcaataaaatggccaaaatacaggcccagacgaaggaaaacctatctaatatttacaagataagcgctctacttacccatggcttgaatctacctaagctatgaaaccctagcttccttgatcttagccatctattgagtcttaccatgcctgtgggtagatgctattcctcacttg

SEQ ID NO: 178096 - DNA, 416 bp, Glycine max
  unsure (1)..(416): unsure at all n locations
ntcccacatgtnctaaatgacattgtaaactatgattatctcactttacactccaatttacactaaccccaaatttagcttctctaacccttaaaatctcacacttttctacctacaacattgtcattctcacatttaaccctaagttaactttccccttcatctctaccagttgtctatcatcaatttcagcacacaaacatcacaaagcatcatcataaaaccctaaaacagaatgggtaaatttggctcacatcaaacatgacaagtttagcatgctttcaacaaattccttcacaaataactaccataaggcataaacttattataactacccatcatatctcccaaaacccatatccacgaaactcatgtgagaaaaatctaccgaacctgacattccaagcccacaatgt

SEQ ID NO: 178097 - DNA, 417 bp, Glycine max
  unsure (1)..(417): unsure at all n locations
gcttttaacttaatttacaatgttcctatttgtttcaaaatgggtgtaatcgaatacaagatattggtaatcgattaccagttcatctgaacgttggaattcaaattcaattgtgaacagtcacatcccttcataaaaagctttgtgtaatccattacaagggtttgggtaatcgattaccaatgacaagttttgaagaaaaatcaaaagatgtaactcttccaatggttttcanggttttctaagggtataactctttcatggttntcttgccagacttgngagtctataaagccgtaccttgattgctttgaagaaacttacatacttacaaccttacaaacacttttcacatattctttacacctttgatctcttgaactctcttctcttctcttcttctctccttgcaaaagc

SEQ ID NO: 178098 - DNA, 457 bp, Glycine max
  unsure (1)..(457): unsure at all n locations
gctgctcaattgctccaggttgctgcatggaagggcataggtctgtatggggggcagcagagaagcacaaaccacaaactcttgcgacaggtacaaatttctgattcaaggccagctgggttaccaagataaccaatgcatctagttttccttctagcttcttagtttcggatgatgcaaatgagtttgtagctacctcatacactcctctaatgactttagcatcatttctggcgctaaactgctgggagttggaagccattttctcaattaaatttctggcttcaacaggagtcatgtctcaagggcttcaccactggcagcatccatcatacttctctccatattactgagtccttcataaaatattggagaagaagctactcgaaatctgatggtganggcactggcacatagtttttaaatctttctagtattatacagctctctcactgag

SEQ ID NO: 178099 - DNA, 343 bp, Glycine max
  unsure (1)..(343): unsure at all n locations
gaacaagctacaaaaagagagagccagaaatgaagagcccattggtgatacgtgggtggagatgaaaaggatcatgaggaagcggtatgtgtcgactagttactcaagggatttgaaattcaagcttcaaaaactaacccaaggcaacaagggggttgaggagtatttcaaggaaatggacgtgctcatgattcaagcaaagaatgaagaagatgaggaggtaactatggcccgatttcttaatggttcgactaatgatatccgtgatattgttgagttgcaggagttttgtgaaatggatgaattgcttcacanaccaatccaagtagagcaacaattaaaa

SEQ ID NO: 178100 - DNA, 378 bp, Glycine max
  unsure (1)..(378): unsure at all n locations
gagagagagagagagagagagagagagagattgntgttacgactcaaatctcattaaaattttttcgaaaactatttttcaatcatggcaaaaattatgacgcacatttctcaataaaaactgaaatgtttttgtctttttgaacacgtccctccttctgtctatacacttcaacaaacattagtccccactgattaatgaaaataaagtaagatgatgctatcgtctaaaaagaaatctctttaatccgataaactagtcatatattaatggttccttatatagacgaaccacttttcaagcaaggcttagtgaagataccaaaacatcttttggcgcataatcatgaatgagatgatatcttattctaatatgcta

SEQ ID NO: 178101 - DNA, 212 bp, Glycine max
gaagagggcacggcaaacacccacaaaagcgccacggaagcccgagagccgccaagaggccgaagacagcgcaagacacgccccccgagaggacggaccgccagagccggacacacaccccgagcccaagaggccggcagggacgaccccaccaggccacagaaccgctcagagaaagccccgcgggcaacggccgcaggcagggacaaaag

SEQ ID NO: 178102 - DNA, 333 bp, Glycine max
agcttggaaaatatatttttttttgctcatcttaagtaagtatcatatatataaatgagtaccagaggtactgtagatacataagatgattggattaacagctggttcagaatgccaagatacatgtaataagaaccagctgaacccgaggaaagagaactattgcgcagctgaacccgaggaaatatattaaagtcattgtcaccttaaaggttttgtcaagattctatagagcgctatcgaagggtgtctacctttctgattcatcccacttgctgcctagacatagcttatgccttgggatggggccccgacttaacaatgattgatgag

SEQ ID NO: 178103 - DNA, 437 bp, Glycine max
  unsure (1)..(437): unsure at all n locations
ctatattgttcaaaaagacgtacaaagatttctcagacatctatgttttcatggatagacaattttaatgaatcaactatttnttacttgcaaatttaggttccccaacttgtcattctcttgaatttcttggatcaatgatagaagggcagcgcttgaactttaatgctgtgtatactggagggtcaggattctgttatccattgcttataagttctctatacttttagttttatttatatagttactttatccaatgaggaattntgttgcttgcttttcacggagcaaggagattgtacccatgagtggtttaaggtaaaagacaatggtttacgagacaaattaagtagcaatggtgacctctttattgcttgtttgtcacctaagtgttctctactcgtgatggccaaagtaaatgcttaatggttatcatt

SEQ ID NO: 178104 - DNA, 388 bp, Glycine max
  unsure (1)..(388): unsure at all n locations
ttaagcgaccgcagctgcagcttgaccaacccatcacatttttcttaagactgcttaacacttgttcgaactgagatattgcctgtggcctctgatatgctttcttatcccatcaccatcatcttttaagttggctttcatcaaggatccacaggccggctgaaaagaaagctctcatttcatcctataaccaaaatcatttgccctgtgaatttcaactatacttggcgacccatttttgatcaactcaaatcgtcctgctcactgcaccaattgttggccaaatcangtttacttacaaagaatgatttttgttgaacaaatagcaaatgaaaaaagaacaaactgccaaactatagcactttttgatctgcatttttctctgtac

SEQ ID NO: 178105 - DNA, 455 bp, Glycine max
  unsure (1)..(455): unsure at all n locations
tttaagcacaaacagattcatgctattaatttacttatattctgcatcagcatattgattactgctaaggaaaaagaaataagactttctaaaaaaaaaaaaaaatatctaaaccaaaattgggagaataaagataggacaaaaaatatacaaataaatgtttgtttatttacccatttgtcaacatctgtatcagcatctacggatctaccattattttaaacttactgtcaaaatcaaatggggaaccaaagtagctaaaagtaacaaaaagaatggaagttcaccaaaaataattaaatgaaggattacaaaaggcccaaccgtttctctgtntaatgttaggcagcaaacaacaatgtcagcctttcttgcaaactcatatatatcttcatgacntgaccttacatcaacaagaatcttagcatcatctttcacccaatataaagaacatg

SEQ ID NO: 178106 - DNA, 322 bp, Glycine max
agcatcaatccttgtatctatgaagcaagattttggagttgcaaactcttctctgaggagctgggacatgtcaaattacatgtccctttgcagcacttggtatggcaatcagtgtgaccaggacaacatctctgtggtgtcacttgacatatctaaattgaatgcctcacggtcactttcaccttccatcacaggactcttgagccctgtgagtgtcctacttcaacgaaatggcttctctggggagtttccaagggacattcacaagctaccaaagctgaggttcctcaacatgtctatcaacatgttcagtgggaacttg

SEQ ID NO: 178107 - DNA, 260 bp, Glycine max
ttattgtccaggctggcatggtacgcggcgctcgaataggaggccctgtatacatgctcatgactcgagtacatgcgactgctgcggggtaaggttaggtaggctctcctgtcggaggataaggtgacaccttaaaactatctgcggagcactgtcatgctaactattgacctgcgttaacagacacaatctctcccgtcaaagaggggagcttcatcatcaaatgcagtatggagacgatggctccaagctcagtagaa

SEQ ID NO: 178108 - DNA, 356 bp, Glycine max
  unsure (1)..(356): unsure at all n locations
agcttggcagtgccaaaggccgcaaaaatattctttcattctgtgcccagaatagttgctaacaaaatatatagtgaaaatgcacaagagagagaaggattgaggcgcaactgtgtgtgtgtgttaaaagttttgcaatttcccttaactctgtntttcaatacaaactactaggaaaggtattgtttntacagacaagaggggtaccaaatgtactcttaacctcatgagagtattatacatgctaaatcgtatttaactaatatcagtggttctgggctggtcatccatacatgtggtacttgcttgtattatgaagttgaatacttgaattcagtcttctgaatagtttatgt

SEQ ID NO: 178109 - DNA, 422 bp, Glycine max
gagcacaagagctgtcaagttgtgttttctttacgtccattaatgatttgcgtgaccttctcttccattgttacttcttcattttttctccatgtatctcctcaaatgtcttgggctaaatgttgtttacatgaatctttaaagttttcaccgattaaacttgctatagaagctagattctattttctatggttcaaatttcttggtcttggtcttgaaccatgaattgtgttgagcttacggtcctttgagttctgggtgtaatttttgtggctgaaacctaaaccctaaaattcttacaaaaatgttaaagtagaagagaacctcacaaatctagagtgactttgtcaactattgtagtttgtcataaagtcatgtgtggcatgaacttgtcacatagattcttatgttggctgaattta

SEQ ID NO: 178110 - DNA, 449 bp, Glycine max
  unsure (1)..(449): unsure at all n locations
tgcagctgtaaacccgtgagtattgagtttattattttttatacctgcggaactaatgagttgatgtatccgatgagcgtttcggggtggaacggtactactttggattggacccactcgtccaaaaatgtctggttcgtggagacgttgatcacaagctgtgttgggagcatgatcgaaaccctaattcccatgttccgaagcgcgtcgaggatttccgcgtctgcgtcgtaaatnttcacgcgcttcgctttcatggaggactgtaggaaactcatggaggttctcggcggcagaaggttgttccccaatcgctcgtagttcactcccagttgactggaaatctcaccacctgaatatgaaggagtatattcaatttaagggtacaaatttgaatcgcgataggctggctcgaaaataatgtgtacatattgatatgctactccgga

SEQ ID NO: 178111 - DNA, 449 bp, Glycine max
  unsure (1)..(449): unsure at all n locations
cttttgtacatagttaggaggtataatgatgattcaaaatgggccatgggtacttgaggattacctgtcagttcatagtaatctctcagttcagtctagctaccactatangtgggttctaaagatcttggttgtatttaacagagtgtatctttccattactatctatgaggtgccaaatatgctttaattcatctttccatcttatagctaagcttctactaatttcaccataagactacatttaaagtaaactaatataagaaatactaatatgttatatcatgtcaagtatatttgagaatagtcttgaaattcctaacttgatccttaatgtgaattgtattgaacatgtcagttgattntctgttaaccatcatcattaccttagtcatatcattccaatcttctgatcctcatccattgattctaaattccatctaccatat

SEQ ID NO: 178112 - DNA, 384 bp, Glycine max
  unsure (1)..(384): unsure at all n locations
cttacaagcaagcttgcttacgtggttatttatcacacaagcttcaagtaggtacctcctaaacctccattaattttcaactttaccttctccttcattggtgtttcttcaatattatccatggatctcctcacatgtcttgtgctaaatgttgttaacatgattctttaaaatttccaccgattaatcttgctatagaagctagatttgatttctatggttcaaatatctttgtcatgctcttgaaccaagagttgtgttgagtataagatcctctgagttttgtcttgctattntntgtggctgaaacctaaaccatataattcttaccaaaacattaaagtataagaaaacctcacaaatatagagtgacttgttcaccta

SEQ ID NO: 178113 - DNA, 418 bp, Glycine max
ctaagcttataagcgcgggtctgggagacaaaggtcaagtggtcttgttatacgaagacgatgttccgagtacattagatttggtacgaccatgccctccagatttccagctgggaaattggcgagtggaggaacgccccggcatttacgcaacgagcataatgtaaacctttacggctttaaaagctctatagttgggcctacgctttagagtttttccttttgttaaggctttgtgtcttttgttgttgattttataatacaaggatctttcttcatttgttcctacgtctctacccattctcattcatttgcatgtttacttctttttctgaaatggcagatccgatgacgagtcccccgaattactaatacctgtgacccgcctatcgactttgagcaagagatgaatctaacg

SEQ ID NO: 178114 - DNA, 328 bp, Glycine max
  unsure (1)..(328): unsure at all n locations
agctngtctcagtgtttatgcgagacattgatttacatgttagccatcgtcagcaagtaccaagaagaattaaatctagccacggcccacgagcacatagtgacggacgagtatgcccaagtgtatgcggaaaaggaggctaaaggaagggtgatcgacttgttacatcaagaggcaacaatgtggatggaccgatttgctcttactttgaatgggagtcaagaacttccccgattactagccaaggccaaagcaatggcggacacctactccgcccncgaggagatccacggaattctcagctattgtcagcatatgatagacttaa

SEQ ID NO: 178115 - DNA, 396 bp, Glycine max
  unsure (1)..(396): unsure at all n locations
tgtcaaanagagaagcaagtcaaaaactctttttattgtttaaatgttatttctacttcaaaaccccttgaactacttcacattgatttatttgatccctctagaattatgagtttgggtggtaattactatgtcttagttatagtggatgattactcaaggttcacatggacatttgtttttgaaaaccaaaaatgaagcttttgatgcttttcacaaacttgccaagatgattcaaaaatgaaaatggtctttatattgtttcacttagaagtgatcatcgaggtgaatttcanaaatgagtcttttgaaagcttttgtgaagaaaatggaattcaccacaatntttcttccctaagaacacctcaacagaatggtgttgtgtggagaggaaaa

SEQ ID NO: 178116 - DNA, 349 bp, Glycine max
ttttttactcgaggccgatcagcgctaatatattcggacgcttgatattgaacaacaaaagctcttgagaaattcaaatggtcataacttttcactcggaggtccgattcatgcgcataatatatcgagacgctcgaaatgaacaatggaagctctcgtgaatgtcaaaggtcattacttttaactccgaggcctgattatgcgcataatttatcaagacgctcacatttgaccacggaagctctcgaagattcaattgtcatacctttactcggggttcgattaagccctaatatttgaacctcgaattgaccatgaagctttagcaatcaatggcatacttttactc

SEQ ID NO: 178117 - DNA, 390 bp, Glycine max
  unsure (1)..(390): unsure at all n locations
tttacaaaaggttcatcaagtcaagttgaaatatggattttaccatcctgcaaaattggggcaaaagatgaatcgagtcacatcactgcttcgtctactgccaaacatatttaggattgttgatgtccttgttacttccagtttcaccttgacaaagatgtcatggaccatgttgaaaatctaaattgattcaaccccatatcctgcgtaaaaattcgcaatacttcgactgtacatcattcgcatgcatccatgcttttcattggttgcattgctcgttgcattctttccttgaaaaataaaataaaatgaacttaatcattgttataaaanaagaaagggacacgctttacgacgcccttaccgaactcgtgctagagctagagtaat

SEQ ID NO: 178118 - DNA, 373 bp, Glycine max
  unsure (1)..(373): unsure at all n locations
gtgagtatatatattattctgccaaattttaatttcagagcttaactctttaatttaattttatttatttctaaggtactgacaaagaatcacactctcatcccttggcaaaccaacctcttgcagattagtttttccatattcgaagctgcaggctatgaagcttatggtactgaaactcctagctttcgtgttcctttggnntgggtggagtacttgtattcatgttaaagcaaaaaatgatcgtttaaagcctggtgattcacttgatttttcacaatcacctatttctaaagcgggcaatattcaaaataatttnttctttcttgatgaggataatatccttacgaatccgtcaaagataaaatttgat

SEQ ID NO: 178119 - DNA, 443 bp, Glycine max
  unsure (1)..(443): unsure at all n locations
atgcgcatatttccttacatacgttctcttgcacaagatttttaaccgaaaaagtgcacccatatacaatcaaggcggcttcgttacctagattatttacacgtactgccaaggtgtatttgttacttacatcacacacatctccttggctgaatttacatacatgcatactcaaagtattttggggtaccaaaaattgcacatgtgcacatcttggtatttctaatacctatacatacacaaacttcatgatgaatcttgactatctacacaataaggtgctacatttcatccctcttttcaagtttttgctacctaaagccgcatgcaaattcaagcatattttcctttgcggactacaaatgtattcaaataaaaaggatacatcttttggtaatgtatcttctntacataacatgcaacatatttatgtatattttttt

SEQ ID NO: 178120 - DNA, 371 bp, Glycine max
agaactacagctacatgtatctgctctaccctacctcgttgactgaaaaataaaaaccgacaaacaataactgaaagaacaatgcttctactcgaaaaaaaaaaacgaaaactaactacgtcctgaaaaaaaaaatgccaactaaaagacgactatccattaagatacgaagaaaacacgatcacggattcatggattagtcaattagaatcaatggttcaataccaggaaaagaaaatcgttctatactacttaagtaatctataccgaggttaaataatttgcatacactatctgataattaaactaaacgagggccattcattacaaattggaagtaaaacaaggccacttcacaagacttaaaacat

SEQ ID NO: 178121 - DNA, 356 bp, Glycine max
  unsure (1)..(356): unsure at all n locations
agctngccgccacggagtgttcctactattctcttgtgnggtggaacaagctacaaaaggagagagctagaaatgaagagccaatggttgatacatggacggagatgaaaaagatcatgaggaagcggtatgtgccggctagttactcaagggacttgaaattcaagctccaaaaactaacccaaagcaacaagggggttgaggagtatttcaaggaaatggatgtgctcatgattcaagcaaatattgaagaagatgaggagggtactatggctcgatttcttaatgggttgactaatgatatccgcgatattgttgagctgcatgagtttgctgacatggatgatttgcttcac

SEQ ID NO: 178122 - DNA, 360 bp, Glycine max
ggacactataaaactcagcttctcgattattacgcatgaatgggactgcatttgttatttatgactatttcaatttctcgagagctttcgttgttcaattcgagccttctcgatatattatccaccggaatcggacctccgtgtgataagacatgaccatttgaatttttcgagagcttccgttgttcaatttcgagcgtcttgatatattatgcgcctgaatcggacctccgtgtgacaagttatgaccatttgaatatctcgagagctttctgtagttaacttcgagagactcgatatagtatgcgcctgaatcggaccttcgtgtgataagatatgaccatttgaatttctcgagag

SEQ ID NO: 178123 - DNA, 410 bp, Glycine max
ctccagcatgcatagtatgttgggctcgccctttgtcacaggaagccggaaggtccatatcaccttcttaattgtacacatggggcactgcgcccccaaatgcgcaagtaagaagagataattttccgggctctcgtgtccgtaaaatgcattcatatcatgcatcgcataagcatctcttcataacatcataatggacatatcctgcatttgtccgttataatattccagcctcacattttgcatgaagcatggcatcatcatgcatatgcgttcaatttcataattacattttccgtgcataagcttaaagtatgcccgagtcattcattcctatgagatggtgttgaagattggcgacacaattgccattcttggatattaggttgaccaactcatgctttacaaaa

SEQ ID NO: 178124 - DNA, 357 bp, Glycine max
ctgaatgcactattcaatggaggtgacaatatcttctttttactgatcaacacttgcacaggggccaaagatgcatgggagatcctgaaaatcactcatgaaggaacctccaaagtgaagatctccagattgcgactcttggctacaaaattcgaaaatctgaagatgaaggaggaagagtgtattcatgacttccacatgaacattcttgaaattgccaatgcctgcactgccttgggagagaggataacagatgaaaagctggtgagaaagatcctcacatccttgcctaatagatttgacatgaaagtcactgcaatagaggaggcccaagacatttgccacatgagagtagat

SEQ ID NO: 178125 - DNA, 334 bp, Glycine max
  unsure (1)..(334): unsure at all n locations
accgcaatgctacactggccatcgctcttagtttcaccataagccttgatgatattccttcctgctttacatttgacctccacaacagcacctacatgtcccccacccccaaaatagtttatcaaaattgatagataatacatgttatgacaaacattcctcctcaaaatggtaattaatccctctgttcttttatctttctttaaggtcttacgttaaacaacaagtgtattagaatttnttcttaacaaacgcaattaaaacaaagaaactatttatacgttgtctactaaagaatataagttcactattcttgcaataacatatttatttt

SEQ ID NO: 178126 - DNA, 406 bp, Glycine max
agcttgtccttccttacaagtcccagtgcttcctttttagccactggatcttctttgattggaatctccgctgcctgcttaacaaattaaaagagaaatcagtacatgcattacagtataaaagaattttcataatgtcattcaatatcaaattataatatactaacctctgatgctatttataagaaataagttgtaatgtacactaatagattcagaggtagtatcataaatttataaatttttataataattatcttaaaaatcatactaaccctaatttttaattgattgattgatactgaccatgtaaagggttttcatgatttgatccaatcacaaaatgcaataaattggttgtcttctatgataactataacaaaaatcataccaataataatttcta

SEQ ID NO: 178127 - DNA, 116 bp, Glycine max
tcatgcttattgtgtaaacactctttgagtgattagaatatattctctatccaacatctattatttgtgaaagctacgagtgacttcctgacaaaaaatacttaagtcttaatctc

SEQ ID NO: 178128 - DNA, 388 bp, Glycine max
agcttataagaacaaaattgccttaatcattttctatattgcatgtgaattaggacgcatcaacaagaatcaagccaaggctattgtgcaagcaatcaatggggcaaaacacaccaaatgattataatgatggatggctcaaattctcacaagggttaaatcatcactttcaaattgagctttcaaaactatcatgacatgtatagaagaatcaaggatttcaagtcacaaaatgtcatgaacttttattttcaaaacaattacccatttcttgaacatattctataattcaaagaaaaacatgctaattcttacgtgcacacgaaattgacccaaaatattaaactgaaaattcgacgaaactaacaacattaaaatattaacacaa

SEQ ID NO: 178129 - DNA, 273 bp, Glycine max
tgagaagctttcttaagaaaacttccttgagaagctttcttaagaaaacttccttgagatgcttctttgagaaaacttccttgagaagctagagtttaactacacacactcatttaaaaactaagctcacctctctgagaagcttccttgagaagctagagcttatctacacaccacccatctataaactaagctcacctccttgagaagctttcttgagaagctagagcttatctacacacccctataatagctaaactcacgcccatgaca

SEQ ID NO: 178130 - DNA, 311 bp, Glycine max
caagcttgagactgcatgtatttatgacatattgtttttatatatatatatatatacctatatagacagatatatgggcctataaatatagacacctacacctcggtgttttcagcgctctccatatcccagaaagagaattttctctagcacgcgtcttttaaaaaatcacaatgagcacatcacacacttttatacttgtgtgagagagatctatacgccagagagaaactctctctctacacacaccaccagaaaaaaaaccccatatctgtgagatagtgacccctcatacacacgcgatttgtcac

SEQ ID NO: 178131 - DNA, 472 bp, Glycine max
tactacgcttgtaactgttagatcattgcaaattcgaacaccaggtttttaattatttttgcacattcccacagttgggatttgtgaaataatattttctgtaagagaaatgtccctcacacgtaactttcttttctcgcatatattcaaatttgtcccattagaactatgatcgcagactctttaactgttcaatcatcgtgaaatctgaacaccaggtttggaacttatttcctcatattctcatcgttggaatttgtgaaataatatctaggagagataaatgtccctagcacaaagacattgaaatagaggcttcaatcccttctccttctctctaacgcttggaaaccttagcagagcaaccagagacaaagcatgaggaatcttacgaactgctagagactctcatattgcgagatcatttctgataattcgttgtgtttgacaagattactacatatcgtgaaaa

SEQ ID NO: 178132 - DNA, 293 bp, Glycine max
cataaaaaaaaaaattttttccacaaaaaaaagaacaaaatgaataaaccccccccaatataaaaaaataaaaaataaaaataaaaaaaaaataaaaaacttaaaaatataataataaccaaaaatcaataaaaatacaataataactaaaactataaaaaaaaaaaataaataaaaataacacacaataaaaataaataatcataaaaaactaaaccaaaaaaaattaaaaaaaaaataaaaaaaataaaaatataaaaaaatcatcataaacaaaaaaaaaaaaaaaataa

SEQ ID NO: 178133 - DNA, 410 bp, Glycine max
  unsure (1)..(410): unsure at all n locations
agctttagtagttattgatcaataatcttatgttcttataaagacaatgatgacaaattgacaaccatgattttttttcctttgcccatagtttctacttttcccacccgattaaatccatgaacctgaacagaatttgaacgagcacaaccagataataaaatgtgatgtatgaatgaagttttttttcacaaaagtaaaagttttcaaggtatttatagaataaaaataatacataccgaagttaaattagatcatggctatcaagggccaaggggtgatctatcgacatttatgcaattattctatttttggttacaaagaaaataaaagaatgggaaggaagtgtttctcctganttggatatcatataaacaaagaaggaaaataagtttttgtggtccatgcta

SEQ ID NO: 178134 - DNA, 450 bp, Glycine max
  unsure (1)..(450): unsure at all n locations
cttcaatatatttntggggctgtgtgctttaaaatatattattattgtatgcttgagaattatgcttctaagaatattatattttgaaatattattcccatatatgtttggttcacatttaataatttaaaaaatatttaattaaaaataaaaaataaaataaaaatatgaattaatgatatggagagagataattattctagaaaataacttctgttctaatgaaaatatggtatactcacattttactatatatcaaaataagaagatatttttttcaataattcttgcaaaaaaatttcaaaacttatacgaaatataagaatgtgatattttgaagatcattntctcgaaattcttcgttataccttgaaataaaaatgcttcctaaatttctttattatttgtgcatttaaatccataanatcttttcaacatagacttaatgga

SEQ ID NO: 178135 - DNA, 396 bp, Glycine max
gcttattaagctattttcataggctctcatatactcttagaagttctatggctagaagataatttcaaaaaagttataaacaaactcttcctaatggaccttaagtctatcactccatctcatcctcaacagagcaatttataaccctgaaaaaattataaacacacgaaccacagagtacataacgaattcatagcaacagaaagcatggtgtgattccataagcattaaaaaatgaatataaagaagaaaagaaaaccaagcggggtgtttcgtctgaatagaaaagacgcaaaagggttttcgtttcaggaaaatgtaaaataagagaggttagggtttggaggactgacttgcaaagcttcaagaaatttttgcacgtcaaagtgcatttgt

SEQ ID NO: 178136 - DNA, 365 bp, Glycine max
catatatattaacataattctagagctaataaattctgattggtgtttgcttatggttttcacttattactacatacatttaatttctgctacccccctcttgattaaccttgtctaaaacagaaaaatgctgatggccaatcaatgctggcgtctacgctaatatcacagccatattccatgaatcatgcattcctcgaggaggatgtcaacatgtctttgggcaggattgtattgttggtggtgcctcaatgactgcccttgccttttgataatatgctatccttcatcaccttaaagatagtaactgtttcttctcatcatgctatacacagcttactttggtgaaatgggatctgacgatg

SEQ ID NO: 178137 - DNA, 388 bp, Glycine max
  unsure (1)..(388): unsure at all n locations
tcttatccaggctcatcttgatggtgaagctccttttccatggcttattccctagnggatgacgccttctctcatttcttctcctttttcttccgctgcatctccatggtggaaaatcatcattaaaggatctcattgaagcttaaagatccagcctccatataagccccaccagcaggcttccatcaggtatggctttttaaaaatattgtaaaagtcaagtcaataactttaccatacaccacactntattattggatgataagtgtaaaaaatcttatactgttagtgtattttaattaaattcaatttatatacacatantaatttagatcatttanttttatgattngttttaggccacttacatgtactatagcatcttaca

SEQ ID NO: 178138 - DNA, 277 bp, Glycine max
ctagaagctcttgcgctagggagagatcttgtcccactcaactgtaaatatcctgtagactcatatagggcctctgtattgtctacatggatgttcttaaacatagtgctacttttaaggaggttagaaagctcttgaaatccatattagggtgaagtttttccggcagacctcgactctgaaaattagaaacttatgtatgaacattagtctcttttaagagaagatgatatataatgtcgtatttctatgagactattaatataattcatattca

SEQ ID NO: 178139 - DNA, 428 bp, Glycine max
tgaccaatctcgacccaacccgggcatagtcggtcagtgagaatctgtgatgtacctaagcaggcgagctcttgcagtcacagataaaggaaaacaagaccacaaagcaaggaggcttgtggtggctggccaactgtgaattttgtgtaatatgtggattgtggcctctggtaatcgattaccaagggtgggtaatcgattacaaggcttaaaattgaagacaggaggctaagatggtctctggtaatcgattaccaaggggtgtaatcgactaccaagcttgaaaacgaggtcaggaagctagggaagcctctggtaatcgattaccagcctgtgtaatcgatacacagaggaatgggcacctgtaatccgataccaagcattgtgtatcgattacacagcgcattattgcatatttcatgtcctga

SEQ ID NO: 178140 - DNA, 429 bp, Glycine max
ggaccttaagcacgcggctgcagcttatagcgcgggacgggagacaatgtctttggtcgtgatatacgaagatgttgttccgagtacattggatttggtacgaccatgccctcctgatttccagctgggaaattggcgagtggaggaacgccccggcatttacgcaacgagcataatgtaaacctttatggttttaaaagctctataattgggcctaagctttacagtttttcctttggttaacgctttgtgtcttttgtttttgaatttataatacaaggacctttcttcatctgttcctacgtctctacccattctcattcatttgcatgtttacttctttatttctgaaacggcagatccgatgacgagtcccccgaaggtacctgtgacccgcttatcaacttcgagcaagaaacgaatcaaacg

SEQ ID NO: 178141 - DNA, 411 bp, Glycine max
tacttttattctgtgaccacagagtgggacctggagatatgtcgcgggggtcaagagaccttggggacgtcatgtgggatgctattgcccaaaaccaagcttgaccaatcccgacccaacccgggcatagtcagtcagtgagaacctgtgacgtacctaaacaggcgagctcctggcagtcaaccgataaaagaacaaggaccacaaagcaaggaggcttgtgtggtggctggcacgctatggatcttgagtgatatttgcgatatggcctctggtaatcgattaccaagggtgggtaatcgattacaacgcttaaaagtgaagacaggaagttaagatggtctctagtaatcgattacaaacgaggtgtaatcgattaccagacctaataatgggaccaggaagtcgaga

SEQ ID NO: 178142 - DNA, 413 bp, Glycine max
agcttccccaacatcaaagtaatacaacattcttcagcacaagccatcacagccaagaaaattagggcaaaggcagaaaactctgcccaaaacaccaaccaaaatcacagcttttctcacccaaagaccccagtaacaattccttcgttccaattcgttaagcgttggatcgactcaaaaattttactggaagtctctagtacctaagcctacattgtgaccgttgggatctactagcaaacatccagaactcattctgcacaactctttccacatccaatcacacacaagtatttttctgcacttgtgcaaaattctgctgcacaatttcacagcaaaaatatgcacaaagtgcagatttcgaaaaccacacttcccctcatccaatcttgcccaaatcaaatcctacaagt

SEQ ID NO: 178143 - DNA, 501 bp, Glycine max
  unsure (1)..(501): unsure at all n locations
atactatagcttcagcttcgctacacatacctctctaatagctaagctcaccttcttgagataagaagctagagcttagctacaccccccctataatagctaagctcacccccatgacaaaaaacatgaaaatacaaaaaaaagtccttactacaaagactacttaaaatgccctgaaatacaaggctaaaaccttatactactagaatggccaaaatacaaggctcagacgaaggaaatacctattctaatatttacaaagataagcgggctcatacttagcccatgagctcgaaatctaccctaaggctcatgagaaccctanggccttcccttggatctctagcccaatctacttggagtcttctacccaatgcccttgcggagtaggattgcatcattccctccaccttagaaaggaattgacctcaaatcccanaagtcttcatactctgggctcnctttctcaacacctgtaaaaagaacaaaaacatatgtatt

SEQ ID NO: 178144 - DNA, 402 bp, Glycine max
agcttgttcaaccgaagatgacacattcttattattgtcccaattgagaaacgagtatttagtctcattaagatcaaagattgaacgtaatttgtatttgttgggtctggcaactaggtgttggtataatggtgttgggatgtttgcataaactctaacctcaagtaagaatcagagtttaaggtgtttataaagttgtcatggcgtgtccaaagtgggaggtgtcatgcattctacgtgagtacttttttggttcaaatgagaagttcgtcatcctgaattatgtaggttatgatgttctcgggagcgtttggtttgggtaagaacaaacacctgatcttcatatgattggtgatatccacttctagaataatcatccctaacttgtggcttctttttaaa

SEQ ID NO: 178145 - DNA, 283 bp, Glycine max
aactctctcagccattgtgggaaccccttcttctttcctaggagccctcctcatctttctttctcgtgcatctcatgggaaatctattaagactcatgactcaaatcacctcatatacccccacccgctcatagatggctttaaaaatgaaagcaagcatcttaccatcccccttatatggagataggaaaatttaactgaggatttataatcaacatatcacttatttaacattattatattgttagcactcagactatgattactcttctccacaaataat

SEQ ID NO: 178146 - DNA, 404 bp, Glycine max
agcttgttgaaattgccatgttggatgagtttaacatacccattctgttttagggtttttgtgatgatgtttgtgatgtttatatgctgaaattgctgatggaaaactgttagagatgaagggtagaactaacctagggttagaaagtgagaatgtgatattatgagtggaaaaagagtgaggctttgagagttggaaggctaagtctgaattctgtggtaaatggaggttaaagtgagttaatactagcttgaaatgtcatttaggacttgggagaaagcttggactgtgctagagagaaaaacaaatgatcaaagtgaataaagagccatttctagggcaaatttgggtgttgaagagtcaaattctgattcggcggaattttacgtgtaaattcagtttga

SEQ ID NO: 178147 - DNA, 440 bp, Glycine max
ttctcataagtcctaaatgacatttcaagctaagatttattcactctaacctctaaatactaccaattccagatttggccttccagccctaaaaaattcactctttttccactcctaacaccacattctcactttctaaccctagggtagttctacccttcatctctaacagttttccataagcaatttcagcacatgaacatcacaagcatcatcataaaaaccctaaaacagaatgggtatgtttaactcatccaaacatggcaatttcaacatgctttccacaaattccttcacaaataactatcatgaagcataaacttagcaacactacccatcatatttcccaaaaccccatacccacgagaatcaagagagaaagaagtccaccccaacctgaagattcgaagtcccactcgtagacacgcacttcacgactc

SEQ ID NO: 178148 - DNA, 395 bp, Glycine max
  unsure (1)..(395): unsure at all n locations
agctntcattgcaacaagggagtctcttatattctttcattgcttctgcagtcattagagcagccatggccttgtgaatggctacatctactttatatagcaatcttttagccctatctctcttcagcatagccacatgacgcttaaaacgagcctcagccatggcatcacgctgtcttaactcctcaaggactgaagcatccaactgttcaatcccttgcctcttagggccagcaagaatgtgatgcctgctaccaagtgaatcatatctggacttgatgaaatttgggatatgatttctatatcctgctccattactagtaagatagtatttcaagctgccagcatcacgaggtaagaatacccttggtgaggtcagagccaatgatgaatca

SEQ ID NO: 178149 - DNA, 370 bp, Glycine max
  unsure (1)..(370): unsure at all n locations
atgagtgcaaactactncattagaaacttgatatgcctagaaagaaaaaaatgtaggtgttgcaaccaaaaacaaaaaagctaatggaggaaggatcctctcaccaacatcaaaataacgaagagtattaatagtggacttatatgagtaatccccaacctacttcttttcggcatgacctgtccatccaaaagttacatgatttaagtcacaacaaaacccaacataaactaacttgcaattaatgtattttggaacctttagtatacaatgttgaattgcaataataagtattaaccatagcaaataaattcttgaaaaggggttaaggctagagatattgataaggatatatagaaagggaaaaaaa

SEQ ID NO: 178150 - DNA, 389 bp, Glycine max
agcttgactgaataataatgatttgttgattgttgaataatatgccattagcctaattcctagtggaatttgggctagccctaatcagaatgaaagtccaaatggagatatttgctccgaagagactaaatgggctaccttgggtggagaggagattgataaaagaattgaccacactttttacaagcctacaccagagatggtgaaacatttaaagcctttatatgcaagggcataatacatgatagaattgtggtaggagtattcatggatggagcccccattttcaatatcatggctctaactacgttgaggaaacttggcaaagggaaagaggatttaataccatgaaaatgagcaaatttacttgaggagctattgctgctttg

SEQ ID NO: 178151 - DNA, 479 bp, Glycine max
  unsure (1)..(479): unsure at all n locations
actaagctgcctagttcgatattgatttctttaagtcgaccatgtgtttctttcgntnaactgaaaatgtcattggttagtccatgtaaacatgataatcctgaaggaatcctttcgtgagactcgtgaaaatatgtctttataatcaacaccatctctctaagtaaaacccttagtaacaagtctggtcttataacgttcaagggtgtcatgaaaatcacgtttagtcttaaagacctacttacaaccaactttcttgcaaccttttgacaattctacaagatcccaaacaccattatgttccatggattttaactttctttcatggcttccaaccacttatcagaattataacaacttatataatttgtgaaaacccaactagatcattattattaatggttaagttagttcctaactcatgtaaatataccacatagttattcaaaatagtgacatttctttctcttgagacctca

SEQ ID NO: 178152 - DNA, 403 bp, Glycine max
agcttgtaagttaatgtggttagctatcatcttctggtgcataaagttatttcattttctcctactagatatgaagtgatcttttactgtcagtccttcaatgcatttcttgtaataaattgtttagatgggaaagctttgtttcaaaatttaaattatcagagcttcctataggtttcttgattagtttgatgactgctttttcttttgtaatattaaggctatatgcttttggctgtgcttctttcatactttctcgaaagcagtattttcataatttggctttatcactccttcagctatgttttgatcattctgagggaaatatattctgggatgtaggtgatttttccagctctagatatacgtgtgaagaatgtagcacagacatattctctcgagc

SEQ ID NO: 178153 - DNA, 355 bp, Glycine max
cgtcgcatttggattcggaaaagatcatatggatcgaagacaggtttactgaacggaagaagagatctgacagacgaggttatggtttagataaacgcgcttcgaggatgaagattaggcatcaaacagatgggaatttaaaacggaaaaccgcatcaacagaaaaaaaaattaatggagaaaccaacaggaacacacgtcttatttatttgatggaggggaaatcgtatttctagttctataggtgagcaatgaaaaagtagttaagtctttttgatgaatggacatgaatgaccctcgataatgaataattaattaactttcactggtttttgacaataaatataatgtattg

SEQ ID NO: 178154 - DNA, 383 bp, Glycine max
agcttcttatccaaggcacattcttggtggctaagctccttcttccatggcttattccctagtggatggtgcctcctttctcctcttctccttttccttccactgcatctccatggtggaaaatcaccattgaaggacctcattgaagctcaaagatccaacctccataaaagctccacaagcaagcttccatcatctagtgtcaagggaaattgtcttgtgttaagggagattgttcggtgtcgagggtggtaacctcgactagtgtaagagttgtaggtttgtgaggcatgtcaagctcccctagcttggacgactgttgtttaagcttcttctggcaagttgtctggggtggacatgcttttgatcttgcaagcaaagtt

SEQ ID NO: 178155 - DNA, 403 bp, Glycine max
agcttattacaagctcgtgagacatctctctaagacggttgaatccaataatgaaagaagaagtaaggaaggaagtgctcaagttgctggaagcagggcttatctacccaatctcagatagttcaagggttattcctgttcaggttgttccaaaaaagggaggtatgacaatgataaagaatgataaagatgagctaattcctacaagaacaatcattgggtggaggatgtgtattgattacagaaagctaaatgatgccactaggaatgaccattacccgcttcccttcatggaccaaatgcttgagagacttgcagggcaatctttctattatttcttagatggatattcgggctacaatcaagttgcagtggatcctcaggaccaagaaaagacaacttt

SEQ ID NO: 178156 - DNA, 385 bp, Glycine max
  unsure (1)..(385): unsure at all n locations
ccctcttattactagctatttggaattctttagttcctgaatgtacaactttcaaattgttggtcgttcccctctttgttttatgcaaaaaatgaaatcaatatcaaacaaaacatgcatacaattatcatcgttattgctacttgaaccataaggaataacatctaaagaagtacttcaaaacgtttatttatctctttggtattttttgaattacaatttgacttcaatatctaattttttaatgtacttaggtggaggatgttgacaaagagaatgaaaaggaagaaagtaatttaaagaagataanggaggtgcatattgttttttcctcacaaggagtgtcacatgaatgctcgttgtgaacaacataaggcatttgata

SEQ ID NO: 178157 - DNA, 409 bp, Glycine max
agcttgtacattcaatttcgagcgttccgatatattacgggactcaatcggacatccgagtaaaaagttattgttgtttgaatttgttcagagcttcaacattcaatttcgagattttcgatatattacgggactcaatcagacatccgagtaaaaagttattgtcgcttgaatttgctcagcgcttcggtattcaatttcgagcgtctcgatatattacgggactcaatctgacatccaagtaaaaagttattgtcgtttgaatttgctcaaagcttcggtattcaatttcgagcgtttcggtatattacgggactcagtcgaacatacgagtaaaaacttattgtcgtttgaatttgctcagagcttcaacattcaatttcgagcgttttgatatattacggcactc

SEQ ID NO: 178158 - DNA, 483 bp, Glycine max
  unsure (1)..(483): unsure at all n locations
tcttgttaaacctcgatcggacatctttcctgaccgacgtctactaaaatntttttcgatcagtatcggtgagtaaaattttttttccgaggatggcgaacgttttcccttccaagcaattgaaaagatgccagtgtcggccgaaacacaacttcgttgtggtcgaacgaaaaaacctagccgacctacatagaaaatttttacgacaacaccgaacaaaagagctacctctatcgtaaaaaaatattatcggccagcgtttgtaaaaaagttgctcaacgtcgactaataattatcagtcgcggccttacaacaacagaagtcagccattctactttctattaaatccttgaatattatntggatgatgttcgatcggcgtcatccggtgacgcttcttttttaaacttcgatcgatcatctttcctgaccgacgtcggcaagcatttcttttgatcagtaacggagaatcctaatttttgt

SEQ ID NO: 178159 - DNA, 396 bp, Glycine max
agcttagccctagaggggatagaccttttcatgttttggagaggatcaataacaatgcctataggttggacctcatagaagagtatggagtcagcaccacttttaacatttcttatttaattccttttgtaggtggagtgatattgaggaggaggaactaacagatttgaggtcaaatcctcttcaagggggaggggataatgcaatcctccctaggaagggaccaatcactagagccatgaagattgggctaaagctgctgaagaaggccctagggttctcatgaacctcagggtagatttctgagcccatgggccaaggttgggtccaattatctttgtacatattagattaggatgtcattatatttggttcttgtatttagggctccataat

SEQ ID NO: 178160 - DNA, 478 bp, Glycine max
  unsure (1)..(478): unsure at all n locations
tatgcgcatacttcttcacgaacgttcacttgcacaatttattcttataactaagaaaaatgcacccatatacaatcaaggcaccttcgttacctagattatttacatgtacttccaaggtgtatttgttaccttcatcacacacatttcctttgctagattcacatacatgcatactctaaacactttggctatcaaaaattgcatacgtgcacatcttggtatttctaatacctatacatacacaaacttcatgatgaatcttgactatctacacaataaggtgctacatttcatgctctcccctttnttttttcaagtgtttttactacctaaagccgcatgcaaattcaagtatattttcttttgctcactaaaantgtattcaaattaaaaggtatttttgaatgtatttctttaataacatgcaacatattatagattttgtaaacattntgctaccacaaatatatgtcat

SEQ ID NO: 178161 - DNA, 491 bp, Glycine max
  unsure (1)..(491): unsure at all n locations
gctgggaccagtcccagaacccgatgcttgtgcaaccaagtgtcatgatttctatattacccattntgctagcttttaatatagaattatagtcttggtccctcatctatcatttctttcatcttctaaatgaattgcatgtgctggacattcaaaaaaactcatctcttacttgatttcaaagtagatcttcaatttaacttataactcactcaactctatcattacccattttcaacatgcagaactaccaacatgcaaagagatctaattccgcaaaggccaggaccaacatgaaacatatcatgtagcagaagcaccatcctcagactcagtcacctttacagccaactattcaccgcacttcataatatatagaatatgatggtccgatatctaatacaacacatttcacaacanatgaatgtaattacattacttaatcccattttgttatttctttcgctctactattaagcgattgcgtctca

SEQ ID NO: 178162 - DNA, 411 bp, Glycine max
  unsure (1)..(411): unsure at all n locations
agcttgaacgaatataagaaacatcttcttttatcttggtgattcttgactccatctcattgaagcacatgttcacttgtaattccaaagtgtcaaacctttctccaacaatggtttgaagaccgtcaaacctgtccaaaatctttgaaagaagagatgaatcttctccatcatgtccttcttcaccaacatgtcgagcaccttttttcactcaagagccatcatgctctatttgataaccaaaggatgcaatgactgaagcgcctattaggaaggatctcttgattggaacataaggttcagaatcaagagggatgttaaagtgttgaaagaagagagtgactanatgtggatatggcaatggagcattcaatcgcaatttcttatgcatgcgatatctaacaagatgtg

SEQ ID NO: 178163 - DNA, 424 bp, Glycine max
tgtaagaaataaacctttaaaagagaaacaaattatggtctctttttatatgggtgcaatagcaagatattagaccaaaagagaaccatagaacactgctaaagtctggcagaaaaggtaccacaagaaaagggatctgagaatggaggactagaattcctttgaaggttgacagttgctggagtaacgtcatcatgatacaatttacaaggctaaggctgagtgagtgctatttccttgacactaattcctaaaagaaaaaggcacagttctgtgtacagccattgtctcttatattatatgtttatgtgaatctgttatgattttacgggtaaaaggtatgtacccagtattataaagtttaatttttgtgatggttgtgcttgcattctggttctgcaggtttgatactgtgtacctcgat

SEQ ID NO: 178164 - DNA, 394 bp, Glycine max
agcttgtgagagtgcaagctctcactactttttttcgacgaggggagacagtttctttacaactcccccccactttataaaatttcttccccaaaatttcatgaattgggtgggagagttgctaggtactatgctaatgcatctaggtttcttcgcttttgttcttatttggcttccttgttggcatcttctccttcttgattttgtgacctttagtcattttcagttgatctcatatggattttggtagactctgaactattatatttggtttggcccttcttagaaacatgtcttagaattttttatgttttttcatgtgatctataacaagaaaggagattattttggtatggtttgagagtatatggagtgtttctttcttcttcaatga

SEQ ID NO: 178165 - DNA, 386 bp, Glycine max
actaagctttcctctgattagatccacctagaaattttttttacgcacactctatctatgaactatacaaaatacatgactcttcaattgttctcaaaataatattaactcatcacccttcaaaatgattaaactcgtcacgttcccacagtggatcccatcacaatactcatcgcgcattaacttgtcacccttaaagggtcttacagccatgtgattgtacgattcataactcacaactcaatgcacacaacatctcaatacacgtatgatctcaaaatttaacacatactcatcttgtcacttacacacagttcatcacactctcataatttcaagacatcatgttatcactcctcatgcatcatgatgcaatccttcctaag

SEQ ID NO: 178166 - DNA, 329 bp, Glycine max
ttgattgtgaaggaatgcattaaccgtatcctagtgagagtgtgatccttaaattttgagagaaacgactatcatctagtactgatttttgcatgaatctctgaagtatggactgaatgcatggaattgaggatgatgaacgccatgtttgattgtgatagccacttaaccacaaagttgaccatgtgcttgaatgaattatcccttgtacccaggttgagctgaatgaattattgattgattgaaccccgagcctattcagaggtatctcctgctaccttgacttaggttgtaggagagcatcatctacacgaagtgtggttcaaagc

SEQ ID NO: 178167 - DNA, 379 bp, Glycine max
ttggtcatgcagacgacactggtttgcatttctgtcacacaatcaagagaaggaaagctgtagaaaacctctaaatctgtaactgttatggttgccattaaattcaccactttgcttattgtggtgtgtacccttaaattaaaaaaataataagatattatgtttataatcatgctattggtaaaaaaataactttattaataattaatttctcgtagaagatatgatgaccaccttaaatatataattaaatattaaaaaaaattaaccacaaaaattaaaaagcattttgaatctaaaacagacaaaactaatacgaaacataaagtagatgatttcatgaatatgacactggctcaaataaatctaattaaattct

SEQ ID NO: 178168 - DNA, 464 bp, Glycine max
  unsure (1)..(464): unsure at all n locations
tcacaagcaagcttacatcaattagtgtgtagttctatacctttattacaatggtgatcaatatttcatgttgtaaatgatgtaactacgtaggtcaaagctaaatagtttagaaataggaactcattttggacggactcaagggcccaatagcatatgaatgggttgggatgtggcgtccacttcatcattgggtcgggatgcacacccaatcacgttgacccagcccaattgaatataagggtctctgatattacaaactttggaaagttattaaaaagaaggataaaatatattttttattcctatgttctaattgaatcttatnttagttttcagaacttttgcatcatgcaatttaattcttgaactttataaaaaaacgtttttaattgataggcttactctccaatttcagcatggttcttaatttcagggtttgacgaggaactaaagcatgtttt

SEQ ID NO: 178169 - DNA, 407 bp, Glycine max
  unsure (1)..(407): unsure at all n locations
agcttttaaccgggctaagatcttttcttttcttatttagngggcacctccaacatcaatttatagtttttggaagaattaattccttttggtgctggcggtattttcaaacctaaattatcaagccaggaacacctccttgactactagtccaactgctgaaaaaataatggatcatatttctaatcagaaactttaaattttatttctagcaatgttaacttaaataaaatgacaaacattcgtactaagaaaaaaaatgcgtaaatgcttcatgtactcaaaagttcaccgtaaaaagagataaaagagtatattcgtaactatatatccgaaaatcaagttgagtcgtgggcgcgtgcccgttcattatatcaaatatgattcttttatgatatactcttata

SEQ ID NO: 178170 - DNA, 377 bp, Glycine max
  unsure (1)..(377): unsure at all n locations
cttctattttgataatattatacgtgttgttgcttgtctattatggggagtttattttctctatggatatggtgggaccggcaagacatttatgtggaaaactttatcatctgctgtgcgctccaatggaggcattgttttaactgttgcttctagtgggattgcttcattattattgcctggaggtagaacaacacattctaagttgtcatacctgtgcctgcaacacaaaattcaacatgtaatattcatcangggagtgacttggctgaattgttgcagaggacaaaattaataatttgggacgaagctccaatgtgtcacaaatttagttatgaggcacttgacaaaagcttaaaagacatcatgtacaacga

SEQ ID NO: 178171 - DNA, 403 bp, Glycine max
agctttgttatacctcaccttcattggttctataactgccttgatagttttctcatcagaaccaaatccagaacttgccgtcgaagcttcatcatcacaggtttgagtttgcagaccaggctatagacaaacaaaatgatcactaaacaataagaaaattgttcctcatctcaatgtttctaatatgcctcaagcacacaccagtaagtgaaggaacttaccaaagtggcagcaaaactatctgagacctcaactgtcaaatgccgactagaccacgtctgcaaatctttcacttgaccagtcacaccattctcacttcttccaaccaaaccaccttttctgttactccccactaacttcaaaccattcccttctttagattcagcttcactcttcacaaaca

SEQ ID NO: 178172 - DNA, 411 bp, Glycine max
  unsure (1)..(411): unsure at all n locations
tcaacattttgtggatccttcacagctgaaaccagaatggagaagagaagtctcaaacagcaacagaacaaggtccttcatggatttgtcttccttgatcaccttgcagaggttgtcaaacttctccttcaactcttcttgcctcttcttctcatcttcactctcgtcaaacttgagcccttccttggtggcggaggcaagcttcttgccgtcaaattccttgagctgaccaacagcatacactactacaaaagcagaattcaacgtcagttaaaaatggtattttatgtcgattaacgaccatcgtcgtctcaaacgacgtcaaaactttngatgatttcaacgacggttagctaaaaccgtcgtagatattctcccattctaagacaggctgtcggacatgcccatctt

SEQ ID NO: 178173 - DNA, 403 bp, Glycine max
agcttgtccaagttgcttttcccaaaagattattgggaccctataatgagatcaacatttgaagaataagcaacagacaatattctttcgtttggccaaaacggatccagaggcaagaaggcttccccacacctcagtactgaaagaacagcaacaacatattcaacagaaggaggcatataaatgcccacaatctttggcctatactctctacttgattcattcataaccccttcactaggcatgacagtttccaaggactcaggtgcctgtacagttccctcttcacagttgacactatcgttacctgcagcagaatacagtatgccacccattctgacacataaaagattcaagcatttgcaaaaacttctaaagatatttgaggaaatggaagcacata

SEQ ID NO: 178174 - DNA, 446 bp, Glycine max
  unsure (1)..(446): unsure at all n locations
tgtcattcaaaacacactatgtagacctaaatgaatactaaacattcattggttatttatttgtattcattatgcgatataattcgttgtaactcgtcactaaccaattaatattatcaactactcgtttggttaagcaaggaaattgttggtccaacaaaaatcatttacgcgtacagcatacatcattgtcataattgacaacacataatgacatgcatgcgtgttacagtttgagcgtgacaacacattggttgacttcagtacacattntgaaactagcagtcgctcaacaacacattggttgacttgactacacattagcgacaacacattggctgacttgactacacatttacgcgtgtctatttttttgtaaacaaagttaaacaaaggctcggtcacaaccatctatatatatggcagactatgctactanatcacac

SEQ ID NO: 178175 - DNA, 350 bp, Glycine max
gcaagaaaataagcaataagaaacatcacatatatatatattacaaataagaaaaaacttacaggttatcagatgatggcttttcctcatcttgcagcaattcatttatcacaattttatcttccatttatatagcctttaagcttgatactaccactcagatgatgatatcagatatgcatatatagctgcgaatagggtttaacaccaaacttttgaagcataactatatagtgggtgtagtctgcagcgtttatggacgaaatttctgcacgcacagtacacaccaccaatataagtccttggtaagtctatatatttttctagaagcttggttttccatctgaata

SEQ ID NO: 178176 - DNA, 398 bp, Glycine max
agctttaagtgtagctacaacctcaatctttacttatgtttccgaatcccttcttcaccaagtgtgcttcttaaccaagattggaataaaatggaaaaaattaatatatacatatatatatatctatatatatatatatatatatatctatatgtcccatgaataataagacttgagagaacatcttaatgttttatatataataaagaagaagagaggcctatttattaatatttatttatcgatacgggcccttaattaaagtttaaaaaattacactttaattccatacagtgtctttggcagactacatgggtcatttcatcaactttgttattctcacacgtacatttttacatacttgatatttgcgacactgtttcttatcactaacttca

SEQ ID NO: 178177 - DNA, 468 bp, Glycine max
  unsure (1)..(468): unsure at all n locations
cgcttgtggagcttctatggaggctggatctttgagcttcaatgaggtccttcaatggtgattttacaccatggagatgcagcggaagacaggaatagaggtgagaggaggcgccatccattaaggaataagccatggaagaaggagcttcaccaccaagatgacccttggataagaagctaggagatgatgcttcaatggaggaaaagaaagagagaaggggagagcacgaaattgaaggaataaaagagggagagaagtggaactttgaagtgtgtctcataagactttcattcatcaaagttacaacaagtgttacacatgcttctatntatagactaggtagcttccttgagaagctttcttgagaaaacttccttgagaagcttctttgagaaaacttccttgagaagctagagcttagctacacacacgcctctaataactaagttcacctgcttgagaagc

SEQ ID NO: 178178 - DNA, 418 bp, Glycine max
catgcaagcttgccacctagctagcccaggcgagctaggttgctttttttttgaaagcaccaccttctataggaacatcctaaaaggcccaagtaggcctggttgctatttgcacccctctgtttactaaatacattgccctgccttttttagcttatgctttatccgctacgctacggaactttacgaattccgttacgattcttgatttccttccgaaatgttacggaaccttacggattacgtaatcaccccttttttggcttacggactggtacggaacctcacgaactgtgtaacaatgctttcttttgatttccggcatgtaacggaacttcatggattgtgcaacaatgctctcttttaacttctggtgtaatatggaactctatgtattgtgcaacattgggtgcccatt

SEQ ID NO: 178179 - DNA, 426 bp, Glycine max
  unsure (1)..(426): unsure at all n locations
ctcagcttctaaagacacgaaatagttgggagcgtaggtgaaagatgctcatgattatgccacgcttgcttggattgaggtggggaagctgaaaaagtctttacttgagaagaaccatattatagatattgagaggtcggctgaggtgaaagtcgagggatttgcgtccttagctaaaggcgaagtcgtagagcagcatacgaaatggtttgaaaaggctaagagacatgtcatcttccttggttttactaatgtagttgatcttgatgtcattaaagatgtttatgactgtgaaattangcccctcgctgaggtatcacatggcttccatgatacgcctgcaactcacgttaccaatgttgctaagccagaagtggaggcttttgaggtgccatctacccctaccaagacttgtactacgcactc

SEQ ID NO: 178180 - DNA, 479 bp, Glycine max
  unsure (1)..(479): unsure at all n locations
cttaatattgaattaaaaacgttcagaaactgttggtaatccattaccatatatgtgtaatcgattacacagtgcaaatattgaattcaaattttaatagctgttgtaaatcacttttggccactggtaattgattacatcctctggtaatcgattaccacagagtaaatttgttgaaaaagactttttaacttaaaattcttggccaaactttttactacttcaattggaattcccttcctatttaatataccctttctaagactctagagactgtcttgatcatccatcttgaatatctttaatctctttgccttgaataaagctctgagacacatgtgacactgtggtatcatcaaaacatttcaacttgatcctatgtctacaatctacgcctttctgatgatngacactcctgaaatcaagacacgctatatataatatgataccacgttcacacaatccttacttcacctatc

SEQ ID NO: 178181 - DNA, 409 bp, Glycine max
agcttgcatgaaatcttgctgagattcattgttattataatagaatgtacactcaacacatgaagcagaatatttggtatgggaaaccaatatgatatgacacaaagacgacaatacatcaatttttttaaaagttataggacagacacaacaataatatagtatatgaaattaatataaagttagcataaaataaaaagttatgcaacatggttgcatgacaagaccattatttagaagtgtatgtgcttcttaaataaaagttgcgatacgaaagagtttatcatagaaatatggttgtaaaagatacgaaatagtagtgcactaccaaaaatggttagccaaatattttaatgaacaaagaatcaattcaaaccatgtaactttcattaaacaacaaaagacaatg

SEQ ID NO: 178182 - DNA, 363 bp, Glycine max
  unsure (1)..(363): unsure at all n locations
tggctcagcgtntatgcgagacagagaccaacatgccatctattatctccaagcaccaagaagagntaggtctagccacggcccacgagcataagatcgcggacgagtatgctcaagtatacgccgaaaaagaggctagaggaagggtgatcgactctttacaccaagaagcaaccatgtggatggatcggcttgctcttaccttgaacgggagtcaagaacttccccgctcgttagccaaggccaaggcgatggcagacacctactccgcccccgaagagattcatgggcttctcggctattgtcagcatatgatacacttaatggcccacatacttagaaatcggtaggaaacttgtatgg

SEQ ID NO: 178183 - DNA, 395 bp, Glycine max
  unsure (1)..(395): unsure at all n locations
agcttcatgatgatgaatcaagattgattctttgtgttttgatgataacaaagatgatgacaaaaagcccaagagaatgagttcaagattaagtcaagattacttcaagaatcaagagaaatttgatttcaagattcaagaatcaagtttcaagattcaagtttcaagaatcaagaatcaagaataatcaagttgaagattcaaaaatcaagaaaagactcaatcaagataagtactaaaaagttttttcaaaacattgagtagcacatgaatntttcacaaaaccttttaccaaagagtgtttactctctagtaatcgattaccagtttattggaatcgattaccagtagcaaagattgttttcaaaaagcttttaactgaatttacaacgttc

SEQ ID NO: 178184 - DNA, 420 bp, Glycine max
  unsure (1)..(420): unsure at all n locations
tgaaccataaccgatgagagtgtgatcttaaactgtgtgtgaacgactagctctgagnaatagtctttgcatcaatctctgaaatttagaatgaaatgtatgaataaggacatgatgagggccatgattgtgtatatacaagccaattgaccaaaaagcttaccttgaattataattgtatcatttgcaccctttataagcggaattacattttcaaaattgaaccctgaacttaaatgattatccccagataccttgtttagattctaggagagcagatagttcaaggcaaattaccccaaaattgggggagttgattgggatgtaaagtaaaaggtaaagcatcagcacaccatacatataaggtgtgttaaaaaaaatatataaaaaacattcaaagaacatgtgtgatgttgtaat

SEQ ID NO: 178185 - DNA, 402 bp, Glycine max
agcttagatcaccagaaactagctaggttttattatgccaccaaaaatagctgtttctccattaataagtcgttgctcttcccaagttgtactctacttatttttacttttgaagtatgctattatgatgctacttattgtttttacttgaactggaaagaagcagaaattatggtgtcatgttgatatttatgtccgaaggtccactagtgctccgaagtcatcagttaggagtgaatatcattttgttagcttgtaaatcatcatatatgcatattttattatcatttgcattccatatgtattccatgacaatcaagtatgatgttttaacgccttccttgttgaggtttaccaaaaatgtcagagatcttgaaactatcactcgtgcacttttgagtt

SEQ ID NO: 178186 - DNA, 367 bp, Glycine max
tgtccatctaagactcaaactctttcccatggatactctatcatcctctggttcaaccctcaatgttcccccactcccatcatcaaccttcacaaatcgcgatttctatcgattcaaagcatcccccacccgttcccaacaacaacaacaacatcatgttttctccacttccacacccaattttctccccaaaaccaaaactttctcccacaaatcttccccttctcttccattctccccctcacccctcaaacccaaaccgtcttctccaactttccatccaaatcccgctactgggtatgcggcagcgctggtggacgtcgcccacaacagcaattcccttcacttttgtcacagcgatgttcag

SEQ ID NO: 178187 - DNA, 404 bp, Glycine max
agcttctcggctcatgctgggaacgcctctatctcaacacccgtgcagcctaaggcacccacccagagggaagctccccaagttccaactccgaacgcgactcgaccagccggtaattccaacacgacaaggaacggccctccgaggccgttgccggaattcaccccgctcccaatgacgtacgaagatcttctaccatccctcatcgccaatcatttggccgtggtaactcccggaagggtcttcgaaccccctttcccgaggtggtatgaccctaatgcaacttgcaagtaccatgggggcgccccggggcattccatcgaaaaatgcttggcccttaaatacaaggtccaacatctaatggatgccggatggctgactttccaagaggatcggcccaatgt

SEQ ID NO: 178188 - DNA, 444 bp, Glycine max
  unsure (1)..(444): unsure at all n locations
tctggtgggacatcttgacttgctttccaatctgacatttaccacagattctgccttcttctattttcagattgggaatgcctctaacagcaccttggtcaatgattttcttcatgcctcttaagtgcagatgtccaaatctttgatgccatattttgacttcatcttctttggaggatagacatgtggaggagtaactggtttcttgaggtgtccataggtaacagttgtcctttgatctgctgcccttcattagaacttcactcttctcatttgtcaccaagcattctgactttgtgaagtttacattgaatccttcatcacacaactgactgatgctgatcanggttgcagtcagtcccttcaccagcagtacttttgtcagactaggaagtccatcatggactagctntccccattcaattgatctttcttagagccatc

SEQ ID NO: 178189 - DNA, 405 bp, Glycine max
  unsure (1)..(405): unsure at all n locations
agcttgtaatggtagcttagaattctgtttacacatccctttttgaagtggattgggaattagatctttaaagcttattcacagatgtgttttttctgaaattcagttaggatgctattactacaaattcccagcttgctacaatgattcaagatagattttaaaaggaggttttcccatttcttactacattntcttttctatttaccctaggatcaaggattgtcttcatattattcaataaaactcttcatggtagtcaaggatgggagataatataaatttatgggtggacaaatgtttatcagatttcaatgtgaatcttcacaatattccatatcatttacatagcttgttgaaagctaaggtaacatattttatctcaggtaattcttcgtctcttct

SEQ ID NO: 178190 - DNA, 498 bp, Glycine max
  unsure (1)..(498): unsure at all n locations
ggaccttaaaactaagctttaaataggctagtgggtcaagccaggcttttatgtaagccgagccgagccttaaaaaaaagcctatgacaggtaatgagccaagctcaagccttacgtattcaactcaagccgagctcaagcctagtaaagcttggcttggcttggctcatttccacccttgtgctacattcaccttctatgtactttgccaaggtatttcttgttcccaagttgtcatctcctaaaatctatattctgttataaagcttctagagagtgaaaaactatacatgtacctttntcttcatttaaatggactttatgatttctcatttgaatatattcttcaacaccctaattaaagcttgtgtacctgaagaaattatagagattagggaaaagctagaacaaaggactgaataatttaatatatattgaaagtgctgtctagccatttcaattagaggtgttataaaaaacctatatttactggctatg

SEQ ID NO: 178191 - DNA, 402 bp, Glycine max
agcttctcctaatcggcgactcttccgtttgataatcctgcttgcttctcagattcgctgtgagttatcactttatttgcttctcctaatctctccttttgttcacttcctttgtttctttgtttcgtttcaggatgactcctaggtcgacagctacgtaagtactattggagttgatttcgtaattatcactcttcttctcttttgttatttctatttatggcccaacactcatttttattttactttcagaaaatcagaaccatgggcttggaagggaaaaccgtcaagctgcagattgtaagtattctcaggtagtggcgttgtcaacgatcatatagcagtgttaggactttccaaatgttatccctcccatgatttgatgtattattatattcaatc

SEQ ID NO: 178192 - DNA, 365 bp, Glycine max
  unsure (1)..(365): unsure at all n locations
tgtcaagaagaatctaacaaggctgcttcaaatgataagtatttgcttcaagaataattcaagattgcttcaacaaacaaagccttgtttcaagattcactaaagaccaagccttgccttaaaacaaagtgctttcaagacatgcaaggctctggtaatcgattaccaggaagtgtaatcgattaccagaagacagggttgagacatagctgtcgaaaaatgtcttgaatntcgaatttcaacatgtaatcgattaccatatgtctgtaatcgcataccagcaatggaactttggaaattcaaatccaaaagtcataacctttcaaattataactgtgaaattgattacacaaacattgctatcg

SEQ ID NO: 178193 - DNA, 392 bp, Glycine max
  unsure (1)..(392): unsure at all n locations
ntcataagtgaaatcaggtgtagccatctgcctaagattcctctcacgaggtggaggctgtgccatgttctcagtataaaaattagtagtggaatgctcaaaatcagaatattcagaatcaccctcaacagaatgcttataatgctcaaagtgcacagaatgaccaggatgcacactatgcctaactaatctatgaaagggtctatctatttcaagatcaaagggtcttaaatcacctggattgtccctagtcatgcactatatgcagcaaataatctgtttcttagcaagcacctaacaagggggtaaaactacaactatactcaaacgatatcaaaataggctgaaattttgtgaggaacaccctaaaatcatgaaaagatagcacaaaa

SEQ ID NO: 178194 - DNA, 338 bp, Glycine max
cgggcaggccaaatgccgaatgaaattaaaaaaaaataacacatatataataggtctggttgaatctatacttgcttatttaattattatttaaaactatctcgcaaagcaaaatataaccaaaaacttgtttgacattatttattattattactcaatgaaacttcacacaaaacatgtattataaagaattcagcgacattgttaataaatttggacattggtcaacatgctaaaataactataagtttgtgctgaaaatgtaatcatatccttttcacgtgttcttataattgtaaaaatggactaatgcatcaacatgggcttaccgaggatcc

SEQ ID NO: 178195 - DNA, 197 bp, Glycine max
gacaccccacaccaaccagcgggacgaagctgcgaaataacgacaaagaaaacgccccgggcgtgaaaaaaaccgccgccatactcgagacaaacactaaagccttagagccgcccggcctactatgcgaactaaaccagaagaaggacacgaccccaaacaattaaccgaaaaaataacactctgaaagaaccaca

SEQ ID NO: 178196 - DNA, 451 bp, Glycine max
  unsure (1)..(451): unsure at all n locations
tgcanagagcataccaaatgaagtgattgtttgtggattcgtttcaaggcatgggtccatcgccgtataacctcagctacatcaacagtttggtgggctcttccagttctgtcatccaatcttgtcaatgtctcattgctgaaatgtgatccatcattctcttctttgttatccattgcaggcaaatccccacactgagcagataatacatctgaataacgagcttgtgaactctggtccattgctgcaagcaaagatgatccagagattcgatacctgaaattttgtatcaaaaagttagctggtaaatttggtctacatgcatcggacaggcaaggcaagctacatcactacattacctatgttctcgatgagctatcaagtcctcaataggaccagatgcaagaacttcatgttgacctgtattaaacactcaatatcatcataagct

SEQ ID NO: 178197 - DNA, 396 bp, Glycine max
agcttgtcttctctaccactagacatccattttctgatgggcaaacagaggaggggaatgaggctttatccactcttttaacggctcttctgtaaggcaacctttagtcttgggatgactatcttcctcatgtgcaatattcctactataggggggatcatacaaccaccaagcaatccccttttgagggtgtctatgtgttcaatcccttaacacccttagacctcattcccctcccacatgacacttcttttatacataaagaaggggaatctatgtcagagtttgtaaagaaattgcatgagagggtttataccctaattgagaaccctacacttgtgtgttcaactaggggcaatagacgaagatacgagctctttcttaatgagggggact

SEQ ID NO: 178198 - DNA, 405 bp, Glycine max
  unsure (1)..(405): unsure at all n locations
agcttcttatctaagacactctcttggtggtgtattttctcattccatgatttattttctagttgatgattcctcctctcacctcttttcctttattttccactgcaactccatggctgaaaatcaccattgaaggatcttattgaagctcaaagatccaaactccagaggaacttctcaagcaagcttccatcaatctacacaatttacactaagctactacacacaaataaaggtttgggtggtctcttggagactcccaatccacccctaagaatgtctaaacataagaattgcaataaaaaaaattcagcactcaattgttttattacaagaaaattacaaagcaattaaggtcttcaaatttgtcttcagcgcttgtttgttntcttaagtgtttaactc

SEQ ID NO: 178199 - DNA, 337 bp, Glycine max
ttaatcactgccaaaacaaaatctagccaatccgtcatgttgtaacctcagttaaaccaaaaaagggacaataataattcaataatcaaaatatcttgaagaataataataaaataatcaaaatatctttgaataaaataataaaaaaaatcaattgaacgtttttctttggaagtttccttagatcaattgactaataaccaaagtgaaactaaggctaaaatcaactctttgctttaaaccggcctctttgctcttatcgggtaacatggaccattcaaaagcataaaatcaacatgtaaacttaccgctcttttgcagaactacctacggctga

SEQ ID NO: 178200 - DNA, 385 bp, Glycine max
agcttcactcctcccggataattggatatgtttattgtatgaagttctggagcaataaatggttgtctgaaataatagcagatgccttaaatttgcccgctgaggtcagattctctctcaaagccactgtcagtgatttttaaatagatagagcttggcacattccggcttttatcatggatcatgttcctgctggtttagcagccgaaattgttttactagacttcccaacttgtcccaggcctgatgagataatctagcagcattaatattaattcggactcaagttgtctctctttcaagcttgcttttaatttcctacgtcggtgtctccctaatgcttcttagggttccaagaattgaagtgctgccatgcattccccct

SEQ ID NO: 178201 - DNA, 403 bp, Glycine max
agcttccatcagtatcgtcttatatggacttatcatctaaaacacagacgcacaaatacagatcataatctgataatacatatatagatacaacttttatcatttgtatttgtttgcatctaatacaaataattaggagtcattatttctctttaagacataaatgtattttgagttaacatttaccattttttataagaaaaaaatttaaaaattatcatccaaaattttaagataataagttattaaaataaattttaaaaatattaaatatattattttatgtcatttgaacaaaacacttcaagaactaaagcaaaattataaatatgataaaatgtttctaaaataaactaacaaaaaccaaaataaagaattttataagaactatttaaaataataa

SEQ ID NO: 178202 - DNA, 463 bp, Glycine max
  unsure (1)..(463): unsure at all n locations
tgtaagaaaccctgcccncagattatatgtgctcactctctctaatgcaatnagacatgcaaaaagtagagcccatattcctcaacatcaaattatttataagagatatggaacccctaaagagaaacctgcataatttgattgactctatccatattgttacattcactatatataattctaaattcactttgtaaaatcaactgacaatatgaccttaaaatatgaatctttgtaacaatattttttttacccgaggacgaatcagttctccaatatattcaatcacaaaatcctctgcctcaattggctccaaggcaagaagaccccaatcatggatcttgctcctttgaacacgcaaatgcttcttccgtgcctganaaatgcaaaataaataagtgaagtctgatgcatncatatgctctaaataaaaatgaccaaaaatacttccttcaatcacctt

SEQ ID NO: 178203 - DNA, 400 bp, Glycine max
agcttgtattcttcaatacacttatttacttctctcagtgctgcaagctcttgtgcattggcatcattctgcaaataaattataatgcaaatatgaaaatacaagcaatgcataacaagtgaaatccatgatgacgacaattactcaattggaattgggaacaagcaacaaagcatacctttgcactagtgatgtcacgcacatttccagtcttaacttgtgaatttctccttcgattcttgaggtatgccttcagaaggggcactggggggaagctttcttggagctggaaggcatgaataaaatgtacagctgctatttgtttcccagtattgattaatgattctacaacagctgcataaatagtgtagactagaataatcaacatcagataatcaaa

SEQ ID NO: 178204 - DNA, 342 bp, Glycine max
tgaagacaagactatacgagggatcttccttgggtatatttatatctctaagggctactgtgtctacaacttgcaaactaagaaacttttcatcagtcgagatgttgaagttgataaatgcgcttcttggaattgggatgaagaaaaattggagaagaacattcttatacccgctcaactacctcaagaagaagctgaggaagaagacccaggtgaaccaccttcacctccaccacaacaacaagatcaaggactatcatcaccagagtctactccaagacgagtaagatctttggtggacatatatgaaacctgtaacttggccatacttgaatctggaag

SEQ ID NO: 178205 - DNA, 348 bp, Glycine max
gggcagccgacacaccaccaagacagcaggagaacctttttagatacacgccgcacatgcgggcacgaaacgcggcagagctgcaaacgagatggtgtgggaggcgatacacaaaacagtgcggaataaagaacgcgctcaggcacacaaccaaaacggaggtaagcgaaaaatgcggacaaggaatgccgatacaacaatcgcacaggaagcataaccacgagggcaacgaaacccgctaacaaatacgcggacacaggcgacatggggaagaatacaaggggaatcatctacaaaacccacgggaaagaaggacaggcaccttgatcaaggacctactgagcacaa

SEQ ID NO: 178206 - DNA, 478 bp, Glycine max
tgaccaatcccgacccaacccgggcatagtcagtcagtgagaacctgtgacgtacctaaacaggcgagctcttggcagtcaacaaataaaaggaacaaagaccacaaagcaaggaggcttgtgtggtggctggccaactgtgaatcttgtgtgatatatggattgtggcctctggtaatcgattaccaagggtgggtaatcgattacaaggcttaaaaatgaatacaggagactaagatggtctctggtaatcgattaccaaggggtgtaatcgattaccaggcttgaaaacgaggtcaggaagctaggggagcttctggtaatcgattaccaagggatgtaatcgattaccaggcttcaaaagggaactggaagactgtggaggcctctggtaatccactaccactctgtgtaatcgattacacagacgaatgggtcactggtaatcgattaccaggtatgtgtaatcgattacaca

SEQ ID NO: 178207 - DNA, 414 bp, Glycine max
agctatactgcccttcattgagaatcaatatctaacattcccatcatgtgttcactctgacatttgctacgccttgatacttcatggcaagatcaagactctgacaggaaaaatacttgactattgccacttttttgcacagcgctttctaattctagcaaggaattcttttggactagttatatcatatgaaacagggcccctaataacctcatgaatgccacgcgtcatgatcatacaactcctgcaattggcgtgatcccactgctcatgaagtcttctctattcagaggtccttgaatccgtaggagacagtgatctctcaatccctaatgcgaggtgtagatccatgcagaccagaccaatttttacttcgtctttgttgagtgtcagagcatacctggcatctgtgac

SEQ ID NO: 178208 - DNA, 446 bp, Glycine max
ttttcaatatgctaaccccgcatgacatgtattatctatacagtcctgcaattgcataatgtaggctgggggaccattttatgaagttgaactgggaagacgtgacgggagaatatctactattgccagtgttcaacgccagcttcctcaccctgatttcaatttagataagctcaattccatgtttagcttccatggcctcacccagacagatatgattgccttatcaggtaacttcactaacacaaagtgacaagattttgttggttcattaatcaaacaaaatgattgaactatgaatttagttatgccatgtgtcattattgagccgacgtgtcatgtgttagattggcgtcctctatattgattcccacgttaagcatcaatgttggataacccgaaacaagtgtcatccaataataaattatcatatatgataacgtttt

SEQ ID NO: 178209 - DNA, 348 bp, Glycine max
  unsure (1)..(348): unsure at all n locations
ttaccagagggacactactcttaaacaaagatgcgtcagcctccttccataaatacaaagattaatgtaaatatagagcaagcttattcgcacactttcttacgaaccgactcttgcacaagacatgctattaactaataaaaaagcacccatatacaatcaaggaagctncattacctagattatgtgcttgctaggtgtgatctggtattacatcacacacacctccttggctgagtttacatgcatgcatactcgaagcattttggggtatctaagactgcacatgccctcaccttggcattctaataccccacatatagatctttacgatgaatcttgactacc

SEQ ID NO: 178210 - DNA, 376 bp, Glycine max
  unsure (1)..(376): unsure at all n locations
actcaagcttgcatcnggaattgcgacagcacgcctccatcatgtggatttgctccttgtcttctcnaacaaaccaaacaaacgcaacaagacaattatagttgttggttgaatacctcacccactcaagtgtatcacacaattatggcttttctctaatgaaacactctttccttataccactctaattccccttgagttcttacgcaattcaagagatgatggccacaacaaagaacaattcaccaatatgtgtaacgcaacgctagagagacactgaaaaggttaaccaanaacaacgctaacacatgttttaggcacaaatgaatgaaataaaactcatgaattacgaattcatgtcacaatcctcatgcaa

SEQ ID NO: 178211 - DNA, 409 bp, Glycine max
  unsure (1)..(409): unsure at all n locations
agctttcaacagatgccttcgagatatcatcactcagcgaaaactctcaaaaccacccatcttattttccaaaaccccatacccacgatatttaagagagaaagaagtccacccaaacctgaaatttcgaagtcccactcgtagccacgcactttacgactccaaaaatgctctcctttcacgatatggggcagaaatggtggccaaaggttgaagctttgcttgaagcttccatggagaatgaagaagaagaaagctacgtgagagagggagagaaaaggcttctgaatttctgctttggctgagtgaggagagagaaaagctttttggttttaaataaaaagggttntcccctttttttttccattattttattcaagctctgccacatgtccctatttgattggag

SEQ ID NO: 178212 - DNA, 380 bp, Glycine max
  unsure (1)..(380): unsure at all n locations
cctgaaattgagagaagatgattattaaatactcaaaatggaagtactaagtatttattatctatatttaatagaaaatacttataacattacaaaataaccataaatnggaagagtttgatacaatttacacaagttttatacacaaaagttcgtcgtattcaccgactaacatagcacaagacatatccgtggagggtttcgagggtatagtcaataacatcacgaccaacaattacctcactttcgctgacaaagagatactcgtcgagggcaggggacacaatgcacgtgtctgtcaaatgtttggacaacatangggccaaagtgctcatcgacaatggctcttccctcaatgtcatgcccaaagcttctttgga

SEQ ID NO: 178213 - DNA, 409 bp, Glycine max
  unsure (1)..(409): unsure at all n locations
agtcttcnctcacaaataaaagaagatatccattttttatttatncngccattaattaatagctaacaaacttaatattttatgaatttctttaaagcggggataaaatttctctattaaaaaataaatagactaaaattgtgaattaaaataaaaagggttttagccttcatttttatatatcccaccttgaaaaatatttgtgcttcaactttttgtatggaacacaaatatccttcataaaaaaacaatttggttgagttgaattaaattatttttttattagtgagatgaattaaattattcttttattactaacttgaattaaattataataaacggaaaaaaattatctgtgaatattaacataacatagttgcgtatcagaaattcaaattgcatatcattt

SEQ ID NO: 178214 - DNA, 313 bp, Glycine max
gccacattggacgccatggaagtattggatgtgaatgctacttgcacactgaccgggatgaaaggattagtataacaagtttctttgcatatgacgaatgcgctctgcttcatcctatatctccatttgaatttatggcagaccatgtatttttatggtatgatgcacaactctacaagccgctgatggaagtaattaaagagaggtaaatcctttatgacaagagcctcttttatgatccacagcttacaatctaatttctttgttaaacccacattaacgaggaagcctcgatcacaaaacagtgtgcgtt

SEQ ID NO: 178215 - DNA, 373 bp, Glycine max
ctttcgaggcatatgaagttcaactcatttctttttttttttctcctttatgcaatgcctcttaaatgtactatgattgtcaagaaatggagtttttttttgtgattggtccaagtgattttgtctgcagatctttgcacaagctggctttccatgtcctgctttgaggaacccttctgatcacttcctcaggtgcatcaattctgacgttgacaaagtcaaggccactcttaaagggtccatgacactcaggggattcacctttttctgctttattatgactctcacattttggttgtcatttatacagcactatatatacaggcattaattactaacccttttctcacttataatataccttttattttta

SEQ ID NO: 178216 - DNA, 402 bp, Glycine max
  unsure (1)..(402): unsure at all n locations
agctncacctaaatgataatctgtgggagtatgagcataaacacgccacccttttcttctcaacagaccaggaagaattccatctggggcaacggattttgctttgaaatcattattcaccctcttgatgatttcaacctgctgataatcgtcagagggatccaaaggtcttggtttaacatcttggacaaagctacaacataaaaacgtctccatgtcctcttcttttgaacttgtgctagcttgactgaaatcaattcaagtttcaaaaatattaatgtttggactaaagtagtaattatattgcatgttttgataaacctcaataaacatttacagggaagaaaagtacaaaggtattgggcttcttaagcaaaaatcaattcatgtatgtaccttaaa

SEQ ID NO: 178217 - DNA, 420 bp, Glycine max
ccttgaactcactttaaagaaaaacttttcttgaaataacttaatcgaaaggcataggaatactcttatttctaaaataatcacttcttttttttgaaaaagagtaaataatatatactctaataatgtaaagatatattttttctagctactatcagttataaactcacatgtatagtaacttttatactaaataaataccttaaatatcatacatactataatttcttatttgcagtgtaaagttatactgagagtaggtagatattaaactcagaataatttaatcaataagtaattaattaattatatattaaaagaattttaactcaattgatggagtaaaatgtgtaaatattataaattcttaatattatctttaattcttaaatataaaaataaactaattaatcatgtatt

SEQ ID NO: 178218 - DNA, 402 bp, Glycine max
agctaaacccataattgtattgctttttttagaatcccacctatatctgaatggttgatattcatatagcaaatttgttgccttattgaacttatctgcaatatttgcccaatcaagctaagtgaagtggctataaggtatattcttagcattcacctcttctaatgcacactttcaacataacttctgtgtttttatcacaccattctgctttttttcttttcacaggaacttgaatgacagacatctcacaagcttaatgaaacaaacaaaagtataaccctaatccataactattcaaaatttaatgagaagaaaaagaaattaatgaagaattggcttacccgtgatgctaacaaaggaagaacaagagatgactaatgatgatttaaagagatgatg

SEQ ID NO: 178219 - DNA, 420 bp, Glycine max
  unsure (1)..(420): unsure at all n locations
ttgatgcttgagttattataacaatctccttgggggtcattaatgcatataccctgatgtgggctactctcttattattatgtaatttcttaaaggattttttgtgtgttggaacatgtgatctttttatgcataccaatattctctttccatgggttcattttttttcattcttttcctagtgttgatgttaggctaatcaatgcttctactaaaggttaaagcaatgtggtcattgggttcatttacttatgttaactttcaattatctggaaaatggtgttgccacaccttctcgagtgaaggaacccagattgatgaagtaatatcatggcttgtggatttattacgcagaactctcgacctctttctcattctttgtattcttctaacctgccaaatgacntattgatgtactct

SEQ ID NO: 178220 - DNA, 401 bp, Glycine max
agctttgagccataatcctgactcaccatttaccttgacccagggtgaaaatgccaatccttaccctcggaagtaaaaaaagaagagacggaaaattatgaggaagcacaaaaaggagagaaggaaaatttccaatcaaagaggaagcaaaaaaaggagagaaggaaaatttccaatcaaagagaaagcaaaaagaaaagaaaaaaaaattcccaatcaaagaatgggagaaagaaaaaaagagaagtaaaaagaagaaagctcctggtcaaagaaaccacaaaaaatgtgccgagaggtccttggaccacacgatatctgaacaatacagaattgtcaccaaatgaacaaaaagaaggaaaggaaaccatgacctacaagtggtcttcttcctttgatta

SEQ ID NO: 178221 - DNA, 477 bp, Glycine max
  unsure (1)..(477): unsure at all n locations
nttggaaggatcaagaagtgccttatgaatcctttcgtgcttatgccaccagtacctggaaggcctctcattttgtacatgacaatcttggacgagtcaatggggtgtatgctggggcaacatgaagaatccgggaagaaagagcgcgttgtttactacctaagtaagaagttcacgacctgtgaaatgaattactccttgctcgaaagaacatgttgtgctttagtatgggcatcccatcgcctaaggcagtacatgctgagccatactacctggttgatatccaagatggacccggttaagtacatctttgaaaagccagctctcacgggacgaatcgcccggtggcaaatcctgctatccgagtttgatatagtctacgtcaccccaaaggccgataaaggaagcgccttagcagaatatttggctcaacagcctcttaacgactatcagcccatgcatttcctgattcccgat

SEQ ID NO: 178222 - DNA, 393 bp, Glycine max
  unsure (1)..(393): unsure at all n locations
agctnatgacagagcctacgtttcgtagttcattaaaccttcgttggtgtgtggtcggtagaaaaataatgattctcttaataaatggataccaaactcgtcgtctttgctaattagctttagaagagtccagagaaaattcagcataatgtgtgtatgtgatagcatagatatttaagatgagcacaatgttgccggtgtcgacggtactgcatctgtttccttctgccctgacccgtcaaggaaacatatatacatacatgccttgtattacacgcttcgaatgtagtagtattctgtttaattataattatattgctataattattttaaagaatcatatttgtaatgattcttttatcatctaaaagtgtaaaattccttacacaaaca

SEQ ID NO: 178223 - DNA, 382 bp, Glycine max
  unsure (1)..(382): unsure at all n locations
tacattacatagggtaatagcataaagttaagaaaatatataaaaaaagtttatttttaacaatgcgtttgatatgtgtaaaaagggtgacaaagacttgcaccaacaaaatgagtcattattataaaagttaagcacttattgatagtcgatagtaattgtatagttaagctagatgttaagtgctcttgttctttttttaattctgtaaatcaatctcaccttgaaaactgaacgcttatgctctctttctatgtgatttgatcaatttcaaaanaaaataattgtctccatgagttcacgacacttcattttgtctataagttgtcacacatgggtagtaggactgcgcaaaatagggaaacctacccataagctactt

SEQ ID NO: 178224 - DNA, 352 bp, Glycine max
aagaatcaaagagtcacttaatcaagaatcaagattcaagtaaagattcaagatatgcaagaacttctagaaaagcatcaagaaaaattggttcaaaagaattttttaaagaaaaatctttttaccagagtttttactctctggtaatcgattaccatgaggcagttatcgattaccagaagcccatacagttttataactatattacaaagtagtaatcgaataccatgtgcatgtaatcgattaccaatgtttttgaacgttggacttcatatttcaagagtcacaacctatgagtaaacatttcaaacttgtgtaatcgatacacaacatttgtaaccgataccagtgt

SEQ ID NO: 178225 - DNA, 434 bp, Glycine max
acgtgacctataaaactcagcttgaatgaggaagtgtggaagggtgagacttccttcttttattgttgaccacagagtggtacctggagatatgtcgcgggggtcaggagaccttggggacgtcaggtggggtgctattgcccaaaaccaagcttgaccaatcccgacccaacccgggcatagtcagtcagtgagaacctgtgatgtacctaagcaggcgagctcctggcagtcaacagataaaaggaacaaagaccacaaagcaaggaggcttgtgtggtggctggccagctgtgaaacttgattgatatatgggatgtggcctctggtaatcgattaccaagggtggtaatcaattacaaggtttaaaaatgaagacaggaggctaagatggtctctggtaatcgattaccaagggagtgtaatcgattacc

SEQ ID NO: 178226 - DNA, 414 bp, Glycine max
  unsure (1)..(414): unsure at all n locations
agcttgcttctacataacaaaacataaaaaccctaataatctaaagctacagntaaagtcttctaccctaaagttaagacaagaaaaagagaaaaaggatcaaggaacttacttggacggtgtatgattgatgcttcaaagtcgaaaatgcacaaagagagtacaaatgcaaaatgtgcaaatttttggagaaagagaatgcagaggcgaggtttctgtaatctggcaaatgtgagtgtaactactgttacactcacttaagcaatttcaatactttttcttagcggactgttgcgctaagcgagcaagagaaacgtttggtttctaaatcaggattgcttagtgaacgtgcgcttagtcgacgtttcaaattcgaaaacgaaatttttttttaatagaaacttggcttagcgt

SEQ ID NO: 178227 - DNA, 426 bp, Glycine max
atttagtggttgatggcgaaaggattgaagtgggtcttacaagaggaaaatttgattatcctacttcgatgaacaggaagcctcgggcaaatggagagaataagtagggagaaacccatgttgtggctgttgtccctacatggccaaatttcccgctagctcaacaatatcaatactcacccaatattagtccttctcattacccaccaccctatcagccaagaacatccaatcatccatagaggccacccctaaaccagccacaaaacccgcttgttgcacatgcgaggccaaacaacacccttaatacgaaccataacaccaaccaaggagatgagctgtacgggtttgctaagcgcaccgcttcatctctctatgcaagaaagggcgcgctagccaaaaatcactaacgtgcactaagcgcac

SEQ ID NO: 178228 - DNA, 411 bp, Glycine max
agcttgtgagatatggattgacaacatgatgtatcatgagtaaccaaaaaacacaaacatgatgtagcaggacaagacagggaacaaaattttaaggccaaatacaacactcagctaatttccagtgtttggtctcctctttgtgatcaatgaagaaactccagaagccatcaaggttgtccatgcctgtggatgctttccctggtttcttcaccacaataatgggagtcaagtcttttgtctctttttctttccacattggactctgtggcactagatcatggtgacagcatattatcaaggcttctagtaatagcaagattgaagccattattagtagactagagatgggacatttgattggaaggctttgctaggaatagatgagaaatatcatatatatatataaag

SEQ ID NO: 178229 - DNA, 367 bp, Glycine max
  unsure (1)..(367): unsure at all n locations
ctatattttatcttatcatatcacatttgaccacaaaacgagctttaattgaccaacaaagggtcttaacaattccttgtacagaatttaccaacataaacttatatcatgattctcatatgagattaaatccaaaagttactcgattaagtaaggcattgtatggcttgaatacaaagtcaaatcgattagagtcaggacatatagtgctcggatatagtgttaaatggtcaagagctctcacaatttcttgaatggatgtggataaagaagatcacagctttttgctacttagaatactgcgaccttgacaggtaagttcatgaatgtggcagatccataatttanaggacgagtaacattatgt

SEQ ID NO: 178230 - DNA, 394 bp, Glycine max
agcttagccacatctccatgaccttgttctcaaatctaaaagtttataataagtacgttttacattatggcagatacgagttggtctctcaccctagtctcctttataagttaaaattaacttattcaactcaacatttagagaacttggatgaaagtgcttctataaaagttagatacagttaaaaaaaaaaaaaactcaaatcattttaccttcttattatttttctcttctaaatacttgtgaagaagtttttattatttttgtacagaacttatgaaaaactttattcaagcaatgtcttaggcataaaaataaataaaaagaatattttaaaaattgtaaaatatagtgattgtcgatatatattgtctttgaaaacaaccttgtgttt

SEQ ID NO: 178231 - DNA, 404 bp, Glycine max
  unsure (1)..(404): unsure at all n locations
agcttcaacaccattaagggtaaagactcnttccgtgtgtcttggatgtctagtttggtcatttgagcctccaccattttgctctttcttgggtcgagaacaatctcttcgagtgtgtccctcttgtccacaattaaaacatgttatgcctatatcgggacaattggaggagatgtgccctggtttaccacatctgtaacaaatgatatgagtggagaaagtatagggtttgctaccgttaccacctgcaaatcccctagcaacaatcctttaattgtcatggcggttaccatgttgcttaggaggagttgaatatggttttactcgatgttgaggaccattctttttggtcctcattggacctgtactcctataataggccgccctatcttgggagtcttcat

SEQ ID NO: 178232 - DNA, 362 bp, Glycine max
tgaatgctctattcaatggagatgacaagaatatcttcttactgagcaacacatgtacaggggccaaagatgcatgggagatcctgaaaatcactcatgaaggaacctccaaagtgaagatgtccaggttgcaactattggctacaaaattcgaaaatctgaagatgaaggaggaagagtgtattcatgacttccacatgaacattcttgacattgccaatgcttgcactgccttgggagaaagaatgacagatgaaaagctggtgagaaagatcctcagatccttgcctaagagaattgacatgacagtcactgcaatagaggaggcccaagacattgtgcacatgagagcggatgaactc

SEQ ID NO: 178233 - DNA, 412 bp, Glycine max
  unsure (1)..(412): unsure at all n locations
agctngaggagacgctgaatcagttcatgtatatatccatgtccaaatataggagcacagatgttggatcgcgtggcctgaaaataattaagaaaggggttgaattaattattcctaaacctttacaaattaaaaattactcttctaaggcttttactaagtttttaagagaataaggattagaagagaaacttaacagaaagtaaaagtgaaaattaaaatgcacagcggaaagtaaaagagtagggaagaaggaaacaaacacacaagagtttttatactggttcggcaacaacccgtgcctacatccagtccccaagcgacctgcggtccttgagatttctttcaaccttgtaaaaatccttttacaagcaaagatccacaagggatttaccctcccttgttctctttg

SEQ ID NO: 178234 - DNA, 441 bp, Glycine max
  unsure (1)..(441): unsure at all n locations
tggatttacagcattgttggatattattattgcgttaagtttgctattgaacatgtaatgaattatttatattttaattttatattctaatatttgaattaacatgtatttatttaattggtgttcattttaacatttagaaaagattatgtgtgcattattatgccaattaaaaagtaatccactgataaaaatattagtaattaaaaatagtaataaattatgactaattttntttacaataatatcgataaccattgttgttataaactctaaattgtgacgattaaattatcacaattgtcttgaatatttgtgattacatgattttgtcactattatatagaaatatgagtgacaacatctccatcacaatatatatttttatgacatctaaaaatatcatcactaatacaacagtgacttgcatattagtgatga

SEQ ID NO: 178235 - DNA, 410 bp, Glycine max
agcttcattaagaggctgcctccaattgctttctcgtggcttctttgagaagctttctcaagaggcttctttgagaagctagatccttatctatccacacccctcttttaactaaattaacctcgttaaaaataattacggatgaaaataacgcaacaaataatcaaacatcaaacataattactaataatatatagatctatgtatcagggtgttacacgaaccgctggccaaaccctgacagatatcatgtctagccattctacaagccttgagcaaaaaatatcaacttaccataaaccttgacccagtgtgagaatgtcaatccttgccctcggaagaaaaaaaaagaagagaaaattcccaatcaaagaatgggggaaagctaaaaagaaagaaaattcccgatc

SEQ ID NO: 178236 - DNA, 414 bp, Glycine max
  unsure (1)..(414): unsure at all n locations
cgacccacctcatcgctatgatatcaccactctatacagcaagannaattcaattttaaatgacaagtctgttaatttgcttatgaaaaatgaaagtaattttttctcgatatacattcaccaaacaatgcgccattacataagtgaatacatatgtatatataggaatagtaactcagtacacatcattcacataatggaaagtaaattagttcatacatataattaaatttgtgatttacatctttaattcaacaaaagaattatggaaccagctatggaggagttgatntacaaaacacaactctctcccataataaccccaacgtcatcacgtcagcttcacaaaagaaacttacttctcatactctactactggtattctgctccatgaacaacggtcctgatcatcat

SEQ ID NO: 178237 - DNA, 400 bp, Glycine max
  unsure (1)..(400): unsure at all n locations
agcntttattgtgcgaaatagggttcatatatttttacaattccatagcacggacaccatagtgctaatctcgagatagatgctttggaggaagcaaaaggagtatctctgcatagaagcctacggttcttcaataaagagagattaccgagttgtataatgattgtgaggcactgttaataggaggagggatgtccttctcttgtgtaaggaacaataattttgtactctcaatctcatttgagctaaggttttactgtaatggctggctaaacacccttgctggggatttctaaagaacaactgatgtaattactttaatctctaatcaatcgagctttatgggttcaatgcttcattcaatgcttaattactgcatgctcttggtctggtcacccat

SEQ ID NO: 178238 - DNA, 440 bp, Glycine max
  unsure (1)..(440): unsure at all n locations
ctggattcgtgagaaatccagctagtgcgtttccaattgtcttggcgctttacacaaggtcattactatgtagagaaagtgtggggaccataaacatcttctgtggtgtatctttagagaagtacaacttgcccatgtcgtcttgtgctcagaatttactttcaacatacaaatcaaatatagtgttaatagcataagacaaaaagaattaagaatgtcaagacaaaacaacttaaaaacctccattntatgtgttatggcaggaattgcttactgaacctatggatgttactttttgatgattctttcactacttgaggatcgagtaattggtccattaccttttgttagtggtgaatatgactaacttttgtgtataaaactcgtgtaaatggatcaactcctccattcatggtattttgtgtgtggcatacttttgt

SEQ ID NO: 178239 - DNA, 405 bp, Glycine max
agcttgtaggattatggggttcctatcacatgtggtactagggggcggtcgggcgatggtgcacaacaagttttccacatccacaaagcgcgcataaacccaccatcccatgttgcccacctccatctgagctcacgtactcccacgtagcccatatcctcgtttctctcaacatcgggtccccatcaatcctcccaagcttccacaacatccaagcaaaacaaaattcaaacagcacaagctgtagccaagcaaaatagggcaaaggcagaaaactctgcccaaaacaccaaccaaatcacagcttttctcacttaaagaccccagtaacaattccttcgttccggtttattaaccgttggatcgactcgaaaattttactggaagtctctagtgcaaaagcct

SEQ ID NO: 178240 - DNA, 254 bp, Glycine max
catggctgtaatagccggatcttttaccaaaagagaaccatataacactgtctaagtctggtctaaaaggtaccactataaaagggatctgagaatggaagactataattcctttgaaggttgacagttgctggagtaacgccatcatgatacacattacaaggcttaagctgagtgagcgctatttccttgacactaattccttaaagaaaaaggcacagcctctgtacagaccattggctcttattttatat

SEQ ID NO: 178241 - DNA, 410 bp, Glycine max
catgcaagctcatgctgcaaatatttacaatatattttctaacctcagcagcaaaatcaaccacagcagagcaattatgacctttccagcaacagatacaaccctggatggaggaatcaccctaacctcagatggtccagccctcagcaacaacaacagcagcctgctccttccttccaaaatgctgctggcccaagcagaccatacattcctccaccaatccaacaacagcaacaaccccagaaacaaccaacagttgaggcccctccacaaccttccctcgaagaacttgtgaggcaaatgactatgcagaacatgcagtttcagcaagagaccagagcctccattcagagcttaaccaatcagatgggacaattagctacccaattgaatcaacaacagtcccagaa

SEQ ID NO: 178242 - DNA, 388 bp, Glycine max
ctcagcttggagaaagctgagcaaacgggtagcacaatgcatcattagaactgcatataaaaggaagaaagcgcttctcgtgatggcgcgttgaacctgcaaaagcaagccgcagcctccaatggcgtttccctgcttcctgtagctgcaacaacctgctgcagcactgtgccctgtcaccttgtcacctgcgtcacctgcaaagctaaaacaccagtcaaactggcatttctggaaaccatgcacaacgcgccagtggaggttgcgcgtcccactccacgtaagcacaaggcgaacccgctgctgctattagcgcgtccctctccacgtggcagctccttcgcggaagcgccagtggtggtggcgccatgcatgacgttcacgtacc

SEQ ID NO: 178243 - DNA, 476 bp, Glycine max
  unsure (1)..(476): unsure at all n locations
actcagcttgtttgctgaactcggngttccactcactaaggaaatcggttttcaccatgtctcctcctattaacactatcctattactagtaattaattgattatcgtcaccatgcttctctaattcgtagtgtcttgtgttaatgtggctaatgtctttcggtgtgcgagtggggtgagtgagttggagctcataaaggacaaaccaactgggtttccttttctgcattggaatagaacagtagaactttccattcttactgttgttggcaattgccagcttttccgtaacttgtcccctggacatgagtgacgaatgaaccgcgtcggtggcttctattaagttcttctttctcctttgtgtaccacactaatttattacccagatcaatgtctagatacacatattactgcgatttaagataattntctacagaacatgtatattatttccaattttgaacatgtttttcaca

SEQ ID NO: 178244 - DNA, 271 bp, Glycine max
acttcagagttctgagaatactgggtggagctaggaccgcctgaaatacccttttaaatgctgatgtatttgcaataagcgcgttacacataccatgcactatacacggagcgagaaattgtcttttgataaaagatcatgaggatatttaccttcatgaatcaagagctcgtcgaggtgaacctcatgtgagagcaaatatatcgacatgtacagtcattgctgggagccttagaggatatattgggtatattgattttagtcttccttg

SEQ ID NO: 178245 - DNA, 436 bp, Glycine max
  unsure (1)..(436): unsure at all n locations
ttataatagttcaaatgtttaattgttcatctaattttagcttatttttgtgtagaaataaatgaaaaaagaagatagattgtgttgggacccaattcaagacccttttaaaggaaattttataggctagaggggtcagacacgtagcatgcactttagactaagtgtaaaactctatctttcataaaaaactaaaaagaattttattttaaaaaataaatagttcttagaaattaaatacatgagagaaaaaagtttttgataattaaaataaaggttgtgtagtattagaaaataaatagagtaaaatgatatttcacaaaataaagggatgttttaattggntatttatntaatgaaagagtaaaataaagttctttttttaaaataatatatatagaataatgtagtaattatatgtcaaagtacaaactat

SEQ ID NO: 178246 - DNA, 413 bp, Glycine max
agctacaacctagaggagacggaccattccacgtgttgtataacatcaacgacgatgcctacaatattgacttgcctagtgagtatcatgtcagcgccactttcaatgagtctggtctatctatctttgatgcacatggaggagccttgtatttgaggactaatccttttcactaacgagggagtgatgaggacatttgataaaatttggtgagagattctctctgggttccttgttgaaccaattatgacacttatcagcggtaatccttgtggcgtctacccagacttatcttgctttattggaagaggcgtatacccggactcatcttactttaccggaagtggcgtccacccagacttttcatccttcactggaagtggcgtctaccctgatctatcttccttcactgg

SEQ ID NO: 178247 - DNA, 286 bp, Glycine max
  unsure (1)..(286): unsure at all n locations
cgcttttatccaacgctcatcttggtggtgaagctccatcttncatggcttattccctagtggatggcgccctccttctcctcttttactttggcttccgctgcatctccatggtgaaaaatcaccattgaaggacctcatttaagctcanagatccagcctccatagaggcttcacaagcaagcttccatcatagacgctcgcaattagacaaccgaagctctcgagatattcaaatggtcataacatttaactccgaggtccgattcancgccataaaatatct

SEQ ID NO: 178248 - DNA, 362 bp, Glycine max
ctctcataactaagcccacctccttgagaaacttccttaagaagattcctaaagaagctagagcttagctacacatacctctctaatagctaagctcacctccttgagatgagaagcaaaagcttagctatagacaccctataatagctaagctcacccccatgacaaagaacatgagaatacaaaaaaaagtccttactacaaagactactcaaaatgccccgaaatacaagggctaaaccctatactactagaatggccaaatacaggcacagacgaaggaaaagcctattctaatatttacaaagataagcgggctcatacttagcccatggactcgaaatataccctaaggctcatga

SEQ ID NO: 178249 - DNA, 393 bp, Glycine max
agctttctcggggccatttcctgctaaagcatacatttggaaagttagttataccaagaaatgctactcttaaaacaaaaatggcctacaacatacaaacatcaatgtaaatgtatagtaaacttatgcacatacttctttacgaatgttcacttgcacaagacattcttataactaaggaaaatgcacccatgtacaattaaggcacatccgttacctatatcatttatatgtacttccaaggtgtatttgctacctacattacatgcacttccttagctaaatatacatacatgcatacttaaagcatttggggtaccaaaaattgcacatgtgcacaatccggtatttctaaatttatgcataaacaaactttgtgatgaatcttggcta

SEQ ID NO: 178250 - DNA, 371 bp, Glycine max
gcatgcgcataatgactgacgaacgctcttttgctcattacactctgaacaccgagagggatgccacctgtatacaatcaaagcacgtacgaggcctagattctatacatgtacctccaacgtgaatattgaactgacatgagacacaggatcttggctaaacatacagacatgcatactctaagcattttgcggtgcctaagactatagatgagcacatattggtgtttctgacgaatatacatacactagctgtataatgaatattgacccttgatactcatgactgctacattttatgctgctctcgagttatagcgaccaaaagacgcatgctactcttgtgtagttcatatgccgcaaacattgat

SEQ ID NO: 178251 - DNA, 398 bp, Glycine max
agcttccaccatgagaggtgtagatataatttgttatggtccctcatgatatgccatctatcttctagatcattatacgatagaaaactctaaaattggaccttgtaatgagtttatttcgcagcaccttaatttttctttttgtcattatattatttaagctgtagaatttagatgttcgtattatggtgctcataagtcttgaatcacctatttgatattgtatagctaagctcacgtgactgtcttgtgatagcttcaaagctactttattgagctatcattctttatctgtttccataatttgggtttacctctttatattttttctcatgctttagtttaatacaaaatcacgaccaaatcacaatctgtgttatatgatacatattaaaatg

SEQ ID NO: 178252 - DNA, 410 bp, Glycine max
  unsure (1)..(410): unsure at all n locations
agctntatatagactccagagcttcaatttgttgagagatcccaactagttgttgccttaacagcttggacgctttacacgtggcatgttacaatgcagagagagagtgtgaggaccacaaacatcttctacaacttatcttcagagaaatacatcttgtcagtgtcgccttgtgctcggagctgacttttaatgtacaattcaaatacaacgttaatagcacaagacaaaaggaataaagaatgtcaagacaagacaattcaaaacttccctcctgtgcaatatggcatgtattgcttactgaaccatgaatattactttctaatgataactctcaattcttgaggattgagtaacagtttcattgcctttggactatgagccaagtgctaaagcacttgccttcttgg

SEQ ID NO: 178253 - DNA, 397 bp, Glycine max
  unsure (1)..(397): unsure at all n locations
aacatacaagcttaagaataattataactaaaaaacacncatctatatatgggtatcgatcactttttaaaaaaattatatatatctatatacagtataacacttatttaaatttgagtgtacattcatgatggaaaagttaaatatcttataaatttggtgaaataatacgaattctattaaatagatatggttatttattatttctaaaactatcactgtacttatgatttatatattaacggtgttatatgacctattgcaagtggtgacgcttcgaataatctatcttattatgacgtaatataccatgaatatcttgattaaacaataataattataatactaataatgattattactaccaattattttctttagccctacgtgtacttca

SEQ ID NO: 178254 - DNA, 407 bp, Glycine max
agcttattcatttatgaatcattattgccatattttggtttcatcaatttttttctaatcaattacagcctttttttgataatatattattgcaaactatttcttcaaactactcccaactaccccatatatatatatatatatatatatatatatatatatattacatatataaaatctacggtataagatcaaacagacacctttggaataataatgctctataataaatgaaaaatataaactcttgaagcgtatattaagggcgcacacaaacggtgttcacacccccgttcttgataacacaaataccgctgcgatcgggtagtctctcaagatactctgaggggagacaggagatatcataaataatgcctgttattttttgtatcacagagaaaactctc

SEQ ID NO: 178255 - DNA, 342 bp, Glycine max
tcctgaagtgttcttgattctatcttgaacatcttgaactcattctttcttgattctatcttgaacatcttgaactcattctttgattaacctttgagctctttgtcatcacctttgctatcatcaaaacatctttgaatcaatattgattcatcatgaagctttgcttctacacatgaccctccagttagctgatcgctccatcgcaagaccatatggagtgattgaagatgttttggtgaacgtgaaacaccttatattcccacctgatcttgtgtgatacacatagaagaagacactgatattcctctcattcttggtcgcacattcatgtctactgca

SEQ ID NO: 178256 - DNA, 377 bp, Glycine max
agctcgttaaagaacttagagaaattattttctttttttttgcacatcgaacgcgtgtatgacatccactccacaaggtttgtagaaaaggagaccttcaatcctattacgcaacatggcggacaaaaatgggcagataactcgaacggtcattattgtcaatgtctgaagtattctgcgctttactattcatgttcacatattattgtatcttgtggttacctgagcctgaactactaccaattaatagaagttgtttatacaaatgagcacatcttaaaagcttactcctcaacatggtagccatttgagaatgaagcgggtattccttctactaatgacgcatggtcccttatccctgacctcattatctttta

SEQ ID NO: 178257 - DNA, 307 bp, Glycine max
  unsure (1)..(307): unsure at all n locations
actcttaaacgtgactntgagcgttcgtttatggaagagtcccagtcaatttctgattatttttctcgagcattggccgcagtcaatctacttaaaagaaatggtgaagatgttgatgaggtgaaggtcatggaaaacatactttcaactttaaatccaagttttgacttcatttttaccaacattgaagaaaacaacgatttaaagaccatgactattgaacaactcatgggttccttactagcctacgaagaaaaaccaaagagaaaaatttaacataaggaggctaccgagcaactactacaac

SEQ ID NO: 178258 - DNA, 413 bp, Glycine max
cttgccatcatcaccacgcacacgcgtcactgttatatgctctcctaaccaacttgaaggatgaaccactgtgcttgtcccttacgattatttgtgggctactctgttcataagactgtggatttttgctccatctccgtcttctcttgctctcggacggaaataggtcatgaaattcacaagaagcgagtgggagtccttgaagactcgactttcctagatgatatcctaggcttgaatgattcatggcccactctctggtgctatatctacatctttccgcgcgacacatgagagctttgttggagcaattaatcttagagttacgatatgaagcttatgtcatgatggctatatggtgtatcaaatcaatatgcacatctgctacctcatcttggacaaatcgatgccac

SEQ ID NO: 178259 - DNA, 480 bp, Glycine max
  unsure (1)..(480): unsure at all n locations
ctcagctttgatggacatgatcnccctcacactctcatttgatttaccattccttcccgccttgaaaaagtcaataaactaacaattgcttatgataaattattggctactctaagagaaaatttgttgaagtctcaagatatcatgcgagcaaatgccaacaaacgtcgtcaggacatagaatacacagtcggtgattgggtgttcttgaagatgcaaccttacaagagaagatccttggctaaaaggattaatgaaaaactctcccctcgattntatggtcctttccaggtgttaaataaggtgggtgttgttgcttataagttagatcttccatctcacagtaaaactcatccggtctttcatgtctctttcctcaagaaagccattggtgactcgttccagtcccaacctttaccacctatgttatctgacgatcagacattacaagcttatccagaatctatttagatattcgtg

SEQ ID NO: 178260 - DNA, 408 bp, Glycine max
  unsure (1)..(408): unsure at all n locations
acccaatccccttcattaagaactagctcatttcttcctctatttcctttaatagcatacacctttggttggttcctaaccctctcatgcaacttctttacaaactctaaccttgattccccttctttatgtataaaagaagtgtcaagtgggaggggaattaggtcttagggtgttagaggattgaacccatagataacctcaaaaggggattgcttggttgttctatgaatccccctgttgtaggaaaattctacataaggaagatactaatcctaagacttatgggttcctttcagaaaagcccttaaaagggtggatagagacccattcactacctttgttngcccatcaatntatggatgacaagtggtagagaaaagaagcttagttccttgcttagcccat

SEQ ID NO: 178261 - DNA, 402 bp, Glycine max
agcttatcctgtaaccgccttattcttctggttatcggttatagcctattataatcgattagatgggccttgttctatggtaatcgattacagggagtagtaatcgattaccagatcctaaaatatggtatttcaagtgaaataatcacgaaaatcaattatttgtcacccgcaaaactacacatttagtataaataatcaaaatagacaatcgtgaacaatcatcataaacaatcaaaatagacaatcatcataaataatcatgaacaataattagcaaacacaagcacttcactcaacaaaaaattaatcaatcatgaaagataactatcaaacacaatcatttttcttaatcaaaggaaacaatcatcataaacaagcataattaacagccattaaagc

SEQ ID NO: 178262 - DNA, 457 bp, Glycine max
  unsure (1)..(457): unsure at all n locations
tctggagcaagtaggcaaacttgacaaccatcatgaattgacaacttgcataactattntgaggaacctttctgatgagtattctgaagtatcatcataatagtcattctgatgtttgttgagaaagaatccatacttgatagattctattaatgaagttcaaactaattcacaacttcatcaaattttacacttcttcacaactccaagcattttgaagtagattgtttcataaacattaagtgaaggtttagttaatggtgtgttagtgttttgtccaacgttagattgtgtagtatcttcaatcttctattcttatgcttctcatggatagattcatctttcaacaagtttgtatcttcttatgcaattagccttcacttttagatgcaccctcaatgtgtctgaccacatgtggaaagaaaagtgtngtcagctcgaatcttttgaagtgcct

SEQ ID NO: 178263 - DNA, 310 bp, Glycine max
  unsure (1)..(310): unsure at all n locations
gtggttgaagataatgaaaaaatggaatttgataattctaaagaatcccaagaagaattatttaacttttgaaatttggaagaggaaaaaagttatgcctcaactcagaagatggaaaaaaaaaaaacaccattcatgttaggggtgaagaggaatacagngctntactttgtgtttgaattggtttctatcactgttattattttgaagtcctgaacttgatggatttttttatcattttcttgtcatctgaaatggaaaacttgatggccacaacttaggaggattactagtagtttatgatctatga

SEQ ID NO: 178264 - DNA, 469 bp, Glycine max
  unsure (1)..(469): unsure at all n locations
ngaacgaatntaagatacatcttcttcaactgtggtgattcttgactccatctcattgaagcgcatatccacttgtaattccaaagtgtcaaacctttcaccaacaaaggtttgaagaccatcaaacctgtccaaaatctttgaagtgttgaaggaaaagggtaacaagatgaggctaaggcaatggagcattcaatcgcaatgccttatgcatgcgatatctaacaagatgtgcccaatcaatttgtagacctttatgaaaggcccacataacaatgagatcttcttcagaaacctgagcaaggtttgaagatctcggaagcaagatgcgaacaattagttaatgaaggatgcgactttcaaaagccaatgaaccggcaagaagcctttcggtcatatccgcttggttggtgcaaaccaaccggtgggcatcatgtacagagaaatcaaacttccaatcgtcaattag

SEQ ID NO: 178265 - DNA, 349 bp, Glycine max
agcttaatcaattgaaaattgacggagtgagaatttccctggactctactaggggcaattttccttggcaccattaattgtaacaatcccattttttcgtatataaaattttagagaataatgatgttttataattaaataaataaagaaaaatagttataataaaataatggtttgagagaaaataagaaggatattttattattcatttgatgaataataaaatagagtttcttttttttataaaataataaaaataaataaataaagtaaataataggtcgtgaatacccctagttataaatagcgacatgctaggtcagttttcagactgacttctcagcctcct

SEQ ID NO: 178266 - DNA, 489 bp, Glycine max
  unsure (1)..(489): unsure at all n locations
cgcgacactatacatcagcttggcatagagattgacaagctcttgttatccgtcataacatctcgtatgaaatcaatcaaaagacaaactcaagaagacttgttgggattgttgttgcaaggaaacaatcatcaaggtgatggcaagttagggaagacattcaccactagagacttgttggatgagtgcaagactttcttctttgctggccatgaaacaacggcattggctatctcatggactttgttgcttctagctataaatgaagattggcaaatccagttaagagatgagataagagaagtggtcggtgataaagaacttgatatcaacgtgcttgcggngcttataaaggtaacacatacttaatctcatttactcatatgcatagatcataattaaacacgttatatatgttcataattaatggtagggaagtatagcgtttgtttggttaaatttgttctgcgtcttaagatatatatcttg

SEQ ID NO: 178267 - DNA, 462 bp, Glycine max
  unsure (1)..(462): unsure at all n locations
agcttgaccattttctccaatttgttggtgatcatttctactcaacaacaggtcctcatcgaattcaaaatcacttgcattgaaatcagaccccaacgtgagaagtttgttnttataagccaggacttgatactcaagagaagtaatttccatttccttctgatacataagctcttcaaaaacttcaagagtggcctcagcatgacctatcttctcctctgccattctcttgtagtgactcgcctccatcttcaccgcggccttctctccttgcaaccgcactatcatgtccatggcttcactggctggcagtgctgaggcttccctttcctcatccaactccgcatatagcttctgcagaaattgctgttgggcgcggagtgtctccttcatggctcttatatcactttcagccatgccgctttctaaatgttcaagcaatcacttatttctgaacacaca

SEQ ID NO: 178268 - DNA, 473 bp, Glycine max
  unsure (1)..(473): unsure at all n locations
cggacactataaatctaagctaacaaggtcttctttccttgttgattctgtcaagcctattttcttgctggtgatttcagtgaatagtagataaagacaatgaaaanttgttaatccatttaactaagaactatatattgaaaccaatatggtgtgataaagttagtaaataatcttgatttacacacacaaaaaaagaatcatatggtggatgaaatggttacaaaattagtgcggagaaatcatctatcatgatacaaacaagaccctgacaatgcctacatggcattgccagtgcctacgtgtcgcaatgccagcgcttctcattcccgcccaaaaatgtcttctcggttgccattaattgcttctgtcattttctagataacccttcagttaccgatgcgccttttcaaattnttcactattttcgatgtcccacactttccattgctacacgcctttccattttccat

SEQ ID NO: 178269 - DNA, 438 bp, Glycine max
  unsure (1)..(438): unsure at all n locations
agcttgcactgcctttcagcaatggagattgctgcctcatttagatatccatagtgcttatgatgttatgcatgaatgatcatcgngttctgatcgctttccaatgcttattttcacgtaaaatttcatggatgcagtgagttttactgccgcttcaaagacttatatgaggcggggcattggttatacgacttctctctctcttggcaggtgtggttcatggccgacttgtcacatatctatgtagattctgacgaagtatgttataagatgaaacatgctccccatcgaaaacattgtatccttttattgaagcctccttacatatgcaattgacaatggtttcccacctttgaatcatcattgctggactacgcctatctctgatacactgatgtgaaatataatgacaaactattaaatgcgaatatctgggag

SEQ ID NO: 178270 - DNA, 474 bp, Glycine max
tagtgaaataacattatattaaagctcattatttaaccagataatagaaggccacgccacatgaaatattgtaacaatcacaaacaaaacaactaaaacaagcctcaaaaccaaatcaagtagcattttccaaattcaaccttactctacttcacagaaaaacccacaaaactaacccaaaacactaataaaaaccatttttcataaattataaattttttaaaattaaaataaacatttacggatcaagttgatctgcaagaagtttatgaatcaacttgatctgcaagtttcatgcagatcaacttgatccgcatgaagtgcaaaactcattacggatcatgtgtttcctattgcgaatcatttatacccaaatctatctcaactgcggatgacctaaatcccctatgcggatcaacgaaatgcctacaaactagcaactacactaaaccaacaacaatggaagcatgaaag

SEQ ID NO: 178271 - DNA, 462 bp, Glycine max
  unsure (1)..(462): unsure at all n locations
agcttattgctcgataacaatngggcatattaatggttacagagtaaaaaaaaaaaagaattattttatgtaataaatcatttttatatttttaatatgataaattattttcaaaataattaagaatctatatttttaaaaccatntattgatgcataagttagaaaatttgttacagtattattttaaaaccatttattgaaataaatttcactgagcaatgccaagatttaaattaaattcacgcacacaagacgttatcatactatgccgattcttcaaatttggtttgacaaattttaagtaggtacatttagaggacatgtgtatgtatctgaccaccaaaccgtgtgaatttttctgtgctgcgcgcagtattgccatgtgaatttgaatttatgactacatacattttctgtgaaaaagaataataagaaaaacgcgctctacggaacttaaaac

SEQ ID NO: 178272 - DNA, 472 bp, Glycine max
  unsure (1)..(472): unsure at all n locations
aaactaagcttataaatggtatagtggatttgacaggggtactttggtccttaaggaaatcccaagaacgggttgtgtggaggagcttcaaatctaatcagaattattcaaactcttgttactaggccctgaacttgatggattttagtatatataatgtaatgtcataatgaaatagaaaacgtaaaattcttccatgaataacgaaaacgaaaattgaacttgatgtaatacttcctttagaggtttaatttaactaatgtaatacttcctttagtcctttatatataagtaacaaatgagtgtatttcctttagacttagatataagtaaaaaataaataaaatntattttgattagcacctgtttattagttntgcttttgactgtagcattcatattgatatctantttttggaatgatgattgatgtangtgttcattcagttatttctttgattcttgctttcat

SEQ ID NO: 178273 - DNA, 445 bp, Glycine max
  unsure (1)..(445): unsure at all n locations
agcttgtccacaaaagatcactanttattggtttganatntcaatatctcagtttttcctaccaagtaaatggatcatttttaaggtccaacgccttanaatgatcacctttcaagtaaaaagaatcgcttgattcacccttaaaaaagaactacgtaggtctgattttctcttcgatggagggtacgtaggagcaagagccccgcttttgtcgacctcaaaaataaaaaaggaaataaaagttaagataacccaatttcacaattctaaaaaataggctgttgtcctttgagacaaacgtgagaggtgctaataccttcctcaaacgtaaatacaactcccgaacttaganaatttcatttgaccagttttcttctgttnttccgtcgttttccacacataaacgttggtggcgactccgcgcatcttttcttcttttgatagc

SEQ ID NO: 178274 - DNA, 464 bp, Glycine max
  unsure (1)..(464): unsure at all n locations
tctggagggacatcttgactggctttccaatctgacattcaccacagattctgccttcttctattttcagattgggaatgcctctaacagcacctttgtcaatgattttcttcatgcctcttaagtgcagatgtccaaatctttgatgccatattttgacttcatcttctttggagaatagacatgtggaggagtaactggtttcttgaggtgtccataggtaacagttgtcctttgatctgctgcccttcattaggacttcactcttctcatttgtcaccaagcattctgactttgtgaagtttacattgaatccttcatcacacaactgactgatgctgatcaagttcgcagtcagtcccttcaccagcagtactttgttcagactangaagtccatcatggactagctttcccattccagtgatctttcctttagagccatctccanatgtcacatagcta

SEQ ID NO: 178275 - DNA, 460 bp, Glycine max
  unsure (1)..(460): unsure at all n locations
tttgattggattaagagtgaacaatgaatagaagagaaatataaaagatagaaatagaagagaaagagaaaattgtgtattgtttgtttggataaataaaaataagaaaaaagaaataaaatttttaattttgtttatttgaataatacaaatgattaaaaattattaataatataaaaatatttatacattaaaaaatttgatgttttactcaacatcttatcatgaatttatttatccattttgactttttgttataaaaaatatttaatattttaagaaataaaataaaaaaaacacaaatcttcttaccttataacatttgaagagaaattttattttatcgtgggatccttaaatttttacattttctccatcttattntacttcaaagaaacacatgaaaagtgtatagtctctccatttcacttcttctcccagatcattcaatgcaaataat

SEQ ID NO: 178276 - DNA, 448 bp, Glycine max
  unsure (1)..(448): unsure at all n locations
agctntataagcgcgggtctgggagacaaatgtcaagtggtcgcgatatacgaagatgatgttccgagtacattagatttggtacgaccatgccctcctgatttccagctgggaaattggcaagtggaggaacgccccggcatttacgcaacgagcataatgtaaacctttacggttttaaaagctctatagttgggcctaggctttagagtttttttttctttttgttaaggctttgtgtcttttgttgttgattttataatacaaggatctttcttcatctgttcctacgtctctacccattctcattcatttgcatgtttacttctttttctgaaacggcagatccgatgacgagtcctccaaaggtactaatacctgggacccgcctatcgacttcgagcaagaaatgaatcaaacggaagatgaaggaaacgaggatgtggga

SEQ ID NO: 178277 - DNA, 454 bp, Glycine max
  unsure (1)..(454): unsure at all n locations
nggatgtttcttgtaggggtaacctcatgttaaaacccctactcatgcccttaaaatcattgaagacatgtgctccaacccctacaacaacttaggggataggagaatcatgaagaggggcatcaaccaagtggagaaggataaatcccaaactgagttggaaaaacatatgcatgctttgagattaatgattgagacactcctaagagcctaagctcaagtcctcatcactacatctaaaatagcaataaacaccctaaaatggggggttgaataatgtgtatatcaaagatataaacttttgcaatataaaggtggatatagatagcaatatatgtgtgtgtgtgtggcaagtcgtccactaaagatacaacttatatttaatgaagatcaatatagtcgtctagtgactagataaaagaaagagttcttanaacagttttccaaataaaca

SEQ ID NO: 178278 - DNA, 450 bp, Glycine max
  unsure (1)..(450): unsure at all n locations
agcttccatcagaagcattgaacacagaatacataatcaattagatattaggtatttacatcattggctcattagaaatccccaactagggtgcttagccagccattacaaagaaacccaaacaataaatcttacaaaacctaggcttcaatgcacaagctactcctcttgatgcttctagggctcttttcccgaaataggcactatggtgtgctctaaaatctgtgccaatcttctgcctacaatctgtatccttctgcacaagacaggctntaaataggctttgaattcgtgacgttgcgcttaacaccaccctaagtggattcttgcttatcgccagtcgtgcgctgagcttggctgaagacacctattgcacgtagcgcactgatctcacgcttagcacgcggccttgatgctaatgctctgccagaatctccttcgtgcttagcg

SEQ ID NO: 178279 - DNA, 470 bp, Glycine max
  unsure (1)..(470): unsure at all n locations
tatcacccttagcggcgattganaaaagcttgtaatggaagtcaagagcatgaaagtgcaccaataccattaactggtcaataggttcttgagcaggttgatgacatcaatacgatatttggaaagacccaaaagaaggaaaaaaagtaaaacttgcatactgaagaagaggtcgatattgtttgatcttccatattggtccgatctagatgtcagacattgtattgatgttatgcatgtggagaaaaatgtgtatgatagtgtcatcgacatgtttcttaacattcaaggaaagacaaaggatgatttgaataatcgtcaagatctagttgagatgagtatatgagaccagttatgtccttggtctaatggtaagaaaatatacttgcctccaacttgtcttactttttccaaaaaagggaagataagtttttgttagtgtctgcatcgtgtcaaagtgccacaaagat

SEQ ID NO: 178280 - DNA, 462 bp, Glycine max
  unsure (1)..(462): unsure at all n locations
agcttgtttctttattaataaattcgtgcatatgcaaactaataaaatntccctaataatccttcattgttttgtgatatgatattagttgttgaagttgctatttcgattacaagtgagtgtgatttttggtgcttgtatagattaaaaagtgaggctttggggggaaaaccggatgctacattggtttgttaacaggcggtttgaactgtgtggatagctagagcttttcattttcactacccgtatcttaatttccacatagatatgtcttctttgtctttattggtttttaaatttcgcatgtagggtttaaggaggttgatgttagtttctactaattatgaaagatatgagatggntgtgagtcagctttgaacatgttgaagacttagagttgtttcggaattttgaatcttttacatgatttcgactgagaaaactaccttcttgatatattta

SEQ ID NO: 178281 - DNA, 462 bp, Glycine max
  unsure (1)..(462): unsure at all n locations
tgaaaaattaaatntaaccacagctgtttaattatatctaaggacaaaacttagacacagtttcttctgtgcttttagtgctgttctccaatcaattggagttttacctcggaaacttttgttgacctttaatgaaaacattttaacacgaactattgaggcgaaacttcaattataattgtataacaacatgaaaaatacctaacgagtaattcaaaaggtggaaagaccaagttaaacaacattttcttggaaaagaaacacaaaaggaaagaaataatacctctccacgataccaaggtaacttgtcttcatggccatggtgatgcaaataagtcaccaaatccaaccacataacaaaaatcttcaattacaaaagtcaaattaggacttgattgtgattctaaaagaaagactcattactaattaagtgtctaatcaaaagaggtggaattaccacat

SEQ ID NO: 178282 - DNA, 458 bp, Glycine max
  unsure (1)..(458): unsure at all n locations
agctntgacttcagtcatcaaaagattatttatatgtgaccatggcatgagattgaacaatcaagaaatctatctttcaatcttctctctcaacatcattcaatatctttcaactctttctacagaattttgtgattcatttctctttatctttctaaaagttttttttcaaatactttctcttccaagaaaagttctttgttcaaaaacttgtgttattcatctttttcattctcttctccctttgccaaaagaacgaaggactaaccgcctgaattcttttgtgtctctcttctcccttacaaaagattcaaaggactaaccgcctgagaattcttttgattcttcccttccncttaagcaaaagatttcaaaggactaaccacctaagatatattttgtttccccttacaaagattcaaaggactaaccgcttgagaattctttgtcccaacaca

SEQ ID NO: 178283 - DNA, 429 bp, Glycine max
tcttagtctcacctgatgaagatgaattcgtggctacttcatgcactcctctaatgacaataacatcatttctggcactaaatttttgggagttggaagccatcttctcaattaaatttttggcttcagcaggggtcatgtctccaagggctccaccactggcagcatctatcatacttttctccatgttactgagtccttcataaaaatattggagaagaagccgctatgaaatctggtggtgagggcaactggcacataattttttaaatctctcccagtattcatataggctctctccactgagttgtctaatacctgaaatatcctttctgatggccgtggtcctggaagcagggaaattttttttctaagaatactctcttgaggtcatcccagctcgtgatggaccttggagcaaggtaatat

SEQ ID NO: 178284 - DNA, 445 bp, Glycine max
  unsure (1)..(445): unsure at all n locations
agcttctgagtgataattttccacagcttgaaatatcaaaagcttctatatttggtcattctatgggtgggcatggtgctctaacaatcttcctgaanaatcaggataaatataaggtgttgattacacaactgaaaatctggttttaatatagtcaaagaattactttggaaactttggcaatttcctaagcattatggatggttttactgttgaaatagcatgtggattgttattagttgttttccctaactgagatactgctcattaatatatttctccactataagctgactgtatattgcataagggttagtggtttctgatatttgttaggatatctggtaacgtttgattagtttaagcttatattttacatggaactattaatgtttaatagtcgcgagactatgtttggtacaaggaggatgatcattagagttca

SEQ ID NO: 178285 - DNA, 470 bp, Glycine max
  unsure (1)..(470): unsure at all n locations
ctcacgcttcatggtgaatcanaagtgattcanagatgttttgatgataacaatgatgataacagaagatgataacaaaaggtgatgacaaaaagctcaaaggtcaatcaaaggatgagttcaagatgttcaagaagaaatcaagaacaaattcaagactcatgaggaaaagttgaagaacacttcaagattcaagaagaaggatgaattcaagaatcaagattcaaggagcaagcttcaagaatcaagatcaagattcaagattcaagaatcaagagaagacttaatcaagataagtatgaaaaggatttttcaaaaactgagtagcacaagggattttcacaaaacatgtttaccanagaagttttactctctggtaatcgattaccagattgctgtaatcgattaccagtagcaaaattgtntcgaaatagttttcanattgaatntacaacgttctaattaatttc

SEQ ID NO: 178286 - DNA, 457 bp, Glycine max
  unsure (1)..(457): unsure at all n locations
agctntctttngctatctctaagactcaaagcatgatagcacgcagagactaatgtcgtcttctgcacctattgtcatccagaggcggcgggtccgatgacatgcaggaaccatttggtcccgcatttttaaacattcttttgctatctctaagactcgaagcatgatagcacgcagagactaacgtcgtcttctgtgccttttgtcatccagaggcggtgggcccgatgacatgagggaaccatttggtcccacactntttaactntcttttgctatctctaagaatcaaagcatgatagcacgcaaagactaacatcgtcttctgcgccttttgtcatccagagggggcgggcctgatgacatgcgggaaccatttggtcccacactttttaactntcttttgctatctctaagactcanagcatgatagcacgcagagactgacgtcgtcttct

SEQ ID NO: 178287 - DNA, 434 bp, Glycine max
  unsure (1)..(434): unsure at all n locations
actaagcnttcagcagatttagtaatgacccactaagctagaattaatataacttaatgccattaacctagggaattaaaaaaaaaacttaatggctgagtgtaactgaaattgtggcaaccaaaagtcacccccaacagccaacaagtcagccaccatttggtctcccaaaaggctaatgcctaggttgccaattgggcccttattacaacttgaactaaacctactaaagctcttttagttgactaacccaaaacatatttttggtcagccaactttacaaggattgggccattatttagacaaactaaacactctaaaattgagacaaagtggtgccatttagtcctcctccatttgggccatgatacaactcacaaccttggacttttctccttgaaacttgggcttgtattcaaatagtatggacaaca

SEQ ID NO: 178288 - DNA, 483 bp, Glycine max
  unsure (1)..(483): unsure at all n locations
ggatcttaagcaccgcggctgcagcttaaccaggggagatggaccatntcaagtgcttgaaagaatcaatgacaatgcttacaaagttgagctgcccggtgagtataatgttagttccaccttcaatgtctctgatttatttctttttgatgcagatggagaatccgatttgaggacaaatccttctcaagagggagagaatgatgaggacatgttcaagagcaagggcaaggatccacttgaaggacttggaggacctatgacaagggctagagcaaggaaagccaaggaagctcttcaacaagtgctgtccatactatttgaatacaagcccaagtttcaaggagaaaagtccaaggttgtgagttgtatcatggcccaaatggaggaggactaaatgacactactntgtctcaattntagagtgtttagtttgtctaaataatggcccaatccttgtaaagttggctgaccaaaaatatg

SEQ ID NO: 178289 - DNA, 471 bp, Glycine max
  unsure (1)..(471): unsure at all n locations
cgagcttcaggtgagttaacttcattgagatgtattgtctgcttctttcctctggtgctgctatagctctgattaataatatactatattttctgccttccaaaaaaaaattatttcacattgagagaaactgaggaatcaagtggttacaagatgatcttgtcagagatctaactatntccatcatttattattgatgtaaaattgtttgaacatttaactaattatcatatcagtttatatcttttactatttcacatgaagaaaaattgagaaatcaagcttcttctaacttgtataattgattcacagttgaatcctggagactctgtcatggatgttagacagttcctccttgatgctcctgagacatgttntattacatgctatgatctacttttgcatacgaaggatggatccactcatcacctggaagatctataatgaaattctgaagtagctgatattact

SEQ ID NO: 178290 - DNA, 431 bp, Glycine max
  unsure (1)..(431): unsure at all n locations
agcttaatgagcagattataattntaaatgattttaaagactcggaaaaaacagattatgtaaaaaaaaattgatntacagtccttaagcaaaattcttaatgagagtaaacagaattattgaaaaacgaaaaaaccaatggcatgaaatgctttggaatacaactctagattgatcacactcttgtcccttctcactcccccaaatttccattttcatcccagaaattaacgtgttttggattcatgaccttcaacagcgtacaccttaaatatgtaacttacttgttcttctttccatctttttctgcctcttgtttgaattgcatgtactgttcaagcaattccatcgtaatcctctacttctgctcgtcttccaacaacctcattgcctcagtttcatgtttttcctctgggtttgcttcttgatct

SEQ ID NO: 178291 - DNA, 448 bp, Glycine max
atttgactcgaatgtcttattgtgtcccgtaggatatcgagacactcgtaattgaaaatggaagctctgagaaaaatcaagcgacaataacttttaactccgatgtccgattgagtcctgtaatatatcgagacgctcgtaattgaaaactaaagctctgagcaaattcaaacaacaattaattttgactcgaatgtccgattgtgtcccgtaggatatcgagacgctcataattgaaaacgaaagctatgagaaaattctaacgacaataacgtttaactcgggtgtccgattgagtcctgtaatatatcgagatgctcataattgaaaactaaagctctgagcaaattcaaacgacaataacttttgactcggatgttcgattgtgtcccgtaggatatcgagacgctcgtagttgaaaacggaagctatgagaaaattctaacga

SEQ ID NO: 178292 - DNA, 460 bp, Glycine max
  unsure (1)..(460): unsure at all n locations
agcttgaaagagagacaacttgagtccgaattaatatttatgctgctagattatctcatcaggcctgngacaagttgggaagtctagtaaaacaatttcggctgctaaaccagcaggaacatgatccatgataaaagccggaatgtgccaagctctatctatntaaaaatcactgacagtggctttgagagagaatctgacctcagcgggcaaatttaaggcatctgctattatttcagacaaccatttattgctccagaacttcatacttttaccatatccaattatccgggaggagtgaagcttaacaagactcattntgttgttgatacctggccaaatgaatgatttgatatatttgtgagaatcatgcctcaggaaacgggctggacagaaagaagcccattggctataagaagtaatacgtcccaacatagtttaacacagcagcttcattgat

SEQ ID NO: 178293 - DNA, 441 bp, Glycine max
  unsure (1)..(441): unsure at all n locations
ctgatatgtttttagatacctattaatgataccaaaccaacctttcccgagcccctaactccctaaaagcttaggaaaagataggaacaaaaactatgccaaggagacatgccaattccttacttaaatagcttgttctgtattgaaaccagaaccggtgataacttaaaataagtgacttagacctgtgttgtcaaatagcggctatcacggcgctatcacattatagcatagcgggttttgagaaaaacgcaatcgcggcagtgtcatgttgtggactctgcgaaaatcacaattgtcggcgccttatgcattgcgaaacctcgttgcatcgttaatttctgacgaggttgaatccggagagaaactgcatcgatggtgacggcgacggtgtgtttanggttcattgttttcaaatatgaagctgggttggagcggatt

SEQ ID NO: 178294 - DNA, 469 bp, Glycine max
  unsure (1)..(469): unsure at all n locations
agctngtccttggtttagacatgattggtacatgatttgttacttgtaggattcgatttgggcaaaattggatgagggaaagtgtgatttcgaaatctgcactttatgcagaatttttctgttgaaatgtgcagcagaattttgtataagtgcggaaaaatgctttgtatttgctggttggggacagagtagtacagaatgagttttggatgtttgttagtagatcccaacggtcaaaatgtagacttatgtactagagacttccagtaaaattttcgagtcgatccgacggttaacgaattggaacgaagaaaatgttactggagtatttgtatgtgaaaagctgtgatttttggtttgtgttctgggcagagttttctgcctttgcctggtttgcttggntntgttagtttgtgatgatgggatgttggatttcttggatgttgtgggagctcgagaggattgatgg

SEQ ID NO: 178295 - DNA, 460 bp, Glycine max
  unsure (1)..(460): unsure at all n locations
tgcgaagtgggtggaattcctagagcaattcccttatgttatcaaacataaaaagggaaaaggtaatattgtagccgatgctctttctcggcgtcatgcattactttctatgcttgaaacaaaattgattggtcttgaatgtttgaaaagcatgtatgaaaatgatgaaacttttggagaaatttttaaaaattgtgaaaaattttcagaaaatggtttctttagacatgaaggctttcttttcaaagaaaacaaattgtgtgtgcctaaatgttctactagaaatttgcttgtttgtgaagcacatgaggaggtttaatggggcattttggggtccaaaagactctagaaacattacaagaacattnttattggcctcatatgaaaaaggatgtgcagaaattttgtgaacattgcattgtatgtaaaaaggcaaagtctaaggtaaagcctcatggat

SEQ ID NO: 178296 - DNA, 468 bp, Glycine max
  unsure (1)..(468): unsure at all n locations
agcttgtgacaatatattaaattatacttattttctacataaatcttttgtacgaaaatacaaatagtcgtatttcaccatgctgaaggttaactttatgcanaacaatattcaacaaattagttggctgcgtaagtttcataatttgtgttgaaaattaactgacaaaagggtatcataaaaaatagtgacaataaaaacatgggaagataaacataaaagactggtaacatatttagcattctccttttcgtcactataagctgaatcgcatgatgacaacacaaaataatcaccgaacataaattatttaacaaaatcaacatganaattgattcaacaattaaaagagtataaaaaattatcaaaatctacattaacatttatctgaacctaaatctaactataagtataaatctacattctacaacataatgtatcctagaatgtccaaagatntaaaaacgc

SEQ ID NO: 178297 - DNA, 468 bp, Glycine max
  unsure (1)..(468): unsure at all n locations
ttatgccattggagcacatagataatcgcatgcaaaatttaataaataaagctggttntggttntgtaattgttgagaatattgatatcaaccaacatttgatgagtgcattggttgaacgttgaaggcccgaaacacacatttcattttccacatggaagacaaccataattttagaagatgtggccttgcaactaagcctcaagattgacgaactgcctgtaactggtgcccgtaccagtgatgtacgtcttgcttgtcaggccttattaggggatattccacctaataagtatatcaaaggaaaaatgatttatttatgtggttgcaaattttttttcaagaacttcctattgatgctgatgatgttgtgattgcacaacatgctagagctcatatcatgatgctcataggcggatgtttgatgtagatacatcangagcaagagttcattatatgtatctcctt

SEQ ID NO: 178298 - DNA, 460 bp, Glycine max
  unsure (1)..(460): unsure at all n locations
agcttcgacaacaagagatgaaatgctatttctgttcacggnggcgcctttatagaagcccttaactaatcaaaagagaacacgtgtcccccttttccccttcgtttcaattatatttccattgctttttaattgaaaaatagtgatggattaaaaaaataactctctgtcattattacactatgtgagtaatattgattttcattaatttcttacttacctgctcatgagttattatgcttctgtcttcctctattgggtttgtattgatttgggcttctcttgcaaaacgaccatgcggcctcagtcaactctcatcccatgcttgattcgggcctttcttagtgcattaaaaaataaaatcaatgtcattataatccaagaaattccattggataatgtattttgtaaaanaatatattcatttgttatcttagaattattcctgaataaaacaagc

SEQ ID NO: 178299 - DNA, 454 bp, Glycine max
  unsure (1)..(454): unsure at all n locations
nntgaaatgagaatcaaatcatgtggagaatatttaagttccgttcaagatcaagaatntcatgcaaatntgagaacattcctccttttcttttcattgtgactttttctttccttttaagatcccccaattgtaacccacgtggccttatattcacccaaaaatcctatcttgttctaataattcaatggcttaatttcttaatttaaaatttactaactttttaatgttgtagattttaagcactaatatcattccaataattttaaatagagaatttccaaaatgattacgctcactttttcttttctgaaattgcacgtgtctactatcactttaaaattaaagaaagatgattcaggaattgacaaaagaaaggactaaacaaattatctttgaattttctttttataaagcaatattgcacacgttttcttacactgcataatggaat

SEQ ID NO: 178300 - DNA, 463 bp, Glycine max
  unsure (1)..(463): unsure at all n locations
agcttgngttgcaaacatatataatatactctctcagcagtaaaaccaacaacagcagaataattatgatctttcaaacaacaaatacaatccaagttggaggaatcatccaaatctgagatggagaagtcctccacaacaacaacaactaatccctccttttcagaatgttgttggcccaagcaagccatatgttcctcccccaatgcagcagcagcaacaacaacaaagacaacaagcaactaaggctcctcctcaacattccttaaaagagttagtgaggcaaatgaccatccagaatatgcaatttcagcaagagacaagagcctccattcagagtctgacaaatcagatggggcagatggctacacagttgaaccaagctcagtcccaaaattctgacaaatngccttcataaactatgcagaatccgaaaaatgtgagtgccatcaccttgaggtct

SEQ ID NO: 178301 - DNA, 424 bp, Glycine max
cactcaacaagcattattcgttagtgaatagcacttctttgttcctgcgtgtgtgtatatatatagatataagcttttctctatgccatcaacacgtcctctatatacggcggagattttcgcaagtcttggtggctgatacctattgcgaatctgtgaggccttcgattggtaatgcatggctcatcaattttttattgtaaatggtattgtcccaaacaaaaccggattattgatcccaaatataagattaaaagttaaccaatataagttctatcaattacgtctgtgaattggtcagagacggaaaaagtacttttagagacgaaaagcgttgtctctatgtaagttggagtttatttagccaaatgaatgtagatatcacaaaagcttttatagagttggagggcgtggcaattatagc

SEQ ID NO: 178302 - DNA, 457 bp, Glycine max
agcttgttgaaaacaaattgaagacgggttttggttatttggaccagaccaaaaccaattctaaattaaagaaaccctaaaaacccaacccaactaaggcccaatgttataaagaagcctaaaaccctgaccccacccaggcccaaaacattaaaaaaaaattatcacccatctaaaaacatatcatctcctctcaaacatttgaggacctgctacaagcattaagcaaccttgtccaccgacctccgacaaccaccttcctccaacgaccacccagagatgatcgtcatcagcgatctccagagtcagcccttctcccacaccctcaacctcagcattaagcaagtgagagaacgaaacagagaaagagtaattgagacacccaatctcaactatgtcagagaagggtaccagcaacatactacgacaatagtggtggcaaaacgaggggagagga

SEQ ID NO: 178303 - DNA, 459 bp, Glycine max
  unsure (1)..(459): unsure at all n locations
tatcacccttagcggcgantganaaaagcttgtaatggaagtcatagagcatgaaagtgcaccaataccattaactggtcaataggttcttgagcaggttgatgacatcaatacgatatttggaaagacccaaaagaaggaaaaaaagtaaaacttgcatactgaagaagaggtcgatattgtttgatcttccatattggtccgatctagatgtcagacattgtattgatgttatgcatgtggagaaaaatgtgtatgatagtgtcatcgacatgtttcttaacattcaaggaaagacaaaggatgatttgaataatcgtcaagatctagttgagatgagtatatgagaccagttatgtccttggtctaatggtaagaaaatatacttgcctccaacttgtcttactttntccaaaaaagggaagataagttnttgttagtgtctgcatcgtgtcaaag

SEQ ID NO: 178304 - DNA, 464 bp, Glycine max
tcttgagaaagctacatgagctgcctcggcaaaaacacttcccagccttcgttaaacgttggatcttctcaaaatttggtctgcagcttcacaagacacttgtacacgatctgaccattgggatcttcgagaagatgtctggagtgtgcgcaaagcttccattcccaagagcatttcttatttaagcatttcagccttcgctctcgtgcagcttaggaaaaacaccatttcttcttctttctttcttccaaagccatttctaatattccaagcactttctccaacacccacagccaccattagccaccacaaaccgtcgttgttctccgttgcaaccccacactgagaggaacccttcaaccgaagcggaatcttccaacttggctcgcggttctggtagagaatgaaaccctagttagacctttcgttatccttcgaggtaaccatggttctgcgcttgtttc

SEQ ID NO: 178305 - DNA, 387 bp, Glycine max
  unsure (1)..(387): unsure at all n locations
ctcaactggctgtttatttatttctagacattacactagtggtctatatgactgaaaacaaagtgacaatacaagcaaaacttaaagtactaggtgctctagtaccattctttacatcttgagctggacgcatgatgacttgtcggtcacagacctagtactttgcttacctctggctatggaattggtcacctattggtcggccatgtgtcgtaggcaacgttctaacctttttgtggatgagctgtggggctttggaggtggcgacgacgcgtctgttgcccgctgccgtccatctccaggctgctgtggtgtctcgcctttgcgcctgcctggggcgcagtacttctcgatgaaagccctattaataggggctngatgaccttg

SEQ ID NO: 178306 - DNA, 461 bp, Glycine max
  unsure (1)..(461): unsure at all n locations
tctccccaatttctataatagggggagaagtgaagtttataagggttcagccccataggcacttctctctcttttgaatntgcttggaaaaattgtttccgtgaagaaaatccaagccgaggcgcttccgaaacgtttccgtgaggaatttcgcgaaggttttgaccgttcttcgacgttcttcattcgttcttcatcgttcttcgatcttcaacgggtaagtacctcgaaccaagcttttcgattcattctatgtacccgtggtggtccacattgtatttcgtgtatttttattctcgtttcatttactttttatacccccttttgacgtgcttatgccattttatttaagtcatttctcgcttaaactagaaataaaataaatttccaccgatcgtttgaattgtattatccgctaaatttggttaaaatgaattccgaccgttcggtcgtgccgtaac

SEQ ID NO: 178307 - DNA, 443 bp, Glycine max
  unsure (1)..(443): unsure at all n locations
agcttgctgtatttctntattattggaattatattatggatgcacgttattgagtgtatttaaatgggcctgccaacatctgccagtgtcttaacattcatgcangacattctttattactttcttacatggatttgttttgcataaattggtagtttagtttattgttttacacaagcatctacttttatgntatttgttgttaaatacttcattactaaagagattttaacaatatcctggtgatctagttggtattagaccgtgcttttatgataaacccaaaacttttatttacaatcaatcattnttaaattctgtcagatctaccctttccaaaaattgtgggaaactcatggtgcatggtgaggaatgtattagctcanagactgcaatagagatggtattcaggtgttcagattcngaatacaagggatctcttc

SEQ ID NO: 178308 - DNA, 448 bp, Glycine max
  unsure (1)..(448): unsure at all n locations
agcttccaccatgggtaattcccaactattctttctttctccaccaaaaatcccattctcacgcatccccattccatacagccatgtttttaaccaactcctccttttgattggagtttagaaaaagtctagaggaaagacatgcactaatgagtcatgcccattccatatatcatgccaaataaatattctgtcccctctccccactttccactcaacacactcattgaaccatagggacttgttttgtcccccgcataccctacacaagtccctccaccaagtggaagaagatgtatggacaccttcaatcatcaaacccctccaaccccatactttgatatcaatatatggaaccataaaaattgtccctcctccttgcanagtcccacctccatttagctagaggggccacataaacagttctaattgaattctttatactcaa

SEQ ID NO: 178309 - DNA, 473 bp, Glycine max
ttccgcaagccatatgggaagaattgggatctagctatgatattagtctctgtcgaagccattgcatccctctcttagtattacgatcagccactaaggtgcttcacgtttggggactttcacctagtgccgatcgtggaagagtttgaagagatcctgagatgtccgctaggaggacgaaagccatatctcttttttgggttctacccctccatggcaagaatagccaaggtagtcaaaatctcggcgcaagagttggaccgagtaaaacaaaacagaaatgggatagtcggaataccaaggaggcatttggaggaaaaggcaaaggtgttggcagttcaaggtgaataggcttcgttcattgatgtcttggcgctattggtatttggagttgtcctccttccaaatgtggatgggatagtggacttagcggcgattgatgccttccttgcttatcaccaaagaaaggaaag

SEQ ID NO: 178310 - DNA, 408 bp, Glycine max
  unsure (1)..(408): unsure at all n locations
agcttattttctgggaaatttcttccctgattgtgtgtttggttggtattaggggtgctgtttggtcttggatgtgcaacaggtggattttgtggccgatttagggatggactttgtggatgattgggtgttcttggctggtagggtggtgggtaatgggtaggactgatattggctaggtagtgatattgttgggaaggatattggtacatgggattataatggactaatggaaaggttggccacgcgagaagtgcaggcataacatgaggttctccctccttcttcctttcactactcctcccgggccctccattaccaggattcccaaaagcaacataattaaattntcctttcctcaaacgtgcttcaattctcttgccagcaaacactatatcttgcaaactc

SEQ ID NO: 178311 - DNA, 103 bp, Glycine max
gaggagggaaggatatttgcccgtcatgaacaactttcttatattacttgtccttcagattttactgcttctttttgctaatatgtaaatataaatagtataa

SEQ ID NO: 178312 - DNA, 442 bp, Glycine max
  unsure (1)..(442): unsure at all n locations
agcttgtaatccacagttgcataccccaatatggtgttgaatgtatacaatactctaatccttgaagttggtccagtggtgggatgtttatctccttaggttttgtagctgccatgatcactacccactttgaaactctatacttccttccaaatcctactgctttatgaagcacactagaagaagtagaaacaacaccaagaggacaagagaacccacaaaaccctacccaaattcgaaaaccaagatgcaaggagaatgcaaattggtaatgtccacactgtcaatgatcaaattgattatatcatcacttgactaagacacatcatatatctacttcactgtctgaggaagcaaggactgagcatcgcgattctacaaaacaacaaaaagaattaatataacttnaaccacacattggtccatcttattttctaaaaca

SEQ ID NO: 178313 - DNA, 473 bp, Glycine max
ggcttgtggagattctatggaggctggatctttgagcttcaatgaggtcctttaatggtgattttccaccatggagatgcagcggaagtcaaaggagaagaggtaagaggtggcgccatccactagggaataagccatggaagaaggagcttcaccaccaagatgagccttggataagaagcttggagaggatgcttcaatggaggaaaagaaagagggagagaaagagaaagggggggagcacgaaattgaaggaagaaaaagggagagaagttgaactttgagttgtgtctcacaagactctcattcatcaaagttacaacaagtgttacacatgcttctatttatagactaggtagcttcattgagaagctttcttgagaaaacttccttgagaagcttctttgagaaaacttccttgagaagctagagcttagctacacacacccctctcataactaagctcacctcct

SEQ ID NO: 178314 - DNA, 440 bp, Glycine max
  unsure (1)..(440): unsure at all n locations
agcttcataaatcatcacttttaatattctctgcacaaaaacttaaatcatgttaatctaacaattattttctcaaaaaggaaaaattagaagaaaaattacaaattcctctataatttaaccccaaaatatacttataattagcagttatcacctatgcattggttcactctattgttcttatcaattgcatgcattctccctttcttaattatcatactccctatgaaaaattacatggaagcatctatgatattaagtctttaagagtgtttgggtgtttatgtttttctagtactctagtagctaacataatgaaactagatcctaggggtgtcacttctatattnttgggttntaagccaaacaccccaaaggattcattattttttatcttaaaaccaaggccatatntgtctctaggaatgtgatcttctatg

SEQ ID NO: 178315 - DNA, 473 bp, Glycine max
  unsure (1)..(473): unsure at all n locations
taggcaagttttagtgaagacgttagtgattaataatgagtgtgcatgcaagtgaagtcatgattcaatattctttctaaaagattcattttccaaatntgatagtaattgtttcggtttaatgtcttaacaccaaaaaaataaattttcaagacatatgtactggaactgtaaaagtatattttgttacacgtttttaatggtatacttgtctataaataaaaactagctaattaattgattgataaaaataaatgattaattttagataaaattataattttggtctctcatcattcttaaaccacgatttttattcttctatgttttattttgactattttgatctcttatttttttaaaaaaaaatctgcaataatttggtctaataatcttcaattttttatacctttatttcttttatctttatatttntattaactaaattattttttatgatatcttaagtaaat

SEQ ID NO: 178316 - DNA, 477 bp, Glycine max
  unsure (1)..(477): unsure at all n locations
tctgagtcacctgcggcatgcaagcttntatacacattaaatcaaagattcatatctatgaaaatgaaataatccaacaatgactctagtggaattgcatgaggataatactttcttgtgtgactctcttaatcttatatgtgggcacacagttttacctgaaaatgaaccgaagagaaactgctcggaccactgaattgaagaggtttcaacatgaatgttttcccgggaggcaccttgagggatgcagcaccatttttcattgcacaaaccatactccaagcttttagaaaagccttgtattatagtaacaagcaaaatttgatgatggatacgataaactagtgcactttgccaaataagtaattattcaattttaaacaagaaagtctaacaaaatgatttacttgagaatcatctgtgaggccatctccgatagctccataatccatcacattgaaagtgttcatgtttata

SEQ ID NO: 178317 - DNA, 460 bp, Glycine max
tcttagtttcagatgatgcaactgagtttgtagctacctcatgcactcctctaatgactatagcatcatttctggcgctaaactgcttggagttggaagccatcttctcaattaaatttctggctttagtaggagtcatgtctccaagggctccaccactggcagcatctatcatacttctctccatattactgagtccttcataaaaatattggagaagcagctgctctgaaatctgatggtgagggcaactggcacatagttttttaaatctctcccagtattcatacaggctctctccactgagttgtctaatacctgagatatccttcctgatggctgtggtcctggaagcagggaattgtttttctaagaatactctcttcaggtcatcctagctcttgatggaccttggagcaaggtaatacaaccaaccacttgccactccctctaaagaatg

SEQ ID NO: 178318 - DNA, 454 bp, Glycine max
  unsure (1)..(454): unsure at all n locations
agcttcaaccaaggagagatggacttttttttgtgctngaaagaatcaatgacaatgcttacaaagttgagctgcccggtgagtataatgttagttccaccttcaatgtctctgatttatctctttttgatgcagatggagaatccgatttgaggacaaatccttctcaaagaatgatgaggacatgttcaagagcaagggcaaggatccacttgaaggacttggaggacctatgacaagggctagagcaaggaaagccaaggaagctcttcaacaagtgttgtccatactatntgaatacaagcccaagtttcaaggagaaaagtccaaggttgtgagttgtatcatggcccaaatggaggaggactaaatgacaccactttgtctcaattntagagtgtntagtttgtctaaataatggcccaatccttgtaaagttggctgaccaaaaata

SEQ ID NO: 178319 - DNA, 460 bp, Glycine max
  unsure (1)..(460): unsure at all n locations
tgtgaggattctagacgaaagtaaaaattaagcattgtgatatattntagattcctcaataataccaattttcaagattttttaatattaaaatattaggataaatccaagtcccgcatcagctaaagataaaaccaagagtatatcaatgggtgcaactctcaccctatgagctaatttttggggttgggttacatccgcattctaagatgatatcagagtttatgctacatccatcaaaagggtcacccatcatattatccccgtactagtcccaaaagtgttgggtgggagatgtattgcgaaaaacctaagtcccacaatagttagagatataggcaagatagagtatataagtgggaacaaccctcaccttgtgagctaactnttgaggttgagttaggccaaaatccacattctaagagtttcaaacacatgtttatattgtagtttattttta

SEQ ID NO: 178320 - DNA, 410 bp, Glycine max
  unsure (1)..(410): unsure at all n locations
agnctgtcttgtngcaaangggatatttgtcattatgaaggtatagattatgatgaaacttntctcccatggcatggctaaatcatccggattttcttgctttagtagatcctatgatcatgaaatatgaaatggatatggaaaatgactttccttaacggtgagctaaaagaagatgtgtatatgacacaacttgagggattcacatccttgtctgatcgtaataaagtgtacaagttttaactaaagttttaactattcatttatgaattgaaacaagtgtgtagaagttgaagcattcattttaacaaaaataatggaatggtccaatcttcttagctatgaagaagaactttgtgagtacaaaaaggacagtgggggaattatatttatgtgtagatgacataaaa

SEQ ID NO: 178321 - DNA, 467 bp, Glycine max
  unsure (1)..(467): unsure at all n locations
ntatcattgcttagcaatgttatctccattgtattcgagcttaattgtatattctctctttgatatatttgaatattttattcattcaaattactgcttggaaagttaggagtggcttagtgatcaaagaatacttaggtgttcttgatcttaggggaagattaaaggtgtgtcagatgtaacgacccactgtcgttacatgaaactatgaactatctcaagcggaagactttattttaattcatttaaaaaatcttctcttaatttcattatgaaaatacttgtagaattttttcattttaaaggcccaaaagctaaaacacaagatatcaagataagaacatcaagtaatatatatacacaatggaaaaataccatgtgttctatggaataaatacataacatgatcatatacaacatcaaagcaatccanaccttctcangacatacatataaacaaaaacaac

SEQ ID NO: 178322 - DNA, 456 bp, Glycine max
atcctctgagtcacctgcggctgcagcttacgccgtcatgcattatttgactggcttgttaagggaaaaaagagaatgagagagttcttcttggtggacgaaaataagaagttatggcacgagagaagatagtatatccactcacttggggatcctttcctccattatcttccacacgtcttgtttccttcttgtattagtaagcctctcattatcatgagaggctaaaccactcattgttgggagctcagcaatcaaacactcttgatgtaatgattctaactatcaatttaatgttagatattattgtctcttttatgtgcttaatatcatgtttatggcttgaacacccatgctcatgtagtgttatagggcttatgtattggaaaattgttatctcctaagaactcgaaaagaacatctaggtaatccatgtctagggatatagttgtatta

SEQ ID NO: 178323 - DNA, 318 bp, Glycine max
tggtagtacttttcttgctccccctttacctgttgttgtataattttatagacatggaagagtaagtatgaaacaaaccattcattccattattttcaagttaactacttcttacatatataccatgtcaatgtacttcttaatatgaaatttttatacgttgttgtacatgaaatatgaaatttcttggtttaaaagaatataaagaaaataatatttttaataatacttatataattttttaataataatattttcattattttaatttttttataaaaaatcattctaaaacggttatctaaaaaaccgtcttag

SEQ ID NO: 178324 - DNA, 462 bp, Glycine max
  unsure (1)..(462): unsure at all n locations
agcttgccctgcactctgacctgcctgttggacctatcctctagggcatacaaatntgcataaaattccttgaccagggccacatctatgtgaccatcaggctgcctaatcaaggctntatgccaccgcctcctctcgagctccttgcggaactcgtcatactgcatgacatatagatcaacattcctctctgggaggatgtttctggcgtgtacgttntgctcgtacctctcccaagcaacctcggaaacaaatcttgtggtgtcataaggttcttgaggtcgagaggtggatgatttcctctctctggaggtcatctgcatcaaaagaatcacaggaaaagaaattaggcatgttttattgaagactacaaatagaaaaataaaacaggataaggactgggcgcttagcgagacaaactcgcttagcgtgcctatngaaaataacatgatacgcttaccg

SEQ ID NO: 178325 - DNA, 471 bp, Glycine max
  unsure (1)..(471): unsure at all n locations
tggcttctacatttgcagagctntactttagagatattgtcattttcttttgatatttttcaccaagtcgcttgttttgtagagtttgccttctatagacttcaatgaaggattcgttacaagattattggattgagcacttaccactaggccaaaagttatagttgatagttagggcacaactctttctacttaaaagtataacagcccaagtgccacgagacgactatgacttgacccacctgggcctccatcactggacaattgatgccacaacccaaaaaataggggttagtgctaattccttgaaatgatcgttgtctcacactgagaaaaaaagctatgtggcatactctgatttgagaggagagaaataaaggtacaaagagctgcatgtgctctatgtcctcgacaaaagagaccctagaagaatattctatgtaaaccttctattntcttctattatgtcat

SEQ ID NO: 178326 - DNA, 447 bp, Glycine max
agcttataaattatattcatctaagatgaaaattacagggaaaactaaaagaaagaaaaaactcaagcaagaagttagacatcagggaagattgattacccagcagtactagaccgtcccaaagaataacttccataagccccataagcactgttgcttccaagctacagatgtatgaagcaatatatcaaacatagaacaggaggaaacaatttgacaacttgaaaaactccagcacatgtaaatcttatcctaaactcatgttcgactagatagaagtacctgagaaccaccatagcttccataaatgtcaccagctgctaaatcacttgagcctccatacccacttgaatatgaatgtccacgtccatgtcttttaccatctctaccatcatagtttaggccatctgatccatctgctgaaacagggagatatggcagaactgg

SEQ ID NO: 178327 - DNA, 457 bp, Glycine max
  unsure (1)..(457): unsure at all n locations
ccttgaaaccaacttgcaccacccaactcatccaatagctattctatggtgggtatcggaaatcaatctttaatggttagagcgtttaaggcccaacagcctacgcaaaaacactaagagtcgtctcgctttttaaccaagagcaccgacgacgagaacgggcttgtgctcggccggatgatgccgctttgaagcatggtggtgacctangcctcaatttcctgtttttggtagaatgggtatctatagggcctgacgttaactgggctaactatggggtgaaggtgaatgtagtgatctgttgggcgggatgggggtagagtagttggtggttggaagatgggagcaaatttgtggagtagagaatgaatttcaagggatgggttggggattgtccgtggtggaggttcaacgtgaatatggaagaattcgctaacagcatcagtctgcagcatac

SEQ ID NO: 178328 - DNA, 425 bp, Glycine max
  unsure (1)..(425): unsure at all n locations
agctntgggttcataatcattattacacttcatattcacaatccaagtccacttacatgtgtaagcatttatgttccaaaattgttcttgtttcaacatcatccccatttccaagtcaatcgatgctttgtgcacttaacgtttttgttgggacacccaacaacaaaggtgaaagggctaaaatgccctccaccttttgcttattaaaaggaatagtgactcatccgtacgagtcattgtgcgccgcaatccttattctttctttgcgccattattcttcttcttcctattcgcgtttgtgttgcttattcttcctccattcgtgttgcttgtctccatcccgtcgtgctactccttccgatccttggttcttcttcctctggtgctaattcatctcttcgagggggtagtatttttaatagggg

SEQ ID NO: 178329 - DNA, 446 bp, Glycine max
  unsure (1)..(446): unsure at all n locations
agcttggaaaccaaaggatataacttgatattgcaatgtngatgcgaagtttaacttgaagtggccacacacaaccacaaggtgatccaggaggtgtatatgtcaagggctcagagcaagtcaccgatatacaatctaaaggtcaatcaggaataggatcaatacacgcatatcacataactaggtggagattattgaaaagaaggaatcagtgtaaatgcgtaatataaaaatcctttaaaattttatagttgcgggataaagcctaggctctatagtaatactaatacctttgttaggtggtggagatggtagaaccaaagtatatgctggtggtggagtctctgtcttcttcaatgatgaacctggaggtgatattctacgtgaaggagagggtactgttggtgatggacaaagcatgccacanagaatgaggtgctaaatct

SEQ ID NO: 178330 - DNA, 467 bp, Glycine max
  unsure (1)..(467): unsure at all n locations
ngagaatngcattgttctgtgattccgactctttgttctgattagttccactgcatcgaaacctgtggattctaaggtgctgcttgtgttgtttcngaggaaaaatcaaagtgctatggtgacttatgttgattgaagtagtggcagttaatgccatgacacaacacaacacaagacagtgtgagagaatcaaagtggcagttgctagttgttacctgcggtttgtttaaatatctaagcttcaaactaatgatagccacaaaaaaacacgacaaaggagttttctttttctttttttttctgatcgcagggatccccaaccaagcactgctccaagttaaattntaattatttttatcaactagtattttagtatgtaaaataaaatacccaaaatatatggttgagcctcaagccctacacatgttggtgtgtgtatatataaaaatcctgtttagatgacattt

SEQ ID NO: 178331 - DNA, 487 bp, Glycine max
  unsure (1)..(487): unsure at all n locations
acctcagagncacctgcggcatgcaagctngatgaattaattattcatttcccatttcttattcaatcgctcgagggaaattcctcctttattagcggctaaaccctaaatcaaaacttttgtgtggtgtgttgacttaattgagtgaagaaataacataatggtgaaagcatatacacaggatcacgtctacaagcacccttgggaacgtgtaacttgtgcatcttttgacgcagtttgctgaccaagagaacaaacgtacattatcacatattcctgatgttgacacattgaaccacagccctgtggtgattatttagtaagtcccctcgcaatncaaattgcaatctgagatttatctatgccataatcatttgcatatattaacttctttcataacaatgtattaattagctatatatgcaagccctaactaagaagaactcacgctgcttatgtctgttgtcttttgggacaatctggatgt

SEQ ID NO: 178332 - DNA, 479 bp, Glycine max
  unsure (1)..(479): unsure at all n locations
tcctatgagtcacctgcggcatgcaagcttgttggaagcaaattgacacctctttatgcattgtcctatggntctctcttggccctacccttcaagcacgatatcaagcttttacaatatgttatgatgtatggaccaaggccaagaaagtttattccaacaatgtttgtcgcttctacagtgtaatcaccaaccaaatgaacattaaagatagagaacatggacatgcaggcatacctcttggtaagctagatcatttaattgcataatattccactcttatgccctttactattgatgcaaagacattttactaacaacatgggcagttcttcatagtggttgctcttgtcagactcacaccagaccttgaggcaatctgaatcaaattttattgagtcccatggctcctacatatgacttanttcagaagtagttggtgtgtctctcattccatatacctgttgacacttttcaca

SEQ ID NO: 178333 - DNA, 485 bp, Glycine max
  unsure (1)..(485): unsure at all n locations
acctataaatctcagctgaatccacnagaanatccctggcaaacaagatgctacaccaattcgctgatggtattgctttagccgctaaatcgacaagtggatccattttcaaacagtcagaaatggcatgatcaatggttgtgggattccataaagcacacacatcatctagtatgccacaaatggcctctataaagaagtgagttgaacttgaggtagtggacttgatccgaagagatttgcctaaagacgagtcattagcatgacaatctagtgctttggtcgatttcggatgtatgggcacaaacattggaaaatgcataataattcaaagttgcaaaaaccataggggactataggcactgcatatgttcggcttagctttcattctttctaaaagtggaaagataaatctataaaaggatagaacttgtttgaaaccaagacgtaatgggaagaggataactatcatgatgggggtaatg

SEQ ID NO: 178334 - DNA, 456 bp, Glycine max
  unsure (1)..(456): unsure at all n locations
agcttgaggaatcttagggaaccactagatacaccactttcgctgccgaactacaaatataagcccatttagaggtaagggatgacttactcgcgcttggggattaaaaggaaccatgtgcagggatccttagaggaataaatttggttattttgggttggtttatgaatttcaattatgttcttcttattntatttgcaaattgactatgtttgatgaaccaattgatgtcccgatgcaaaattgttatgttattatgttcggcgtgaaacctagaaattaagccttttctaattagcctaaattgatgaaattaagtaaggagagatttatcgtaagacggagtgagattttgattttatttagcttgaaattatatgttgcttcatattngtattatttaacataagcgcatgtctatctactattacgttctttaaagttaagtgaaacctt

SEQ ID NO: 178335 - DNA, 464 bp, Glycine max
  unsure (1)..(464): unsure at all n locations
agcttgttcctatgataattatgattagttttactctaatgacaataattaattntgatataataattaatatatttacatatatgaatttttatgaaatttatgttttttatttaaaatttatatagataaaaaatactttattatatcaaaatcaattataataagatcaaaaaatacattagtagatttatgttaataaacatataatttttatttattatttatatatataaatatattaattattatatcaaaattaattatttaaatttacatacgtattaaatttatattaaaagctttaatattatatataataatattaattattttataataccaataccgcgaaaattacaaatntaactcttgtttgaactattaatttaactaatctgtagaccaatttacgagtgtacgtaacaacgccccgatgatgaaactagttatacaccaagctc

SEQ ID NO: 178336 - DNA, 433 bp, Glycine max
  unsure (1)..(433): unsure at all n locations
cgcctcanagaggtccacgaaggacaaggcagcagacggaactatttccgctccggagtatgatagtcaccgctttatgagcgcggtacaccagcagcgcttcgaagccatcaaggggtggtcgtttctccgggagcgacacgtccagctcatggacgacgagtatactgattttcaggatgaaatagggcgccggcggtgggcaccactggctactcccatggccaagttggatccagaaatagtgcttgagtattatgccaatgcttggccaacagaggagggcgtgcgtgacatgatatcctgagttacgggtcatgggataccgctcgatgccaacgctatctgccaactgctgagatatccgatggtgttagaagaaggccatagtgcgactatggccagaggatgaaccagtctgatgggttctatg

SEQ ID NO: 178337 - DNA, 371 bp, Glycine max
  unsure (1)..(371): unsure at all n locations
aaagctgcaactctcgctgagccaggctctgaccagcttatctaaaatgatgcatcttaagtatagaggagcatgcgcatatctaataaggacttgcttancgcttacattgctgcggagaattcagcttaactgccatgacggcacatgccttcataaaccaaacgtatggtcataaggaatataccttggtgacaataagtgatgcttagccaaggataagttgtcgcttagcgatcaggctaaagcttagccgaattcatatcgaattgaagttggcttagctcatccttggccagcttagcggaccaaatcagcatcagatgaaagggttgggggctaagcgcttattactctcagcttatcacatg

SEQ ID NO: 178338 - DNA, 454 bp, Glycine max
  unsure (1)..(454): unsure at all n locations
tgcagacgtcttctccatcttctgtttctcaagatattataacaaataatgaaactgcacaggatacaaagcctacagtgtcaatgctgccccttcgtccagtgaatcctgttcaagcaaatgtgaacattttgaacaatctctctcaagcacgacaggtgatgaactctgctgccttaagtggtggaacctctatgggacttccgtcaatgggtcagactcctgttgccatgcacatgtcaaacatgatatctagtgggatgacatcttctgtacctgcggctcaaaatgtattttcatctggacagtcaggaataacatcaatgactagttctggacctcttactgttcctgcacagcgttggacaanattcaggtctcggctcattaacttccaacacttctaatttgtcttcnagttcgaacattgggagttcacaaccattgggtaatc

SEQ ID NO: 178339 - DNA, 443 bp, Glycine max
  unsure (1)..(443): unsure at all n locations
agcttatggttggcagaggaagatttttttttatcgatcagtnctatgtgtcttatatctcttttataattctacattatcttaatttaaatattttttttattttctatcttcattttctcaatcaaacatactataaaataatgtttagtcacataaaagaatagaaaaagagaagagatctctttaacttctctagtttgtctcaactattggccatggtttgattgtgagaaaagaaatattattcttgagaaatcttttaaaaaataatgagtctcacacctctttctttttactttaattcaaatattgcgtctcaattctcttttcttcttttttccttcacacaaccaaacacacccaaaggaagagagaaaaaaaaaacactcattctttatctaatcttcgcctctttaatattggggatctcagggaaggga

SEQ ID NO: 178340 - DNA, 395 bp, Glycine max
ggaacaaaaactaagcttacggccaaagggagggaaattaatatctattttgggaatcacaacaataaatctatttaaaaattaagagactgacatttggatacctggctggattggaagagttggagtacgtcactcaaactgacagaagcactggagcatgatagaaggttaccttagagtcaggagctcatgccctctacaagtgatgagagtaagcacaatacatatgtgaaaaacgtcagcgccacgtgcattaagaaactgagctaactaaaatcggcccctatggatcataactcttaaactgttagacaaaccctctggcagtcttattttgcactgttaagtgctttctaagtggcatacaaacatacacattgactagtctatat

SEQ ID NO: 178341 - DNA, 465 bp, Glycine max
  unsure (1)..(465): unsure at all n locations
agcnntgttgcttggtttaagcaaagtatgcaaggacaaattctggctttgctttaagcaaagaatgcaaggacaaattcttgcctgctttaaggcacaagcaaagaccaaaagtctaaaaagtaacatcaaatcactttaaggaagagaataaatctctaatcctatgtaatctcaaaagactatctaattctccttttagaagcacatcaagcggttgaatcctaaacaagttttaaaaaactggcaatgattacaaaattgaaatcataactctttttttgttttttttctttcaaaagtacaacatctagtcattcatgtttctacagccacaaattctgcatcttcctgatcaagttctataggatgttattctccaatcggaattggagttttacctcaataatccgcataacaaaggattccatgaaatgcanatcaacaccgaggtgaaactccaat

SEQ ID NO: 178342 - DNA, 457 bp, Glycine max
  unsure (1)..(457): unsure at all n locations
ntaggcaaaatcaatcgacaataacattttactcagctgtccgattgtcacccgttgtatatcgagacgttcgatattcagaataaaagctctgagaaaaatctaatgacaataactttttactcggatgtccgattgtgtccatagtatattgagacgctagaaattcagaattgaagctttgagaaaaatcaatcgacaataactttttactcggctgtccgattgtctcccgttgtatatcaacatgttggatattcagaatagaagctctgagcaaaatctaacgacaataactttttactcgtatgtccgattgtgtcccgaagtatattgagacgctcgaaattcagaacggaagctctgagcaaaatcaaacgaccataacattgtactcggatgtccgattgtgtcccgtagtgtatcgagatgcttgaaattctgaacagaaactctg

SEQ ID NO: 178343 - DNA, 456 bp, Glycine max
  unsure (1)..(456): unsure at all n locations
agcttatctcactttgtttcttattttcttttcttaaaagtatttataaagaaacttatcaaaacaggtgcatagtgatatgaaaagagttcataataattaagaattctcatgcatggtgtattttttatgtatcatggtcccgttgataaatcaagtgaaacctatacaatccttttgctggtaactgcaatcttaagtcttaaccagttggaccacagaacaggtacgaggctttcagcaacattaacacttgtattgtagagacaaggattaagacgaaagggaccacactttattttatgcagtttacgtgtatttatatatacccctcatcactttcttttcttttcttttttatcacttactacaagaaaaatgacttataaatacggacaaaaactgtcactataaataaaaaaatatgtaggtaaatgtatgatagactntgtctta

SEQ ID NO: 178344 - DNA, 469 bp, Glycine max
  unsure (1)..(469): unsure at all n locations
tcagaaaaacccattgactgatctgaaattcccaatcataaccttttatatctgccttttgcttcatcatgtttgcagcacgatgcaagtgatgtttaagaactcctatcatagcttcccttgctgcaaatgttctatcaaatggatctaccactgaattccttgggagatagggattgtgcagtggtggttttttcccatacaagagctcatgaggagttgtttttgttgctgtatggaatgtggtattataccaccattcagccagagacagccacttcattcttttggattctcccaacacatgcgcctcaagtaggactccaagcacctattaaggacttcagattgcccatctgtttgaggatggtaagacgaagataatttttgttcaattcccaaagttntcaagaactccttccaaaaattactcacaaaaacaggatccctatcaataattatctcaact

SEQ ID NO: 178345 - DNA, 412 bp, Glycine max
  unsure (1)..(412): unsure at all n locations
agcttgcatcagtataacccttcagtttctattcagagtctccataaatgaggaattggtctttaggtcttcttaagtacttaagtatggacttaaccactttccaatgttcctcaccagagtntgcttgatgtcgactagttacacctagtgcataagcgaaaccaggacgcgtacaactcatggtgttcatgatagcgtccactgcactaacatatggaacgctactcatgagttctattgcttttagagttgctggacaattctccctactaagaggtattccaacacctatgtagaagcagatgactctgatgtttcgacgatgatcatgatgatgtgatgcaaatgtgctttgtaagtcttattcacgacaatgattctggaatacaagacacaacatcaagatgat

SEQ ID NO: 178346 - DNA, 471 bp, Glycine max
  unsure (1)..(471): unsure at all n locations
taatacanaagtgggtcactctcaaaagagactgttcgattaagctgagaatctagaaggggggttgaatagattctttgaaaatctttacctattcgttcttaacaccgattaaaaacatccccttaaatcaatcaaagtttcttcaaaaattctttagaaataagaaactattatttgggcccttaagatcaattccacaaccaatatgattacaaaactcagagtaatagagaatatgagaaatacataagactttatactggttcagtccaatctggatctacatctagttgttctaaatccttttagaacttccactatacagaaaacataagtacaaacattgttcacacacaattctttaatacaaaacaaatctttctcttgaatcctacgagaaaagatttagcattgaaaccctatcaattctctaacatcagtggcaaccctaaccaaatatcacaatct

SEQ ID NO: 178347 - DNA, 449 bp, Glycine max
  unsure (1)..(449): unsure at all n locations
agcttgttgtgaaaaagacgcctaagatttttatttataatgagggatgcatctaaaccaaattaacttactcaaactaatatggttacctggggagttgtaaaaaccataagcttgtctgaaggaaagttcccgagttcgtatcatttcaaacaaggttgtccacataagaaaagtcaaccaaatgcaccttatcaattcccctcaccaaattagggaatttgtcatacgaagttgattaattttttttatcaaaataaatcttattttatttttaaatacatcagtatcacataatacatttcagacaaataagatatattataaaatatcagaatgacaccattctttctattacttatttcgaagtagttcatagttgtctcacatctgtaaaactgaaatagatgaaagaaatctaaanaagactaataagaaaactcaagata

SEQ ID NO: 178348 - DNA, 452 bp, Glycine max
  unsure (1)..(452): unsure at all n locations
tgggatanatcgttgctgtcatagattatccacgtttactttcttgtgtaattattgatcaagggaaaacatatttttgaattctacgtaaatagttcatacatggatctatacctcacctactccaatatcatctttgttacaatggttacacgtactaagcttagaatctatgactttttaccgttacggtgactttagtggattcttgaatatcattaagttattcataaattaaactaatgaactatttttgtaataactcaaagtctaaactacccttttcaaaaaaaagtctaaactattttaattaatcaattacaaatgatatagttattcatttatctaatcacattaaggtcaattcgttacgaattaataaagcaatttgatataataatctactaactattctgtttatagatttgaaaaagaatatgctaattctttta

SEQ ID NO: 178349 - DNA, 360 bp, Glycine max
  unsure (1)..(360): unsure at all n locations
agcttcaacgatgactattgatcganattgtatctcacgaagctcaatgtgtcatctgagtgaagaagaggtagcctatccatatactcttacgacaggtactacattttgatcatacgccatttttgttgccactataaccaacgcctctattttaccctctagcttcttaatttcacatgatgaagatgaattcatggctacctcattcgctcctctaacgaaattagtctcatatctggctctaaagtgatgggagttggaagctcttcttatcaattaatatctggcttcaacaggggtgatgttacaagggttccaccgccggcagcatgaatcatacttgtctccatgatactg

SEQ ID NO: 178350 - DNA, 454 bp, Glycine max
  unsure (1)..(454): unsure at all n locations
tcggaagaaagtgatgaggtacaagccctataggcagagcttgaaagagcccgagtagtcgaagagaagttaaaaaagagtatgatgaactaagggacgtcaatatggccaccgctgatgccttggaacgagaaaccaagaaggcccgaaaggaagaacacgaccaaagcaaagttttgaggggctntatagggcagcaatagtgagctcaagctccgaagaggtgaaaggaatcatcacgggtcaaaggcatgatcttgaaggacgagctaaaggccttaggtcgaaaagaaatttgtcccaacagttaagcgagactgaagggaatatgtgggccatcatcgataagtgcaaagagaagctaaatctagcggcgactcacgagcaaaggctagaggatgagtacgccaagatatcagcagaaagggaagcaagggaaagggtaattgattca

SEQ ID NO: 178351 - DNA, 433 bp, Glycine max
agctttcataagtgaaatcatgtgcaaccatctccctaagagtcctctcacgaggtggagggtgagccatgttctcagtatgaaaattagtagtggaatgctcaagatcagaatattcagaatcaccttcaacagaatgctcagaatgcacagaatgaccaggatgcacactatgcctaactaatctatgaaaggttctatctatttcaagatcaaagggttgtaaatcacccggattgcccttagtcatgcactatatttagcaaataatgtgtttctcaacaagcacctaacaagggggtaaaactacagctatactcatatgatatccaaatgagctgaaattttgtgaggaaccccctaaaatcatgaacagatagcacaaaaaatttcaaacacaaattcaaagtctaactatgaaaactacctaagc

SEQ ID NO: 178352 - DNA, 426 bp, Glycine max
  unsure (1)..(426): unsure at all n locations
tgagatgaggaagtgttgaagggtgaaacttcctgctnttattcgttgaccacagagtggtacctggagatatgtcgcgggggtcaggagaccttggggacgtcaggtggggtgctattgcccaaaaccaagcttgaccaatcccgacccaacccgagcatagtcagtcagtgagaacctgtgatgtacctaaacaagcgagctcctggcagtcaacagataaaaggaacaaagaccacaaagcaaggaggcttgtgtggtggctggccagttgtgaatcttgtgtgatatatgggttatggcctttggtaatcgattaccaagggtgggtaatcgattacaaggcttaaaaatgaagacaggaggctaagatggtctctagtaatcgattaccacggngtgtaatcgattaccaggcttgaaaac

SEQ ID NO: 178353 - DNA, 473 bp, Glycine max
  unsure (1)..(473): unsure at all n locations
tatgcgcatatttccttacaaacgttctcttgcacaagacatttaaccganaaaatgcacccatatacaatcaaggcagcttcgttacctagattatttacacgtacctccaaggtgtatttgttacttacatcacacacatctctttggctaaattcacatgcatgcatactcaaagcattttggggcaccaaaaattgcacatgtgcacatcttggtgtttctaatacctatacatacgcaaacttcatgatgaatcttgactatccacacaataaggtgctacatttcatgctctttttttcaagtttttgctacctaaagccgcatgcaaattcaagcatattttcctttgctgactaaaattgtattcaaattaaaaggtatattttttgtaatatgttttcttcacataacatgcaacgtatctatatatatttttttgtgagacattctgactaccaaacattata

SEQ ID NO: 178354 - DNA, 448 bp, Glycine max
  unsure (1)..(448): unsure at all n locations
agctnttatgttggcattaagtgctactgcttatgtacgacgaatagggaagtgagcttcaaggtgttcttttgtctcttgccatgggatttacatgaactaagccgaatgtacatgtgtacgcatattttgatgtacaaatcttgacttctagcgcatggaagaatggttatggtttagtttcgtttaggctatacaaagtaatggttagttgtaagcagcttagaagagtaaatatatacatacaccacaattagtcatattagcttttttgaaaacgagccacaagaaatgtgtctttcaaatgaaaattacagtgattcttgaatatacatttagtcgttaaactaattttataaatatgtttaaattattccaagacgaggactaatntaattgaagaaacacgtattcgcaggcagaagctacacaagcatatttcatcatg

SEQ ID NO: 178355 - DNA, 463 bp, Glycine max
  unsure (1)..(463): unsure at all n locations
cgtcgctagtgttagtcgatgagtatgactaactnttgtgtataaaacctgtgtatattgtatcaaactttcccaatttatggttgttttgtaatactataagtactttttgtaaatataggtaatagataatttatacttttgttttgtgcgtttaataatcaatttctctcaatttcaggttaaataggcaactttggcaaagtgttgtttttcactcttttgctaagccaagctgctggcttagcgagaattcgctaagcgcaaccttcagcggctaagcgcgaggaagaatccagaagaagatgagctgtcaagttcgctaagcgcaccgctccaggtcatcaagtgcactgcttcagctcatccgctaagtgaaacaagcgtgctaagccaaaatccacttatgcgcgctaagcgatccagatctgcgctaagcacacgagcatgaacaaggccacct

SEQ ID NO: 178356 - DNA, 301 bp, Glycine max
ggcccttaagtctaatatttgctgacccttccgagaaggccatgaatctcttcggggccgagtggcgctgtcatcacttggtcttggatgacatatctgtaagttgttgactgcggttaaagtaagagcatagcgattcatccacatggttgcctcttggtgtaaagagtccatcacccttcctctagcctgtgtttacgcatatacttgggcatactcatacgcgattctatgctcgtgggccgaggatacatccaactcttcttggtacttggcgatgatagctaacatgttggtttct

SEQ ID NO: 178357 - DNA, 472 bp, Glycine max
tcacaatgtagttctacatctttgcagataatgcagactattgtatttctcgggccagctatcttcttaactcaattgagccacgctaattctcctgtgatggctgttttgtgtatgacatgcagtcaggtttgcttcttgttttgtatttgagatatttttaattctgagaaggcagtctctttgtaatcctaacataaaatctgcttatatttgtgtctcttcttatatgtttctggagaaagttacttaatacttgtataaagtttctttaatttaagtatctcacttcaataattttattatgatttttagttcatactgcataatctgaaaatttgactggcaaatataaattttcttggcaatggtgtcttggaacttctcttgatgagcataactacacattctcattttgctaagtcttcatataaagttagaaagtgttggttcatccattcattccattgag

SEQ ID NO: 178358 - DNA, 74 bp, Glycine max
  unsure (1)..(74): unsure at all n locations
agcttgtaacgtcattggcaataacgggatcgtttattccnncattggcacaatcgggacggcgatgatatagg

SEQ ID NO: 178359 - DNA, 475 bp, Glycine max
tctgacctatgaagtgatgaggaataattgttaatcgtttgacataaagatttaaagttgtactatgatatacactaaactaaaaccaagatactgtagtcttgcatgtataaagacaacctaacttgtttgttacatattcaaaaaaaaaaaaactgattctgatgtcaaacaatttagataataatttttaaaaattttaagaaaaggaagaaactagtttataactattttttttttatcaataaatgttaattattagtttgttaatttttgttaggagggaggatcgaatccacgaccttgccccccttctactctttcttaaccacccattcaaccttatatctcttaatttatcactaaatttaaagctgattaatttagtgattattttaaagattctgaataattgcctgacatctttgtcaatctaatataattataaaaattcctgaaactgtaatctgtcact

SEQ ID NO: 178360 - DNA, 413 bp, Glycine max
  unsure (1)..(413): unsure at all n locations
nagctttcatctagccaagagtatacaaaatgtgttttttgagaacctaacaattcctaattatgtgggccatcaaatctatcatgtgctgacagtaattgattagcccatgaatctcctcgggtgcagtacacacttcggccatggcttttgctttggctaacagacgcgggaggtcttgacttccattcaaggtcaaggcgaacctatccatccacatagtctcttcttgatgcaacgcatcaatcaccctccctcttgcttctttttcggcatacacttgtgcaaaatcctccactagctattgttcatgggccatggactggttcaattcttccttgtattgccctatgatagctagcatgctttgctccgtggctttcaagtgttgagccaaactccttttggacctc

SEQ ID NO: 178361 - DNA, 474 bp, Glycine max
  unsure (1)..(474): unsure at all n locations
cgagtaattaatcttgtcgcttatatggattgttgtacaaaatacaacactgcaccaaaccaaacagcaaacaaaactccatgtctaggacaagaattatacatttcctatttaccatttatttgaccatttcacagatggtcaagagggaggcatattattaagtgattaatagtcatattaaattcaaatcatgattntgcactgtgagctgccccatgtaatactgccccaactatgaatggaaggcctagaagtttctcagtcatgacaattggacctagaacagaaggcctagaactttctcactcatgacattcgtgttagtaaacaaaattaattatactgataagtataacacaaaacttagtgcaatgaanattaattatactgtcaagtttcctgccaattggacttttgagttaatattatgccaattgttattcattntggttttcatttcatacaacttac

SEQ ID NO: 178362 - DNA, 449 bp, Glycine max
tgtggcagaatgcaaaggtcatggcagggtgtgtaacattctgatatatatatctatatattattagcaattatgtttgatgtttgattatttgttgcgttattttcatccgtaattatttttaaggaagttaatttagttaatagaggggtggatagataaggatgtagcttctcaaagaagcctcttgagaaagcttctcaaagaagccacgaggaagcttctataggaagcctcttaatgaagcttctagagaaagctacatgaagctgcctcggtaaaaatgctgcccagccttcattaaccgttggatcttctcgaaatttggtctgcaacttcaaaagacacttttccatgatctgaccgttgggatctttgagaagaagtctggagtgttctagaagcctcttaatgaagcttctagaggaagcctcttaatgaagcttcta

SEQ ID NO: 178363 - DNA, 428 bp, Glycine max
  unsure (1)..(428): unsure at all n locations
ngcttaaaaagtctatgctaattagttgttactaatttattcccttgtgcatgtggatgcaattatgcattaataacattcttaaatgccaatctaaaaatatatatatatataaaacataatcagtgattaatgaattataaaatgctatgtacaaaaaaatgatgttaacattacatgagattaacactactaatggtttaattttatccaactattatgtgtactcataaaaaaatcattcatttttttctctatcttattttcccacattctctctttatatatagtccttaaaattatatggccggtcaattggctctaaaatataagataacataatacacttttttcctaatattaaatcttccaattatgcctaagtttttctggtaggtaagcaagatgcaaaaaaaatcttgagacta

SEQ ID NO: 178364 - DNA, 466 bp, Glycine max
tcttcagcagtgcattctgactgtgacgtagggttggaaagagaaagaataataggtctctgcaagcattatcatataataaattgcttagcctatgttaacatgaaatcaatccatggtaggtacactaggtagataaaataggttgaaatagtaccttgttaatagaagccattgcctcaatcacttctttagtaaaagttcttccttgtcccgatgttccaatcaacactgttggcttaattttctgagaagataacattgaccatttaagaacattgaaacttctgctatgcgtgtggtgtaatgaacagaaagataaaaaaaatcatacattaacagcatctagaagatttttaacaggttcatgctcatgagcccagggcttcttaaaatgttggagcgaatctttgcgagaactgacaatcaatccctggtaaagaaggaataacagattaatcagatg

SEQ ID NO: 178365 - DNA, 364 bp, Glycine max
tgtatacctattaattgttctaccaacaaattattgccattatcaccaacaaaaatacaactactgtatatatgcctctcttgctgcctgttatttccttaactaaagaatgtaattgatttgcgggttgggttacgttgtatgtgatccttgtcaaaatctaattgcttaacaacaaaaatatttggctatcgaaataggcatctacccactttaatagatagtccttcataatttacttgcattagagttagattacaagttagctaaattaaataagactaatgctcaagtgctaaatcttaccaggcaagcatagaatcaatgatgagagatggagaacacaatgatgcacgaaaattaa

SEQ ID NO: 178366 - DNA, 316 bp, Glycine max
  unsure (1)..(316): unsure at all n locations
acccccccncccgaggggttgtgctcgtgcccggaccaacacaccaacagggaccgcgacggcaggagccctttttttcggcccacaacagagggagagagccgcccacccgtcccagcaagcagcgagaccaacaacccaagccctcggaagccgacgacagcaacaccgaagagaatggaaaggcaccaacaaggagcggcaaccacagagcacacccacgcgaaacgacggacgcaacaccgatagagatggagggaacagccaaacacccatcaccacacacgacgacacgcacgcgcaacgaggcgggcaa

SEQ ID NO: 178367 - DNA, 440 bp, Glycine max
  unsure (1)..(440): unsure at all n locations
agcttatgcgcatacttctttacgaacgttcacttgcacaagacattcttataactaagaaaaatgcacccctgtacaatcaaggcaccttcgttacctagattatttatatgtacttccaaggtgtatttgttacctacatctcatgcacttccttggctaaatttacatacatgcgtactcaaagcatntggggtaccaaaaattgcacatgtgcacattccggtatttctaatacttatgcatatacaaactttgtgatgaatcttggatatctacacaataaggtgatacatttcatgctttattcaagtgtttttgctacctaaagccgcattgcaaattaagtatantttcctttgctgactaaaaatgtattcaaattaaaaggtatttttgtagggattttttttacataacatgcaacatatatatatttt

SEQ ID NO: 178368 - DNA, 466 bp, Glycine max
  unsure (1)..(466): unsure at all n locations
tcanaccatagcaactcanaatctaggtatccaaaacctctcaatttaatggattttcaaggtttgagaagtgaaattgagaatgaggtaaatttggagcaaactctcacctcacacaagtctataacatcaatttaaactttctcaaactggatttacacctaaaattccaccgaatcaaaatttgactcctcaacacccaattttaccctagaaatggctctttgttcactttggtcatttgtctttctctctagcacatcccaaactttctcataagtcctaaatgacatttcaaactaggattaactccctttaacctccaaataccactaaattcagatttggccttccaactctcaaagcctcactctntttccactcataacaccatactctcactttctaaccctaggttaactctacccttcatctctaacacgttttcataagcaatttcagcata

SEQ ID NO: 178369 - DNA, 465 bp, Glycine max
  unsure (1)..(465): unsure at all n locations
agcttgaggtntggtgtcggagatcaaatgatacatttttcttctccctctgatgttgtttggcttagccacaaagtggtaagcacctcttcttcctcccttgggtttcattttcattntcattttcctcagagtacccatggaagctcatgaaaaaactttgtttgtgggtttttgattctatttgttgtcatttttggntttgggtgatgttgttgtgatgagcctattgttggtgtaatgaccctccttgtcgctaagatatcaccactctaaactacgaaaatttcaatttttaaatgaaaactccgttaatttgcttatgaaatatgaaagtaaatttttcacgatatacatatatcaaacaacgcacaattacttaaataaatacatatatagatatagtaactcagtatgcatcatccacatcatggaaagtaaattaacttatacatataattaaat

SEQ ID NO: 178370 - DNA, 431 bp, Glycine max
ctcttgaagattaggcctcaagagtgcctatctatagtacgctaataatgtctcccccttctcaatgatcataggggtcttcatgaatgtgtcgagggcgttttcatcaaattttatcaaataacctctgacccgcacctgctttggtgatttggcctctggatcatacagagtaacatataatttttttactatggcaaccataatgctgccttccttaatgatgggcaattcttcatcccatcttcttctgtctaattcttccttaacatcatcaaatacagtgtggtagattaccacatttctctctgaaacagcttcttatgaacaataatgtcagtgtacctctcccaagcttcacgagaagtgaacctggatcagtatatcggacctggaagtgtgcaggtgtcttctctttttgacgcatttga

SEQ ID NO: 178371 - DNA, 374 bp, Glycine max
  unsure (1)..(374): unsure at all n locations
tgcttctacatgtaaggaggatagtgtctcctcctaagtgttagctaccaaggacagacatgttgaaatacatacaaatattatagacacttcccctatgtgacaacctccacatnttctactttgtaaaaagacacttggtagcacaaccacacctctagggcttgaggctattcctcacataaaggagtagttggatgagggttcggttcgtgagagcttacccccttgtgctctgattgtgccctatataggtgttgttagacaccaaatcccttacacaagtgatatgatgaatgggatgagtgatgcatccctctatccgtaaaccagtcgatgcgcccgacatcatcatgatctcatgtcatagggac

SEQ ID NO: 178372 - DNA, 438 bp, Glycine max
  unsure (1)..(438): unsure at all n locations
agctntgcgaagtgaaaaataataacttatctactgtaaaatatctcanttaattaacccacttcaaactaatgataaataagtcattacattttcattttataaagcttttcactttaaaagagtaaaatctgtctcagatgataattgatcttataaagggtaataattatttcttttagttaattgatttattttgttgatgtacatagaataattgttgttaaatcatacctgcgggtgatcaatctgacacattcttttagtttaatcccccgcatcttgcaatcgaagtgacgataaccacacataatttttcacttaacagttaaaaaaatggaaaggtgtgactcttgcaacaaaccataaggcacaaggtaaaaaaacagttatgattggtcactacttcgaagaatagccttatttgattatcattgt

SEQ ID NO: 178373 - DNA, 398 bp, Glycine max
  unsure (1)..(398): unsure at all n locations
agcttctcattcagcagtgatgtaggttggagggtgcancatatgtggaggagctcatgagtctagttgttgcatacccctagatgatgctacaaagaaagtgaattatacagggaatcagaacatatagggattccatgcaggcgatttttcaggttaccaacaaggtgcaaattttaatcagaatcaagggcaaggatgaaggtcccatccagagaatcagttcaataaagaccaaggaggaccatccaatagacctcagaatcaggggcctagcttgtacgagaggaccaccaagatggaagagactttggctcagttcatgcaagtttcaatgtccaaccataagagaactgagtcagctataaagaacttggagatctaagtgggacaactag

SEQ ID NO: 178374 - DNA, 443 bp, Glycine max
ctggagaaccaagccaatcagaatgctagacgaaatatatatgggaatataggtaacaatggcggttatgacggaccgaggcagaaccgggttgagggagtaaagctcaatgttcctcccttcaaaggtagaagtgatccagatgcctacctggactgggaaatgaagactgagcacgtatttgcctgcaatgactacactgatgcgcagaaagtcaagctagcagcagctgaattctccgactatgcccttgtttggtggcataaataccaaagagaaatgttgagagaggaacggcgagaggtagatacatggactgagatgaaaagggtgatgagaaaaaggtatgtgcccactagctataacaaaaccatgcgacagaaactccaagggctgtcccaagggaatttaaccgtggaagaatattataaagagatggaaat

SEQ ID NO: 178375 - DNA, 433 bp, Glycine max
  unsure (1)..(433): unsure at all n locations
agcttgcacgtgtattgactgtatattgaggattctttattnttagntntttatctttctgtcaggggagtttcactaggtcccatgtcaaccctctaacatggcaactaaaaaatatgagttacgtaaggataggtcattcaagtcttntttctaattgaatccagctagtatcactttcgtacagtatccttcttatcacggtaatgcgaagtgatgaataaattaagaggtttttgttttcttacaagggtgattaaattgaataagtttataataaaaaaaatattattattttaattttggtttgtgagttgtacttcatatatgcaacttaacttttatcataaaaaatagagaaattgtagttattaaatacagtttatgttttttntaaataataatagggttaaaataattaattttgaagtgc

SEQ ID NO: 178376 - DNA, 463 bp, Glycine max
  unsure (1)..(463): unsure at all n locations
ctannaattgaattaanaacgttcagtaactgctggtaatctattaccaaatatgtgtaatcgattacacagtgcaaattttgaattcaaattttaatagctgttgtaaatcaattttggccactggtaatcgattacatcctccggtaattgattaccagagagtaaatctcttgaaaaagacttttttaacttaaatttcttggccaaaccttttgctacttcaattggaattcccttcctatttaatgtaatcttcctaagactctagagactgtcttgatcatccatcttgaatatctttgatttctttgtcttgaataaaactttgagaagcatgtaatcctttggcatcatcaaaacatcagcttgatcctttgtctacaaccttatggcaggagagcagaaagaggagtttgaacctgaagcggtgctggctgtgaggagggtacagaaacagggt

SEQ ID NO: 178377 - DNA, 437 bp, Glycine max
  unsure (1)..(437): unsure at all n locations
agcttcacagctgaaagtatagaatggtcattaacaatatcctgaaaaagatcatactaaaaccaaactgcacaccctactcacacgcctaagatcactggcgactagaccagttggggtagagagacccctggtccatgtggatcctgctaccgggaaagcagatggtccctacaaaaagaagttaagaacctatttggggatcgtcgctcgtgataaggtgaatgtcacatacgagaattggaagcaagtccctgctgcttagaaggatttgatatgggaggatattcangtattttagttttcatgttgcatattgtttattaaccaaaaattcaaatttagtaacaataaaacgttatttttcgtttgtcaggctgaatgtgatatccctgaagcatctgatgttaggataaaaaagaaaatacttcagacta

SEQ ID NO: 178378 - DNA, 471 bp, Glycine max
  unsure (1)..(471): unsure at all n locations
tgtatgagtactgggaaagattcanataattgtgtgcattctgttctttcaccagatttctgagcaactccttcttcaatatttctatgagggacttagcaacatggagaagagtatgattgatgctgctagtggtggagctcttggtgatatgacccctgctgaggctaggagattgattaagaagatggattccaactcccaacaattcagtgcaagaaatgatgctattgtccttagaggagtccatgaggtggccacggattcatcttcatctactgaaaataaaaagcttgagggaaaacttgatgccttggttaatctagtaacttagcttgccatgaatcagaaatctgcacctgttgcaagagtctgtggtctatgttcttctgcagatcaccatacagatctttgtccttctttgcagcaatctggagtcaatgagcaacctgaagcttatgctgcatacat

SEQ ID NO: 178379 - DNA, 372 bp, Glycine max
  unsure (1)..(372): unsure at all n locations
agctnggctactccgattgctctgacagttaggatgctttacaccaccactctgagggattctagtccacggtcgaggagaggatgttacatcttgctcatccgcgaagcatacctgctggcagcagtcaaagctctccattgtcctcagatgcccacatcgaaggatgctcaagcgatgagtatttaacttgcgccctcataccggttctccgatggaaacccggttgctcgatgtcattgaaaatcaatcctcctgagttatcgctggtggtccatccactactacatttagaggataggagggcgtggcgtgtaatggaagatcaacaccccacctatactcatggagttgaagatacctcattgtcac

SEQ ID NO: 178380 - DNA, 469 bp, Glycine max
  unsure (1)..(469): unsure at all n locations
ntcttatatcacaaccaatatacgcgcactaaaatacatagaatgaggacctgaagaggtttttcttttttctttttactcaaacaacaaatgccccgtcagattcgaacataggcttcgtccaacgtacgagctcggacccaagaataatttgttatatgcacaatgtgtacacaacacaacaaaaacagtgtaatgtaaaataaaggaacaaaaaaaaaaaaaaacaacatataataagtgaggcatgcatgaatgttgagaaaccaccgaaaattaatttaattaaatgccagcaaggcactctggtggggtcactgggaaccttgacttatccttacaatagtcatagatgacatggttcacacgaacccacctgtaccttcttgcttcaatggagttaagggcttggtatgcagccccttcccaccagttacttgggttggaggcaccagttgcaggtcctggc

SEQ ID NO: 178381 - DNA, 355 bp, Glycine max
  unsure (1)..(355): unsure at all n locations
cagagtcacctgcagcgtcaagcttatcngaaggacacaggtctcggcttggattgggagaaaacaaccattgtagttagcgatgaatggtggcacatcaaaattcacgcctgtattattcaacgaaaatagagtatttgcgcaggccactcttttcttttgttgtttatgagtgattcttgactgtgcggacaaaattgcagctgcttactattttttagaagctcgcgtcaagaatcctaggcgataatcatgttggctatcactttgatacatgttacacatgaggtagttgagatgccaagaaatgaacgtgttcattagtgatgattaatataaaacctaatgaagtgga

SEQ ID NO: 178382 - DNA, 476 bp, Glycine max
  unsure (1)..(476): unsure at all n locations
ccgaannagcttttgggattttttcggtcttgcattagtcattgtgtctttcacccattactaaagatacttgaagtaattgaacctttcgctggaacatatcaagaagtaattctctttgtgctttttgtctagcacgcttctctctttatttttgtttctttcgcaagtcattgttgtaccgatacttcttcttaatctcaggatcaagaggaacaagggtgtcttccaaaactctacctcacatacatgaacaaaagcacactagaagcaaaggttagcacggngagaaaagaataaactatagaattttataaaagaaacaagtaatgaaaatatattgagacgcaagtccctgacaacaggaccagatagaaacttgttcaatattttgacaatcataccaattacacatgtatngaagtatcttgagaatataatttcccanaggagttgcacaatatcagactaattga

SEQ ID NO: 178383 - DNA, 458 bp, Glycine max
  unsure (1)..(458): unsure at all n locations
agcttaaataggtggtgttgtntgtgctcgtatgcttagtgcaactctgatccgcttagcgcacattagtgaatatcggcttagcgcatgcttttctcgctcagtggatggactgaagcggtgcgcttagcgggatgaccctttgctcagcaaacatgcatagctcatccttcttccagattcatcctcacgcttagccgaggaatgttgcgctcaacagatggctcggtaagccagcagattggcttagcgagtgtgtgaaaatcagcacttcacaaacttgcctagttaacctgaaattgagagaaaatgattattaaacacacaaaatagaattactaagtatttattacctatctttaactataagaacttataacactacaaaataaccataaattggaggagcttgatacaatttacacnaagtgtatacacaaaagttagtcgtattcatc

SEQ ID NO: 178384 - DNA, 459 bp, Glycine max
tgtttaatgtggtttgctccctcgctcctacatccacattcttaatctcagttttttaaacgtagttcgaaccctcattcctacatccacgatcttctcacaacaatcttttaggacaagctagacaaacttataagtcttcccttaacatgaccccccctctctcactagggtggtgacccccttttcaagctaagtaattattttcatcttaagaacctttacatatagacctagcattataattttaaaataggaaacaaatatctgatttataaaatatatctttaattttaaagagcatcctaaaaataagacaatatcctagagatttgaaattacaaatttgaattgtttcccaacaatccttccctaaattaaaatttaatttcatcttcaatcttcttggatgttcatcacacttccactttgcacaaaatctagtatggtttcctatat

SEQ ID NO: 178385 - DNA, 457 bp, Glycine max
  unsure (1)..(457): unsure at all n locations
agctnnggatattgttaatgggtcttttctcgctatcatntgaatatnttatgtttaggatggaattaagtttttattctataatttgaaaagtaaatggaatgataaatgcataattgttaccagtaaaaaagtaattttataagtaaaaattcaaataaattccgttatgtttcattttaacttatgttagatagtttcacaactaatataattttatttatttgattccattacatcccattttaacaatcttaacaaaacttaaaggagacaaaattttatcaagaaattcattataaataggtttatacataaatacttttttttctcacaagtatcctcttgcagagaatacttgttcgatggttcgatactaatataaacattttaacttagttaataaagtagtaacatattttatttgttgggaaaaatcctacacacaataaagatc

SEQ ID NO: 178386 - DNA, 461 bp, Glycine max
  unsure (1)..(461): unsure at all n locations
tctaaggaagttttctcaagaaagcttctcaaggaagctacctagtctataaatagaagcatgtgtaacacttgttgtaactttgatgaatgaaagttttatgagatacacttcaaagttccacttctttccctcttttattccttcaatttcgtgctccccccttctctctttcttttcctccattaaagcatcctcttcaagcttcttatccaaggcaattcttggtggtgaagctccttcttccttggcttattccctagtggatggtgcctcccctatcctcttctcctttgccttccgctgcatctccatgatgaaaaatcaccattgaaggacctcattgaagatcaaagatccagcctccatagaagctccacaagcaagcttccatcaagttatgaccatttgaatttctcgagaatcttcgtgggtcaatntccggcgtctccatatgtcat

SEQ ID NO: 178387 - DNA, 455 bp, Glycine max
  unsure (1)..(455): unsure at all n locations
agcttcccactgatgagagtctgctcactcatgttggcacagntctaatgatttcccccctctttttggatcgacaatgaagtntgtgtttgtgtatattttctctgattggttgtgaatcaatgctttctatttgcacagataaaggatggatttgctgagggcaaggatcttgttgtgtctgtcatgtctgctatgggtgaggaacagatttgtgccctcaaggatattgggccaaagaactagcttttggtgcttggtgcttgttatttctattttctatttaagcaaagatatttttgtaagccttttatattggtttgttcaagacctggcgtatagattctagtcagactagtcttaacaatgcgttttatggatgtggtgacagaaactattatcacatttttctggttttctttgtcgcctgtgatttattataaaggaggagtcta

SEQ ID NO: 178388 - DNA, 453 bp, Glycine max
  unsure (1)..(453): unsure at all n locations
agctttgaagaatccactacatgttggttataaacacaattattcctcaatnttcaaatgcataccatgactgcacaccaaatgaccattcacatatcaggttcatatcatgaggttcccaaaccaaaactctgcaagaagtgtcccttcaaatcgttcagtagcactataaaaaacaacgatgttttctaggagtagcaagctcgccaaatcagtgtttccatctcacagtttaagaacaaatgttgaactgactccacctgctttgagcatgacgagcaaagggaatcttcatgttgatgaatatattcctactcaccaaattgtcttttataggaaggctnntagaggaaggacacaactctgttgggaacattaaggctctaaatgaatgaaaatatctccttatgctactcttctccaccaagtagagttatcacctcatacgtggag

SEQ ID NO: 178389 - DNA, 442 bp, Glycine max
  unsure (1)..(442): unsure at all n locations
ntccaaatagtccatagctactttgaagcctaagatcatcctaccatccncaattaaatggtaaaacaaaagttgtctatatatgtttgggaacatacctgcaatgtttcacagggttcaagccaaagcaatgtccatggttgatgagtcaagctgagtgttggtacaatgctaattaccacagttccaatatgatgtacccctccaaagctttatgtgaaagggaaaccccaaaatcatttaggcgttcaggagagttgcataagtggccgtagtgaatcagacaaaaaggaatttggtgttagataagctgaacgacaattcggtgtgcctcaaaataaaatgaagctttgtgcagaanaaaacaaaagggatgttagttattgttggaaaggtgccttaattgcggtcaccccttggacaccttaattatgacctattt

SEQ ID NO: 178390 - DNA, 323 bp, Glycine max
tagcttgcgcaacacgcaactaaatctaattttgtacacaatgaagtcaacaaccaagtgactagctcacttccactaatatatacagatactactactcaacccgaagggatgagccttgattacgcccatcttatctacctaattaaacttacaaggccttttcttcctacgcagagcggatttcttctacacccaacaattttattaaatgtccaacactacccttgacaagttcgccttctctgcatggcggttctatttatttcttcattaaccaagctgagctgtttctttctggctgacgtcctaactgttgatgt

SEQ ID NO: 178391 - DNA, 393 bp, Glycine max
tgagatgaggaagtgtataaaggtgaaacttcttgcttttattcgttgaccacagagtggtacctggagatatgtcgcaggggtcacaagaccttggggacgtcaggtggggtgctattgtccaaaaccaagcttgaccaatcccgacccaacccgggcatagtcagtcagtgagaacctgtgatgtacctaagcaggcgagctcctggcagtcaacagataaaaggaacaaagaccacaaagcaaggaggcttgtgtggtggctggccagctgtgaactttgagtttatatgggatgtggcctctggtaatcgattaccaatggtgggtaatcgattacaacgcttaaaaatgaagacaggaggctaagatggtctctggtaatcgattacc

SEQ ID NO: 178392 - DNA, 457 bp, Glycine max
agcttaaagtatgcccgagtcattcatccctatgagatgttgttgaagtattggcgatcagaattgccattccttggattatagggttgaaccaagctcatgcttttacaaaaaggttcatcaagtcaagttgaaatatggaagtaaccgtcttgcaaaattggggcaaaagatgaatcgagtcacatcactgcttcgtctactgccaaacatatttaggattattgatgtccttgttacttccagtttcaccttgacaaagatgtcatggaccatgttgaaaatctaaattgattcaaccccatatcttgcgtaaaaattcgcaatacttcaactgtacatcattcgcatgcatccatgcttttcattggttgcattgctcgttgcattctttccttgaaaaataaaataaaatgaacttaatcatttgtataaaaaagaaagggacatgctttac

SEQ ID NO: 178393 - DNA, 68 bp, Glycine max
  unsure (1)..(68): unsure at all n locations
agcttctaaactntatacaagagtgaagctctgataccacttgttagacaagtggcctcagatatctt

SEQ ID NO: 178394 - DNA, 464 bp, Glycine max
tcctcggggccatttcctatgaagacaaacatttggaaagttagtctacatgataatgcttattttaacacacaaatgatatgctaatctttccgatttagaacaaactcatgcacacattaatgtagcacatttatgaacatgcgtatgtgtaaaatatcctactatttatgtcaacatacaaggacattcaacacattctagttaccacacatatatatatacatctttgaaaagaacacacattctcgtgctcaaggcattgtgtcaaaatttacacctaatcacatcctaaatattctgctatcacaaactacctatacatatttgaagtatttaacatacaaatttatgttgtttcactcacatttatttatatgcacattggaaagctaattacgtcatgcgcatacttgcatttgaaaaggaaattccatgccatctatatacatttgagggataat

SEQ ID NO: 178395 - DNA, 439 bp, Glycine max
  unsure (1)..(439): unsure at all n locations
agctntacagcagattgtagtaatgacccactattctataattaaaataacttaatgccattaacctatggaattaataaaaaaaaacttaatggctgagtgtaactgaaattgtggcaaccaaaagtcacccctaacagccaacaagtcagccaccatttggtctcccaaaaggctgatgcctaggttgccaattgggcccttattacaacttgaactaaacctaactaaagcccttttagttgattaacccaaaacatatttttggtcagccaactttacaagaattgggtcattatttaaacaaactaaacactctaaaattgaaacaaagtggtgtcatttagtcctcctccatttgggccatgatacaactcacaaccttagacttttctccttgaaactagggcttgtattcaaatagtatggactgcacttg

SEQ ID NO: 178396 - DNA, 454 bp, Glycine max
  unsure (1)..(454): unsure at all n locations
taagcaagtntgagatatgtcagatctcacaaatccagtgttctgtttcgtcgntcttttttaccgttaatatcttttgccgccgaaaaattgacagccactctcaaccgtctgatccacaaatccccaacatttgtgagggtccacctcatgcagtggaccccaccgacaccgttgctaatttccaaataatgaaaaaagtgttttttctctctttctctctctctatgctcttgtacgttcccccaccaccatcccttggagtcacaccaaagccactgtgattccattccatctcttccaatttctattttttttcttctctttttctctgaatacctctaaagtttccattnttctgacatgggtatctcttattttctctggttctcttaagttcaatcatctcttcttgtctctttggacttgtcacgtgtggggtgccatcatgtgt

SEQ ID NO: 178397 - DNA, 432 bp, Glycine max
  unsure (1)..(432): unsure at all n locations
ctttcaaaatcccgtcttatattaaaaatcacatatctagcttctaaaattaaaagaataggaataaatattcatggtgatttttatttttacatctttatattaaaaactattgttcgagaataatatctatctttatatgaaaaaaataatagttattaaaaatatttacttaattagtggggtgtataattgcccccataaatcagaacgtagatccatctttgagtgatataaatntttaaaaagtatttaatgtaataatatatttagaatttaaattcaaaatgtattaattaaactaaaataatcttacataagttagtaagatgagatgttgcagaccatcaaatgtgaagtatctcgttgaatacctcgttgtggtgaaaaaaatataatagagcacacctcatgcatgagtgtcgtaacact

SEQ ID NO: 178398 - DNA, 471 bp, Glycine max
  unsure (1)..(471): unsure at all n locations
ngccaataacctgttaacagcagccttaatgtgaacatcatgctttntccgtaaagaacaaaaccaaaatacaatattgtctcgtggacacaaaacaagaagttgccaatgtgccctgaaagtcaacaaaataaaattattttacttttaatgcaaagacattgataacagtctcatggattcacttactgattcaagtaaggtcctaagcaaacttctcgatgtgattccttgacccagttggcgatgtactattcacattatgtatgtttgtcctttgcacagtgtattgtctggggctcaagaaaaccataaactggagccaatcctctgcttgtactacaatcattcataaacctatttcatgcacggtaaacaatattgttagccatatattgtaaggaaaatttacttagacttacataacgataaataatttacttacatcatccacagatgtagtatagaaat

SEQ ID NO: 178399 - DNA, 451 bp, Glycine max
agcttgagcaaattcaaacgacaataacctttttactcggaagtcggattgagtcccgttatatatccagacgctcgaaattgaatgttgaagctctgagcaaattcaaacgacaataacctttttactcagatgtcggatagagtcccgtaatatattgagacgctcgaaatggaataccgaagctctgagcaaattcaaacgacaataactttttactcggatgttcgattgagtcccgtaatatatcgaaacgctcgaaattgaatgttgaagctctgagcaaattcaaacgacaataaatttttactcggatgtccgattgagtctcgtaatatatcgagaagctcgaaatggaataccaaagctctgagcatattcacacgacaaataacttttactcggatgtcttattgagccccataatttatcggaacgctcgaaatgcaat

SEQ ID NO: 178400 - DNA, 474 bp, Glycine max
gtgaatgatcaagagctggccttgatgcaagctctgtagcatagataagatatgctctgagctctgagcaaacctgtaagaactggagctgctagtgctagagggaggggagaggtagaaggagctgaaatatggggagctgaagtagatagggcctcagatatcctaaccttggaattttgggttccccgaatagtgaccgagggtcatccaggttccggtagttctttttaacatatgccaaattaatggcttggctcaagttctcgaaagtcaaagagtcagaggtgactccccgggccttgcacaaggcagtgatgagggcaggaaaacctagcctcagggagtcttgctgagcaataagagtaatctgactcgagatgaggtacccaaggttcatgtccatcttttgaataatcccatatattaacctggccctgtccaaagtaatatctaaagtgtgggacgtacggg

SEQ ID NO: 178401 - DNA, 372 bp, Glycine max
  unsure (1)..(372): unsure at all n locations
atctcgaagaaggctgatcacagcgggtatctcattgctncacgagaactacatattaaaggagcacagcgctcctcgtgatggcgcgttgcacctgcaaacgcaacccacaggctccaatggcgtgtccttcctgctttctacagtagcagcagtctgctgcagcactgtgcaccctgtcaccttctacaaagctaaaacgctagtttgactagcgtcttaagtttctcatgcacaatgtgccagtgcaccttgcgcgtccctctccacgtaagcagaaggccaagctgctgttgctactagcgcgtctctctccacggggcagctcctacgcgaaagcgccattggtggtgacaccatgcatggcgttca

SEQ ID NO: 178402 - DNA, 415 bp, Glycine max
  unsure (1)..(415): unsure at all n locations
tcatcatctttgcattccagcattgaggcgggtgggctggttttgcattccagcttcaaaatatttattatttcctattaaaaatatctattattaaaattaaaaaattaatatttatcataatttatgatttaataatgataataaaatatactctcagtatatatacatattattttctattactgttttaatacaaagctatataaaaaggcatagatattgtattagtgggtacttagtatttatatgttcccccgctattggtggtttctattcaatgttctgtatgtccagcatatcacaggtgaaggtgatgatattgcttagagggtcttgtggcaagtcactttgctttttccctcgaggagagtntctttttgttccacgagatgacagtggttagcattttgac

SEQ ID NO: 178403 - DNA, 451 bp, Glycine max
  unsure (1)..(451): unsure at all n locations
agcttgttgatgagaggactaggattaaatgatcggttatgngcagnactcatgcttgaaatgcccgaggccagtgctgatatatctggatgattatgactagaacaaaaattgatttcccaaagtactgatgcaagggcaccacttaaatagggatctgtggaatatggtagatatttctgcataccaaaggggagacaattccataaaagcattacagaaaaaagaatagtcctcactaaaatattttgcaatgaaattcacacgtttagcatttttgacataaaaaatatcatgcccaacttttctttcaaaataagctatctacacaataatgttttaaataaaagaatagcataatgctgatgcagactactttggaagcattctccctccttcccctttcttataatataccagattttgtcatatcattatctctcagaagagg

SEQ ID NO: 178404 - DNA, 443 bp, Glycine max
  unsure (1)..(443): unsure at all n locations
tgtggcatatcctaagctgatgattaaaacaacgtattataccaganaagctagaaggaaaaagagtgaatatgacaacctctttttatcaaaagtattattcaaacctcagatctggtcgctccaccaacaatgaatataaatattctttgccccattttcttgaaatcactggatgcgtgttttagcaccgaatcgctatataccagcagaaaaggatgaaaattaaatgtgagttttggaatgcaattccaacagatactcagtagtcccctacaaattattatctataatagcaaactgatgcaagtatacaacacaagtacacagctcagaagttgggaagaataataaggcagtggcaaagacagaacagggttcataaatgaagtgaaaaacanaactgatttcactagaagcgctcatcatattaatgacttgta

SEQ ID NO: 178405 - DNA, 449 bp, Glycine max
  unsure (1)..(449): unsure at all n locations
agcttgtntctgagtgtagagtgtatagtgtacacacactgataattctgaanatgagtgaattaagaaagaaacaacaactgagtggtggttgagagatgacattctttctgcagggaagagagaaacaatagttctgcttctccaaaaatgagtttaccttcaaattctccaaagaaaaaaacgcagatattcctgaatctaaatttattcagcagatttagatctttggttatattttttatattgaatcctttgagcattggtacgtgaattatattcaatgctcattattagttgtttgtactttttgacttactgccattttcagttcagacataatccaatgaactaaaatgaaattatttatgcatgaggcagaataaactcaatctttgtatnntatttatattacatttcanaatttgacaactatttcaagttaaatg

SEQ ID NO: 178406 - DNA, 437 bp, Glycine max
ggcaggttagatcaatgcgtctcgttactgaattttctttgttttacattctgggggttgaccttcagatataactaacaacctgtataatagaaactagaattaaaacatattttttacaaaatattcttctatgattaactaaactttcaaataattcagtttcctttaagacgtgatgttatgaaatttcagcatagatattacattctggagcacatagaagtaataatcataatttgaaataccatttttgcttttctgtccataattaaactactagaaaaccaagctaaacttagtacaattaacatttattgaagttataaaccttgagtgattttaaagacaacatgatgaaagcacaccaatcaaatatagatctattctcattaaaacctcaagaatattaccactctctgtcatcaatattgacc

SEQ ID NO: 178407 - DNA, 459 bp, Glycine max
  unsure (1)..(459): unsure at all n locations
agcttccatcaagtggtatcagagcacaatagcttcaagtaggtgctccttaaacctccattaattttttgctttaccttctcttccattgttttttcttcattntgctccatgtatctcctcacatgtcttgttctaaatgtttttaacatgattctttagagtttgaaccgattaaacttgctatagaagttagatttgattttctatggttcaaatttcttgttcttgttcttgaaccatgaattgtgttgagtttaggttcctttgagttttgtcttgttattttttgtggctgaaaactaaaccataaaattcttacaaaaatattaaagtagaagaaaacctcanaaatctagagtgacttgttcacctattgtagttttgtcatagaagtcatgtctagtcatgaaacttgtcacataagatttcttatgttgcgctgaattttattttctt

SEQ ID NO: 178408 - DNA, 418 bp, Glycine max
  unsure (1)..(418): unsure at all n locations
tctannacgtttgattntcataatttagaatgaaaagtttcttctgttgatgtgtaatcgattacaccttaatgatagtcgattaccagtgactgatttcgaaaaatagatttccaaaagtcacaattcttcaagtgacttgtttctgaagattttttcaaaagtcacaactttttaagtgactagttcttaaaagaaattgccaagagtcacaagctttgacttgagtcatcaagagattataaataattatcataatcaatcatctttgaatcatctatcttttacatcatcttctttcaacatccttgaatcaatctttcaatcttctctcaacatcattcaatatctttcaattctttctacagaagtttctgattctttttcttttcatctttctaagagtgttttatcaaca

SEQ ID NO: 178409 - DNA, 464 bp, Glycine max
agcttgtctgaggaacatacccaatggctttaatgcgttgaatcaagtctgcaagtgtttcatatatctgctgagactgtgggtgagatctgtctcccacataaaaggttgcaacacctttccttccttgtatccagctgcaaccaggtctcttcttgattccagtccgtttcatcgtatatctaatcctagccacatctttccagcgtctggcattagcatatatgtttgaaagcaatgtgtatgacccgtcatttccagattccaattctaacaaacggtttgcagcaaattccccaagttccacgtttgaatgtaaccgacaagcactaagtaaggccacccaaactactgtggttggttccataggcatttcatttatgagcctcatagcttcacctaaacgaccagcgcgaccccagagatcaaaccatgcagcataatgctctggtccaggatctacc

SEQ ID NO: 178410 - DNA, 468 bp, Glycine max
  unsure (1)..(468): unsure at all n locations
tagagaanacaaanatgaaataagcttcttatatgctaattatagcttatgcataagtctaaaaaatcagctttaatttagcatctgcaaaagttgattttaacatgtgtagcttctccaaaagctgattttaacttatgcataagctatttttagcattcaagagaagcttatttaattttttctctttctataagtacttatggatagacttattcaatcagggccctagtagaataagacttttgttgtatgttaactgtttttggctgataattcttgctagcttaatttgtagaccatatgtgtatactgcgtaggagttttgttagagcttcgggtaatgccatggtgggattattggttattagaaatatgttactgtatgagaaattatatgtcacacaaagagtcttggatcctccaatgagaaatctacgcacaaaatctatataaaaattactggga

SEQ ID NO: 178411 - DNA, 444 bp, Glycine max
  unsure (1)..(444): unsure at all n locations
agcttgtttcttgcaattccaatattaatatagcttcctaagagatggcattcccacttgtgtttttcctatctagtttgcaccctacaaaattagaatatgaaaagtcaattagatttaaggaggtacctttgggagtccataaataaacattggttgtgctcttaaggtacttaatgatccttttaacaactattaagtgagattccttaggattagcctgataccttgcacacaagcaaacagtaagcataatatttagtcaacttgcaattaagtaaagaagtgaaccaatcatacctatataccttgactcatcaactaatgtacctttctcatctaagtcaagataggttgatgttgccattggagtttatgcttctntgcactnttccatgccgaatttcttaattagttatgtatagtatttggntagacatagga

SEQ ID NO: 178412 - DNA, 375 bp, Glycine max
  unsure (1)..(375): unsure at all n locations
tgcttggttggtgtttcataattacggacagatatatattctgaanagcctaacgtaatttgataatattcggccaaagtgaaaaaaaaaaaaatacatagttttgatatttttaaaaagttaaaaaggtagatgtatctcttgatggagatcgagagtgtgttacaaaaacatacttcttcagaattaatttgcgcaaacacacatattactctatttcaacaaacaagcttaaccgtttaaattctaccgatcacccatttttttttccttcaggtagatttgaaatgattcttcatcacctcattgtgttgccacgatttaaccaacttggtcataccattaaaaagaaaaacacaaatatcatggatacca

SEQ ID NO: 178413 - DNA, 426 bp, Glycine max
agcttgagccttccacatattctggaatgtgacctgaaataaaattgtttgacacgtctataacctccaaagagctgcttgtcctgtcatttatgattgttgatagtgaacccaccagcagattagcatgcaaatctatggaagacagttctgttggtaatttgatttcagaaatgtcaaacctcagctggttgtttgagagcttgaccttttgcaagctggacatgtttgtgaagaaatttgaaataccatccaccagatagttatctgataggtcaatagagctgagagagtcaggtcttgtgaagtgtggaagatctcccttcaatttgcacccagctagatggacatctttaagctgcttgcttctgatccaatcagggtaaaatccaaggctgagattattataagacaggtctatggaca

SEQ ID NO: 178414 - DNA, 466 bp, Glycine max
  unsure (1)..(466): unsure at all n locations
ntgcggatntggtcttcaccggcagaaggatcaaagcttgtctgaaaagaggcaaatttaatcatcccacttggacgaatgaaaaaaagctggggcaaataaagagggtgaggatgaaggagaagcccgtgctgtgactgtcattcctatacagccaagtttcccaccaacccaacaatgtcattactcagccaataaccaaccttctccttacccaccacccagttatccacaaaggccatccctaaaacacccacaaagtctgtcttccgcacttccaatgacgaacatcacctttagcacaaaccaagagcaccaaccaagaaatgaattntgcagcgagaaagcctgtaggattcaccccaattccagtgtcctatgctgacttgctcccatatctacttgataattcaatggtagccataaccccaaccaaggttcatcaaccttcatttcttcgagaata

SEQ ID NO: 178415 - DNA, 456 bp, Glycine max
  unsure (1)..(456): unsure at all n locations
agcttatgtctangtgagtataganttgagcatacataatactcccaataatnggtgcatacaaaattgcttccatttgttttcattccagatcantttgaagacattgtgtgagactaaattgtctcctttgggaattggaatgggtgatgccaagcacattttcatcttgaatttctctagtactttattaatatatgctttctgagatgagcctaacaatccttgtgatctattttggaatatttctatccttatcacatagcttgtctcacccatatctttcatttcaaagttactagagagaaaattcttagtctcatgaagaagaccaagatcattagttgcaagcaagatatcatcaacataccgaattagaaaaataaccttactcccactgaccttcatatacatacatagatcaatagtattttcctaaaatctaaaggaaacaat

SEQ ID NO: 178416 - DNA, 449 bp, Glycine max
  unsure (1)..(449): unsure at all n locations
agctngaagtgagaaagtgtggaagagtcattcttccttcttttatttgttgaccacagagtggtacctggagatatgtcgcaggggtcaagagaccttggggacgtcaggtggggtgctattgcccaaaaccaagcttgatcaatcccgacccaacccgggcatagtcagtcagtgagaacctgtgacgtacctaaataggcgagctcctggcagtcaaccaataaaagaataaagaccacaaagcaaggaggcttgtgtggtggctggccagctatggatcttgagtgatatctggaatatggcctctggtaatcgattaccaagggtatgtaatcaattacaaggcttaaaaatgaagacaggaagttaagatggcctctggtaatcgattaccaagggtgtgtaatcgattacaaggcttagaaatggatacaggaagttgagat

SEQ ID NO: 178417 - DNA, 458 bp, Glycine max
  unsure (1)..(458): unsure at all n locations
ngccgcccagctcgcccaggcgagcagggttgcttcctccagaatcattagccttatggaggaatcttctggagggcccaagtgggcctggttgctatttgcaaccccatttttactaagtacaccccctctgctttttttggtgattctttttttgtaaagttacggaaacttacgaatttcgtaacgatacttgttttctttccgtaatgttatggaaccttgcggattacataatcatcccctttttgacctacggaatgttacggaacctcactaattatgcaacgatgcttccatttgatttctggggtgtcacggaaccttacggattgtgcatcaatattttcttttgtttttcggaatgtcccggaatttcacaaattgcctaatgatgggtgccaatcaccttacaaggaccaaacaaaggtcgcatgtcatcaagcaaaggtccccgg

SEQ ID NO: 178418 - DNA, 377 bp, Glycine max
  unsure (1)..(377): unsure at all n locations
agctntgaaggtgcgtagcccaccatntttcatagtagaatactggtaatgtgtctactatcattgtcatcggttntttgtcattgaggtgccactttgagctgcaggctcttcacctttgggcgtattctttgaaagattttgccccctttttgcacatgttctgtaggtgcatcctatccgaaaacattatactgacactgcctaacgaaggaaaccactangtccttccaagaatggactccggaaggttccaagttagtgtaccacgtgacagctacccagtaagactttcttggaaggaatgtatcagtaatttcttatcttttgcgcatgcccccatcttccgataatacatctttagatggttcttgggg

SEQ ID NO: 178419 - DNA, 476 bp, Glycine max
tccatcaacatgtagaggagaatcaaggatttcaagtcacaatatgtctagaactcttattttcaaaacaattacccatttcttgaacatatcctataattcaaagaaaaacatgcaaagtcgtacatgcacacagaattgacccaaaatattaaactagaaatccgacgaaactaacaacatttgcaaattaacacaactaacaaattaacaaaaccaacaaaactagcaaaaccaaagaacactccacccatacttaaacaacacattgtcctcaatgtagcacaattaaaagattaaaaacaattaaatcatcaaatagaatccgacaagtgtaataaaagcacagaaggagataggaaaagaaaaactccctaagtcatggtggaggaagagtagggtggagtaaggaagtctcttccaccactacgtccactaaagaaggggtcgtgaggaatggcttaagtcgatgtccg

SEQ ID NO: 178420 - DNA, 462 bp, Glycine max
  unsure (1)..(462): unsure at all n locations
gcttgttaccggcttcaagaagatgctcttccaattctttatctgctcccgccattggtggcgccgnctctgtctcttctttctgatctaacacggactctctctctcctgtttcactccattgatgccctgaaaacgccccaattgaatcgatttgagaagcaacgggaagattagggtttttttctataaaaaattctccctttttccccttttctatgaaaaaacaggacagagagaccgggtaacacaaaaaaaatctaaacaagagaaagtaatttttgttttacgggagatctgaatcaattcatggtaacggaatagaaagtaatttttgtgtgtgaaaaaaaaaaagtgtgcatatgtgtcgaacaatatgtatgtagcaaaaacagtgtatntaatgtgtgtgtatgtgagtatactgtgtaattaaaaatacttgcagaaaaataaaatata

SEQ ID NO: 178421 - DNA, 458 bp, Glycine max
tctaacacttgatggaagcaaaaacaaacactagaatattgctatatattagtaatccaagatgctctttctcctcacagtgaatattctattattgcttagacaatgaatccaaatatccattaaaggagtaacgacctgcggaacaaaagaaatttatgtggggggatgtatacagtatgatttcacaaaatggtacagatttaacattcatgaaattgcatactacacggaatttaggtcctaccgcttctgaaacaatgaaatctaatactaagagtaactgctaaggcctaagaggaaatataccacgcatcggaattgggcaattgtgaattgaagctcggcatccctcttgctgttcccttctcatcttctacacaaacaccggctctactccacacataccatcatatcatatgctcaataaccttgcaatacaagacctaaggaccatg

SEQ ID NO: 178422 - DNA, 458 bp, Glycine max
  unsure (1)..(458): unsure at all n locations
agctntgagcaaattcaaacgacaataccttttgactcggatgtcggattgagtcacgtaatatctcgagacgcttgaaattgaataccgaagctctgagcgaattcaaacgacaataactttttactcggatgtgcgattgagtcccgtaatatgtcgagacactcggaattgaataccgaagttatgagcaaattcaaacgacaataacttcttactcggatgtcggattgagtcacgtaatatgtcgagacgctcgaaatagaataccgaacctctgagcaaattcaaacgacaataactttttactcggatgtcggattgagtcacgtaatatgtcgagacgctcgaaatagaataccgaagctctgagcaaattcaatcgacaataatcttttactcggatgtgcgattgagtcccgttatatgtcgagacgctcgaaattgaataccgaagc

SEQ ID NO: 178423 - DNA, 463 bp, Glycine max
  unsure (1)..(463): unsure at all n locations
ntaagagaagttgcaagagaaaagacagaagcctcaatgtggttgaaactggactcattgtatatgacaaagtcccttgcaaatcggctatgcttgaagcaacaactgcaccttcaagatagcagagtcaagaacagccactgaacaattggctgatttcaacaagattcttaatgatttggaaaatattgaagtaaagcttgaagaagaggataaagctctcttgcttctgaattccttaccaaaatcctttgaacatttcaaggatgcaattctttatggcaaagatcaagacattaccctagaagaagtccagacctcaataaggaccaaggagatgcaaaaacggcaagactccaaatctgaggataatggtgaaagcctgaatatttcaaggggaaggagtgaaaagaagggaacaagaggaaagaagtctagatcaaggtcaagggattcacagaat

SEQ ID NO: 178424 - DNA, 426 bp, Glycine max
  unsure (1)..(426): unsure at all n locations
agcttgtgcctttccaagacatcacaataatcatggctctactggactttttctgatggctaaccagaagatgaagtagctaccttttgttgtcacaagttagtgtttattgttgtgggggcttgaggagtagggaaggcatttgaattggttgcggtggattggtagttaggattaacgtaaggtttagaggcgtggcgagatgaagcgtcggagggagggattgatgcaatcctatcccgcaagggcattgggtagaagactccaagtagattgngctagagatccaagggaaggccctagggttctcatgagccttatggtatatttcaagcccatgggctaagaatgaacccgcttatctttgtaaatattagaataggttnttcctttgtttgggccttgtattntggccattctagtagt

SEQ ID NO: 178425 - DNA, 454 bp, Glycine max
  unsure (1)..(454): unsure at all n locations
tatcgtaatcgattacacaagttgtctgaagcttgcagatttatgtctcgtatcaatttaatcgattacaaccttctttntatcgattaccatgtgatataatcaattactcctctttctataagtgtttcagaagtgaacaagaacactaaaatcaatcactttgggtatctaatcgattacattgttcttaagttgtttccaggttttgggaagaacactttaatcgattaataagataatataatcgattacttcattgaattaatcgattatcttgtagatttaattgattacaggcggttataattgttttctctataaataaccagcttgtgttcacttcaaaaactataacaatgaacgaaataagcttctgaatgagctaagatcacgtgctgntattagttaaagaaagaagaacagaaaagttcttaacaaagtaactcacacc

SEQ ID NO: 178426 - DNA, 364 bp, Glycine max
agcttctaccattgccaaacgaatgtgactttgtatggatttaagaaaacaaagcttggtacagtgctctgggtcaaacacccacatcactacatgaaagagctgagagtatttcgggttttacaaaggaacgtaatttggaaattccgaccacgccaatgtgaccggggttcagtgtaggttacgaaaataacatacatttcatgaaaggataatgtttacaaagtctctttctctaaggtttttcaaaggaagcataagacaagcaatggcggttccaaagtcagaaaagatgcaaagacaagatgaaactaacaagaaacaatcatagaaccatgattacctcgaaagaaaacgaaagatc

SEQ ID NO: 178427 - DNA, 489 bp, Glycine max
  unsure (1)..(489): unsure at all n locations
ctattacggacactataaaactcagcttggcacaatatttttntnnttgccgacattgtgcaatttttttcttatttttcaccaacgccaggcaataattgttttagtacgatcaagctaattttccttgttgatttcgctctatgataggtttaccatcgaggtcgcctttggtatttcatgggaactcaaccgccgttgtgtttcggtcgacattggcctgcgctggtagaagaggcaaagaaaaatatagcagaccttggcagcaaaaaaaaaatacctcgacaaacttggataaaaaacaattctagccgacatcggccaagaaagattaccggtcgctgtatcccaaaaagaatcaccggatgaagccaatcgaacatttccttatcgacatcatccgaaaattattcagggattgaacagaaaaacaatagcccaaaacggtcgtaaactacacccgactgatatttgtgcacagacctcacc

SEQ ID NO: 178428 - DNA, 453 bp, Glycine max
  unsure (1)..(453): unsure at all n locations
agcttcttgtcctacatatataagctcacttacacttcactaccaatagagaaaattaagaagtagtccaaaccttcagttttntttttaactctcaaattaatgcacatgaacacctactcggaagccaccacatcacaattaccaataccaccaaccatggacgaagatttggagaataacacggaggtttgtgacggtaacaatgcaatgacaccaatggtgagaaagaagtcagaactagttgtggtcgcaaataataactctcgtttacaaatgcttaggaatntcatgaccaatttgcaagaggtcttcttcggcactaagcttgtggtgctttttccggcagtccctttggctgttgttgcaaatttttatagctttggaagggtgagtatcatatcattcatgcaaactatgttgttattttcaattcaatttgcacatatgcta

SEQ ID NO: 178429 - DNA, 469 bp, Glycine max
tgaatctcgtatatgatacagttgattgatatagtaatattattacttcaattgtcttttatttatggcatctcgctcccgtaagcataacgtacaaattcaattgaataaggtttaaaattctagcattccaacttaaacttaattcaaataattataatgatgataataaagaacttacccttagtgctaaagcttttatgacctcttttgctgccttgcacttagcagcttcctctcttgctacaaaccaactctcctcaattttttgttgacactcttgtattttatggtttttgagctcacactgctcttcaagtctcttagcctatccaataatatgaaatagtagcataagaaagtgaacgtacaatcaatacattacaaaagtgaatggcactcgcaaatgagtggaacaagtttaatttacaatttaaggatataaggaactccgaatgagacgaatgtc

SEQ ID NO: 178430 - DNA, 436 bp, Glycine max
  unsure (1)..(436): unsure at all n locations
agcttcggaggtggttgtggcggagtcacatctacctgttcatgaaacaaagttaaatagccaaatnttaggcacgctaaatgaattaatttaaaaagaagaaacatatagtaaggacaataagcgcctggtgtgataaagacttgattagatgtgtcggccaagcaaggaaggtgtgaagtgcctgccccactaaggaaacctcagcagtgggtacaggaactggagcatctgcatctntaacctcatccacactcacctttacttggccaggcaacaaaggagtgttatgaacaagagtggatccctcataaactctccccacggcaaccaagcgggcaggatctgcttctatgtacaagccgcacctgtcagagtcacccgtctcaggatcatttcctgaggaatcaacacaactcccctttgtgctcacccg

SEQ ID NO: 178431 - DNA, 450 bp, Glycine max
  unsure (1)..(450): unsure at all n locations
gtaatacatcattggtatagaatatcgatagatatgttgtcttaagagaagaacncgacaacaaacatatactgtagttcgaacacttggtgacacaaatccctgatctatttctttcttaataaataagccaagaccaatccttacatccataaatactattaatcatatcgacattcaatgaaccatatttctgactcaatgaaaataattcagagaggaaatatactgacattaaaatgaataaatattcaagacaatatcgcgccaaaccttctcatggttaaaataatagaacatgcacaatacattctcattatcttacactaaacacacttacattgcttgaagatccgcttcgactcttgaaacaacacttaatcacaaatgctaacgacacaggccgcatgaacactgagagaatgatatgtgacatgacaatatacgact

SEQ ID NO: 178432 - DNA, 435 bp, Glycine max
  unsure (1)..(435): unsure at all n locations
agcttataggaacaaaattgcctcaatcattttcaaatatgcatgtgaattaggaaccatcaacaagaatcaagccaaggctattgtgcaagcaatcaatgaggcaaaacacaccaaatgattatgatgatggatggctcaaattgtcacaaaggtaaacccatcactttcaaattgagctttcaaaactatcatgacatgcagaggagaatcaaggatttcaagtcacanaatgtcaagaacttttattttcaaaacaattacccatttcttgagcatatcctataattcaaagaanaacatgcaaagtcgtatatgcacacagaatngacccanaatattaaactaaaaatctgacgaaactaacaacattaacaaattaacacaactaacaaattaacaaaaccaacaaaaccagcataaccaaagaacact

SEQ ID NO: 178433 - DNA, 471 bp, Glycine max
  unsure (1)..(471): unsure at all n locations
ctgaatagcgaggatntatgtgaagtacaaacagccccatgtgcnttttgtctactctgaaagtgaccttcaagagaatattccatggaagccttctattgtctttcatactattttttttcttaaattcaaacattagttattcaaatgtaagagaggcaaatagaatatgaataaaatggtacatgagaacttcccttttttgttatacaatctttgagactggacgcacgagtttaccttatggcaacgtgttatattgttatgcacaagagtgggcactcagtgaatatagtatgttggacgttaggttaaaacaaagcaaactttccatagatgtgaagaatattcatttaacaaaataatcctgaccacttgtcaaaaaccaattaaaatatcaataatttatccttatgttatacatcaaaatctaggttggatgagacgcatggtcgtcgaaaccaaacacaa

SEQ ID NO: 178434 - DNA, 438 bp, Glycine max
  unsure (1)..(438): unsure at all n locations
tcacacagtttatttttctcaaacttgagntttggaagaccaattactaagtctttcctaactagatgatttaaatgatacatattaatgtgtccagccccaaccatgaatcgtttattttactcaccaagcaacttagctcattaaaagatgcatgctcaacattcagcatatagatattacctattctcttaccgatgtggacaactttacctgatatggcttcacttataagataacaatttttgttgaactctatcttgaaactttatcacaaagttgactaatgcttagaaggttatgctttagtccatccacataaaacacattctntatctgagttttgtgttgattccctatatttccttctcccattatttttcctttggtattgtcttcaaacgtgacatatcctccatcttttgacacaaagtcaaa

SEQ ID NO: 178435 - DNA, 448 bp, Glycine max
  unsure (1)..(448): unsure at all n locations
agcttcgagccaattctaacgataataactttntactcggatgtccgattgagtcctgtaatatatcgacacgctcgaaattgaatgttgaagctttaagccagatcaaacaacaataaccttttactcggatgattgattgagtcccgttatataacgagacgctcgaaattgaatgttgaagctctgagccaattcaaacgacaataactttttactcggatgtctgattgagtcccgtaatatatcgagacgctcgaaattgaatgttgaacctacgagccaattcaaacgacaataactttttactcgggtgtctgattgagtcacgtaatatatcgagacgctcgaaattgaatgttgaagctctaagcctattcaacaacaataacttttactcggatgccgattagtgacgtatatattcggacgctcgacatgaatgttg

SEQ ID NO: 178436 - DNA, 455 bp, Glycine max
  unsure (1)..(455): unsure at all n locations
tatcaaanaccctaggtccaccctcggttctcacatctctcaaacccaaggtttgtccatggtatgaaaacccaaggttcaaccttggtacataattctacaaaacccaagatactcccttggtccactcacatgaagcaactacgacaaccaccattaagggtccaagttccactaagcgaattgtcaccccactattaagcaaaacctttacccaggtcgaacctatactcactcctcataaatatcagaggagtacttttgcatgtcaggatgacccaccaacgaattgcatgacaagacctttaattaggtgcagcttacacttactcctcacaaccatcaaaggacgaactcagcaggtcaagcgacctatccactcattggttaggaaagaccttcaaccaagggcaattcaaaacaactcctcacaaccatctggggagaaactccac

SEQ ID NO: 178437 - DNA, 458 bp, Glycine max
  unsure (1)..(458): unsure at all n locations
agctntctccactaagttgcttgatgcctgaaatgtcttttctgatggcagtggtcctatatgcagggaagaatttctccaagaacaccctttcaaggtcatcccagctgaaaatagacctgngagcaaagtagtatagccaatcttttgccactccctccagagaatgagggaaagcctttagaaagatatgatcttcttggacatcaaggggcttcatggtggaacaaacaatatgaaactccttaagatgcttataaggatcttcacctgcaagaccatgaaacttgggcagcaaatgtattagtccagccttgagaacatatggaacacccttatcagaatattgaatgcacaagctntcataagtgaaatcaagtgcagccatctccctacgagtcctctcacaagggtgtaggtgagccatgttctcagtatgaaaattagtagtcgaatgc

SEQ ID NO: 178438 - DNA, 458 bp, Glycine max
  unsure (1)..(458): unsure at all n locations
ntgcttccacaatatagatatcaattatcaacaacaaataaaaggtgtcatatattcattgaatgatcattattgaagtaatgttattttcatttttcctggacttcctcttattcttgaaagatttcaactcttgaatttgttttagttattgatggactttcaaggttcattgttgaaccttgtagaagtcatgcttgattagtgaaaatggaaataatataagaaagacaatggaattaatgcatggaacagttcaccaaacaacactacaggaaatgcatcgaagaggttcaacgaattgttgactcttgtaataacgcctagtagacatttttacaaacaatttacatgcaacaaaattactaatatgaaacacgaacttggtgaaaaataggttatcaccaatggtaagtacaacacttttcgcaccgtttcataccacaaacagatattca

SEQ ID NO: 178439 - DNA, 327 bp, Glycine max
tgatgaccctctggctgcaaactcgcaaatcccgtgggtatggctttagaaaggggagaaaagaagtttcgaatgcaaaaacattccctcattagtcattcttatatttaggtgcagggtggctcccccaagcgagctaacctgcatttattttttttttttgagaggaacataaaccatgctccctccttctttatggttaagcgtctagctcaaccttaacttacttaagttaaaagtgggcattgagtacttatttctaaaacaaacacaaagtataaaaaactgccaataaaaggaacggtgctgcccacaaaaacttttctt

SEQ ID NO: 178440 - DNA, 408 bp, Glycine max
  unsure (1)..(408): unsure at all n locations
tctctccttagatgatatagtccatctcgtgtcttcttaatggacacataagatttgtcccatgctattaagatgcaaccacactggatggctactggaacacaataatgcgtacgtncatcaatagaagtatcacctgaaaactccttgggaaaatcttatgaagtcnaaagagagaaacaacaattgagacagaattctcaagaatggatccttctcaagaagtaacacctccaaaggttgagtattaaaagaaggtaaacatttggacacccataacaaagcttctacctgttaatctagttgatcttaatatcaccacttctgagtactccatgttgggtggactacatgccccaatgaacacacgcaatcaagcaattgaatgtcctcctggnttacacatat

SEQ ID NO: 178441 - DNA, 458 bp, Glycine max
cttggagtttccaagagccaattcgtcctcttctttagttcagtctttttctggctccaattcatcagagggctttccttctgtgtccaacatcttgggatgttcccagcctttgatgacagctgtccaggttctgctatccagtgatttgaggaaggccaccattcttgctttccagtattcatagttgcttccatcaagaattggtggtctgttcactggtcctccttctttctccatgttcatcagaatatatctccccagatctcactctgtgatttcgagtgttggctctgataccaattgaaattctgataccaggggacagatgtcgtacaggatgtcacgacatcacgcttcagaacatgcagtttatgtgtgtccgtatgaacagattaaacaagttaataacacaagagaagttgttacccagttcggtgcaacctcacctacatctg

SEQ ID NO: 178442 - DNA, 402 bp, Glycine max
  unsure (1)..(402): unsure at all n locations
tttatcttgtcaaagaagttatcaggaaagaggccgtnctcacatgtggagagatcttgaacaaagctgtgattaggtaccaatccatacttctttaatggcagcttccattttagaatagtttcaacaaatttagaaattccccatctctgaaagttaataatagagccatatatgaacacattattgtttacttctaaactacaagtatcaatatgaaatataaataaatatatatatatatatatataagaggagaaaataaaaatatagaaatgatattgttggtattggttttcaatcaaatttaaactttcaacatttaattgggttcattgtttcatgtattatcaaggtgaaactttaaatctgattgnaaaacaacaccaatagtactaatga

SEQ ID NO: 178443 - DNA, 296 bp, Glycine max
  unsure (1)..(296): unsure at all n locations
tgcttgatgaacttctatagagactggatcgttgagcttcaaggtatgttcttcaacggtgatgttcaaccatggagatataggggaagataaagaaatagaggtgagaggaggcgccatccactagggaataagccatagaatgaggagcttcaccattaagagagtgtcttggataagaagcttacagaggaagcttcaatgaacgaaaagaatgagagagagagagaggggggggggtgtgcgccatcntgggatggtaatttatcccgaagcgacgctttcttcttatggac

SEQ ID NO: 178444 - DNA, 400 bp, Glycine max
  unsure (1)..(400): unsure at all n locations
agctntatgattaagataaatgaaatgtcttatatatattattctttaaacanaattggcaaccatccataacaaatgaaatctttagtctatgtttattcaacaccaagaaagtaaaaatatacaaggaaaccatggataagagcatgaaaaggaggacacaagaattttaatttggctaagataaagcaaaagaacaaattatgaaactgaatttctctcaaggtaaaggttatggctttaaaagtagaatcctcttgtagcatgtggctggaaatttagttattgactatgaaataaaataaaatcaatcatctggattcaatgattgtaccaacagaattattaactatacctccatgtccttctgttgaaaacatttctcctttagcatgaactc

SEQ ID NO: 178445 - DNA, 460 bp, Glycine max
ttacaccatgttccaagaagagtagatggtgtcccttttgttgagtagctctattagcattttgttagctgaaaaaaaggcccaaactcgtgttaaagtggctgtcaattctcttgagatttgcacaacctatgggcttgatttaaattaaacaaattaaggtttaataatgtgaaaactctatgattgtggctgcctcttggctgaccaatgaattgcacaatattccatatgtatatgagtcttaattctaatattaattaggtataatgacaccatcaattgttgttatcaattctatttttacttatgttcaatgacaccatcaattgctgttattggcgatcatttcacttgtgtaaccaactcgatgtcattcctatctttaggctgcacatttattaataaatcaaatatgaccttgaatctgagtgtttaatcaccttctatagcgtgagag

SEQ ID NO: 178446 - DNA, 442 bp, Glycine max
  unsure (1)..(442): unsure at all n locations
cttaagtcacctgcagctgcaagcttggattcactgattgattttgctgtaaggaagtctctgaattctttgtatgtgcatntttgtttataatactttgagattcataatgaaaataactaactaaggtagttgtgtataattggatgtaggtaaaaaatgattgaactaatataaattgttgagtcattcatctccctttccctaatctcttttatgagttttgcgatttgtgtattctacataactgaatcttngttcaattgattctacatatttatatgatgattaaagttttccagggcatttccatcacattttaaactttgattttaagatttcattggttcaacaatccaagaagagatggtgtgtaacaattttgtgagaactttaaaaaagtggaacagtttctgacatctatcccccctaatagtttgct

SEQ ID NO: 178447 - DNA, 452 bp, Glycine max
  unsure (1)..(452): unsure at all n locations
ctaagcttacgactaagtcttctgttgtccccctatctctttttactttacaagacgcggngcataacacttattaccataatgaatggacgccagagttgacctctgaggaatattttgtgaagatcttctattctcttttatttatctttccttaaattcaaatgttagcaattcaaaataaagagagacaaaatgactttgtataagatagaacatgtgtacttcccttttcccactattacaaattgaccatttcaaaagaatgtgttagtctcttactagttggacgcaagagttaacaagatgcagtgtataacgttgattaccataataagtatacactctttggttntaacgcgttggagactagttcatatgattaacagagcattttctcttggagtatggatgatccatgcagaatatagttanatccttttacaagttga

SEQ ID NO: 178448 - DNA, 381 bp, Glycine max
gtttgacacatggaatcctacttttgatgttctataacatactgatattaggtacttaatagtacaaacaatagattgttcaactaaagaatcatctctaagtatgacacataaatcaacatgcagtgataggtctgtttactagtgctttgtgtttgtgtcacttgattacaagaaacatccatatcaataagaatgcaatcattttatctacaatgagttaattaattagagatacatgaattttcaatgacttatgaatatatacacaaattaaataggtcaaatgactatctatacacaaatatgcaccagaaaaaagagaagcaacaattatactaattatactaattctaataaggataagcaatagatctacta

SEQ ID NO: 178449 - DNA, 457 bp, Glycine max
  unsure (1)..(457): unsure at all n locations
tgctctanantacattgatgttngtatttatgggatgtggttgtatgccatttttgttttaagagtaacgtcccactggtaaaactaactttccaaatgtttgccttcgcaggaaatggccccgaggaagcttgcctcaaagaggtccaggaaggacaaggcagccgaaggaactagttccgctccggagtatgacagtcaccgctttatgagcgctgtacaccagcagcgcttcgaggccatcaagggatggtcgtttctccgggagcgacgcgtccagctcagggacgacgagtatactgatttccaggaggaaatagggcgccggcagtgggcatcactggttactcccatggccaagttcgatccagaaatagtccttgagttttatgccaatgcttggctaacagaggaaggcgtgcgtgacatgagatcctgnngtaggggtcagtggatc

SEQ ID NO: 178450 - DNA, 455 bp, Glycine max
  unsure (1)..(455): unsure at all n locations
agctagaagatagagtacttccatactatttatcttctctctcaaagagactttctaactctgtagctttctcactccaaggagtggatccactcttgtcttgggattagttaaggatgaaagctcctacctttatttatactactccacattcacaatgaatggtagaaattacttgtatccttggagattaattctctagaatgctccacacattctaagagtctttacacttttctagtcccttctatatccttccatactcttccataaagttttaaaaggtttcacacatgtgcagaatatttcagagatgttcacgttcttctacaaggttttaaataatcctacactactctagaagtctccaggaccttctagaaaagtctacactgttctagaacctctccaattatggagggatcccaacanaagcctccaaggaaatctttatt

SEQ ID NO: 178451 - DNA, 371 bp, Glycine max
  unsure (1)..(371): unsure at all n locations
actcaccttatagctctattaaccaatttctgtcatgtttactaaccaccacccttgggttgaaaatttgaattaggcagctctaaagagtcgcaactaagcaggcgaggggtgaccacaattaagtactttcactcccccactaacaaaactaacaattaccaatacatttctgataaaaaaaaataaagggctttgaacactctctatcccaggctactgcctgacaagaaatgangtggccacaaggactagatagttcataccatctaaattagttgagctatcacctccaaaccgttgtaggacatntaccatttatgtatggaataacacacttagcgcataagactgaatagccactagggcta

SEQ ID NO: 178452 - DNA, 397 bp, Glycine max
  unsure (1)..(397): unsure at all n locations
agcttgtctcaaagattcggnagataacatanttaatctgaccttcccgaggtcttctaagtaaccgnagatttaaacttgttccttggtaatataagcttatctttgcattttttctgactttggaaccatcattgtatgttttacgcttccttcgaaaaaccttaaagaaaagagactttgtaaaagctatatttttatgaaatgggtgttatttttgtgaccttcactgaaccccggtcacattggcatgattggaatttcaaaatgatgttcctttcgtaaaatttgaaacaaccctctaccctttcatgtagtggcatgagtatttgactcaaagtattgttgttaactttgtctttaagattcatagtaattacctccgttttgacataat

SEQ ID NO: 178453 - DNA, 373 bp, Glycine max
atgaacaaggggttaataggtgtatgtgttacttaatcacatattgataaacccctaattgattcttgcttaataaattaaatcagggttggattaagtggttaactgctacgggtgaaatcctcacaacctatgataagagaatcacttatgaatcagaggaaacaacacgtttttaatactattaatttcgtattccaatctgcttgttcttaaattcacaaaataacccctcccccccaattgttactgttactgcaagtatattatgaacattatgtttatcattgctcgttgggaaacgacctaggaacacttcctagtactgcatttcaaggttatttgattcactacgacccgatcaatggctaac

SEQ ID NO: 178454 - DNA, 465 bp, Glycine max
  unsure (1)..(465): unsure at all n locations
agcttataagctatcttataggctctctcagacacttataagttctattgctagaagataatctcaaaaaagtttaaacaaactcttcctaatggaccttaagtctatcactccatctcatcctcaacagagcaatttataaccctgaaaaaattataaacacacgaaccacagagtacataacgaattcatagcaacagaaagcatggtgtgattccataagcattaaaaaatgaatataaagaagaaaagaaaaccacgcggggtgtttcgtctgaatagaaaagacgcaaaagggttttcgtttcaagaaattgtaaaataagagaggttagggtttggaggactgacttgcaaagcttcaagaaattttngcaggtcaaggtgcattttgtggtgtgcaaatcaactacaaggtcctctaagctcgtcacaatcagcaccgacattctttgaagacgctcg

SEQ ID NO: 178455 - DNA, 467 bp, Glycine max
  unsure (1)..(467): unsure at all n locations
gcttaacgttntatgttgtgacgagcttaanattccttacctggaactgaggtcgagggttgtcattgtgtgagttctacccatggggagacctaacttaaaaatccattctaacacatctttaccatcaaatcgtggaaactcaagcttaaaattccttatctggaacggaggttgggggttgtcattgtgtgagttctacccatggggagacctaacagaaaaatgggtggttgacaacagtttctcaatcgcagcttcaattctatcaatcctggagccatgattccccaccatctgctcaatgtgaaggtccacagaccgcaacagttttgcctatttccatgactttcatttnttctaggattcggcaacctttgtttgaattcctttgagttggtgatgtctaccatggtgtgatgaaagcaccaatngtaaggaataaagaaggatcacgatagaaaaag

SEQ ID NO: 178456 - DNA, 126 bp, Glycine max
  unsure (1)..(126): unsure at all n locations
cccccccgcacccgcgaattccgccccccccacccccctactgatcacctcaccaaaaaacaaaaggngggaagagtatagaattttcaacccacggggcccccctcccctcccccccccccacaa

SEQ ID NO: 178457 - DNA, 455 bp, Glycine max
  unsure (1)..(455): unsure at all n locations
ctacccttgagccatatcctgactaccataaaccttgacccattttgtaatgtcaatccttaccctcggaagcggaaagaatagaagggaaatttccaatcaaagaaaaggaaagaaggaagatttccaatcatagagaaagcaaaaaaagaaaagaaggaaaattccccaatcaaagagtgggagaaagccaaaagaaaagaaagaaaattcccaatcaaagaatgggagaaagtaaaaaaggaagaagaagaaggaaagaaagctcctgatcatggatcgaaggaaaacagaagaaatgtgcagaaaggtctttggaccggacaatatctgaacaatacagaattgtcaccaaatgaacaaaaagaaggataggaaaccacgacctaanatggtcttctcccttttgattaccaaccaaaatccgtgcgctagcgactttttctgcccgcact

SEQ ID NO: 178458 - DNA, 462 bp, Glycine max
  unsure (1)..(462): unsure at all n locations
tcgcctgaagatgcagcttaacatagacccctccaggagctttaactatttcacatggactngatggggcctatgcaagttgaaagccttggaggaaagaggtatgcctatgtcatccacaacagagtcacacttagaagagggactccaaccactctgtatgaaatctggaaagggaggaagccaactgtcaagcacttccacatctttggaagtccatgttacattttggccgatagagagcaaaggagaaagatggatcccaagagtgatgcaggaatattcctgggatactctacaaacagcagagtatatagagtattcaattccagaaccagaacagtaatggaatccatcaatgtggctgttgatgatctgtctccagcaagaaagaaagatgtctaataagatgtcataacatctggagacaatgtagcagatgcagctaaaagtggagaaaat

SEQ ID NO: 178459 - DNA, 470 bp, Glycine max
  unsure (1)..(470): unsure at all n locations
actaagcttggattctntatacatccttattaattgtttaattcttactcttaaatgtacgttttatacttggtataggaaccttataattctaagtatatatagttgtagtatggtgttttgccttaatttcatagatagtatgattgtttgtgatattttgttcttagtgatgctaatattctatagttggaagactcataccaagttatatttcataaggaatactctnttgatcgtaccttctaattctagtgcaacctattctttgtgttgcatgcttaagtcaagtaatttgattacacttgaaagcttgagtttaattcattcgttgtgttatgagcctacatcanacaattgaattactgatgtttctgtcacaatcaagcgattgttaacggcttcatatgggtgtacattgtggtcatgtatttggttctaaaattctttgagatatttgtgttgattct

SEQ ID NO: 178460 - DNA, 469 bp, Glycine max
  unsure (1)..(469): unsure at all n locations
agcttccaaaggggaacacgtacctttnttgaatnttgtattgtattgatcccataactcctctcttcatgggtttgctccaattggaactctaagatacacaaatggcaatttcatcaagttgcaattcaataaacccgtgaatttctcctccacacaattttcaacccccaaagccatgaagttactttttccaaagtttattttaagaccggaagcaagttcaaagcaccaaagtgtacatttgatggtttttacatttgccaaagaagcttccttagtgaaaatagtatcatttgcatattgcaataaactcacttccacctccccatcccccacttagtatcctttgaacaagttcttttgtagagcgtctctcataagaccctnggaccatctaccaccaacgtaaagataaaaggtgtcaaagggtctccttgatgtnagcccctatgaacatcaaattcac

SEQ ID NO: 178461 - DNA, 463 bp, Glycine max
  unsure (1)..(463): unsure at all n locations
tacccttgcattgtaaccttttattatctctcagaaactcaaaaatgtctcagtaaaactacgatcccggattcgttaaccgttggattgtagtcaaatttggatatgttgttcgaaattcaactacacacactttaaccattgggatttgctagataatattcgtggagggagaaaaggaatcgcatgaggatagtacaaatggaggattcaatctcttctcattctctctaacatttgggaaccctatcagagcaaccagaggaatctcaagaacttgtcagagatgtctctatcactatcggaagacacatgatcccacttagaggtaagggatgagttattcacaatcgggagttagtgagaacatgtgtaggaatccttagaagaataaatangattntatttgngatgttattanattcaattttctttatgatataaataaatattgatgttaatg

SEQ ID NO: 178462 - DNA, 416 bp, Glycine max
atcatctcataacaatggaatgtttaaaaataatggtacacgtactagctatttttttttaaaatttaaaatatttttttataaaaaaaaccgtattttaacaaatattgtttttggtgttattttaacaaatatagttggacatacatgattataaaaaatggttatataaaaatttctatttataatttcattgtaagagggggtaagtgggctgacccaccccgcttaaggttcgcccgcattggcagcggactgggtctgtccgtcccgcattcttacactgatcaaataaattgatctgtccctgcctcgtgaaccccgaggttaaatgagcatgtgtgcatgcataatttttaaagaatctcaatttcaatataaatacaacataatcaaattaagttcaatacaaatgt

SEQ ID NO: 178463 - DNA, 406 bp, Glycine max
tgtcataatatcaccaaaactatcacattaacaaaatcacagcctctaagatttcgacaaattattatgtagccttgaagcattatgtttttatgattctaatctaccattctctttatatataatacataactatattttttaagttgcaatttatatataatattcaattatgctatgttaaaaaatagttaaaataattaacattataatgattttagactatctaataatttctagtaagattgtaatgtataacaacacctggaagcacatgaacgctaccacataatccgtcccagaacatgtgaacatactagttggatcatcataagcatagctgtaagaagatggacatgcctccttaaacttcttctagataaacgtgggattgcatgtagaggga

SEQ ID NO: 178464 - DNA, 430 bp, Glycine max
  unsure (1)..(430): unsure at all n locations
agcttgacagcaacaaaagaacaaaactgttttgattatatatcaagnngngntnaagggtagaggaatgttcttgtcatttgtttcatggaggtagcataatgcttggcatcaattaacatcttttcttattggtttcattgctaactaccttatgttccttgagcattaatgctaccgctttcataagttataatagaaagttgtctcataaatttatccatcaaaggctatattttctggtccataaggtctaatttaagatttaaagataatactgttttgtgggtatattgaattttaggtaggcatggcaattaacaactccccgcgggtacccactcgaccttgtccctagtttaacgggaaaactcgcattgaatgaatttcaaattttcctacttgagaaatcatgttcagggtggtcagg

SEQ ID NO: 178465 - DNA, 462 bp, Glycine max
  unsure (1)..(462): unsure at all n locations
tcactacaacagtctttcttattaatagactttccctattttgtgatgagtatggtatagaacacaatttttctgcacctaggacaccccaacaaaatggagtagtagaaaggaaaaatagagccctagaagaaattgctagaactcttttaaatgacgcacctcttccaaaatacttttgggtagaagcggttaacaacgcatgttatattatgaacagagccttaatcagacccattattaagaaaactccatattaacttttcaacaatagaaaaccaaacattgcaaatntacatgtttttggatgtaaatgttntgttctaaacaatggtaaagaaagcctangaaaatttgatgccaaggcagatgagggtatcttccttggatattccttacatagtaaagcatttagaatatacaacaaaagaaccatgacanttgnggatcaatacatgttac

SEQ ID NO: 178466 - DNA, 410 bp, Glycine max
  unsure (1)..(410): unsure at all n locations
tataaaaccgcatacccagcgtttgttttttttctttgtgtgtgtccattgcactgcgttttaaataaaaaattgagtctcacacatttttttaaaagctcttaaaaaggatcagccttattgcttataacaaaaggaaaacaagtagcttaacaaaaactctaattgaaagagctttaaaaaaaccttggttcttttcttttattgctctgctcccccagactctctctttgctctctctctttccccactctattactctctctcacctgttgatttaactaacgcatatacttgaaagaactngtgcattgtcatgtggcaaaaaaacttatcttacccctttatgagattctggtagttactatttacgactactaattaaaattgctggttgaacatatgtatac

SEQ ID NO: 178467 - DNA, 475 bp, Glycine max
  unsure (1)..(475): unsure at all n locations
tgtgaacaagattcttgaccggtccgggntggttttgtgtacgtatgtcccggagggtctcctggagatccctcccagactaacgttggaggaggcaaggaaggagacggacacggtgctcttctgggccgtcgacgagctcttggagaaaaccggtgttgaagccaaagacattgggattcttgtggtgaattgttgcttgttcaatcccacaccatctctctctgactccattgtcaaccggtacaagcttagagggaacatcttggcctataatcttagtggcatggggtgcagtgctggggttcttgctgttgactttgccaaacagctcctacaggttctctctcaccatcatgctaataaattagtattccatgcatctgtgtattgttatactggcatcacatatatatcttcagttagttaatatactagctcatatttatatttcaaataataatgcgtatgaata

SEQ ID NO: 178468 - DNA, 154 bp, Glycine max
tttttttgcgcccatcaaaaacactatttccaaaaggtggtccttgcattggccatgcctttcacccatttgttgctgatgggaagaacttgcacaatttcttcaacacatgggccctttattggtggaagtttggaataacttctttcacttt

SEQ ID NO: 178469 - DNA, 441 bp, Glycine max
  unsure (1)..(441): unsure at all n locations
ntgacttgagtcatcaagagattataaatatgtgcccattgctttattttcataaatcatccttcaacatctttatcactatcaatcatctttgaatcatctatctttncaatctttttaacatcatctctcaaacatctttcaatgaatctttcaatatctctctatagaattttttgattcatttctcttcatctttctaaaagttttttatcaacactttctcttccaagaaaagttctttgttaaaaaactcgtgttattcatctttttcattctcttctccctttgccaaaagaacgaagggactaaccgcctgaattctttgtgtctctcttctcccttacaaaagattccacggactaaccgcctgagaattcttttgattcttcccttccccttaagcanaagatttcaaaggactaaccgcctgagatatct

SEQ ID NO: 178470 - DNA, 393 bp, Glycine max
  unsure (1)..(393): unsure at all n locations
aatcgggttgtcatttgctctcaagggtgtcatgaatgaaaagacataattgtcttttgtgatgaaattgtgatttgcggatccaatttttagtatccataaactggggaacctatttaagattctatgaaattggaaaaaataaaaggaaaaataaatgggattatagaagaagatgaaaataatgccacaatcttgagagtttgatcaattgaggatgattcgtcacaaataataaaattctttataagaacctaagttgtacacaagaatcaaaaagacactctttaactgngtgctaattaaaaattgatcaaactgcaatacatgttaacgagctattataactctacaatatcctaaataactattgtccaacttcttatatttaaa

SEQ ID NO: 178471 - DNA, 390 bp, Glycine max
  unsure (1)..(390): unsure at all n locations
aagaggcaaaacngagcaacaagccccggaaaatgcaaaaacaagaaaacaacggcatacgaacagggcgagaaagagggagaaacacacgccgagaccgccatgaccatatagacaaaattcccaccagcccaacaatgacacgcctgagcgcagaacaaacgctcgcctcacccaccgcccagtcagccacaaaggcaagccctcaaacaaacacaaagtctgaccaccgcacacccaatgacaaacaccacgcttagcacagaccaaaaacccaaccaaaaaagaaacggcacgagaaccccgcgaaacaccccaaaccagcgccgatgccgatagcaccaaacgatcgaaaacaaaggagccaaacccagccaggacaccacccca

SEQ ID NO: 178472 - DNA, 354 bp, Glycine max
  unsure (1)..(354): unsure at all n locations
agcttgtcccgccagcactgctggtgactttacggctgngcagaaatcgcagctctgactggcgatttccgaggctagcagctatgggtttaagacgcactgcaagacatgcaggacgtgggtgcaggtgctttttgacttcttgggcttaagggagagttgccaattggtctggcgacttaagccatggaaatcgcccatatcaatggcgatatgcacactgctgagtgtagacaaaggatcaagctgatgttttgatgatgccaaaggattacatgtttctcaaagttntattcaagacaaagaaatcaaatatattcaagatggatgatcaagacagtctctagagtctta

SEQ ID NO: 178473 - DNA, 429 bp, Glycine max
  unsure (1)..(429): unsure at all n locations
ntacagcagaatttagtaatgacccactaacctataatttatataacttaatgccattaacctagggaattaaaaaaaacttaatggctgagtgtaactgaaattgtggcaaccaaaagtcacccccaacagccaacaagtcagccaccatttggtctcccaaaaggctgatgcccaggttgccaattgggcccttattacaacttgaactaaacctaactaaagcccttttagttgattaacccaaaacatatttttggtcagccaactttacaaggattgggccattatttagacaaactaaacactctaaaattgaaacaaagtggtgtcatttagtcctcctccatttgggccatgatacaactcacaaccttggacttttctccttgaaactngngcttgtattcaaacagtatggacaaacac

SEQ ID NO: 178474 - DNA, 328 bp, Glycine max
ggcacatcatacatttttctctgcattgaggcccttgactgccagctctccaatgggcgtattcttcaaagatctggcccctttttgcacatgtctgtgttgcatctatccggaaccatataaaattgactgatactgccaatgaagcaaccataggtcttccaaatgactcaaaagttcagttatgtccagtaacactccctatagatttctggaagaatgatacagtcctattttgccagccccatttcgaaatacatttaatggttgggaagagccttgtctgcaagccaccctgactggaggtgaatatggttgacacttttag

SEQ ID NO: 178475 - DNA, 409 bp, Glycine max
  unsure (1)..(409): unsure at all n locations
agatgaggaagtgttgaaaggtgaaacttcctgcttttattgttgaccacagagtggtacctggagatatgtcgcgggggtcaggagaccttggggacgtcaggtggggtgctattgcccaaaaccaagcttgaccaatcccgacccaacccgggcatagtcggtcagtgagaacctgtgatgtacctaaacaggcgagctcctggcagtcaacagataaaaggaacaaagaccacaaagcaaggaggcttgtggtggctggccagctgtgaaacttgattgatatgtgagatatggtctctggtaatcgattaccaagggtgggtaatcgattacaaggcttaaaaatgaagacaggaggctaagatggtctctggtaatcgattaccatggngtgtaatcgatcacc

SEQ ID NO: 178476 - DNA, 280 bp, Glycine max
gaccccaactaaatttcttgggatacataattaaaatttctacttactataaaaaattgggttacatggaaattaactggcatagttgtccccaactatgtaatataatttctgcaaataaaaacccctcatcgcgtgtgtatgtgtgttgcgctgtgatatttctgcatatataaatagcgtttactcatatgacaaccgttgtattgaaaatgtgttacatttgccaatgcagatctagaactccttttaagatcaaatgccttcacgcgtggttaat

SEQ ID NO: 178477 - DNA, 453 bp, Glycine max
  unsure (1)..(453): unsure at all n locations
cttgtcaaggtggcaattccaacaaagtgtctacatcaatcttcttatcctttactcatattgagtagtctcaagccataaaatgtttggtcaatgtggttgcataacaaacctcatcaactacataaactagactcattcacccagttgtttaaggcattgttattggacaatgaagctttgaacctcatcaaaatttgagcatctgtgtctcccaacaatggctcagaacatatggcgaacaccaaaagcgtaagaaggcaatagtatgctcttctaagagccataattagttgatcagaggtcgaaccaaaattggttgatgagaaaggaaatacagggaatattgaatataaacaacaaaagaactattgagagttcggaagagagtgtgcataggaaattatgattncatgtgttaacgagtgacattgacaaagtcctacatggcta

SEQ ID NO: 178478 - DNA, 444 bp, Glycine max
gcttgctgatttagttttcgctgacgatatgtatcttttgggtctgaaaagaggaaaatttaattatcctgcttgctgctcggacaaatgacaaaactggggcaaatgaagagggtgagaatgaggaaggaacccatgttgtggctgccattcctacatggacaaacttcccttcaccccaataatgtcattgctcagccaatatcgacccttctcattacccaccacccagtcattcacaaaggtcatccctaaatcaaccacaaaacccacctaccacacaaccaatgctaaacactcacctttagcacaaaccaaaacaccaaccaaggaaggatatttgctgcaaaaagcctgtagaactcaccccaattctcgggtcctatgctaacttgctcctttatctacttgataatgcaatggtagcgatcacccctactaggt

SEQ ID NO: 178479 - DNA, 453 bp, Glycine max
  unsure (1)..(453): unsure at all n locations
ntaaatagttcanactaatagatttgagatttgcatcataccttcatnttgcacttgacaagatttgaaacataagagttaccggaaaagtgtccaaaataatagaaaagtatatacgttttgttgtaattgacacggagaaggatatgatcggagtatatttgtagatctaccatggtggctgaaaacggatttgatggctacagttagaactcggtaaagacttcaattggggaaaaaanttgggatcgatgagaggaaagattctatctgtttagatttagaaaatgaggtctatggttgccaaaatcaatgtcgatggtggcagagtagatgtagggttcaagagagagaaagacaaagggtctcttaattagttcgagttacatctttttccaaaagttgttatgtctcccacgtggttcaagatgaggacagataatgaacagatgt

SEQ ID NO: 178480 - DNA, 352 bp, Glycine max
  unsure (1)..(352): unsure at all n locations
agaacggggataatcaccacatccaggaatgaaatcaagaaaaagatntcaagaggcgaaaaacaattccgtgataaggcgaaataataatgacgaactcatactcttatacataaaaaaagaaaaaggggagcatgggccctatcaaccaaaggaaccaaaattattaatgtctctcttctcaaagaacgaagaatcccgggaattcatatacttgaacaacactattgagaaagaaaattcgcaccgcaacacaaaagtgatatgaaaagaaggactctgtgaagcaacaccagagaatatatatagaagccgaagatgacaagtctaaaagatgaagaacataaaatta

SEQ ID NO: 178481 - DNA, 312 bp, Glycine max
ctgccgcaccataataacgggaggaatgactgcatatccattccgctcatctaaatagtttgtcagctcttataagtgtcaatccactaacaaatgtgaaggataaagacatatactatcctgacaaaggtgaagcgcagatcctcaagagcctcttatataatttacattactccttaactcgtcacataataatgcagcgataccatcctctctagtgaacactgcaaaacttatttgtctcgtcaataatatgctatcattacaatagttatagtcaatataataagtttcatgtatactgctttattc

SEQ ID NO: 178482 - DNA, 401 bp, Glycine max
  unsure (1)..(401): unsure at all n locations
agcttgctaattaggaatacaatctgacctttgggttanaattcggactcttgagtccactgttaatctttaattaatcattcctacaattgatcttatcctttgacttaaatggatagatacgtaatcattagggcattgacttaaggcaaagaacatcttatgaccttgataatagactttagttaattctgggaattagtaattaatatggaaaggaatttcattaggactaggattgaggaaaaattgatactagtgaatcataacccatgatcattcttatcatcacttaaatctctttgtatattcatttaactaatttattataagaactagaactacaaaagtatctcaaacctctttttaaatcaaatatattgttagtttaataagcttac

SEQ ID NO: 178483 - DNA, 476 bp, Glycine max
  unsure (1)..(476): unsure at all n locations
cgctcatgatatatatcgactgccttaatatgcacactatgtgttttctatccctcaactaagaatcccattggttgggccatatgaacattctcctctgattctccattagaaaaggcatnttgtgcattcatctgatgtaactccgaatcataatgggctactaatgctatgataaacctgaaagaatcctttagtgagaccgatcataacggctctatataatcaatgccatctttcttagaaaatcccttatcaacaagtctagccttgtaacattaaacgctgtcatgaaagtcacatttactcttgaagacgcacatacaaatcttacgactttggcatctctacaacgcccccaacaccaatatgttccatggaatttatctcttctttcataggatgtaacgacgtctagaattatcaccacttacagcttgtgaaaaagacactagaacattaccatcgcctatttc

SEQ ID NO: 178484 - DNA, 477 bp, Glycine max
  unsure (1)..(477): unsure at all n locations
tgccatagctcagcgtntatgggtttcttctctccttcttactaagccataattcactttaagaagaagaaaacaaagttgtaaacggagagagagagagagagagaggtaaccttctccggcgttgggtgcgacggcggcggcaccgtctggtggttgcgccttcattgcttcggtgggcgtggaggttgttttatgttagcggcgatgcatctctcttgtagtgatttagcgaaaagtgaaaagcaaaggaaatgaaggtagggaaagggaatcggaatggaatggatagtgaagtcaaatcaaggaatggcgaagcgaagatagtctcggagtcaaaggtgccagacagacactctcttatntgttagaggaagaacggtgaccactgtgtctntgttatnttttctggttccaggagtatccttgtcgttaattattaatattccccacaattcatcgtcaatatcttccaac

SEQ ID NO: 178485 - DNA, 455 bp, Glycine max
  unsure (1)..(455): unsure at all n locations
agctngaagtagttcccttatctccacctctaattatcatctctgatgcatcatcatatgaagctactgcccctcctgatacaccagctgaagaaacagctgacccccctgcttccccagttggagaaattgctaatctttctgattcgtcatctggagaaagtgttgctctcactgattccctagtgtagacactgttgacattgttgattcttgatgatgcttnttgttttctttttggtttattattattattattataataattatggtttcagtacaatatctcttttatgttgatatacactgttaagtttatgtataagtagttggtttgctcatcttgaagcatatggaacacgttgactcgactttgatgatattgcagtgaaacactcttatctttttgtgaaaatcggtgtatgactttggtttgaattgaatgcatgattgtg

SEQ ID NO: 178486 - DNA, 460 bp, Glycine max
  unsure (1)..(460): unsure at all n locations
tctacattgaagatngagacactcatgagagatcaagctcttagtctccatcactacccatccattcccaacctgtgataaatgtgaggttgtgcatgggtaaagagaatgcactattgatgacaagttatgtacaaccatggatgatatcaactttgttggggcagaaaataattcttacaatcaatatcccaacaatttcaatcaaggacaaggcttcaggaaagtcaagggatgtataggcctcaaaccatgcaaaatcaaaggcctagacaagagaaaagaaaacctactcttcaagagaccatgcttcaatatatggcccanaatgatcagagaatgaagctggtggagtctcaactcaccaacatacaattccttttgtcacaaagacagacgatcaaccttcttttcaacttgaaccanatctaanagggatgatgtcaattctatgatgact

SEQ ID NO: 178487 - DNA, 348 bp, Glycine max
tcgagctgctggttgtggcaagatatatacttttatattttgtcatgacaatgcaagtgatcactcaatggataagtaagcttatcatggacttcttaatatttagtattggcatgtatgtctaaatatctgtttgataattgcagaaaagcaacattggaaatgatgtgtatgcagtgcctaactatacagccagctgggccgatatgcatgtcaccttcatgtaatggacttacaatggcgaagattattgcaacatttgcaaattttttgatgatgaaaggtacatttcgattacttcttactgtattatgcatacttgcattctatagacatatagttggtact

SEQ ID NO: 178488 - DNA, 382 bp, Glycine max
  unsure (1)..(382): unsure at all n locations
agctgnttattcatgttgtgctggtcttttatagtaattncctgtccttagtcctctactctcacaagggtgtacatgatatactccacaagatcgttgttacactaatgagtatattaatcaaattctaatattctaaagcgttgtaaactccagcggctagcatccttaattatccttaaattaatcctgtacctgtacatattatatgagggcttttattattttatcttttgcttaaactcttgctatcttaagttactttgaatctagactacactctacactgattttgagtataagtcgattaaattcaacttctacgttcaaaaatatatattatttattattctcttatcacaatatgaattatatattaaca

SEQ ID NO: 178489 - DNA, 478 bp, Glycine max
  unsure (1)..(478): unsure at all n locations
ttanataatcaagtaaccttataatgatctgcagaatcttttagctntgnggcttcttccagaatgctagaggcagtttggctagaatttgttgtcacaagacctgactcactgagttgtccatcaggtatgaaactttctgaactgcaattaactccaaccttgcaacaaacatcaattggatttctcgcaaacttgggaacatcattgccagaagcgtgaactgggtgcccattagacatatctcccttttgtgactcaggtgcagttctagaacccacatataatgtttcccttttcactttatcctcggaagatgcgatcactttggctttcccatctcttgatccagtgcatacttgattagctatgttttcttccacaaagttctgaatcacgttctgctgggagataatctttctattagtgctacgtgtagcatccactttcagaactggattcccaatctcatttttgt

SEQ ID NO: 178490 - DNA, 366 bp, Glycine max
  unsure (1)..(366): unsure at all n locations
agctnttaaacacttgagtctcaagtgttttgtttagnnttttctctccctaataagttaaaatacacctgtatcttgagaatctgtggaagtgaatgatagaaattttgatccttttctatgcttgagcatttaggggcattatgcatgaccctttgttcaatagttagttctagaagttcatttagttctagccgcatgaccttcttgttcttgtattcatcttttcacattattgcttcaagttgatgaattgtaagctgctcattagtgtccgatagctttcattttgagaaaaatagggttacattttcaaagcttttagtttcaaattttaacagatggtgtagagaacccaaactattc

SEQ ID NO: 178491 - DNA, 413 bp, Glycine max
tgtcggaaacgtgaagatgcctagtggcgagtttggctttcgcttcctcgagccgatcgaaggacttggaacgggtggattccgccatggcaattgggctcaatgaaagcaccaagttgctatgacccaggggtcatagctagaattcgaggttctagctcctccaagaaaaaaagggtaagaaagggaaatttgtattattgattatgtgttttccgaattacattcattctatttataagtattatgttctattctagaattgtgtaattctaacagaatttggcatatgtgccttggaggaatttgtaaatggctatggataatgcttagcggaaggtgcctctaacggtcgaagaatttggaagattctgtgctgacaaggctgttgctgacacgattgcttactcatt

SEQ ID NO: 178492 - DNA, 328 bp, Glycine max
gcccatgcatagatgaatgtaatgtctgctactccattatacaaaacatggctgatagccactccaattgcaagggccttgggtgctgcttcctttgagccttgtcaattgaacaagcaacaagggaagctcctcaatgggttgagaataatcaaccataggaatgagttcactcatcagtttttcgttcgtggcaatatcgccataatcatccattgtttttggagattcggcttcgatcagtgtcactccctttgtattgcaattcagtgctactctaccaccctctatccaagtcaatcgaccggtcaaagggtagtagtgcact

SEQ ID NO: 178493 - DNA, 488 bp, Glycine max
  unsure (1)..(488): unsure at all n locations
cttagacaagtactgcatgtgaaatattaaatacccctttcttcatatatgttctgcactaccccagcagcaacttcagatatttctgcagcacattcaataactttagcaatgtctgatctgatgacttgaaaacatgaaacacagaggcatatatatttcttctagctgcctcacagttccatagcagatcgcagaagtagaagatgcacactngaaagaagtggaaattgggttggcaaagaggaggggtaaggaaataatgcatagtctcattgttttctttactttaacagctggctatatatcaaaaaccttgcttcttgatgaaggcatagaacanagaaattttactaaatgcattcccattcattgccataaatctagtgaaccactgctgaaaatcttccatacactgtcttgcaaaggggtaacaactaggccactcanggaacaatgaaaccaaaagagcttcacaacaatatgct

SEQ ID NO: 178494 - DNA, 382 bp, Glycine max
  unsure (1)..(382): unsure at all n locations
tacatgcccaactcccttaagtgacanttgtattggtagtatcttggttgttgcatcttaatacacttgatatttgtgttgcatcatgaatcatcatggctagtgtgaagaaaagtttctttaaaggaaaaaactctatgtttaatcgatacagagttgtcataatcgattcaacaagatgtctaatcttaagaattgagtctcgttcagttaatcgatacagctatctataattttattacattgttgttgagacaatgaatgattatttaatagtctttgttttatctatatcaagtggataatcatcctctttttgggtatttgtcacagtgacaagacacttatcaattctatgacattaatgatacacgtcttgata

SEQ ID NO: 178495 - DNA, 278 bp, Glycine max
  unsure (1)..(278): unsure at all n locations
gcttggaaaaattggtttcgtgaaaaaaattccagcccgggggctttcgaaacattttcgtaacgtttccgtgaaggaattcgcgaagggttctaccgttcttcgacgatcttcattcgctcttcaatctgttcttcgatctttaactggtgatgacctcgaaccaagcctttcgattcattctatgtaccccgggtagcccacattgtgtttcgtgtatatatattctcgntgcatttactttttataccccctntagacgtgcttaagccatttta

SEQ ID NO: 178496 - DNA, 462 bp, Glycine max
  unsure (1)..(462): unsure at all n locations
taagctttataagtgacatcaggtgcagccatctcgctaagagccctctctcgatgtggaggttgagccatgttctcagtatgaaaattagtagtctaatactcgaaatcagaatattcagaatcaccagcaacagaatactaagaatgctcaaaatgctcaaaatacacagaatgagcaggatgcacactatgcctaactaatctatgaaaggttctatctattntatgatcaaagggttgtaaatcacctggattgcccctagtcatgcactatatgcaacaaataatgtggttctcaacaagcacctaacaagggggtaaaactacaactatagtcaaacgatattcagagtagctgatattttgtgagcaacactcttaaatcattaaaagatagcagagaaattcgaacaaaaattccaagtcttactatgaatactacctaagcgaagtttagaaa

SEQ ID NO: 178497 - DNA, 394 bp, Glycine max
actggactaatacatatgctgcccaagtttcatggtcttgtatgtgaagatcctcataagcatcttaaggagttccatattggttgttccaccataaaactccctgatgttcaacaagatcatatctttctaaaggcttttcctcattctctagagggagtggcaaaagattaggtatacttaccttgctcccaggtccattttcagctggtgtcacaacatactcctcggcggaaaggcgacacggggctcgcaagtgcgtcttccaagaaaggaaaatgcgcggagtcaccaccaacgtttattttgaagaaaacgtcgaataatccggaaagtgtggtcttcaacttaagtgtgaaaagttcggagtgttttaccctagggaagtttagca

SEQ ID NO: 178498 - DNA, 472 bp, Glycine max
  unsure (1)..(472): unsure at all n locations
ctttcaagaaggtgagcttagttattagaggggtgtgtgtagcttatctctagcgtctcaaggaagcttctcaaagaagcttcttaaggaagctacctacgctataaatagaagcatgtgtaatgcttgttgaactttgatgaatgagagtcttgtgagacatacttcgaagttcaactgttctccctcttttcctctctctctctatattttcctccattgaagctttctctctaagcctcttatccaaggcactctcttggtggtgaagctccttcttccatggcttattccctagtggatggcgcctgctcttacctcttttcctttatcttctgctgcatctccatgatggataatcaccattgaaggacctcattgaagctcacagatccagcctncataaaagcttcacaagcaagctttcatcacatgttgtataatgcttcttaatccattacactacagatgc

SEQ ID NO: 178499 - DNA, 479 bp, Glycine max
  unsure (1)..(479): unsure at all n locations
agctngcatgcaaatccagataattaataatatatgataatgcattaaaactcatagaatgtcctctaaaagtctgaacaaaataaaaaaatatgagtgttatggaaaaacaacaatgaagcataaaaaaaacacacaaaattagacaaaaaacgatgatagattaacgattagagattggcgataagcaaaaggggcttacacgatcagtatgtatatctcttgtaacctttgatggcttcacgaatctcgttcctgtggaggaaaacgatgactaattattgaaggagatagaaggaagggaaaaaagagaggaaaagagacatgctcaacctcacatattgtattgcaaaaagcgggtggcttcaacattctggggaaatttcagtttccgaaaaaaagagaaaagagaatgagattaacagaggatgattcttggagttggcagcagaaaaaaaaaagttcatatgaagacacat

SEQ ID NO: 178500 - DNA, 339 bp, Glycine max
  unsure (1)..(339): unsure at all n locations
acctgcggcatgcaacttgaagactgggttattatcctttgctaatattcaaattcttgtgaaaaagccttatgtatatctttgtatagtttgaaaggctttcaaaacaccttgaacaacttgagagaaaagactaagtgcttatatcgtatatccgcctatgagatgattaagagttagttagtgagcaaacaaaccataaatcttttgattngtttagagccaatagttgcttggtaggacaaagaatactgagttatttcaagcttggtgtaggagttgtagagctagaagtggcaatgccatgatacttgtagctttggaaagttagcggaactt

SEQ ID NO: 178501 - DNA, 413 bp, Glycine max
  unsure (1)..(413): unsure at all n locations
atattttataatatcctcccatcagagattattctatatgataatctttatcttttataatgattattttagatgatttttttatcaattggcatacatgcctgttaaattctgtttttataacatcttcttttaatttatcatttatgcgttataaaacgttatttttaattcgagagataatctttttctagtctaattggttagtgatagataaaaattaaaaaaaatgcatatataatattttctttagaaaacaaatacctgttgttgcagagcaatgatggtggatacacaaccataaactggatatacaaccttgcctgccctcatataattgttgtcatgcttattgtgcggttacccaatgtgacaaaacttnacacttgctacaccaacacctgtcacactgt

SEQ ID NO: 178502 - DNA, 402 bp, Glycine max
  unsure (1)..(402): unsure at all n locations
catgcaagcttagtgaaacaaaaaatttataatgttcattatctgggnngcgaacaagcatatcacaaacttctgtgattggtttaaagatacaatctttgctgatgaaagggcctcagaaacattacgaaagctagcagatgggcctaaaagaaatgtgataacttggcaaggatacgacataaacaattatcccttttacacacaagctaaagatgacaaaagtacaatgcataacaacggggtcaccctaagggcaaaatattaacacttcgcaagtgtgcatgatgacaatccctgtgtagcttccatcccttactttgggttcattgatgaaatttgggagcttaactatgtcaaatttacagtttgagttgtcaatgtcaatggctgacagcacac

SEQ ID NO: 178503 - DNA, 389 bp, Glycine max
  unsure (1)..(389): unsure at all n locations
cctttctcntattcctcttcttcaacacctttcaagttcttatcccctcccgnctccacccattgctttcatgctttccgatcccaactaattcccaaggttacctcactttctcatctgggtactcttcaattttcaattgttattccttttaaacttgtatgatcttatggagtcatgatccgttcctttactttttatatattcacaatcattccctgccattcttttgttctttttgaatccctccctgtccctgatgatgctattatgtgagtgtgaatgattagttagctatgaagaaatgatgctttttatttagggtcatcatgtccatgtgccacaaatgaagaactttttaagacgtcttgctgaacaaaagagaagga

SEQ ID NO: 178504 - DNA, 476 bp, Glycine max
  unsure (1)..(476): unsure at all n locations
tacctttaattatatccaatatgaccttatctccccagtactttgnttttcctccctttcaaaagttatactttcttattgatcatattcaaaggaattttccctcattagttttgttaaaatttagcaaccatagccttttctatgttttctaccaggttgctgcccttggtgctattagcaacatagtgatcgactttacaccacagaagtcaacattcatggaatgtggaggtgttaaggagcttatccaattgacaaagtctatggattcatctttacggttaaatgctgtattggccttgaggaacatggtatttcttgcggacaaaatgtgtaaagaaggaatttttaaggagttgacagtgtcttctgtagctagccttatctgcggtaatgatcttcattgtcaggtcctattttttctgatcaattggtgtgtgaccaataaattgtcattgatctgtatgctctgc

SEQ ID NO: 178505 - DNA, 317 bp, Glycine max
atcttcaaggaaggacaacataatgaacattccaatattatcacactaagaatgaagctcgatataaaaatcaacaatgtttgaccattatcatgaatgttgaggttgaggatccaaacttctggtccacatacatgttacaaatgaaaattaaaaaaaagggaagatttctttattagttaaagaatacatcataatgaaaagaaattgtcttttcccttcagtacctttgtatgcttaaagaatgagcatgcaaaacttccttaatttgtataatataactaccaattacagttgctctttataaaaaaatacca

SEQ ID NO: 178506 - DNA, 463 bp, Glycine max
  unsure (1)..(463): unsure at all n locations
tatgcgcatatttncttacgaacattcactcgcacaatatattcttctaactaagaaaaatgcacccatgcacaatcaaagcactttcgttacctacattatatgtatgtacttccaaggtgtactacctacaccacatgcatttcctcggctaaatttacatacatgcatgctcaaagcctcttggctaccaaaagttgcacacatgcaaactttatgatgaatcttggctatctacacaataaagtgctacatttcatgaattattcaagtgtttttactacctaaagccgcatgcaaattcaagtatattttcttttgccgactaacattgtattcaaattaaaaggtgtatttgtaaggtatattctttacataacatgcaacatatctatataattttgagagacattntgactaccacaaattatatgtacatacatccaagtatttagctaccaca

SEQ ID NO: 178507 - DNA, 135 bp, Glycine max
ctccttggggggcacaatcgatcttaaagatcccaccccattttagactgaaaccaaaatcattaattagaagcgatgttcccgaagtttcccaccgcagcgctttagcacacgtttagcttgtatctacttatt

SEQ ID NO: 178508 - DNA, 458 bp, Glycine max
  unsure (1)..(458): unsure at all n locations
tactaagcttcttatgagccctggattgatgtaactgattatatntttatagtttaaaatgcatgttagttgtaggattttagctccatctntgaatactgcagtatgctagtgatttgatccaactctgacagcttggttctatacaggcagaaattcatagtctatatgccgaggaatgcaaacttgatgattgtataaggtttgctactaatattgtgtgtgaaaagttttgtgatggttgacttatcagtttttttaaaacaactatcattttaatttctcacgaaaaagcaagagcgtctaagaaacctggaggaaaataaaagctctcaaaagtatgaacttctgacaactngtcttatgagttacatattcttggtttctttcctgtaagtaagctgctgatgataagtacctttttatactgatgtccatcatttcttctatattctaac

SEQ ID NO: 178509 - DNA, 337 bp, Glycine max
  unsure (1)..(337): unsure at all n locations
cccttagagggccctactagttttgtgtactntcactttaaatttgctgactttcaggtttgcttttcttacactttaacgagctttttaccgtttatttaagccgttttctcacctaataaatgataaaatgaagttcaactgatcatttgtgtgtgaatctcgtttaattactgttaaaacaaaatccatctgattgttcacgttgtaaccacggttaaaccaaaaaagggaaacataataataaaataatcaaaatatcttcgaataaaataataaaaaaaaatcaatcggacgtntttctttggaggttttcttgaatgaattgagtaataac

SEQ ID NO: 178510 - DNA, 417 bp, Glycine max
  unsure (1)..(417): unsure at all n locations
tatgcgcatatatccctacgaacgtcacttgcacagatattctattaactaacaaacatgcacccatatacaatcaaggtaacttcattacctacattatttacatgtacttccaaggtgtatttgttatttacatcacacacgcctccttggcttaatttacatacatgcatactcaaagcatttccgggtaccaaaaattgcacatgccctcatcttggtatttctaatacctatacatatacaaacttcatgatgaatcttgactacctacgcaataaagtgctacatttcatgctntttatttttttatcaagttttggctacctagagccacatgtcaattcaaacaatatttcctttgctgactaaaatngtatttcaattagaagggatatatttttctggaatatgtat

SEQ ID NO: 178511 - DNA, 276 bp, Glycine max
  unsure (1)..(276): unsure at all n locations
actatacacaactcaagcttaataacatatgcttttanagatcctagaatatacagttcttaattgacattttatttgaaaattcacaacagaacccgatagataaagctattgtttgacgctcaagttgcaaaatatattattaaaaactagtagttggtcatgtcgaagaacatcataaagaaagggcggccaactctagctcatagtcaatatcgatgtcggctgctactactccgtaacaatgaaacttgacgtgagtcatgtagctcactt

SEQ ID NO: 178512 - DNA, 337 bp, Glycine max
tcttatgggaggggggcttttttctttcttgtttcacgcgactatgaccccggtcttcttccgggaagctctcttccattcggctggaggggctatagcctaaccatacttcccacattcctttggctctatcagcttattatgccgccgtgtctttcctaaaccattcgggtcgaaccgtccctaacataactcggccatcattactgctgatcggaaggcaagctgccaaaaagagtcacgagaaagcgacccctaagatggaagggttctacgttctttgcgctcccataagataagagggagtcacaaagtcttctgctgcacagacaatgcc

SEQ ID NO: 178513 - DNA, 326 bp, Glycine max
ccttagaattcaccccaattccagtgtcctatgctgacttgctcccatatctactcgataattcaatggtagccatatccctaaccaacgttcatcaacctccatttctccgaaaatactactcgaactcaacgtgtgcttgtcatggagaatccccggagcattccattgaacattgtacgggcctgaatcgtaacgtgcaatgtctaattgatgcgggctggctgaaatctgaagagaatctcatgtaaatcctgacattaacaagagatgccacacatggggcaattttgaaagctgttgtagatgtctctgatgactcatta

SEQ ID NO: 178514 - DNA, 432 bp, Glycine max
  unsure (1)..(432): unsure at all n locations
gcttgactcacaccaaacatggcaaggttatatgttttttcaaatnccttcacaaataactatcatgaagcagaaacctagctaaactacccatcatatctccctaaacccaatacccacgaaaatcaagtgaaaaagaagtctacccaaacctgaaatttcgaagtcccacacgtagagatgtcgcttacgacttcaaaaatgccttcctttcgcgatttggagcagaaatggtgaccaaaggttggagctttgttgggcaacaatggtgggtgagaaaaaaaggagaaagctacgtgagagagggaagaaaagcttctgaaatcttcctgctgactgagtgaacggagagagttgctctttggtttataaaggcttctctcttttctatttatttattctaagctatgccacatgtcttaatttgagtgg

SEQ ID NO: 178515 - DNA, 421 bp, Glycine max
gctagccatcttcagaagagaaatagatgttttttatgcacaacaaagtcacggctccagaaatgggtgattacaagacgtgtcggtgtgaccgacaaaaagctagggttgcctttcatagagagacagtgacattatggctggatgacgtacgcggccggagtaaacgctcgacccaccgaggttttgatgaagtgaagaccaacaaatgtaaccaatcgcatgcaatagacacataagtcatcaactaaatatgcgagacaactccccctgcggccatggtaatccgataaaaggttaagtaatccactaaaacacaacgaaatccacaccaaacattatgtcatccattacatagacaagtaatcgactaacatatgccgccttaacataaacacccatacatgaaaatgatatcgat

SEQ ID NO: 178516 - DNA, 416 bp, Glycine max
tctcgagaggtgaacctagaccggtcatatcttatttttaatgtgtacaaagacccttccattccttagatgccatctgctaaatatctatatcacaacaccagatttaacaacgcttattctcaacaaaacaaaaaaaataaaactgaaatttgaattgcgcgcttatcgtaatgggttgggctcatggcgccttataataattactcatatgctaagcgcacctactcacgcttatcctaaagacataaaaaatattcttctgccgattatgcttaacccagcatgctgggcttaacctaagtctacaatgctttctaaaagaaggtccggtcttagcacagcatggcacacttaactcagactcaccaaaaagacccttatgcttaccacacacggcatgcttagcctaacta

SEQ ID NO: 178517 - DNA, 277 bp, Glycine max
aagccctttgataatgtcgtgagaccctgtcatcttaaaaagaatcttagctacagagtgtccacactaatgaggctcttgaacgcttaaatgaactcctaccaactgcaaatgaaaccactaattgtgtgaaacagaacatataaattgaaacagcactggtggttctggattcctctgccaaaggtgagttaaaacacatcgggtgagaataatatgaaacattagtaaaatcacttcacccccagctcaaaacagtcatgatcaattatttaaa

SEQ ID NO: 178518 - DNA, 449 bp, Glycine max
acggacctaaaatactcactggcataatctattttagtacactgcgttaacctatttgtagcctgaaactgccgatacaaactaactgagaatgatgccttcatcagagcatgttagcttaagcaagcgcaagcggccattgagaacgattcttgatgttggatatttaacaaaactaagaattataagtgggctaagctatccgatgcaaaggagctagccactgaaaaatatcacgacagcggggcatgttatctgacaacattagtgcaccacaaaacatgttctcatgggaactataaccacactaacacaatattaaaattagacccaaatcacatgtgaacacattcttcatattccataaactacaacatataatgtggagaaatgctgtataatgcgaaactgcacatgagaaagaagtgtacatgaaatcgtgaactgag

SEQ ID NO: 178519 - DNA, 347 bp, Glycine max
agcttctcaaggaggtgagcttatttattatatgttgtgtgtgtagctaacctctagcttctcaaggaagttttctcaaagaagcttctcaaggaagttttctcaagaaagcttctcaaggaagccacctagtctataaatagaagcatgtgtaacacttgttgtaactttgatgaatgagagtcttgtgagacacaactcaaagttcaacttctctccctttttcttccttcaatttcgagctcccccctctctctgtctctccctctttcttttcctccattgaagcattctttccaagcttcttatccaaggctcatcttggtggtgaagctccttcttccatg

SEQ ID NO: 178520 - DNA, 474 bp, Glycine max
tgaattctccaagcatgtgtttaacacacgaaacttgtgtgctactttaagataatgatatgtcaaaaccagactggagaagtatgatgcagttgcatggtagatgtttaagttggtttatatttcccaatttccatgaactaatgctatttcactccaataacaaggtttgctgatggtccattgcattttggtctttctctgtatgtctgtatgtagttcaaccttaatgctgtataacaaattcatgtctacatctagaagccaccagaagttatgactatctctttgattagttccaaacatgtttcagatgtgttttctctcaaatgagtcacttgattatgtttaatagctaaacattggctatcaagtggccactcgatcattgcagattaatggacattataaatttattatatcactatggaattggtacgagtaattgttgaataattataataaagagaatgt

SEQ ID NO: 178521 - DNA, 412 bp, Glycine max
  unsure (1)..(412): unsure at all n locations
catgcaagcttattngaaagatttaagcttgctggttatccagttaaaatgttgaagactcaatacagaatgcatcctgaggttggtgcatattgttaagatgttctatattggttaggaatatggctaaaatactgtttagaaggcttgggctatccttcccccctgaattaggttttagagttgagttaggccttactcaacccatctctaatgcatatgctaagcagaatcttgcaaagataatttgtttaatatgtgtgatctttctgtgtccaaataagtatcaagaggttgagactcaagggaattgcctctgaagcaagaggttgaaacacaacagaattgcctccaaactaactagatacttcatacttataatttattttctgggcttgtcattcntgtgcat

SEQ ID NO: 178522 - DNA, 469 bp, Glycine max
tcaactatggatgagagaaataaaaattaataattgtacatgggatacccgcgagtaaataccaattagaaatgaatatcttaatcaatatccacttatatattaatgggacgaggacaagtaataaggcacttgtaccagtggatattcgcaatttaaaactaattactaattatatataaggccctctaatttgctatatattagtgtaaatatatattttgaatctatttattcatattataaatatatatgtattaaagttatttattcatactacttgcaatagtctcacctcattgtctctctaactctagcagttaacctacttgtagtactaatgatgttagctcatattcaccgacatatgtaaaaatttaacaaaagacaatcacattgttttatcttaaattggtgagatcgtattcaatccagctgggacactgtgttgcaatatatgtctagaaca

SEQ ID NO: 178523 - DNA, 324 bp, Glycine max
  unsure (1)..(324): unsure at all n locations
agcttnnnagggcgatgttgcctataattgtacacgcagcccggctaggtttcttcgtgctaactgaaccgaagttgtgtttcggccgactggcatgttctcatcttgtcggccaggaaaacattagcccacctcggcataaaaaacatgattcacctatatttgacaggaaaagaaaaatgctagccgacgtcggccagtaaagatgacccgaccgaggtctgaaaaataagcatgaccggatgactccggtcgaacatttcctaactgatatcatacaagtattattcagggattgaatagacaaaacaatagccggcatcg

SEQ ID NO: 178524 - DNA, 396 bp, Glycine max
  unsure (1)..(396): unsure at all n locations
tgaagaacttntataagaaaaaacaatctcttttatgtatatataggtcgtatgaacgattgatacttgaattcctaaattctgaattttatttcctacaattgagcctaaaaacattgctagcctttttcttggttaaccttatccttgtctctatctagccttaccctacacatattggtgaaatgctctttgatgtggccataatctcttgagtcgcctaataactcaaagggaattatagtggtaaaatgcaacagcgttatcattagacaaaagccatagatgtgtgatacacttgagtggatgagcgtttcaaacaacaactataattgtcattgtacgtttgatttgtgtgctgacatgcaacgcctaatcctaatgaaggatgggggc

SEQ ID NO: 178525 - DNA, 340 bp, Glycine max
agctaagctctagtttttcaaggaagttttcacaaagaagcttctcaaggaagttttctcatgaaagcttctcaaggaagttatttagtctataaatagaagcatgtgtaacacttgttgtaactttgatgaatgaaagtcttatgagatacaattcaaagttccacttctctccctcttttattccttcaatttcgttctacccctttctctctttcttttcctccattaaagcatcctcttcaagcttcttatccaaggcaattcttggtggagaagctccttcttccttggctgattccctagtggatggtgccacccctctcctcttctcctttgc

SEQ ID NO: 178526 - DNA, 406 bp, Glycine max
ataaatcactcctacatgtcatctctagcatgtctttttttctttacccactcctcacgtttggttatttagggaaaaacaccattactaaacgcgccgcttgggattcctatcgcaccatatccaaatctagaacgatgggtgatcaagaggagacgcaggaacaaatgatagccgacatgtcggctctgaaagaacatatggcctccatgatggaggccatgttaagtatgaagcagctcatagagaagaacgcggccaccgccgccgctgtcagttctgctgccgaagcagaccctactctcttggcaactacgcaccattctccctcatacatagtatgactgggaatggacacactgtggcacgatggcattcctcacctgagatacaaccgagcggctta

SEQ ID NO: 178527 - DNA, 467 bp, Glycine max
  unsure (1)..(467): unsure at all n locations
gcaagcttagggtgaaccacaatataatcttgttctattttctttatcacaatccctttcttcctggtagttgtgtaaacattcatggtagagacatcacgtcaatttccatcaaagttgacattnttataacgattcggcagttgggtaactaatactcctttagtcttaattataagaaaaaaaatcacactgattaaaaaaattaattaatatcattttattttattaattccatttataggtcagagtttgtgggtcaatagcctatgtagcccagacatcatggattcagaatgcaaccatccaagacaacatattgtttggtttaccaatgaacagagagaagtccagggaagcaataagagtgtgctgcttggaaaaggatcttgaaatgatggaacatggagaccagactgagaatggagaaaggggtattaacctcagtggtggccagaagcaacgtg

SEQ ID NO: 178528 - DNA, 397 bp, Glycine max
atatattttacttccacttatcagttacctcactcttttgaaaccctatttcgactctctttttggagtcacttacctgtgtagcacaacatatagtcttggactcttggtccatcacgtgactcatgtcactttctttctaaatcctaacagagaccaacacacatcctcattcctcacttccacttctcaattacctgcaccgtcatcgttcaatattggtcgacaataccgtgtcccgtcaacgacaagaaggagaaccttcgtccaccgttatcgttcaatattggtcagtgaaaccgtgtcccgtcaacgacaagaaggagaacctccgtccaccgttatcgttcaatattggtcagcgatatcatgtccgaccgtccatgaacctctatgt

SEQ ID NO: 178529 - DNA, 225 bp, Glycine max
aaacagaaactcttggcaaatttaaacgacaataactttttattcggaagttcgatagaggcccgtaatatatcgagacgcatgaaattgggaacagaagctttgaacataattcaacgaaaataactctatattccgatttgcgattgagtccccgtatatatcgagacgcacgaaattgagaagagaaactttgatcaattcaacgacataaattttactcga

SEQ ID NO: 178530 - DNA, 429 bp, Glycine max
  unsure (1)..(429): unsure at all n locations
ttgagccaattcaaacgacaataacgttttactcgaatgtctgattgagtcccataatatatcgagacggtcgaaattgaatgttgaatctctgagcaaattcaaacgacaatagctttttactcggacgtctgattgagtcccgtaacataacgagacgctcgaaattgaatgttgaacctctgagacaattcaaacgacaataactttttactcggatgtctgattgagtctcgtcatatatcgagacgctcaaaattgaatgttgaagctctgagccaattcaaacgacaataactttttactcggatgttagagtgagccccgtaatatatcgagacgctctgaaatgaatgttgaacctctgagcacaataaaacgactataactctntactcggatgtctgattgagtctcgtcatatatcga

SEQ ID NO: 178531 - DNA, 404 bp, Glycine max
  unsure (1)..(404): unsure at all n locations
gctttactcgctaagctaccaacacaatataattttttttagtcggcgccgctaagcggagcctttaatgagcttaccgcaaatccttgcagcacatgtccagcttagcgggcgctntcccgctaagccagttctgccaaatcttaaaattctgcaacttgcgctaagcggctccatatgtcggtaagcgataatagtttcttatataaaatctagctaagcagaccatgtctcactaagcggccagcgtctctttcaattttatttttcagtttttaaaactcgaataacggtgccctaattaaatagctggtgtctctgccacagaaggctttaaaaagagaaaaggatgggacaaggctatatctcataagacacaaagaaatctcttgtatatgctggac

SEQ ID NO: 178532 - DNA, 372 bp, Glycine max
acccacagagagagcgcaagaatctatgtagagatcatttaacacttgtgaaaaccttttaagatcaagtagatgtttcactagacgagtctacttagacatgtcaagcttgtataactcttaaagaaaaagagttcaagctgtgtcttaagattgagacaagtgccacggaaagagctactcttctcaagaagtttcagaagttggaaaacaaactataagatctttaaaaggatttgaaagagatgaataaacttcatgattatcaataagaagaaagatatgatctatggagagaatgtgaacaagctcacaaagattatgaaaatctcaacataagtaaacataatatttggtggaatgtgaaaacac

SEQ ID NO: 178533 - DNA, 327 bp, Glycine max
  unsure (1)..(327): unsure at all n locations
catgaagcttaaactttgtactttttatttantttaaaactgaaactaaaacataaactgaacataaaatgtntcaaaagcagaaaaataaatggtaatcctgtcatggctcttcctgtgctgctgtgggctcatcctgagagaaagagggagcatcctgtgctggctgagggatatccttagctgtaacaagccatggatcccaagtgttttgcgctactaccatatctgctacataatctatatgtgcagcgccatactcctcatctgagacctctacccctggtgtagtaactgaagaagtctgcggggtggtctctggagtgg

SEQ ID NO: 178534 - DNA, 470 bp, Glycine max
  unsure (1)..(470): unsure at all n locations
ctataaaactcagcttcaccattgattaattccacaaaaatttttctttttgatcgaataacacattcattcatcttttcaatcttacgagacctttggagaagaagaattatcaaaaattcaaactctgatnttgtatgcaaacatgaaacgattatcaccgaattgctttgaacacattgtangattgaattcccactttcattgtgatgtgaaggttccaccaagaacattactttcggagaaagaaaccagaatgaaagatagactaagaatcttaatacaaagtttagtagtatttaacaatttggcattgtttctacgaaacaaaatggagctttcttccttcaatattagattntttgagacgttccattgtaaaatcaatcgcgagattgaacaatacatgattattcactgagatgagatgagatcgaaacatctccttgaacacactcctgattattaat

SEQ ID NO: 178535 - DNA, 403 bp, Glycine max
gaatttatcaaggagtagtgctccttaagcacgctactgaaaaaagaaacattttgtttgtcacctccacaagttcctttcaaatgaaaccctggcaagtgtgttatcttacaaatattatgaaaatgttgttcagggacactacaactttgatacagagggtcagtgttcatactacaaaaccatgctgcgctagaattagccatactattgtctacaagctttcgccacttgtgacaggcatcacactgaatccatgtatcattgtactcaaaacagtcacctttaggcttcccaggcgacttgttttgagatacatgagatgtaacatctaatgcatgctttgctgtaactaatcctctcacaaatactattgccttggaatcatagcttcatattcaat

SEQ ID NO: 178536 - DNA, 398 bp, Glycine max
  unsure (1)..(398): unsure at all n locations
tctacctcangcactcctctaatgactatggcatcatttctggcgctaaactgctgggagttggaggccatcttctcaattaaatttctggcttcaacaggagtcatgtcttcaagggctccaccactggcagcatctatcatacttctctccatattactgagtccttcataaaaatgttggagaagaagctgttctgaaatctgatggtgagggcaactggcacatagtttcttaaatcgctcccagtactcatacaggctctctccactgagttgtctaatacctgagatatctttcctgatggctgtggtccttgaagcacggaaaaaaatttctaagaatactctcttaaggtcatcccagctcgtgatggaccttggagcaaggtaatacaa

SEQ ID NO: 178537 - DNA, 447 bp, Glycine max
  unsure (1)..(447): unsure at all n locations
tatccttattgntgtaagtgtggttcatgtctgtgttattagacaaataattcatttctagaatagttcattattctttaaaacgtggtttataaagatcaaaacattttcaaatcttgcgtttggttcaaaacagatttttttttccctttcatttgttcaccaaaaaatgcacacgtttttaacttcatttaattattattgattaaaacattttcatgttttgatttgattcaacacacgtttgattttatttcttctttcatttactcaccaaaatttggaacatatataatcgtattatataagaagggaaacacatttaaatttttgcattaacttttataacatagtttttattagaaatcacataacagtataaattaatatgaaatattgacatttatcaagaaatttgtgttttaattccatcaaattttaaaatat

SEQ ID NO: 178538 - DNA, 348 bp, Glycine max
  unsure (1)..(348): unsure at all n locations
agcttgcatgatttggtaattcattgtggttatcgtgagctngagaattttgaccactattgtgttttgtgaatattttctttaccctttgttggattttgtgttgcttgggaacaaacaattgtttatgtttggggtattttgataattgttttcacacctcattntgtgagcaattatcttagcttttctttagtatttttttgttaataattgtggtctttgttaataaattgaataaaatagttttgaaaacttaaaaagatggtttttgtgtaaatttttatcttacaagagaaagcttcgatcaatccagaaatgaagagttgcaatgatgatatcgtgtta

SEQ ID NO: 178539 - DNA, 488 bp, Glycine max
  unsure (1)..(488): unsure at all n locations
gacctataaaactcagcttcaactntagtcttcatgttgctccccctatctctaatagttagtccgtgtgttattattcaacccctattaagtcaaaagacatttgtgtcttaagacaaattaggacccttaattattttgattagatgtatataaatacaacggctaaaagttgtcttatgtgatatcaaatcatgcttcctatatctgtgcccgtctttccatacaaaagcaaagatactccatgatccgatacaacattaaagggtgcatttaagaactttagtgtgcacataaacaacaaatctttttatttgtgttagagccaacagtggcttggtaggacaaagaatactgagttgtgtgtaagcttgttgtaaagtcagaagtagtagtgactcatacttgtaactttgataagtaaatgggaacttcggtggttaccaagaattcgatgtagtctcggtagttgagactaactagtataa

SEQ ID NO: 178540 - DNA, 447 bp, Glycine max
ctctaagtcacctgcggcatgcaagcttgcagattggtcttgctcgtgtttgattttgcgggtccgaaaagaggcaaatttgatcattctactaggacgactgagaaaactggggcaaataaagagggtgaggatgagggagaaacccatgctgtgactaccattcctgtacggccaagtgtcccaccaacccaacaatatctttactcagccaataacaaactttctccttacccaccacccagttatccacaaaggtcatccctaaatctaccacaaagtctgtctaccgcacttccaatgacgaacaccacctttagcacaaaccaaaaaacaccaaccaagaagtgaattttgcagcgagaaagcctgtataattcaccccaattccagtgtcctatgctgactcgctcccatatctactttgataattaatggtagccataa

SEQ ID NO: 178541 - DNA, 419 bp, Glycine max
  unsure (1)..(419): unsure at all n locations
nntgcggattggtcttcgccagtgaaaggatcgatgtgtgtcctaaaagaggcaaatntgatcatcctactaggacgactgagaaaactggggcaaatgaagagggtgagaaagagggagaaacccatgctgtgactgccattcctatacggccaagtttcccaccaacccaacaatgtcattactcagccaataacaaacctcctccttacccaccacccagttatccacaaaggccatccctaaatcaaccacaaagtctgtctaccgcacttccaatgacgaagaccacctttagcacaaaccaaaacaaaaaacaccaacaaaaaggatatttgcagcaaaaagcctatatggttcaccccaaattccgttgtcatatgctaaacttgatcccatatccactcgataattcaatg

SEQ ID NO: 178542 - DNA, 378 bp, Glycine max
catgcaagcttgaagtaccctacggagggtggggtcctttggggaagaacaagagtggagacgatgggctttgcatcgccatttccaaatccaccaagaggtcgcgacaaacccattgcttgatgagagggaagaagaactactgttgggcaaggaaacccaaatgagtccaaatctctctggcatgcgaacaatcacgaagacaatgaagagtgtcttcctgcgggtgggagcaatcatggcatgccgcccaagtagctaagtagtgacgatagcgaacatcattggttggcaaggagaataagccaaaagaaggttctaatcttctctggaatgagaggcttccaaagccatttgaagttggccggggcggtgtca

SEQ ID NO: 178543 - DNA, 479 bp, Glycine max
  unsure (1)..(479): unsure at all n locations
tgttgactnttacaataaaacgttgaaagtcatattattatattttatgattcaatgtcaatgtgaatattttttacaatgtcattacatgatcgatcattaaactcttcttataacaacatggtgttatctttgtttaagaaaatttctccaagttacaagttaattaaaatatcgatgactaagctttcgacaagattaaagtgacgttgtttctatcaaaatattgtctttcgataaaagatggtttcttgacaaaattattatgcacatggaagaatagagtgctcgcaggaggagtttgaatttgaatntgaaataaaagttacaaaagttagcgaaaagggttacttgaagacattagaacgtcgtagatctaaataattaggaacttgttgtactcgtgtcanaaatctataattcgaacatttagtggtaaaagtttataaatnaatacctttaacaagcatttccgttgg

SEQ ID NO: 178544 - DNA, 246 bp, Glycine max
caaagaggacacaaagatagtcaagttctaatgaaagggaacgtgtcccggaaggactatactctagggtgagcgcgccttcaccagagcacagagctcataggaaacaagagcaggcggtcacactttagtgactatgaggacttgataaaataaacgagcgatgtagaaaaaaaacatgggaaggaaggacgcaagcaagtgcaacagaactaaaaggacggaaagggggccaaaaagggcccg

SEQ ID NO: 178545 - DNA, 386 bp, Glycine max
  unsure (1)..(386): unsure at all n locations
atgagcaagatttttagattcaagatgatttatttggagacaanactggaggcaatcaagaatgagttcagatgtcagatgaatcagacacttcagattcaagaggaaagtgagaaccttcggattcaagaggaagttgatttaagaataagattcaggatcagcttccagaataagatcaagattcaagactcaagattcagaatcagagaagacttttcaagatgagttgaaaaggtttctcaaaactgagtacacatggattttctaaaacatgttaccaagagtttactctcttgaatcgagaccaattattgtatcgattccatagcaaaatgatttgaaaaatttcaatgaattacacattcaatgattcaaaagtggaa

SEQ ID NO: 178546 - DNA, 434 bp, Glycine max
  unsure (1)..(434): unsure at all n locations
cccagtgttgagaagaacgatgatgtgtgctcttgggaatacgtgagctcagatgaatgtgggcaactggggatggtggattcatgtgtgatttgtatatgtgaagagtcgacttgcgccatcacccgatcgccaccgagtaccacatatgacgggtaccccataatcctacaagcttgaagtgagaaagtgtggaagagtcagtcttcctacttttattcgttgaccacagagtggtacctggagatatgtcgcgggggtcacgagaccttgtggatgtcatgtggggtgctattgcccaaaaccaagcttgaccaatcccgacccaacccgggcatagtcagtcaatgagaacctatgacgtacctaaacaggcgagcatctggcagtcaaccgattaaagaacanagaccacaaagcatggaggcttgtgt

SEQ ID NO: 178547 - DNA, 387 bp, Glycine max
  unsure (1)..(387): unsure at all n locations
tccttaagaagatngatgtgccatcatttncttctattttctatttcctntntgcaccattttaattactgattggtcttaattgtcaattaatcaggcagctctattatttgggctcatttagctaatttgatgtttttaatctaatttcaagaattaatgaaacattgggcttaatccggattttggttatggacttgaagagggaaaattaagcagcgcttaccttagttaatttctaattaggaaatttcgcaattttattntatgttgttcagagtttatttcgctttgggccagagtattgtaatatggcccagtgactttgagtgactctattaaatagcagcctcgggattcgtgcaaagcattctattatgctatcca

SEQ ID NO: 178548 - DNA, 289 bp, Glycine max
ttcttgagaagctagagcttagctacacacacccatctaaaaacttagctcacctccctgacaaaattcctggaaatacaaaaaaaaaaagtccctactacaaagactactaaaaatgccctgaaatacaaggcgtaaaccctatactaatagaatggcccaaatgcaagggccaaaagatggaaaaatctattctaatattaacaaaaaagagaggacccaaccttggtccgtgggctcagaaatctaccctgggattcataagaaccacaaagcctttttagcagct

SEQ ID NO: 178549 - DNA, 459 bp, Glycine max
tgtacgaatgtaagagacatcttcttcgaccttggtgatccttgactccatctcattgaatcgcatgtacacttgtaactccaaggtatcaaacctttcaccaacaaaggtttgaagaccatcaaacctgtccaaaatcttttgaagaagagaggaatcttctccaccatgtaagtgtccttcttcatcgatgggttgagcaccctttttcacccaagagccatcatgctctttacggtaaccaaaggatgcaatcactgcagcacctattagaaaggatctcttgattggaacataaggttcaaaatcaagagggatgttgaagtgttgaagaaagacggtgactaggtgtggatatggcaatggagcatttaatcgcaatgccttatgcatgagatatcagactaagtgttcccaatcaatttgttggcctttatgaaaagcccacataacaataag

SEQ ID NO: 178550 - DNA, 420 bp, Glycine max
  unsure (1)..(420): unsure at all n locations
actgtactctctctttcactactctttaagcctagaagacttatagaattgaactaaccacacttcacaacacaaaccctaattatttatgcttttctctctcccgcactttccactcttcagtcttcaacggttcaacccaattctcattctctctctggctctctccctcttccaataatggcttctcttccctcgaggcattctttattatagcccttgcgtccctttcgccgttttccctgggaatcaatatcaaaattaccttcttttcaaatttcactccataccctcttcaaaaaatcacttttccccctacccttttgtttttacctacctgcccatcanatntcataactgagaacacattcctactctctcangatcaatcttctgtgtgtgagtgttgttcttggatgg

SEQ ID NO: 178551 - DNA, 424 bp, Glycine max
  unsure (1)..(424): unsure at all n locations
ctaagctaccgagtacttaaatcttcagtctatttgagcctaccgtttatactntgagtttaccaaagaaaagtttattaacgagttaattcagaatgtgcctgtgaacttgtaaactcgaaagaatttacaagttaactcgagagtttgataattatgcttgaaacatgagcccagagaggtttgttgaaaaaacacttaatgtttgtgcctagagattcaagcaaaagaatagttgctttgagctaaaaaaggcttggaaaaagaatacttgtaacagtgtggaaacatggntcttgtgaattgtattatagtggaaatcttgcgcattgtcaatgattatagcattatgacttaattaatctctacgcatttcgcgctccaagcttgacgatcgtgtaccttccagattggatggctatcg

SEQ ID NO: 178552 - DNA, 402 bp, Glycine max
  unsure (1)..(402): unsure at all n locations
ctttgtttcttgatgagagacancttcccttaaaactctgctaggaagaatttgagaagagagcacagtccataactgcaaaatcaaagttgaaatctgaaattaggttcaaggctgaggttgtatcaccagtggaatgggaaccggaatatgctctgatttcttgtctaatcttggctacttttgtaatctatctcttcattaaatgaggggaaattagtatcagcgtatagtcaaagggtggattgatgtaaactaacaagagcatggtagagaaaggtggagagagagaacgagaacagttactaatagttgtatgctaactcatgctaacttaactaggtggataagagatcagcagaagtctgaaggagtttcacttggtgaagacgtgtacataat

SEQ ID NO: 178553 - DNA, 410 bp, Glycine max
  unsure (1)..(410): unsure at all n locations
tactgacgtgcagatataacctgctactggatttgattattatataattgaatctgctaagctaaattatattgcacttgaattcatatctgaacactctccttcaagatatacaagcatacagacaattgtatagaggacaatgctactaagtttagaccctagtagcaatagagagatatccttttaaggctaatgagggtgtggtgaagcttatatgctcttctataactcttcaaaaccttcttcatctccttcattttctatcctttgaaattctcgtctccatgactccatctgccagaatatcaatgcttggttatgctttatacaaaatactatgcaatagcatgtcaatntgaacaggaagtgcctcacctgatcatcagaatgtagcagctgttctgcaa

SEQ ID NO: 178554 - DNA, 424 bp, Glycine max
  unsure (1)..(424): unsure at all n locations
catcaagctntataagaactcatgccatgcctatttttttctttaacatgatatccatgtccaccgttaaaaaaatccctagatcgcttgttataaactcaaagaaactattatgccaagcatgtaatagaatcccactgcatctaatccacacatgtctctcatttgacacattagttggtttccactttccaacttggtaaaaaagctgctccaaaataggtttagtcccatgaatcaacacttccaagtcctccctatccactagcttgattagtaccatatctccacccattagtgtgattaatcaatttatcttggacagaataaataatctctagttggattaatctncccacataacactactccaaccattgagaagcctcttcacccatcatgaaagacaacacccttcactcat

SEQ ID NO: 178555 - DNA, 359 bp, Glycine max
  unsure (1)..(359): unsure at all n locations
tcagcttttatatataaatgttcacagatagatggtgattgtattatatgtcacagggttctctatgccagagcagctggttgcttgatgtatgctatggtgtacactaaatcagagttgacacatgttgttagccaatgtctgcaagttatgtctgtcctacgaaagtgacactgggaagcactgaaatggatctttaagtaccctaaaggtacacaggtcatcgtattatgttatacagctagcaagatgatccttcagttatcatatttggggattctgactatgctggtgatttggatgatataaggtctacaacaacgtatgtctntacttttggaagtgggcctacttgtgga

SEQ ID NO: 178556 - DNA, 365 bp, Glycine max
agagaattaatatttttcagacacagtgtaaaaagcagaagttattcgacgtagcaaaatatttttcaggattcaaaaagtctatttatttctatatatgttcatcattaatgtatctgtcaagatgttgggaaattcatccgaaaatcctgaatacagtaaaataaagaatacaattttataataagttcataagttcttttttacagatttccttcttgagattaatcgttgatatatggaactcattcctcccatagtcaagaagacaaacctattccaggagacaaagttgtccaaacttatatgcatactactcgtttatcatttatttacacaattgagctactaaattaacacataac

SEQ ID NO: 178557 - DNA, 384 bp, Glycine max
cgacactatagaaatactaagcttgagatgaggaagtgtataatggtgaaactttctgcttttactcgttgaccacaaagtgggacctgcagatatatctacggggtcatgagaccttggggacgtcaagaggggagctatcgttcaaaaccaagcttgaccaatcccgacccaacccgggcatagtcagtcagcgagaacctgcgatgtacctatacatgcgagctcctggcagtcgacagattagacgaacatataccacatagcatggatgctatgggtggctggccacctgtgaactctgattgatatgtgagatatggactctggtaatcgattaccaatggtgaggaatcgattactatgcttaaaaatgaatacagg

SEQ ID NO: 178558 - DNA, 465 bp, Glycine max
  unsure (1)..(465): unsure at all n locations
ccttaagncacctgaggcatgcaagcttgattaaaaatagtttataaatattttatttaatattnngaattntattcctttattaatatatatgtgaggggtagagggtgtcacatatagtacattgtttcatatttaattaaaaataatatgcagaattagaaataacaaataggagatactaaataagtttctttagtgatactcgcagtatttttaccgtcctttgttaatagatacgatatcttgtttcgagtttacagaatttacttatttataattattcattaattatgtagattgtagaatatttgaaaaacagttaaactatgttctcaagaaaatttaaaataaataaaaattataataaaaatgtttgttaaaatattctaaaattatatcttatttttacaaaaatattcatgcgtaccgatagatatacttggatataaaaaagatcacata

SEQ ID NO: 178559 - DNA, 467 bp, Glycine max
tgcacatgtgcgctaagcctaatttgagtgaaatttatacttatatgttttgggcttatcgtgagggatgcgcttatcaagtgttggtgtgcaagatgtggtgcttaacctgcatacccttgctaagcccacattaaaaacattttcatacagagaagactttttatgtctcgcgagacttactcgcttagcaagaatacaaaacaggaagtgcacgcttagcaagtaatctcgcactaagcccaattagcataaaaattctgacagagagatatttgggcttagcgcgtaggaaaaatgctatgtgcacgcttagcgcgcaacaacataattgaaacatagcctaattcaacaacaacaaccagcgtactaataattgaatttgaacttgatcaattatctaaatgacatgtattaagctagcaagttctaaaaatcgcggcacaaggtatcaagcaccagatcac

SEQ ID NO: 178560 - DNA, 258 bp, Glycine max
caaacagcaaaaccgaaaacacgggaccccaactcaccaccaagggggggagcacgtctgaacacccttaaaacaccaaaaaagggaaaaacacgccaaccaggcagggagatacaccaagccacctaaacatccctcatccgtgtcacggggaagctatgagcgccagagattagaaaatcacgcacccatggccgacacaccgcgggaagatatcagcagaaacacctcagacagaaaggcccacaatcactcaac

SEQ ID NO: 178561 - DNA, 473 bp, Glycine max
  unsure (1)..(473): unsure at all n locations
taagggaagcactggttagacatctgtgagtatccatattattgaaaattagctgacttatatctcgtggtagcatagaaaatgtgttatatttatcaatatcctgttggataaagattgcagtgattagatcaaaataaaaagggtatggacagagtaaatgtagcattttttttgtaaaaaaaaatacctcgcttattttctgtatgcataagtccaacagtgatggacattctccttttcgtatgtgaaaatctacagatggataagaaaaagaggatgtccaccatttcaaacttccgcatttgcaatatcttcgtggtagtcctctgataagactatcttcgttatcccactctttgcttctataacatgctccccccatctagaaaatatcccgtcaccaatatatgtcaaaaaatntgcagcagaacactagtgcaattcattcaatagccaaatacgaacatatg

SEQ ID NO: 178562 - DNA, 283 bp, Glycine max
  unsure (1)..(283): unsure at all n locations
gcttccnccagaaggcgaagcctttttggtggaactttctggaaggccccagtgggcctggattctatatgcaccccctgtatactaaatacacccctgcgccttttgtgctgattctttttccgtaacgttacggaaccttacagattacgcaatcatcccttctttggctcccggaaagttacggaactttatcgattttgcaacaaagctttatcttgactttcggcatgtaacggaacttcaccgattatgcaaaaactctttttttgacttccggcat

SEQ ID NO: 178563 - DNA, 404 bp, Glycine max
  unsure (1)..(404): unsure at all n locations
ggcattttcngggtcgcgaagtgcgtggctatgagtgggacttcgaaaatcatgtttggggttttgggagatatgatgggtagttttgttagttttctgcttcatgatggttatttgtgaagactcttgttgaaagcttgttgaaattgccatgtttggatgagttaaacatacccattctgttctagggtttttgtgatgatgtttgtgatgtttatatgctgaaattgccgatggaaaactgttagagatgaacggtagaactaacctacggttacatagtgagaatgtgatgttatgagtggaaaaaaaatagtgaggctctgatggttggaggctaaatctgaattctgtgtgtaatggaagtttaagtggctaatactagcttganatgtcattaagac

SEQ ID NO: 178564 - DNA, 113 bp, Glycine max
aacttacatcctaactctctgcattaatacaaaagagtactctcactccatgtctattactctgaaactacccatgttgatgagattctacatccactactacatattatgac

SEQ ID NO: 178565 - DNA, 442 bp, Glycine max
  unsure (1)..(442): unsure at all n locations
ttatgcacaggattatgacacaacattattctttttttgttattgagcccagcagatacagaggcacttttccttcacccaattccagtctagtattcaaggcattgctttacttcccaaaaatatcactatgatttctgggctctctatattgaatatctaaccctgcactaatggtatgaatatatgatgttgatatggtcagctacatggactattggaagcatcaaagacatgtnccactctaccagatattcccaaccttgatgtcggcagtgacacagtgaaaacatccggaagtattcacgcactctgcgtagagatcggcatggtctcgatcttgtcagagctatattcgaacaactattgtaactgagaagaaacctttttgttataacaatcacattgacgattttacatgtgattaatagtaaagaaacta

SEQ ID NO: 178566 - DNA, 339 bp, Glycine max
  unsure (1)..(339): unsure at all n locations
aacaagaatcaagccaaggctattgtgcaagcaaccaatggggcaaaacacaccatatgattataaagacgggaggctcacactctcacaaaggcaaaatcatcactttcaaatcgagctgtcaaaactatcatgacatgtagagaagaaccaaggatttcaagtcacaaaatgtcaagaacttttattttcaaaacaattaccatttcttgaacatatccagcaattcaaagaaaaacatgcaaaggcgcacatgcacatgaaattgacccanaacattaaactgaaaatccgacgacactaacaacagtaacaaattaacacatctaacaaatgaac

SEQ ID NO: 178567 - DNA, 490 bp, Glycine max
ctcaagcttaataatagatcctaatatcttattatgaacactggtggttattgtttaataatgtccacttattagcttgctaactttagcacatctaaatcatgaaaccaaactttgatcttgaagtggaggcatgagcaaaagatgaatctaatgtacgaaggttgcttccaatgtatctattcaagagacctctacatgtccatgtagtggaagcctcactaacatttccaatgtcacaaatccaataggaactcatcatcctaattcagaagctatttcacttgactcagctctcaactccaacaatagtgagccgagggaaagagattcaatatgattctcaatctcaagcactggtgatagcaacaatgaatctgcctctcaaactacaacagcaacaaccattccataagaattcccttgcaattcagtctgcgcaaattttttagctctcaagatcttgatagacacgatgatgcacataaga

SEQ ID NO: 178568 - DNA, 336 bp, Glycine max
  unsure (1)..(336): unsure at all n locations
acaggttacttcctcattgacatcttttgtcttagatggaattgccatgacaggattattgatactgtctttgatgttcggcaattgatattgtgttgcgggaggtgattccgattggattaacttaccatccttcactatgccaggtgatatgacatctgttgctggatcacctatgatgtcttagttacaaaggtcatctatatccttactgatggcataagcatgaaaccaatcaaagaaaaggacattatatttgactctttcgacaaatncgcagaacttgtcttggattcgttctctgtttgtaccctatggatgctggaaaaaccatct

SEQ ID NO: 178569 - DNA, 201 bp, Glycine max
atgaccaatctatcccaaaataccaaacaggtttttttatcagagcgtcaaacacttctacttatacacaccgcggccgaacctacgtcataaaccacagtgccttattcgcttgcccataacaaccacacgatgtttgcttacaaaaccacttacctttgatttaatcagaccctgcctgttttttttaaaatttatcat

SEQ ID NO: 178570 - DNA, 378 bp, Glycine max
  unsure (1)..(378): unsure at all n locations
ttcatactccaantgcagatgagtttggggctgctttttgcgaacaatgtttgaggactatgatcgtataatatccctgtcttctattgcggctgcgactgttatatttctttccagacttattctggctctgaagtgcatccttaaggaaatattatgttatggataatgatatacacttctctttaatggaacgctattacccgagtttcaacgcatgcgttctcatgtgttgtatttatgattaacatttcgccaatataataaaattattgctctctactctaatatatataggtaacgacttaaggttgaagattagagaangtatatcccttctactccatcaccatttactatcagctacattcttggact

SEQ ID NO: 178571 - DNA, 352 bp, Glycine max
ctaatctcaaacattgacttaagactctcccaactcatcaccgcctctaccttggaaggatctactgctatccctcccttagatataatgtgccctaaaacgctcacctcctctagccaaaaatcacacttggacaacttagcatacagtctatagtcttaaaggtttgcaacacaactctcaaatgctcctcatgttcctctctagtcttagaatacactaagatatcatctatgaagaccactacagaactatctaagtaggggtgaaagatcctattcatataatccatgaacacacccacggcgtgggtcacaccaaaaggcatacacaattctcataatgaccgtaa

SEQ ID NO: 178572 - DNA, 461 bp, Glycine max
  unsure (1)..(461): unsure at all n locations
ntatcattttcttacaacaaatcaatatcagtatatctactcttataaatcacccaccaaagaaaaaacaagttttactttctaatcatttgagaacttcaatcactgataattcagccacatctaagctgcccaatcaagaaaattgaaaccttagcaaagtggctatatccattacatctccaactaaccttgtctacttgtttttttttaacattttctgattattacggcaagagggtgtctgctaaaagcagcttaaagctgctagcaaatcttcagaattaatggggaaaaaaactcaaaatcagttgatcatgtgctattgacagtgataatgtgcattaaatttacctatatcaatcatactnggcctttaatatttaggccacagatatataaatgagagtcattgaagttattcttctatatgtgtcaacaaaattcatctacangcattt

SEQ ID NO: 178573 - DNA, 427 bp, Glycine max
agcttgtcgttccgtttctccgctcaactgttgccctcgctcctcccgttcccatcacaatccctctgccactgcctcgcctctgcctcctccgacgaccgcagtgccggcgccaaacacaacggctgggactctgtgctgcaccagttctccgaggtcaccaatcaagtcaattcctactggaagtccctcgggaacgccgccgctgacgatcgcgtccacgtcgacggtggcgacgaggattgggattgggatcgccggcatttcgaggaaatcgacgagcaagagcgcctcctctcgattttcaaggtacacggatttcaatttgtgtcttctcgcgtgctcttaccaaagtttttgtgaaagtcattattctaaatcaatgtcattgcgtttctttatttctctgataaaagaattcaattta

SEQ ID NO: 178574 - DNA, 442 bp, Glycine max
tcaacttacagagagaagttcaagcttatcgctatatgtgtgctaagcacacttcccagaattcaaaaatagtaagagattggcacttagcgcatcctgccccgctaagcccagcttggaagctcaaattctagaatggatctggggctttgctcaagatagcgcgcttagcgctactacaataaaattttccagaggggaagtggagcttagcgcatcatccacactaagcccactgattaagattcaattatagtgaagatgttgggcttagcgcagtgatgtgcacttagctgaactattcagccaaccaatcaggggtctctgcgcttagcgcgaagctcgggcttagcgcgtgaagactgagcgcttatcgcaaggtctgtgcttatcagatagacaattgcaaaagaatttctaagtctttttctatctagctctt

SEQ ID NO: 178575 - DNA, 317 bp, Glycine max
  unsure (1)..(317): unsure at all n locations
agctagtcatgtccctagatatatttgattttctcatggncactatgaatgacaaattctctgtgataaaggtagtgttgccatgttttcacggcccgcactaaagaatacaactccttatcataagttgaatagctaagagtaggaccaattaacttttcactaaaataagcaattggatggccttcttgcaacaacacagccctaatcacaacatgtgaagcatcacactcaattttaaaagaattttgaaagtntggcaacacaagtatggggggcattagttagcttttgcttaagaacattgaaagcttctt

SEQ ID NO: 178576 - DNA, 400 bp, Glycine max
gctttggagaaccaagccaatcagaatgttatacgaaatatagatgggaatagaggtaacaatggcggtaatgacggaccgaggcagaaccgggttgagggagtaaagctcaatgttcctcccttcaaaggtagaagtgatccagatgcctacctggactgggaaatgaagactgagcacgtatttgcctgcaatgactacactgatgcgcagaaagtcaagctagcagcagctgaattctccgactatgcccttgtttggtggcataaataccaaagagaaatgttgagagaggaacggcgagaggtagatacatggactgagatgaaaagggtgatgagaaaaaggtatgtgcccactagctataacaaaaccatgcgacagaaactccaagggctgt

SEQ ID NO: 178577 - DNA, 458 bp, Glycine max
tcagcctaacattcaatttcgagcgtctcgatatattatgctctcttatctgacctcccgagtaaaagttatggtcgttggtatttgctcagaacttccacgttcaatttcgagcgtctcgatatgttacgggactcaatcaaacatccgggaaataagttattgtcggttgagttggctcacagattcaacattcaatttcgagcgtctcgatatattacgggactcaatcagacatccgaataaaaaggtattgtcgtttgaaatggcttagagcttcaacagtcaatttcgagcgtcttgatatgttactggtcctgtatcagacaagcgagtgaaaagttatgaccattttaatttcttgagagccttcgttggtcaatatctagcgtctcgatatggtatgtgtctgaatcggacatgcgagtgaaatgttatgatccttctaatgtctcgag

SEQ ID NO: 178578 - DNA, 353 bp, Glycine max
  unsure (1)..(353): unsure at all n locations
atctaggtcccattggtctacaagaaagttacaccacctaccacaaagttgaagaccacatacaaggccaaagtactaacacaacaatgcaaccattcaaatcaattttggtaggggagggctggacgttctttaatgcagtactcagggaaggtatacaatgcaccaaacacagcctaaaggtactgtttgcaactatcccttcacatgcaagtgaagaaaccaacccctatgntagcaaaatagaaataaaaatgagaataagacatcctccttagtggactaacaagacactatggaaacaagtttacctagacacacaaggtcacaagccctccaatttcatcaaaaac

SEQ ID NO: 178579 - DNA, 470 bp, Glycine max
  unsure (1)..(470): unsure at all n locations
tggattgggacaaanaaacacattttaatnttcnatatcaaaaacatacaaagaaaattggcaatgatggattntaaactntctgatatttataaagacaaagaaatatattttaatcattttatgttcttacgtgcacacgataatcatctcatcatttatcatcactatgccatcccttaagggtggaaattctgttgaattataccaactttacaattacttattcaattatttttctaaaattatatgacctaatttgtttccatacatgatgtttattttattgatttaatttgtaaaagtcaaaattcccttttttgttaactgaaccctacacacaattgaatatgtccttttatggcatctgacatatttcataaacttatcaactagtcatatcaaacactttcaattaattaacttagttatacattttcaactaacttctatcttgtcaatcctaactt

SEQ ID NO: 178580 - DNA, 379 bp, Glycine max
  unsure (1)..(379): unsure at all n locations
agctttagagaagaggatntataaggggattcttattggcataaataggggggaagttagtattcatgcggacgacacgatcttctttggggaggcaacaatggaaaatgttagagcaattaaagcaatattgagggcttttgagcttgtatcgggcctcaaaattaattctgctacaagtagttttggtgctttcggggttccggatcagtggaaaatcgttgcagccaattacctcaattgtagcttgatgtcctttcctttcacatacctcggcgttcccattggagcaaatccaagaagaagtcagacttgtgaccctattattagcaagtgtgagagaaaattatcgaaatggaagcaaaaacacttatctttc

SEQ ID NO: 178581 - DNA, 428 bp, Glycine max
  unsure (1)..(428): unsure at all n locations
tacttaccaagcaactaagttcatgaaagggtgtatgttctatatttaacatgtagaggtgacctatcctnttacctatgtgaacaacctcaccagatatagctgtacaaatgagacaatagttcttgttgaatataatattgaagcctttgtcacatagctgatttatgctcaagagattgtgcataagtccattaacatatagaacattttttatttgagtcttgtgctgatttccaatgattccttctcctataatttgtcccttattgttgtctccaaaagtgacatattctccttcctttgacacaaagtcagtaatgtctggacttatcacccgtcatgtgcctagagtagccactatccaagcaccatagtgagtttcttggctttaggaccactacaagacaaaatctattagagagagg

SEQ ID NO: 178582 - DNA, 313 bp, Glycine max
agcttatatatggcttgtgtcgcttgtcttattattcacccataatcatccacctccatgggactaatcgtagaagcttcaaaagacaatttatatttgagaattcttggcttcttgagctagacatggtcaatattgttgatcttgcatgggaaccacaacaaacgagtgactttattcaaataagatttcaataccaggaccaaattgatatatgtaagcatgaattggagttgagaaaagaatcaaatgatgatgttaatggtgcggcctatttggaaacaaacaacaatgtttgtactcttattgcgct

SEQ ID NO: 178583 - DNA, 454 bp, Glycine max
  unsure (1)..(454): unsure at all n locations
tataattagtattcacctcctctcattttcctattttacttcttcactgttaattaaggttatcaaatggcacttatgaacaccaaacaacttgctctcaaaccaaagcctaaattggacaagaatttattataaaggtgcatggattgggcaaatatacccccatcgaagcacatctggtactaaaaaagcataagaatggctatacccaacactaatttgtttccccaccagaatattacaatatgtaaacaaatacaatatcccaattaatttcatttaaacagttntaatagcgtttcagagcagaggctatcctaataaagtgtgtttgcattacacttaaacctcatattggaccacttggcagaatataatcattgaagttaatatggttaactggaaaggaatacatgcatgcacctatcaatcatatagatgatatcttttgcac

SEQ ID NO: 178584 - DNA, 468 bp, Glycine max
  unsure (1)..(468): unsure at all n locations
ttgngaaagccaagattccattaccttaaatttaaattttccaccctcctaaactgctcaaanagtgacttatgcaacaaagaagcaagagtgtactctgtggagctcacagaattatcagcataactcctaatcccagcctcaaagctctctggctcattgcaaaacaccaccctggaataccctctccctccaatctgtgaatagtcctccttgagtgattgtttcccacatgcaaatgaatagatcttactaagatgcaacttccttctcctctcacccctcattctcctcctccccaagttcaccattcaatccaccaatatccacaatcacaaagataaagaaagtataatacccttagaaagaagaacactacttgctncaacacactctaactccagccaccaaagacaaccagtacctaaactaacaacctcaccaagtgcttgtcaaacgcaagctcac

SEQ ID NO: 178585 - DNA, 283 bp, Glycine max
ttgcaacaacatgcttgtggatatgatcctcttaatatataacaatcccatgcatgcttatgaaatttattatgattgatgaccgtgtctacctcttaaacaacgagatctatcacttgttaacaatacatctgtctcacgaactaaagatgtatgttactacatttgggtcatatttatatatttatattacaaaatcgagagagtctttatttgattaaccaaaataataaatggatctagtgaatctaaatttataactaacgacatatattttctaaag

SEQ ID NO: 178586 - DNA, 463 bp, Glycine max
  unsure (1)..(463): unsure at all n locations
tgtggattaggaatacgtaagcgtatgcgattacttaatttttgttatncgccagagataattttgaaaaagataatgaaaaggtgttgagtgcacatgccatttggtagttgcacaaagcaatttcattaatattataacccgtgtgaaactaaaacctttgcgaagagggtccacttcgttccttttgtattaacgataaataatttatatatcaaaaatgtttaaattttggcttttgatatgataacactatatgattcttctcttttaaagcatataagcaaggatataaaaaatcatctttgtacgtttggtgtaaccacaagaaaatcttctttattattcaattgttactatcctttcaaggaaagncatattgacattttctccgacacataatgatcaatgtgaaaaagaacctccattgtatgcagctagcagtttaacttctacgtacaac

SEQ ID NO: 178587 - DNA, 437 bp, Glycine max
agcttgcagcaaattctaacgacaataacttttcactcggaagtccgatggagtcccgtaatatatcgacacgctcgaaatttataaccgaagctcatagcaaattcgaacgacaataacttttcattcggaagtctgattgagtcccataacatatcgagatgctcaaaatataaaacagaagctcgttgcaaattcgaacgacaataacgttttactcggatgtccgattgagccccgtaatatatagagacgctcgaaatttaaaaccgaagctcgcagcagattctaacgacaataactttttcactcgaaagtccgattgagtcctgtaactatcgagatgctcgaaattaaaaccgaagctcgtagccatacgaacgacataacttttaatcggaagtcgataagtcccgtacatattggatgctcaaatg

SEQ ID NO: 178588 - DNA, 435 bp, Glycine max
cgagcttcacgatatattacgcgactcaatcggacttccgagtggaaagttattttcgttagaatttgctacgatctctcattttaaatatcgagcgtctccatatattacgggactcaatcggacttccgagtgaaatgttattgtcgttcaaatttgctacgaacttccgttgtaaatttctagcgtctggatatattacgggactcaatcggacttcccagtgaaaagctattgtcgttcgaattggctatgagcttcaatcttaaatttctagcgtctacatatattacgggactcaatcggacttccgagtgaaatgttattgtcgttccaatttgctacgagattcggtttaacattctatcgtctggaatattacgggactcaatcggacttgcgagtgaaatgttattgtcgttcaaatctcgtacc

SEQ ID NO: 178589 - DNA, 451 bp, Glycine max
  unsure (1)..(451): unsure at all n locations
agctntgatgcaacatttggagaggttaatgaatcaacgagatgatgcgctccatgagagggtggatcaaatggagaacaaagatcataatgaagaagaaaggaggagaagaaggaatgatggtgttcctagacaaaaccgaattgatggtattaaactaaacattcctccctttaaaagaaagaatgatccggaggcctacttggagtgggagatgaaaatagagcatgttttctcatgccacaactatgaggagtaccaaaaggtgaagcttgccgccacagagttttccgactatgctcttgtgtggtggaacaagctacaaaaggagagaacaagaaatgaagagtcaatggttgatacatggacgaagatgtaaaagatcattaggaagctgtatgtgccaagtggactacccacctttgangggaattgaacatcaaattgatct

SEQ ID NO: 178590 - DNA, 472 bp, Glycine max
  unsure (1)..(472): unsure at all n locations
tcatctcatttcactactgacttggtttgtcagttgtgggacattaatatggattcatgccccgttgcaactttcgaggttcatgagtatttgagacccaaggtctgataagtgatgaattatgaatttcattctacttctttgtcgagttataactggttatgcttttgtttaaacatggcagctttgtgatttatatgaaaatgattcaatctttcgataagtatgaatgttttctaagtggtgatagattgtgcgtagcaactggttcttacaggtctctgatacaaacttaatatgtggttcagttgttcttggaattgtttatcctgcatcttatgattttgtttcacttgttgacagcaatctttttcgtgtgtttggttgtgaccctggaagtgctgacgctacaaatctagaagccaatacaaactcaatgagctaattntatggtagctctgacatcaagtat

SEQ ID NO: 178591 - DNA, 427 bp, Glycine max
agcttgtcatttcatctcatcaatgcattcctataagaagaacattcagtggctttccacctacatcaaagaactctctcaaagttgaatatcatatccagaaaagctatgtaagctaaaagatatgcaaatgatgcatatacaaagcataatataacaagtgttctgatgagtttagaacaagctcaaaatggacgccttaactatgctttcaagtgagaagcttcagaagatttaaaagaaacccatctgttgattaggtaagtgcttccctttgaagatctaaatcttatcatgttgtaaagacatcaagaaggccttacacaaaagaattatcaaagtctacaaagagctcacaacatcataatgaagttgcaccagagtctacattagaatgatgaatatcttgacttttgagaagctgaca

SEQ ID NO: 178592 - DNA, 469 bp, Glycine max
  unsure (1)..(469): unsure at all n locations
nggacataacaagaggactagcaaaaattcccccattcatccagaaccaacagagactcgtgcctaaggtgagggagcacccagagaagaacaacaaagtcatgttcaagttgaaccaaatggaacacaagtgcaaactgaagtgaacaccgaacatgataattgaacacatgaaatggaaattgatgcactgattaatctgctaacacaagctagccaaacaaatccaaacaaggtaaaatctataccattctgagttagaagctattgtgtatttcactttcattttcagtctttaatggtccctttacacagaaaaaatcaaaccttgtctcaaagaaaactggtcctgcatctgcatctacaaataatattggtattgcaaagaaagtgagttgtgcagcaacaaaaaaggtaggacttcttgcgtctttgcactctaaanaacccagactcatggtgttacaac

SEQ ID NO: 178593 - DNA, 443 bp, Glycine max
  unsure (1)..(443): unsure at all n locations
agcttcccgagcctctccgtcgcgccgtctccgattgcctctcctctcccctcacctccgtcctcgaaccttccagaacccttcgggttagctcttcattcattcttattttttctctctgcttttaccgtgcaatccatattacgtgtgctcagctacaccagagagagagagatgacaatttcagtttaaacgctatcggttattttaactcgttcaatgttctgatctggagcttgtctcaattctctatacttgcttttctcctttaatttcctgaaaatttgaactaacttctctattaatcatgattttttggaatatgatctngtaattattgtaaaatataattctaagttctctttctaagattcctgctcttatttaatgataattattagatgtgttnttatatttacaagacatgcatctactgtttcatt

SEQ ID NO: 178594 - DNA, 391 bp, Glycine max
acccagatgttaggttagaacttaattgacctaaaccatgatttcgaatctctaatttgaagcgttaaaaaacagcacaaattaaaaagcttcttaaatattcttgttgatacattcttaaatagtttaataacatacaaaacaaacatagataagaaatatactatttaatacattatcgatacactgaaaggttattctcttaagttggatggtttctctatctgaatcctcggcgttcctgatcttaagttaagtgtaaatgggatatagtttcctttttaaaaaaaaaactgagtatggtttctatattatatgagacaaatgcccgcactccgagaaattaatggattattcacaaaaattagaagaaaaatattttttaatcatt

SEQ ID NO: 178595 - DNA, 400 bp, Glycine max
agcttgtgcattcaatatcctgatgagggtgttccatatgttctcaagactggactaatacatttgctatccaagtttcatggtcttgcaggtgaagatcctcataagcatcttaaggagttccatattgtttgttccaccatgaagccccctgatgtccaagaagatcatatctttctaaaggcttttcctcattctctagagggagtggcaaaagattggctataccaccttgctcccaagtccattttcagctgggatgaccttaagagggtgttcctggagaaattcttccctgcatctaggaccactaccaccaaaaaagacatttcaggcatcaagcaacttagtggagaaagcttgtatgagtattgggaaagattcaagaattgtgtgcaag

SEQ ID NO: 178596 - DNA, 452 bp, Glycine max
  unsure (1)..(452): unsure at all n locations
tgaacaagtntagggaaatgaggagttgtctgctntgcttatccagttagcacccaattagtattaggtaggaaaccttagagtgaaaccgttagaatcccttgaaactaagtgagagttatgagtcaagtataccgaaatgaggaagataatgttgagggaagagacctaggtccgaatataagtaaatcatttattcttgagagtcacgtgtggactacgattggtagagcgttgaagtcttgaaacttatacctcttttcttgaatcgtcccatgttcgaaaaagagtcagccatgtggccaatcatgttaccttgtatctatttgttcgtttcagattctcattagtgtctcttataatattacccaacttcaaaatagtatgccattcacattctattatcattcagatgtcattctcgtgagaaaatttgacccacgccccccccc

SEQ ID NO: 178597 - DNA, 443 bp, Glycine max
  unsure (1)..(443): unsure at all n locations
gatcttaagtgaccgcggctgcagctcttaagtcttggatattatttaacattgttgagataaaaactcagaagaaattcatatatttttaagtcaaggaaaattaagaaagagaaaaaatagatgattactatataatttaagtatacacactaaatatttataacaattatcgaattcaccaatttgcaatctgcatacgtaacctttcttatatagnttacgttgaatgtttagcaccaaattaatttattagtaagtgcatcacgaattttaaattttatattcgactccggtatatttataaaacataattatctaattgataagattaaggagaatggttcgtgtctgggatgattttagtgtaagtttcttttaaaaaaaaacagcttttcgcttagttaaactaattaatctattcttttcttttaaaattatct

SEQ ID NO: 178598 - DNA, 418 bp, Glycine max
gcttagatctctaagtgtcgtaagcttgtaagcttccttacttcaaaagggatttctccacgaagagaatttccacttagatctagatgttgtaagcttgtaagcacccctacttcagaagggatttcttcactaagagaatttacgcttagatctaaatgctgtaaacttgtaagcttccctagttgagaacgtattgctccatcaagagaattccatttaagatcaagatactccaactctgagagattccccaattcataaggaattctcccaccaaacctcgaccatgatagatcaagatattttaagttggtgaacgagcccataaattttggtatgtaactcccttcacaatcattattgctaagattcacatattcaatatcttgccagcaatcaatgacgaaatattgat

SEQ ID NO: 178599 - DNA, 458 bp, Glycine max
  unsure (1)..(458): unsure at all n locations
agctntntcaaatggcaacatttggtggcagtgcatggcaatcataccacgttccaacttgtgaactgtttctgttgcggcctaatggaatgaagaataataaaaaataatgtttgatgtagcttattgatttacgttcacgttactaccatgtacacagatgattatgtctacatgtaaaacagtatacaaaaggaatatacagatgactctgcagatcattatcataactattgttggatacatcgatcaaggtgtaaattaactgactttctctttagcacattcctttattctcctttcttttaacaaccaaatcaattgaataactccttaacaattttgaatttcaccttaagtaccgcttgatagagtgaaaagaaatganaataaagataaaaatgtaaattaaagtagagtataaaaatgtgagttctatctaaatttactgttaattt

SEQ ID NO: 178600 - DNA, 464 bp, Glycine max
  unsure (1)..(464): unsure at all n locations
tataacatcaaacttggagaaagagttctgggggtcaatacatgataagcaatcaagtataatgttacttccttcactaaagcggtgatccatctccacacatattttatcaatagcaacataaaaaatctctgcacggtaatgatgaagattagtgatagtcctcccttctgctcttgaacgaccccgaactggtatttcgtcatccatatttggtaccagaatacttttagcaacacaaaatccttggacatcggcaaaaaaattattccagccactctctcattgtgcccaaccgagctttgacaacatcaactaattccatggcattcacaatattaagatcttttctttgcaatatatntgaaagctcgtttgtgataccaaacaactttaacattaacctcanaatataagcaaatttaaagctctccattttttctatcatacctgctgcttgagat

SEQ ID NO: 178601 - DNA, 451 bp, Glycine max
  unsure (1)..(451): unsure at all n locations
agcttgcttgtggggcttctatggaggctggatctttgagcttcaatggggtcctttaatggtgattttccaccatggagatgcagcggaagacaaaggaaatgaggtgagaggaggcgccatccattaaggaataagccatggaaaaaaaagagcttcaccaccaagatgagccttggataagaagcttggaaggatgcttcaatggaggaaaagaaagagggagagaaagagagaggggggagcacgaaattgaaggaagaaaaagggagagaagtttaactttgagttgtgtctcacaagactctcattcatcaaagttacaacaagtgttacacatgcttctatntatagactaggtagcttccttgagaagctttcttgagaaaacttccttgagaagcttctttgagaaaaacttcttgagaagctagagcttagctacacacac

SEQ ID NO: 178602 - DNA, 457 bp, Glycine max
ggccacccagctcgcccaggcgagctaggttgcttcctccagaagcaactgccttctggaggatttttctggaaggcccaagtgggcctggttgctatttgcacccccattattactaagtgcaccccctgcctttttgggtgattctttttccataacgttacgaaactttacgaattttgtaatgatgcttgttttctttccgtaatgttacgaaaccttacggattacgtaatcatcccttttttgccttccggagcgttacggaactttatggattgcacactaacacttccttttaatttccggcatgtcacggaacttcacggattgtgctacaatgctttcttttgacttccggcatatcacgaaacttcacgaattgcctaacgatgggtgccaagtacctcggagtggttaaatgagggtcgcatcctaacaacggatggtccccgga

SEQ ID NO: 178603 - DNA, 425 bp, Glycine max
  unsure (1)..(425): unsure at all n locations
gaaccttcgttagtctacgctaccactcttgttaaatatttgtaacagcgngtttttaacgaagttcatctataatagtagcattaagaagtgctttcctaaatctttttagaaactatttcaagataattgtacttaattattactctgtaactctagttctttctttaagggtttaactttagttctaatatcataaatatgctaatttttttttaaaaaaaaaactcgaacatgtaaaaatgtgttcataagtgtttgcttgatctgcagacttttttttcttttatctatagtaggtaaaatacaggcactctgtgcattaactattcattcacgtntagaagtatatatatatttgtaaataactatcatctttgaaaagcttttggataaatatctgcttttgatgtggggatgatttt

SEQ ID NO: 178604 - DNA, 467 bp, Glycine max
  unsure (1)..(467): unsure at all n locations
agcttttcctcttcatcaccaaccttttttaaaganaaagagaaggcattatactcgtgattgtgattttcagattaaaatccatcataatcaagattcaattctcatcctacgacaacttaaacattaatatgcacaattatgcctgaattatttgatgataaggtcaggaaatgcaaaagtaattaaggctaatgctaaatagaaagaattttatgacaaaagaacagatgcgtctacattacgatgtagtccagaaacataaatgtttcctttcttttctctccaaacacagaatgcgtccaaaaccaaacagatggcagggttgtgagaagaaacttcaccacatcaccacaaacttcaagttactcagcacagatatgaatatgacaaccatctattttgtcacattttagtatatgagaatctanaccacactctggaaaagatcaaaagacaactctgga

SEQ ID NO: 178605 - DNA, 458 bp, Glycine max
  unsure (1)..(458): unsure at all n locations
tgtcagttnttataagaattgtaaatgattttatttaaaatgaattttctaccacgataattattacaaaaatgattcataaaccccaatgcgtaatctagagataaaaactgaaatcaagattgtcaattagacatatatgcactatacaaatgcccacctgtcactactctaagtattaaagtatcccgagcacaggcaccaaaccataccatatacaatatacaggaatcagttgggatgaaatttttcaaaatccaatatcagtttgctattttgttcggacctatttctttattatttgatgatggcacgaatgatgacaagtttggattcaagtcgaactaaatcttaattatacaaaatttaattttcaaaatctaaatttatttcaaactggagatccaggttgttgagcacccttaatttcacgtatggaaagctgatcttaattatat

SEQ ID NO: 178606 - DNA, 440 bp, Glycine max
  unsure (1)..(440): unsure at all n locations
agcttataggctacatgccagctaactttgtggatctcgtcttcgccggagaaaggattgaattcggactacgaaaaggcaagttcgaatatgcttccaatgtggcccccaacaacaacagaagagccctattagtgggcgcgaggaaaaaggaaggagacgcccacgtagtcaccaccgccccgacatggatgaaagcatcccaaaatatccaaagcttataccagcccaatcccccaaattttttaatccgagctgggaattctctcccgactcaagtaaaaggaccacctgcaacagaaagagcgccggcccaacgcacggctccagccgctccccggccagttaataatacagcccccgacgcgacctataaatatgcacagcacccgcccncgaaagataacttctcccctattcccatggcatactccgagtta

SEQ ID NO: 178607 - DNA, 459 bp, Glycine max
  unsure (1)..(459): unsure at all n locations
ntaggcagagattctaaatgaagaanagaagctttgtgaatccacagatgtgtcaaccataccagaagctaaacttgaccaacctattgtgccatcactggatctagagacagagggagattgaaaaggagggggagaaaaacagcctcttcaacctgaaaaacagttccaccttgtttttcagcaaagggacaaaagacctttaagaggtacaagctgtaactcattaactgcactgccaagagtcttaaccacaggtaaatgcacaaactgaaactgaaattattaatgctgaattctgaaagtatctctgaattggagatgtctggtatttctcgaaaaagcgatttgattgatgggatttgctataatacttatgagaatcattcgggtgacaaagaatctcactagctctcanganaggggtaagaacctgcagagcatccaatttcaaactac

SEQ ID NO: 178608 - DNA, 456 bp, Glycine max
agcttctcaaggaagttttcttaagaaaacttctcaaggaagctacctagtctataaatagaagcatgtgtaacacttgttgtaactttgatgaatgaaagtcttatgagatacacttcaaaattccacttctttccctcttttattccttcaatttcgtgctcctcccttctctctttcttttcctctattaaagtatcctcttcaagcttcttatctaaggcaattcttggtggtgaagctccttcttccttggcttattccctagtggatggtgcatcccctctcttcttctcctttgccttccgctgcatctccatggtaaaaaatcaccattgaaggacctcattgaagctcaaagatccagcctccatagaagctccacaagaaagcttccatcaagtggtaatcagagcacaagagcttcaagtaggtgctccttaaaacctcattaat

SEQ ID NO: 178609 - DNA, 434 bp, Glycine max
gattgaagatataatcttgcacgaaaaacattcatcattttttcaacaaaaagctttatgtatattattgtaaagttagaaaaagctctcaaaataccttgaacacattgagagaaaaagactaaggactaatttgtatatttatctgtaagacgattctagctttagtctctcagcaatcttcaaccacaaatctattctgatttgtttatggccagtagtggcttgttaggacaaagatcactgggtgttaatcaagcttagggtagagctagaagtggttgtaacacaataattgtaacttgtgagaagtcaattcaacttggtggtttgccaagaactagacgtaatctcaatggtagagatgaattagtataactccctgtgtccgatattttcttgttctctctttgttttaactaacccagggtctg

SEQ ID NO: 178610 - DNA, 438 bp, Glycine max
gagctcgtcaagaactaattctccttacagatattctctcttaggtgaaaggccatgaatggttttatatctaacgcaccttgtaagcaaaagaatctcatgtttgaagtgtatacaatgcacaaacccattttactgtatcctaaaatttactttatattatgaaaaacgatggtgacaaggattgaattcttgaccacttgatcgtaaaagccttggtaagagccaactcttataaaagcttaagctcttaggtagaggtttgatcatttgtatcactaaatgatgtttataagtcttatttatggtgcatatcgatgttggaaactaaataccagaaacttgatatggtgcgacattcttgttatttgagaatggtacattagttatcttctgcacgagtacacagaataacaataattattagattatgcattt

SEQ ID NO: 178611 - DNA, 465 bp, Glycine max
  unsure (1)..(465): unsure at all n locations
agcttcttagtctgctctcacaattgtcaaagcacgtggattattgtttctactaccatcttgtctgatgacagtcaacaaagtaccacgatatttgcccgctaaaaatgttccatctatttgcacaaatggcttgcaatatctgaagtcttcaatgtatggattaaacacccaatatacacgaactaaaatcaccctaggagggtcatcgtcaccttccttcattgaagataaattctcgttttactatggtatctgtacaaagtgttgagcacatgtcaaccatatatgcaggtaactgtatgattgttcccaacttccaaatgtcatttcaagggctcttttgttagttgtccatagccttttgtatgagacaatgtaaccaaactgttgatgcatgtctgcaatcaaggttttgatttcgatatccacaattgttntcactaaatgaacaatattatgggc

SEQ ID NO: 178612 - DNA, 441 bp, Glycine max
  unsure (1)..(441): unsure at all n locations
agcttgcttccatcaaacacagtctccacgttgtacccactctcgaacttcatcatcgacctgctcgaaaccgctgcaaaaaaaaaccccaaaaaaacccacatttcaaaccttcaaaacccatctaccaaaaccaaagccaaaaaccaaacttgcaccagatccacacccgttttggtggtggccttgagcgaccacacccacttggtgaaagcaggcacggcattggagagaaacccactaacaatttctgaaaccaagaagacacagagctatctatgagcaaaagaagcaaactttgatgaaacggaagcgagagaatgagcacaagtgaatggggtcttacttgctggggaagtagcggaaggtgcagctgacacatggagaaagtggagagtgacggccancaagagaagtttgtgcttacccatttgagctgat

SEQ ID NO: 178613 - DNA, 413 bp, Glycine max
  unsure (1)..(413): unsure at all n locations
tgcttctacaatggttatgtatttcatgcanaataatttttatgctaaattntagttagatgtgtctttgtaggcgatggctctgaagaggcttcctgctaaaagggctaagaaggccaccgcaggggagggatccagtgtagccccataagtggagattaagtttgacagacactatttccaaagcaaggagcatcagcgccattntgaagcgattaacgattggtctttccttaaagaaagacgagtccagtaagagaaagagagcacacaaaattctaggcggaggtttccaggaggcagtgaacccagctgacagagcccatggctaagtatgaccctgagatagtcatggagttttgtgcaaatgcctggcctattaaagaaggagtcatggataaatgctccttggt

SEQ ID NO: 178614 - DNA, 458 bp, Glycine max
  unsure (1)..(458): unsure at all n locations
agctnnttgtaagaatggaggagagaaagataactaaatagcacaagtttttgcccaatgaacttttcttgacaaatcaagtattgaacaaaaactcttagaaagatgtttagaatgaaagaatgaaaatctgttttgaaatttgtgtcatggtcacgtatttatagccatttgatggctcttgaagaaaccatgttaaaagttgtgactcttggaaatttcttcaaatctattcactttaaaagttgtgactttcttgaaaaactagtgactttaaaagttgtgactttcttgaaaactagtcactttaaaagttgtgactcttgacaaattcttctaaaaaccagttactttaaaagttgtgactctcttgaaaactagtcactttaaaagttgtgacttttcatgtttagatttgaaaaccacacgttagaaatactggtaatngaatacaaatg

SEQ ID NO: 178615 - DNA, 409 bp, Glycine max
  unsure (1)..(409): unsure at all n locations
agctngagatgaggaagtgtagaagggtgaaacttcctgcttttattcgttgaccacagagtggtacctggagatatgtcgcgggggtcaggagaccttggggacgtcaggtggggtgctattgcccaaaaccaagcttgaccaatcccgacccaacccgggcatagtcggtcagtgagaacctgtgatgtacctaaacaggcgagctcttggcagtcaacagataaaaggaacaaagaccacaaagcaaggaggcttgtggtggctggccagctgtgaaacttgattgatatgtgagatatggcctctggtaatcgattaccaagggtgggtaatcgattacaaggcttaaaaatgaacacaggaggctaagatggtctctggtaatcgattaccacggngtgtaatc

SEQ ID NO: 178616 - DNA, 483 bp, Glycine max
  unsure (1)..(483): unsure at all n locations
gacactatgaaactcagcttacatggagctacatcacagcagctgctactgtgcacccaacattgtcgcttcttctcttcgcgcctcttctcctcattcgtgcttccttcacgagtctcttctccacctctacaagtctcatctcctctgtcatcatgagtagtgttgtgtcgtcgataatgagtttttattttttggactctgtttactccattcagatttgcaatccatatgggacatgcgaaatacgaaatacaaaatacaaaatcataacttatatggattgacaattcgtatgtttcatacagattagcatagattgaagttacaaacaaaaaaactaacctcctccgctgttgcattgtaacacccaccatgatgacaatcacaaaccgcatatgaaccaccacgaacaatgcacctcgaccaaaccaaccaaacatagaaggaggagcttagccaaaagaaaatgaanatgaatgg

SEQ ID NO: 178617 - DNA, 454 bp, Glycine max
  unsure (1)..(454): unsure at all n locations
agcttttctttatgggttgatgggttatgtctcatagaatggcatggtcactggctgacatgttctcaattagctcagttgcttctctggggtcttcagttttatctttccccctgcagaagcatctaacagttgcttggtttgtggtcttagcccatctataaacatattcaattgaattggctcggaaaacccatgggtgggagttcttcttaataaacctctaaacctctccaatgcttcactcaaagattcatcagggaactgatgaaatgaagagattgcagctttcccttccgcagtcttggactctgggaagtatntttttaggaacttttcaacaactgcttcccaggttntcagactattacccttaaatgagtgaagccaccttttggcctctcctgccaatgagaatgagaaaaggctagcctaatagctttgtctggtcacc

SEQ ID NO: 178618 - DNA, 470 bp, Glycine max
actaacttagctctcgccaacaccttaaaaaatatgatttttgcttaaataggtggccttgttcgtgctcgtgcgcttagcgcaattctggaccgcttagtgcacattagtgaattttggcttagcgtgtgcctttctcgcttaacagatggactgaagcggtgcgcttagtgagatgaagcggtgcacttaacgaacctatacagctcatcttcttccagattcttccttgcgcttagccaatgagtgttgcgcttagcggacgctcgctaagccagcggattggcttatcgagaaggtgaaaaacaccacttttcaaagcttgcctaattaacctgaaattgagaggaaatgattattaaacacacaaaatagaattactaagtatttgttacctatctttaactaacagaacttatagcactacaaaataaccataaatcgaatgagtttaatacaatgtacataag

SEQ ID NO: 178619 - DNA, 461 bp, Glycine max
agcttccttaagaagattcctaaagatgcttgagcttagctacacatacctctctaatagctaagctcacctccttgagatgagaagctagagcttagctacacaccccctataatagctaagctcacccctatgacaaaaaacatgaaaatacaaaaaaaaaaaagtccttactacaaagactactcaaaatgccccgaaatacaaggctaaaaccctatactactagaatggccaaaatacaaggcccagacgaaggaaataactattctaatatttacaaagataagcgggctcatacttagtccatgggctcgaaatctaccctaaggctcatgagaaccctagggccttcccttggatctctagcccaatctacttggagttttctacccaatgcccttgcggggtaggatggcatcattcccttcaccttgggaagggattgacctcaaatcccg

SEQ ID NO: 178620 - DNA, 467 bp, Glycine max
  unsure (1)..(467): unsure at all n locations
tctatagaaggttcattcctaatttctctacaattgcatcacctctcaatgagctggtgaagaagaatgtggcatttacctgnggtgaaaaacaagagcaagcctttgctttgctcaaagaaaagcttactaaggcacttgttctagctcttcctaacttttctaaaacttttgagctagaatgtgatgcctctggagtgggagttggagctatattgttacaaggtgggcaccctattgcttattttagtgaaaaacttcatagtgccaccctcaactaccccacctatgataaagagctttatgccttaataagagccctccgaacttgggaacattaccttgtttccaaggaatttgtcattcatagtgatcatcaatcacttaagtacattagagggcaaagcaagttaaacaagaggcatgcaaaatgggtagagtacctagagcaatttccatatgttatc

SEQ ID NO: 178621 - DNA, 438 bp, Glycine max
  unsure (1)..(438): unsure at all n locations
agcttgattntcactntattttcttgttttattctcacttgtagtttcaaatcttatttttgtactcttgaaggttggaaactagaatctaaactccctcattcttccttctaaatttcgtggagactacaagaggtaagaggggtctctctaactcttagaccctaattttgttgttaaacttccttgaacatgttgttttgaaattttcgtgcttgctaccctgttctggatctttgtgttaagatgtttttcgtgagtttttgatgccaaacatgagttctttgagtcctaaaacatagggatagccttaaatgttgcttaaatcggagttttctagcaaaagttatgaataaaaaaagttntataacattttactggataaaatctgtcatgaaaataatctggcagtaagagttgtatgaaccaattttatta

SEQ ID NO: 178622 - DNA, 452 bp, Glycine max
agcttcttccgccataaccgccattctgtcactaccgttaagcctatggcagccgccatggcacctccatttgaaacccgcacgccatactgccatggcgctgccataaccgccatttgacaacactggtttgtgtacaggtgattaagagtggcagaaaagataatcaactagtgcttcatagacaagaaatactttatgggtgccagatggaaaatagatatggctcaataatacaatttgctaaactttcaaagaataccttatcaaaggagaacaagtctttgctttataggcctggaacttatgtacaaaatagagttaagaactgatgtacaaaataaggaaaaagacaaaagcaatcgctttccattagtaacatgcatatctcgtgtacaaaataatagcataattaagaagtgatgtcataccaccaattcagatatacatac

SEQ ID NO: 178623 - DNA, 458 bp, Glycine max
  unsure (1)..(458): unsure at all n locations
tatcaaagactaaaaccataaagntgtgctcttactgcgtgtcccgtttctgtcaaaagaatttttttttctttcacatttgctacttgctagctataaactatgttgattaagatcgcgattaataaaatgtttacattntttgtgtaacttgcaaacatcgtgatcagtgacatttaaatttaaataagttacaatatgttgggaagaaactgtactagcctatggatatagagccttcaaccgatggaattaatcaaatgactttgtcttaattgaacaagatttttttttttcaccatgaattaattgaccaagtttaattttaatgtatcactggtataaataatattattatacaatagtgtatcattagagaaatagaggatgctagtaaatttacattttctaccaaacataataaaatgtatatatggattcacctgatattgtatttg

SEQ ID NO: 178624 - DNA, 375 bp, Glycine max
cgacctgcagcatgcaagcttcattcaatgacttagacctttatttttcttatcatcatcaatgcccacagaacacgaacactcttagccaaggcttcatttctctgagctaagaacgctcagtccttattttccgagaaatgggaagcgaaagtagcgtcgctctggctcacaaatatttggttccttttgaacgtcaagtcaagtaactactactactcgcttccaactattaaaaaattaatcccactaaataatcaacaataaagtgtggcgccccaatggtcaccaccctatactttaatggacaaatgaacaccattgactaaaatatgtggcacaaagaaggcatatggatcttgactggtccttttt

SEQ ID NO: 178625 - DNA, 352 bp, Glycine max
taaaactcacctcggagagactgaagacttaaatggacaaccgactgcttttgggacaagcacacagagcacacaaattctatatcatgcatcaaataatacatatagcaatatcaagagcccttactttttactacatcgatataaatcgataaactgtggccaatgataagcctattactatagattctataaaagagagcgctaatttatatatataaaatataaaaccaaggtcgaaacttatcaaagatgaaagaagactcagccgcaattactaatcttcaacagctcacagataataacagactgtgtactacaaaaagtgtattctcttataaactgtgtagaa

SEQ ID NO: 178626 - DNA, 453 bp, Glycine max
agcttcaccatgaatcacctcatgtcagacatcacagacaaggctagtactttctgtactctttccggaatgtatatatattattacacctttaaaatagttattccaaaagccaaaaaaggatgcatattccgaaatataattttatattctggaagggaaaaagaagtgcaggaatcaacatgagaagtacaggaagcaatagcccataaaactggccagcccagtccataatgcagaatctccatccagtcttattatcttggcttctaaatatgggcatttgaatcctgcatgtggagtattacaagtaacaacaaatacaagccataatacacacaccatattaagggcatattttttgcactcccaactgctgctaaatcctgcaccgtccactatatttattacatatgtgactcttagcaacaatattttcatctaacacttaat

SEQ ID NO: 178627 - DNA, 423 bp, Glycine max
ttgaatcacgtgacaatgaatagagtggaaataacacatcctaaccctgaaacactggtgttgtggtcaattgctcttactggtactgatttttatttagcttaatttttacattgaagaaagaacattctctttcgaaacttgtatgtcattattctcttttaacaattagtatcaaagctccattctaggggtctaatattgagtgcatgtgagaaaaacaatgactgtgagtgataaaagaaactgcaaattttctcttaagtccaacgagttgcgaagaatgacagaaggtggtagtagcagttttgtgcacctcgaattccaacgcttggtggtcattatgatcattacgcaatgtctatggagaattttcttcgctccaacaaataatgggatctcattgaaaatacgatattggtg

SEQ ID NO: 178628 - DNA, 404 bp, Glycine max
  unsure (1)..(404): unsure at all n locations
tagagcgaatatttcgatttgatatctacctcctagctgcccccgcctattcagtgatatataggttcatctcggaacatagactaaaacatcttgaaagcttctgctataagttttacattcctcatatgtgaaatttctaaagacctgtataagcttaaatctagacagatcgacccacaccttaccctactaatanatacattttattttgaaccggataataccatctctgtaattacgatatgacacaatttcttcgtttataaagagctaaactaattagtgcggataaccagtcctaggaacaataggctgataaacagacgaggacatctctatttgtattgtatatgggattactgaatggcgtgatttaatttttcccataaaaacgataaagc

SEQ ID NO: 178629 - DNA, 430 bp, Glycine max
  unsure (1)..(430): unsure at all n locations
taagtattaaatataaggggtagtatttatgcgatgagttttctattggtaccttatacaaaattcaagggttgtgatattgaaccaacagttgaatgatgcacaatgcaacttaagctaattcttaaaacacactgaatctgatntttttttataaaaaaaaaaattgaacttacgaaaattaacatcaagcctaaatgagttagtgaatctcgggatcaatgggtagtcttaattatattttagacaaacagctcacaataatcatgtgtgatcaattaaaccatgtaagtgtttgtcgactgaggtgttaaagcatgttataaagcaattgtagtgtcctagtttcttgtatacacatctttttccattaaacaaataatactgggatctaaagattctatntatttatcgatcattataatattta

SEQ ID NO: 178630 - DNA, 432 bp, Glycine max
agcttctcgatatattatgctcctgaatcggacatccgtgtgaaaagttatgaccattggaatttctcgagagctttcgatgttctatttcgagcgtctcgatatattatacacctgaatcggacttccgtgtgacatgttatgaccattttaatttttcgtgagcttctgttcttcaatttaaggcttctcgatatattatgtggctgaatcggacttccgtttgaaaagttgtaaccatttgaatttctcgagagctttggttgttcatttttgagcgtctcgatatattatgcacctgaatcggacatccctgtgacaagttatgaccatatgaatttcacgagagcattcgttgttacaatttgagcatctcgatatattatgtgcctgaatcggacatccgtgtgacaagttatgaccatttgaatt

SEQ ID NO: 178631 - DNA, 411 bp, Glycine max
tctcgatatattatgcgcctgaatcagacttccgtttcataagttatgaccatatgaatttctccactgtattccgtgtgacaagttatgaccatttgaatttcttgagagcattcgctgttcaatttcgagcgtctcgatatattatgcgcctgaataggactcccgtgtgacaagttatgaccaattgaatttgtcgagagcgtcctgttgtagagttcgagcgtctcaattattatgcgcctgaatcagacatctgtgtgacaagttatggccatatgaatatctcaagagcatccgctgttcaaattagagcagctcgaatagtctgcgcgtaatcggacttcctgtgacaagtagatcattgaattctttaggcttcgtgttcaatttaagcactcgtaatatgcc

SEQ ID NO: 178632 - DNA, 308 bp, Glycine max
  unsure (1)..(308): unsure at all n locations
agctttatccactatgttacctggagcctgaaatttctnttctgatnggagcggtcctagatgtagggaagaatatctccaagaacaccctcttaaggtcatcccagatggtaatggacctgtgagcaaggtagtacaaccaatctttcgccactccctccagagaatgtggaaaagcttttagaaagatatgatcttcctggacatcagggggtttcatggaggaacagacaatatggaactccttaagatgcttatgaggatcttcacctgcaagaccatgaaactggggcagcatatgtattagt

SEQ ID NO: 178633 - DNA, 325 bp, Glycine max
  unsure (1)..(325): unsure at all n locations
cctacggaatgagaacaaacctaacggctgagcgaacagaaaatggggcaaccaaaagtcacccccaacacgcaaccagtcaaccaccacttggtctcccaaaaagcctgatggcccaagttgcccaattgggccctcattacaacatgaactaaacctaaccaaagcccctctacttgaaaacccaaacataatactggcagccaacttacaaggatagagccattattcagacagactaaacactctanaactgaaacacacgggngtcaattagtcctcctccatctgagccatgatacaactcacaaccttggactcttct

SEQ ID NO: 178634 - DNA, 436 bp, Glycine max
  unsure (1)..(436): unsure at all n locations
agcttcacgtagaaacttgattttttaataaattatntcaataaattttgtagagcctaagttttcatttaaaaaaagtagtctaactgcccccgagtaaaactgggttaaataattccatcctaaatcattcaataaaattacatcaaattttatgcataaaaaaatctaaacaaatgggtgtaattttattggaccactagattgtttaacttatttttagttgggattagttagaaaaacctttaaaaaagggtcaggtgtttttggagtaaaatagtgaggcaaatactttggacaccgagcaacacaggtgaaagaactaaaatgattttttctttaaatacggatcgggatataataattgatatggattgacgatttggatgactcatatggattgacgattcgtatgagnnttttttaaataataata

SEQ ID NO: 178635 - DNA, 463 bp, Glycine max
tgtcaagcccccgagcttggacaagtgttgtccgggctgcttctatcatgttgttcggcatggacaggcatttggtttttcagacaaggttagttgagggaagtatgtgtatttgacaactctaccattttttgcccgttggagtgcattgaagataaacgttacgttttgtcttttactgcaagcatgtgcggcgcacgtgcggtactcttgcatacatgtcactcatggagtgagcatgtcctaaagacataatgcatgggtgagtggggctacatcgtggtgcgaaaaattagggaatcacttcagctcctgccagttatcaaagagtttgtctcctctttaaatggagtggacgtttgattcgtgaccactgtcactttgaatatctgtattccattccttaatctcctttgttcttgtacgtgcgatttatgattccttttcttcttcgttcaacttc

SEQ ID NO: 178636 - DNA, 386 bp, Glycine max
  unsure (1)..(386): unsure at all n locations
agctntttattttcagtagatgaagatgtatttctggccacctcatggactcctctaagaataatagcatcatttcttgcactgaattgttgggagttggaagccatcttctcaatcaaattcctagcctcagcaggggtcatatcaccaagaactccaccactgacagcatcaatcatactcctctccatgttgctaagtccctcatagaaatattgaagaagttcctcagaaatatggtggtgagggcagcttgcacacaatttcttgaatttttcccagtactcatacaaggtttctccactaagtttcctgatgcctgagatgtctntttcgatggcagtggtcctagatgcagggaagaatttctccaagaacaccctctt

SEQ ID NO: 178637 - DNA, 465 bp, Glycine max
tacagctgcttcaactgcacaaggctcttaatatttgaaaagtattcttgtggaaccttcacccgacgaagacactgacaaaaacttatcttctcctttttggacaaagtatgacaagcagggggcaagtaaattttcttcccatcaaaccttggatgcaactgtgatcgtatgcccatatcagctagatcttgacgggtattcaagccatccttcgtcttgccttgagtgttaaggagtgtcccaatgacactgtcacaaacatttttctccacatgcataacatcaatacaatgtctaacatctatatcagaccagtacggaagatcaaagaaaatggacatcttctttcatatgctactcttactcttatccttcttttggatctttctgaatacaatattcacgtgttgaacccgctggtatacctgctcaccaatcaactgtatcgacgaaatatcatgc

SEQ ID NO: 178638 - DNA, 300 bp, Glycine max
gcaagcttgggtagaacttttttggctctgtaatatctagaagtgacagtgaagaatacttataactcttgataagttagtgaaaatttagtgggctactaaaaattgaacatagtcacagtggtagagataaaccagtataaactcttgagtgttattttttattgtttctctatgtgtttgactgataaaggatttaaatttatctttaaatattatatttgttttgatctgataaagctctttttaacatcctttatttgatgttttgaaaaatcttatcaaacgataaatattttt

SEQ ID NO: 178639 - DNA, 456 bp, Glycine max
  unsure (1)..(456): unsure at all n locations
agctttgaagaagcgtcaaagcatgaagtatgggtcaaggtaatggaagaagagatacagatgatcgagaaaagcaacacatgggagttagtaaatcgtccccatgaaaaaaatatcattggggttaagtgggtctataagacaaagctcaaccctgatgacaccatacaaaaacacaaggcgaggctagtagctaagggttactcacagcaacccggaattgactacaatgagacatttgcaccagtagctcgtcttgataccataagagctctaatagctcttgtgtcacanaaaggatggagtatctatcaactagatgtcaaatccgtcttccctaacggcgtatttgaagaagagatctatgtggagcagccacaaggattcgtgtctgaaggcaaagaaaacaaagtgttataactaagaaaagcactctactgtttgaagcaagcacct

SEQ ID NO: 178640 - DNA, 443 bp, Glycine max
  unsure (1)..(443): unsure at all n locations
tattcctgacgaatcggttacatacatagtctttgtggattctggtggtccacactatgcncactatgacttagtgggtggtcgcctggtatgattattccaattattatcttattgaaaatgagttactagcatacttatttgaaccaactcgacatttttcaatatatggattttcataactctgtcactttacactccatattgcatgcagcagatcaactctatccatgtatcactgaatttctcattcatcatgacacggtttattccattgctctatttccaatgccttattcttttgtacatatagaacactagatcaaaatcctcatagaggaaacccctacacgctacaagatcctgccactatttattctatgcatgatctgcactaatacttaaattcctgtatatagtcgaagacaatatgtacacgtgta

SEQ ID NO: 178641 - DNA, 431 bp, Glycine max
  unsure (1)..(431): unsure at all n locations
agcttggctctcaaaaagagatcaacttttttatggagtattaaatatggatctcatatgatccataattccaagtctgatgtgggaggacttataatggtccaacataatgacaggcctgccatttcgatggtttattctagtaggaaaaggcagtatcctagtgtagttagttagtagtggggtgagctaattcacatgaagagtatgtaaggaggggtgcacacatcatgacggngttaacagggaagaaatcagtctaggtcatttggttgggcagagagaattacctctttgaggaggggtgtgtacttacatttgtttcttattcaaaaatacttcctgagattatatcctttantttggtctctatcattgcgccgaagganngagtcatttcttagtgatgattgtcgccatgccccaaaatg

SEQ ID NO: 178642 - DNA, 470 bp, Glycine max
cgctttagcacaagagttctcatctttaaggaacatggtcaattatatcgataatgcttctgtatttagcagtcaaacgcatcttacattgttattactggccatggagcaaacgccggtagttctttttgtaaaatagagttttagtggctaaccagtatttaatgaccataaatataaattaaaaacagtaaaatagaatcaattatttcccaaatgcttgttggtgattttatatttttatatcctctgttatttgtaatttccctcttattgcaaaaccctaattgaaccactgaacataaaatttctcttttcaacttagattagttgtgatgaaccctgaaattaacttgctatgaaccctagattttggaagtcgtattccacttcgattcagatcaccaatctcattcgcttcctctattggatccgcttcatttgcgttcaaaccaacaagtaatcataat

SEQ ID NO: 178643 - DNA, 425 bp, Glycine max
  unsure (1)..(425): unsure at all n locations
agcttgtgttntattatgtgaactcttatccttaatgatgacgtctatgagatccactgggaggaggtgaagtaactgtcggcggaagaggagcaggacggttctcaaaagaatttccatcgtatctagttaatatttaaagagtcacattaaccacattgctgaagctatgcattagaaaacagataggcatttcaaacaacaatccataatacttacatgaaattatggatggaactaagctcatggggtatccatccactgaaattattgtttgcaacatttctggaaaagtatagagcaacattagaaactgaatgcagataattcaaggcccaaagggtgaagaacttacaaagtatccataggcaaaccaacgagagcactaagagaaccagtcaactggttcttctgcatgaaactac

SEQ ID NO: 178644 - DNA, 456 bp, Glycine max
  unsure (1)..(456): unsure at all n locations
nttgatggtgtcgagaagaaatacatgtggtcatcatattgagggggagaatgtgaatgtatgtatacatgattttgatgatgtcaaagaagaatctaacaaggctgcttcaaatgataagcatttgcttcaagaataattcaagattgcttcaacacacaaagccttgtttcaagattcactaaagaccaagccttgccttaaaacaaagtgctttcaagacatgcaaggctctggtaatcgattaccaggaagtgttatcgattacccgaagacagggttgagaaatagctgttgaaaaaggttttgaatttgaattttcaacatgtaatcgattaccacatgtctgtaatcgattaccagcaacgaaactttggaaattcaaattcaaaagttataacccttcaaattataactgtgtgatcgattacacaaacattgtaatcgattaccagt

SEQ ID NO: 178645 - DNA, 448 bp, Glycine max
agcttgacgcagtcttgggttcttatcataccaatgtcctaggaaagactgactgaatggttgatcctttggaaatctaaatcagtagaagaggtcacttgggaagaggagaccagcatcagaggtcaattccccaaactctgccctgaggataagacatcttttgaactgaagatccaaaagctaaggccctatattttatactgtaggtgaaaaccaaattagaaagagttctgaaattgtgagtttgggggtgaatttgatagttagtttagaggaaagaggaaggctatgaggtttctccatacgtggaagctcttgctcttattttttatatttgcttttcctgtttcttgctgaatatactagtctgcctttgaaagataggatttgtcctataagaattgtaacagaagggtttaggtcaatgactttgcaatatggtatc

SEQ ID NO: 178646 - DNA, 418 bp, Glycine max
  unsure (1)..(418): unsure at all n locations
cgtcaatgttgggttggactatgaccgggtgtgtttgtgtttttgtcgcanatgagcttcatgttaacctaataaatcaattcatggttataacttatgcaaaaatagtatttggtacacttacattaatgttgttctaaatgtctttaagcatttgtaattttaatcattgtatcactggattccccctcatttccttgagctaggagtaaagatacgcgcttcctttatttgtaagtagcttcatctcaaaatggctatctgtttaaaacatgtattggattctattgcagtatcaacaagatgacccaattacccttgtggtgaacagagttggtccttataacaatccacaagacacgtacaattattacagcctaccatactgctcgtcacctggtaatactgcacacaaatg

SEQ ID NO: 178647 - DNA, 441 bp, Glycine max
  unsure (1)..(441): unsure at all n locations
agctntaactntagccactcttgacaaattcaaacatgaccaacacaatggtccttataagaactaataagggacaaatcaacagaacctcctataaatgggggtccaatgatcctattagcagctgaccctagctctggctctacccctagctctggcattagcagttgttgttgctatcgtcgctcattatcactacgcatgctgactcagtcactctacaacatctctcgtccgcaccttcccttttcatgtgagtggccttcatagaggggggagttgcatccaacaatgtacgatgtcttcgtgcaagctgtcacaagtctaaaataaaatgaaaaaacaagttagtaatgcatcataataaacatttatttaactaagaaaaaaattaagaaaaaaatgacattacctcaaaaataagaacatgaataacatttt

SEQ ID NO: 178648 - DNA, 458 bp, Glycine max
  unsure (1)..(458): unsure at all n locations
ntagtcaaagatgacattagaaggagattgagagatggtcacatgataaaaatttggactaatccttggcttcatgatccacaaaattcatatattgtttctcctcctattgatggactctcgaatttaacagtaaattcccttattcaccctacatcggccacatggaatgagactcttattcataatctatttgcccctattgatgctgcaaaaaaattttccatgcccatttacctctcacacaatcctgataaaattctatggaagttcaccaaggatggcactttctcaaaaaaatcgacttactatcatgctatggggaatatggttaatagcactcttctacatgtaagtggaaactagatggacatttggaagctgaaaattccttgaaaatgattgtttttatggagggttgcttggggtgtctttgaaaaagggaaaagcttatgtct

SEQ ID NO: 178649 - DNA, 411 bp, Glycine max
  unsure (1)..(411): unsure at all n locations
agcttgtagaccattgattctgttcttcttttatttngagatctctgattgttcaaattaatgtaaattgcggggaatctgatgaatgatgtttttctaccatgatttaaaggtatatcccacccaaactactccgtctccagaaggtacgtgtgaggctgcaccaaatgatgaagttaatgatgtgaagactctgacaganagattatctgctgctcttttaaactctaatgccaaagaagatttggcaaagcagcatgctaaagttgcggaaaaaactgtctcacgtatctgttgtgtggctggccatcttgcatctcaataacttcaccttgatttgacaaacaagtttatctaaatgagaaatctgttgaggcattgagcagttgcaattgagtgtttttttggtct

SEQ ID NO: 178650 - DNA, 423 bp, Glycine max
  unsure (1)..(423): unsure at all n locations
taatagaaggaacggagaagaaaatgtattcttgttatccatggaggggaacatggttgtgggagtggtaaaggcttaatttttaacgtgggtttttgggtttaaaatatactaattaggatatatcttataatatatattttacgataaatgatatcaatattaatgtagatataagagtctattataatattaaacattaaacataagagtttattctaataaaaagttcgatcatgatttactactttatatagattactaccttcttccactaaattcaatctttatttgtgcatgaaaaacttgttacttcctttaacaaaaaaaacaaagaagagaagttatcatacaaacataattcattactagaaaaataaattccttaactaanacatgttatacaaatttgacatacaatta

SEQ ID NO: 178651 - DNA, 455 bp, Glycine max
agcttctaaggaagctgtctcggtaaaagcacactctggcattcattaattgttggatcttctcgaaatatggtctgtaggtttacatgacagatttccacgatctgaccgttgcgatctgcaatatgtcatctggtgtatgagaaacacttcttttaccgagattagaaacacttgagtgttgcaagctttgtttttcgtgtagccttggaaaacagccattcctttctccttctttcttccaaaacccttccccaacgtcccaagcttcttcttcaccacccacaaccaccagtagccaccatgaaccaccgtagttctccattaaaacctcataccaagaggaacccttcaatcgaagcggaatcttctaaacttgtctcgtagtttcggtagagaacgaagcccactctgaccttcacgggtttctttgaggaaccatgattctacgcttt

SEQ ID NO: 178652 - DNA, 457 bp, Glycine max
  unsure (1)..(457): unsure at all n locations
ngacatatctacatttcccacgaatgtcaaggttaacattctnggcactggacaacacttgtccacacttgggggctcgacaaactcgtcaccctcctacttgtctaggctactaccccaaacatcaaacaaactccctcgacactggataacctatttcgcccgcaagttagtgtggagctcggggggcttatgtactatccaggattcacaaaatacatgtgtcatgctacatggcactatgagacacacgtcaaccctccatattagccctggcgctggagcacgaacgccaatcccttagtagtcgggctccccaaccaatagattatctctaatctcttattatttcaatataatgtcatcccattatctcttggctagcattcaattatctacaaggctacacattatctacaaggtacaattatctactagcctttactctaagctatac

SEQ ID NO: 178653 - DNA, 438 bp, Glycine max
agcttgaagggaacatcaaccttcctgatcccatagaggaacacagaaagggcatggcattgaactgtgaagaggctccattggatgttgacatcaaaaatggaggaagggttgtggtgttgaacaccaagaaccttcctttggttggtgaggttggtctaagagcacaccttgtgaggcttgatggaaaggccatgtgttcccctggattctcttgtgattctgcttttcaggttattttttttatatatgttaattgttagtttggtagtttttattaggagaagggatcgaactccgcaactttttcttccttctctttcttaaccacttaaccaaccttatatctccttcttttcaggttacttatattgcgagagggagtggtcgtgctcaggttgttggtgccgatggtcgcacggtattggagacaacagt

SEQ ID NO: 178654 - DNA, 456 bp, Glycine max
  unsure (1)..(456): unsure at all n locations
tgaatcatataagaatgtggattcaattcgtgagatcaatacgacatctnttttggggaatatacaatgacacatctctacaaacactcacctaaatgtttatttataaaaaaaaatcatttttccaaaaatgataaatatgcaccaatagggataatctcttaatatatttaattattttataattctcaataatgactaggtacatcttaataattatgtggtacgagaatcttttttatatgtcaatatgtacaactatgagcccacatatatntcttttaaaaaaagttgataaggctttgctgtccaatgaagaaataataccacagagatctcttaataaatatcgatttcaattatgtactttttgtcttttaaattccactcgctaaaatttgactttatattcacattttttttaaaataactgcacattaagtctattacatatta

SEQ ID NO: 178655 - DNA, 399 bp, Glycine max
agcttaaaggtatgtaacccaccattttctcattgtagaacaccagtaacatgtctactatcattgtgataatctctttcttcgtcattggaggtgccacttgagctgccaagtccctccacctttgggcataatccttgaaagattcatgccccttttacacatgttctgtagctgcatcctatccggagccatatcaaaattataatgatactgcctaacgaaagtaaccattagggccttccaagaataaaatcgggaaggttccaagttagcataccaggtgacggctgccccaataagactttcttggaagaaatgcattagcaatttttcatctttcgtgtatgcccccatcttctaatagtacaatttttggtgattcttggggcaagcagt

SEQ ID NO: 178656 - DNA, 467 bp, Glycine max
  unsure (1)..(467): unsure at all n locations
tgaaccanaaccagtgagagtgtgaccttaaactgtgagtgatcgactatctgtgagtaataatatttgcatgaatctctgaattntagaatgaaatgtattaacgagaacatgatgaaggccatgattgtacatacataagccttttgaccaaaaagcttaccttgaattataattctatcatttgtaccctttgtgagctaaatgagtttgtcaataaattgaaccctgaactagaatgattctctcccgatacattgtttagattctaggagagcatatagttgaaggcaaatttaccccaaattttggggagtggagctaattgggatgcaaagaaagagataaagcatcagcacacacaacacacaagttgtctgtttaaaaaaaacagagagaagaataaagaagaaaagtgtgctgatgtaacaaggtcaaaaccaaataaaagtgaatagctagtgagc

SEQ ID NO: 178657 - DNA, 445 bp, Glycine max
agcttatagctagaacaaatatttcatatttgtattcatccaaataaacccttattcaaggtagattataagcttacactttgatccgatatgcttagaagttgctctagatattcaactcccaagtcctctaacacaaccacacttggtgttggtgcctctgattcctgtttattctctctacactttctagcttttgatgacaattttcgtctgatgtagtgcctctccttgatagcaagagctggtgaacaccctttgctgcaaccatattgaatctctagcaaagactctttgacccttttgaccggagaattgagcacagcatcgtggcctctcatggaagatgcagcttgatcataagccaatgcagcagcctctgcactctcaaaggttccatgccaaaccctagtgccattcctcggtgtgtcttgatctctgctgc

SEQ ID NO: 178658 - DNA, 360 bp, Glycine max
  unsure (1)..(360): unsure at all n locations
agctntgagccaaaatcctgactcaccataaaccttgacccagggtgagaatgccaatccttaccctcggaagcaaaaaaagaatagaggggaaatttccaatcaaagaaaaagagaaggaaaatttccaatgaaagcaaaaaagaaatgaaggaaaattccccaatcaaagagtgggagaaagcaaaaaaaggaaaagaaggaaaattccccaatcaaagagtgggagaaagcaaaaagaaaagaaaggaaaattcccaatcaaagaatgtggagaaagtaaaaaggaagaagaagaaggaaagaaagctcctgatcaaggatcgaaagaaaccagaagaaatgtgcagagaggtcttt

SEQ ID NO: 178659 - DNA, 490 bp, Glycine max
  unsure (1)..(490): unsure at all n locations
tacgtgacctatgaaactcagctnttgcaagctggaatcatttatcctatctccgacagccaatgggtgagtcccgtccaggtagtcccgaagaagaccggcctcacagtgataaaaaatgagaaggaggagctgattcctactcgggtgcagaacagttggagagtttgcattgactatagaaggctgaaccaggttaccaaaaaggaccattttcccctgccattcattgaccagatgcttgaacgcctggcaggtaaatcctactactgtttccttgatggtttttctggttatatgcaaattactattgctcctgaggatcaggaaaaaaccacattcacttgccccttcgacacttttgcttataggaggatgcctttcggcctgtgcaatgcccctggtaccttcaagcggtgcatgattagtattttcagtgatttcttagaaaattgcatagaggtgtttatggatgatttcactgtatatg

SEQ ID NO: 178660 - DNA, 460 bp, Glycine max
  unsure (1)..(460): unsure at all n locations
agcttgcatgaccaagtttcttatgccgcaagcaacgattttctctgctagacaactagtgtgataccttttgatctgatagttcacccagcttgatcttgtagaggttacttttcatcttagcagaaaatagtagagacccatccttgttctagacgacacactcatccttgttaaaagaaacacaatatccattatctcataactgacttatgctcaacatattgtgtttgagacctttaacaaataatacaatatcaatatagggataaagatgtatacctatctcacccactcttgttatttgcccatnttgattgcctctaaaagtgacggttccaccgtgataaggagctaggcattggaacatacacatttctcttatcatgtgccataggcaaccatagttcagataccatgatagttgttcactgcctactatataggacatctacaacat

SEQ ID NO: 178661 - DNA, 469 bp, Glycine max
  unsure (1)..(469): unsure at all n locations
tcntcctttagcttttgaaaagtgtttntgatattgggatcaagaggagttagaacaaccgttttgcttcttatacctaacatgtaagcataaaatagaaacttagaataggtatgagtagagtggttagtttaattagtttaaatagaaaataaaagatataaaaatattattatattttcaaaaaattaactaaaaaggaaaatattaaaatttgaaaataaaagataactatcctaagtactaaaaaataaaaaacagaaaataaaagatatatttttaattaaaatttttgaaattttttatataagaggtataatctaaaattaaaatgctaattatatctatatttatttaaggaatagttagcattttaatttagtaaaaatataaaaatagaagatatatttatttctttagtttttttcaaatttgatacacttgaagataaataaaatctgacaattaa

SEQ ID NO: 178662 - DNA, 455 bp, Glycine max
  unsure (1)..(455): unsure at all n locations
agctntaactnntttttntcttttggttttttagctcctcttttgaatttgatccatggagagtaaaattggtaaaatgtatttgtacttttttgtttgtttcatgagttttactttttttggttaaaaaaaatattcttcaattctctctttcattgagcttccttcttctcctctcggctttgaatccaaggtttttatttattttaatttaagctctaattctgatattaattcaatgttttgagttgtgagttttggtcctttctttttcccttatatcaactctcaccttgtttaccactcttcacaaaatcaataaaagtatcccactttcacattcacatcttcaaacgccgaatctgaacataatggagctccatgcttgttctcctccatcaaggatgtaaatgctaggggtagtccaagagtgtggcctccggttagaacttcat

SEQ ID NO: 178663 - DNA, 464 bp, Glycine max
  unsure (1)..(464): unsure at all n locations
ntactaaacaatattaanatattaactagctctcctctttgttatatatctgtnccaaaaagatgcatctgattgtcattttctatctatcgtttcgtcgaggtaattactctttagattgcaatatatattatagtatatgctcctccttgtcctaatatatataaggtcgaaaggtcctataattcaggttttggtttactctttgagagctccggatatttcgctatgttaactcgtctttatcgcatttcaaaaactgtcctcgccacgttcacgtacacaactataccatttaaaatgcgaacttaatgcattaattaatagtactatagttaaactaatctaaaagtctgtatattgcaagtaattaaacaggaacgatgcatgcaagatagtatgaactcatacccaacatcgttgtagagtttaagtttttataatgttggagtgcataaataagt

SEQ ID NO: 178664 - DNA, 340 bp, Glycine max
agcttaggtgccaaagggtgtcggtgtttttgcgaagctgcacccttggtgaaatatattaccaaaggtttgggcttcacaagactgctctcctccgtggactgcatgcatatatgctgctcttctcttccctcactgccgacttccagtcgaccttgatctatcatccgctgtaacaactcctccacttccaaacacttttccatgttatgcagctcgccggaatgcagcaaacaagaatcctccttatgcccaccatggggaatcacacctcccttttgtagggcctcgaagataaacctcctaggggttgccacatcctttaaaggtttagaccgac

SEQ ID NO: 178665 - DNA, 442 bp, Glycine max
  unsure (1)..(442): unsure at all n locations
tgccacgaccctaaatgggtcttcccagtttgaccccatcttttctactcatgggtctttccttgcttcaccttggactctccacactaggtcgccaggttgaaaggctcaaggctgaaccttggtattgtatcttcttgatgcttgaagcttagtggcctcttccttgattctgaccatcttttggacttcatcttttgtctctagttcaaccctcgtgttttcttcattattctgttcctggaaaaacaacctccttgtcggcgatttccctacttcgacagggatcatggcgtttgtctcgtatgtaaggcgaaaagaagtttcgttagttgttgtttggggtgaacaatgataaacacaaagtatgctagggagtttgtccttccatatacctttggacttgtcgagtcttgtgcgtatggctntaaggataaccctt

SEQ ID NO: 178666 - DNA, 456 bp, Glycine max
  unsure (1)..(456): unsure at all n locations
agctntaacctcatcgtctctcacagcctttagatttgggagccaatccagtccttgtgttcgaactctcaaccacttatgatagccgccgatgatcccattactgcttcccctaagctctctgtcctttcttcacgccgcatcccatgccttgcgaactccttggagtaccctcgcgttgtggtcactgaaacctcgtgcgatgaaaggcgtgatgctttcgtctgatggcactcctctcatgggacatccttcgcatgaagatagaatcctgattcttccttccttctagcgagggaaccatttaacagacgcccctccatgctagccaagaagtggtgcacaacanacaattcttgcgccgctcttttcacatccccggtcgaacgtgtcatacatggccacaatggcgacgaccgggctcttctctgcatgatgaaaggcgaggaaagcgtc

SEQ ID NO: 178667 - DNA, 459 bp, Glycine max
  unsure (1)..(459): unsure at all n locations
tcatacaattaatatagaacttatatcctaatgtcacatcctatcagagcgnngngttcncgtgtcctctagcatgaggttcttcatagtcatccacctattcatctactcccccgaacacaagttcaagatcatcacaggatccaaacacaacaacacacagggagtgagttatcacattcctagctaatagagaaacaagacacataaatatacatattatataaatgagataccacttgcttagacatagctcatgtaacttcaccacttcgtcattcaaaattcacttttcaatcatcaatcacattacacaagaatcccacacttcgatcaagatataataacacatcaattagcaagcatatgcaacaattatgctaagactcaatcctatatgcaatgtggcaccatgtcagtgagaaaccacgtcaggcgcctatgagtacatgacaagac

SEQ ID NO: 178668 - DNA, 448 bp, Glycine max
  unsure (1)..(448): unsure at all n locations
agctttaaaaaataataattgaataaaacactgaatgcagttatatttttagttatgaaatgaatatttttacactaaaaaagagtttactatttttcaaaggcgaagaaaatattttataaaataaacgagctcgcaattattttatcaccagttggcatatataagaactcaaacaaatgcgttgtctgtacccaaagaaactaatgtgttgtgttcattcaacaattttacagaaataatgagaatatttaatacctgtatgcctgtatcccccataattttgttctagtaagaaatccaaagacattgacaatatattgggctttctggttctgtatnttttttccaggtcatttccagagccgttacagagtgtgtcaaaaccaacatatatgatccatgaccggatatgaaagaagttcctccggcagaaccatgaatgaac

SEQ ID NO: 178669 - DNA, 456 bp, Glycine max
ctttacttcatcatcaaagttctgtctttgctgctcgaattccttcatcagattgccaactgtggtcaaagtaccattgacctgtctcccagcatcagagacagatagactaccagaaagcattggtgtgctcccaccaggtgtttgagatcccatggaagtagcatcttcagaatcataaccacgaggcaacacaaaatcacgtcttacaggctgaactgtagcattctcaggagcaaggctctttctagcagcaacaagactcatctgcattgaaaaagaaatcagagtcttttatagaattctaagttggatatgaaacctttgtgcatatgacttgtaaaaaggacaaaaaaattgtggcagattagaaaaccaacagactcgttaacttatcaggaacacttttttcttaatagcaatgacaaattcaaggctgtatttgctttgcaagac

SEQ ID NO: 178670 - DNA, 456 bp, Glycine max
  unsure (1)..(456): unsure at all n locations
agctntataaaaaatacactaaagaatgttatatttcaattttacttattgttttcctatactgaaatttaaacatgtctatttttttaattttaaaaatccaaaaattagttaaaactgcacatttttaaaattttaaaaaatatacgaatttgttaattaaatatgttcatttaagaaaaatctaatagattgaattagaacttttcattttttgttttcaacctactaaatattttttttctatttcttaatcaattttttaaattattttcccctgtttaaaaaaatgaaaggagtttagttttaattatttgtcttcatttttaagaaaataaatnttaattttactactttttacttattgttttttttcattggaagttaaaactacccacttttggaattttaaaaaatcatttattgattaaacaaactcccttttattttaaatat

SEQ ID NO: 178671 - DNA, 461 bp, Glycine max
  unsure (1)..(461): unsure at all n locations
ngatgtgccgagatntgatggctcggacgccaccggctggatctttaagataacgcagttcttcgagtatcacacaactccagatcatgagagactcacgatcgcatcattctatatggaaggtcagatattagtctggttccaatggatgcaccgaaatggtcaattatcgtcttggccagcatttcttcatgctctccattcgcgatttgcatcaaccacatacgaggatcccacgggactgctatgtaaattgcagcaatgaaccacgataaacaactacctctctgaatttgaaggattagcaaatcgaatcattggattacctgctccaatggctntgagcggctntatctcgggccttacgccgtcgattcgccgagaggttcaagttatgcaaccagcctccatgagtcaagcagtggcttatgccaggttgcacaaggaaaagcaaaatgatg

SEQ ID NO: 178672 - DNA, 394 bp, Glycine max
  unsure (1)..(394): unsure at all n locations
agcttcttatccaggcaattcttggtggtgaagctccttcttccttggcttattccctagtggatggtgcctcccctctcctattctcctttgccttccgctgcatctccatggtgaaaaatcaccattgaaggaccacattgaagctcaaagatccatcctccatagaagctccacaagcaagcttccatcaagtggtaatcagagcacaagagcttcaagtaggtgctccctaaacctccattaattntttgctttaccttctcttccattggtttttcttcatttttctccatgtatctcctcacatgtcttgttctanaatttgttaacatgattctttagagtttgcaccgattaaacttgctatagaaagtagaattgattttctatg

SEQ ID NO: 178673 - DNA, 455 bp, Glycine max
  unsure (1)..(455): unsure at all n locations
ttgagccaaaatcctgactcaccataaaccttgacccatggtgagaatgccaatccttaccctcggaagcaaaaaagaatagaggggaaatttccaatcaaagaaaaagagaaggaaaatttccaatgaaagcaaaaaagaaatgaaggaaaattccccaatcaaagagtgggagaaagcaaaaaaaggaaaagaaggaaaattccccaatcaaagagtgggagaaagcaaaaagaaaagaaaggaaaattcccaatcaaagaatgggagaaagtaaaaaaggaagaagaagaaggaaagatagctcctgatcaaggatcgaaagaaaccagaagaaatgtgcagagaggtctttggaccagacaatatctgaacagtacagaattgtcaccaaatgaacganaaaagaaggaaagggaaccacgacctanaatagtcttctccctttgattacc

SEQ ID NO: 178674 - DNA, 452 bp, Glycine max
agcttccatatcagttcttctaagaacatcatatatagggctagtgaaagaaagaatataatcaaccttatcccaccatttatcatccaacaaagtatctttcacaaatttagcctttgcaacatcatcttccttataaaagaccattggtcactaatgaccgtctcttggaatcctttcttcaattgcttgaatctcttgagcattacaatagtggaggcaaatcttgttggagcaatggatagcaatttcaatgaattgaatgaattggaaattgatactcatagagtgactcatgacaaaaattttcacaaacattgcatcatccaaaatttgggtgatccaagaacattcttcataaacaacattggtttttttctgtattcttggctgcacatatgttcttcaaagcaagaattaatgtatggacaccacatagagtccaatagatg

SEQ ID NO: 178675 - DNA, 468 bp, Glycine max
tgcttctacaacaacatgcttatatagaaaggggcacgatccattgttataataaagaatcattatcaactttcttacatcatatttttattaattctgttactcattaagcatatttttacgaaaaatgcatatactaaaaagaatgcctttaaattctccactctaacatcgacttcttataaattcgatgttaacaaaagggtggtggcatacttgtatgagttcgttaacatcgattcttcaacattaaaactaatgttaaagtggcgatgttaacatcgattttcgaaaaatcgatgctattttacgcttgtaaacatcaatttttcaaacaatgatgttgtgttttgatgttaacaccgattttcataaaaaaaacaacattgtgtttctgctatatttaatatgtttcgctctcttctcgcattcactcttactctcactctcatgctctcactcttactc

SEQ ID NO: 178676 - DNA, 409 bp, Glycine max
  unsure (1)..(409): unsure at all n locations
gagcttgcctttagggttggtacctcatcactttcttttgaagctttaacctcatcatctctcatagtctttagatatgggagccaatccaatccttgtgtccgaactctcagccacttatgatagccgccgatgatcccattactgcttcccctaagctctctgtcctttctttacgctgcatcccatgccttgcgaactccttggagtaccctcgcgttgtggtcgctgaaaccccgtgcgatgaaaggcgtgatgctttcgtctgatggcactcctctcatgggacatccttcgcatgaagatagaatcctgattcttccttccttctagcgacggaaccaattaacagacgcccctccatgctagccaagagttggtcccaattcgcctttcctttntcgacgca

SEQ ID NO: 178677 - DNA, 461 bp, Glycine max
  unsure (1)..(461): unsure at all n locations
ctggaaggtagtcatactctacaaaatatatgtatgtgtgtttatgtagtgaaaatgccttagatatgcatgtatgtaaacaaaaaaatacttcacaaaatatatatatatgtatgtttaggtagaaagataccttggatatgcatgtatatagcaaaaataccttacaaaacatatataggtatgtttaggtagcaagataccttggatatgcgtgtatatagcaaaaatacctcacactaatatacacatgtgtaggtagcaaaatacctcatgaaaaaaaaaacaaacaaacataccagaaaaagaaataaacaaatgataaaaaaggaaaagaaaaataagttgtttagctgaaaaaccgatatgcttttganaagagatgacttccaacttctctttgaaaaaatcactgatcataactagtttttaaaaatgtgtatacacttgaagggtgaatg

SEQ ID NO: 178678 - DNA, 439 bp, Glycine max
agcttgcaacatctagatctgagtggatattctcttcttggagaaatcccttctgaagtagggaagcttacagccttacgatatctagatctaagttataatgtggctattcatggagagatcccttatcactttaaaaacctctcacaactgcaatatctttgtcttggagaacataatctttccggaccaatacctttccgggttgggaatcttcctatctttcatactcttagacttgaaggcaattttgatcttaaaattaacgatgcaaaggggctatcttctctctcttttttaacaactcttgacctgacatcattgcataatcttggctcctctcgttactggcaacaagtgatcggtgagcttataacatacttgagagagttgagtctagttgattgtaatctcactgatgaaagtgttgtgctatctg

SEQ ID NO: 178679 - DNA, 464 bp, Glycine max
tggtattattgtactcctccctacttagtactggatatgtttatgttaattaatccctattaaatatgttaatccccaacatatgaacacggaagattccagccaaatagatatacattgaacgacctcttgtcttgtctggtgctagacagaaatactcaccctgtgttaacgagaaacatagcatcctacaagctcatagcgcggtttctttcttcttcttatgatagcatagaagaatattattgtgaaaattcagaagtttatgtgtctcatcacatgaaagtttgaggacacaatttctgcccaaaacataagctcccactatctacttcatcaacagactacatatatgtgatatgattctaaagagaaaacatgtataaacagccagctcagttaaatccaagcaattgttttcaagcgtgccacccttaaatatggttgaaaataagctcgccatc

SEQ ID NO: 178680 - DNA, 448 bp, Glycine max
  unsure (1)..(448): unsure at all n locations
ttaagcacctgagctgcagcttataactaatatatggataattatcttttattcaaaggttggattaattaatttcatattctatgtaaaattattaagatgtgaagagtttaatttaaatatattaagttatattttcattcaatcacaagttattaaataccataaatttattaattgttacattatttattagcagccatacctaatatgactgtacagtggttgacactgtaaaaaaacaccaaacaaaacataaaaactaaactcaatcaatattcttttcctctctgtttaaatatattttccaaattatttattgttttagatcactaaaaatgtcttaattatctttattcatcaatgtctcacttaaatacttaataactaatgcttganattgatcaacaaattaaaagtgaattgtttaggagatattaatacatca

SEQ ID NO: 178681 - DNA, 448 bp, Glycine max
  unsure (1)..(448): unsure at all n locations
agcttatgctgcaaatatttacaatagactcttctatcctcagcagcaaaatcaaccacagcagagcaattatgacctttccagcaacagatacaaccctggatggaggaatcaccctaacctcagatggtccagccctcagcaacaacaacagcagcctgctccttccttccaaaatgctgctggcccaagcagaccatacattcctccaccaatccaacaacagcaacaaccccagaaacagccaacagttgaggcccctccacaaccttccctcgaagaacttgtgaggcaaatgactatgcagaacatgcagtttcagcaagagaccagagcctccattcagagcttaaccaatcagatgggacaattagctacccaattgaatcaacaacagtcccagaattctgacaagctgncttctcaagctgtccaaaaatccaaaaat

SEQ ID NO: 178682 - DNA, 465 bp, Glycine max
  unsure (1)..(465): unsure at all n locations
tatctngattgaatgtagcagcaaacttgacgatatttctaatttttcatttctgcaaaggactcatccagctttgacattatagtgtttgtcttattgccattaaatcttacaggaatgtccttttccataatcaaggttttagagttatacactctatatgccttggataattgagagtatccaagtaagattccataatcacatttggagtcaaactcttcaaagttatccttggtgttcaaaatgaaacgttgacatccaaatgggtggaaataagaaatattangcttacgttcctttcacaattaatagggagtcttctttaagattgacctaatatagactctgttatgtaaaaaacaaacagtgtgatcgaggccgtacccgaatcaaataaacatgaaaatgcagtaactacgaagtgatcctaggtcgtttcccaacgagcagtgacaagccaaa

SEQ ID NO: 178683 - DNA, 452 bp, Glycine max
  unsure (1)..(452): unsure at all n locations
agcttgaagtgagaaagtgtggaagagttatgtcttcctacttttanttgttgaccacagagtggtacctggagatatgtcgcgggggtcaggagaccttggggacgtcaggtggggtgctattgcccaaaaccaagcttgaccaatcccgacccaacccgggcatagtcagtcagtgagaacctgtgacgcacctaaacaggcgagctcctggcagtcaaccaataaaagaacaaagaccacaaagctaggaggcttgtgtggtggctagccagctatggatcttgagtgatatctggaatatggcctctggtaatcgattaccaagggtgtgtaatcgattacaaggcttaaaagtgaagacaggaagttaagatggtctctggtaatcgattaccaagggtgtgtaatcgattcaccaggcctaaaaaatggggacaggaagttgagat

SEQ ID NO: 178684 - DNA, 464 bp, Glycine max
tgaatgctctattcaatggagttgacaagaatatctttatactgatcaacacatgcacagtggccaaggatgcatgggagattctgaaaacctctcatgaaggaacctccaaagtgaagatgtccagattgcaactgttggccacaaaattcgaaaatctgaagatgaaggaggaagaatgtattcatgacttccacatgaacattcttgaaattgctaatgcttgcactgccttgggagaaaggatgacagatgaaaagctggtgagaaagatcctcagatccttgcctaagagatttgacatgaaagtcactgcaatagaggaggcccaagacatttgcaacatgagagtggatgaactcattggttcccttcaaacctttgagctaggactctcggatagggctgaaaagaagagcaagaacttggctttcatgtccaatgatgaaggagaagaagatgag

SEQ ID NO: 178685 - DNA, 417 bp, Glycine max
  unsure (1)..(417): unsure at all n locations
agctttaggaattaggttnttcaaattattacatttggggcgggtcggngttggggtggatatctgtaatcccatgcacgcccccgccccgttttgagttatcgagaaaaacccgaacccgaccccgaacccgaccccgaacccgatcaacacggtttttattcgtcaaagtcggggcgggttcgattcggttcccgtggggtcgggttccgctgccacgcctaatctcacctctatatgccttcaaatttttcaaaaaatattaatctcgatgaacaatcaatgaatataaaagaaaagtttaaatatgattttcatccatgaaatatatttatatttactttttggtcccaagaatattttacttgactatttgttttcattttagtgccttataatggtttgttcactttataa

SEQ ID NO: 178686 - DNA, 462 bp, Glycine max
cgcttgccaatgaactctgaggctcttcacccaattcaaggatgttacttatgatgggaacacgggatggtcccgatggcagcttatggtttgctcttgtggccattgcaaggaatgaaccaagaagtgcatgaaccatggtgcatggcaagacaataatgagtagtgaacaacttgctatgtccttaaattttcttaatatataaacttagtactctatttgaaaactcacatgttttcttgggtttttctagagttatcctgtcatgcaactgcaatatctttagaatatagtttgtacatcatggcttaattacataggatgggtatttttccacttcaaatatgatttaagttctaaaatcatgttaagttacatgtaaacataatcaataataattctctcattacccaaaaaaatcttcaatactataattctgaatgaagctcgatctgcacact

SEQ ID NO: 178687 - DNA, 466 bp, Glycine max
agcttgcaaacatgcaagcacacttatattagtgccaaaaccaataggattttagtatcatttgaagtccaacatgctatgagaccaaacctttgcacaatcaccaagccaacccataatgacacgtgcagcaccaaaaatttctccaagcgcagttaatgtcacctatagaatgataagagtataaaatataagacaagaaagcagatttattgtataagcatgtctttgcatgttggttcacatgcatttccactcatatattatggatatatttaatcaaaccaagcccattaagatctggacactcagatagtactaaatatacaatactgtgaaataaccaacttgatctaaaaactttatctaggtttgatcgtatctaaaaaagaatatcttctgtaatataagtattccagcaggtaataatatcctgctgatgcaatgatgagaaatacacataaag

SEQ ID NO: 178688 - DNA, 454 bp, Glycine max
  unsure (1)..(454): unsure at all n locations
ntggagtttccaagtgccaattcgtcttcttctttagtctagtcttcttctggcttcaattcatcagtgggctttccttctgtgtccagcatcttgggatgttcccagcctttgatgacagctttccaggttctgctatccagtgatttgaggaaggccaccatccttgctttccagtattcatagttggttccatctaggattggtggtctgttcactggtcctccttctttctccatgttcatcagaatttatctccctagatctcactctgtgatttcgagtgttggctctgataccaattgaaattctgataccaggggacagatgtcgtaccggatgtcacgacatcacgcttcagaacatgcagattatatgtgtccgtatgaacagattaaacaagtaaataacacaagagaattgtatcccattcggtgcacctccctacatctgg

SEQ ID NO: 178689 - DNA, 351 bp, Glycine max
  unsure (1)..(351): unsure at all n locations
agcttgtcggggaagagagaagataagattctntttgcggaagagacacagtgagaaaaagagagaatgcttccgggaagaaaaaaaatgctttttatatttttaactgaagggcaaaattgacctttcattgaattgctgggtgcaccagcaatattgctgggtgcacctagcatatcccttagtgctggaatgcaccatacaacaatatttgattctcaggagagttttgccaaagcaacacctaaaactgcagaaaccccaattgctctaattcaaaaaataatctcatatctctatcattttctcaccaaggttacagactcacaggggaatgagntctcttaaaaa

SEQ ID NO: 178690 - DNA, 450 bp, Glycine max
  unsure (1)..(450): unsure at all n locations
gggtgctaaaatctgtgtccaatagcacattagccgatttaatatccctatgaagaacactttgctctgcatcctcatgaagataacgaagtgccaaagccacgcctaacgctaccttgtacctgttagaaaaattgagaagagaagagatcattgataacaatagtggaaaaggttttaattaaactacctttaaatgacaataaataatcgaaagacaaaatgttgattcaatttaatagctattttaagtgttgctctctcatcataattgaaatttcataggtgtaatcaacctaataaaagtttgtattattaaacagaaacgtagattagtaaggtaaaattataattctgattgaagaattgtaacaaanacacctatgaattgctcatgataaaaatacatacaagaagataaagagtatattaaccatgcctaacatccca

SEQ ID NO: 178691 - DNA, 391 bp, Glycine max
  unsure (1)..(391): unsure at all n locations
agcttaccactgtgagagttntgctttgtgttgctgctactagaaactagtgccttctccaattagatgttaataattttttaatggagatttgtttgaagaagtttatatggaacttcccaaaggttacaagtccaaaaattcttcctttgtatgcaaattgaacaaatcattgtatggacttagacaagcttctaggcaatggttttgtaagttctccactacccttcttagtcatgggttccatcagtccaagcatgattactccctattcaccattagtttagggaattccttagtcattctactaatgcatatagatgacatcatcctgtcaggaccaaattctgcctctgtgcaagcctattagacccaattcaatctatgtttc

SEQ ID NO: 178692 - DNA, 464 bp, Glycine max
ctgatgtttgtgttgaatgcattaaaggtaaacagaccataagctagaaattaagtgcatatagggctacagacgtcttataattgatacatacgaatatatgtgggtcatttcatacaccttcgtggagtggttgacaatattttatatcattcatagacgattaatccagatatgcatacttgtttcttatacatgaaaagccacaatctttggatgtgttcaaaacatttaaagtttaagttgaaaatcaactcaacaaaagaataaagtgtgtcagatctgaccgtggtggtaaatactatggcagatatgacagttcacgtgaacaatgtctggggccgtttgccaggtatctagaggaatgtggaatcatcccacaatacaccatgtcggggtcacctagcatgaatggtgtggctgaaacacgaaacaaaactcttaaggatatggtaagaaacatc

SEQ ID NO: 178693 - DNA, 440 bp, Glycine max
  unsure (1)..(440): unsure at all n locations
agcttagcagtagcatttagtaaataatttttatgttggggacagcgtgtttcttttatctgtcaactttctcccgttttctcaattaaaatgggtttaatgatgacccacgttatggaaacaaattattgttctcacataaattttgtatccattcgcttaatcaacaacatcatcgctaaagagcttaaattggtgggcatcaagaaccaatttccttatagaagagaatgcgcccattattccaacacccgtgaagaccaccataattgaggtgttaatccaataagtgaaggatgatnttggaggcttgtatgtcatgttgtacataagcataggcagaacgaaatccaaagggatgaaaccaatggcaccaaccacaccgttgatgtctccaaaaaatggcagcatagctgccacatacccacatagtatcatgt

SEQ ID NO: 178694 - DNA, 452 bp, Glycine max
ttccaagatggccaagttcaagcctaacgatgggttatataatgaaaggcgcaatacaattctgtgtatgacattcaaactttactatgttagtaggtaagattaaggattgggcagtggtgtcatggactatcgaaaagattttcaagtaacaagaagcatccgatgatgttcgatagaattcatatattgttgttgctttagaaatatatttgttatttaattccaattatattttgaccaatttcattttacgtttttaacaaaactctttataattttagtctgctataatatacgaatcattgtagagtaatatcttaaaattttaatgattaactaagatcagtgtattatgcatttcaattaatataaaaacttgtatatctcatagtatataaaaacttgcatacttcatagtaaatatttgataatacataatatcgttaatt

SEQ ID NO: 178695 - DNA, 311 bp, Glycine max
  unsure (1)..(311): unsure at all n locations
agcttcttatccaaggcactctctnggtggtgaagctccttcttccatggcttattccctagtggatggcatctcctctcacccttctcctttatctttcgctgcatctccatgggtggaaaatcaccattgaaggacctcattgaagctcaaagatttagcctccatagaagcttcacaagcaagcttccatcacaaggagtgcagggtaattcgcccaggcgagctgtagctcgctcatgcgagtttcttgctcagggttgacgttacattttagcccaagccagttggatgctagcctaggcaaattt

SEQ ID NO: 178696 - DNA, 73 bp, Glycine max
tgtcttcaaagtaccctctttccttaatcctccaaaattttgtttaaaggaacacattgacttacagtgccta

SEQ ID NO: 178697 - DNA, 455 bp, Glycine max
agcttgagataaggaagtgtagaagggtgaaacttcctacttttattcgttgaccacagagtggtacctggagatatgtcgcgggggtcaggagaccttggggacgtcaggtggggtgctattgcccaaaaccaagcttgaccaatcccgacccaacccgggcatagtcggtcagtgagaacctgtgatgtacctaaacaggcgagctcctggcagtcaacagataaaaggaacaaagaccacaaagcaaggaggcttgtggtggctggccagctgtgaattttgtgtgatatgtggattatggcccctggtaatcgattaccaagggtaggtaatcgattaccaagggtaggtaatcgattacaaggcttaaaagtgaagacaagaggctaagatggtctctggtaatcgattaccaaggggtgtaatcgattaccaggcttgaaaacgaagtc

SEQ ID NO: 178698 - DNA, 469 bp, Glycine max
  unsure (1)..(469): unsure at all n locations
tctacttatgtggcagggcgggcttccttcactttcttgtctccaacgcgagctttgaccactgttcttccttcccgcgatgcttcttttcatgtccgcctgagtgggcttatagcctaaaccatacttcccacgatttccttgggtatttatcaggctagttatgccgccgttgtctttgcctaaacccatcccgggttcataaccgttccccaacataactcgggccatcattaccgctgcatcggacagacaaggctgcccaaagagggagtccacggaggaaatgctgaccacctcaaaagactggaaagcagtttctaacgattcttctgcggcttccacataaggcatggaggatgggcagcttaccaagatatcttcctcgcctgacacgatgaccaagtgcccctccactacgaatntcagctnttggtggagtgtagaaggcacaactcccactgagtga

SEQ ID NO: 178699 - DNA, 439 bp, Glycine max
  unsure (1)..(439): unsure at all n locations
agcttggtcagactcgtgatggcttcctcttattattctcctgccatctcttccttctatttgggttccaaacaaaaacaacacacgatcatcaatctcttcatatatataatggaaatcatcattcataatcgatgaatcgatcaataactagtatgtacgaaatctctatgaattttacaggtaaacaacaatggatcaattaatgattgatcatcaaagaaagagattggtggaaatcaattacttaataattgtacgtatacgtgaattgtgtatgaatctggtggacgaaatgaagaaaaagaaaagattggatatgtgtgtagcttttgtgctttctgggtggtgagaattggaagaaaataacgaagtttgtgtttgtgatatgataagcagatatatggctatgacttgttgangttttattggctgtgta

SEQ ID NO: 178700 - DNA, 419 bp, Glycine max
ccctcacttgacgacaccctcacgtcaaccctatgcagagaactcacggaaccgctggaagaaagagcggctgtgaatggaaaacgccacgagaacgacaaagtggaattggaatcggatccttggagaaacacttgaaccttgggaacggagagggaagtgctgttgagcaagataagagtgaggaaaaggagagaaactccaacgcccaaactgaacccagaaatcacctttctcccctgtgacataaagggttccgaaaatgtaagtctcttagaagagtccatggtgaacaaagccaaggcatagaacaaaacgtgctttgtggttcacacttcacagatcagtgtttggtttgaatgaaaactgagctgagatgtgataagggaaaaaggggtttcacagtttcactgaacgtg

SEQ ID NO: 178701 - DNA, 342 bp, Glycine max
agcttgatgttgttattgtagacaatatcacaaataaaacaatatgttggggagagctctgcaaccaaatcctttatagagaacatggaaaaacaatatgttataagcaaaggggaggcacttgtaaagggagttgggttaaggatgtagcaaacaatgaatttctattcttgggctttcattgtatgtgtttgagttgttgtggttagagccggaagagcaaccccaggagacataataactgcactgatgagtattatctttcgtgccatgtaaggaagaaaccaccttcaggaatgtttagaatggagaaaatggttaatatttaatgactaagtaaca

SEQ ID NO: 178702 - DNA, 464 bp, Glycine max
tcttatccaaggctcatcttggtggtgaagctccttcttccaaggcttattccctagtggatggcgcctcctctctcctcttctcctttgtcttccgcttcatctccatggtgaaaaatcaccatcaaaggacctcattgaagctcaaagatccagcctccatagaagccccacaagcaagcttccatcacaaattccgcaccagcatgattggagtaccgaccttaagtgttaatttgtgattaggtatccctgatgttttcaatgagtttagaaatttaggtgtcagtaatccgaaagtaggattgagtagttcatcttatttatcaatgttatcagtgctacaatactccttttcgtcattgggtatcaatgataagacaataatttattttgtcaacaatatcttttttagaggcaagaacaactctcttttgcaagtaatctgcgttgctatagttatg

SEQ ID NO: 178703 - DNA, 424 bp, Glycine max
  unsure (1)..(424): unsure at all n locations
agctntgatggtgtcgagaagaaatcacatgtttgtcatcatcaaaaagggggagaatgtgaatgtatgtatacatgattttgatgatgtcaaaagaagaatcaaacaaggctcattttgcttcaagattaatacaagattgtttcaacaaacaaagccttgattcaagatttcttcaagatcaagccttgccacaaaatgaaaagatttcaagtcatccaaggcacatgtaatcgattaccaatacatgtaatcgattaccaaggcacatgaaagtgtgtaatcaattacacatcatatgtaatcggttaccagagactctgaatgttgggagattcaaatttaaatgaagagtcacaactgttcaagaaaaataactgtgtaatcgattacactaattatgtaatcgattaccagagaggat

SEQ ID NO: 178704 - DNA, 492 bp, Glycine max
ttcccacaggggcttgtgtcctgaggccctcatctcactctgacagaggaccatatactatatgagagactttatgttagtcattctgaggaatacttctgacgggccttctatagaaccattataataaccattctgatgcatacagagaaagaatccatacttgatgaattcagctgatgaagtttagactaatttcccaatctgaagtaacataacttcattactcttaacacttcttcacaggttcaagcattttgaagttgattactttaacaaaactaacgtgaagcttatgtgttggtgtgttagtgttctatccaaggtcatactgagtggcattcctcaatctgtcattttgatgtttctcatcaatacttctcatggacagcttctatgttcaacacactcgcattctccttaagcaattagctctcacttcctgatgagccctctatgtatgtggcaacatatggaaagcgaagtgctcta

SEQ ID NO: 178705 - DNA, 453 bp, Glycine max
agcttgataccaaatattaaacataaatatacaggtatgaacatgttaacaaccataagcaacacattcagaacaaacaatggaagcaaaaaagaaaaaattttcaaaggtacctacctccagtcattgctatcaaccttcttcagccttcacaattttagctttccagagcctcactcactcaaactcgatggtgtgtttatttgaagagatgactaggcttggtgatcaaaactaagagcatccatttctatttatagagctttgcccatcacaaagcttaaccttcatggatcaaaacatgggtttttgtttgttgttgaacattgtagaagataaggattgaatgtgggaagaaaatgaaccatgcataaaaaaccacttctcatagaaactagaacagaaaaaacagaaagataatccgagaaaaaagggactaaaaattcctacatt

SEQ ID NO: 178706 - DNA, 489 bp, Glycine max
ctattacgtgacctatgaaactcagctgagttgtaaagccaaaaatggcaataattaatacttataactttgttggagttaaagaaacttagtagttagctaagaattggtcgtagtctcaatggcagagacaaactggtacaaatctttgtgtcttatgtgctttcatttcttctctgctttaaactgacctagggttcgaattggattatagtttgaaactctatctattttgcaaaatctattttcatcttctgaaagttttttttttcaaattttttttatttatcttacaaagtttctctttagatgacaactatgttcttcttgaaaaaagctttaaaattttctaaaatcacaattcaacccctttcttgtattacttgcctttatagtttgttatgagaactggacctctaagggttgagcacctgacagtgactagaggaaaagatcctgatggtagataacaattgccaattcattatt

SEQ ID NO: 178707 - DNA, 430 bp, Glycine max
  unsure (1)..(430): unsure at all n locations
agcttgcttgatatgtcatgaagtctgttttacaatttcaagatcatgagctcttcctttctcatgataattgtacatggtcgacccttgtctccagtcggatatatttatagaatagtaataacaacttatcataccctaattttgcccaagggtcattgtttgttggcatgcgaccttcgtttcaccacctcaaaatgtttaacacccatcgttgtggaatccgtaaagttctgagatgtttcgagaagaaactggtcaaaaacacgaaaacaggagtgtatntagcaaagtggggtgtgtgtaaataaactgttacactctaatttcatttgaggaccattgttgatcgatttggaaggcttaataatcatcgcggtggaatccataaaggttcatgagatnttggaaagaaaatagacaaaaacac

SEQ ID NO: 178708 - DNA, 465 bp, Glycine max
taaaaaattgtggtgaagaaactccattttccgaatgaatactaacaggctatgagtcgttctctttgctgaggtagttactactgtaaccaactcccgtgagtccttaagcacaaactacatgatacattaatagctctccgacataaaagtagtttcatatgcatttcaatatttaaagtctacccttattagcctaattattactagtacagcacaataatatgcatgcaatcataatttctaacttcaataacactattataaaaaaaatgaatagtctatttgaaaagtcgtcaaatgactcataaaagtgagtatttgttaaagtcaactattataattaacttctctagccatttgagagcatcaaagattcaaattgacatatccaactaatattgtgaaaattagtctgattagattagtctagcagatccatcgaggtaataggtcaataatata

SEQ ID NO: 178709 - DNA, 456 bp, Glycine max
  unsure (1)..(456): unsure at all n locations
agcttccatcaatgcacacacttgcatttatttgagaaggaattttcatgccatctatttacacttgagaggcaattccacatcatatattcattttgggaagcattcaaacgtgtgtacatttataaagcacttgaccacctattcaacatatacacattttatttgaagggtcctttctctagctacctatcctatacatatatgtacatggtaaataacatctttacacaaactaggcaaacatcatggtgcagccccaaaaatcagccgctggcctaaagggaaatccctatcacaatgccctcatntttatgctttcttgtatagaaatcaaacgcttgggttcctaggcctaaaattgcattcgggcactcattntaacctctacatgttgtccctatacatataaaacagccccacaatccaaagttcacaaaaccatgctcctatgtc

SEQ ID NO: 178710 - DNA, 447 bp, Glycine max
  unsure (1)..(447): unsure at all n locations
tcctcggggccattntctgcgaaggcaaacatttggaaagttagttttaccagtgggacactactcttaaaacaaaaatggcatacaacctcctcccataaatacaaacatcaatgtaaatttagagcaagcttatgcgcatatttccttacgaacgttcacttgcacaagacattctattaactaagaaaaatgcacccatatacaatcaaggcagcttcgttacctagattatttacatgtacttccaaggtgtatttgttacttacatcacacacatctccttggctaaatttacatacatgcatactcaaagcattttggggtaccaaaaattgcacatgtgcacatcttggtatttctaatacctatacatacacaaacttcatgatgaatcttgactatctacacaataaggtgctacatttcatgttcttttcaagtttt

SEQ ID NO: 178711 - DNA, 373 bp, Glycine max
  unsure (1)..(373): unsure at all n locations
agcttcacgtaatatgctatgtattgcattgtgactagatcacagtcatgcccattttgccgtaacagtcttaagagagtaaactcatgtgatctctgggtgttcactgataatagggatgtagtagacatggcaacaccgacaagggagaatcttanaaggcttttcatgtacatagataagttgcctttggtcattccagactttctctttgacacatatgactctcacctaagatgagtgtttgcaacagccagattttactgtctctggtgtgtggtcttggagggttagttcctttcaatttaacaatgtcaactcaaaatgttatttgataaatctagtttatataaaggtgcaacgttgctttcta

SEQ ID NO: 178712 - DNA, 450 bp, Glycine max
  unsure (1)..(450): unsure at all n locations
atatatgccagcantatgtatattggttgtaccaagattggttatttgtgaatcttttattcagcgtcacaattgcacgatattgtcctgtgtagtttttgctcttaacatatctctctggttctctgtgtcataacatgccattgaatattttggaagttcgactatgtgatttccttcccacacatgatggcatcttactctttctagaccatcaaaggcgactatatttgtctttaattgagatgtcgcggtgaatgccagtatacttttaatgaagaaaacttataactggtcttacaatatagagtttattgcatttaatatggttgctaaaattcaagatgtggaactgcctctattgcctacttcagaggattaaataccattacgtattctttacagagcatagccgtgaacagtgaggatcacttacatctgaaatataat

SEQ ID NO: 178713 - DNA, 452 bp, Glycine max
  unsure (1)..(452): unsure at all n locations
agctttccacaagacatattgaaagatctgggatctagctaggatagaagtctctgtcgaagccattgcatccctcactcaatattacgatcaaccgctaaggtgcttcacgttcagagactttcagctagtatcgatcgtggaagagtttgaagagctcttgggatgcctgctaggaggaagaaagccatatcttttttctaggtcctacccctccatgtcaaggatagccaaggtggtcaaaatctcggcgtaagagttggatcgagtaaaacaaaatagaaatggggtagtcggaataccaaggaagcatttggaggaaaaggcaaaggcattggcgaagcaaggtgaaggggcttcgttcattgatgtcttggcgctattggtatttggagtcatcctcttntcaaacgcggatgggctagtggaccctagcacgatcgatgcctttc

SEQ ID NO: 178714 - DNA, 457 bp, Glycine max
  unsure (1)..(457): unsure at all n locations
tcgctgtataagcacgggtctgggggacgaaggtcaagtggtcgctatatacgaagatgatgttccaagtacattggatttggtacgaccatgccctcctgatttccagctgggaaattggcgagtggaggaacgccccgacatttacgcaacgagcataatgtaaacctttacggttttaaaagctctatagttgggcctaggctgtagagtttttcttttggttaaggctgtgcgtattttgtttttttaatttataatacaaggatctttcttcatctgttcctacgtctctacccattctcatccatttgcatgtttacttctttatttctgaaacggcagatccaatgacgagtcccccgaaggtactaatacctgngacccgcctatcaacttcgagcaagatacgaatcatacggaagatgaatggaacgacgatgtgggacttccccca

SEQ ID NO: 178715 - DNA, 460 bp, Glycine max
  unsure (1)..(460): unsure at all n locations
agctnttaagtacaatcaaagcataaatgcattacatatccaaagaagaaaaaatggaagaagaaacaaaagtacctattggactttctgttgcacctctctcagttgatacccacactccaggtccctgcacctctggttgctcatcctacataattcacaaacttaaaaaaagtaaccatgaaaacctcgagttcctgaaatgcgttattttggaacctcaacatcaaattacatgccatgtaaatctagcattcacagatcagaagtcagtttcagtcaatagttgactaataaacatttcggacaaagaaaataaagaagccgctcgctatccataacatgctcacacaacttcaaaaccaaaatgaagagttctgtaattagaattagcagcaattaagcgaatgatggactgaatcagacaaacaatagcaaaagtacacaagagaaattatcg

SEQ ID NO: 178716 - DNA, 455 bp, Glycine max
tcagtcttttcaactgtgatctttggtgctccgtttgcctttttggtctcctcatcttccgctggtgttggatcttgtattataacttctttgggcttttactctgtcttcgaattatctatcaccacttccttggtctccacatgaataaccgggagctcagcttgtggggcatcaattgttgctgcttctatcggttcttgtgctgattcttcctttggtttttcgattgctgctggttctggggctggaacatcaatgcctgattgttctgtttctgggattagtcttggtcgatacctcgatggtacttgtttcactatggttcaattctgttgggacttgtgcatcctgcaagatccaatttcaattcaaaaagcaaattcatgactaagttaggtgataaaatggcacgtcacataatcatatctggcgacttaattagagaagaatgt

SEQ ID NO: 178717 - DNA, 348 bp, Glycine max
  unsure (1)..(348): unsure at all n locations
acttgtaggagctgtctgtaaataaatgtcctcaccatccatatcaattntctccaactccctaccacatatggtaaaaataaacattaacttctatcaaagacacattgaaaatttaacataaaaatccacaataaaaataagccttcagacatttggccagtacctccggataccagctcggcgttcttctttagggagtggaaatagtacaccagagatggatgtaactntgtcaaagaaatcaaactctcttttaaatatgtcaagtgcctttggattaaaaccatccattatacgctgccttaccgctggcagcagttctagaaatgaacattctgaaataaa

SEQ ID NO: 178718 - DNA, 456 bp, Glycine max
  unsure (1)..(456): unsure at all n locations
tggttgatagganacacattctgtttctttgctatcagacttcactctgtattcgtataggaaacacgtggtaaacacagtgaagtctgatagtaatatcacttttcttttgaatgttaccaaagacatgatttttgttataaaaaaacaatcaagttgaacaatcacaagataaaaaaaaaaacaatggtttgtatttttgggtaattttaaagttaagattcatcatgtgatgggaagtaaggataccgaatcaacttattaaaatatcgtgattttttttttaatattaagaaccaattttataaatgaaaaaatatgattgaaacggacagtccaactaacagtaatatgttacttgccaataaaactgataaatattatacatcaatagtaggataaagagtacttanaaaaaataagttgcccaatcatattcatattttaacacaatca

SEQ ID NO: 178719 - DNA, 460 bp, Glycine max
agcttcaccggatgacgccgatcgaacatttcctaaccgacgtcatgcaaatttcgttcagggattgaattgaaaactcgttaggcgacatctgtcgtgaagtagcgaccgatatttttcagccgacattgcacaattctttttagaaaagctcgctggtcgataatggtctttttacggcagagtaagttttcttgttttggtgttgcataaaaaagttacaatgtacttcggctaggtttttcgtgcgagttcaaccgacattttgtttcggccaggaaaacattagcccacctctgcaaaaaaaatatttgctaaccgtcttcatgcatatttcattcaacgattgaatagaaaactcaatagccgacaacggtcgtgaaatagtcccgactgatatttttcagccggcattgcgcatttcttttaaaaaaacgctcgctggcagaatatgtttttt

SEQ ID NO: 178720 - DNA, 465 bp, Glycine max
tctttgttagacctcgatcggcattttcaggccgaggtcgaccgttatttttttcgatccatttcggtgaataatatttttttgccgagatgggcaaaatgccagtttcggccgaataaatgggaaaatgccagtttctgccgaaacgataagtcggttgggctctcacaaaaaaacctagccgacctacattttaaactttttatgcaacaccaaaacaagaaaacttcctgtgccgcaaaaaaaaaacattacatgacagcgagcgttttgaataacaaaattgcgcaacgtcggctgtaaaatatcactcggggcttcttcacgaccgatgtcggctattgagttttcaattcaatccgtgaacgacatttgcatgatgtcggttaggagatgttcgatcggcatcatcctgtgaagtttctttcttatgcctcgatcagtcatcattcctgaccgacgtcg

SEQ ID NO: 178721 - DNA, 456 bp, Glycine max
  unsure (1)..(456): unsure at all n locations
agcttggatacttggctctgtcaacaaattatgctcatcanacccctaatttatgttctcctttgttttcttcccatttttttctataaattaagtgtttgttgcttgagatcaatttgtttggtggtgtcaacttagttggaatcattcaacatattatatattatgatgttgctcaaacacttagttttatttattaaaaaaaatactaagggagtcttaattgagtaagttgtctgaatatcgtgttcaatttctttgtataaaaatatacattaaaaagtaacttgtatggtacataacaatgctcgctcacatgactctttattattctattattaaaaatatacttgagtcggtcaactttcaattgatggaaaaaaaaagtcttaanacacagtgacatattagtatcaaaactatgttcccttattacaggtacnaaaaaaaatattt

SEQ ID NO: 178722 - DNA, 470 bp, Glycine max
cgtagtcagcatggaaacaatttctcagcccagaagaatattgtgttatcaagaaccattcatttattagccatttaccaagatctatataggccagaaaaagacattatttaagatcaaggtgcaaatagcggtcagtacccatatccacaagaaatatgttatttggaacgcattctgcaagacaaaacaaatcagttatgaacaaacattaaaaacttaaaattcaaaactacagcaaagtttttctcactaaatgaactattttttaattaaagtcagctacgaaatattatactatttatttaatagcaaatccgtcaacatatcttaaataatgtaaatgaactattttttctaattaaagtcagaatataaaaattatctactttaaagcgctatctgaaactggcaaattttcctgatcatgcagaagaagtttcaagggtaacatatgtttatatcattac

SEQ ID NO: 178723 - DNA, 376 bp, Glycine max
  unsure (1)..(376): unsure at all n locations
agccttctattcttttgggcctattaagaantttttggatcaaaatcaaaggagagttgctattgactctattccatttgttattgctctctatcaagaggttgacatctttttttattccaaaaatatatttctgaaagaatcatgattttgtccaataaaatatataatggaatcataattttattgcgtatctatttttgtgtttccttttttacaacagaatcgtgattctattgtataatatgtacaacagaatcacaactctgttgtatttttttagtcacaataaacattacaatgaaattacgatttcgttatcatttnttttggcatccccttaatacaatgaaatcgagattccgtgttatatttt

SEQ ID NO: 178724 - DNA, 465 bp, Glycine max
  unsure (1)..(465): unsure at all n locations
tatgatggaagaaacagctagttaaaacaagattccaaattaattgctgcacatgcaacattttaatactactgcgctctttttntgttccatgatattacatatagaagaaccatgttctaaaaacattcccttttttgttcttaaatcttgccactgtaacctttttctaggcaaaagtgatgttaatatgttagtcattagtcataactccacgtgattagcacacagcatatacatttaatttgaatttcaaattgagagcaaataaattctgaggtcaaccactaaagatatgtttggatttcttccattcaaagctcacaatctagttacaacaatcacaaattangctaacaaaaatttaattgtatgtagcacgttgttgtaacttttcaaatttaattaagctcatgtatatttaattaaaaattataataaaaaaaataatgtaattaggaacta

SEQ ID NO: 178725 - DNA, 453 bp, Glycine max
  unsure (1)..(453): unsure at all n locations
agcttgtgctaataggttctattgatactatntgtttctgaacttcttcctttacgacaaagtacttcaattccatatgcttaacacccttagtgtacttgtcgttcttagagaaaatactgttgtggagttatatcaatacattttcaacggtctagcaatattgtcgacaattccaagccttaaaataaagttccacagccaattagtctgaattgttgcctcaaaacatgctacaaattcagcttccatagtagatgcaacaacaattgatgcatacagaattgtttccatttgtttttgttccatataatttctaggacattgtgcgagactaannattgttttttctaaattataatgggtgatgctgagcacttttcaatcctaaatctctctagtactttattgatatatgctttctgagacaagcctaacaatccttgtgatcta

SEQ ID NO: 178726 - DNA, 447 bp, Glycine max
  unsure (1)..(447): unsure at all n locations
agggcagagcanatgagacnaatgagtgacaaatgtgaactgattgatccatttctacggtaaattgggtgttgagaggtcaaattttgaatacgtggagttttcaccttataaccagtctgagcaagtctaaatcaatgttatagacttgatgaatatgagagtttactccaaaattacccaattctcattatcacctttcaaaccttgagatttcactaaattggagggttttggatacctatatttngatttgccttggtctgaagattgtttttggcttacatatgatctatacatgatntatgacttgtaggatccaatctgagtaatattggatgtggtcaagtcggatttctaaatctgccatattatgtataaaaatgctgtttaattgtgcacaaatatttaccatagtgcacaataatggttgtgcattgctactca

SEQ ID NO: 178727 - DNA, 347 bp, Glycine max
agcttccaacaccattaatggctacctaaccttccaaaatcacaataaacacacaaataatcatccttaatgcttcataacattgaaccccaacataaaaactccttatctaagtaaaaataactctaactcatcagcttccctaaatcccatgagtagtgtatgaaaatgaaaagagtaaggatcaaggaaaactatcaatgaaatactcaagggaaagggaaaagcactcacctctaggaacatgttgaaatgagctcttggcagtgagtctctagatctatgcttctctttcttttctttctccctctaactatcctttctcctcttaaacatgtgtgtgtgtg

SEQ ID NO: 178728 - DNA, 461 bp, Glycine max
tctggtgatccttcaaacccaatggagagaagaagggacgttgctctcttttgtttagctgtgttcttcttgtggacttcagtggctgctttgctttctcctaaaggtgtcaactatgaaggtgatttgactaggagtgcttcccttgtttcttacagcacataataattgtaaggtcgctcactaatcctaataaatatgcttgttttacatgcagttcaagcacttatgggcattaggaactctctggcggatcctcattctgtcttaaataactgggatcctgatgctgtggatccttgcaactgggctatggtcacttgctcttctgatcattttgtgattgccctgtcagtcaaactggaataaaccataatccataacaagaaatattcaatttcactgtttctcttcttaagagtacactacttatatcatcactttgcatcttttcagtggga

SEQ ID NO: 178729 - DNA, 442 bp, Glycine max
agcttcttctctgcattctctctctccataaattaacccattgtgcatctgtgcttccttttcgcattttctacttacaatcacaaagcatttatcatccatgtaagttccttgctttatattctcttttacttgtctaaactttagggtagaaaaccttacttttagttttagatttttagggttttaatgctctgttagaattagtttaagattaggactttatatatgtttgtattgtattaagtattttgggaacattgcatgtctgatatgccttttagaggcttgaaaagtgcaagaaaacgaattgcgttttctggaaaacgcggtgaactcgctaagcgagaatgctgcgctaagcgggttcatcagtattcattgaatatacgcgttcttggaagaactcgctaacccacctaccgtgctaagcgagttcatc

SEQ ID NO: 178730 - DNA, 450 bp, Glycine max
acgcgacctataaatactcagcttgtatgaagatgaacatgaacttaggatcacttatttctggtcagatttcactcattgctcagtccaactcctcgcggcttggatttccagccctgattactgccttgtgcaaggcccgaggagtcacctcaaattctcttaccttcgagtcactcagcccagccattaatttggcttatattaagaagaattgctggaacctggatgacccttcggtaacttttctagggacccaaaaatccatggctagaagatctgaggccctatcttcttcagctactcctgctccccctacctctgcttcctttacttttgctctcccttcagcaccagtaactccagttcttccaggtcctttcgctcagagcttagagcctttcatgtctatgctgcaaagctcgcatcagggccaactcctgatcatgc

SEQ ID NO: 178731 - DNA, 387 bp, Glycine max
  unsure (1)..(387): unsure at all n locations
agcttgcggttctctgtatggctttgttttgaattttgtcttcagnggctctgcgctaataatgttgcgtgtggaagcgtgacgaaaatggcttccacacgtgccatttagatctgacggggcacaatggtcctgttaaatgtatcgtcgtaaaagaagcataaccgcctacggatggtcgttgcgagaaggggaacctgcggtggattgtgtacactgggagctaggacaagaccgtgaatgtgtggtgcgtgtatgaacacgcgccggacgcgagcgtgttccaaagctgggccacaccgtatcattcctactcctacgcagctggattcagctatatctcgccggcgaaatatatgtgtatattcatcaccggcgtggagttat

SEQ ID NO: 178732 - DNA, 456 bp, Glycine max
  unsure (1)..(456): unsure at all n locations
tgcanggtatcgtgaagtgtcagggcatntacattttctgtataaggaaagacaagaacatgtcctgggcttcctgctcgcgtgtttatatcacatgttcctgaatggacctccaatgttggttactacaataaaactgagtatttaaggttggagcatgctaagaatcacgagattcgtggatcaattgctcttcctatatctgatgtgcactctcaagtgccatgtgctgtattggaactagtcactacaaaggaaaaggctaattttgacagagaattagaaattttttctcatgcactccaggtggatttttcttttgctatttctagcatatgcttcaatttcttcttatgttgagtctgtttggaacatctgtgttattctattagagacttggctatcttagtacaaaggttatcatggagaagtttctaccttgtctgacacagtatc

SEQ ID NO: 178733 - DNA, 393 bp, Glycine max
  unsure (1)..(393): unsure at all n locations
agcttggacaagttaaaatcgacaacgctttggtaattgctttggttgaaaggtggagacctgcatcacacacatttcatcttcctgttggagaatgcacaatcaccttgaaagatgttgatctacaactaggtttaagcattgatgatagaccaattactggcccaacatattctaattgggaacaaacatgcacaaaatatataggtgttgttccaacaaataatgctctaaagggattaacacttaaactaaagtggttaaaagaacacatgttgactgttccagtaaaacccacacaacaacaactagcaggtcattgtagggcatacattntaaggttgattggtggggtggtgatgccaaacaagttataacagaagtcacctaatg

SEQ ID NO: 178734 - DNA, 461 bp, Glycine max
  unsure (1)..(461): unsure at all n locations
ntgcttctatagtgcatggtgatcattgatggaggtagttgcaccaatgtggctagtgctagattagtgtcaaagctaaatttagctactaaaccacatcctaggccatataaacttcaatggcttagtaaggatagggaggtgcaagtgagtcagcaagttgaagtggacatttccattgggaaatacaatgataaggtactttctgatgttgttcctatggaggccagccacttacttttggggagaccatggcaatttgataaaagagccaatcatgatggttagaccaacaagatctctttcatgcaccaagacaaaaagattgtgctcaaaccattgagtccacaagaagtgtgtgaggatcaaaagaaaatgagagaaaaacttctgcaagagaagagagaaaaagaaaaagtgagcacaacacttgagagtgagaaaaagagggaaacacttga

SEQ ID NO: 178735 - DNA, 318 bp, Glycine max
agcttcttgagctgtatggctccatgaatatttgtccttacacaagagcttggttaacggtgctgctacggcgacataatttctaatgaattttcaatagaatttgttggatcaagtggcctcagaataattaagaagggggggttgaattaattattagtgaacctttactaattaaaaaaaaattatccttcttaatgctactagattcaattaggcttttactgctaagttaagaaagtaaagaacagatatataaacttataccatagtaagagcgataattatagtgcacagcggaaattaaagagtgtaggg

SEQ ID NO: 178736 - DNA, 448 bp, Glycine max
gctattacgcgacctataaaactcagcttgggtttgaacacagccaatcctcattgggcttatcatatttcaggtacttttcaaaattatggtctttccatctaaataaaaaaaaaatgtttgcttgatttctattggatgtacatcttgctgcatgagaatgtttctgagttgtgccttgatgactggttggtcatgggtttgaatatggaaacaacctctttgtatatgcaaggataagggtgcataaatgacccttccccgtaccttctcattagctgaattgaatggatttgaccactttcgaaagtaatacaatttttttcatgttcatttagttattgaatatttgcataatatctttctatcaatgataatgcttactttgtctaacctcttttacatagagcccatactgatcttatcaagagacacaatcgtccattat

SEQ ID NO: 178737 - DNA, 437 bp, Glycine max
  unsure (1)..(437): unsure at all n locations
cgcaagcttttaaatntatttacgaaaaaaatgggatattacaatcatcattatgggaaaactagaacaagataataatttgtataaaataagtcattaaagaatattatttagagtataattcacatgaataaaaataactaatttttttaagggttcatactcgacacaagaacacatcaattttacagtaattgctcattgagacatcaattagttcgtcaaacatatataattcacagttataattgtaaagatagaatcaaaatttacggaaacaccccaaaacccattccaattgatactctaaggatctctacacattntttcactaatccctaattgtgaataaccaatctcttacctcgatgtagtcgctcaagtgttctacattatcaattgcggtgcttttggtgctctctaaagatcttcctctg

SEQ ID NO: 178738 - DNA, 452 bp, Glycine max
  unsure (1)..(452): unsure at all n locations
tgagctatcanaatacttgcttattcatttagtgctaatttctctaccttcacagtttagttagtttaagatctcttataaatgtcagaagaagaaataatctcttaatgagctcatttcatactgtatgtgcaagaagaggaaaggttgaagcaagaaaggactgaaagtgctcatgttgtgagtacctctaaagacaagggcaaaagaaaaagaactgtggagcccaagaatgaagctgctaagggtccaggacaaaagaaacaaaatcagggtgacaactgtttcgtttgtagtaagcttggacatgtagagaagaaatgtaccaaatatcatgcttagcgtgcaaagaagggtatgtttcttactttggtctgttctgagagggcaatttagcttcagtacctggaaacacttggtgggtagattctggtgccactaataacatcagt

SEQ ID NO: 178739 - DNA, 407 bp, Glycine max
  unsure (1)..(407): unsure at all n locations
agctntacgtggtactgttgccagatcaatgcaatttcaactatgaagcatcatacntttgctcaatttatccttatatttaacattatatttgatacgatatttttagatatttcgcaaataaatatatgtgaagtataagtcttcaaaagaaggatttgatttttctaaactaaagagagtgtattttagaagataaaatacaacaaaaaccaataattagaaattgatgagcaagactgtaattaactttagattttgtatgtattcgattttatcataatttttaacttttgattatttaataaatgaatctgaatgcaatttattgtctaaagtatactccctcaatttagaggagttaaattaaaaaaatatggtaatatctaatataattacacgggaca

SEQ ID NO: 178740 - DNA, 419 bp, Glycine max
tgccacatcgagtgtgatcgagctgctcgttctctcttcttccaacctcgatgctcgccaatcctctctcctcaacctcgttattcacaacgaaggtacccctcttctcccaagatgcatgcttttttgtgaattatgaaatgggtctgtgaatttggcttctgggtctaatagcagtttgtatgactattgcagttttttttatgtggtagtgtcgcatatgcatagttgttgaataaatcctttttttcttatagaaaagaattttctttgtccttgtgaaatgaacagaatgtgggttggattggtagcaagctaataagattataccatggtcattctcaatttgatagtggttaaaaattaaactatgtgtgaacaagttggcctccacatcaatggaaaccatgtcgggatct

SEQ ID NO: 178741 - DNA, 311 bp, Glycine max
agcttgaaattgaacaacggaagctctctagaaattcaaattgtcataacttttcacacggaacaccgattcaagcgcataatatatcgagactctcgtaattgaacaacgaaagctctcgagaaattcaaatggtcaaaaattttcaaatgaaagtctgattcagacgcataatatatcaagaagcttgaaatttatcaacggaagctctcaagaaattcaaatggtcataacttgtctcacggaagtccgattcaggcgcataatatatcgagaagctcgaaattgaacaacgaaggctcttctgaaat

SEQ ID NO: 178742 - DNA, 440 bp, Glycine max
tctcgatatattatgcgccagaatcggaattccatttgaaaagttatgaccatttgaatttctcgagagcttccgttgttcaatttcgagcgtctcgatatattatgcgcttgaatgagactttcgtgtgataagttatgaccatttgaatttctcgagagcttccgttgttcaatttcaagcttctcgatatattatgcacctgaatcggacttccgtttgaaaagttatgacgatttgaatttctcgagagcttctgttgttcaatttcaagcttctcgatatattatgcgccagaatcggacttccatttgataagttatgaccatttgaatgtctcgagagcttccgttgttcaatttcaagcttctcgatatattatgcacctgaatcggacttccgtgtgaaagttatgacactttgatttctgagagcttcct

SEQ ID NO: 178743 - DNA, 445 bp, Glycine max
  unsure (1)..(445): unsure at all n locations
agcttcaaccccgctaggatgcgcgtgagcacatggagtcaagcgagggaaagagtggacgcaaaaatgaagagtcaagcgagggagaaatgaacagtcaaggataaggccaaatttaaaattaaaatacacacacacaaaaacaacaacattttcatataaaaaattggcgccgatttgtgttccactaggacattctaaggcggtttcaagaaactgtcttagaatgtgtgtcataaaaaaataattattcttaattacagaactgccaccgcataacattctaaggcggttatgtataatcgtcttagaatgcgcgtcgtaaaaaaatgattttttagtagcggggtttgcaagttttgtatcgggtatgttctttgtgcttctttgntntcagttgatgatgtgggatataaggtctctcttctttttggtttttggaggg

SEQ ID NO: 178744 - DNA, 393 bp, Glycine max
  unsure (1)..(393): unsure at all n locations
gcttcggtggattagaatttctcttcaaaaccggtcttttattcatttggctgagtttatttattctgtcattntttaaagttaattctccaaatacgaaaaaaggtgaattgtggggatgtgaaaaaaatatagtggtatagtgttgtatctgtgtttcgtgtatctagctccaaaacttgtgttcagtttgcttatttgtcaatcacaattcacaactgggttctatgcgatctgcacagtttgaatgatgcatctcttctttttttcgtattgttaatttggcgggtgaaactacctgcacagataaagctgatactgaatcaaaacattaatacatacctaatattctcaaattgaatttactaatctacaaagagagggaatagcaca

SEQ ID NO: 178745 - DNA, 456 bp, Glycine max
  unsure (1)..(456): unsure at all n locations
agcttaccacccatccatagttatcaatacatgctattaaatgctggaaatcaatagttcaaaactgaagcaatgaatcccccctggctccccctcgattaagaacaaagaaatagtagtaacttttttaggataaagaaatagtaatgtggaaggtgtgcctcaactaatatttcatatatgatatagcatgcaatgtttttagaactatgctaagtttaatatgattagctagcacaatctttttttttggtgtctccttatgcttgtgatgaattgaaatgcggcatctatatgcaacctatataccttttaaacaaaaatttgtggtccttctttntcacttccattgtctatacctaaaagatcaaaggtatagacaaatatgacatatttgcatttattatcatcatcttcatatttgcatttaatatcatcatcatcttcacaaaatac

SEQ ID NO: 178746 - DNA, 398 bp, Glycine max
  unsure (1)..(398): unsure at all n locations
ctgggagacataagtcaagtggtcgtgatatgcaaagatgatgttccgagtacattggatttggtgcgaccatgccctcctgatttccagctgggaaattggcgagtggaggaacgccccggcatttacgcaacgagcataatgtaaacctttaccgatttaaaagctctatagttgggcctaggctttagaggttatttcttttgttaaggctttgtgtcctttgctttgaatttataaatacaaggatctttcttcatctgttacaacgtctctacccattctgatccattcgcatgtgtacttctttacttgttaaaacggcagatccgatgacaagtccctcgaatgtactaatacctgngacccgtctatcaacttcgagcaagaaactaatc

SEQ ID NO: 178747 - DNA, 330 bp, Glycine max
  unsure (1)..(330): unsure at all n locations
agcttgtgaagaannatccatttgtaagcagagaaaagaaggtttccacaaacaatacggaaagatagacatgttattgagggcttttgtgcaaatacaaggaaaaatgcaattaccatcttgctcctcttagcctcttcatcgctgtcattaccatcatcaccaatagctttcctggaaaagtacatggcatttttaaatgtcagtacatcaataacaatatgcatatcaggagagtgaaacaacaaaacaaacagatactggacttcaaaccttctttttgtaatgacccgatcatcaggaccagcctcagcatggccatggccatgg

SEQ ID NO: 178748 - DNA, 466 bp, Glycine max
tataccttcttgttgcctatagccttaagctactaatcttgctttgtttcttaccactttaccttgttcattcagtttatttctaaacacccatcttgttccaataatatttttgttctccggcttggtacaagtgctcatacttcatttttggtaaactggtaaagctcctcttacatggcaatgatccaatcatcattttccagtgcctcgtctatcattttaggttctatttttgacacataggcataagaaacaatatctttgaataatgatctagttttgtctcctttaatatgatctccaataatcttatcttgaaagtggcagttcacaaacttccaatcctttgtttgagcttgttgatcaaatgatccttcaaactgacgaagaatttcctaagactcttttacttcatcttctctaggttcaacagatggaccaatctgcaaatctacaaaatcat

SEQ ID NO: 178749 - DNA, 466 bp, Glycine max
  unsure (1)..(466): unsure at all n locations
agctngaccaatagcgcatcttgccaaggtgcacaaagtccttcaaaaaccgagtcttctatgatgaccattggtttcaaaggattcccctcctcgtacactattttggccagaatattgtctttcaataaattaaatcaaccttttgcattctcttggtttggaagaaccttgtctagaaaggaaaccttgatctgctgatcaccaccaccaccatttggtgaatcattattcaagctcgcattgcccgcaatactcgtattgaattgatgaatcctggttgttgctccattctctctctctagattaatctttatctgctagcctgttgtttgaatattatattgatagtagattatatttatagtagataagagtaaaattgaagagcttatatgataactgtacatatgtcttatattangattattagtggaatatgatgtatatatatatatatatatat

SEQ ID NO: 178750 - DNA, 433 bp, Glycine max
agcttgttcgaacatcgatcgcgtgtgtgatatccactcaacaaggtttgaagtagaagagaccttcaatcctataacgcaacgtggcagacaaaagtgggcagttaacttgaatgaccattattgtcaatgcggaaagtattctgtgcctcactatccatgttcacacattattgcatcttgtggttacgtgagcatgaactactaccaatatatagatgttgcttacacaaatgatcacatcttacaagcttactccgcacaatggtggcctcttgagaatgaagcggcaattcctccttccgatgacacatggacacttatccctaaccaactacattgatgtgaacggcagccaaaatcaacaggatatgaatgagatggatgcatgaacatctgacaccgacaaatgtatgatgtgagcaaagggaca

SEQ ID NO: 178751 - DNA, 455 bp, Glycine max
  unsure (1)..(455): unsure at all n locations
ngcctgatactatctgagatccctctgtcgttgccttccatacgagggtgaagcttaaagagaacccaatctcctatctggtagttcacttcgcgacgtttcccatcagcttggcttttcataacagcttgttccttataagcttatttcgaatagcttggaaagtgatatccctgtcagttaacatctcttcaacggcctcaatgttcgaagaccctgtaatatattctggatagttaaaggttttcggctaaaggtaacaccatacttagtggctccagttcccacattccatgaagtattatgggatcattctacccactagaggagcttcccccacaaactaggcctatgatggatgaaggctcgcaaatatcgttcaattatgcgattcataacctctgtctgacatcaattaggggtgatacgagaagctcattctcaatagtgtgcca

SEQ ID NO: 178752 - DNA, 425 bp, Glycine max
  unsure (1)..(425): unsure at all n locations
agcttgaataactgtctgaactaatatctagtaaattgaaatatttgtttagtatttgttcattttatgtcccaaaagtcatagctaattaatcatgttacgtttatatgccaaaaaaatcatagtagaataaaagaaatagaaaagccaccttctgtttgtacaaaggagtaactatctccggtgttgccattgttgttgctaccaatttgactttaactntgtgcctttgtatacctagtgtctggattttctttatctgaattcaatcaattttgttgtatgatgggtttaggcttggttggttgaaattgacaaaatcaaatctattaatcaagttttggccattatactgcattccagttctggtcctttggctntgcaatgcatagttgaaaattgaacttggctgagtgaactgatct

SEQ ID NO: 178753 - DNA, 460 bp, Glycine max
  unsure (1)..(460): unsure at all n locations
tgataagtcacctcatccttactaaattaagtatcttggcaacaaagataaatcacaagatcttttatctggatgtattgggggcagggtgaaattgaaaggtaggaattataaagaacaagaaaaagaaaatggatacaaatgaatcataataccttatcagaaaatacatcatgcaactaaaacacaagggtaccatacaaggagaaatcataatttgcttcctttcttttcatccttttttcatgaatatggtatctttcattctactagcttgacatnaacagtttttttttttttttttcgtgtcaaacattgctgacacgttattattcaactcttaatccccacaaatttttcatatactgctagcttgaagcactgagtcagtaccaacaattcattaatgagttgtccaatgtattaatcaagggtaccaagacaatatataaccaataaa

SEQ ID NO: 178754 - DNA, 462 bp, Glycine max
agcttgcccaggcgagctggttacttaatgttgaagatatttcatggcccaagcgagccaaatgctagcctgtgcgagcttgggcccaaaaaattccataaaatgactatttttcccatttccttgtggttttcattcctggatctaacaatcaatttgagcgatccctcgaccttgcactgaaatcggtgtcgaatgataaaagcattccccaaatgaaattagggtttgacaataggcaatgtggggttgtgttttaaatgacgcccatgttttagccttagtaagagtcaagggatcatggtggatgacgccacaaagttcgtgcgggtttgtcagagtttgtctccatgctttcctggcgagtgcttcccttatccttcttaagttattgtatcttttaagtggtggtgaatgcttttatttcttccatttatcttaacttaggataataatatggga

SEQ ID NO: 178755 - DNA, 457 bp, Glycine max
tctcccccatattcctataaatagggggagaggtgaagggaaaatatgttcagccttgctggtaattcgagaatcacatgaaattagtgaaaaaaattgtttccgtgaagtaaatccaagcccaggcgcttccgtaacgtttccgtgggtgatttcgcgaagattttcaaccgttcttcggcgttcttcatcgttcttcggtcttcaaccggtaagttcccaaaattgaacttttcaattcattctatgtacccttagtggtcctcatttgtttcgcgtacttttattttcattccatttacttttcgtaccccctcttgacgtgctctagtcatttacttaagccattctctcgcctaatcaagaaataaaataaatttccaccgatcatttgaattgtaatgtccgctaatttttgttaaatgaaatacgactgttcggtcatgccgtaaccacg

SEQ ID NO: 178756 - DNA, 289 bp, Glycine max
  unsure (1)..(289): unsure at all n locations
agcttgtaagtatatgttggtataatttgtctgttccattaagctcttaatgtctttagaggttacttcctcattgacatcttttgtcttgaatggaattgccatgacaggtttattgttactgtctttgatgtttggtagttgatattgtgttgcgggaggtaattccgattggattaactcaccatccttcacttgccagtttgttatgacatttgttgttggatcacctatgatgtcttgtttccaagggtaatctatatcctctttgatggcatangcatgaaac

SEQ ID NO: 178757 - DNA, 459 bp, Glycine max
  unsure (1)..(459): unsure at all n locations
tggattatcttatagtagggaatctatccttcctaagatggagctcaacccagtcaccctcattaagaactagctcttttcttcctctattgcctttagttgaatacacctttgtttggttctctatttggttcttaaccctctcatgcatcttctttacaaattctgacctagattccccttctttatgtataaaagaagtgtccactgggaggggaatgaggtctaacggtgttaggggattaaacccatagacaacctcaaaaggggactgcttggtggttctatgaacccccctgttgtaggcaaattctacatgaggaagatactcatcccaagacttatggttgcctttcataagagcccttaaaagggtggatnaacccctatccactccctntgtttgcccatcagtctgtggatgacaagtggacanaaacaaanttttttcctaaccta

SEQ ID NO: 178758 - DNA, 418 bp, Glycine max
  unsure (1)..(418): unsure at all n locations
agcttcctttcaacaatgagaagagaagatgaaagatagaagaaatacaagtagtggggatgtctcctccacctctagaaaccccacaatctctcaaaatctcatccaaagcttgataagatggcttcttcttcaagctcagctctctctcagtctctccacagccaaaaactctaaaaaaaaaactcaactccctttagaaatcgtgatttcatcttaaataggcaatcctgtcggtggacgcacgcttagtggaagatgagctcgcttagcacatgtaagtgacttctgccttagcgccaatcacactcactcagcctgaaggtgaaaacggcgcgcttagcnaattggctntcgctcagcacctctatacagctcatccttcttccagaatggtccatgcgcttagcggatgata

SEQ ID NO: 178759 - DNA, 458 bp, Glycine max
tgtaggattatggggtacccatcacatgtggtactatgtggcggtcgggcgatggtgcaccacaagttttccacatccacaaatcgcgcataaacccaccatcccctgttgcccacctccaactgagctcacgtactcccacgtagcccatatcctcgtttctctcaacaccgggtcctcatcaatcctcccaagctttcccaacatccaggtaaaacaacattcaaatagcacaaactatcacagccaagataacagggcaaaagcataaaactctgcccaaaacaccaaccaaaatcacagcttttctcacttaaagaccccagtaacaattccttcgttccagttcgttaaccgttggatcgactcgaatatattactggaagtctctagtacataatcctacattttgaccgctggtatctattagcaaacattcagaactcattctgcactac

SEQ ID NO: 178760 - DNA, 458 bp, Glycine max
agcttggaacgataaagacattcatggtcacaaggctgcagtttggtatcgcgaaccacttgatcccgtcagtggtgagaagattggaaaagtaatgccaattgcaccagaagactcgatcaatatagccggcctctcccaagtacctgacggtgtagcttcgtggcacgttgctgttagcaagtttacagattcacctttgctttctgcagcattgccagtttgggactcttctaataaaagcattgtggcagttgtgggtgtcacaactgcactttacagtgtggggcagctcatgaaagagctagttgagaaacatagtggtcacatgtatttgacctcccaagaaggttacttacttgcaacttccacaaatgcacctctactgtcaaatactaccaaacctcctaagcttaagatggctggtgactgtgaaaatgaagtaataagagagggag

SEQ ID NO: 178761 - DNA, 378 bp, Glycine max
  unsure (1)..(378): unsure at all n locations
tgggaaagatctaacagactcagcctaatgttcatgagtttgactgntgcagacagtattaagacagctttccctaaaaccgatagtgctaaagagtttatggggttagtgggagagcgctctcaaacagttgataagtctcttgctgggacattaatgagtatactaaccaccatgaagtttgatggttcacgtactatgcatgaatatgtcattgagatgacaaacattgcagcaagacttaagaccttgagaatggctgtgaatgagaacttctctgttcactttattctaaactcattaccgtctgagtatggcccgttttaaatgagctataataccatgaaagataaatggaatgtgcatgaattgccagta

SEQ ID NO: 178762 - DNA, 353 bp, Glycine max
  unsure (1)..(353): unsure at all n locations
agcttcaacattcaatatcgagcgtctttatatgtaacgggactgaatcagacatagcgagtaaacgttactgtagtttgaagttgctcagagctaacgcattcaagtccgagcgtctcgatatactacgagactcaatcagacatccgagtaagaagttattgtcgtttgaatttgctcacagcttcggtattcaatttcgagcctctcgatatattacaggactccatcagacacccgagtaaaaaagttattgtcgttcgaatttgcttggagcttcaacattcaatctcgagcgttgcgatattttacaggactcaatcggatagccgagcacanagttattgtcgttg

SEQ ID NO: 178763 - DNA, 437 bp, Glycine max
taacaaagagcatgcgaagtgagtggaatgcctatagcaattaccttatgttatcaaacataaaaagggaataggtaatatcgtagccgatgctctttctcggcgtcatgcattactttctatgcttgaaacaaaattgattggtcttgaatcgttgaaaagcatgtatgaaaatgatgaaacttttggagaaatactaaaaaattgtgatagaatttcagaaaatggtttctttagacatgaaggctttctttacaaagaaaacaaattgtgtgtgcctaaatgttctactataaatttgcttgtttctgaagcacatgaaggaggtttaatggggcattttggggtccaaaagactctagaaacattacaagaacatctttattggcctcatataaaaaggatgtgctaaatgttgtgaacattgcactgttgta

SEQ ID NO: 178764 - DNA, 429 bp, Glycine max
cttgaaaaatttcattcgctctctagcattgcataacaagtgcaggacaaccttctatggtggattatttgcaaaacctatttttagtcataggcaactatatgttgcattataaatggtcaactcaacagaaggattaaaaattttgattcatgataaataccgaaaaaatatgacttctactaccaatgtaactttcaaagatgtcttaataaatgtaagaaggttaatataacttctgcaaaagcccaattattatcatttatttgccgctttactaaactgataacttactcatatgtattcaaatatgtattctaatatgcaggctaatagaatatcttatgagccacaattaatatttccatagtgaggtacataatgtcattcgctatattacaatctttcaattgaaattataatactctc

SEQ ID NO: 178765 - DNA, 371 bp, Glycine max
cccccaataagggaattgcaaggttgagaagtgaaaatgagcatggggtaaatttggagcaaaccctcacctcaaacaagtctatatcatcaatctaaacttgctcaaactggtttcacgatgaaaactctaccgaatcaaaatttgactactcaacacccaattttaccctagaaatggctcttgccttcactttggtcatttgtttttctctcttgcacagcccaagctttctcataagtcctaaatgacatttcaaactaggattaactcattttaacctctatttaccattgaatccagatttagccttccaactctcaaagcctcactctttttccactcataacaccacattctcactttctaat

SEQ ID NO: 178766 - DNA, 356 bp, Glycine max
  unsure (1)..(356): unsure at all n locations
gcttctagaactntggatgctgtccaagataattacactaccacagataaggagctattagtgataagttttgcttttgagaaagttcgttcgtatttacttggtactcgtgttattggttatactgaccatgcagctctgaagtacttgttgaagaaggctgaatcanagcctagattcatcaggtggatgatttggctccaagagttcgatttgtagatccgtgatcggagcggtgcacagaatctcatggctgaccacctgagtaggattgagcgtgtgtctgaggactcacccattcgggattgtcgcaacctaccctttggcgggagggtgacgcgtgactcgcgagtgca

SEQ ID NO: 178767 - DNA, 398 bp, Glycine max
  unsure (1)..(398): unsure at all n locations
gctttatataagctgaaccattttatcattattttcaatttgagtnttattcagaaaattagagtttatctcttttatcttagtgagagggattcaagaacaccctggctgtatcaaaggactttcacaacctttgtgtgttgccctcgccggaaagagtgattctttccttcctttcatcttcaatcttgttctttcaaaccacaattccagaaaatccacttctgcccagaattatctcgtggccataactcccattttacgcactcaaattaagtgattcttgagcctaaattgaatttcaaaatgagacctttcacctcgttttggaatcacctcatttggagccctgtagcttgagttattgtcatttctatatttctgtccaaccaccactt

SEQ ID NO: 178768 - DNA, 328 bp, Glycine max
tgcgaactgaaccggagctgtgtttcggccgactggcatgttctcattttggcggccaggaaaacattagcccacctcggcataaaaaacatgattcaccgatatttgacagggaaagaaaaatgctagccgacgtcagccaagaaagatgaccgaccgaggtctgaaaaagaagcatgaccggatgactccggtcgaacatttcctaacagatatcatccaagtattattcagggattgaatagagaaaaccatagccgacatcggtagttaaatagccgtgactgatatttttcggccgacattgcgcaatttcttttaccaacgc

SEQ ID NO: 178769 - DNA, 386 bp, Glycine max
gacccaaaatcctgactcaccatattctttatctcggaagcaaaaaaagaatagaagggaaatttccaatcaaagaaaaagagaaggaaaatttccaatgaaagcaaaaaaagaatagaagggaaatttccaatcaaagaaaaaaaagaaggaaaattccccaatcaaagagtgggagaaagcaaaaagaaaagaaaggaaattcccaatcaaagagtgggagaaagcaaaaaggaaagaaagaaaattcccaaccgaagaatgggagaaagtaaaaaagggaaggaaagaaagttcttgatcaaagaaactagaagaaatatgcagagaggtctttggaccggacaatatctgaacaatacaaaattgtcaccaaatgaacaaaa

SEQ ID NO: 178770 - DNA, 404 bp, Glycine max
  unsure (1)..(404): unsure at all n locations
agtggtgtgttntgtttgaaatgaatgtttgtgaatgacttgaatgagaaaatgtatgaattgagtggactggaatgattagatgtttgttttgatcaagcttgcagccactataagagaaagaacatgtgattagaactttgattgacaatgttagtcagtttgtcatattgattgtgaaggaatgcattgaccgtatcccggtgagagtgtgatacttcaatcttgagagaagtaactatcatttggtactgatttttgcatgaatctctgaagtatggattgaatgcatgaaattgaggatgatgaaggccatgtttgattgtgatagccacttatcccaaaagctgaatgaatattgattgattgaaccctgagcctatatagggttatctcctactacc

SEQ ID NO: 178771 - DNA, 405 bp, Glycine max
agcttgttgcttcacaaaatgaagtagaaattgatgaactatgccacttcgatatatccttgcgtgctcttattaaattctgaccacgtataccttcctgtttcttactaaaatattttcaatcatgtctcagcatggactttggtgattaattaatgtatcagtgaaagctcagttacaataatagtataaaaaaggtttgtagttgtattccttttcattaggtaccttaacagcatgttcaattccccattcacatgacaaaatgcattgcatcatcaaagaggccaatatcaagcttacaaacacagcatggaagtttctatataatgttcagaagaggatcaaaatatgatgcattccacacatatctgagttttaatccccttagtgttgtgttgagat

SEQ ID NO: 178772 - DNA, 399 bp, Glycine max
gctctaggaaccagggacggagaaagatctatatatatgcttgctaagggtagagagaggaagactagagatttggatcaagtaaagtgtgttaaggatgaagaaggcaaagtcttagtgcatgaaaaagatatcaaggaaaggtggaaggcgtatttccacaacttatttaatgagggatatggatatgactctagcagtctagacacaagagaagaggaccggaactataagtactatcgtcggattcagaaacaggaagtaaaggaagcgttgaaaagaatgagtaatggtaaggcggtggggccagacaacatacctattgaagtgtggaaaactcttggagatagaggtcttgagtggctaccgaactcttaacgaaatatgaggtcaaacgta

SEQ ID NO: 178773 - DNA, 374 bp, Glycine max
  unsure (1)..(374): unsure at all n locations
cccactgctttgccggagaataacaattgcttgaccacaacaaccctggaggcggcaagggacaatggtctttcaaataaacctgttgtacatgaacaaacattatatcatgcactgaccgtgccaaacgaaccagcgaagacattgcataattgttatactaactatattcaatgtacctgaacaaaatgatttccaaacacgtgaccgacacatatgatgcgngggccagaagaatcaggtggtggttgacttctaagagggaaaaatgtcatgctttgttgtcgggacaacgatacaaggattacgttataccgtgaagcaatcacatatcccatgtccgttatatccatccacttgtccacgctaacctg

SEQ ID NO: 178774 - DNA, 489 bp, Glycine max
  unsure (1)..(489): unsure at all n locations
actatatactctcaagcttcttatccaagtcacatacttattggtgtagctccttctttcatggcttattcccttgtggatggtgcctcccctcttctcttctcttatgccttccgctgcatctccatggtggaaattcatcattaaaggacctcattgaagctcatagatccagcctccatagaagctccacaagcaagcttccattagtgcataacgtgaacttaaaagtatttgcttttccctttttatatttttatattcttttgggctcgacaagggttgatgcaatcctaccccgcaagggcattggatagaagactccaataaaattgagccagagatgcaagagaaggccctagagttctcatgagccttatggtagaattcgggctcatgggctaagtatgagcccacttatcttagtacatattagaatataggggttcattatttntgngcccttgtatttanggctcaataatgtac

SEQ ID NO: 178775 - DNA, 345 bp, Glycine max
  unsure (1)..(345): unsure at all n locations
ggagacactggtganattttggacttttctctattcaactttttcgttcgtcctatcagatgatctcgtttgcagatccgtacactattttctttgtttcttcagtttacagtgagttagagatgttctaattattaattttattttttcatttttcaaatattccattgcataaattagttgccgaagcttctgtagaacctataaaaacacatatatttgacttgacgaatattatatgtatgaacttaactttaaaagtaatcaaagttataattattttcaatagtttcaattaatggaataaatcatgtatgtgcacctaacgaaatttttattagaaat

SEQ ID NO: 178776 - DNA, 451 bp, Glycine max
  unsure (1)..(451): unsure at all n locations
tcaatttactaatgctctgnttgtattaatttctctgtttcgntcgcggntgctgagttattctttgctttggtcacatgtttatgtagaggtaattagtaattatggtttatgaaattttagcggtttggttagagatgagtgagtttaaaacgaagtcacgggttctagttgctcgctccagttccgtgtgcaacagtggagagtaaggccctgtttgtttagtgttctaaaagcagttatcttattnttgttcttataaatattgtcactggagttcatttgaaagtgtgtctttgagtaaattgaatagagcacttgatgaagaccgaacaagatggatgaagaaacatctctggttctgtgtcttgcttttanaacacttgttttgaattaattttcaaacctgagagatttcgagtataaatgatgctgagtagtcggactattt

SEQ ID NO: 178777 - DNA, 397 bp, Glycine max
  unsure (1)..(397): unsure at all n locations
atccttaagtcacctgcggcatgcagcttcctcaagtggtatcagagctttttttttaagtggtgctccttaaacctccatgtaatttcagctntaccttctcctccatttttgtttcttcatttttctccatgtatctcctcacatgacttgttttgaattttgttaacatgattttttagaatttccaccgattaaacttgctatagaagatagatttgattttctatggttcaaatttcttgctcttgttcttgaaccacgaattgtgttgagtttaggttcctttgagtcttgccttgctattttttgtgggtgaaacctaaaccataaaattcttacaaaaacattaaagtagaagacaacctcaaaaatatagagtgacttgttcacctat

SEQ ID NO: 178778 - DNA, 355 bp, Glycine max
  unsure (1)..(355): unsure at all n locations
tcaagaaaaggtccatactccccttcaaaatctgatntatgcttaaataggtggctatgttcgtgcttgcacacttagcacaattttgatcggcttagcactcattagtggattgcgtcttaacgcgtgattttctcgctcagcagatggactgaagcggtgctgtcgcaacctacccttttgcgggcgagcgaggcgaggctcacgggtgtgtcttccaaaggtggaaaatgcgcggagtcgccaccaacttttatttgtggaaaacgtcggaaaaaccaaaggaaccggtcatgaagaatattccagattcgggagttgtatttatgtttgaggaaggtattaatacctctca

SEQ ID NO: 178779 - DNA, 226 bp, Glycine max
aagagggagacacccatgctgagactgacattcctatacgggcaagattccaccatcccaaaaggcggactcaatcaaacaaaccccctccatacccaccacccagccatccacaaaggccatccctagaaaaccacaaagcctgctaccgcactgccatgacgaagaccaacttgagcacaaaccgagaaaaacaccaacccacaatgaataatgagcgaaaaac

SEQ ID NO: 178780 - DNA, 391 bp, Glycine max
agcttccatcaccataaaccaaggaattcttttttgccctagtagaagttcataccgaggatctatatccgtgcagggcgaaaggcagcatctcatgccaatctttgtatgacaccgccatcttctgaataatcttcttaatatttttatttgcaacctctacagccccattcatctttggccgataaggggtggagttatgatgctggatcttgaaatcctcgcacatttcctgcatcattttgttgttcagattggtgccattgtcagtaatgatcttcctagggagtctgtatcgacaaatcagttccttctttatgaatctgaccaccacactcctcgtgacattggtataagaagcttctttgacccatttggtgaagtaatctat

SEQ ID NO: 178781 - DNA, 465 bp, Glycine max
  unsure (1)..(465): unsure at all n locations
ttgtagcatagggactaaagttggcgagtgttggacatctggtcctatggttgctgactgaggagctgggatggatgatgaagggatgtcattggttctagtcctttttcttgatgccatctacaactaaaaagaactcaaaacttcttaaaccaaatttattcaagttcaaagactgagaaagtaaacttaaaaagacattatatgcttagcgagacacagttcacttagctggccttcacaaaacacactactgcttagcgacatgtgaggctgcttagcagaagttgcagaaattcagcttctgcataattggcttagctgacaagttcccgctaagcctagcgtctgccgcaaggatatgcgctcaactcctcataagttgcgcttagcggcaccatacagntcacaaaatacattaagtatgggagcttagtgagcggggctcgcttagcccaacggata

SEQ ID NO: 178782 - DNA, 409 bp, Glycine max
agcttgcaaatgtaatggcagcatagattctttagtggcaggaaatgaagcacgtgccggtgccggttgaattgggtaaggagtttcagttccattcgatttttgtttgccctgtgagtagggatcaaggaagtgaaaaaaatcctccaatgctgctgccatgcttacatgtcctttgcaaacaatcaattatgaagctatcaaaaaacagcacccgaacattcaagtgtccatactgtccagccgaagctactgttgcaaactgcaaacagctgtatttctgatgatgtttatgtattttatctcttccatacatttcatttgtgcaaatacagcatttacagctttctggttgtatataaatattctaaaaatcttttacattttgataagaccaacgagtaaataa

SEQ ID NO: 178783 - DNA, 394 bp, Glycine max
  unsure (1)..(394): unsure at all n locations
agctcttttattcttcaataaatacatnnntgcttatataanaatatttactcgaggtcttaatgagntaattattttcatatataaccttacccattaatcataaatggttgactcatgaacccattntcacaatgtgacatgaggattagatatgttgacaacaatcgtgatggagaggagaggacacaagcatgtggttgcattgcatgtgactcttaccatttgtgaagagatgaactttaaagaacaatgtgtggcagctagttgaccgagctgaagttgacaacatatgtgatggagaaggatacgtgtagtacttgtgtactactgangtntcataaggcaaagaaccacgtatgaaaattgctanactgatggctgagtgtggagg

SEQ ID NO: 178784 - DNA, 393 bp, Glycine max
  unsure (1)..(393): unsure at all n locations
agcttaagctccttcaactgctttttgtctcttattattngaagagtatccttgtagaaccttcacccgacgaagacactgacaaaaacttatcttctccttcttggacaaagtatggcaggctgggggcaagtaaattttcttcccatcagaccttggatgcaactatgatctgatacccatatcagttagatcttgacgggtattcaagccatccttcgtcttgccttgaatgttaaggagcgtcccaatcacactgtcacaaacatttttctccacatgcataacatcaatacaatgtctaacgtcaagatcacaccagtacgaaagatcaaagaaaatggacctcttcttccatatgcaactctgacttttatccttcttttgggtctt

SEQ ID NO: 178785 - DNA, 426 bp, Glycine max
  unsure (1)..(426): unsure at all n locations
cttcagtcattttttccattgcattgtcattttattttgntatctaatgtcgaattgctgaagcggataatatatagctttgtgggcatggaagattaaagttaaacttatcacaacaagccaattaaacatgaacaaatcaaatagtaatcattggagaaaagccctctacaaattattcaaaatacccagaaaataactcaaataaaccctcaaccaatttaacgcataggaattgttatgaagaaaagtaattactgtggattaagaatgccttataagatancaagcaattaatgtacatgtatacactctatgaaaatgaattaaaaaaaaaagagtccttgatggccaacgattcaaatccataacacanagtaggggagaacgtcaacgagaaccatgaaggtgatgtgcatgagactc

SEQ ID NO: 178786 - DNA, 335 bp, Glycine max
aaaacatttagtggaaggaaattgcagggcagtgattcaaaagatccttccacccaagcataaagatcctgggaatgtaactattccttggtcaattagagaagtcattgtgggaaaagcacttattgacctgggagccagcattaatctaatgccactccccatgtgcagaagattgggagagttcgagatgatgcccactagaatgactttacaactagttgaccgctccattaccaagccatatagagtaattgaagatgtgttggtcagagtgaaacattttatctttctgacagattttgtggaatggatatctgtgaagatactgacat

SEQ ID NO: 178787 - DNA, 415 bp, Glycine max
gctgtatactcttaaagaaaagagtccaagttgggtcttgtgatagagacatgtgctatggaaagagatactcttctcaagaactttcatgatttggcaaagaaactgaaagatctttaaaaggatttgaagaagctgaatgaacttcatgattataaaaaagaagaaagatatgatctatagagtgtagaagcaagcttcatgatgagtcaagattgattcaaagagttttgatgataacaaagatgatgacaaaaagctcaaaagtcaagaacacttcatgataacaaagatgatgatctcaagaatcaaagaatgagtttaagattgaatcaagtacactctaaggatcaagaggaaagttgaattctagaatcaagaatcaaggttcaagattcaagttccaagaatcaag

SEQ ID NO: 178788 - DNA, 403 bp, Glycine max
  unsure (1)..(403): unsure at all n locations
ttcatttaaccctagatttttttttcaaaatngncanagataaagcaatgttcatgttcaaaggacactttaaattcctttttaatcaactgacctacacttagcaagttttggtcaatgttaggtacataaagaacatctgatactaatttggtacctgaacacgttgaaattgcaacagttccttttccttttactggaatatagccaccattcccaattctgaccttcgagacattagttggcttcaaatccttgaataaagtcttatcatttgtcatgtggttcatacaaccactatcaatcaaccaactttcacttgattcactactcaagaagcatgtggccacaaacagttggtcctcttcttcttgattagcaatctgagctccctcatcatggg

SEQ ID NO: 178789 - DNA, 332 bp, Glycine max
  unsure (1)..(332): unsure at all n locations
acactgcaaggggttacgcgtgtgctataattgaggaggaatctaatctctctaaagatgcttgacgagctacgtttngtgtgtagtgctccacgcggagttctcaagatcatcaaaggttccatggtattcaagagaggcaagctggaaaatggcttgtctcttttggcaggaaatgttcaaaagacggttgtggcaattatcactgaggaaactgattcacatgcaagtctctggcacaagaagcttggacacatgactgaatgagggttaaatgagctcagctagcataagctactaggaaaagatagtgctgggtcactacagttttg

SEQ ID NO: 178790 - DNA, 360 bp, Glycine max
actcgttccatgagtcctgctatcaaacaatcggtgatgtggatagattcaacttttgaaatctggaaagatctcaaagatcgattctcgcattctgataagtttcgcattgctgatctttaagatcaaatccagaattgtaagcaaggtaactcaagcatttctgagtactatacttgtctaaagattatgtggaaagaactagaattgtatagatgtttcttgctgtgtatatgttctagtccttgttcctgtgggctcatttccaaacttaagaaagaacgtgaagatgattgtgtgatccattttttgcgtggcctcaatgatgtgtatgcacttgttagatctcaagtcatgttt

SEQ ID NO: 178791 - DNA, 348 bp, Glycine max
  unsure (1)..(348): unsure at all n locations
actcagctgccgctggagtttcacatgctctnggggttttacagctcttaatgagagagccagaaatgaagagccaatggttgatacatggacggagatgaaaaagatcatgaggaaacgatatgtgccaactagttactcaaaggacttgaaattcaagctccaaaaactaacccaaggaacaagggggttgaggagtatttcaaggaaatggatgtgctcatgattcaagcaaagattgaagaagatgaggaggtaactatggctcgatttcttaatggtttgactaatgatatccgtgatattgttgagctgcangaagttgttgaaatggatgattttcttcac

SEQ ID NO: 178792 - DNA, 363 bp, Glycine max
ttgataatgacaaagatgatgacaaaaagcccaaagaatgatttcaagattaagtcaacaagttcaagatcaagttcaagagaagtttgatttcaagattcaagaaaagatgaattcaagtttcaagaaaaaaaatcaagaagacttcacaaggggagtatttaaaagatttttcaaaaacaaacatagcacaattttgtttttcaaaagagttttcacaaaattttctaagttaccagagtttttactctctggtaatcgattaccagtggcaaagtttgtttcaaaagctgttaaccgaatttacaatgttccaattgatttcaaaatggtgtaatcgattacaagatattggtaatcgat

SEQ ID NO: 178793 - DNA, 436 bp, Glycine max
  unsure (1)..(436): unsure at all n locations
actaagctagaagtgaatcgaatactggacttagcacgggatctctacacaaatatctcacggngagtgagttatcacattcctaactaatagagagaaaacaagacaacatgtaggtatagatatcatataaacaaaataaaacttacttaaacataactcccatcatttcatcactgtgtcgtcccacatcgcatcacaacataacacgtctcattcattcacgtactcaaggatcaaaacacaatatcaccaagtcaatcaatatcgatcaatacataagtgttatgcaacatatacactaagattcaatcctatatgcaatgtggtaccttgtcagtgaaaaatatacactaagaatcaagtgaagattcatgagaagactcaagatatgcgagaacctcaagaatagcatcaagataagtttaaaaagaat

SEQ ID NO: 178794 - DNA, 408 bp, Glycine max
  unsure (1)..(408): unsure at all n locations
agctttaaaatttgaattaaaacattcaattttttttggttttcgattaccatccaagngtaatcgattacagagtgtaaaatttgaattcaaatttctaatagctgttataaataatttcaactgctggtaatcgattacaagacttgtgtaatcgattacatgttttcagaaacattttaaaaacatttcaggaagcctttttggccactggtacattacatcttctggtaatcgattaccagagaataaatctcttttaaaaacattttaacttcaattctttggccaaacctcttgttgtttcaacttggaattttcttcctaagactctagaggttatcttgatcatatatcttgaatttcttgaattcttgtcctgaataaaacttgagaagtgcgtgatcc

SEQ ID NO: 178795 - DNA, 456 bp, Glycine max
  unsure (1)..(456): unsure at all n locations
gacaagtctggtttaactccatacaaatacataaatgtagaagaccattataccttagtgaatagctaacaacaacaaaactntttgacttacgggtcaagttgtttatatcattccatgttaagttgaatgcaaatatgccactgctagatttaatctcatggatagtcatggaaaatttgctaaaactcgattgggcgactgtcgtactctctataagatcaatggagtttaagaaaaatggtgttccatccttagacatttgaacaggacaatcaagaacatccacaccatcagatatggccttattatacgctaagttggtacaagcaagatgatctccacttgctccatattttagataaccaagtttgtctaaacatgacaataaagtgagaagacagtcacaattatcaagctatgctgttgtaaatgataacatcatacaatcaacac

SEQ ID NO: 178796 - DNA, 409 bp, Glycine max
agcttcctcgtggcttctttgagaagctttctctagagtcttctttgagaagctagatccttatctacctaagatgcaagggttgagcgctaagtgcttgatactcacagcttaacgtatgaccaaagatgcacttagcgcgaggcttgcacttagcgaaacgactgtttttcagaaaatactttctaagttatttttcagtccctttctcaagaaatttaaacccttatatctaacatttaaggataagctgatatactccaatgtaaagattataaagcaagttccacatgatataatgcatgagaaacaaagataacacaaattaaaactgggttgcctcccagtaagtgcttctttaacgtcattagctggatgcttttacctcaatgggtgatatcatgttttg

SEQ ID NO: 178797 - DNA, 465 bp, Glycine max
cccatcacatgtggtactatgtggcggtcgggcgatggtgcacaacaagttttccacatccacaatgcgcgcataaacccaccatcccctgttgcccacctccaactgagctcacgtactcccacgtagcccatatcctcgtttctctcaacaccgggtccccatcaatcctctcaagcttccacaacatccaagcaaaacaacattcaaacagcataagctatcacagccaagcaaaagcagagcaaaggcagaaaactctgctcatacaccaaccaaaatcacaagctttctcacttaaagaccacagtaacaattccttcgatcccaattcgtaacccgtggatcgactccacaaatttactggaagtctatagtgcataagcctacattgtgaccgttgggatctactagcaaagatcaagaactcattctgtactactctttccacagccaaccacacac

SEQ ID NO: 178798 - DNA, 394 bp, Glycine max
agctttgagggtgcgcagcccaccatctttttatgtagagtaccgataatgtgtctaccatcacgatcatcgtctccctttccatcattgggggtaccacctgggccaccagatccctccaccttttgggcatgttctttgaaagatccgtccccctttttgcaaatgttctgtagttgcatcctatccagaaccatatcaaaattgtattgatactgcctaacaaaggcaaccattaggtccttccaagaatggactcgggaagattccaagttagtgtaccaggtaacagctaccccagtaagactttcttggaaggaatgtattggcaattcctcatcttttgcgtattcccccatcttctgacaatacatctttagatggttcttgggac

SEQ ID NO: 178799 - DNA, 410 bp, Glycine max
  unsure (1)..(410): unsure at all n locations
gagcccgggtagtcaaagagaatttcaagtccattctcatcanagtctgaagagagtatgatgaactaatggacgtcaatatggccaccgatgaagccttggaatgagaaaccaagaaggcccgaaaggaagaacacgnaccaaaacaagtttgaggggcttcatagggcagcaatagtgagctcaagctccaaagaggtgaaaggaatcatcacgggtcaaaggcatgatgttgaaggacgagctaaaggcttgccttatgtcgaaaagaaatttgtcccaacagtgaagcgagactgaagggaatatgtgggccatcatcgatgagtgcaaagagaagctaaatctatcagcgactcacgagcaaaggctagaggatgagtacgccaagatatcagcagaaagggaag

SEQ ID NO: 178800 - DNA, 379 bp, Glycine max
tgtgctgaagaaaattagtttttttgaacaaagagctatttctagggcaaaattgggtgttgaggagtcaaattttgattcgggggaattttaagtgtaaattcagtttgagcaaatttagattgatgttatggacttgtgtgaggtgagagtttgcttcaaatttacctcattctaaatttcacttttcaaacctagaaaacccattgaattgaggggtgttggacacctagattctgtgttgctgtgctttaaagctcgaatttggtttagacatgattgatacatgatttgggacttgtaagaattgatttgggcaacattggatgagaggaagtgtgattttcgaaatctgcacttatgcaagaattttgctgtg

SEQ ID NO: 178801 - DNA, 464 bp, Glycine max
  unsure (1)..(464): unsure at all n locations
tgtagaatggctagacatgatacatgttatggcttggtttggttcaagggtaaaagggatgccccacattattttcatgacacaaatgcaaaaatgatgatttgganaatttatgcaaaactggtcatgcctgcacctatgcggacactcaagtgtcaaatttttatggtcatgtgatgctagggcttatgatttatttcctctattttaaatcaacccaatgtttccaaaatatgttcttttatcaatttgtgcattcattcgagtccatttcgggcgtgcggagaagattcacagcattcacccttcaggtgtagacacgctntttttctcttcagatatcggtcatgatcaatgaatttctttttcgaagaagagttggaaatatctctttcaaagcatgtcggtgttagctagacacttatttctctttttcaacttttcttacttgcttctcttttttc

SEQ ID NO: 178802 - DNA, 407 bp, Glycine max
  unsure (1)..(407): unsure at all n locations
agctttcttgttttgggggggcatatataatgtcaatgnaggccggctaggtttttttgtgcgagcccaaccgacgttttgtttcggccaaaactggcatgtttccatttattcggccacgaaaacattagcccatctcggcaaaaaaatatttttcaccgattttgattgaaaaaaatgccagtcgacgtccgccaagaaagatgaccgatcgaggtctaaaaaagaagcatcaccgcatgacgccgatcgaacatttccttaccgacatcataaatatttcattaagggattgattagaaaactcaatagccgacattggtcgtgaagtagcccgactgatatttatcaactgacattgcgcaatttctttttaaaaacgctcactggccgataatgtttttttt

SEQ ID NO: 178803 - DNA, 398 bp, Glycine max
  unsure (1)..(398): unsure at all n locations
ttattnntcagcaacgccggccaataattgttttaatacgatcaaacaaattttccttgttgatttcgctcaattataggtttaccatcgaggtcgcctgtggtatttcgtgggaactcaaccgccgttgtgtttcagtcgacattggccagcgttgatagaagaggcaaagaaaaatatagctgtccttggcagccaaaaaaaaatcctggacaaacttcgataaaaaacaattgtaccaacatctgccaaaaaaaagataccggtcgttgtatcccgaaaagagtcaccggatgaaagcaatcgaacatatccttatcgacatcactccgaaatttataatggattgaacagaaaagcaatagcccaaaacgatcgtaaactacactcgactgata

SEQ ID NO: 178804 - DNA, 406 bp, Glycine max
  unsure (1)..(406): unsure at all n locations
agcttcttatccaaggctcattttgttttgtatactccttcttccatggcttattccttaatggatggcgcctcctctcacctattttcctttgtcttccgctgcatctccatggnggaaaatcaccattaaaggaccccattgaagctcaaagatccagcctccatagaagccccacaagcaagcttccatcaagatgtctcctccacctctagaacctcaccatcactcacatactcatctcatgctctcaggatggcttcctcttctcgctcagttctctgccagtcttctcacgacaaaagctctcaaaactctctggaacttggacctttctctctctagaaatctctaaacatgcaaaagctttgagaattgcccaaactcccactccattttatgattt

SEQ ID NO: 178805 - DNA, 469 bp, Glycine max
acccatcacatgtggtactatgtgtgcggccggcgatggtgcacaacaagttttccacatacacaatgcgcgcataaacccaccatcccctgttgcccacctccaactgagctcacgtactcccacgtagcccatattctcgtttctctcaacaccgggtccccatctatcctcccaagcttccacaacatccaagataaacaacgatcaaacagcacagctatcacagccaagcaaaacagagcacaggcagaaaactctgccaaaacaccaaccaaatcacagctattctcacttaaagaccccagtaacaattccttcgatccaattcgctaacccgttggatcgactcccaaattctactgtgagtctatagtacataagcctacattttgaccgttgggatctactagcaaacattcagaactcattctgcactactctttcacagccaccacacaccacattt

SEQ ID NO: 178806 - DNA, 389 bp, Glycine max
agctttgcaagcacaatacagaagttttctttctcatagagagggttgaagctaaaacacatttttcacttagagatctagcacaagatgttgtagattagaaatgtttcaacttgttcttcatagccttcaaatattcctaataaagctcccaagaaaactattgtgggctccacacaattaacacacttctggagcaagtaggttcactttacaattgtcatgaagggacaacaaacgaaacccttatgaggttccattctgaggaacctttcagataggcattctgaagaaccatcagaataaccattttgatgtttgttaagaataaatccatgcttgatgaattctgatgacgaatgtcgaatagttccaaaaacaaataaaac

SEQ ID NO: 178807 - DNA, 448 bp, Glycine max
aaactaactggttgaagatcgacgaacgatgaagaacgaacgaagaacgattaagaacgaacaaagaacagtgaagaacgttcacggaattgatcacggaaacattacggaagcgcctcgaccttgattttcctcttctttctccttcttttcactaattttaagcgaagtatgcttgcccagggtgttgaacccctttcctcagcctcccacgccccttttatagccaaaataggggagaagtttgccgcccagctcgcccaggcgagttggttgcttactgatgaagtttcctaagggcaccctcgaaattgatcagttcaccccccccaaatttttttacatctcttccgaacatcacgaaacttacggatgtgcagcaatagcattcaatttgctagcaaagtccgacttgacaacaaatgtcctgacaataggatacaccccg

SEQ ID NO: 178808 - DNA, 162 bp, Glycine max
atttttgttttctctctgggaagttgcgacactcccatttaattcagaaacattcagactgattttattctggatgtttcacatccatgggaaagtcatttttctaatgtcttgtacaggataacgaactgtctaatgtcaaagaggaagtctatggagctc

SEQ ID NO: 178809 - DNA, 441 bp, Glycine max
  unsure (1)..(441): unsure at all n locations
actcagctttgtacaccttntctctcccttggcacatcaattatgccaagattcctgatatcaacacagttttaacaaaggagtagcaagatataagcatcagagtattaaatacaataagccaaactcacaaacaagaaataatcaaaccagaatccaaataactgaaaatgtcaacaaccacaaaacatccaagactgaaatttaaaatccacaagataaataagcaaagtacttagcataataatgtaaattctaagaaactaaaagccaaaatacacggcttataaaagataaataatcagagtctaaaagctaagaagacggaggaggtggtggaagatcgaaactctgacgaatgtatccgacatcctcttcaagctgtgtaagacaatgtccataccggcaagcgtgaatctacgagtcaagcggcaccacata

SEQ ID NO: 178810 - DNA, 408 bp, Glycine max
  unsure (1)..(408): unsure at all n locations
tgcaagctnccatattaagttactctacacctttttgttcttctaaatngggcctagtccaataagagggatttgaggacgaagcttggattgatttggtctgacaagggatcgaggtttagtaatttatgctacaacatagaacacaagagcatgattgattagagaaatatatttatatacatcagcttgtctgttagaaagacccaacatttctacctactgctgtcacatttacttacgtcgnattatatagtttttagcataaaggtttagtttaaattctgtatgaaattatccatcatacatgttctctcaacaatgctacatttctgaatttactcaagctaacattagttccctgtgctcgatactcggatccattcattttaatttttacatacatga

SEQ ID NO: 178811 - DNA, 424 bp, Glycine max
  unsure (1)..(424): unsure at all n locations
aaagaaactattgttgaaactatctcaataaacactaaaagaggtgtgaaagataaggtaaaaaaactaattggtaaaatgcaagctatctaggcggttttaccttatctactataatggccaaaatacaaggcctagacgaaggaaaacctattctaatatttacaaagataagcgagctcatacttagcccatgggctcgaaatctaccctaaggctcatgagaaccctagggcctttccttggatctctagcccaatctacttggagtcttctagccaatgcccttgcggagtaagattgcatcattcccttcaccttggaaaggaattgacctcaaatcccgaggttcttcatactctngggctccttcctcacacctgtaaaaagaacaacacacattgtatattggtgttggtatgtt

SEQ ID NO: 178812 - DNA, 184 bp, Glycine max
acaacaaaaaagagcgcccagccacaaagacaccgcaagcgtagaaaagaaagagaccaacacgcacgacaccacacacaaagcaaccaaaagatgacgaaaacgaaagacccccacaggaacccgggcgccacgaccgaacaaaagcagaagccacacacgaggaagaaacacacacgccgca

SEQ ID NO: 178813 - DNA, 289 bp, Glycine max
cactgagcacgcaccaagggaggagacagattaaacagggaaaagccagcaaagagaaaaaacccaagaagaatgccacagcaagcaaaggagtaggacgatcaaagaccggcgggagtgaacaaggactaaacaacataaaaaaaaaacaaaagcaaagcggcaacagggggaaggcaacggaacagacgcccgaaaaacaagacgaagccacggacacaaagatcataaggaaagcggaccggaatggagaacccaagacggagcggaaggtagacaaaaaaaaagc

SEQ ID NO: 178814 - DNA, 402 bp, Glycine max
  unsure (1)..(402): unsure at all n locations
agctnggagcatgagtgaggaccagcgatgcatatcttcttctgaggacaaaggaccagcgacgatgaggatcacgactgatggccagcgatgactatgtgactgagggctttcaaagcaaaacaactacggtgagtatctcatctttagcacagcacaaagtcgcgactcgcgagtaagggggtagcttaacttcaaaatgacgccgttcaaaaatttcgtaaacctgcgaacttgtcgcagacttgcgagtctacctaaactcacccgagtttactctaaatcagaccagtatactctggttgagattctacttccaggtttatttggtagtctcaaaaaagatttaccgactgttcatacacaaacaatgtatcaatgtattaatcttttggtgggaaa

SEQ ID NO: 178815 - DNA, 380 bp, Glycine max
  unsure (1)..(380): unsure at all n locations
gcttctggtgggacatcttgacttgctgtccaatctgacattcaccacagattctgccttcttctattntcagattgggaatgcctctaacagcacctttgtcaatgattttcttcatgcctcttaagtgcagatgtccaaatctttgatgccatatattgacttcatcttctttggagactagacatatggaggagtaactggtttcttgaggtgtccatatgtaacagttgtcctttgatctgctgcccttcattaggacttcacttttttcatttgtnaccaagcattctgactttgtgaagtttacattggagtctttatcacacaactgaatgatgctgatcaagttcgcagtaagtccctttacagcagtactt

SEQ ID NO: 178816 - DNA, 410 bp, Glycine max
  unsure (1)..(410): unsure at all n locations
agcttgaagtgagaaagtgtggaagatcatttcttctactnttattcgntgaccatagagtggtacctggagatatgtcgcgggggtcaggagaccttggggacgtcaggtggggtgctattgcccaaaaccaagcttgaccaatcccgacccaacccaggcatattcaatcagtgagaacctgtgatgtacctaaacaggcgagctcctggcagtcaaccgataaaagaacaaagaccacaaagcaaggaggcttgtgtggtggctggccaactatgaatcttgagtggtagttggaatatggcctctggtaatcgattaccaagggtgtgtaatcgattacaaggctttaaaatgaagacaggaagttaagatggtctctggtaatcgattaccaatggtgtgtaatc

SEQ ID NO: 178817 - DNA, 344 bp, Glycine max
  unsure (1)..(344): unsure at all n locations
tggttcgaggtacttacccgttgaagatcgtagaacgttgattaacgaatgaagaacgtcgaagaacggttgaaaccttngcgaaattcttcacggaaaacgttacggaaacgtttcggaagtgcctcggcttatattctcttcacggaaacgatttttccaagcaaattcgaaagagagagaagtgccaaaggggctgaaccccttccttcttcacttcctcccctatttatagcaaaataggggaggtggttgccgcccagctcgcccaggcgagctcagctcgcccaggcgagccaggttgcttcctccagaagcaacagccttctggaggaatattctgg

SEQ ID NO: 178818 - DNA, 319 bp, Glycine max
  unsure (1)..(319): unsure at all n locations
tgcaagctnccatatctagtgtaagggttattttctttgtctagggagattgcccagtggcgagggtggtagactattgtaaaagctgcaccgttgtgaggcatgtcaaactccctcagcttggacgagtgttgtttacgctctctcaagttgtttggggtggacatgcttttgatctttcaagcaaaattatacttgtcacgcggatgatgtccttatatatgacaatttttcccttttctgatatttagaggattcattgaaaacaaacgttttatattagacttttgcttcacgtgattgctacacacactgttta

SEQ ID NO: 178819 - DNA, 491 bp, Glycine max
  unsure (1)..(491): unsure at all n locations
tccttaagaagaatcctaaagaagctagagcttagctacacatacctctctaatagctaagctcacctccttgagatgagaagctagagcttagctacacaccctctataatagctaagctcacccccatgacaaaaaacatgaaaataacaaaaaaaagtccttattacaaagacaactcagaattccccgaaatacaaggctaaaaccctatactactagaatggccaaaatacaaggcctagacgaaggagaaacctattctaatatttacaaagataagcgggctcatacttagcccatgggctcgaaatctaccctaaggctcatgagaaccctagggcctttccttggatctctagcccaatctacttggagtcttctagccaatgcccttgcggggtaggatngcatcanttcctccaccttggaatggatntgacctcanatcccgaggttcttcatactcagggctccttccctcaacacct

SEQ ID NO: 178820 - DNA, 457 bp, Glycine max
  unsure (1)..(457): unsure at all n locations
ctgcctcttctaaacgcatactatatatattttatacattgtctangagaagttccatatatataatgctctaatagatagataaggtcttaatgacccattagtttataaggactttacagtctaaggagataaaaacccgtgagttccatcttttattccaacaaaattatcattctaatcaaataatatctattgataacaaaaccttatccttgcgagttactccatatgccacataaataaattatttgcggacaaatttactcattatttactactatataatatgcgttagataaatagaaataagttagattctggttatataatctcctcatgttgaatagacattttttaaaccctgatccggaagaatttaattgtcccatttcttaatcattattctctactatgatcgtcttacccatctgattaattaagaataagtaggatc

SEQ ID NO: 178821 - DNA, 392 bp, Glycine max
  unsure (1)..(392): unsure at all n locations
agcttcttatccaaggctcatctnggtggagtagctccttcttccatggcttattccctagtggatggcgcctcctctcacctcttctcctttgtcttccgctgcatctccatggtggaaaatcaccattaaatgacctcattgaagctcaaagatccagcctccatagaaaccccacaagcaagcttccatcattacctcattgatcacatgacctatgtgccgatgttattcactttacaacacattttgcacatctacgacaacttctttggtttattgccacacgaatcaatgtggcaagaatatgaaagagatttgtggggtcatgatccaaggagaaagaggactgcaaagagtcgtcccgtttcaactcatattcctattgagat

SEQ ID NO: 178822 - DNA, 400 bp, Glycine max
  unsure (1)..(400): unsure at all n locations
tgagcagccctgctcctggggcaaaaaaaaagaagaatgtagtctctatgagatgaatgaatatgatgaattgaaaatcacgttgtgatacagggcagatacattttgagatccattccagtcaagcaacaaattacaaatattgggtgcttgaaaatgttaattaaatagcgtgtgacgtanaaaggtatgaacatagtgcaggcgagcaaagtggagataaattaagtagataaacaatgacaagggtggtatctgtaaatcaattaatctctgttcggagggggtaccgtttttgcgaggcttgatgcgagcagagagagaaagccatacacgcctgangggaaaaaaacatgtggcccanatctccataaggttgtttggtgatgtgttggtgatc

SEQ ID NO: 178823 - DNA, 400 bp, Glycine max
  unsure (1)..(400): unsure at all n locations
agctttggaacctcgacaatgaacatgatanctttcgtggatgtatcaaaagttcaaggatcccccaaccagtttttaagagattaccataactttataaggactctcgtgaggagcatgcctttgaattcatttgaccatccaccaatccatgccatggctacattgtttgcttctttttcttttttaaggaggataccattttatgcaacatggatatttcaaaatcttattttatcaactgttgcctcaataattcaatctccaattcactttgcttcaatcgtccatccagtgcttcaatctcattcgaatgggcattagtgtcacacttgccaaagcctgaggaggcatcctcttcaattnttggatccacctttgctttctttgaaacaccgac

SEQ ID NO: 178824 - DNA, 424 bp, Glycine max
  unsure (1)..(424): unsure at all n locations
ggcatgacttctgttatgttagagcaagttttatgttatatgtaagtttatgtagtagaggtcttcttttgatagcgattgaaaaattctagaccttgatttcatttattcttcaataagatttgacaagatttgacatatcctagaagaatctttctgcaaaagagatcctagatataaaatattaaatgaagtcttaaatatcatcttaagtcgtatcagatatgactctatttgcttatggtctgaagcatcaaacgcaactnttccaagatatgttatgataaagcatcagatacgaaacattagacacaacgttcacataagatgcaacttttaaattttatatntgtatgcatctaatcaaattaaataagaattgtgatccatcttatgacaaaaatatcttttaacttaacataga

SEQ ID NO: 178825 - DNA, 404 bp, Glycine max
  unsure (1)..(404): unsure at all n locations
agcttcgtgggaaaccagnggttatatgtgtatgttggatggngaagttgatgtgtgggagtcataatcatgaattggccaagtcattagttgcacatccatatgttggtcgatttactaagaatggaaagacaattattgctgatatgataaagtcaatggtgaaaccaaaaaacattatgctaatgttgaaggagcacaatgccaatagttgtacaacaatcaaacaaatatacaatgcaagaagtgcatactgttcttccattagagaaagtgatactgaaatgcaacatcgaatgaaacttcttgaacgagattaatatattcattggcatagattaaaggataaagatgtggtacatgatatcttctggtgtcaccctgatgccagaaagatatgcaat

SEQ ID NO: 178826 - DNA, 372 bp, Glycine max
  unsure (1)..(372): unsure at all n locations
agcttcccgggagggaagagttttgtaattttttccnaagcaacagacccaaagggctattaacaacttccgtatgctcatctgtttgtgggtgacaagtggttgaaaataacaatttactgcccaacttgcttcacaaagaccttcaaaaatggcttatgaacttagagtccctatcacttacaatgctccttggctaaccatggagtcttacagtcttcttgaaatacaaatcagccacattggaagcattatcaactattcttcatggtaattaatgagccattttaggaaacctatcaacaaccacaaaaatggagtctcttccattgcgtgtttaaggcacgcccaaaacaaaatccattgataaat

SEQ ID NO: 178827 - DNA, 415 bp, Glycine max
  unsure (1)..(415): unsure at all n locations
tgtccacaaaatcagtccggtccagtttacgaccgatgcgggctatngttntctgngcaatccctgaataattttttgatgatgacgactatgaactgttcggttggcttcatccggtgatgctttttggtatacctcgactggtaatctttcttggccgatgtcgcatcggaatattttcgatcaatgtttgtaatggagtcttttctctgttgaggtcggttacattnttgttagcctattcaattaccgcagtccaatgtcacccgaaaagaaagtcagttgagtgtgcacgaaataccatangcgaccttgacggaanactttttgagcgacaatgaataagaaaacatcctcgatggtacgaataatattattggccggcgctgatggaaaataaaaacattgcacaatg

SEQ ID NO: 178828 - DNA, 364 bp, Glycine max
gctagggacgttaaaaaagtgcttattgggaggcaacccagctctttcttacttttctcaatcatttttctgttgaataatgcatatagttaggttttgacttcacttgaaactgctagagtaaagcgttaagcatgattttagtgaaaaaggggttggcccaaaagcttttctgaagcattggatgaggaaagaacttagaaaaattccagtcatccaacacgctctgcgcgccatccgcgctaagcgagccatatcctatgcgctgagtgagtagcatctctcgctaagcacactaacccccatccattggctgttgtggtctcgctaagcgagacagttgagcttagcccaaaaacctctc

SEQ ID NO: 178829 - DNA, 419 bp, Glycine max
tcaccacttcttgatttacccctaatcacctccttaacatcaataagtaagaacacaaccactgctactaccactcgaaaacataattaagactcttttacgagagttgtgatttgcatttactaagtctataccccatttcccatgtccaacaccttcgcgatagatttcatttatgcaagtagaagaattgatatcattatctatagatataaaagttgaaacaaatcaattgtaatatttccttacaatttataaaatccgcacactcattcagaacgatacgtgcatcaactttattattgcataacattttttgtcctcggccattaacctactatatgtgaaaccacaaactaccttttgtataagttgcggaatatattttatcagtatacttcgcgtgtctcctatttata

SEQ ID NO: 178830 - DNA, 369 bp, Glycine max
  unsure (1)..(369): unsure at all n locations
tagctcgtaatataattcctatgtagaaaaaagaaaaggttatttagagaaagaactaataaaaattcaaaaataaaactgagctttaagcacatcaacttcaaaataatagacttaagactttatatgtaatgcacaattgtgaatctaactcattacggccaatatttggattattggaatatttttcatcacctagttagaaatttaatttaattcaccttttaaatagaaaaaggaatttgggttaattaatatattattcccacctttaactagcctcctcccaactctctctctctctccnttgaatttcaactgaaagaatttttctattcaaatactcattcctcatcttagtgtaagcat

SEQ ID NO: 178831 - DNA, 307 bp, Glycine max
cccgacatatgtgggactatgtggcaatccggtgtttgcacaattcaactcacccactttcacaaatcatacatgaacccaccatccccagttggccaccttcaattgagctcacgtactcccacgtagcccttatgctcgttcctcacagaacacgggtgcgcatcaacccctcccaggcttcacaatatccaagaaattcaatcttcaaacatcatgaactaccctaaaccaagagaatagggcagaggcagaacactcttgccaaaacacattcacatattacaggtttccttactcaaatact

SEQ ID NO: 178832 - DNA, 391 bp, Glycine max
  unsure (1)..(391): unsure at all n locations
naagcttcaccaagtggtcatgcaaacactctttgattcgcctagtttacatttcttgcttactttcatagcttatttcctttaccttccattgtcaaaccgcctagataggtttccttttaccaattagttttttaccttatctttcatacctcttttagtgtttactttggatagtttcaaccataatttcttttaccttttgttttcaaacctccaacaagaaagaaccgcaacttaggaaccaacatgagtcatcattaatctagtgttaatggcgagggtactagtcataaggaccctttatctagaatcttagataagttgagttccctcaagttatggaaagaaaaacacgagagaaaagaaataggaaaaaaaagagtggaag

SEQ ID NO: 178833 - DNA, 458 bp, Glycine max
  unsure (1)..(458): unsure at all n locations
tcttctctcagaaatctgattttatgcttaaatatgtggctttgttcgtactcatgcgcttagcgcaattctgaaccgcttaacgagcactagtgaaattcggcttaacacggcttttcttgctcagcagatggactgaagtggggcgcttagtgggatgacccttcgctcagcaaacatgcacaactcatccttcttccagattcttccttgcgcttagttgaggattgttgcgctcagcggatggctcgctaagccagcatattggcttaacgagagggtgaaaatcaacacttcaaaacttgcctaattaacctgatattgagagaaaaatgattattaaacacacaaaatggaagtactaagtatttaatacctatntntaacgaaaaactaatacaacactacagaataaccatagattggaagagttgatacaattacacaagtttattcat

SEQ ID NO: 178834 - DNA, 397 bp, Glycine max
  unsure (1)..(397): unsure at all n locations
agcttgcaaccattanaagagaatgagcatgttattggaagtatgactaaaaatgttagtcagtttgtcagattgattatgaaggaatgcattgactatatcctggtgagagtgtgatccttaaattttgagagaaatgactatcatttagtactgatttttgcatgaatctttgaagtatggactgaatgcatgaaattgaggatgatgaaggccatgtttgattgtgatagccacttagccaaaaaagcggaccacgtgtttgaatgatttatcccttgcacctagtttgagctgaatgaattattgattgattgaaccccgagcctatatagtgttatctcctgctaccttgtctaggcattcctcggcggcagccttctcatggtggagctta

SEQ ID NO: 178835 - DNA, 294 bp, Glycine max
  unsure (1)..(294): unsure at all n locations
tactcaagcttaaaaaacaagaaatgaatggaaagtctcggattcgttaacttacccgttgaagaatgaagaacggatgaagaacggtgaagaacggacgaanaccttcacggatttgcttacggaaacatctcggaagcgttaccgaagcacctcggcttggaatttcttcacggaaataattnttttcacccaaaacagctgaaatacatagccagggggctctcagatccttagaacaacccctttcagcctatntataagaaaaaaggggaggaggttgccgcccagctc

SEQ ID NO: 178836 - DNA, 391 bp, Glycine max
  unsure (1)..(391): unsure at all n locations
agctntagattctacattaccactccatgggttaacaatattaatgaaaaaaaaaaatctatgtctctcttgtattgattgacattaattatcctcaattgaaatttggatatttgaattcacagaggaaattacaactttcagagcaataaaatggaaaggcaaaagcaaaaaagaattatttttttaaaggctccagccataaagtaaacaaaatgtagcaattgaaaaaaagaaaagaaaaggatgataacgacgaaacaattgcgactaacacgattctgagagtagcaataactaattactaattatgttgatgaagcagcccctgatgaagacgagtgattgttacaatactgcacactattctcatccatcctttccaacacat

SEQ ID NO: 178837 - DNA, 437 bp, Glycine max
  unsure (1)..(437): unsure at all n locations
gctgccaaacacagaanatgtgagtgtatatcgtaacattcctacttttttcgttacttctacttgttcaatcactttgtattttattctggagaaccagttttgaacctaaaagttcgatcctcatggttacattcgtaccattaagttctatctaaattntaataattcattcaggttgacacctgagtagcagcaaaataatcgttatgtctctagaaaattgcataaaatagtaaaaatgtctaaagaggtttaaattatcttttgaatcattaatacactctaaaatattttggtggaatatctttctatatttgcaaaaggaatgatacaatgattataaataatcaactaagaatatagttctggtatgtaagcacaaaatctctcctgcaataatctaatccctataatacaacaattacaaatattac

SEQ ID NO: 178838 - DNA, 232 bp, Glycine max
ttttttataagaaggatgaggaaaattatacaaattttagcaccctttatcttattctagcatcctgcgctaggatgaccctttaattgaaaagtacagacattcgcagcaagctatataagccccccaaattatccatgatgtaaattggtcgcttgctggctacttggagaggttataactttgggcggcaagttaatgaaaagtcagaaattcgcgaagctataaagct

SEQ ID NO: 178839 - DNA, 397 bp, Glycine max
  unsure (1)..(397): unsure at all n locations
ntcaactgaatttacaatgttccaatttatttcaaaatggtgtaatcgattacaagatattggtaatcgattaccagtgtgtttgaatgttgaaattcaaattcaattgtgaagagtcacatcctttcacaaaaatgctttgtgtaatcgattacaaggatttggtaatcgattaccagtgacaagttttgaacaaaaatcaaaagatgtaactcttccaatggttttcagtttttctaaaaggttataactcttctaatagttttcttgaccaaacttgaagagtctataaaagcaagacgttgactcgcattttgagatattcattacaatctttgacaacctttacaaacaactttttcacatactcttttacaacctttgaatctcgttgaac

SEQ ID NO: 178840 - DNA, 403 bp, Glycine max
  unsure (1)..(403): unsure at all n locations
agcttgtgctccaaacagatgcacagtttatatttgttttcacctaacttcatggtaatttacataaactcgtgtcattttttttaatttgttattgggtacattagtaaaatttaactaagaaaatctaatttaaatttattttcaaattttctatcaaattaaacacttcaaaaacatgaccagatacaaggtaagattcactcactaaacctccaaatttgcctactcagtttcttcagctcagggtcaaactcatttctgaaatgacgcccctgctgaaatcaaataatattctgtttttttcactcagatgtttgacctctntcaaaagtctgacccaacttaagcttccggggaaggggtttagtatatacgatatttaaattagttctagacgcgt

SEQ ID NO: 178841 - DNA, 482 bp, Glycine max
  unsure (1)..(482): unsure at all n locations
actcaagctggtgtaggggtgaggcctagctagcacgcctccttgacaccaaaaggacctcanatnttatcaatgaaatatgatttgagttccactatctataattaataccagcatatgtaagcactaatattaaccaatctatcattacattcacaatcacatgagtcaggctatggtggcctacatctagctaagaactgactcgtgtcaggttcaagtgttaaaccaaaatcatgttgtttggactactattggagttcaatctacattaaagctaagtaaaatcaaataatattaataaaaacaaacaatcaaacccattgtgtggacaacctattgcatgtcaaatgttcaagaatatccacatgcaatggaagatatagaaagtgcaaaaacatataaagcaaggacagatanaagagagcgaaaataagaaatcaataaagtgttctacacanaataaaaagtaaattctcatg

SEQ ID NO: 178842 - DNA, 394 bp, Glycine max
agcttagaagcctcaaaagccagcctgtttttatgtcatacatcaagttgtttagaacagtcatgcacttggaagaaattccccttttatggtgcactttcttcaatagcctatacacatacctctgcattattagaaaatatgctttctacatcggttatttatgactttcaacatcggtttttcaaccgatgttgaaagtaccgacgttgatagtattatcgttaacatcggtttttgaaaaaccgatgttaacgtaaaattaccaacatcggttatataaataaccgatgttgccaatatgaattacacccagaaaatgtatattaatgttgaaagttaacatccggttttataaaaaaccgatgttaacgaatgtgttactattgacagt

SEQ ID NO: 178843 - DNA, 453 bp, Glycine max
  unsure (1)..(453): unsure at all n locations
cctgggcanatggagagagtaagaaggatgtgaggaacccatacatgcccaaatttcccaccagctcaacaatatcaatgctcagcctatatcagcccttctcattacccaccaccctattagccaagaacacccaaccatccacagaggccacccctaaatcagccacaaaatccgtctgtcacacatctgatatcaaacaccacccttaacacaaaccaaaacaccaaccagggaaggaattttccagcaaagaagcctgtagaattcaccccaattctggtgtcatatgctaatttgctcccatagttactcaataatgcaatggtagccatactcccaacaaagttttctcaacctccattntcccgangatataacttanatgcaacatgttcttatcatggaagagttccggggtattccattgagcattgtatgaccttgaaacat

SEQ ID NO: 178844 - DNA, 393 bp, Glycine max
agcttgtaacgtggccgggttaacaaatatttttgttttttctcggattcaaacacttaggttctaggagagcattcacccattccttattttcttgacaaaccataaatcatttttttatttcacaacccccaaccttattaggttgccacacttaatagcacacaaaaattacttgatacacaattgcttccagctcttatttcttaaacttttttttttacaatgatactaaagcacaataccacataatgaagttctcatcacctgtgtattgttatttatgtccctgcaacaaaatttacccaagacactcccccaaatttggaacaaatttgtcttgatccataagagtgctctcctataacttaagacaaggtttacaacaacgag

SEQ ID NO: 178845 - DNA, 468 bp, Glycine max
  unsure (1)..(468): unsure at all n locations
acggaccttgatactcagctgttatatcttagatcacatcattctaagactaatctacttctctctagaataaaaatatgttgtccttcaaactttcaccttattgaagaaagtttattgacagttgggtagccatgaacaaccaagccttagaaacatctcagatgtagctttataagctactcctgcattgctagccttctccttctacacagtttccaccatttgagtgtcatctcctttagaaccactaacacttgaatctttcaaaatattagcagcattacggacaacctttaaggattcatctttttcctccttaacaagaatttgagcaacataaacctaaacaacaatctttgacttcttattgttcaccaaatgtgtttctataaaaanatgaaaacaataagaaaatacatgagaacaagttacgaattataaacatcgcagctcacataaataaat

SEQ ID NO: 178846 - DNA, 399 bp, Glycine max
agctttatgagtctaattcatggaatgtctttattttgtttaagtagaaatatacataggatgaaataaaactcctaataccacataccatatttttcttacggcattgtaacatagcttttttttaaaaatctataactccttcatttctcaggggatgctcatgaaacttatcaaaatagaaatatttgtgaagctattttcaaaattagcctgacacattaccagaggatcactatccaaacataactaatagtttgaccaacacatgtttcagcaaaataatagaagagtctcctgcatatgcttcttcccgtgttaattagtgtcctaccctacacagcgaagtaaagaaagatttccagtaccaaatttcatgagacatgtcactgcaacaaa

SEQ ID NO: 178847 - DNA, 355 bp, Glycine max
  unsure (1)..(355): unsure at all n locations
ggaccttgaaactaagctgctgcaatcgttaactggagtgatctatgctattctctataccctttccttcaccttttcgtgatgccgacactcgagaagcccaacaggcttttccttttcaatatactatgaacaaaattcagtaacttcttctgctatgtacctttcaacaataagagcttcaagacaatgtagattctttgtataccctcttaagatcttcatgtattgctcaaccgggtacatgctcctgatataaatgggaccacaacatttgatttcccttactatatgaataattaagtgaaccatgatgtcgaaacgcgaatgaggagaatacatctnccactgacac

SEQ ID NO: 178848 - DNA, 401 bp, Glycine max
  unsure (1)..(401): unsure at all n locations
agcttaatttgtgagtggatttttttcttttttttactttagnnattagtcaattcaattaagaaaaatcccaaagaaaagcgtctgattgatttttttgattattttattcaaagatattttgattattttattattattttgcctcttttggttttaaacgtggttacgacatgaaagaccggttggattttattctaacagagattaaacgatattacaactcaaatgattagtggaaattcattttattattgattaggcgagaaaacgacttaaataaaatggttaaagcacgtcaaaagggggtacggaaagcgaacgaaataaaaataaaagcacgcaaaacaagtggggaccactaagggtacatagaatgaattgaaaggttcgatttccgg

SEQ ID NO: 178849 - DNA, 477 bp, Glycine max
  unsure (1)..(477): unsure at all n locations
ctttggcgcanagaagaagaagaagttcatagatatttatgacttgtaaaagattgatttaataagtgttcaagatacttgaaatgcaaaacaaagtcttgcttttatagactcttcatgtctggtcaagacaaccattataagagttataacttttagaaaaacttaaaaaccaatttgaaaatgtcaaaaaccatttgaagagttacatcttttgattttattcagaaacaatcactggtaatcgattaccgaattagtgtaatcgattacacaaatcttttatgtgaaaggatgtgactcttcacatttgaatttgaatttcaacgttcaaaggcactggtaatcgattacaactttctgaaattaattggaacgttgtaaatacaattttgaaaaccttttcaagacactattctagtggtgatcgattaacacaatctggtatcgattaccagagagtaatactcttggtaa

SEQ ID NO: 178850 - DNA, 234 bp, Glycine max
gacaccaaaatatgcgggcccatacaactaacacatgccgacaatagccgagaaccccatgaatcccttcgggggcggagaaagcgaccgccaacccctaggccttggctaacaaccggggaagcccccgacccccgaccaaggaaagagcaaaccgacccacccacaagagcgcctctcggagaaagagccgaaccccatccacaaccacaatgccacaaaactagccataaa

SEQ ID NO: 178851 - DNA, 323 bp, Glycine max
atatcgagacgctcataattgaaaacggaagctctgagaaaaataaaacggcaatatagtttaactcggatgtcctattgagccctgtaatatatcgagacgctcgaaattgaaaatgtatgctctaagaaaagtcaaacgacaataacttttaactcggatgttcgattgagtcccgtaatatatggagactctcgtaattggaaagtgaagctctgagcaaattcaaacgacaataacttttgactcggatgtccgattgtgtcccgtaggatatcgagacgctcgtaattgaaaacggaagctatgagaaaactctaacg

SEQ ID NO: 178852 - DNA, 485 bp, Glycine max
  unsure (1)..(485): unsure at all n locations
agaatactncagcttcggggttcaatttcgagcgtctcgatctgtatagggcttattccgacattcttagcaaaatttatcgttgcttgaatttgatcagagcctcagttttcaattacgagcgtctcgatatattacaggacttaatcggacatccgattcaaaaggcattgtcgtntgactttacttagagcttccgttgtcaatgtcgagcgcttggatatattacagggctcgatcagacatccgagttaaaagtcattgtcgtttgacttttcttagagcttccgttttcaaattcaagcgtctccatataatacagggctgcatccgacattcggattgaatagctattggcggtgagaattggtagcaactacaatcttctaaactaacttgacattgatatacgatcttagacttctaaacaccttctagggtagcgttaccgaaactgggatccttgctaaattatactttgtgaa

SEQ ID NO: 178853 - DNA, 367 bp, Glycine max
  unsure (1)..(367): unsure at all n locations
catgcgctaagcgcacttccaatgatttcaaaatagaacgatgttggcacttagcgcatcctttcccgctaagcccagcttgaaagctcaacttacagaatgaatctggggcttaacgcaggatggcgcgcttagtgcaactataataaattttcatagagaggaagtggcgcttagcgcatcatccatgctaagcccactgcttaaggtacaacttacagtgaagatgttgggctcagcgcagcgatgtgtgcttagttgaaccattcagccaatcaattaggggtctttgcgcttagcgcgagcaagcttggcttagcgcgtgaagagatagcgcttagcggataaacaatcntaaaaattttct

SEQ ID NO: 178854 - DNA, 373 bp, Glycine max
  unsure (1)..(373): unsure at all n locations
ctaagcttganggttaaagtctcacgattgtcatgtgctcatgctatcaattttttctgtggctatacgagacatcttgccaaaaaaagtcaggttagccataactcgcctgtgctttttcttccatgctatatgtagcaaagtcattgatcctgtcaagtttgatgagctggaaaatgaggccatatttatactgtgccaattggagatgtattttccccctgctttctttgacatcatgattcacttgattgtgcatctggtcagagaaatcaaatgttgtggtcttgtttatctaccgtggatgtacccaattgagcgatacatgaagatcttaatagggtatacaaagaatctatatcgtccagaagca

SEQ ID NO: 178855 - DNA, 349 bp, Glycine max
tctcttttcaatcatgttcttgtatatgcaaaacaccaagctaagatactggttaatggatctaaactccatttcacttgaaccaacataatgttggttgagattcacggtttgaatttatttctagaatgaaaaatttaaaaagaatttaaaacatctattaattaatatattaaattttattgaaaaaattaaacaagtttaggtatacatgaataatatctagaatattaataattgtttctattactgtacctttataataaatagtcaaagacatgtccaaaaaaatgttcttgatgaaaaataatactactcattcaatccaataataaaatattaattacct

SEQ ID NO: 178856 - DNA, 372 bp, Glycine max
aaaaaaagcagggtttaccttggaactttccattttttggaacagaaattaaaaatgactttatttaaaaatcaatagaagtttaggaaaagaatgaagtgttcttagtctgataaataaaaagaaatagttttatttattaaaataatggttttaagggaaataaaataaatatatgttcttaagaaataaaatggagaatttatttattcatttgataagggtgaaaataaaggttctttctataaaataataaaataggattaaatagatagtaattgttgactgaaatatcttagtataataaagactattagctcagattatattactatggttctacctctctttcctttcaatcaattctttccg

SEQ ID NO: 178857 - DNA, 386 bp, Glycine max
agcttgtagaatggctagacataatacatgttttttttggtttggttcaaggataaaagggatgccccacattatttccatgacacaaatgcaaaaatgatgatttggaaattttatgaaaaactggtcatgcatgcacctatgcggacactcaagcgtcaaatttttatggtcatgtgatgcgaagtctcaggattcatttcctctattttaaatcaacccaatgtttccaaaatatgttcttttatccatttgtgcattcatccgagtccatttcgggcgtccggggaaattttcacagcattcacccttcaggtgtgtacacattttttttttcaaaaattggttatgatcaatgaattttttcaaaagaaaattggaagtca

SEQ ID NO: 178858 - DNA, 504 bp, Glycine max
tactcagcttgtctagcatttatgcgagacagagaccacatgttagtaatcatcagctagtaccaagaagaattaaatctagccacgacccacgagcacaaagtggcggacgagtatgcagaaaaggaagctaggggaagggtgatcgactcgttgcaccaagaggcgacaatgtggatggaccgatttgctcttactttgaacgggagtcaagaacttccccgattactagccaaggccaaagcaatggtggacacctactccacccccgaggagatccacagactcctcagctattttcagcacatgatagacttaatggcccatataattaggaaccgctaggaagtttgtattgtcactcagatcttgactagttataactttctgaataaaatgagtttatcccatgttttacaccaaaatagtgcgaatcaatcactcccgcatttatctctagcatgcatacgatttctttacgtacccctcacatttggttgttag

SEQ ID NO: 178859 - DNA, 378 bp, Glycine max
agcttttgtcactccacccatattgggtctttactttatctagacttaagactgctgacaacaacgtcaatgactttttgaaccccggatacaaaggattcttggaatcactttccaatgtatcatacataggggaatgtgcttgctgaaaagacttttgtccaaaatcacaaatcatttcctctaagcgatttcccatttctacatcaactggtttagattgggtccccctctacatgtttgtgaacttaccatgccatacccatgtcgtattattcttcttaattccatcacacagttagtgttctcgtatgccatcgagtacttgttgtctcctgttcaaacagtttatacaaggacaaagatatttttatcctc

SEQ ID NO: 178860 - DNA, 481 bp, Glycine max
  unsure (1)..(481): unsure at all n locations
ctaagcttggaacgaaatgtntcgttgcaaaccaccagattgctgacacatatatcagtggaacaaaaatggctactaaaagaaatgtcaagtatctccaatttgcaggcttatctgctgaaatagatgatgttacttgagtttcagagcttgcaccttcttcatccacctaataatagaaaccaagacaggggaatcttttatgatctcaggaaaagtaagtttggacctctaaattagctttttgctctatcagcgcaaggttaaattctccactttgtgatgttactacaacaatatataaaaatctatccaggatagctattacaatgacggtagaaagtaaattattgaaagaaactgacagggtattgattcatgaggggcatttngctcaactctgtgaataccattgagcatcatatttaatgaacgaacatgcaatcatataagaattgttcactcttcagtttcacatgta

SEQ ID NO: 178861 - DNA, 403 bp, Glycine max
  unsure (1)..(403): unsure at all n locations
agcttatcttgttaacacgtaaggctattatgttntttgtggaggaaaacaaattgggatgcaaggtatgtttggatgtttctaaaccatattaaccgaattgggatctcttggtagaattcatgataacaatgacaaaatcttgagaagtttgattagaaagtggagaccgtatgtcctaaccctgagagcaataaaaaatcttgattccatgttcatagaggaactagttggaacattaaaggttcatgaacaagaagtacaataagacgaaggaatcaaaaaggagacatctctgtgtttaaaagcacaaaagaccaaaaagtcttttacatccaaagaacccacctctagatcagcactcaagaaggcctcanatgtagacatatcctttgatgatgga

SEQ ID NO: 178862 - DNA, 423 bp, Glycine max
gatgaaaaccccatggatcaatgcatataccacaaggtcagtgggagtaaaatatgtgttcttgttttatatgtaaatgataactcactcgcagctaatgatcagggtttgctacatgaggtgaaacaatctctctctaacaatcttgacatgaatgatatgggtgatgcatcttatgtcatcggcattaagattcatagcgatagatctcgagggtatttgggtctatcacaggaaacctatattaaccaaattctagagagattttgaatgatagattgttcaccaagtgttgctcccattgtgaagggggattggtttaatttgaaccaatgtctaatgaatgactttgagagggaacatatgataaacatccattatgcttcaagttgttggaagcctcatgtatgctcaagtatgcat

SEQ ID NO: 178863 - DNA, 394 bp, Glycine max
agctttggcatgtttaggaagtgcttttgagtgatttgatccaagttccaaagagttctgagagatttttttgtgtgaagatctatagagacgcgagttcaaagcgaaagccattatgagagcttgagatgagcttgtgagtgattgtgagatcctagaggtgaaggagacatcttcaccacttgtgtttttgtagtctttcatcttgttcttctctttgttggaaaggaggtttccagactatggaaagctaaatcctctgttggatcttccctgtaggtacctgatgtaaatatatttttatctatgtaatgatgttttgcgtgttctctgtgctatctgcttttcattccaatgtgattctaccttgatcacgtagatgcatgctttgtta

SEQ ID NO: 178864 - DNA, 403 bp, Glycine max
gggaagaagagatagcacaactctgactcctctccctttagttgaattcgcgcaaaatgaagggatgaatgctccataagattttctttctcacaaagaccaataagctatgatgtaagcttaaattgacagggttttgtgacacttgaataacctccttgactttcatcttgaacatgtcaatctataccacaaatgggtaggttcgcttttcggcgtactaccataaatgaaatacacgagatttgcccggaaggaataattttgctgttaccataagttataagaattatatccatctgactagaatattcggacataaattaatctggctcaatgaactctctccactcatatcattattctatatttgctctctgtgaatccattgtagatgacattt

SEQ ID NO: 178865 - DNA, 395 bp, Glycine max
  unsure (1)..(395): unsure at all n locations
agcttgtaggattatggggtacccatcacttttgttactaggtggcggncgggcgatggtgcacaacaagttttccacatccacaaatcgcgcataaacccaccatcccctgttgcccacctccaactgagctcacgtactcctacgtagcccatatcctcgtttctctcaacaccgggtccccatcaatcctcccaagcttccccaacatccaagtaactcaacattcaaacaacacaaaccatcacagccaagaaaacagggcaaaggcagaaaactctgcccaaaacaccaaccaaaatcacagcttttctcacttaaagaccccagtaacaattccttcgttccaattcgttaactgttggatcgactcgaaaattttactggaagtctct

SEQ ID NO: 178866 - DNA, 440 bp, Glycine max
  unsure (1)..(440): unsure at all n locations
gacanagaaattanagatattcaagatggatgatctagacagtctctagagtcttagaaagggtatattatataggaagggaattccaattggagtagcaaaaggtttagcccaaaaatttaagttaaaaagtctttttcaaacaaatttactctctggtaatcgattaccagaggatgtaatcgattactagtggtcaaaactgatttacagcagctattaaaatttgaattcaaaatttgcactgtgtaatcgattacacatatatggtaatcgattaccagcagtttctgaacgttntaattcaaattttaaagcttgtaatcgattacacatataatgtgatcgattggcagagcagattttcagaaaatattctcaacagtcacatctttntatgtggntcttgaatggctatcanaggcctatatatatgtgac

SEQ ID NO: 178867 - DNA, 395 bp, Glycine max
  unsure (1)..(395): unsure at all n locations
agcttccatcaagtggtaatcagagtactagtatcttctatgtggngctccttaaacctccattaatttttttgctttaccttctcttccattgttgtttcttcattttttctccatgtatctcctcacatgtcttgtgctaaatgttgttaacatgattctttagagtttccaccaattaaacttgctatagatgctagatttgattttctatggttcaaatttcttgttcttgttcttgaaccatgaattgtgttgagtttaggttcctttgagttttgtcttgttattttttgtggctgaaacctaaaccataaaattcttacaaaaatattaaagtagaagaaaacctcaaaaatctagagtgacttgttcacctatcgtagttttgtcat

SEQ ID NO: 178868 - DNA, 444 bp, Glycine max
  unsure (1)..(444): unsure at all n locations
tgtgaaagatctctaacattcatatagagaatacttagtttactatattctaagtgaatggaagtttaacaattgaaacttgaaagtatcaaaatcaatatcaccgacatcacatgaagtattacttggacctcattatatcgcttatcatctatgtaaggatatttgattaactaatgaaccttcctaatccataaatgaattaaggtttgcggtataattaacttctgatattaaggtttttactttgaaatctcaaaattcttaaattcacacaagaatgcttcttgtttagacttttgtaaatataatgaaaaatcaaatattgaaaacaatttccgcttgtgtctaatgtatattaaagaaattcgttatcaaccaatacgttatggatggaaataaattctattccttaatggatgatatanagacaacaccagatct

SEQ ID NO: 178869 - DNA, 394 bp, Glycine max
  unsure (1)..(394): unsure at all n locations
cagcaactgcctacgggggggttttttaattttttggnnncggggccaatgtggattattttccatgccatatacttgaactaaagaaccatgcttttttaatgcttatgcagttacgttgttatgctattttttttcctatatatttatttaggtaattttgcttaagagacagttaaacggatactaaatgtaagtctcgtttaacatgattcataatttcatatattgatcgtgaatattaattaggctctttagctatatatacttaatcttctcgcacgtaattgatttataatatttgcttggtgagtggatcgctcgctgattcattctttttgttttatcttttcacttgatatcgggatttgttaagtcaccctggtatattatg

SEQ ID NO: 178870 - DNA, 473 bp, Glycine max
  unsure (1)..(473): unsure at all n locations
ggaccttaaaactcagcttactcaaacagtaacgttatataaactacattttgttattgacatanacgaatagttttcaatttttccttctattgcatctaacagtagaaaacaaaatgaaaattatatacctatgaaaatgttgttcctcccaatcctttcatttcaatatatgatggcatgtcaaataaaataatgcaatccttttagtgtggatgaggaaagaggagtggtttgtctagaactgtcaaacgatcactaacttgtgttcacatcatgagattaaaataataacaacatctagccttcccaaggtaatggaaatactaccttagtttcatattanaaaatcgtttatgtcaaacttgcaagagttgtacagagaaataatggtacagttcggatatagattcctgaaaaaacgtacaaaatatttatacacccaactactacctttattatatagttaaaat

SEQ ID NO: 178871 - DNA, 389 bp, Glycine max
  unsure (1)..(389): unsure at all n locations
agctttgatgatatggtcttcttttttatttgttcgaagnggatctgaaaagaggcaaatttaatcatcctgcttggacgaatgagaaaactagggcaaataaagagggtgacgatgagggagaaacccatgctgtgactgccattcctgtatggccaagtttcccaccaacccaaaaatgtcattactcaacccttctccttacctaccgcccatttatccacaaaggccatccctaaatcaaccacaaagtctttctaccgcacttccaatgacgaacaccacctttagcacaaaccaaaaacaccaaccaagaaatgaattttgcagcgagaaagcctgtagaattcaccccaattccagggtcctatgctgacttgctcccatat

SEQ ID NO: 178872 - DNA, 400 bp, Glycine max
  unsure (1)..(400): unsure at all n locations
tgctggtggagcttctatggatgctggatctttgagcttcaatgagggcctttaatggtggttntctaccatggagatgcagtggaagacaaaggagaagaggtgaaaggaggcgccatccactacggaataagccatggaagaaggagcttcaccaccaagataagccttggataagaagcttggaaggatgcttcaatggaggaaaagaaagagggagagaaagagaggggggagcacgatattgaaggaataatagagagagagaagtggaactttgaagtatgtctcacaagactctcattcatcaaagttacaacaagtggtacacatgcttctatntatagactangtagcttccttgagaagctttcttaagaaaacttccttgagaagcttc

SEQ ID NO: 178873 - DNA, 318 bp, Glycine max
tctctcatttgaatattctacacacacacacacatgtgcatactcaatcttctttcttagtttctttatgagaactcgcattttggtttccgattttacacattggattggaaacttagtttctataatctttctatttgcttgtttggagaagatggcgccttaaggtgtagattttttatttttttttgctttatatgctattttactgcccctagtctaaagggatattttcataaggtttgaagtttagtcttttaatatgtgtaaggtggcataatataaaaaattggtgaagagttaagagaataggatgat

SEQ ID NO: 178874 - DNA, 224 bp, Glycine max
ggctggcgagatggtcatcacgaagttcctatgggcaggtgagaggcgcgagtatgaaagtactgagcttagtggataacgaacaatcactgaagcttctggtgtagatgaagcaaggactctgtggtaatcctgaaggtatgtcggggaatgtcttgatcgtgttgaacgcctatggtgtgaagggtcttgctcggctgaatgttcatcacaggagtgtattg

SEQ ID NO: 178875 - DNA, 366 bp, Glycine max
gggagaagccaatccttaccctcagaagcaaaaaaagggagagggaaaatttccaatcaaagagaaagcaaaaaaggaaagaaggaaaattttcaatcaaaagaaaaaagagaggaaaggaaattcccaatcaaagaatgggagaaagcaaaaagaaaagaaagaaaattcccaatcaaagaatgggagaaagaaaaaagagacggagaagaaggaaagaaagctcctgatcaaggatcgaaagataacagaagaaatgtgcagagaggtctctggaccaaacaatatctgaacaaatacggaattgtcaccaaatgaacaaaagaaagaaaaggaaaccctaacctaaaagtggtcttctccctt

SEQ ID NO: 178876 - DNA, 325 bp, Glycine max
  unsure (1)..(325): unsure at all n locations
ctgagtatgacagtcaccgctttangagcgctatacaccagcagcgcttcgatgccatcaacggatggtcgtttcttcgggagcgacacgttcagctcagggatgacgagtatacgaatttccaagatgagatatggcgccggcggtggacatcacttggtacccccatggccaagtttgatccagaaatagtcctcgaattttatgccaatgcttggccaacagaggagggcgtgcgtgacatgaggtcctgtgtaaggggtcagtggatcccgttcgatgcatatgctatcggncagctcctgtgatatccgttagtgctgga

SEQ ID NO: 178877 - DNA, 381 bp, Glycine max
agcttatactcattgggaaggccttagaatcttttttatttggccgaaaaccataataaaatttatccttcattaaagccatcaccttcaattctatactcagtctaactttatgaacataatataatttatgaattggggaacacatcaaattgtaagttcacatgattgaaatattataattcaagtttaagaaataaagagtatcatttaacatattattaaattaaaaaaggcaaatcggttgaaaaacataaaaaattaaatgttattcatgtcaccaagtttaacaataagaagtgtcctgatcaaaccaaacgagaagccctcatttcacaaccttgatatcatgcattaaactaaaggccaatcaatgaacga

SEQ ID NO: 178878 - DNA, 428 bp, Glycine max
  unsure (1)..(428): unsure at all n locations
actcagcttattagatgttgcatttcagcatcacttcctcttatggtagtacggtatgcacnttcttgattggataattggttgatggtcatacaactattggcattgtgctccttcaaagtcagtagaatgtttcttggtttcaccattgacttcgtcatatcaacaataagtgtcttttcaactttagtcaatcgctcggcatatggatgtccaactaatgacttggccaattcattattatgaatctcagaaatcaacttcaccatccagccttgtcctccaaccactggcttgccaagaagcttgaagggacacctacatttcctagtcccagtgtctcttctaacaaattctttctttctacacctatactcgccacttcgttcacgaccaataacacatacgaagtgctttctctactacat

SEQ ID NO: 178879 - DNA, 345 bp, Glycine max
atttgggtcaacattgtatttttttggctttatgaataaataaaagaatgacttgtttcaaactttttcatccactacaaaacgctgcagagatgtgatatttatagaaaaaataattattttatataaatgaatttcttagcctaattataaatatatgtatattattcaccgaaaaaaatatgcattaagtttctattttgttttctattttagaataaaaatttatttgaatttgatattatttttgaataaaatatttttttattcaatgtaaatatgcataatactaacaaccttaaattagaacatatgatgaattacagattgttaatttaatatata

SEQ ID NO: 178880 - DNA, 441 bp, Glycine max
  unsure (1)..(441): unsure at all n locations
ngacagattcctgctntcccctgagtggctngacaaatggcctgcaagcactcaaatcactntacccaggaacttttcaaaccactgtccaatcttgcttatgtctatatccgtcaactggagtcctaaaccttttaggattctagactgctggttatcagacaattctttcaaagaaactgtgcacaattgctggtcctccaatcagtaatcaggatggggaggttatgttctcaatgaaaaaataaagagactcaaataaaggctgaaaatttggaataaggagaactatggagatacttacaagaaggtcaagaagattgaagatgaactaaacaaaatggaggatgatacaacccaatgacagctatctactcaagantagatgaaaaggagacaattactagaagctctattggtagctgcacaagctcatgaatg

SEQ ID NO: 178881 - DNA, 413 bp, Glycine max
  unsure (1)..(413): unsure at all n locations
agccttttttaattgttgatattggagattgttgtttattatcaacctttacgtgctgtaggatttccaagggatcttttgtgatgtaattattgttttcttctgcttgctcctcataatgagtatttctattggcttgttgaagaggattatcttcaggtccaaccatagaatctttttgttgatgactttcatccatggtctcttcaggtgaggagataatctatttcaatcctacagtttcaagtcaaactcagtcttctagacaatatttactatagataaattaattctaccgattaacagcatctaaattgccactatgagtgtcagtgagttattntgaatgaaaatcacagatattcacatgtgcatggcaacatagaaaaacatataatgagtgtacatttatt

SEQ ID NO: 178882 - DNA, 402 bp, Glycine max
ctcagcttgcttctcagagaagattcatcctcagatctaaagccttctcatcatcataagaagcattaccacaataaggaatttaacattgaaagcatcagaactatgaatatgactcgattttgctagcaataagctagttgtattaatgagtgtggtaagctacaaaattgagtctcccaatgtttgatataagttttggtagaccatctttaattcgagcaagtggcttataggtgtaaatgcacagtccttgcaagcaagcaactcaaaggtgtaacaccatcttagaatttcgtatgagcatcttcattgaaaatggaagactttgaacgaaatggttggcttgctcctcattgttctcggaatagataaggatctatataataagcacaatgtatg

SEQ ID NO: 178883 - DNA, 320 bp, Glycine max
tactaagacgactgaaaaaactggggcaaatgaagagggtgagaaaaaggagaaacccatgctgtgactgtcattcctatacggccaagtttcccaccaaacccaacaatgtcattactcagtcaataacaaacctcttccttacccaccacctagttatccacaaaggccatccctaaatcaaccacaaagcctgtctatcgcacttccaatgacgaagaccacctttagcacaaaccaaaaaacaccaacaaaaaggaattttgcagcaaaaagcctgtagggttcaccccaaattccgttgcatatgctaaactgat

SEQ ID NO: 178884 - DNA, 444 bp, Glycine max
  unsure (1)..(444): unsure at all n locations
ttggtttagacatgattgatacatgatttgttcttgtanngaattgattgggcaagattggatgagaggaagtgtgattttcgaaatctgcacttatgcagaatttttgctgtgaaattgtgcagcagaattttgcacaagtgcagaaaaatgcttgtgtgtggttggctgtggaaagtctagtgcagaatgagttctggatgttngctagtagatcccaacggtcataatgtaggcttatgtactagagacttccagtaaaaatttggagtcgatccaacggttaacgaattggatcgaaggaattgttactggggtctttaagtgagaaaaagctgtgatttggttgatgtgttgagcagagttttctgcctttgctctgntttgcttggctgtgatagcttgtgcttgttgaatgttgttttgcttggatgctgtggaagc

SEQ ID NO: 178885 - DNA, 398 bp, Glycine max
  unsure (1)..(398): unsure at all n locations
agctngaaggcaaactggatgcattgtttattttttttttctcagctggccntgaatcagaaatctgttcctgtcgcaagagtttgtggtttgtactcctctgctgaccaccatacagacctttgcccttccatgcagcaacctggagcaattgagcagcctgaagcttatgctgcaaacatttacaatatacctcctcaacctcagcagcaaaatcaaccacaacagaacaattatgatctctccagcaacagatacaaccctggatggaggaatcaccctaaactcagatggtccaaccctcagcaacaacaacaacaacctgctccttccttccaaaatgctgctggcccaagcagaccatacattcctccaccaatccaacaacagcaacaacc

SEQ ID NO: 178886 - DNA, 442 bp, Glycine max
  unsure (1)..(442): unsure at all n locations
tgctaacccatggaagctcctaatatctcccacacttttttgngtangccattcttggatggccttgattttctcaaggtccacttggaccccatttctaccaactacaaaccctaagaaaactatattatctacacaaaaagtacacttctctatatntgcatagagggtgtttttcctaaggactgaaagaactcgcctaagatgtcctaagtgatcatctaggctcctactatacactaaaatatcatcaaaataaactgttggatcgagtggcctcagaataattaagaaagggggttgaattaattattcctaaacctttactaattaaaaattactcttctaaggcttttactaaattgttaagagaatgaggagcagaagagaaacttaacataatagtaatacagatattaaatgcacagcggaaagtaaaaga

SEQ ID NO: 178887 - DNA, 382 bp, Glycine max
  unsure (1)..(382): unsure at all n locations
aactctaagacaagtttattcttgtttacgcgccaaccgannaaaggagcaagatgattacgcgtaagatcatgagatggtttactgataatgatgaaatagagtaatagacattccattttgatgcatgcacggaatttgaggtggacatgtggtaaagtcattttcctctctgatagaggagcctcttaattaattaataacactaattccaattccaaaaaaaaaaagaagctgattatatatgaacttgtccattttctttaaccatctttcattatagtagcaaaacacacattacacaactttaattgaagagctccacagtgtatagaaccatcatcgtaatctaactcctttttctttcgttcgcccccactta

SEQ ID NO: 178888 - DNA, 334 bp, Glycine max
  unsure (1)..(334): unsure at all n locations
ngacttgacgcccaagtcgcaagatggtagagacttttttctcaaatcatcgcgatacattaataaaaaaaccacttatatggtctaactatcattgtaaatcctactcgagaaatgcacatctgtactgaagatgaaatcttgattgattaatgcgtaaagaaaatatccattgcatttgtaacaactgaatggttgttcgagagaatgactcatgaaaacgctatgaaaactacgggagtaaggccaaaacaaaagatcctgtgacctttgaaaacgcactatgcctactgcatctttgaccataaaacataaccattattcgtcacgctat

SEQ ID NO: 178889 - DNA, 390 bp, Glycine max
  unsure (1)..(390): unsure at all n locations
agcttgctagagaagcttctatggaggttggttattttagctntaatnaggcccttcaatggtgatttccagccatggaattgctacggaagataaaggagaagaggtgagaggaggtgccatccactagagaataagccatggaaggagaagctttaccaccaagagagtgccttggataagaagcttagagaggaagcttcaatggaggaagagaatgagagagagagagagagagtgacggggaaattgaaggagaatagggagagaagttgaactttgaagtgtgtctcacaagtttttcattcatcaaagttgtgacaagtgttataggtgtttctatttatagcctacgccactaactgaagaacaagtttcatgatgatgaac

SEQ ID NO: 178890 - DNA, 407 bp, Glycine max
ctcagcttatgatgttgaataagattgattcatgttttcatgattataataagagacgatgacaaaagataatttaatgatttcaagattgagtcaacaattcaagaataaagagaagtttgatttcaagattcatgaatagatgaattcaagtttcaagagaagaaatcaagaagacttcacaagggaagtattgaaaagatttttcagaaaaaaccaacatagcacagttttgtttttcataagagtgtttcttaaaattttctaagttaccagagtttttactctcaggtaatcgattaccagcttcctataatcgattaccagtggcaaagtctgttttctaaagctttcaactgaatttacaatgttccaattattttcaaatggtgtatcaattacaagat

SEQ ID NO: 178891 - DNA, 411 bp, Glycine max
  unsure (1)..(411): unsure at all n locations
agcttagcaaatggacctgggnggtgttcatttttattatatcttccgtaatactcatcacctctatcatatctaataattttcacacttatgtctaattgcccttttacttcattgtagtaaatttctaaggcatccattgcctaagaaatctcgggcagtaagtagacataactgtaacgtgaataatcataaaaaatggtgataaagtatcattcctttccgaaagaactaacatcaaaaggtccacaaatattagtatgcacaatttcaagaagctgagtgcttcttgcaactcctttctttgtatgttttgtttgttttcctttaatacaacccacacaaatatttagatccgtaaaatctagataaggaagaatttcattctttattaatctttccatcctttct

SEQ ID NO: 178892 - DNA, 400 bp, Glycine max
  unsure (1)..(400): unsure at all n locations
ntaatctcaaatgatagtttgtcgatgatagacgacattgatatagctagagaatnctctttgagggatcaaatatganaaataaattaaaacacaatataattaatattttaaaaaaatatataaataaattgaatttttttaaatgagatgagtttcatgtgaatttacctaaacttgatagaattcgatgagagtgtgaatgagtttcaaaaaaaaaaacatcatctcttttaagccagatgtttcctatctttagcgagaacaagggtcgtgagagtcaaacccacatcccaccttgtccctttggcctccctactttatatatagatatttatatgtatgcatggattatttagagacataanntgaataatagacgatggcataagagttaatt

SEQ ID NO: 178893 - DNA, 301 bp, Glycine max
aaccactgttgtgtttcaccaaattcaccggcgacaacatcacaggactcttatggaaaaccctaatattatttctcacataccgctgctgtacagaaccaccgccgtcgccgccacaaccaccaccactctttttggagtgcaccaccgccactctcttttttccgagatcggtacagaacaattacctccaccacccgaacctgaaggcttgaacaccgaaactgagccagggcatcgggtcttagagacttgttccgggagctcgaactggcctcgaccttaaccctccacccttttt

SEQ ID NO: 178894 - DNA, 352 bp, Glycine max
ttgagagcacaactcaagagtatttcactaacatatttgtgttgaactaaaccacaaatttctcactcagagatctagcacaatgtgctgcagattaggaatggtttacctatgtcttcatagccttcataaatgcctgctaaagcttccaaaaatatcgttgttgtgaactccacacaactaacacacttctggagcaagtatgttcactttctagctatcatgatgtgataacaaacaaaatcattgtgaggttccattatgaggttctcattatgaagaacctcattgtagaacattatgaagaaccatcacaatagtccgcttgaagtttgtaacaattgacgcatac

SEQ ID NO: 178895 - DNA, 395 bp, Glycine max
  unsure (1)..(395): unsure at all n locations
agcttctactgatgtggcaggtgttgtttcttttctgcttgnngncccaaccgcgggctttggcctttgttcttcctttccgagatacttttccttatgttagcttgcgtaggtctatagcctaacccaaacttcccgcggtttcctctggtgcttaccaggctggtcctgccgccgttgttcttgcccaaacccattccgggctcgtagccgtaccccaatatcaccggggccaccatcattgccatatcagacaggcaaggctgcccagagaggcaatctacggaggcaatgcttactacctcaaaagattggaaagccatttccaatgactcctccgcggcttccacatatggcatagaggaagggcaacttaccaagacatcttcctcacc

SEQ ID NO: 178896 - DNA, 401 bp, Glycine max
  unsure (1)..(401): unsure at all n locations
tatccttatggcttgcctccggatcttactccccatgccaccccggaagaattaagccaagcccctacttttgaggggcaactcccgccttatgacgactatcccgggcaagacgatgaggaaggagatacccatcttggccccctgctccacctcaaagatccgtccncacatgaactaccccaaccgaacatagtccgccatatcccgacttcgcccacacccgtaaaagaatctgttcccttcgtggaagataagggaaagattgaggcgctngaagagaggttgagagcagtcaanggcctcggcaattacccattctcggatttagcggatntatgtctcgtgccaacatcggcatcccttccagttcaaatactgaacttgatagtacaagggac

SEQ ID NO: 178897 - DNA, 318 bp, Glycine max
tatttcctttagaagcatacacctttggttgggtcctaaccctctcatgcaacttttttacaaactctaaccttgattccccttctttatgtataaaaaaaagtgtcaaagggggaggggaattaagtcttaaggtgtttgaggattgaacccataaataaccctcaaaggggattgcttggttgttctatgaatcccccttgttgaggaaaattctacatgaagaagaaactaatcctaagacttatgggttccttttaaaaaaacccttaaaagggtggatagagacccattcctacctctgtttgcccatcaatt

SEQ ID NO: 178898 - DNA, 440 bp, Glycine max
  unsure (1)..(440): unsure at all n locations
tatacttcttatcattcctctcacacctctaattatgtccaccgcacaaaatctgcactatgaagtccatcacctcctcttgtattcaccaaatagactattaaacccagaggtccaagactgaccctaatcacactttataattatatatttttcgtgttggcatatctccttgttctaaactttatgttctctttttgtttgtggtagatccatgagccagaaaacaaaatcacattcatgggccttctttgcagatctacttggttggaattcattgatcgtgtcttatatttctttgccctctctcttatgcttngtcttaccctttgcngcnaccatggccaataaacatcttcaacgaccatgatgttatttgttaattaaataacgtaaaagtctactcgttcgttatctaaatgagtattaatatcacaata

SEQ ID NO: 178899 - DNA, 360 bp, Glycine max
agaacagggctaggttatcgtataatctggacacagagtgtggtaatttagtttttattatgttgtaatcgtaacgctgttcagttaggttaagttcacaagagacatctgagaacgaggcttaattagaattagtccaaactcacgacacatcagtgtttggtattttagctctcagcatagaacgcagaaataaccttaaatagagaaatacatttaattgcattatgtatttcagtaggaggacccaacgtttttacatatctgttttcacacccacttgctcacatttactgctttgattagaatagaaacaacaattgtttttaattcatgatcatcaattcattgcacacatgc

SEQ ID NO: 178900 - DNA, 402 bp, Glycine max
  unsure (1)..(402): unsure at all n locations
ctcagcttggcctggattacgttcatctaagcctcttgagtatgtgcattctgatttatggggaccatctagaatgaaaactcatggtggaagctcatactttcttaccatcatagatgatttctcaagaagagtttggttgtatgttntgaaatacaaataagaatcttttcaaaaattcagagaatggcatactcttattggaaatcaacttggtacaaaattaaaagtgttaaggactgacaatggcctggagtttgtttcagagcagtttaatgagttctgcacgataataggcatcaaaaggcacacaatagtccctcacacaccacagcagaatggtttagcacatatgatgaataggaccattttggaaagagtaatgtgcatgctactaatatc

SEQ ID NO: 178901 - DNA, 352 bp, Glycine max
tatatcaagtttgaacgtgcaaggatgaaaacattaagccccataaattatttatcatttttaaataggttcctaaatatttattgttttaatcgtgtccctggattttatttatttatttaattagatagttagttaaaaataaatacaagctcaaagatctaattaaaaatttaatgaacgtttaggaacttgtaaagtaattaaaccttaaaaaataaaaaaataaaagatattaataagatttttttgcatcacatcattgattactctttttttttcactttcttttatctttctattgggtggggccatttccttctcacaaagaaaacgtgaaaaagacatttat

SEQ ID NO: 178902 - DNA, 403 bp, Glycine max
  unsure (1)..(403): unsure at all n locations
gctgatactttgagaatttcttctcctacggtatcctgatgtaatcctttcttgggcttaagcctcgtgcactactaaaaggaatacaatcgaataactttgtcaaattttgatatagcaagaatgcaatgcttgccttttaattacaatgaaatatattttcatagcattttttttaaatatgtgcgcttagcgatagttaaaaattgcaaaataaaaaataggattatctggaacttaatgagaatatgatgaatgacaaatattacaagatntttagaaaaggggataaaatgtggtagaataattctgtggacacaatattcgctaagattntaaaaatgaggataggaaatatatttataaaaatacaaatcttaatatgaaattgtgttctcacatg

SEQ ID NO: 178903 - DNA, 326 bp, Glycine max
tgaaaaattctcacactggacgcattcgcttgttctgaaacctgttctgtttacgcaagtgcacccttgcaataacatgctcattaatatacctagcacatggcaagctatgtatgtcaaaatctaataaaagggcttgctattctggatatattgacgcattgtcaaactaaaattacacgacattgcattctaacttctaagtcatgacaaacaatatggtaactatgactttctttgccaaacgtgcggggaacgcagaatgctgaccaaagaggcaaaacaacccactggaagtagggaagtgaatggatataagcatagtc

SEQ ID NO: 178904 - DNA, 403 bp, Glycine max
  unsure (1)..(403): unsure at all n locations
agctttgtgtaatcgattacattgatttgtttatttattaccagnganggnnnctgaataaancaaaagatgtaactcttcaaatggttttttgactttttcaaattggttttaagtttttctaaaagttataactcttctaaatggtcctcttggccagatatgaagagtctataaaagcaaggctttgttttgtttttttaattcattcattcaatcaatcttgaacacttattcaatcaatcttttacaagccctaaatctctttgaacttcttcttcttctttatgccaaaagctttccaaagttgtttggttttctaaaccttgaaaacttgtgttattcagcttttcattctcttttccctttgccaaaaagaatttgccaaggactaaccgcctga

SEQ ID NO: 178905 - DNA, 328 bp, Glycine max
  unsure (1)..(328): unsure at all n locations
gctcatgggccactttgggatagacaagacccttgtcttactcaaagaaaagttctattggccccatatgaagaaagatgtccataagcattgcactaggtgtgtggcttgtttacaagccaagtctatggtgatgcctcacgggctatacacacccttacccattccatctgcaccttgtgtagacattagtatggactctgtccttgggctccctacaacccanagaggtgtagactctatctttgtagtggtggataggttgagcaagatggcacactttataccatgccacaaggtggatgatgcttcccatatctcataactc

SEQ ID NO: 178906 - DNA, 377 bp, Glycine max
  unsure (1)..(377): unsure at all n locations
cctgcggcatgcaagcttttaaatgggaaaaggcttcttcttttnttttacatcatattcaaacttgtccaaataaataataaagtcatctcgactcacagaaagtcatataagtctcatacaattaatatagaacctatatcctaatttcacatcctatcagagcgtggtgttcccgtgtcctctagcatgaggttcttcatagtcatccacctattcatttgctcccncgaacacaaagttcaagatcatcacaggatccaaacacaaacagcaaaccgggagtgagttatcacattgctaactactagagagaaacaacacaccatatggtggccaaataaaattacttagcatatctcacattatttcatcac

SEQ ID NO: 178907 - DNA, 425 bp, Glycine max
  unsure (1)..(425): unsure at all n locations
gcggattnggtcttcgntggcgaaattatctaagtatgtctaaaaagaggagaatctgatcatcatgctttgataaacacaaaaactgcggcaaatgaatatggtgagaatgaagaagaaactcatgctgtgactgccattcctatacggccaagtttcccaccaatccaacaatgtcattactcagccaataacaacccttctccttacctaccacccagttatccacaaaggccatccctaaatcaaccacaaaacccaccttccacacaaccaatgctaagcaccacctttagcacgaaccaaaacaccaaccaatgaaggaattttgctacaaaaagcctgtataattcaccccaattctggtgtcctatgctgacttgctcccttatctacttgatactgcaatggtagccataacccct

SEQ ID NO: 178908 - DNA, 379 bp, Glycine max
  unsure (1)..(379): unsure at all n locations
agcttgtctgtcattagttggagattgtgttatttatagaagncactaattatctaggtatattatggaacctagtaaattaattgcaacagcctgtcagaatcaataatgattttttgctaagtgtaacactgaaagttatggattttgcttgtttttctttgctaagacaaacatttaacttgtgttttcaaacctaagatcctctgccttgttgctaagggaggtaacgtgacatgagaatcactatcttgacattctttctttggatccaaatgatattttctttctcttgcattttgattttatgcaaatgttggatttgtttgcacagatatngcgagacaaacctgacctgtcacggtgggccttgaagtat

SEQ ID NO: 178909 - DNA, 375 bp, Glycine max
  unsure (1)..(375): unsure at all n locations
tctgtggatgttcttcaatacgctgacgatacgatattctttggagaagcatctatggcaaatgtcaaaactgtgaaggttattctcangagttttgagctggtttctggattgagaattatatttgctaagagcaaatttggagctggtggtcaatctaaagagtggtgtcttcatgctgcaagctacctcaattgtgctttgctccaatttcctttctgctatttangtattccgattggtgtcaatcccaaaagaaaggtggtgtgggatcctataattaggatatttgacgataggctgaacaagtggaagatgggtacgggtgaccaaatcctgttctgggaagatgctcgggttgggataggattccct

SEQ ID NO: 178910 - DNA, 324 bp, Glycine max
tccgctagatagaaaagattccttcctatttttttatttacgaatttagtggaaatttttatttttaaattcagacttcatacagaatactcaaattctaactttagctgttttaatactattataggtgaatattgaataatatggcatctacattattctttttattcatgttattctataataattttttttttgagcatgaaaattatgtgaggtggaagcaacgcattattattattattaatttaaaggtttgcaggttccctgggggaacacaacgattgggcgatagtccatcaacttgggcccgaactcagtaat

SEQ ID NO: 178911 - DNA, 378 bp, Glycine max
  unsure (1)..(378): unsure at all n locations
agctngngtagggccacaggctactaataatttgattcgcccacagcaaagcctgagaataacaatggttcgaccactacaaccctagaggaggcaagggacaatggcctttcaaataaacctgatgtacatgaacaaacattatatcatgcactgaccgtgccgaactaaccaccgaagtcattgcgtaattgttatactaactatatacaatgtacctgaacaaaatgaatctcaaaaacttgaccgacacatatgatgcggagggcaaaagaatcatgtggtggtggactattgagatggaaaaatgtcatgctctgttgtcggtacaactatcccacgattacggtttatcgagaagcaaatccatatcccatg

SEQ ID NO: 178912 - DNA, 382 bp, Glycine max
agcttgctttggaaacgaattttcctttttttgaatccacagtataatgccatcagattcttcaccacaatagttattggtatcatttttggactaatctattgggacaaaggaaaaaagacgtaagtcaaatagttatttgatagtattgcactccatcagtacttgttaactactaaattatttctaactcaaataaacaatgagacgtttctatccaagaaaccttagcaatttcatgaaccacaggattgccccaagatatcattagacataagaccaagatggaaaaaccagcttaggtaaggaaactctttgtttgagaacctaaatggagtcaccattctcctcccacaagagtcttcccagtgaggcttgcatc

SEQ ID NO: 178913 - DNA, 389 bp, Glycine max
  unsure (1)..(389): unsure at all n locations
ctatagaaggttcngtcctaatttctctacaattgcattacctctcaatgagctggtgaagaagaatgtggcatttacctggggtgaaaaacaagagcaagcctttgctttgctcatagaaaagcttactaaggcacctgttctagctcttcctgactnttctaaaacttttgagctagaatgtgatgcctctggagtgggagttggagctgtattgttacaaggtgggcaccctattgcttattttagtgaaaaacttcatagtgccaccctcaactaccccacctatgataaagaagcttatgccttaataagagccctccacacttgtgaacattaccttgtttccaggaatttgtcattcatagtgatcatcaatcacttaagta

SEQ ID NO: 178914 - DNA, 407 bp, Glycine max
  unsure (1)..(407): unsure at all n locations
taagcaccgcggctgcaactttgatgatgccaaaagtatttcttttttgatngancaaagncaagatcaagaattcaagagaaacgatgaggggaaatgaaataatttgtatcatatcatgtatatccctcaatattagcttaattttatgtaagatatctagtataattgtacacaatcaatttgtatataaaacataatttttggacatatttctaaggagatctcactactagaaaaaatgtttttcacatcgctggatcaacgatggttttttcaagaccgtcttaaaaaaatgtgcagtgacatttttgtaattaactagacacattaacaatggttctagaaaaattgtcattatggttcgtgagataaggatgatctttggaaaaatcatcattgagagc

SEQ ID NO: 178915 - DNA, 378 bp, Glycine max
tatgaacccaaacttgtagcttttatgcaaggaaacattcttatggctaggaatccaaaatttggttttagaattagaaaaacatgaaaattaggatttgcttgtgagagtttttttgctcaaatttgggctgccccatgtttgatactttacatggaggtagcgtggaaaacaccttgcaatagtgtgtatacataggtaaatataaggagcatgaagttcctagcaaagtgtgaatgattgtcttcctaaatgaatgtatgatagcacggaattcccttttgaatgcaagtgtgtgcataatgtaaatagctcgccagtatgaataaatgtgagtgaaacaatacaaatctgtatgatgtatatttcaaacatatg

SEQ ID NO: 178916 - DNA, 355 bp, Glycine max
cgcttagcgcggaaagatgcgcttagtgcgactactctattggacaacagggacttagtgagcaagctcgctaagcccaaatccaacaatttgaaaaacggagagataattgcgcttagtgtgatagggcatgcttagcgcataacaaaacacaaaaattctaagtgtttgagaacacaacacttgcttagtgtatagacacgcttagcgaggtcatacgcaattgaattttcaatcaaagaagatgaacgcgcttagagggacatggccacgcttagcgagttcatctggaaatccagatattcaacaaaaaatgatgaactcgcttagcgcacagccacgcttagcgcgctaa

SEQ ID NO: 178917 - DNA, 362 bp, Glycine max
cacatcacttcctcaatggagaacgtattcacttttgcatagatactagatgattgatgacaactattggcaattgctccatcaacgctagaaaatgttctagagtcacattgactttgcatataacaataagcgtcttgcatccttaatcaatcgcctagcagatggatgtccaactaatgactttaccaattcatgattatgactctcacacatcaacttcaccatacaaccttaccctccaaccaatggcttctcatgaagcttgaaggaacacccacatttcctacttccagtatctctgttaacaaaatctttcttcctaagctatactaaccactcctttcacaaccaattaacac

SEQ ID NO: 178918 - DNA, 348 bp, Glycine max
tctgtgtggtggtaggtagaagatcataaaccacatagtctggcgacaagtgcagattttgtgattcatggctagttgggttaccaagttaaccaaggcatttagtttaccttcaagcttcttagtttcggctgatgaagatgaattcgtggctactttattcactcctctaatgacaatagcatcacttctggcactaaattgttgggagtttgaagtcatcttctcaattaaatttcttgcttcagtaggggacatgtctccaagggctccaccactggcagcatctatcatacttctttccatgttactgagtccttcataaaaatattggaggagaagctgctc

SEQ ID NO: 178919 - DNA, 379 bp, Glycine max
  unsure (1)..(379): unsure at all n locations
ctcgcccaggagagcaagggtgcttcctttctaagcaactgtcttctggaggaatcttctggccaagagggtctggttgctatctgcacccctcttctatttttttgaattctctttccgaaacgctacgaaactctacgaatttcgtaacgatgcttattttccttccacaacgttacgaatccttatggattaaggatttacgcttttttttagctatcggagaacncacgtgaactcatagattgcgcaaaaacacctcttttcgatttccgccacattacggaatatcacggatcgcgcaagcctgcttcctttagatttctgagacgtctcgggacttcatttattgcgtgtcatcaagagataatccccggaa

SEQ ID NO: 178920 - DNA, 360 bp, Glycine max
gcaaaacatcacctgagccttatacaaaggggaaaacaaattaaagcaaaaaaacctagggtttacgcatgaaaacaacaatctaacctcggtgaacctgtcaaactgctcctgcgacgtgccgttaggaggatccaaccgcagcacgtggatgatcttcgcgaagtagtgcaagtaaacaacgagcgcggtgccgtgcgccgcggcggcgacggaaccaatggccatgaggaaccaatcgaagcggtcggcgcatgctaagagctgcgaaaacggaaccgcggcgggcggcggctcgatctcctccggctcctccatctcctcctccgcctccacctgctgcgacgcggaggtctctgc

SEQ ID NO: 178921 - DNA, 410 bp, Glycine max
  unsure (1)..(410): unsure at all n locations
tactcagctgtattcaatgacccccaaggcaactctaactttccaaccattttccttcttcctgctttctagntnttttatntttttttttaattttttatgcagctgaatagtgtgcttcatgttatgttcttgcagagttgctgtggataacatttcaagcggaacagacactgtcataaaggttccaaattcacctttcgttggctttgtcttttctgcattgccaaagggtcctttttctctttgtgtgaccaattttccgtgtgtgttgttgcangttgatagcgcgaacaatcgtgggagcttgttggaggtggttcacgttctcactgatatgaatctcagagttagaagagcttatatttcctctgatggagaatggttcatggatggtacggttcccttca

SEQ ID NO: 178922 - DNA, 408 bp, Glycine max
  unsure (1)..(408): unsure at all n locations
acctgcggcatgcaagctngttatgtgaaanctttcattcttttgttaatgncncacaaagcctttactgcatctagttttctcatcctttatccgcaagttgggtctcattaacatttacttttcaactggaggggggtattaaaactgtataaagggatgaaagttagttttttcagttagaggttggttagattagttggcaattagttagaataaagttagttactgattctgttaagctggatacaaacaccatgtatataactttgtatctcttcattaccaataatgagaatctggagatttctttgctgcagacagctctctcttaatagcgngtcctatacatatctaattcaatactcttgtaaaactccagcatatatactcgttgagaaattgaat

SEQ ID NO: 178923 - DNA, 300 bp, Glycine max
ctaatcttcatgttgctcatgttgcaccctatctttttctctgacatcacacaggaaattgcctgatataagagattatcattttgaatgagtattgggttgatgaccgaaaattgtacttcatatcttttaagctgaccaatgggacctaatgactacatgaaggaaaagacaggggggagaatgaaaaaatgaaccaattagggtgtagaagacaataagggtggtgaaggagactgaaaagacatatgaatatactttccaacaagtgtagaagagcaaagttaaagaggtggagag

SEQ ID NO: 178924 - DNA, 346 bp, Glycine max
ggaaatggtggtccttcccttttgaccagcttgtgaaaatggaggaagaatgagcaactttggtgagttttggattttaaatggacttgtagaagaagcttatagcatgttccattggattgttgtgtaggcttatcttagtcactcaattttgacccatgaatgacccttgcttagtcatggaaaatgtgtacatcactaccaaatgtggtgcacatatttttctctatcgatctgaccaaatgtggtgctacccttatcttccaagggtatgccctctattggtggacttcccttgttcgggaaagaaggatcatggggatcctctagtagagtattggaatga

SEQ ID NO: 178925 - DNA, 337 bp, Glycine max
  unsure (1)..(337): unsure at all n locations
tctatagaaagttcgttcctaatttctctacaattgcattacctcttaatgagctggtgaagaagaatgtggcatttacctgnggtgaaaaacaagagcaagcctttgctttgctcaaagaaaagcttactaaggcacctgttctagctcttcctgcttttctaaaaatttgagctagaatgtgatgcctctggagtgggagttggagatgtattgttacaaggtgggtaccctattgcttattttagtgaaaacttcatagtgccaccctcaactaccccacctatgataaagagctntatgccttaataagagccctccaaacttgggaacatta

SEQ ID NO: 178926 - DNA, 394 bp, Glycine max
  unsure (1)..(394): unsure at all n locations
agcttgtttgtctggagaaaatagtttgttttcttgtggaanganaagccacttttttctgtatcaacctggacactttagaagaacaataacatggttatgtaatgtgaaagtgaattactatggcatgcacatttgataagctacattggggttcagttattcgctaaagtgtgtgaatcttcaaaacttgttttattatcatatctatatctatgattttatatagacttaattgcaaattttacaactcaatttttattattttgcaaattttattatcgaagttttatttctgcaaattttttcactcaggttttcaatgtttgaaattttaccaccattgacgaaagatagatgattntgacttttgacatcggttgtaattatcacc

SEQ ID NO: 178927 - DNA, 432 bp, Glycine max
  unsure (1)..(432): unsure at all n locations
gaagcttcaaatagcagaattagaagaaatgtgcctcaatgcttatacttcttcccagcattattaggagaaaacaaaggcatatcatgacaaanagctagtgtagagagatttcaaggaaggacaacaagttntgttgttgaattcaaggttgaggctctttccaagtaaactaaagtcgaaatggtcaggctcatttgtagtcaagggagtgaagccttatagaagaatagaaattgaaggctcctncactcaaagaagttgggttgtgaatggtcatangctanaaccatatcttggtggagaatattaaaggatggctacaattcctcatttggaggaaccttgatccttctcatncgtcaagctagtgacgttaaataagtgcttatgggagggcacccactcttctcattctcttctttttaaata

SEQ ID NO: 178928 - DNA, 402 bp, Glycine max
agcttaggatgagctctgcctatcatacttatatggatggacaaacggagggtgcaaaccgagtggtggagcagtatttgtgcacctttgttcaccgcaaacccacgacttggggacgatttctgttgtgggcggagtggtcgtacaacacttctgttcactcggcaacgggattgactccgttcgaggtaacctttggtcgtaaaccgccaaattatcctcactatgtggaaggcactgcaaaagtggaagcagtagatgaattgctgagccaaagagaagtcgtattcacgttattacgtcaaaagttgtttaaagctcaagaacatatgaaggctatcgcggatggtcatcgccgagatcaagaagttcatatcggagattgggtcctggttaaactcc

SEQ ID NO: 178929 - DNA, 436 bp, Glycine max
  unsure (1)..(436): unsure at all n locations
ctcagctaatcttatgttgctccnctatctcttactattattcctgcttgacggatttgtatgaaatacagaacgagataacatattatcatctcgggtttgatttcaacctggataacggtcttccccggtcatcttatgataggttcaacctggtgatgttccctttcgctttgtagagcttctcacctaaggccgtgaggatttactcgagtaacacattaaactaactgcgttagattaatctggaccttgcctatgcttgtcacggtttcaagggaatgagtttatcaagagtgtgtctttgttacttgtgcaagacgagtcatangggtagagagacttaccaagggcagaccttgggtttgatgagcctttggagatcaaccggggatatgttccttctagatttgacgagactcactaagggcggacc

SEQ ID NO: 178930 - DNA, 392 bp, Glycine max
agcttcatccttagatccttgttgttgttactttacttagaccaaacatcattattgtaatagcatacttaaaaccaaaacttaatccgcagatccctcttgtaagactaagtttcaattctgcttcattcaagttctaaggcaacaatacatttcccaatgctaaagtcacctaactatgcacacaaatgggtgatcagaccaagagcatacgaaatttaagcactaaaagaagcattgaacacaagaaacacaatcaattagatattaaagtaattacatcaattgttctttagaaattctcaacaagggtgtttagccagccattacagaagaaaccctaacaataatgagattacaaaacctaggtatctctgcaaaagttgctcctc

SEQ ID NO: 178931 - DNA, 423 bp, Glycine max
  unsure (1)..(423): unsure at all n locations
gctttggagaaacctggaccactcatttatntataaaggaagtcatatctagtcaaggtctgagagaccatacaagtttcctaacgatttctaattatgtgggccattaagtctatcatatgctgacaatagccgagaagcccgtgaatctcttcgggggtggagtaggtgtctgccatcgccttggccttggctaacaatcggngaagttcttgactcccgttcaaggtaagagcaaaccgctccatccacatggttgcctcttggtgtaaagagtcgatcacccttcctctagcctctntttccgcatatacttgagcatactcatccgcgattctatgctcgtgggccgtggctagacctaactcttcttcgtacttggcgatgatagctaacatgttggtctctgtctcgcatagatgc

SEQ ID NO: 178932 - DNA, 405 bp, Glycine max
  unsure (1)..(405): unsure at all n locations
agcttgtcattggagctgcccttttatctgttttaactctttnatactggggattcctaggctcttgaccttgacttgatagaacctctttttaagcgaaggcatttgacttgatcccatgttttactaaagtgaaacaaaatctagtgcgaatcaaaactctgacatctatcatgggtggaatggatgaatgcatgaagaaatgcatatgacatagatgcaatttatgaatacgggagcccgggaaattgtctccgtatttaagaaggtgtcgcggaccctccgttggtttgccaaagagaggggatcaaaatagaatccgtgcgtgatgcatatgcgataggcgcaacacgggaatgtacatattttgacaatattcacaaaatataagcaaaagggtacatg

SEQ ID NO: 178933 - DNA, 387 bp, Glycine max
tccatcactaggcctacaagctccaatggagcttacatcactaggtgtctgtataggtgtcatatcatcctatctgaatacttatctagtatagaactaaaccgcaaaagattggtttggttcaattcggattttattttaaatgaaaactgaaccggatgtatttgtaaagcttgatttgagtgactttttgatcaaaaaccataccaaaacgaacaatagacattcctagtttgtagtgacatttaatatatcttcacccaaagtagtccatgcataagttcacaagattttgcctgcataggatttggagttccactgaaatgcaaagtcttggttaatatctatatgagacatattttagatatcaataaagatttctttatg

SEQ ID NO: 178934 - DNA, 367 bp, Glycine max
  unsure (1)..(367): unsure at all n locations
agctcgattggcgagaggattttattcttatcnttcactcgggtattagccaattcaattaagaaaaatcccaaagaaaagcgtccgattaatttttttggattattctattcaaagatattttgattattctattattattttgcctcttttgattttaaacgtggttacggcgtgaaagatcggttggattttattttaacagacattaaccgatgttacaactcaaatgatcagtggaaatccattttattattgattaggcgagaaaatggcttaaataaatggttaaagcacgtcaaaagggggtacggaaaattaaccaaatgaacactaactatcgcgaaacaagtggggaccattaagg

SEQ ID NO: 178935 - DNA, 411 bp, Glycine max
  unsure (1)..(411): unsure at all n locations
gacctttaatctcagctgtgctataactcantagaatcttacctgctccaattgtatagacattgttcaagccacccatgacctcatgggtgacaacgtcactggtgtcccagacaatataatgtggttgtcgtagaaacattgcaagagggtttctccatttctcatctccgcatattccggcattggcatactccttgttggatatttctgacgcaatatttggaccaccaagatacagtatgttcttcataagcactccacctgtcaaagtatgcattgtaaagagttgagaatgaggaaagataaaaatagatatactaccaaagtaccagcttccattggtcgttatcaaacacattctagatacaaatagcacagctacctggtggctatcagttatattgattt

SEQ ID NO: 178936 - DNA, 234 bp, Glycine max
  unsure (1)..(234): unsure at all n locations
gtcgcaattcccgatactttcacttgttgattaatgcgatgccgcacaaaaaatcgtctgaaaggaacgattattaaagggtcggggactgaggagctgacaattgtcaaagaagcagtgagggggttcttcttgaagtgtnttccagaacctgactatgcaagacctcgattggatgggagtaccattatgactatacacagcctcccgaatgatatgctagtgggtcgattt

SEQ ID NO: 178937 - DNA, 473 bp, Glycine max
  unsure (1)..(473): unsure at all n locations
tttgagaagacaatntccaattacgctctcttatgcaatgatctttaacaagtcgcagggacaatcactatctatggttggactttatttgccaaaacctatttttagtcatggtcaattatatgttgcattataaagggtcaactcaacaaaaggattaaaaattttgattcatgataaataccagaaaaatatgacttctactaccaatgtagttctcaaagaggtcttaaaaaatgtaagaaggtaaatataacttctgcaaaagcccaattattatcatttatttgccgttttactaaactgataacttactcatatgtattcaaatatgtattctaatatgcagctcaatataagatcatatgagccacagttaaattttctattgtgaggtacataatgtcatctgctatattaaaatcttccaattgacaattataatactctcttggccttataaatngcatcta

SEQ ID NO: 178938 - DNA, 438 bp, Glycine max
ctgcaagctaacgtgaaggagcagactttattatctttttcctgcttaatacaagcttatgtttcttgtgtccagctttgcggaagttgtgtgattaattaataattagtgtacacaggctgttatttatgctgctaacatgttctctagtccaagatgattgctaacttgactttcaaattacagaactcgttttaactatacaggtaatacctaattactcgcttatcgcatgcttaatatctgtaattactcttaccgggtatgagacatgtattttatctatgtgtcctaggcatcagccacagctttctgtaatgacaatatttgctttttgagaggtgacttctttgcgtcttgttaaattatgcatatttataggatggcttgattctttctatatatgacaagtgttatgatgcaattctctctacatat

SEQ ID NO: 178939 - DNA, 458 bp, Glycine max
tcatatcttagtaattcgtggaatgctacttctgaattctatttggtatgcatggcaatatttccttgccccataaattaaatttcaggataataagtaaatagtttcattttgtcttttttaacaaaactcacttgacaaaataggaagttcacctatcggatctacttatcatttatatgtattcaactaatatattaacctagtaatccacataattatccatacattgtggtggatttaaggtgagtctatcaatatatttttttaaaacattttcattctccaaatttcaagttttcttttttggtatacaatggttattagaaaccttagatcttgtgtatactctctaattaaggggtttgatagaggataaatttttagtactccaaaaattataagctgggaaccttaatttttcatatttgcgattaatataagaaataacactcatg

SEQ ID NO: 178940 - DNA, 445 bp, Glycine max
  unsure (1)..(445): unsure at all n locations
gtcacctgcggcatgcaagctnntatatggctgaacgcatgtattttattctcanagggagntttattcagaaaattagaggttatctcttttatcttagtgagagtgaggcaagaacaccctggctgtatcaaaggactttcacaacctttgtgtgttgccctcgccggaaagagtgattctttccttactttcatcttcaatcttgttctttcaaaccacaattccagaaaatccacttctgcccagaattatctcgtggccataactcccattttacgcactcaaattaagtgattcttgagcctaaattgaatttcaaaatgagacctttcacctcgctttggaatcacctcatttggagccctgtaacttgagttatctgcatttctatatttctgtccagccaccacttaatcaatttccgcattcattaagaaccacg

SEQ ID NO: 178941 - DNA, 424 bp, Glycine max
  unsure (1)..(424): unsure at all n locations
ctntntgttcgatgttgcctaataaatttacaatgcatttcttctatgctaggtttcttcgtgcgaactgaaccgaagttgtgtttcggccgactggcatgttctcattttgtcggccaggaaaacattagcccacctcggcataaaaaacatgattcaccgatatttgacaggaaaagaaaaatgctagccgacgtcggccaggaaagatgaccgaccgaggtctgaaaaagaagcatgaccggatgactccggtcgaacatttcctaacagatatcatccaagtattattcagggattgaatagaaaaaacaatagccgacatcggtagttaaatagccgtgactgatatttttcggccgacattgcgcaatttcttttacaaacgctggccgttaatatttctttacggtaaaggatgttt

SEQ ID NO: 178942 - DNA, 456 bp, Glycine max
  unsure (1)..(456): unsure at all n locations
cctgccgcatgcaagctgaggcctggagctctaattgtttatttcttnacttcttggaagatgaatggcatcggaatggagaaggaagatagagaggagacgctccttcaaggagaagatgagtctagaataagctcaccaccatacgaggccatggataagagcttggaggaaaaagaagatgaatgaagggagaataacagacgagcacgaaattttgtgctctaaaagagctctgaaatctgaagtttaattttcaaatgatcaaagttgaaaaaatgcacacacatgacctctatttatagcctaagtgtcacacaaaattggaggaaaatttgaatctcaattcaaatgtcacttgcatttgaaattgaatttgtggagccaaactttggagccaaaatctcactacttatgattagtggaatttagttatggttcagcccactaacccga

SEQ ID NO: 178943 - DNA, 465 bp, Glycine max
  unsure (1)..(465): unsure at all n locations
gggcttatcgcgtgaagagatggcgcttagcacaaggtttgttcttagcggataagcaatctgaaaatttttctaagtcattttatgcttatctcttcacacataatttaaaaaccctttttgttcattactaaacaagctgaaataaatcacaatcacaagcaagatgtcctaactacatgcaagaaatagaattgaagatagagaagggaaagaaaaactgggttgcctcctagtaagtgcttctttaaagtcactagcttgatgcatcatcctattatcttggatctaataaagttcccacttcaaggaccttcttctcaggtcttctttcctccatcacatgaactttaaaacaaacattccggtcaggtggatctttatcttcatgaaatagatcaaagttgattttctgatcttctatgcctatntgcaacgtcttcttttccatatctactacacaac

SEQ ID NO: 178944 - DNA, 444 bp, Glycine max
  unsure (1)..(444): unsure at all n locations
agcttctcattaatagatctatctactcttgttcttatttacaccagngtttaaattttattagtaaagcaacaaagatcttcgcactcaatcaaacgatattaataagagtgaacactatattttttgttagagctgagtgaatatagaattagacagtaggcacaactttaaatagattttaagtaaaggccaactttaagatttaagtgtggattcggtcctacaataaaaggagtaaggaatgttgtaatttcctactttagtcatcactatcagtttatatttaaactgtccaacctcgagacatatgtcaattatatatttgtgcattgttatttcgttcttgattttttttttttttttgcgggattattattggaacttggaccgatattttttctacatgttgtacaagggcgctatttctagttaaatattact

SEQ ID NO: 178945 - DNA, 412 bp, Glycine max
  unsure (1)..(412): unsure at all n locations
tgcagttaaaatacacacacaaattaaattaaagctcttcattctctttatttggtgcattattcatggcttatatgtgtttttatttttttggtgatcatttggtgttcatggtacatgttgtatatatataatacaaataagactattatgtaacttaattcgagttttatttggattctaagtttgttgttcatatattactattattgtccattaaaaatatgtgcattttaagtgaaccctagtttcccatttgagattccatacgatgattactatggatagtttggattagttatcgtatggaatcttgaattgtccgtttggacagtttgngaactctttattttttttaatttattcggcttataggttaagatgttggttacattgataaatttggttaatg

SEQ ID NO: 178946 - DNA, 437 bp, Glycine max
  unsure (1)..(437): unsure at all n locations
tgcagctttgaacctatatgcaaggttgattanattttggacngnntctaggtgtattcaatgaaaaatgattgagggttggctgattgacattatacaattttatactttctagttcctgtattttttgacaatcaaccttctctaattgcctttttttagagtgttggttgttctaaattgcattttgtgcattccaaatatggttctttgcaattttttgatagttgcaatacttggaaattattttatctgacttgggaggatgggagttgtggattgttggccagtgccaaacacaagttgtgaagaccatgattattgaacttagactatttgtaatactaaatgtgcatttgatttgagtcattgcgtgatgatagaaatcattgaattgctatttcttgttaccttttattgctaaccatttagaaatt

SEQ ID NO: 178947 - DNA, 444 bp, Glycine max
  unsure (1)..(444): unsure at all n locations
tggagaacattatttttcggtcttggacttctgaaaggagcaaataaaggcttcccttattcttttgtgcagtgggcatctaatcccggcatgtgcattaagaacatagtttgatttgaatcctttggggggacaatagttttcgctggactatgctggagttatatatctctatgcattctatgaatcctttgggttgtttaacgagtttggtgggcttaacaatcattgggtcatttaagtccaaaccttacatttcatccaacaagttcggaatagttacatttacgcattttgcctgtcacctctaccgggaacgttcctattttttaattagttaactttttagttactttgtctaatataacctatctcacctatgcaaataaacattctctattacacatatttaattggtgattgaaatctgntaaaatcacaact

SEQ ID NO: 178948 - DNA, 444 bp, Glycine max
  unsure (1)..(444): unsure at all n locations
cctgccgcatgcaagctttgaagggatatctagagttgattgtttattttacaaatgagtatatttagatggatttgtggctacacaagaaaggacaagatacaaaatgattgtgtaccgcgagacattcgtgtgacacctattgaggaaaagatgacaaaaaatggttaagatgctttgggcacatgcaaaggccgttagaggcattggtgaggaaagtaaattgtatggtttttaaccctgtgaaaaagggtagagggaggccaagaaggacgttagaggaaattaatagaagatatttcatgctggctaatattcttgagaattggtttntaaccaagtccaatgacatgtgatccttgtaaccaacctcacctagtgagataaggctattaatatttgtttattcttaagggtattattctgttttagaagttttcctct

SEQ ID NO: 178949 - DNA, 462 bp, Glycine max
  unsure (1)..(462): unsure at all n locations
tctatagtccaacttgtgcctccaaggctattttgtttctttgcaactacatgtagcagctgataatcataatccatgtctgctataggctagcaaatggaggtggttcttatggagtgatctcttgcatctgaaaaagtacttaagattgttggcttggatttcatcattagaaatactccctctggtcctttttataagaaacaagttttagtatatttacactaaaacttgtttcttataaaaaagacaggagataatagctcataaggcacagataagaaaagcttgtattgctcagagatctaacttttttttttatcaccttttctcttcaaaaaaatttatgtgctgaaaagcatgtntgtctctgggtcatgatgtccttaataatggttgtggcaattgaattcaaagactggcccatgccattngattaactggatatgtggcatgaatctc

SEQ ID NO: 178950 - DNA, 432 bp, Glycine max
  unsure (1)..(432): unsure at all n locations
ctgcacttggctgagttagtattatagagggaacgctcgcttttagtttaaaaggcttcctcttttttttttttttataaagggtatgctacatgtctccttttgagtggagcaaaaaggggcccactttttctcttggtgtgaatcatactcaatcataataagagaaaaatctgacctatttgaaactctaaaatccagcctcggtttgcgtgtcattactctggatccagtccctcgcgtttctctgcacccgtcggggccaagtttcgaatgtaggcaatatatatatcaaaacgcgtagaatgaaaccccgagcgtggttcagaggttggattcgttaaattataatttgcacgcacaacaatattntgtagactaattaattgagaattaacctataactatccaggtatggatctctcttcctta

SEQ ID NO: 178951 - DNA, 467 bp, Glycine max
tgcttctacaatctcccgcttgttgatgatgacttctctaatatcaagaaacacacacacacacacacacacacacactttttcctagtcgatgactcacataaatttccattctccccctttgtttttgagtttatgcttcagttgaaattaagttaattacttgtgtgagttcttgatttattccctatttctctccccctttggcatcaacaaaaagccaaagtgcgtaacaagtataagacaaacatatactattaatcattcacaaggcatacattgaagaatataaaccaatcatgaagcaagaaacatgaatagattaaatatataaaaaaaccacatagtcatataatataattcataattgttcattcacaccatgcagataaagaaatactaaattatccagatgtcataatatagccaaatacgcggctagaaagcaaagtactagtaatattaaa

SEQ ID NO: 178952 - DNA, 439 bp, Glycine max
  unsure (1)..(439): unsure at all n locations
agcttatatagttccccaagtttggtttctttggagtanaatttggaaataaatcttattttatggttaacgctgtctctagaacattttcattggatttaatgatgaaatatgtgcattttcaggtgaaaaagaggctaagttttgaattgcaaaaagtagcagttgggctaagcacatatccatcgctaagctcaacagttgggtagcttcagcgtgcttagcgcaaaggagaatttggcatagcatcaacatcaaagctgcgcgttgttagtcggtgaatgcgactaatttttgtgtataaaacttgtgtaaattgtatcaaaatcctccaattcatggttattttgtagtgttgtaattaatttttgttaaagataggtaataattacatagtacttccattttgtgtatttaataatcatatcctctcaatttc

SEQ ID NO: 178953 - DNA, 463 bp, Glycine max
tgctggggggctttatggggctggatctgtttctttatgaggtcctttaatggtgattttccaccatggagatgcagcggaagacataggagaagaggtgagaggaggcgccatccactatggaataagccatggaagaaggagcttcaccaccaagatgagccttggataagaagcttggagaggatgcttctatggaggaaaagaaagagggagagaaagagagaggggggagcacgaaattgaagggagaaaaagggagagaagttgaactttgagttgtgtttcacaagactctcattcatcatagttacaacaagtgttacacatacttctatttatagactttgtagcttccttgagaagctttcttgataaaacattcttgagaagcttcttagagaaaactctcttgagaagatagagcttagctacacacacccttctcataactaagctcacc

SEQ ID NO: 178954 - DNA, 400 bp, Glycine max
  unsure (1)..(400): unsure at all n locations
agcttaagaccgactttggccttcncttcgttgtcaaagaagtgctcaatgtgtatgggggtaatctccatggagggaatgctcatctcttggtgtggactttcaaaagacatggttgagttttcggttagggtttaagagaaaagttttcttgtggcttttttattgatatttgagagagattaatgtggttactggaacatttctggctttgtgtataatatacggagaaaagaggggaatgtgggcaattttcttggacttttaaagagaatttgattagcccattactcaagtatcgacttagcaaagcacacacacattacttttcttaccttaaaacactacatttcatttaatgtatgaatgaatgtatgtatgtgtctagtctttgatcatt

SEQ ID NO: 178955 - DNA, 222 bp, Glycine max
gcaaaatcatcgggatatacaggttgggggacgccccgcatcatatggtcgccggggaacatgccgcatatatttattacaatgcacactattatgtaacttaattccagcctcagctggattctaagattgtttgtcatatagtactcttataggccatcaacaacatggcatttgtagtgaaccctagtttcccactggagatatcataccacgattact

SEQ ID NO: 178956 - DNA, 343 bp, Glycine max
agcagcagcaagagaagcgagaaagtgtctttaagccaagaaccacaggcgacaagccccaagagggcccacgaacccgcccatagccaaaagaaggacacgccaccaaggccctaaaacaccgccaagggagagatcaaacacggggtggcaccaccaaggccacaagagtcccaagcacatgaaggcaacccagaagaaaatccttggggaccggctgaccgacggactaaagggtaagagacaacgaaaaacccgggaaagggacaacgcgcggacaaaaactcccgagaaacaaccgggaggagcgggaaacaacatacgcagagagacaaacagcagc

SEQ ID NO: 178957 - DNA, 359 bp, Glycine max
ttttttttccgccttggcacccaccgatgaagatgccgacatctgaaatgtgaacccagcttacgaggcgagggaagttcaagatcagatgctacttaccaggcttcaatagacactttcgaagtcaatattatcttgtgaacttggatcgatccactcgtatcaggtgcgggataagatgcacaaacattgcttcactcagacaaaagcttgtgctagtgaactttgaacggactcgcacaccacttctctggaacgcaaaaccctatgctagttcttgagttaatcaacaacattcctgatgagactcccccatgggagtccaattcacatgataatatgtgacgatactggaggac

SEQ ID NO: 178958 - DNA, 388 bp, Glycine max
aaggcaaggaacattctgggtctttctttgactaaagtacacacttgctcaaactcatgaaaagaatcacacactccatcaaaatcatgcacatcaattcaaaataaagacatacacccattttcataagtcaataaaagtgttttactgccatgtcatcaaaatcaagtcaaactgttcaaaatgcttcaaaaaaagaaaaccaactatccataaataaaactaacaaaaaggaattattgtactaaaaccatgaccatcataatgataatctaaaaggcgtcaacgaagaacacacaaatttatcaggaatgtcaacattcttgtcagtatgagccacaactatctcagcaggccatccagtcataaaagtcagaaccatcgtcta

SEQ ID NO: 178959 - DNA, 357 bp, Glycine max
ttcatgataaccaagatgacgactttcaagaatgaattcaagaatgagttccagattgagtcaagaacacttgcgggatcacgaggaaagaatcaggaatcaagatttaagagtgaagagtattcaagatcactattctagactcgaatattcacgaatcacgagaagacttggtctcgataagtattgaaaagtttttcaaaccattgggtatcacaagaagttttcacaaaatcattaccaaagagttctactctctgagaatcgattaccagattatagtaatcgattaccagtggtttaaaatgttagacttcaaaattcgcatcgaagagcacatctggtgagcgactattt

SEQ ID NO: 178960 - DNA, 471 bp, Glycine max
  unsure (1)..(471): unsure at all n locations
ntgcttctacaatctcgccctttgtgatgatgacaacttcttttttctagaaacacacacacactntttcctagtcgatcactctcataaattctccccctttgtttttgaatttatgcttatcttaaaattaaattaattactcatgtgagttcttgatttaattccatttctctccccctttggcatcaacaaaaaagccaaagtgtgtatcaaaatttaagtatgcaaatataactaaacattcatacagcattcatgaaaaaccatcaatcaaatcatgaagtaagaaccatgaagcaataatcataaataggttaactatgaaatccacatagtcaaataacatacttgttcaaccataccatgcaaataaggaaatagtaaattgttcaaataccataataatatagagaattattttgataagtcactaacatctattagtcctaattctcttctaatgttata

SEQ ID NO: 178961 - DNA, 435 bp, Glycine max
  unsure (1)..(435): unsure at all n locations
gcaagcttccagattggtgtaccacgccattgcttcncttgctaagctgncttgaaagaagtgcattaacagcttttcgtccgtagaatatgcccccatccttcggcaatacatccgaagatgactttttggacacgttgtccctttatatttatcaaaatctggtactttaaacttgggaggaatgatgatgtcaggtaccagacacagattcgctaaatctgagaacgaatagttgccgaggccttctaccgctctcagcctctcttcaagtagatcaatctttcccttgtcttttgcaaagggaacgagttccttaacgggtgcggatggagacgggacgtggcggactatgattggttggggcaattcatggggggctggttccttgaggggaagtagagagcctaaatgggcatctccttcatcatcttc

SEQ ID NO: 178962 - DNA, 464 bp, Glycine max
  unsure (1)..(464): unsure at all n locations
acataatacatggcggngtttggtttttttcatggataaaagggatgccccacattatttccatgacacaaatgcaaagatgatgatttggaaattttaagcaaaactggtcatgcatgcacctatgcggacactcaactgtcaaatttttatggtcatatgatgctagggctcaggattcatttcctctattntaaatcaacccaatgtttccaaaatatgttcttttatcaatttgtgcattcatcctagtccattttgggtactcgggaaaatttcacagcattcacccttcaggtgtacacacattttttcaaaaactagttatgatcagtgaattttttcaaagaaaagttggaagtcatctcttttcaaaagcatgttggttgttcaactagacaacttattntttctttnttttggtgggttttttgtgaggtattttgctacctaaacatatatag

SEQ ID NO: 178963 - DNA, 372 bp, Glycine max
  unsure (1)..(372): unsure at all n locations
cttatgccaccagnacctggaaggcctctcattgtgtacatgacaatcttggacgagtcaatggggtgtatgctggggcagcatgacaaatccgggaagaaagagcgcgctgtttactacctaagtaagaagttcacgacctgtgagattaattactccttgctcgaaagaacgtgttgtgctttagtatgggcataccatcgcctaaggcagtacatgctgagccagactacctggttgatatccaagatggacctggttaagtacatctttgaacagccagctctcacgggacgaatcgcccggtggcaagtcctgctatccgagtttgatatagtctacgtcacccagaaggcgataaaaggaagcgcc

SEQ ID NO: 178964 - DNA, 467 bp, Glycine max
  unsure (1)..(467): unsure at all n locations
tgcccttctccatgcaatgtccttcaccctactaacattgttctttttctcttcttgcaagtccttgcaatgtctgaatagttcatcatcatccaacctggtgcacaaaaacttggccaacacaccgccaactttacaagatagttggtggttcgacctcacagccttagcaaaagcaacagtggcaccaattacattggggcgctccactctccaaacagtgtgagcagttgccctccattgggaaactttagcctccaaaaatgtcactttgcccaatgtctactgatgtcgctgctcattttactcaaggattgccagactacattgaaggaagaccttggcaaaattcgtggcatgttggaacccgactaacctgataagatntttatcanagactgatacaaagccagtcagggtcttctattcgggtttgtaccccatgcccccacaatggaagtgtagat

SEQ ID NO: 178965 - DNA, 393 bp, Glycine max
  unsure (1)..(393): unsure at all n locations
caaggggagagggtgagaggtcagaantaaagaaggagaggaggaaacacaaaaagagaaagagaagaagaaaaaaaagcaaagctgaggcgttgccaaatcgaaaccggggatcattccctacatcatttctctcgctagccttgtaccccacgcaacagtcgattagtttttcttaagagttgaatgtaatctatgtacccttataggccctctgagatattatgcgtgtatttatcttctcccctttatcgatggaaatttcgtctcattcgcaaggcttaattctagtcgatcactagtgtcatgaaatttgtttttttagtgagactgtgaggcaataaacaaaaccaacaatgataaaaaaatcaattgataactattggatcgagt

SEQ ID NO: 178966 - DNA, 442 bp, Glycine max
gtgtcattctaatgaggttgagctaagcgtgccattcttttctaagctccaactctcttctgttttgaaaattgtagacttaagctacgctcagctgttgcgctaagcctaatgtcataccctaatttcgtccgggaacctttgctcgatgacgtgcgaccattctttggtcctcgtgaggtgcttggcacccatcattatgcaatttgtgaaattgcaggacatgccggaaaaccaaaaaaatattgatgcacaatccgtaagtttccgtgacacaccggaaatcaaaaggaagcgtcgttgcataattaagtgagggtccgtaacattccgtaagtcaaaaaggggatgattatgtaatccgcaaggttcgcgaacaattacggatagaaaacaagtatcgttacgaaagtcgtaagtttgcgtaactatacgaacaaag

SEQ ID NO: 178967 - DNA, 404 bp, Glycine max
aaactttccaagtgcatgttttctcaacctcaagttgaatacctgggccatgtggtatcggcacagggagttgaaccagtgatggccaaggtgcaggccatacagcaatggccggaatcgcagtcagcacgcactctcaggaattttttgggccttgctggtttctatagacgcttcattcgcggctatgcaaccattgcgacctctctgaccaaattggtcacggcggatccttttcagtggactgaggaagctcatgctgccttcgttcaccttaaacaaatgctgacatctactcctgttttatgattgccagatttttccctcaccttcacggtggaaacagatgcttctaggacaggcatgggagttgtgttgtcccaacagtgccatcccattgcgta

SEQ ID NO: 178968 - DNA, 465 bp, Glycine max
  unsure (1)..(465): unsure at all n locations
actaagcttacactgcctcactntatctgtttcgcaaaggttggttatcttatattgcaggaattgctgggtttactcttggaaattggttggggttttgctttgggcaccagcccaagcaaatttgggaaagtgataaaaatattctcttcacttattttttaaaagcgttttgtgtttgttcttatttctgccgctacagtatcttcttctccctctctttgagcccattttttgtcgcgccaccgcctctgttgttcgtgctgccggcgcaccaccagtgacctccacggtagtaaccttgccgttgcccatccccgttgtaagatagtttctctttgtcattctttgcgcattcatggtggcggaattgaggattcatatagacaattcgtatggtttatacggattattaatccatatatctatcttaatttaatttttaaatttgaaataanaaaatta

SEQ ID NO: 178969 - DNA, 436 bp, Glycine max
agcttagccctagaggggatggttctttttgttttggagaggatcaataacaatgcctataggttggacctcccagaagagtatggagtcagcaccacttttaacatttctgatttaactccttttgcaggtggagctgatattgaggaggaggaactaacagatttgaggtcaaatcctcttcaaggggaaggggatgatgcaatcctccctaggaagggaccaatcacaagaaccatgagcaagaggctccaagaagattgggctaaagctgctgaagaaggccctatggttctcatgaaccttacggtagatttctgagcccatgggccaaggttgggtccaattatctttgtacatattagactaggatgtcattatatgtggtccttgtatatacggctccatattgtaggtagggtaccctataaatata

SEQ ID NO: 178970 - DNA, 452 bp, Glycine max
  unsure (1)..(452): unsure at all n locations
gtggtatcagagcacaagagcttcattatttgctccttaaacctccattaattntttttctttaccttctcttccattgntgtttcttcatttttctccatgtatctcctcacatgtcttgttctaaatgttgttaacatgattctttagagtttccactgattaaacttgctatagaaactagatttgattttctatggttcaaatttgttgttcttgttcttgaaccatgaattgtgttgagtttaggttcctttgagttttgtcttgttattgtatgcggctgaaacctataccataaaattcttacaaaaataataaagtagaataaaacctcataaatctagagtgacttgttcacctattgtagttntgtcatagaagtcatgtctagtcatgaaacttgtcacataagatttcttatgttgtgctgaattntattctcttggttc

SEQ ID NO: 178971 - DNA, 456 bp, Glycine max
  unsure (1)..(456): unsure at all n locations
cctgcangcatgcaagctnttacagaaaactcagaatttcgtagttacaaaaaataaaaaagaagaatagtagcctagtacaatagggatataataacctatcttctaacattccccctcaaactagagcatatatatcatatgcaccaagcttggaacataaaaattgaatcttaggtccccccaatgacttagtctaaatatctgcaatttgatcattagagctaattttttcagtactaatttccttagttaacaacttttctcaaacaaagtggctgtcaatttctatgtttggttctttcatagaatactgtattagaagcaatatgaagtgctgcctgatcatcccaatatagttgcatcagctaaacttcacaaaattcaagttcttggagttgtttgacccacatcagttcacaagtggctaaagtcatgttcctatattcagcttct

SEQ ID NO: 178972 - DNA, 463 bp, Glycine max
  unsure (1)..(463): unsure at all n locations
tgttgtatacctagattacaagtcatcaatgtgttgtttttcaaaatttgtggatactcataaccatgagcttacaccagttaaccacatgcatcatatgcccaggtatcatgtgttgtctaatttaaatagagcataagtggatagtctacattcatttagtgtaaggacttgccacataatggttatctattagctcaaaaaggtggatatggtagcatcggaattttaaaaaatgatttgtataacgatcttcaccgaaagaagcatcctgtaattaaagatggtgatgctcgtgttgcactgagttatttagaaggtgaggctggtaacgatccaacattntattctacaattgagactactagtgatggtaacttgaagcatttattatgggttgatggtcactatagatcggatttccagtgttttggtgatgtccttacctttgacaccacttata

SEQ ID NO: 178973 - DNA, 444 bp, Glycine max
  unsure (1)..(444): unsure at all n locations
aagcttatagacaaaattgccttattantttcaatatgcatgtgaattaggaagcatcaacaagaatcaagccaaggctattctgcaagcaatcaatggggcaaaacacaccaaatgattatgatgatggatggctcaaattctcacaaaggtaaactcatcactttcaaattgagctttaaaaactatcatgacatgtagaggaaaatcaatgatttcaaatcacaaaatgtcaagaaacttttattttcaaaacaattacccatttcttgaacatatcctataatttaaagaaaaacatgcaaaatcgtacatgcacacagaattgacccaaaatattaaactagaaacccaacgaaactaacaacattaacaaattaacaaaaccgacaaaactagaaaaaccaaagaacaccctcccccccatacttaaacaacacattg

SEQ ID NO: 178974 - DNA, 461 bp, Glycine max
  unsure (1)..(461): unsure at all n locations
tgtagaagcaaaaggccagctatggtgttcaaggtgtgttttttaaaaggcctatgactcagtctcatgggtttttttggattatatgctgcaaagaatgggtttttgccacaaatggagacactggatgtctgcctgtctcaagtcagcaagcatttctattcttatcaatggcagtcctacaaaggaatttgctcctactagaggtttgaggcaaggggatcctttagcccccttactctttaatatagttggagaaggcatcacaggattgatgagggaagcagttcagaagaacttatatagaagctatatggctggaaagaaaaaggaacccattaatattttgcagtatgcggatgacacagtttttgtgggtgaggctgagtgggagaatgttattgttttgaaggctatgctcangggaattgaattggcctcangtctgaagaataattatg

SEQ ID NO: 178975 - DNA, 349 bp, Glycine max
tcgttattagacactgattttgtctgcaaagcgcctttaatgtaacacagaccctctaaaccggaaatcgtattacccacccatcgcatttccgaaagagaacccgttcgtatgataataaacaagaaacactggggatgagtggttataagactcatgcggaaatcaacgacatgaagactccttacttctcacttggagaataaaccccaccattcctcaccaaagatactgaaacgctgcttgttccatttcatacaaagaagagaagctttcccaggacctaggcctagatgaagcatgccttatacaagaaagatcacatgggaattttcgataaacggtgcat

SEQ ID NO: 178976 - DNA, 365 bp, Glycine max
  unsure (1)..(365): unsure at all n locations
ctcaagctcgagatgacgaagtgttgaagggcgaaagctgcctcnttttttgnggaccacacagngggaccaggatatatatctgggaggtcatgagaccttggcgacgaccagaggagtgctattgaccagaaccaagcttgaccatatcccgacccaacccaggcataatcggtcagtgagaacctgtgatgtacctaaacaagctatctcctgtcattgagcagataaaaggaacaaagaccacataccatggatgctcgtggcggctgaccacctgtgaactttgtgtgacatgtggtttgtgggctctggtaatctattaccaagggtgggtaatcgattacctggctttaaaatgaaga

SEQ ID NO: 178977 - DNA, 402 bp, Glycine max
  unsure (1)..(402): unsure at all n locations
ataaggaacaaaaatgggcataccagaccaacatcttttcacaatacagtgtttctgatatttttgactcagaaatttccattcatctcattggaaaagtccaacccacatttcactgtatattagattcaacttcttgatatcatgtgctaacgaagcacaagatttagactcatgatattgagttcgggatactcagaaatttaatctacaatgggcattttgttgaataaaaagcaggcaaaaattaaaatgaacaaaatcatgccaataataactatagaacattagacaacactgacaaacttagtcgcattagccactaattgaataacagagcttagttgcanaatagtagtaagccaataaacatacacagaactagactattaagaaaaaaac

SEQ ID NO: 178978 - DNA, 444 bp, Glycine max
ggacctaaaaactacgctgcctaagagatccagaggataagtgtctatttgtccgttccgctcccgagtatgacagccaccgctttaggagcgctgaacaccagcagcgcttcgaggccatcaagggatggtcatttctccgggagcgacgcgtccaactcagggacgatgagtataccgatttccaggaggagatagttcgccggcggtgggcatcactggtcacccccatggccaagtttgatccagacatagtccttgaattttatgccaatgcttggcctacggaggaagacgtgcgagatatgaggtcttgggtaaggggtcagtggatcctgtttgatgccgatgctatcggccagctcttgggatatcctttagtgctggaagagggccacgagtgcgagtatggccagaggaggaaccgggccgatgggtttgatg

SEQ ID NO: 178979 - DNA, 301 bp, Glycine max
caagcaatgaatggggctaacctcaccaaatgatatatgatgatggatggctcaaattctgacgaaggagaactcattactttcgaatagatctcttataatcgtcatgacttgtagaggagaatcaaggatttgtagacacaaaaagttaacaacttttatttcaaaacaatcactcatgtgttgaacttatcctataattcaaagaacaacatgcaaagtccttcatgcgcatagaaatgtcctatattatcttactagaattctcacgatactaacatcatctacatattaacaccac

SEQ ID NO: 178980 - DNA, 232 bp, Glycine max
caacaacacggtggaggaatattgtggaaggcccacaaagacctggttgctatacgcacccccatattaactaagaacatccccaggctaaaatcggtgataccttcataaggccagtgacggaaactaacaaaaatgccaacgatactggagaactcatcctaacgctgcggaacattgcggacaacatatatcactgcttttaccactcactgaaagaaacgagaatcta

SEQ ID NO: 178981 - DNA, 438 bp, Glycine max
  unsure (1)..(438): unsure at all n locations
ctaaatgacccttagggcgtgatggtttactgttctctatcgccagntcaccgacggggaccacccacttttgacgagctctaatcatttatttaagtcatttgcccgcctagatcaaaaaataaaaataaatttccaccgatcattcgcatcgtaatatccgctaatttctgctaaaataaatgccgaccgttcggacatgccgtaaccacctctataaccaaaaagaggcctaattatattctaataatcaaaactatgtgttagtcaaatagataaataaaaatcaatcggaagtttagtggaccaacgccttaaatgacctttcattcaataaaaacacattttgctgaagaggggataaaaacaacttaacctaacactctgatctcaaagaactacgtaggtctgatttctttatcacaattaaagaatacg

SEQ ID NO: 178982 - DNA, 446 bp, Glycine max
agctttgcagatttggtcttcgccagtaattgttcaatgtgggtccgaaaagaggcaaatttgatcatcgtactatgatgactgagaaaactggggcaaggatgagggagaaacccatgctgtgactgctattcctgtacggccaagtttcccaccaacccaacaatatctttactcagccaataacaaactttctccttacccaccccccagttatccacaaaggccatccctaaatctaccacaaagtctgtctaccgcacttccaatgacgaacaccacctttagcacaaaccaaaaacaccaaccaaaaagtgaattttgcagcgagaaagcctgtagaattcaccccaattccagtgtcctatgctgacttgctcccatatctacttgataattcaatggtagccataaccctagccaaggttcatcaacctccatttatc

SEQ ID NO: 178983 - DNA, 486 bp, Glycine max
  unsure (1)..(486): unsure at all n locations
acttgaaactaagctacattccttctcttcttctattaagagcaatttgcttgcttgccacgacatctgaatttgatgtacgacaaatctccatgcgggcttagctggaacatggttgctagtgtggcaagggcatcgaccatctaattttcttctctaggaatgtgatgaaaagatatgtcatcaaagaattctatcaacttcctgatgtaagcctggtaaggcaccaatttgtggtctctggtctcccattcacccttcagctggtgaattaccaaggccgagtccccatataccttgagcaacttgaccttgaagtcaactgtcgcttggatcccgagggcacacgcctcatactcagctatgttgtttgtgcagtcgaaacccaacctagctgtgaaaggtatatnaatgttgcttggggaaaccaatactgccccaactccatggcctagtgcattagacgcaccgtcaaaccacacgatc

SEQ ID NO: 178984 - DNA, 446 bp, Glycine max
  unsure (1)..(446): unsure at all n locations
agcttcaatagaaagggagactnatcgtcatcaaaatngncggngcggnggtcaaggtgcaaaggttaacagtgtcatccatagtgaatttgttgtatgtgtgtgtgtgtctctctctctctctaacaattcaacaggaaaggccgagtttaggttttcgagattgatgggttaaggaagaggaaccttgtgaaggagatagtgcagagagagaaagagttagtaggtttggctcaacaaagagaaatgcaagtgagtggtgagggagaaaggtttgtgtgattggcagaaagctttgcacaaagacaagtgaaagtgaaagaggggggaaaagtttttatttgcccttcaacgactgttttcagtaagccatgtagaattatcagagcatcagttattaactaaaccgatactggatcaatgatgattntcaaatgctctatgct

SEQ ID NO: 178985 - DNA, 467 bp, Glycine max
  unsure (1)..(467): unsure at all n locations
tcttggaggtgtaatcgcattaacctttattnntatatttgtttcatgcttcatcttgtttgtaacaatttttttctcaaatgttctcatttcgtgtgtcaatccaactatttgaacattagaaccaatatgcattttttcaacgtttctcatccctactttttgtttattacatacatttttttccaatttttctaatataacgtgtctacccaaattctatgaatattagaatatcatgattgttgaaatgatgatgggatggtaaaggaggtgcattgggaatgagacattttgttcttttcaccttgtacataaacttgtatatctgttagatgtgtacactaaaaatagatcctccttgtatctttgtacaacaacaaaaaatatcgtcatgacagagtatccaattatttatntatttggttactatgaccatctngtttttngccacaatagatataata

SEQ ID NO: 178986 - DNA, 436 bp, Glycine max
agcttaagaaatagttgtgaggcctatttgtctctcttgggagcgacgatgttgttagttaaaaagaaggatgggaccatcagattttgtgtagactatcgtcggctgaacaaggtgacgattaagaataggtaccctttgtctaggatagatgacctgatggaccaattagtgggggcttgcatgtttagtaaaatatatctcatgtcaggttaccaccagattagagtgaagtatgaggatatttcgaagactgcctttaggacccgttatgaccattatgagtacttggttatgcctctgggtgtgaccaatgccccaagtgtgtttatgaactacatgaataggatttttcatccatacctagatagtattgtagtggtcttcatagatgatatcttggtgtattccaatactaggggggaacatgagaagc

SEQ ID NO: 178987 - DNA, 468 bp, Glycine max
ttgaacaacagagaaacaatgtaatcccaagaatatattatttttttctccaaactttaatgttattgatagtgagtgatgtcacaaaacctccagatttgaatgtgtgatatactttagtatgaatttttttttatccttcaaaagtacaacatatacatgtatcttctagtgcaattttcaaagctgactacatcaagaatggctggattgaagcaagtaataagaaacttcatcctgtatgctttctcttctttgaacccttgccaccagagaaaactcctgtggcataccgtgaattggcaagctcccgaggcacagctgctccaccagatttcagaacttcaattaattctgcaaatatattcttattctcctcattcacaaaaactatgccttgaccttcctctcccattctagatgcccttccaatctgatgtacatactccttaatgttattaggcatgt

SEQ ID NO: 178988 - DNA, 430 bp, Glycine max
  unsure (1)..(430): unsure at all n locations
agcttctgctgccgactatacactangatcttttctttagagancaagatagtgaggaacttatttataacatacacagtagcatgaaaggacatcacaatttaaactattcatgaaaaatccaacatacaatttatatatttaaatacatttattaatttgaatatttacaaatgagaaacaataaggaagaaatgatggctattagcatggtatagatggtacaaggacacaaaccttaaaagacaaaataacaccaggcctttcaaccttttttctttaattttcttttctttcaaaacaagtgctcaataattaatctccctctttcattatttatatgatgtttagaaatattggagatctcacaatttatactcacttttctgcatctgcatctgatcatatgtattngatcattatgctctgt

SEQ ID NO: 178989 - DNA, 371 bp, Glycine max
gcatgggtccctaaagtgccatcatagtttttttctttagtagaaggtgcaggaggagacatgtgcacaggcctttgatgatgaggacaaactctcttgccaaataagagtagactgtcgcagaacacgcattggagtgtgagagaagacaaactgatgattccacacagtgtcgcggaagatctcaatgacatcatattatagaacgaggaattatgtgagcatcatatgacatgactaacacatgattgatattaggtatagggacgacttcagtgagtgagcatatgatcttactatgctcactcattaagagcgacagctattggagctagtgcaatacccgcgcggatgcatgaacagctgcaaaa

SEQ ID NO: 178990 - DNA, 438 bp, Glycine max
  unsure (1)..(438): unsure at all n locations
agcttccattggccatggactcatactttgatttacctgccataaagatgcagnagggtttgattcattggcatatgatgtcaaagaacataataagcacacagaaacagatatacctctcacgttttttaatgcaaaagccttttaaagcaacaagatgccgatggtgcagtcgagcaagaagttcaatttctctgcagaactcatcctctccctgctcagatattctgttcatcctttttactgctatgaccaggccatcagaaaattgagctttatacacagttccaaatcccccttggccaatgacagagctaaagtcctctgttgccatttttatctccctggagctgaattttcggaacatagatgaagaacctgcatgccatccccacacccccacccncaccccaaacaggaaacatagtaagaaaaaat

SEQ ID NO: 178991 - DNA, 472 bp, Glycine max
taaatacaaattataatataggtatagattatatttttattatatcatataatattggtattgtttaaatttaaaagcaagtgcatttgatgtacaaattaaatttaaggatgatacaaaagaaaaacagatattatataaaaaaaagaaataataaaatcatattgttgaagacagtgcgtcgcaaaaaaaaccaaataagcatacaatttacaaaaagttggtggactttggaaaaatttggtgtctctaaacatggccaaaccaaaacatagttgatattgggatcatgaaattcgaagactatttggtgggctgtggaaaaatctctccatcattcgcatccaatatttgttgtctgttgtcagtcattgtaaacaatgcgacattcggcacaatcttctataatcaaatgactgaatattttctctttcataaagtaatacatactacttggaacatcctgacataa

SEQ ID NO: 178992 - DNA, 297 bp, Glycine max
ctgcagcttaaagtgatgaaatttttttattgtggtacgattctatatatggtgatcattaccaggccacttgaatcaaatttaaaactggtgaaattagtttggccactggttattgactacatcctttggaatcgattccaaaagttaattgtcgaaagacttttatcttaaaatcttggcaaacctttgctcttcaatgaatcccttctatttattacccttctagacttgagacgtttgatatctctcaattctgattttttgtcttgataagttgaacttggacccttaaat

SEQ ID NO: 178993 - DNA, 474 bp, Glycine max
  unsure (1)..(474): unsure at all n locations
agcttaagaattatggcctcatcaaacgacttgtgtttcgttggtaattctataagaagacctgccatctttaatggagtgggttaccactactggaaaacccacatgcaaatctttatagaggcaatatatttaaatatttgggaagccatagaacaaggaccttatgttccctctataatagtcggaagtgcaacaatagaaaaacctagagcagattggactgaggaagaaagaagattagcacaatataatttaaaggccaaaaatattattacatctgccttaggaatagatgaatactttacggtttcaaattgtaaaagtgtgaaggatatgtgggatacactacaagtaacacatgaaggcacacaaaatgttaaaagatctaggataaacactntaactcgtgaatatcaactttttacgatgaatgtgaatgagagtatacaagacatgcaaaacaagtcacac

SEQ ID NO: 178994 - DNA, 438 bp, Glycine max
  unsure (1)..(438): unsure at all n locations
agcttcaattgcgggtggatatatagtttttctaatttggncatgtggccactgggttggacatggggtatcatatgccttattgttgtgggattctacactgcctatgcaaactggctcttggcagcatttcacttcatcgatgaccgcagattcattagatacagagatctcatgggatatgtttacggagaatttttaattctttgcatgatactttcctttgcgtgacattataactttttaattacattttaactgaaggaggctattaactgaagcattccttaatttcacaaggcaagggtatgtaccaactcacatgggttttccagtttttgacccttcttcttggaaatatgggcttgatcctcctgggaggcacggcacttaaggtaaagtttaatttatatcatanatagtttatttagaacagac

SEQ ID NO: 178995 - DNA, 364 bp, Glycine max
  unsure (1)..(364): unsure at all n locations
gggcctgatatggaaagggataagctgaagcagttgcttttttcttcnccctcgcntgacaggacactcggaatgcatgtggctatgtcatcctaaattttgtgaccatgagtatatttctgagtcctttcagcttaggacgaactatttggcaagtgctagacgagaaatatcctcttactctactcaacccaagaactacatgaaagccactttcttataatactctataaacacatttttttgtagtgaattaaaattggataaagatgatcaatttgcaagtaaaattcatttaataaaacatgagacgcacaatagtgttataagaaatcgtaactaataatataaagagcatattgta

SEQ ID NO: 178996 - DNA, 461 bp, Glycine max
  unsure (1)..(461): unsure at all n locations
cttaagtcacctgcggcatgcaagctntgagggtgcgtagcccaccatctttttatattgagtaccgataatgtgtataccatcacgattatcgtctccctttttgcacatgttctgtagttgcatcctatccagaaccatatcagaatagtactgatactgcctaacgaaggcaaccattaggtccttccaagcatggactcgggaaggttccaagttagtgtaccaggtaacagctaccccagtaagactttcttggaagaaatgtattagcaattcctcatctttgcgtatgcccttatcttccgacaatacatctttggatggttcttggggcaagtagtccccttgtacttgtcaaagtccagcaccttgaacttggaaggggtgataatattgtgtactaggaacaactcttctaggttagaaaaggcataatctttacctccttcaatggccct

SEQ ID NO: 178997 - DNA, 388 bp, Glycine max
gaccttaaactagctgcctataggaagggggacagaagatatttcttccttaccggagtctacggcacacgaactgcacttggctagatacctaaacactggaccatgactatattggagagcttgcagctaaggagacactatttgtacacagctgacatgagatatcctgaacatcactcaccccaaaaaccaataaaaggttgctctaatacaaaactagaacaatacacttgtttgaagtgattacacttgcatagacttgtacatggcgatgcaaccattgtatgattggagatgccaatgagtataatgccttatctttgatatacaggttgctttaacatgagagaacattgtaacgtcaatctaggatgggctgaaccag

SEQ ID NO: 178998 - DNA, 138 bp, Glycine max
ccaagccccaagaggagcgaaaccaaacgaggggcaccccaccaaaaacacccacaaacaaggaagaaacaaacgccccgccccccgaaaccacaccgaagacaccccgaggaaccacaggcgccaaagcccaccccc

SEQ ID NO: 178999 - DNA, 431 bp, Glycine max
  unsure (1)..(431): unsure at all n locations
ggactaattaacctataagtgagagagaangagtttatttactcaaaacggaaggactaaggatttattacctatacttaacaaaaaatagttataacactagaaaataaccataaattggaagagtttgatacaatttacacaagttttatacacaaaagttagttgtattcactgactaacaattcccccaaatttacagttttgcttgtcctcaagcaaaaagagaacatttcacttgtcctcaagtgacaacaacatgcaatgactatgtacaaaggtgtatgcaacaaaagttactgattgcatgataagagaatgaagttaaatgccctcatcacttgtctttcacaaggtatgcagatatccaaagagaagaaaaaatggtacctgaacaattagatggaggtaggcataggacagatatcaag

SEQ ID NO: 179000 - DNA, 308 bp, Glycine max
gacggagagaaagagagaggggggagcaccacaccgaacgaagacacagggagagaagttgaactttgaggcgagacacctcgtgaccggagagatcaccacccttaatcctataaaaacttccatgcgtctcagcataaacgagcgaagagttatccctgattcggacgatacacatatcatcattaaagggcacattggatccactcgcacataagtgactatgcgtaccagactatgactcaaccctttaacaagaaaaacattatctagtgggcggaagggaggactacatcccttacctacac

SEQ ID NO: 179001 - DNA, 480 bp, Glycine max
  unsure (1)..(480): unsure at all n locations
ctataaaactcagcttatatcgngctccaggttgaccagcttctctatatgaacttgntctgtctctgtcggatcacgtccaacaagattacaaatcgcctatgccattcagaatattaagtgatggatacacactaatattcttagtgagccaatcttcaagagaatcagcaaaaaataaaacgttagtaaaaccaggcccaacttccttccaaatactccttgccttctcacagactctcaagcaatgcaagattgtctcgggttcctttttgcacataggacacaagaaatcagtagagatttttttgttccattaagcaatattcgatgggagagctcctcttgcaattntccacaacagtacccttcctctctcatatgctttccacctccaaatcagcctacaaatgggaagtttctccttaccatccaatngagcagctagtctataagcactcngaatatccaaaatactct

SEQ ID NO: 179002 - DNA, 440 bp, Glycine max
  unsure (1)..(440): unsure at all n locations
agcttctagagagntctacactactattgatttctccaggacgttctagaaaattctacacttttccagaaagctccagaattttctagaacctctccaattaaggagggatctcaacaaatctccccctcccgacttaattcgggggtagtagcaaatcggcaccttggataccttatgtcaatgtgctttggtcatcatgcaaggattgcttctcttcttgcatgactcttctccactccaccaattcataggtgttactctcatgcaaggatttcatctcttcttgcatggctattctccactccggtgttattctcatgcaaggatttcatctcttcttgcatggctatcctccactccaccaattcataggtgttattctcatgcaaggattgcatatcttcttgcatggctcttctccaccaccaattcataag

SEQ ID NO: 179003 - DNA, 376 bp, Glycine max
  unsure (1)..(376): unsure at all n locations
aactcaagcttgtacctngaaaaaatgacacctcttgcatttcttatgaatngaacaaccaacagcaacaaaaaattctggttatctatcctcaaacttcccttcagaacgttaggatacttcaagtcttttggatgcatcaaaatgattggatgcttcaaaagggttggatgcttcaactcttctggatgctccaaaacgtttggatgctgtcgaactagcagagaattcaactgttgtgtgtcttatcgatcactgccttactacattacagtattcaggatcacttgtttgccatgtcattgacatccactgaatcaaatgatgatacatacggaataaactcaatttgatggaagcatctactaaatatgga

SEQ ID NO: 179004 - DNA, 342 bp, Glycine max
gaacaactttcttaactatatgtccttcagattttaccgagtttttttcttatatggaaatataaataatataaggttatgccatagggacatggtcatttttacccctaacaatcttagaagtaaatatagaccatgtttttacgccgtacccttatacccttagaccatgtcttaaaagaaaaacagttggttctgcagtgatttgagcggtcaaaggactaacatacgtgtccatgtatgaatcatcatcttctacattaacaccaactgttctgccctgcaaaaccacacaccacctttcatcacaagggtcttgcacaaaaaatacttgtctagctt

SEQ ID NO: 179005 - DNA, 465 bp, Glycine max
  unsure (1)..(465): unsure at all n locations
tcttgtctttgtggtcacaaaatcctaatagagtgactcttttcggacgatgaagctggcatagcaactcaatttcattcttgaactgcttgagttttttacgatgcttccatacattcggttgattgcaaccgtagactcggtgacaccattgtagcatgctaatgagtcatcaactcttacctcacatgctgcaattgatttatctcattcagactctaaactggcaccttttttagcttcattacatgtcaataactgaagcaagcatttctttctctccaatcttccctgctgtccatgttctctcccatgattaatttgtcattgccatcaagaatgcttactatctgtgtagtgcttggtcttaattntgggtcagaacgggtgcatgcagctcctaagcttaccaatctcattaactccttcaaattgtactctccatttagtcccatatatgctaat

SEQ ID NO: 179006 - DNA, 442 bp, Glycine max
agcttgaaaggaaacaccactgtcgttttttctttggatccatttggaaaaataaaacctaatgtagagttcacaattgtctgactgcttgtctctcccaagaatgccatagttttttttgtaagagttgggttatgactgaaacttgtggttttttacagtcttaggcgatgtcatatatatatatatatatgagttttaatatcagtgttgcattttttaaagattaaaaatacacatacacatgctttcttatgtgttgttaactacaccaatgacgtgacacactttatcttgcatcagatctacatgtgtagtcatgttgtgcaaggtcttgtcacgcactttatgttaatgcagacaacaatttatcatacatgttttttcacaatgtgttgccaacttagacaacgatatatcatacatgccctttttagaataa

SEQ ID NO: 179007 - DNA, 469 bp, Glycine max
ggcttctacaatctccccctttttatgatgacaaccttgttatcaagaaacacatacacattctttttcctagttgatcgctcacttaaattctctatattctccccttttgtttttgagtttaagcttcacttgaaattaagtatttaattatatggttcttgatttaatcactattttctctccccctttggcatcaacaaaaagccaaactacgtaagaaatataaaacatacataaatgactaatcatacaagagaatataaaataattaaacaagataatttaactattcatcaaacttagaaaggtaagaaatataaaaatcatacataaatgacatacaaaataatagaaaacaatcaaacaagataacttaaccattcatcaatcttagaaagataatacttaatagaatgtcatataatccagaaagttattcataataaccaaataaaactactaatgc

SEQ ID NO: 179008 - DNA, 466 bp, Glycine max
  unsure (1)..(466): unsure at all n locations
gaccctaagtcacctgaggcatgcagcttggaataatggttggagtncattagtgggtttatttagncatattccatgaagaagtcatactatagtagcttttgtaaaagaaagaagagaataatagtgtgagttggaagagaagaaaggaatcatcgaggagcttaattaatataattctgttataatagtaataaaacatacgtattaagcagtgacagtgccggcagagctgccaacaacgagcttgagttgcatatcgatcctcccaaataggtactctttcttggattggaagccggagccagagactttgtccagagaaagagatagaagctgaccaccattgaatatcttagcacggtgatcaccccatgttagatcaaagtcttggttgaagttagcaccacaggaagccaccatggagcccaccaccaccactagcataagtgcataaaactcattg

SEQ ID NO: 179009 - DNA, 451 bp, Glycine max
  unsure (1)..(451): unsure at all n locations
cgtagtgaaacctgatcctcactggccacaagattttctttatagacactactgacagttaactcggcttcaagctcagaagatcctttagaaagctcactctcttccaatgtgagggatgacagatggcttgttaggtctacctctgaaagataacctgccagtcccttatggccatggctagctgcaatagatgcagcagttttacctgttggatcttgtgaacttggatctgtcactgctccagcagatgcaccagaagctataagcgaagcaaccattttttccctatcatgaaacaaaatatttcagtggcccaaattcccagaacaattagaatggatagatcatttataaaggcttttaaaagcaagagtttcaaccttgatatgatcatttatgacnagaattggtctaataagattgtttgatcatgtgagaagaccaatag

SEQ ID NO: 179010 - DNA, 421 bp, Glycine max
  unsure (1)..(421): unsure at all n locations
agcttcctttagagaaggacctgatgaatgntttctcattggaatgggtactcgctacaaggcaatggctattgtcaacaagaagcagggcgttccagttccttttcaataaaccaaagcttattcaaattaaaatgtcgaaccaattagtgtaccaggattgaactttccccaaacaatggttgtgttttgggtgcaatcaatgattggcacttctaatggctacaattttttcttcttttatttatttgttcatggatgattgttcaatgtagcgctttgttttacctgtattgtaagatttacacgatataacgtcctcgttacaatattttctgtggaatgttctcgcatcaattctaataatatgatcattactaaaaggtagaatagaatcttcatactatgtcaacagagtggc

SEQ ID NO: 179011 - DNA, 322 bp, Glycine max
gatggcggattgccttaacttctgccatctggaagcatacgactttactcatttttcagggcattccttttattaattccaaagttatggatgatgccttatttttggctgggacctggtctacagctatagttaaaggttttaatatcccttttaatcactggtcatcctatctaatggaggccttggaataatcggatgtcataccttgcaggtgggctttgtgaagggttattgctctctttatgggatgctggcagcacagctgcctttgtatgcttatcatcagtacccctggtactgcatgcttgttcttattaat

SEQ ID NO: 179012 - DNA, 410 bp, Glycine max
acactatagaaagtcagctgtaaaaatacagtgccttcttggattttatgtttgtttataacgctttgactaaatcagagtatacaggcaattgtaaagacatgacaggaataagattggagttttcaaatgcctgaatgcattcaaaactctcatttgaaaagagatccatatcaatgaattttggatcaataatggaacgagaagagaagagatttgtgtatcgtattcggatgaaaacactgaggaagagggaatagaggaaggaattggcgtttccctgagttcagaatgccattgactctgatgccaagaaccctatctcttctttgatgggtacgccatttgaagagatttttgaattttaatcgggtcgatgataagaatgaaaagataagtttggcttcggg

SEQ ID NO: 179013 - DNA, 347 bp, Glycine max
  unsure (1)..(347): unsure at all n locations
catatgnnctcaagactggactaatacatttgctgcccaagtttcatgatcttgtaggtgaagatccttataagcatcttaaggagttccatattgtttgtttcaccatgaagccccctgatgtccaagaagatcatatctttctaaaggcttttcctcattctctggagggagtggcaaaagattggctatactaccttgctcctaggtctattttccgctgggatgaccttaagagggtgttcttggagaaatttttccctacatataggaccactgccatcagaaaagacatttcaggcatcacacaacttggtggagaaagcttgtatgagtactgggaaaga

SEQ ID NO: 179014 - DNA, 472 bp, Glycine max
ttggtatcatggtagccaacacagagaacattttatttccactcatatctgactgcataattaatcctttcttagaatgatataccctacacttcccatgttgaatcaaaatagttaagcctttttcttgaagttgccctatgctcaatagattattcttaagttcaggaacataatagacaccagaaattgccttagtaaatccattcacttgcatacgaatgataccttttcccacaacagccattctggtattattgccaagttttacagtttggctaaagctttcatccagttctgagaaccactccttgtttccagtcatatgattgctgcaaccggagtcaaggaaccacacttcttccattttgtcttgctccaattcaacataagacattaataacaattcttcatctttttccttctctaattcaacataattggcatttttctcccaattaggacattcata

SEQ ID NO: 179015 - DNA, 464 bp, Glycine max
  unsure (1)..(464): unsure at all n locations
tcatggagaatgagaggtggaactggaacgattgtctttatttcagactgatgattngaatcaagaagagttagttgatcatcctcctgtctgcggcactggattacttgctgacatatatcagaagtgcaatgttgttgtgcttgaactaacaggatattaagaaacagaaaaagatcctaaatggagagatgttatgcagaagacctcgctatgataaaaaaatcagacctgtgaattggttgaaagacctcaacatcagaaggtgattgaagtaaagtgggtgttcagaaaaaaggagaatgcagatgactcaattaacacatataaaacaaggttagtggtaaaagggtatgctcaagtttttggagtagattattttgatacttttgctccaattacaaggctagatacagtcagaatgttactagctattgaacacaaaacaatggaagattatcagc

SEQ ID NO: 179016 - DNA, 410 bp, Glycine max
acaaaccaataacattgtgtgtgctatagattaactagttgaccacgacaacgaaagttgcatgaggggaaaggaaaacaaaagcatactttattgtgtgtcccattttcttttatgaaagaaaaggttttactgcaataggaggaaggaggaggtaggaatataaatggatggcacaacgcatacccgccacacgttgttgcgtttattgtcagacaatatctgatgagctgccacgtaggatgctgacaaccaccgcccagtcacctggcccatacaatcaatatcatgtgtgtcggcgccattttatgatcattgactcaatcttaatgtaacatatcatcttatataagagtaaaaatgactaatttaatgttatatgaataattaagataaccattttattactg

SEQ ID NO: 179017 - DNA, 406 bp, Glycine max
acaacctagtgggccaattgccatatatcattgtttgggctaactaagcttagtgattaagattgctccgacaataaattagttggcccaatgccagacaaaattagtggactttaataactaatttaatttatcaggatttgtctggtaactccctgcacgaaaaaatccccatttatatggatttgactgggaactccctgcacaaaacaattccccaatggtgcttttctttgtcatcgatgttacgcttatatatttacagaaatcagcttacaggagcaatatggcgaattctctcctttacccttggattatggagatctctcttataacaagctacatggcaatatcccaactcaatgtctcatctacacaatgtcactgtgttgagactatcatcaaa

SEQ ID NO: 179018 - DNA, 356 bp, Glycine max
  unsure (1)..(356): unsure at all n locations
tctattgctcttattcatctatacttaggctatctcttaccttttattnaangggnctaagattttgcatacacctctttcaaagtgaagtgcgtagcctctctccatcatttggctaatgcttagaagatattcttttaggctgggaactagtacgacatgatggatgagttgcgtacctttatctgactaccccatagacagagtctttgcctttggattcagcctcactaacatatcccatcagaacattgactaagtctttctctccaatagctgagagcacatgaattattcttcaacacgtttaccanagagcactatcctgtaccaactgactccctattttttattgg

SEQ ID NO: 179019 - DNA, 445 bp, Glycine max
  unsure (1)..(445): unsure at all n locations
ttaagcaccgcagctgcagcttcataagaagactgtttccttcttttgcgtagggngaaataccacaacagcctggggatggccggcagcgggcaacagacgcaccacaatcacctctagagttcacctcagctcatccacaaaaaggttagagcgttgcttacgacctatggctgaccaagtccaaagtcaaaggtaagcaaagtactaggtccgtgaccgacaagccatcgcacgtccagctcaagacgttaaagaagcgctactaggaggcaacctagtaccttttaaatctctgcttgttatttgatcactttttgtttctcaagtcatagcaggacacacctagttgcacatgatcctaggaatttaaataaaacaagcacaagctcggaaggtagtcatacctcacaaaaaatatatatatgtatgtttaggtaaaaag

SEQ ID NO: 179020 - DNA, 392 bp, Glycine max
ctttctttgagggttgatgggttctgtcgcgtattttgttttgttcactggctgacatattgtcaattagctcaattgcttctttcgaggtcttcagctttattttcccccctgtagaaacatctagcagttgcttggtttgcggtctcagcccatctataaacatattcaattgaattggctcgtaaaacccatgggtgggagttcttcttaataaacctctgaacctctccaatgcttcactcagagattcatcagggaactgatgaaatgaagagattacagctttcccttctgcagtctaggactctgggaagtatttctttagaaacttttcaacgacttcttccatggtttttaatggttacccttagatgagagaagccacctct

SEQ ID NO: 179021 - DNA, 310 bp, Glycine max
  unsure (1)..(310): unsure at all n locations
cagctttaaattattttactttattngaaaactatctgtccttgagatcaaactatctccagaaggatttttaagatttgtgaacttaaacaaagctattatggacagatttaaggaaagagaagaacatgaaatctccataaagcaagcaaaatgatcttcagaacaaagcttaaagatctccctgacacattatgggattctcaaggggtacactaactctctaaattatgcatatatggattggctatatacctaaattaatgacctataagatcttgaagtgcagcagaaacaattattgaaaaca

SEQ ID NO: 179022 - DNA, 463 bp, Glycine max
tactcagcttcgccacagatccctatgtagactggttctttctatatacattatggtaacagcatgattaaaaccaaaacttaacccgccgatccctcatgtaagattaagttgtgatcctacttcaatcaagttctaaggcaacaatacatttcccaatgttaaagtctcctaactgtgcacacaagtgggtgatcagaccaaaagcatacatacattaagcattgaaggaagcattgaacacataaaacataattaattagatattaggtatttacatcagttgtttattagaaatccccaactagggtgtttagccagccattacaaagaaaccctaacaataaatgagattaaagatagagaatgatcatttcttacaccagaagggggatgcctcctcctcttctcagcatcttacactcactctctactcaataatctctctcaaatgacaaaacct

SEQ ID NO: 179023 - DNA, 435 bp, Glycine max
agcttccatcatatagataaagtgaattctatttcctgacttgtctgacattaagacaccccccaatcaatcctaaaatatatgtcctacaatgggctactaattgttgttgtgtgggttctactgggagaggcaatatattttcttttaaccacttaagtttcaacattgatctcactagtgaaacctttgggggaacggatcctagatattctacgcacatttgttcccaatcaaaataagttgggccaataactaatttttcatcgactcataaacccagatgaagagaaacattttctgaattgttgtgtcatatcctaatttcatccggggactattgttcgttgatctcttgatccttgctagtcgacttacggtgttgaacgccagtatcagtgcaaagcaaggaaccattcaatgtttcgatcagga

SEQ ID NO: 179024 - DNA, 437 bp, Glycine max
  unsure (1)..(437): unsure at all n locations
tcatgatgaatcaagaatgattcaaagagttntgatgtttacaaagatgatgacaaaaagctcaaaagtcaagaacacttcatgataacaaagatgatgatctcaagaatcaaagaatgagttcaagattgaatcaagaacacttaaaggatcaaaaggaaatctgatttcaagaatcaagttccaagaatcaagatcaagattaaagactcaagattcaagaatcaagagaagattcaatcaagataagtattaaatttttttttccaaaaactgagtagcacatgaatttttctcaaaaccttttaccaaagagtttttactctctagtaatcgattaccagattattttaatcgattaccagtagcaaaatggttttcaaaaagctttcaaactgaatntacaacgtttcaattaatttcaaaatggttgaatc

SEQ ID NO: 179025 - DNA, 457 bp, Glycine max
cctgaggcatgcaagcttccataagtacaaggatcagaatttttattttattacagcagaacattgagtgtattaattactttcattcttaaagtattatctttttcctttaagtggtcattaaaataaaaataaaaaatagtcttaggtatactaaacatcatactattgaaaaatgtctcaaatattaaaaactttttagattacatccaaaattttatttaaaatttttaatactttaaaaattacataaatatatatttttaactaatgtaattagggtttttagcttttggatgatgataataagatttgagaatatttttacaaattttgactcttttgattaattatgaaattaatttttgatccggaacttaatcatagtgattcgtacctagaataacttaaaataaagaataagtatgaaataatttttatccgaaactaatcatag

SEQ ID NO: 179026 - DNA, 476 bp, Glycine max
  unsure (1)..(476): unsure at all n locations
ctttggagacactcttaanccatgacgatgttgtataagtttttttattgtgcataacgccaaggaatactttagaattttcacagtatagcttcttaatcaatattgctatttaagttcaagtctcgaactcctctcactaactgccacactcttcacttcgcaaacattggattgtctctcagaaaatttcaagataccctcaggtccacttttatcaccactgatgttgtacaagctgatattatgcttccacaaaacaatgcatggctcactggttaaaaaaacaacatatttgtccatatattttacctagcctgtccagagtgcaagctgcaaactctgaagacactctaacccaagacatgacaactgtgtacaaactttacccatagcattatatgtacgtctatatggcgaacaagaacatggaactctacagatatggcaaccaacatagatattgaatcagaatt

SEQ ID NO: 179027 - DNA, 457 bp, Glycine max
atcttaagtcacctgcggcatgcaagcttctaataatgcgtgccatgataatctgtttgtcaaattacaacaatatacgaaaatataaatatttcacttcacattaaaaattaacaagactaaaaacattcataaatccaacaatccataacataggttcgtagaatggaaaatagaaaaaacccaagaatccataacatagggtcatggaatcaagcatacaaatgttttaatcaaatcataagcatattaataaattcaaagatttaggactaggtctttcttctgcatattgctagaaacatatctctctaagaagggtaatctttcaatgccttgactgcctttgtaaaaggagcaacaccaattccttcaagtttttcaaggatgcttaaacaaggctataatttgttattatcctcattgtttggccaactacttccccaccgaacattag

SEQ ID NO: 179028 - DNA, 471 bp, Glycine max
  unsure (1)..(471): unsure at all n locations
ggacagttagagctntaaacagctgttctgaagactattattattgaaaccattgtgtatatatatagagggagtaacaaactttacgaagttgttgaaaagtacaaaaatactttctttccaagaccattccacacatccaaaactaatcaatatttattatgccaattgagcagttgctaccaatgacccactagagaggaaaacttgtgagtggtgccaaatggaaaaattatagtggaaaactaagcttaggagcatgcattatttttttcacaagtcacaattacttgatgcagaaggcagtgtgattagaatggtaaaatttaacttgtaaatgcaaatctcataagcttttcagaattttcagtagactttcattntgtgggttaggggtttggttccagtctttctagcatgtgtggctagaaggaccacagtcttgaatattgaggctcttggtcactgtca

SEQ ID NO: 179029 - DNA, 415 bp, Glycine max
gacctcagaaactcaagcttaatagttggtccataagtcataaccctaagagttattgtttttggataaaaggggatgaccatgaagattatttatacacccttgtagatctatatggtgttcatcttaatgagatcttgagatcaaaaaggatccctaactactagaagatggattggaaatctgcatgcgttaagcaacgctccgagacgtgggatcgactctattgacacctaactcagcactcaggagcacaccattcttgatccttgatcaaatactgtttttgacaacaggaatagatcagaacatttcctatgacctataaccaaggagtatttactctctataaagacgataaccatattacgctatcatctaccagtatctaaaagtgattcaatatgctcttaca

SEQ ID NO: 179030 - DNA, 410 bp, Glycine max
  unsure (1)..(410): unsure at all n locations
agctngcacttgaggagggaaggatttttttttctattgaacaactttcttaactatctgtccttcagattttactgttttttttcttacatgtaaatataaataatataaggctatgccatagggacatggtcatttttacccctaacaatcttagaagtaaatatagaccatgtttttacgccatacccttataccatttatatttacatattagcaaaaagaaacagtaatatcttaaggagagggatgaacattcaggatactgcttgtcctttatgtggtgatgtgcaagaggaggtggggcatctatttttcaattgcaagaagatactaggtgctttggagggagtccatgagctggattcaggctatgggacctctatcattctctccagtggaccatcttc

SEQ ID NO: 179031 - DNA, 441 bp, Glycine max
ctaagcttgtggcaaaactctggtgacgaaggacaagaaattgtattcgactcgctcgaagaggtaccacaatgcggtggcataaacgagtactgcaaccgctccactccaattcatccacaacaccacatcaacagagaacacgatgaaaggatgagaaactaaggcaatgccaagattgtcagaagaatgaaggggttagaatcatcaatggcagtcatggccatgagagaaaaaaggaaaaaaaagaaaagaattaaccaaacatccgaaaggtccccttaaaaaacgattcataagggggtggtctatccagttatataagaacttaatcatcaatgacatccatggccatgagagaagaaagagaaccaaaccagcatccgaaaggtccctttaaaaaaaaaccatgcataagggggtggtctacccagttatata

SEQ ID NO: 179032 - DNA, 377 bp, Glycine max
atgacacgcgcgcaagccaggtatgttgctttttccttttcaacgctctgtagttgtggtcgtacgaataggccatcgtgatgtatacaaagtaggaagtatgaccttgttgatgtaaaggtaggagtgtggtggtcttataaagagtagaatgacatgaagtcatgtcaggtttgatttcaacctggataaaggtcttgtcaccatctggtagggcttccttctatcttgtggagcctttcccctgatggttgtgaggagtaacgttgacttgcccctggttgaaggacttgccaaccactcgaggggtagatcgctagacctgttgagatcctcctatattggttatgaggagtaagtatgatttgctcctgatt

SEQ ID NO: 179033 - DNA, 396 bp, Glycine max
ttccacattgaattcagcacctaatgtcatattagatgtgatttgggtatcttaacataagagatttcagatggactttaatcctaatcccacagtcgaccttttcacgagatctctacttaaccctttggttaaatgatcggccaaattatgctgagttctcacaaactccactgatatcacaccatgcatgattaactcccaaaccatgttgtgtttaacacccaagtgcctagacttcccattatacacttgactatatgccttagccaaagttgcctgactatcacacctgatagacatgggaggtataggtttgggccacaatggaatctcatagatcagatttcttagccactcagcttctttacccagctgtgctaaagctacaaattc

SEQ ID NO: 179034 - DNA, 437 bp, Glycine max
  unsure (1)..(437): unsure at all n locations
agcttctctaaatgaagagaactttttatcattaactgngtgaatttgttcataagtggtcagtcctttaaccacaaccaacatcatcctaaggtaatacaattctccagtacttggaggcacccagttaagcttgccaattgtatttccatctttacatggcctccaacatctatacttggaggcacccatgttgttagcttgtagccaagaagtaaacatagactgtttaatagttggcttggatagcaaagcatcaatgccatcatcatcctcaaatattattgaattttcaccaggaaaatgaaagtacaacctcttaacaataggtgatctcttgtgaatatggaatgaaaatattctttatcaagcttcgcatggagaaatatacctatcgtcaaaataatgcttgatctcatcaacagtctatttagtag

SEQ ID NO: 179035 - DNA, 469 bp, Glycine max
  unsure (1)..(469): unsure at all n locations
tgaggcacgctgagcaagcatatctctgatggattcttttcttggttacccagcacgctaagcgagctgcatgcctcgcttagcggatgtcactcgctaagcgcacatgccttgcttagcgagacaccagctgtttcaaccttctcttcttttagcctgaaattgaagtgatttccacattaattcacaaaatgggagtattcactatataaaatcaaactaaacatgagaatatgtacaattcctacaaaaagaaccataagttaggggaaagaggataattctatgtaactattcaatacaaaaggtagtcgtcaataacgattaacaagtacaaggtaggttcatggttcggtagatggattcctngagcctcaatccatacacaatgcataggataagtgtgatcaatgccaacattacatcgaaacatgggtaaacaaatcacaatgagaggtttacctaagag

SEQ ID NO: 179036 - DNA, 315 bp, Glycine max
  unsure (1)..(315): unsure at all n locations
aaaacgcagnccagcctacgataaccactggatcgtcacgcaatacggaccgcaactacacaagacacttgaccacgacctgaccgccgggagctttgagaaaagggccggagtctgctagaaaataccgatcccgagagcaccgccaatttaagcaccacaaccttagcttccgaggagcttaagaaaaacgtcaaagcttcatgaatcttgcttccaaaggcattaataaagatacaagcactttctacatcacccacaactaccatgagccaccacaaacaataattgtgctccacaccgagaggaaccctc

SEQ ID NO: 179037 - DNA, 479 bp, Glycine max
  unsure (1)..(479): unsure at all n locations
gacactaaaaactaagcttntaaccccttttcagtactaaacatgctgtattttatcttcacaagcgcttaactaaatgcaagagaaacaaaatttaaaaagggttgagttgcctcctagtaagcgctcatttaacgtcattagcttgacacatagttctttgttatcctggatcaatcttggttctctccttcagaatcttctcatcaaactccttcacctgtaaacaaacattctggtctagcaatttttttttcttcattaaatagatcaaagctgatctgttggtcttcaatacccatttcttactttttcttccccatgtccactacacagcttgcagtagacataaatggttgtcccaaaattaagcgaatatttgcatcttcctcaacgtccattacaatgaagtcagcaggatagataagaatgtttacccgaaccaaaacatccttaatcactccataaggtctggtgat

SEQ ID NO: 179038 - DNA, 422 bp, Glycine max
  unsure (1)..(422): unsure at all n locations
agcttagacaacacagcatacattcttctagaattggatggcaaagtatttccaagaacatggaacgccacccacctgaatttctactttagttgacctaatgcaaaactagatgttattcttttttttcctactcaagtctttattcccaaaagagaaaaaatatgggttttagcttgagaggttttcatgaggtacatctaagataacaaagggaatttgtactcaatcaaatacattgaataaaattctgcatcccttcattttcataattttcttgtgtcttcaagacaagtacatccgtggatgcagctccacatgcttgtcaaacccaaggtccacccttggtgagtcttgccaaaatctacgataaatgggtcattggtcattttccaaagggatcacaanatcaaaggtccacc

SEQ ID NO: 179039 - DNA, 444 bp, Glycine max
  unsure (1)..(444): unsure at all n locations
tccttaaggaaacaacanaacattcttcattattttcttcaaatgcaaaatttgctaactttgttttattagaaagtatttcttctaaatatttgacatattttgggatctatgagataacctcaacaaaaagaatgttgatgtccaatctcttcattatttcaaggaagtttttgaagtactcatcttgtttcaaattttttaccctttgggggaaaggaatatttacctaaggaggccccagtaccttcttttcctctactcctttgtctggcaccaggctctcttcagtgagaacctcttctgtggtatttgaagtagactcctctttttgcttgaagtcctctttaacctttttgcttcttatcttgatagctttagcatcttccttttttggattagtttcaatttaagaaggaagtgtcttataagcccctttgtgac

SEQ ID NO: 179040 - DNA, 444 bp, Glycine max
cctgcggcatgcagcttttctggggagggagtatttttattgtttcccataaataaaggaaagcttcaaaagatgaacaaaattaagaccatgctgttacctcgagccaaacaacattcccatcatccccaatctgccatttccaaaccatatctgagaaagatgaaagaacaaacacgatatctaaataaacttaaccatatgtatccaaattttcttctctgcaagggaagaaacccttggttctctcagcacaaacgagtttgagagagagagagaaaaaaaaaaggagatggaacgtaagctacagcatgcagtgttagagaaagagaaagagagagcaaaaacaaaggagactctcacccatatatataagacctaaccgttatttaatttttatttataattcaaggtttctcttctaattatgttcatcacataaca

SEQ ID NO: 179041 - DNA, 435 bp, Glycine max
tggttctcctgaaggtatattgtggaactattcttttatgtaaaaagccggagttgtgtggtatatttgacacataaccaacgatgatgtaagagatataaattattaaattcatatacaaattctaaaatttcaaagaacaatacttgatgcgtatatttcatgcttcaatattagtgtttcctcatcgatgcatatctaccctgcttattaatctgttggttcatataggtcacaacagaattttgagaaagaataatgctatatcctcctactaatttatgaagaaaataaacacatttcacgtactggaaacttagaatacattcaatactttcgtgaagagtgctaacaacacactcaatcattggtaaaatctattagaaactacacaatacaaggtaaaggcattaaatacgaagtgaaatctttttt

SEQ ID NO: 179042 - DNA, 317 bp, Glycine max
ctataaaactcagcttagtgaggaggtgcccaacaaagagtattgtttttttttgaaggggaaaagaaagaaatgtctctgatccgtaagccttttaagttgatccgcaagagatttacggatcatcttgattcgaatgcttaatatcaacatacggatcctcttgatctgtacgatttacggatcatcctcatgcatatccgacacaaatgcgaacaaagcgtacgggcagttatgacatttttaacatatggtggatgcaccaacaataatattgggtgtgcctaccaatcaccctacagctattggtggcctat

SEQ ID NO: 179043 - DNA, 175 bp, Glycine max
aaaaaaaggaagagaaaaaacacaggacaaaaaacataaacagagcacgaaaccggaaaaaaggaaacggaaaagaaaggaaaaaacaccggaaacaacaaaacacacccgaaagcaaaccagccacaaaaaaaggaaagcaaaaaccaaggacgacggagaaaaaacaaaaaga

SEQ ID NO: 179044 - DNA, 389 bp, Glycine max
agaactcaattctctaatgggaagagtgtccattgatgaaaaaaacccccccacaaagaatcgggtataccttagataggatgagggttctccttatatagaattatagatatacctctgtctcataagtaacttacaataaatttttggcacttgtattatatctactctcttgccgttgattttcttcatttggtaattgctttggtgttataattcaaaaatgtttttaaatcataaaagataatcttacaaagatggattgtgatattttttttatggcaaatattagttgttaaaatcttagtgaagacttaaactcataatccgtgtattatttttactttatacatcaagcccatcttataatttgatgaatctgctgctta

SEQ ID NO: 179045 - DNA, 305 bp, Glycine max
  unsure (1)..(305): unsure at all n locations
gcacaacagcgngaccctgaccggactccctccgacaaacccagcgagagggacccgacataccaggagtgcgggcggggcacgacaaggacacacgggcgcaaacgaggccgcccaccaagagggcaccacagggcaaataagacagaggcccaccaaaacgaggcacaacgcccgcgaagccaacgacaccgacagagaggccgagcgataacgcgcccgaccagcgaatacccgaacgaagaaaaaaaaccacgcacgtcgcgggaggagagcgcacgcacaagcggaggaagacaagaaca

SEQ ID NO: 179046 - DNA, 385 bp, Glycine max
aatataattgaaaatgttggaggatagacaacggtcggagaagttatgcacaatttaaaattacaattggaaataattcactttcttgcattaggactgttatgtgcatataacaccttattgtatacatcaaaatgtacttttcctctctcttgcatgcatattatattatcttgtatggtagaatttctttgatatcgctgatgttttgaacagctgaaatttttaattgctggggctatcgctctgaagggccttggaggggtctctttctattcggcagctcttttggagcttgctacttggttgtagtcaaatcttctctatgaatatattggattcattttctcccatggcctaatttctagtaaactctaaataattt

SEQ ID NO: 179047 - DNA, 394 bp, Glycine max
tataaagaataaagtttggaccaattggagataggtatgaatgagatcacattgcatgtaattttcatgttgctcatctatattgacctatgtcattgagtgtattgatgtggtagtcattggggtttagttacatttgttgtagtgtcaaagacgcaatgattccattattaatgcatgagacgaactatgttgttaaagtgaaagtctaaaggaaaatagcatacagatgcacgcttaaggattttttataaaattgttacaatatgtagcccaagtaagagattgttggaattttccattccaataattaatgtggactaatattataagacaattatattagctatttatcattaatgagttgtatcttatgtgatcaacataaatgatc

SEQ ID NO: 179048 - DNA, 470 bp, Glycine max
  unsure (1)..(470): unsure at all n locations
ntgtcctctnttcgtctagaacatgggtataggcaatgtttttttcactntgaggtgagagatcctgngcttccttccactccatgcttcttgtggtgtcttctcatgcacgcttcttgttggagaacgatttgttaggtaaactgcacatgccactgcttcagcccaaaactccttcagcatcttcttgctcttgagcatgcttcgcaccatgttaagtatggtccggttctttctctctgctactccattttgttgtggcgatcttggcactgtcagtgggcgacggattccatggtcttcacaatatttgttgaacttatttgaagtgaactctcctcctcgatcagatctcatggccttgatggaaagaccactttctttctccacgagggctttgaacttcttaaagttttcaaacacttctgatttctccttcaagaaataaacccaggtttttctggaataat

SEQ ID NO: 179049 - DNA, 448 bp, Glycine max
  unsure (1)..(448): unsure at all n locations
agcttgcctaattaacctgaaattgtgtgatatatgattattaaacacacaaaatgaaaatactaagtatttattgcctatacttaacagaaaatacttacaaccttacaaaataaccataaattgggagagtttgatacaatttatacaagttttatacacaaaagttagtcattttcactgactaacacgcctcaacatttctttttttcttcttctttttctactttctgcattttcctctctttcttcaatttttcacccctcttagcatctccacatgcatggctatttatagaaaaagccatttggtgcaagggaagctcacccaggtgagtagcttgcttagggatgaagctttntctatggaagcaaagttaccatgatgattcaccaagatgttttgatgatgccaaagctcaaagagttgtttcaagattaaagaatc

SEQ ID NO: 179050 - DNA, 469 bp, Glycine max
  unsure (1)..(469): unsure at all n locations
tatcataatcgattacatagctctntntgagacaatgtttgtttntttaggagtctctactttaatcgattacttctctcttaaaatgtgcttcagaagtgatcacaacttttaataaaaatagaataaggtgtcgtaatgggtgcaagctatgtaattgattacatcaagaatctaatcgattacattgttcttgaaatttttccagttgttgggaagaacactttaattgattgaaatgataatataatcgattacttcttccaaataatcgattacattgtatatttaattgattacatgcggttataactgttttctctataaatagacaccttgtgttctgccttttaataacatctaacaacttctgaatgtgttagaattatgagctaacattagtaaaacaaagaagagaacaaaaagtgcttataaatagtgtgactcacaatttttaatctttgattat

SEQ ID NO: 179051 - DNA, 143 bp, Glycine max
agcaaaagaggcgcagggaacgagaaagccgagaaacaaaaaagaaacggggcaaacaggaccaaccacaaccaaccaacaagagaaaacaagcagcccaaggaaaaccccaaaaacgcgaaaagagacccaccaagagacaa

SEQ ID NO: 179052 - DNA, 428 bp, Glycine max
  unsure (1)..(428): unsure at all n locations
aaactaagctatttcagaaanaaaaacaaaaagggtgctattgtttattatttcaggccacatcggagaaactctgttattgtttagaaaagtaatacgaaagttaaactaattttagcttatagaaaaactctcatatattttttttctcctaatgttgtggataagtatacccaaagagatccttaatatagtcgagcagaacgaaaacacaaatatgaaatcatacactgttttcacattccatacctgcccatggtacaagctgttgaagtagaggcaagcaccaaagtgcttaaagaagagagttttgtcatcataagggaccctatgcaccacatcattgcaggaaacatacctcatatacctcacatcatactttctcaacttgtcctttatgaactccccaaaccgagagttcccaactc

SEQ ID NO: 179053 - DNA, 432 bp, Glycine max
tactaagctcgatatagattccttgctaaaatcgctgccagaaactatgttccataaggggctaagtttggcaacaaaatattatcagaaataaaaaaaaggaacatttaaaaatttaggaaggtgtatttaacatttgaaaaaaaaactcaatgaagaaaagaaagaaaatatttttgggtgaactagaaaattccttagtggagtccaaggattaatttctcaaggtagtgagatccttatttaagaaattgacatatctcgtcatatatatatgtatatattttctacatatgaagctaaattgaaccctaacaacatatataaggatgaaattatttatcaatgtaacaccatgttaataaaagaaaaagaatatatgttgaaccgaattcaattcactggttactagctaatccaattaaatcactc

SEQ ID NO: 179054 - DNA, 464 bp, Glycine max
  unsure (1)..(464): unsure at all n locations
gatccttgagtcacctgcggcatgcaagcttattcttttactgaattgcattgttttttcttggatgaatttaaaattgggctgcggaattcattcaaagcatatatagagaggccatctgaattgcattttttgtctactatacaggccagtgagagatctctagttggtattcaagaaggatgtactgtgatttatgatataacaagtaaagatggggggattttcatcatttgtaacagctggcattgaatgctttgtcatgattcttgagtttgtttcaggtaataagaacatctgttgagagcacatatcatggcaattttgaactaacatttcatttcatcagtatttaaaatcttcaaattacatcttttcttttgtatccttttagtcgtacttaaagtcagtacatcattactatatnttgattcatattaactaaaaaagttgtacagttttat

SEQ ID NO: 179055 - DNA, 386 bp, Glycine max
ctaagctaacctaatgagtttctagtattttaatgttgcttattataaaaatgtaacttgaaataaataattttcaaatgtagcatagatttattttttttaacacaattagagatgtcaaaatgaactaattcaatccaaccctattagttaaaacactggttggattaattcattttaacattaaatttaaatttttaaactcaatccaatcctagggttgcaacaagttgaattggattagtccactaattttatttgaaaaaaaaagaaataaaaagttttaagaataataagtaactcataagttgacccataaaataaataaatctgaataatataattaaatataatatcaccatcataaaaatattatatctaataat

SEQ ID NO: 179056 - DNA, 427 bp, Glycine max
  unsure (1)..(427): unsure at all n locations
agctttctaaaaccggctggaagtgnatttcatctcgaccactacttgatgactctgaaagtagggcctaactcgtcaagccgaggagatgagtgttagcgccacctttttaatcatttgatagcacttctcggcgtcatggagcatgcgactagtgaaatagatagggagctggggtttcccttcctcttgcacaagggttgagctaacggcttcatcgactactgagagatataggagtagtggtgctcctagcctaggtcgactcaaaactggcggtgtggctatggacttcttgaaagccaggaaggcttgttcgcaagtctcctcccatgagaagggttcaatctttttgagcaatttgaaaatggctttaccttttcatgagctttggaggaaccggcagggatagaacctccattcactt

SEQ ID NO: 179057 - DNA, 462 bp, Glycine max
  unsure (1)..(462): unsure at all n locations
tgtaggattatggggtacccatcacatgtggtacnatgnggcggtcgggcganggngcacaacaagtttttccacatccacaatgcgcgcataaacccaccatcccctgttgcccacctccaactgagctcacgtactcccacgtagcccatatcctcgtttctctcaacaccgggtccccatcaatcctcccaagcttccacaacatccaagcaaaacaacattcacacagcacaagctatcacagccaagcaaaacagagcaaaggcagaaaactctgccaaaacaccaaccaaaaatcacagcttttcccactcaaagaccccagtaacaattccttcgatccaattcgttaaccgttggatcgactccaaaattgtactggaagtctatagtgcataagcctacattnntgaccgtgggatctactagcaaacatccagaactcattttacattactc

SEQ ID NO: 179058 - DNA, 435 bp, Glycine max
  unsure (1)..(435): unsure at all n locations
agcttcantgcaagccagcggttttattatattgcttggtggcgaanttgagttgtggagtgcataatcatgaattggtcaagacattagttggacatccatatgcagggcgattgactaaagctaaaaaaacacttattgctgatatgacgaagtccatggtgaagccaataaacattctgctaactctgaaggaacacaataccaatagctgtttgaccattaaacagatatacaatgtaagaagtgcattccgttcttccataagaggaagcgatcttgaaatgcaacatttgatgaagtttcttgaacgtgatcagtatattcattggcacaaaataaaggatgaagacgtggttcgtgatatcttttggtgtcaccctgattcagcgagagtagtcaacgcatgtaatttggtatttttgaagatagcac

SEQ ID NO: 179059 - DNA, 464 bp, Glycine max
taatggtcttcttatacaggtcaatcccttggtttgatttcttgttaagtcgacttcttttctccttgttaaactggttccccgaatgattcctccagcttgagccttgtgtgaaattcctcccttggttgaatctcgatggtcctccttggttgtagccttagaatccatggcaattctgagctcccatgtagttcgcctccctggaagaatcttcttgggctatgtattgtccaggctcatgtgctccaccgcagatgttgcatccccctatctgcatgatcgaggagtgaaagggacttaccacttgtagttgttaatgaagctacgcgatggtctccgtcatggcctctatctgtccggccaagagctgtgtttaggtcagcattgcatcttgggttgtgagttccacaaggattctctttgttggcgtggatgtacaatcacaaatgatggcgtgatca

SEQ ID NO: 179060 - DNA, 424 bp, Glycine max
  unsure (1)..(424): unsure at all n locations
agcttaatgatctttgggngaagtgattttttggcacccaacaaaattccatctgcagaagaagtttagcagttaaatttgagcgggttaatgaaatcactactataaaaatgttgttctaaaacaatcaaaaacaggatacaaggacggtcgatcattgactataagcctaccttgtgaaaagttaaatcttttaacaatgggtcaaaaaatatataatgggaacaacttttaacttcagcaccatcttagaaagcttacttgataagtgaagtttcaaatgaaaatttgaagcaaattgtgacagattgagtgccgcaatgcttaaattgatgaattagtttgctggaattggtgtaaaggttgcatcgcaggggcacatgaagaaaggatgggcatcggagtggagcggagatgctgttct

SEQ ID NO: 179061 - DNA, 463 bp, Glycine max
  unsure (1)..(463): unsure at all n locations
ntagttgttaagcaaatatacatgaatgatttttacttatatctctaacagtaatgaagcaagaaaaaaaaaaaaggcatttacagacagaaagaaataaaacgaggaatggaaaaaggaaggggaatccagaagaatgtaaatatttacatcctagagaatctggctgtgcagactgggatcgtaattagaaattaaattgtaatcaccaatccaaattggcactacattaaattaaagctcacatatttcacaggtcaatggcaaaataaaatggacaaccaaactattcaaaaaagggaatcagccaaaaatactaaagagattttgattgaagtttgatgctcaacaatatccccaagcaattccaaattccaataataagaatcagcaaatattgcccgtctattgacacaaaaaaatacatctataacatacttcaaagaaatatatgtntgcacat

SEQ ID NO: 179062 - DNA, 341 bp, Glycine max
acaccgtgatgcaaaaagctaaagatcataactttcttgttacaaagagatgatctctagaacaaagaatgagttgatgattgaatcaagaacactctcgaggttcaagaggaaatttgatttcaagaatcaagtttcaagattcgagctcccgagaattaagatcaagattcattcgagaatcaagagaagacttattcaagagaagacttaatcaagataagtattaaaaagttttttcaaaaactgagtagcacatgaatttttctcaaaaaccttttaccaaagagtttttactctctagtaatcgattaccagattattgtaatggattaccagta

SEQ ID NO: 179063 - DNA, 462 bp, Glycine max
  unsure (1)..(462): unsure at all n locations
ggaagaaagtttggtttttacagtgcctacctctcttgtatgtattttgtatngagcgctgaattatgtgttgcatcttagtctctatttttttcatatgtgcatcatgcttcatcatgtaggagtaagaagaaattgtctaatttctttagtgcataaaactctttgttttaatagattacaagctaaccataatcgattacacaagtgtttttagcttgcaaagaagtttttcgtatcggtttaatcgattacaagctaatcataatcgattacacagtttagttgagacaatgattggttctttaggagtctctgctgtaatccattaccaggtgatcgtacaggggattgattaaatattggtttatcaaaagtttgtgatacgatctttggaaaagaagctcnttatataactctgatctttacagtttgatttgagttaaaaacccaatcaccccc

SEQ ID NO: 179064 - DNA, 457 bp, Glycine max
ggaccttaagcaccgcggctgcagctttgatttccaattgcttatttgtttaagctttcccttgtaggaaaataaatgagaaattgaagatttgcatgaaaatttgaaaaataccagaagaatccaggttctgaattccatatcttgattagaaggaaaggtagcataatcaagtaaagcaaaaagggattgaatttgactagtttctttattgttcaaatttcttgtattgtttgattgtcttaaactaattttcttgtttcaagcatggcaattacattcacaacttattcataatttatattttatatgtacttccttgattcctaacaatctgctcttgatacagcacacatcaatcagtccagagtggaagcttatgactgttgttggagataacctacatgactgctggtggattctcaaaatgggaaggtacatagttcttctgatcaag

SEQ ID NO: 179065 - DNA, 357 bp, Glycine max
  unsure (1)..(357): unsure at all n locations
ntcacctttggtcctcctcatagttgttgcatgatattacatgctctattttcatctcccactccaagtaggccttcggatcattctttcctttaaagggaggaatgttgagtttaataccatcaattcggttttgtctaggaacaccatcattccctcttctcctcctttcttcttcattatgatctctattcttcatttgatccaacttctcatggagcacatcatctcgttgtttcattaacctctccaaatgttgcatcaaagctgacatttggaattacgaaagccccactccatcattaggaattgttcctgccatctcaaacaaacaaatcaaacgtaacaagacaatta

SEQ ID NO: 179066 - DNA, 420 bp, Glycine max
agcttgctaacccatggaatcttctttatctcccacacatttttgggtgggccattcttggatggccttgattttctcagggtccacttggaccccatttctaccaactacaaaacctaagaaaactatattatctacacaaaaggtacacttctctatatttgcatagagggtgtttttcctaaggactgaaagaacttgcctgagatgtcctcagtgatcatctaggctcctattgtacactaaaatatcatcaaaataaataactacaaatctacctatgaaatcccttaagacatgatgcataagcctcataaaggtgcttggtgcattagtgagcccaaaaggcatcactagccattcatacaaaccaaacttggtcttgagagcagttttccactcatcaccctttttcatcct

SEQ ID NO: 179067 - DNA, 444 bp, Glycine max
  unsure (1)..(444): unsure at all n locations
tctttnggaccttgaacaagcaattaacttctctttctgatccatgctatgtgcccgcgactggtctctttcttcccttcgcaacttgagttcactattgctaccccatagagctccgcgaaatttgttccggccatactcttccttgcgagccctcttggtttcttgttcaagggctcttgcggtaattgcattctcttcccgtaacccggcacactccttccgaacgtgtgtagcggccaacttgaacttctccttggcaagttttgcctttcctaactcgcttttgagagtttggacttcttcgtcctcttccgatgcttcaaaactctcttcgctgacgacttttaacttggcgagccaatctaaacctcgtatatgagctntcagccattcgtggtacccaccaatgatgccattacgaatacctctaagctcttgatc

SEQ ID NO: 179068 - DNA, 377 bp, Glycine max
  unsure (1)..(377): unsure at all n locations
aagcaccgcggctgcagctatgttatctattctaaattttgtgtggaatttaacctatgatttattatatatgagattttattttcttatctagaatagtcatacaaaattagtttatgaaattataaacattgatcacattttatttaaagaactgttgatgtcgatatttgtctataatcgaaatttacattttcatcatgtatacaggatcatggcttctccacctgcctggcctcctcctcctcctcctntagnnnaaangaccatcngattcacctncggccatgactcggacccgcaaatccccacatggatgaccgtggtttcttataccaatcggtgctgacagaccagtgatccatgttatcctttta

SEQ ID NO: 179069 - DNA, 423 bp, Glycine max
  unsure (1)..(423): unsure at all n locations
tctaaactntgtacaagaatgaagctctgttattactttttatacaagnggcctcagatatcttaagaagggggggttgaattaagatattccaaactgtttcccctaattaaaaaaaactatttcactttttactcaagttatgaattcccttaatgacaatcttcttaaatattaattcaaatgaagcaacttgaattatgaatataaagcaataataaataaaggagattaagggaagagaaaatgcaaactcagttttatactggttcggccacacccttgtgcctacgtccagtccccaagcaacccgcttgagagttcccctatcttgtaaattccttttacaagttctaaacacacaaggacaatccttcgctttgtgttagagatcctttacaacaagagactcacagtctctta

SEQ ID NO: 179070 - DNA, 471 bp, Glycine max
  unsure (1)..(471): unsure at all n locations
ggaggganaacttgatgccttggtcaacctagtaactctgtttgctatgaatcacaaatctgcacctgttgcaagagtctgtggtccatgttcttctatagatcaccatatagatctttgtgcttctttgcagtaatctggagtcaagcagcaacctgaagcttatgctgcaaacatttataatagaccccctcagcagcaaaaccaacaacaacagaataattatgacctttcaagcaacagatacaatccaggttggaggaatcatccaaatctgagatgggcaagtcctccacaacaacaacagtctgtccctcctttccagaatgctattggtccaagcaagccatatgttcctcctccaatgcagcaacaacaacaaagacgacaagcagttgaggccccttctcaaccttctttagaggagttggtaaggcaaatgaccatccagaatatgcaatttcagcaaga

SEQ ID NO: 179071 - DNA, 437 bp, Glycine max
  unsure (1)..(437): unsure at all n locations
agctngcatcaagaaagttttgcttagtaattgtctccaggaactcatggagcttcaccaggtagattgtctaaaaaaatttcttaagatctttggaagcaaacatcatgttattttgttctctccctttctctgctggtttcatattgtcatggatcttctggtgcttatcctttaatgtattacctcacacgattaatttgctttgtttaataataacacatattttgttctaactccatattagcttgagttctatttgagtatgttgttgtgtattttaggaaagaaagtgaagaagctgtattttgttctaatgcgtattttgattgtacatagtaggctttgcgcatttctaaggtgttgtatagcttatatcggttgtactctacagttatttatgtatcggctgctattttatcatggtntccaactac

SEQ ID NO: 179072 - DNA, 466 bp, Glycine max
  unsure (1)..(466): unsure at all n locations
tgatgatcggagtgagaaacatgtgttcattggctatgtatttctgctcaaaaggctacaaattgtacaatccaaacaatggaaagacaattgtgagtcgagatgtagagttctatgaagaaggcacatggaattgggaggagaaagaagacacttatgattttttcccgtactttgaagaaatagatgaagaagccttgactccaaatgattcaactccagcactttcaccaactccttcaaccaatgaagcctcatcatcttccgaagggagtttaagtgaaaggccaagaagaatgagaaatattcaagaattatatgatgaaactgaagttataaatgatttgttttgtctttntgttgacagtgaacccttaaactttgatgaagcaatgaaagacaaaaggtggagacaagccatggaagaagaaatcaaagccattgagaaaccaacacatgggagtta

SEQ ID NO: 179073 - DNA, 442 bp, Glycine max
  unsure (1)..(442): unsure at all n locations
agctntaacaaattattctttgtgggtaattatcttttttggntgacatggncaacaaacattggttatgctgaacaaacaatttcaaacttcttaaggcaatcatcgaaatgatccttagaaggacaatcaaccaaactcccccagacatccatcacataatcccatgcatttttttgaccaactagagatttacattttaccttgacattcttgtcaatgtgaaacctacacaacaagttggtacacccagggaatacagttttcactacattcatcaacgttaggtctctatcggtaacaataactccaaggaggacatcacatcttataaaaagacattgaaaccgttctagagatcaaaccatattatttagacgttctccctccaaataggcaaaaccaacagagaatgtcattccagttggtatcacaccaacta

SEQ ID NO: 179074 - DNA, 466 bp, Glycine max
  unsure (1)..(466): unsure at all n locations
ggtattgagaaggactactaattntcatgtttactcttttgctctttactacattgtttctaagctaactgctgatatggctcagatttgttttcctaaaggcttttagccttcgttaatatattatgcgtttacaaaaacagtcaaaccaatttttttgtcgagaccaaacaactctagaataccaaaacaaaaaacactaattttcttttattaatattatgttggtccaattgaaactaagtattggagtataaatgtgtgatgaaggcccacattgagtagaaatgaaaaggttgaacattatataaatgaggaaaatatcataaacttatgtaagggttttttgagttaaagtgtggtatcaaattctcttgtgtgattgtttatgacttattgatactaaataagtaaggctntcgatctaattcttatcaatgaaacaacaatatgagtgaaagaaagt

SEQ ID NO: 179075 - DNA, 401 bp, Glycine max
agcactacgaggtacctgtttaaaaaaacagacctgttgagattaagggagctagcatctttagtaagtgatccagttgattttcaagctcatcatgggaagttgcttcaaaattcttatagtagatgttgaggaaggatgcctaaagaccctgtttcagttctatgacccgctctaccattgcttcacatttcccgattaccagcttgtccccacacttgaagagtactcctacctattaggtttacctgtgccagacaagatacctttccatggttttgagcctacccctaaaccctccgacatcgcagccgccctccatcttagaactctcatcatccaagcacaccttacctctaaaggaagccttcaaggtctccccacccactttctttaccaac

SEQ ID NO: 179076 - DNA, 278 bp, Glycine max
ttaacaccgagatgcactatcctaggcgctcttttttcccacccccgagataaccacccctctttgaggcactcaccttataaacttccgcaacaggggaagaaaccattggcctgtcacaaaacctcccgagactcccagcacatgccgctatccgactccccaccgaaaattgtcttccgaaaaagaaatgagctgaagagtaacagcaggctgcataccttcgatgggattatgtggcccatgatctccgtaagccattgtatcaagacactgca

SEQ ID NO: 179077 - DNA, 318 bp, Glycine max
cgcatcgtcattggcatcatgcggtacactggtatcgccattggcaacagcggaaccaaagctgactcactgcgcccatgccgctattcagactggcgagacatgctgagtcactgcatgttgccattggtactggcgggacatgccaacgtgggcagtcccgccattggcgcctgcggaacatgtaggggatggcatagcatgtgcgtttgcagtgtttcggtctgaaaaaagatgggtaggcttgcacgggttgcagtgtgcagtctgaacaacatgggtaggcttatggtttgcacaacacgctgcatgtgaacg

SEQ ID NO: 179078 - DNA, 419 bp, Glycine max
  unsure (1)..(419): unsure at all n locations
agctnttggatcaccaagattatttgtcactactgcagcgaggggcactgttggccatattgcaccagaatacctatccacaggacaatcctctgagaagactgatgtctttggatttggcattctcctccttgaattgatcacaggccaaagggctctagagtttggaaaatcagctaacaacaaaggagccatgcttgattgggtgagtttctttccctttattatggggatgaaaacaataaaatggatatattttggaaaccaaaaatatatttaagtcatttttgtaatggagtcattggagttactatatggctccttaaaatctccagaagaataactatctgtggcggttttataaaatctagggacccaggtacaaaatattttcaaatactctcactgcttactctgca

SEQ ID NO: 179079 - DNA, 466 bp, Glycine max
  unsure (1)..(466): unsure at all n locations
ctataaaactaagcttgctttcactcctccactccaatgctccttcngtttanttccaaataattcacagattcaaacagtttcttaacacaaacttaatatcataaacttaacatcgaaactttttttttaaactctttcaagaaatatcgatcactatatactgtagaattaatatctattggaatgtgtttcagacttaccaccagttcttaaaaattacaatattataaatttattatgttcattgtatatttatgtttgattaaaagtaaaaatcttaaattaaaatattattatttgttatgttcattgtatagtggacaaatacttcatataaaaaattaaggggaagactcggccagaataattgaaaataaattaaaaatataagatttaagttataataaaaataaaataagagttctaaatgaatgtctaaagtaaaataatacatgcaatgtga

SEQ ID NO: 179080 - DNA, 432 bp, Glycine max
  unsure (1)..(432): unsure at all n locations
agctntagatatattgagactgacaattctgtttgtagtcatgactgttggccattagcaatgaatttttaagttttaactgttgtttgttgtgttccttccagcatcttaaaaaatcgaattcgactttgatttgtaacaatgctaacaaagttcatcaattttcagtctaggcagtggtagtaaatcatttgacattataatgagtttttaagttttatcatgtttagcctttcctttcattcactgtattaatttcaagctcatttaattaatttactatttgggagaagtctctcctcttagacagttttatatacatctatatatatctgaatcacgatgtcaatttctgtattatatatcagtcaattcattacccataatctgngggcctgcaattaattagttatgaactgtgatatttaaaat

SEQ ID NO: 179081 - DNA, 458 bp, Glycine max
  unsure (1)..(458): unsure at all n locations
tcctgacaagctcacccagtgatcgtccagcaatctattttatcaatagggatatgtaatttctgcaacctatgatagaaaataggttgacacagatatagcacagacctgccgcctttcagatgatgatgatgcaagggatgtaattaaagtatccatcagaactggcataatttccctaagagtctttggagtatttgccacaatagttttccacacatgtaatgcagcctgaaaaaagaaaaatgcatccagtcgttacatttggtaagcatattccaataataataatgaacaatatatngactaaaaaaaaagtaaatgtagtagtcattacctgacgtactgacaaactaacatcagctcggaccatgtacaatgcagcaagtacttcattacgtttatcacgtcccagaatctcaatgatggcacgcccatgtgcctcaatactagaacct

SEQ ID NO: 179082 - DNA, 399 bp, Glycine max
tcggcacgagaggaggcctcgctggagaatatgatgggatgaccatccaacttcttctagctatgagatctctgatcaacattatcaatgagaagtgaggatgaaataaatttatctcttcctgcataaattaggtccaaagcgatatgggagtctgattcacaaatgatggatctgaatccaccatccaaagctttcatcatacaattataaatggcaatgatttcagctctcaggctcgttgaaataaccacaagaacctgaaaagcaagatatataatttcccaagtaatcacacattataccaccaaaccagttattctcagatttccaaaggaacttccctctgcgttaggcatcacaagagattaaacgacctggttggtgactctcttgagc

SEQ ID NO: 179083 - DNA, 437 bp, Glycine max
aaactaagcttggtattagctctaagctgcatgcatttgttttttattgtacaccttaagattgtattttgactacatgaagaaaaccttacacatcatgaggttagcaccacccattttttaatatttatttatttgacttaagtttaaaattgtcatgacttcacttcaaaaaaccaccggcactctaacttaatggaatcggaaggaacacttttgattattcttgacatagatagcaagtgtcaatattacattattgactaagacagactaaatatatgcgaagatgaaaacgttaagagacgtttaattaatttagaatttaatggttatgcacttaagtgtaaaacaattatattcgtcatccaataataaattattggttgaattattgtaacagtattattttaaaacgcaacaaacttttcacatat

SEQ ID NO: 179084 - DNA, 367 bp, Glycine max
  unsure (1)..(367): unsure at all n locations
agcttggttcgagggacttttcttgtttaagtatcgaagaacgangaagaacgaatgatgaacgtcggagaacggttcaaacctttgcgagattccttacggaaaacgttacggaaacgtttcggaagcgcctcggcttatattttcttcacggaaataattcttccaagcaaattctaaagagagagaagtgcctaatgggctggaccccttccttctttatttcctcccctatttatagcaaaataggggaggtggttgccgcccagctcgcccaggcgagctcatcttgcccatgcgagcatggttgcttacttcagaagcaaccgcctttgtgaggaatcttctggagtgtcctaatgggcct

SEQ ID NO: 179085 - DNA, 447 bp, Glycine max
  unsure (1)..(447): unsure at all n locations
ntctaattgttntcatacacgtgtcatattcttcacattacaactgctgaccagtcattctgtcacaaaattcgaaaactgtgtactcgaccgctttttctaagtcaacaaatgcaccctttatacttatagtataaaagtaaaaatatttttgttgaaagataaaaatctatgtttatgattatttttatatttttttataattnttacaataaatatattttttaattttcaaatcaatgtctcttttaagttaaactaagttctggataaaatattattttggtcatacaaatgtaaaatactactcatttaaatcattaattaaatcaactttttttattataaatacatttataatcaagtaaatatctaanaaagaaaaaagtgtattgcttaattaatagattactcatatttctatttcttctttcatatcttttctga

SEQ ID NO: 179086 - DNA, 463 bp, Glycine max
  unsure (1)..(463): unsure at all n locations
tttaccaaagagtttttactctctggtaatctattctgttaactgngaatcgattaccagtagcaaagtttgttttcaaaagctttcaactgaatttacaacattctaattaatttcaaaatggtgtaatcgattacaatatattggtaatcgattactagtgtgtttgaacgttgaaattcaaattcaattatgaagagtcacatcctttcacaaaaatgctttgtgtaatcgattacaatgatttggtaatcgattaccagtgataagttttgaataaaaatcaaaagatgtaactcttccaatggttttcaagtttttctaaaggttataactcttctaatggttttcttgaccagacttgaagagtctataaaagcaagaccttgacttgcatttctataacttttgaacaattattacaatcctttacaacctttgaatcttcttgaacatcttcttg

SEQ ID NO: 179087 - DNA, 426 bp, Glycine max
  unsure (1)..(426): unsure at all n locations
agctttcttcgctaagttttttttgtttttaagncnnnncngagggcagngatcctatatgcagggaagaatttctccaagaacaccttcttaaggtcatcccagctgaaaatagacctgggagcaaggtagtatagccaatcttttgccacttcctctagagaatgaagaaaaacctttagaaagatatgatattcttggacatcagggggcttcatggtggaacaaacaatatggaactccttaagatgtttatgaggatcttcacctgcaagaccgtgaaacttgggcatcaaatgtattagtccagtcttgagaacatatggaacaccctcatcaggatattgaatgcacaagctttcataagtgaaatcaggtgcagccatctccctaagagtcctctcacaaggtggaggttgagccatg

SEQ ID NO: 179088 - DNA, 412 bp, Glycine max
  unsure (1)..(412): unsure at all n locations
ntcaagttaaaagcctctnttattncattctcttccttgtggtcttcaaaccaattttctataaagtataacaaagtaatgaaattgtacacaattagaaaaatataaattttacaatttcaattaaaataaaaaataacattattatccatttcaacctttgaactaattcattaacagaagaataatttaccttaaaacgctggaaaaaatgttcctgataatctttttggaatcgctccccatgtaggccaaggctgaccaaattgttgcctaatggacaaagtgatagcctttgccgcaaccttagatggatgtaacctaaatataaaagataatgaatcaaaatagtaaaatatcatgtgatgtatcatatataatgataattatataaattttgtaatacctacgc

SEQ ID NO: 179089 - DNA, 446 bp, Glycine max
  unsure (1)..(446): unsure at all n locations
ctgcagctaaatgtttgtgtatgaaaattgttttattagacatngaaggcgtaggctggtttccgcagtatataatatcatcttaattacattgtaaagtataatatagaatatagagacaccaatcataatcgtcagcatcacgagacatgtacagcactaaataaaatatgagttactcacttcattttatttatatatcaaaatttaaaataacggatgttcttttctatttataagattcagatattatgttcaagtaatatattataattaatttttaattagttgaaaattccatttaattatttgataaataaattatgtgtaatatctttctaataactgttaacgttcataactgagactaatattattcaaagggtaagaacgaatctccaatctttgttatattcttatgtttatactcgatatatttatggact

SEQ ID NO: 179090 - DNA, 470 bp, Glycine max
tgaaggacatgcacaaagtgtgactatatgatgtgtatagtttgtgttcaagcaaatgctcacccccccccctaaaatttaattggattgggcttctccccatccaattaaatttatttcccaacacacacatcaaatattcacttaatgcatgtgaaattacaaaactacccctaatacaaaaactagtctaggtgtcctaaaatacaagggctgaaaaatcctatatttctaggataccctatctacattatggagccctaaatacaaggacaaaaaataatgaaatcctaatatgtacaaagataagtgggttcatacttagctcatcggcccgaaatctaccctaaggctcatgagaaccttagggccttctcttgcatctctggcccaatctacttggagtcttctatccaatgcccttgcggtgtaggattgcatcattccctcccccttgaaatggatttgac

SEQ ID NO: 179091 - DNA, 282 bp, Glycine max
  unsure (1)..(282): unsure at all n locations
agctngcatgtccaagtttcttgggttttatctctcatttatttccttnggaggaaattagacatactacattttgatttgatagttcactaatattaatcttataaagatttcctttcctcttagcaattaaaagttaggtcttatttttgtgttggacaacacactcttctttgctaaaggaaacataaagctcgttgtcacataattgactttgctaagcagattgtgttaagtcttttacaaaaatacctatcatggtgagatagggataatagcatc

SEQ ID NO: 179092 - DNA, 441 bp, Glycine max
ctaagcttgaagtctattaaagcttgaggaagttcatgaagattttgttattatactagagaatcatcttgagtcaaatcaaacaaagtgttgtaacactgttagcttagttggacgaaataaacttgagcgaattgagtgaaccctagctctactaagttagcaagtttccattgtatttgaacttactatctaaaaaatccttgagtgattagaatacatattctatgaaacatttattgtttgggaaagctagaaatggcttcatgacaaaaaatacttgattcttaatctcaaagagagattaagggtagtgccaaaagtggcttagagaatacttcttgtagagagaagtggaataaagaatactaggttataatcaaagttttgattagtggagcccttcaagttttgaaggagaactggacatagcctaagagt

SEQ ID NO: 179093 - DNA, 434 bp, Glycine max
  unsure (1)..(434): unsure at all n locations
agctttgagggtgcgtagcccaccatcnttttantatttagcatcgataatgggtctaccatcacgatcatcgtctccctttccatcattgggggtaccacctgtgccaccatatccctccaccttttgggcgtgttctttgaaagatccgtcccccttttgcaaatgttatgtagttgcatcctatctggaaccatatcaaaattgtactaatactgcctaacaaaggcaaccattaggtctttccaagaatggactcgggaagattccaagttagtgcaccaggtaacagctaccccagtaagactttcttggaaggaatgtatcagcaattcctcatcttttgcgtattcccccatcttctgacaatacatctttagatggttcttcgacaagtagtcctcttgtacttgtcaaagtccaccaccttgaac

SEQ ID NO: 179094 - DNA, 435 bp, Glycine max
  unsure (1)..(435): unsure at all n locations
ctacggtagattgtgcgcccatgggctaagttttagttcacttatctttgtacatattagattagggtttcattatttttggaccttgtatttaaggctccataatgtagggagggtatcctactaatgtaggatttttcatcccttgtatattagggcacctagactagtttttgtattaggggtagttntctaatttcacatgcattaagtgcactatttgatgtgtgtgtgttgggagagaaatttaattgaattgggagaagcccaatccaactaaatattggaacttcctaagggggaggtgagtatttgcttgttacaccccattgccacatcatatagtcacactntgtgcatgtccttcatgttttacatgcctcatgacacctaagcaaacttaacagagaatcttggacttgatcttggattatt

SEQ ID NO: 179095 - DNA, 411 bp, Glycine max
  unsure (1)..(411): unsure at all n locations
agcttctagccaaagggttttactcntgttttaattcctttgatagcccttttgagccttgtttccctttccttgttttgaagctcactacaagccttaagtgaaaaaccatgatattaccatatccttaaggaattttggagctttggaattgttttgggaataagagtggggggtttttgtttcattggacaacttgttttgttgcctatgcttcatgatgtattttgggccatacttgatatacattgtatattggttaaatgttggacatgctgaatgaaatgttgtttctcaaaggcaaaaaaaaaaaaaaaaatcgaataataaaaaaaaaaaaaagaaaaccactaagctgagtgaataagatcttaaatggcacaagaatgacgaaactcttggttctactct

SEQ ID NO: 179096 - DNA, 433 bp, Glycine max
  unsure (1)..(433): unsure at all n locations
tttaaaattaaagtgccttcttggatttttggtttgtatagaaggctttgactaaatcagagtaaacaggcaattttaaagacatgaaaggaataagattggagttttcaaatgcctgaatgcattcaaaactctcatttgaaaagagatccatatcaatgaattttggatcaataatggaacgagaagaaaagagatttgtgtatcgtattcggatgaaaacaatgaggaagagggaatagaggaaggaattggcgtttcctgagtctcagaatgccattgactctgattcgaagaaccctttcgcttctttgatggttacgccattagaagagattttttgaatttttaatcgggtcaaatgaaagagaatgaaaaaagatgaagtttgggctttgtggggagtgattnggacaagaaatgagtgagatat

SEQ ID NO: 179097 - DNA, 437 bp, Glycine max
gcttctttggaccttgaacattcatttaactcctcttttagaaccatgctatgtgctcgcgactggtccctctcttcccttcgcagctggagttcactattgctaccccatagagctccgcgaaatttattccggccatactcttccttgcgagccctcttggtctcttgttcaagggctcttgcggtaattgcattctcttcccgtaacccggcacactccttccgaatgtgtgttgcggctaacttgaacttctccttggcaaaattcgcctttcctaactcgcttttgagagcttggacttcttcgtcctcttccggtgcttcaaaactctctttgctgacgacttttaacttggcgagccaatctaaacctcgtatatgaactttcagccattcatggtagccaccaatgatgccattatgaatgcctctaag

SEQ ID NO: 179098 - DNA, 453 bp, Glycine max
ctagtgctaacactgagatatatccaaaggaagtatgtttatctgtcatgacaaggagcagaatggaaacccatgtggatgaaagaaaagctgagaagaagacggaggaacataaacaacagctggctgatgaaatgacgttggaaccggttgatgatttagttgaacttgaagaaattgttgaggaagcagaaggtgatgaagaaggagagatatcaataaaagactgtcaagagagaataaagaaggaagaaaaagaagaagaaacaaaagaaaaggaggaaaaagtaaaaaaattgaaaaatgaaaatcaaaaagagaaggttgttgagattgaaaagaagaagggcaagagtgaggctaactcaaaaaagaagaaaaagactactcctattgaatgcaaggaggtaccttatccattggtaccctcaaggaatgataaagagcgacatt

SEQ ID NO: 179099 - DNA, 407 bp, Glycine max
tttttccgaatcttgaagggagatattcaagtttttattttgttgcaaaacaaaataggtttaagatttttagtcctgccaaacttagacttgtaaagttttctggtatgcttctaatcttgtcattcttgcttctaaattaatgttgattgtgtgatccaggacatatcatgtatcaaggatctaacatttctatatgaagttgccactattgaggatatataccgtgcatatgaacagttgaaagtggatgagaattctttatattcatgcattggaattgctggtgctcaggctgcacaagaaatatcacgtgtagtaatataaccaatggctaatattggatcttcctttgctaatctctccaagggaatttgaaactaaaatctttcatctgttcctaattt

SEQ ID NO: 179100 - DNA, 382 bp, Glycine max
  unsure (1)..(382): unsure at all n locations
gagactaaaaatanaaaatttaaaatttttttaatattgaaaacatagttaattctaagagtgaaaaaaattattggtgagtatccctttattataattcgctcttcaaatacatcactttttttttactaaaacaaacttaattttatcattttattcaaaataatggcatcaatacaactgggagcattatcaaaagattgtgagctaccgtaaaatctagacacccaagctaatgaacgagcaattcgattgacttggctacgaacaaaactcacggttgagttgttaatggaaactattttttatttacattgagataaaatataaccagattcatagtgtataggatgataggactacatatacattactcttatat

SEQ ID NO: 179101 - DNA, 434 bp, Glycine max
agcttggtcatttagagtccgtattgccttctaggtctttgaggataacattttcaattgccatatgaccatgtaccaaaatacatatatttaattcatcttaaaagaaggcttttagtgtacttgtatcatttttatgttgtgattgtatacttttaatcaataaataattagcaaatttgcggataacttaatgaaagttcatgtatatataattgtttttatatatgatatgcttcttacatgattacatcgttgatcaccaattgtgttccaaaatgttttggctaatacgtagtagtaatttattagtttagtattaatttgatttttgaaaatatcaaataaattaagatattgtcataaaattcttcattaattatttagctgtctttattttataatggtttagtatcgttaagtcctattgataa

SEQ ID NO: 179102 - DNA, 399 bp, Glycine max
tgcttgtggagcttctatggaggctggatctatagtttattgtggtcctttaatggtgagtttccaccatggagatgcaccggaagaaaaaggacaagaggtgagaggaggcgccatctactagggaataagccatggaagaaggagcttcaccaccaagatgagccttggataagaagcttggagaggatgcttcaatggagggaaaagaaagagggagagaaagagagaggggggagcatgaaattgaaggaagaaaaagggggagaactttaactttgagttgtgtctcacaagactctcattcatcaaagatgccacaagtgttacacatgcttctatttatagactaggtagcttctcaaagtagctttcttgagaaaacttccttgagaagct

SEQ ID NO: 179103 - DNA, 375 bp, Glycine max
gaaccgaacaagccatggaggaagataatgctttgccataaaaacctgtcataaaggtagtcatcatcctaaaagtagctagatgtagtgaatagaagtagttatcacgtagcggatagtagcaggtatcatgtaatgcaatcatcggccataaataatgccttctgtattaacaaaagcacgcacaaatatatccagtgggatctgtttcttgctttctttgctgaacgaagattcccttgatctcgaatacaacggcgaacaacctaacaattgggccgacctgccgctcttcaatggcatacatggaacttttcgtcgcctaagtggaccaccttgaggctgtgacggccaaacatctctgcagcccaaact

SEQ ID NO: 179104 - DNA, 423 bp, Glycine max
  unsure (1)..(423): unsure at all n locations
ctataaaactaagcttaagaggtgagtaaaataactgtcgtctatactcttttggttttaatgcttaagaatttattttcttgatatatatatatattaaagctaaattctgtgaaaccaacacattattttgcacatacatgtattttgcatgtcataggctataacacattttttctagaacacaaatttttatgatacaaatatgttactttctagtgcacaaaggctatattatggtgggaattggttttgcaatgattgcaaagaaaagaaattatgagcccagacacacacaaatgtatatatgaggaagaatcaaattatactagtgtaactttgacaactattacattattcttataactttatatatatatgtgattnttattgatccaaccattgagatatatctatgtatta

SEQ ID NO: 179105 - DNA, 429 bp, Glycine max
  unsure (1)..(429): unsure at all n locations
agcttattaagactatgtttttatatttnttaacgnnggagctgaacaatgcacatctatatcacttgaaagaaatgagagtccaagttcaaaagtgattaaaagggacactgtgtagctgcatatttttctttcccctgttttggaaaatactagctgctcattgctatccataatccatgggctacatgcatgcatcatagtctgctacaaattgcccattaattttgactcccatatgacatgaatcacatgaagttatgggttaaatgatttgttacttctgagtagagtacaacgtcccatcttctctaattaactaaatatgatacatatatattatcaactgtagcaatttcctttcatctattcaattattaaacacattgaagtaacgtaagactctaagatgtatattncatatacaca

SEQ ID NO: 179106 - DNA, 450 bp, Glycine max
  unsure (1)..(450): unsure at all n locations
gaccttgaaactaagcttaagaataagtttaaagaataagattattatctttcaagtttaaagattcaatcaagtttcaagaatgaagatttaagaacaatcaagatcaaggttcaagactcaagattcaagaatcaagagaagactcaatcaagataagtactaaaaaggtttttcaaaacattgagtagcacaaggatttttcacaaaatcttttaacaaagagtcttactctctagtaatcgattaccataaggtagtaatcgattaccaatagccagcattgttttcaaaacagatttacaaagttgtaatcgattaacatgagcatgtaaccgattaccaatgttttaaaacgttagatgttaaatttcaagagtcacaactagtgataaaacattntcaaatcattnttaacttgtgtaattaccagtgcttctaaacatttga

SEQ ID NO: 179107 - DNA, 433 bp, Glycine max
gcagcttctcgtattccggattacatgtagtggagggaacttgaggaccctgagaataaggcctacatgaaagcaatggccgcgagggcgctccggcagctggccaagggtaatgtggccatttgccggagcatcacggagtccagggctctgttgtgctttgccatactgcttgagaaagggtctgaggatgtgaagtacaactctgccctggcagtgaaggagatcacggcagtggcagagaaagatgctgaattgagaagatcggcattcaagccgaattctccggcctgcaaggcggatgttgatcaagtgcttaagatcatagagaaggaagatacaaaactcttgattccttgcgtaaaggctattgtgaatctggcaaggacgttccgagcaacggagacgaggataatcggccccttggtccggc

SEQ ID NO: 179108 - DNA, 460 bp, Glycine max
  unsure (1)..(460): unsure at all n locations
cttgatgaatgagtgaattaaagatgtcattttgttgattttnttnctntctactcgaaaaatgttgcattctcttcatccatatcagaacagattttagtcaggatggatccacccatatttttcatcccttttcctgcctctaaacaaagataatatttttgtcttcttttcacttctctcaatctttccttctaaaatctacaataccaaacacaacattatacaagtcataagtctaaattaataaatagtaaatatgctctttcaaatacacccttagtatgtttagagtttcattcactttaattttaaatatagaaattaaaaaattgaaaacatgtatgtnttggatttatattttctattaaaaatttattcaatttcttgttgttcattccaatttaggatatatatatatatattacatgtatcttatatgaaaaacaatttcggttaa

SEQ ID NO: 179109 - DNA, 436 bp, Glycine max
  unsure (1)..(436): unsure at all n locations
agctttataaaagaaatattttctaattcataatngnttattcatttctgaagtaggtttcaagttcaaaatcataaatattataatgactctactccacaccctgtctggaactgctaaattaagtagtgatagttttgacaaggttttttcttgcaagtaaatttataaaatctttggggacacctaaattgcagaacagaatccgtgactcgtcaaccctctagtcctctggggtcggcaataagagataaatgtggcaaagcttcacactataaatcacaagattcaatgtccacacctgagaagtctccaattcaatctgtatctcaagaagcaaggagtgagaccagcagtgaaggtcgaaggtagttttccttgacttcatgctatcttcttatcttatcatccatgacttagaattggaatgtttatg

SEQ ID NO: 179110 - DNA, 409 bp, Glycine max
  unsure (1)..(409): unsure at all n locations
tgtgggatgcgtgatgcgcngggtttgagaggttttttataatgaggggttgggtgagtccgagagcgaggttaggagggaggttgatagttgcagagtgagagtgggatagcgtgttggtgatagaagctgccaccagcacctctcccaattgtttccaatgccgcatttcactcggaatcaaagtattctcgattggttttggttgctttatgaatcatcttccatcataatatgcctcaacaatgctaatcctaaaaccctaatcggaaagtagaaacctggagaggtaaaattgttgtgaatgttatgtgaaaccgtcgcactttctttgtcgatgacgaattcgaaatcctcggcggtgatcagcttcgccgggtcttgcttcttcgtcttcattcttcgacga

SEQ ID NO: 179111 - DNA, 376 bp, Glycine max
  unsure (1)..(376): unsure at all n locations
taatggggaatttacaccatggagatgcagcggaagaacaaagagaataagtgagaggaggcgccctccacttaagaattagccatggaaaaaagagcttcaccaacaaaatgagccttggataagaagcttggaaaggatgcttcaatggaggaaaagaaagagggagagaaagagagagggggagcacaaaattgaagaaagaaaaaagggagagaagtttgactttgagttgtgtctcacaagactctcattcatcaaagttacaacaagtgttacacatgcttctatttatagactaggtagctttcttgagaagcntcttgagaaacctccttgagagctagagctagcttacacacctattaaaactaac

SEQ ID NO: 179112 - DNA, 440 bp, Glycine max
  unsure (1)..(440): unsure at all n locations
agctttgattgcccatatgcacgccacttctggtaactgtacaaaagaaataatcaaatatatatttacattatatttttcatctccagagacactataggaatcatgtctgcatatgattaattctaatttctacatacgctatattgttcacataagtctaccagacaataactatatccaagtgcatcaaattctaaatcatattagcgggtttttgcatgataccttctacaagtgacagaccacaaatgtgtgcaaagcaagttagtaatgtgacatagggacacaagaaatgaataaacaaacttgagattgaaaataatatatgtttttggttctttaataattgaacgcataanattgagctgaattcccaattgcaataaaattgaatctccagataatatgtcttcagggtacattaccttgattcgtca

SEQ ID NO: 179113 - DNA, 427 bp, Glycine max
agcttcttagtctcacctgatgaattcgttactacttcatgcactcttctaatgacaatatcatcacttctggaactaaattgctgggagtttgaagccatcttctcaattaaatttctggctccagcaggggtcatgtctccaagggctccaccactggcagcatctatcatacttctctccatgttgttgagtccttcataaaaatattggagaagaagctgctctgaaatctggtggtgatggcaattggcacataattttttaaatctctcccagtattcatataggctctctccaccgagttgtctaatacctgaaatatcctttctgattgtcgtggtcctggaagcacggaaattttttttctaagaatactctcttgaggtcatcccaactcgtgatggaccttagagcaaggtaatat

SEQ ID NO: 179114 - DNA, 462 bp, Glycine max
  unsure (1)..(462): unsure at all n locations
agctngcaactctacatagcttcagttgtttattatataaagtaaagncatacactttccttttgtatgcaaaaatctcttttattttctcttcttctacttctctctgcatcacttgttggtagtgattaatgattattttagttttaacagtttggtgtcttttgtttctatgctactggttagaaacacttatggggatttattcatggttacaacaagttaggtaatgattaacaacaatccattctctgcatcactaaaataaaaattatttcagaactagtactctgtaatctgcagttccatacacgcaaattggtataagaaattcaaattatatcatcttcaatttgatatcatgattagacacggctgtaattaagagcttaattcttattctgtagtagatggtacgcctaaacctcactaaccataatacagcgccactatagtttgtct

SEQ ID NO: 179115 - DNA, 447 bp, Glycine max
agcttgtcattggaatgggtagcttttgcaataagcatcataaaataattttttgaattattttgcaaagggtttttggtatttttaaaacccaaccttatgctgggttttaaatttgttatttgcatctattgaaaataacaattagttcttgacatgcactatgaagattgtttcatcaagctaactatcaattcttcgaacgtttttatgttcctgcaatgctcatgttttccagcagctgaagtttgaaacagtagcatttgggagattttatgaatttcaccgaattctgttattctcaagttttttgtataattgcaggcagggaaagctgacaaatattaacatccttttgattatattgttagaattctattagggaacagaatggcataatgactacaataatgcattgtccctcctgttgctatttttcattttcta

SEQ ID NO: 179116 - DNA, 434 bp, Glycine max
tctctctcgcaaaaattcaccctttgtgcatctgtgcttcccttttgcattttctacttacgatcacaaaacatttgtcatccaagtaagttccttgctttatattctcttttacttgtctaaactttagggtagaaaaccttacttttagttttagattttttaaggttttaatgttttgatagaattagtttaagactaggactttatatacgtttgtattgtattgagtattttgggaacattgcatgtctgatatgccttttagaggcttgaaaagtgcaagaaaacgaacagcattttctgcgttctttggaaaatgcgatgaactcactaagtgagcatgctatgctaagtgagttcatcagtattcattgaatatgtgcatttttggaagaactcgctaagcgctcttaccacgctaagcgagttca

SEQ ID NO: 179117 - DNA, 456 bp, Glycine max
  unsure (1)..(456): unsure at all n locations
agcttcctgaaaacattagttgattctgattatccaaacatgctctaaatgtgcacacatcgcctcgatgtaatttaaatattaatactccatgttaaataggattagtcaattaatctcttctgccgaccatgtgaccaacatagaatagtactactaagttagaacaccactttcattgtaaaataaacatttttcaaaggaagaagaaaaaccagtgaacaagagaggaagtaactaaactaaactaataggttatgaatgaaatgcaaggatgataagattacgacatagagccaacaagtttggttgttttggtaaatcacggaccaaagntcatccttccttctattccctctcatttnncgttcactattcattgccagctacaggtaccagtgccactcacacactcgctgtttttctcaattcacactttgaacttgaagggcacac

SEQ ID NO: 179118 - DNA, 456 bp, Glycine max
  unsure (1)..(456): unsure at all n locations
agcttngtgaaaatataatcaatgcaagaccccttgagagatttagtgaacatgtcctccagttggtcactagagttgacaaactcaatggtgatttttcctgagagcactttctctctcacaaaatgacagtcttctactgtgtttagtccattcatggaagaccggattagatacaatgtggagaacggcttgattatcgcaaataagattggtggcttgagtgtctccaaattggaactgctggagaagtttccttagccatgtaatttcacttgtagttgcaggcatggcacggtattcagcttcagcactggatctagtgactatattntgtttcttgcttccccatgggatcaaatttcctcaaataagaacacaataaccaatcatggacttcgtggctgatggtgagtctgcctaatcagcatcagagtaaaacaaatgatcttggca

SEQ ID NO: 179119 - DNA, 407 bp, Glycine max
  unsure (1)..(407): unsure at all n locations
agctnttacaaaaaggttcattttgtctgttgaaatatggaagtaaccatcctgcaaaattggggcaaaagatgaatcgagtcacatcactgcttcgtctactgccaaacatatttaggattattgatgtccttgttacttccagtttcaccttgacaaagatgtcatggaccatgttgaaaatctaaattgattcaaccccatatcctgcgtaaaaattcgcaatacttcgactgtacatcattcgcatgcatccatgcttttcattggttgcattgctcattgcattctttcgttgaaaaataaaataaaataaaataaaatgaacttaatcattgttatcaaaaagaaaaggacacgctttacggcacccttaccgaactcgtgctagagctagagtaatgggt

SEQ ID NO: 179120 - DNA, 449 bp, Glycine max
  unsure (1)..(449): unsure at all n locations
agcttctntttgtagttgtgagttattattattatgattaaaacacagagaagaaaacataatttgtatttagtggacaagatgttttccaaaaattaaaaatgaatcacttttaaattatcaacttccttgaatggaaacttttccccaattggaaaggctcgtttcctcccttgattttgtttgtacttttaaatgaatcacttttaaattatcaacttccttaaaaataattcttatccctcactgcaaactctacatttatttcctatggacatcacttgtatgttgcaccatttgacctggtacacttgcatttggggttcgttcctcgaaccaacaaacatttggagttcattccacactaatgctggccagaaggtaattctagaccaaatttgagactatagttattcagtttcatgccgncattctatttttcttaagca

SEQ ID NO: 179121 - DNA, 443 bp, Glycine max
  unsure (1)..(443): unsure at all n locations
gcttggagaggatgtcttaatggaggatataaaagagggagagaaagagggagggggagcacgaaattgaaggaagaaaaaaggagagaagttgaactttgagttgtgtctcacaagactctcattcatcaaagttacaacaagggttacacatgcttctatttatagactaggtagcttccttgagaagctctcttgagaaaacttccttgagaagcttctttgagaaaacttccttgagaagctagagcttagctacacacacccctctcataactaagctcacctccttgagaagcttccttaagaagattccttaagaagctagagcttagctacacatacctctctaatagctaagctcacctccttgagatgagaagctagagcttagctacacacccnctataatagctaagctcaaccccatgacagaaaacatg

SEQ ID NO: 179122 - DNA, 318 bp, Glycine max
tcacctacaactcgcttgcataattaaaatctacatatgccctgaactgtgcaaagtctgtggctatgttcttttgtgatcaccatacaaatctttgtccttctttgcacaatcttgagtaatgacaacctgaacctatgtgaaacattttaaagaccccatagcagcaaaccacacaacaaataatatgatctttcagcacagatatatccggttggggaacatccaatttgaaggacaatctcccacaacacagctgtcctcttttaaatgtatggtcaacggccaatgtcctttcatgagcccgtggcacacaca

SEQ ID NO: 179123 - DNA, 397 bp, Glycine max
ctataacataaggtaatgttattcactctagaagtcttcaggtaaatgttatacgactggaacatgttacatgtctatgtgatggaattactctgcactcccagaaaagtagaattttgtcacagaggctgaaatattcctcatgaagaaataaagacgatgacagattaccttgaacaaagtcaaaaaatgatagtcactatccaacatatgacgataatcgggatatcatttgctgtttctcactatgaaatagatgggggcaaaaaagtattttttgagaagtgaaattgagaggaaatttgtagatcatgagggcaaatattactatataagtacctaacgctatcagtatggaccatgagctccgaatcatgggcttgatagtactgaacaa

SEQ ID NO: 179124 - DNA, 262 bp, Glycine max
gcttatccacaaacacttccaggagaggatgatattatgaaaaacatgaaatgagcttctctctaagctaaaattatgtttatacataagttacttgagaaagcttctacaagtgtatgtatcatctaaattcagcatatgaagaacctcgtttcaggattttcttcttccaacggtgcttctggagaaacttatccagacaaggatcaccttgatgattaggttataagtgaagaatttactcagttaattcaaattgggg

SEQ ID NO: 179125 - DNA, 459 bp, Glycine max
  unsure (1)..(459): unsure at all n locations
agctntagttntcaattacgagcgtctcgatatattattggactcaatcagatatccgaattgaaagttattgtcatttgactcttcatagagcttccgctttcaatttcgagcgtctccatatattaaagggctcaatcggacatccgagttaaaaattattggcgtttgatttttgtcagagcttccgttttcaattacgagcgtctcgatatcctccgggacacaattggatatccgagtcaaaagttattgtcgtttgaatgtgctcagagcttctgtattaaattacaagcgtctcgatatattacgggactcaatcggacatccgagttaaaagttattgccgtttgactgttcttagaccttccgtttcaatttcgagtgtctcgatatattacagggctcaataagacattcgagttaaacttattgcggtcaattttctcctagcttccg

SEQ ID NO: 179126 - DNA, 382 bp, Glycine max
  unsure (1)..(382): unsure at all n locations
gaccctcagagtcacctgcggcatgcaagctttgctccttttataaaaagagaagttctattttcatcacattatctaaaaaggccttgaggtggatccaagtgctctgatcattcattagcatattcatgttttggtggcatactcaccactgtttgtttctttagggaactcaccataactaaaaaagcgcagaggcacccctataacacccgatccagaagtaagatggataacaaagagggagtgcacgaacagatgaaggccgacctatcagccttaaaagatcagatggcttctatcacagaggccatgctaaaacttcaaanaactatagaaaatatggtatggcgacccgttccaatacagctagggaagcgga

SEQ ID NO: 179127 - DNA, 449 bp, Glycine max
  unsure (1)..(449): unsure at all n locations
agctntctcataagtcctaaatgacatttttaactatgattaactccctttaacctccaaataccactaaatccagatttggccttccaactctcaagcctcactctttttccactcataacaccacattctcactttctaaccctaggttaactctacccttcatctctagcagttttccataagcaatttcagcacataaacatcacaagcatcatcataaaaaccctaaaacagaatgggtaagcttgactcacaccaaaatgacaagtttaacatgctttcatcaaatctcttcacaaataactatcataaagcataaacctagtaaaactacccatcatatctcccaaaacccaatacccatgagaatttatgtgagaagaagtctacccaaacctgaaatttcgaagtcccacacgtagagatcgcttcacgactccgaaaat

SEQ ID NO: 179128 - DNA, 458 bp, Glycine max
agcttgacaagcctgcaatgcttgcacctatcgaggttaccactctcaacatcagacaatacttgtccatacttgggggctccaagaactcgcggccctcttacttgtcaaggatactaccccaaacattagacaatttcccttgatactgaataacctctttcgcccataagccaactcaaaacttggggggcttatgtactatccggggtccacaaaatacatgtgtcaagctacgtggcactctgatgcacacatcaaccctctatgtcagccctggcataggtgtacaaacattaggcccttagcagtcaggttctcaaccaataggttatctttaaccacttattatttgaatatattggtgtatctttatctcatggaaagttactaattatctataagggaagatattatctataagccacaattatctactgactattatctacaagtcg

SEQ ID NO: 179129 - DNA, 416 bp, Glycine max
gcagctggtggtatgcatgcttgcattttctatatgaacctagcactttcctctgtgtatacatgagtttcattgtccagcctgtcaatagtgtcaagtgtgtgtgtcaagaacagaatatcatatgcgaataattgcaattgccagaggatagaatataactaagtttcacttacgagtttcgaacagtcttgctcaaagttgaggctgatgtgaatgttttcccatcaagatatctattctcccccttaatcctatgtctcattctgaggtctagctcgtctgcactcaggtctaatggagaatctgaagcctgttacatatgcaaaatttgtcttaagaaacattctttcaatatacataacacagaactaactagaacttgaacttaatcttcacaatattaccatgaccca

SEQ ID NO: 179130 - DNA, 448 bp, Glycine max
  unsure (1)..(448): unsure at all n locations
agcttttacaanaaggttcatctagtcagttgttatatggaagtaaccatcctgcaaaattggggcaaaagatgaatcgagtcacatcactgcttcgtctactgccaaacatatttaggattattgatgtccttgttacttccagtttcaccttgacaaagatgtcatggaccatgttgaaaatctaaattgattcaaccccatatcctgcgtaaaaattcgcaatacttcgactgtacatcattcgcatgcatccatgcttttcattggttgcattgctcattgcattctttcgttgaaaaataaaatataatagaatagaatgaacttaatcattgttatcaaaaagaaaaggacacgctctacggcacccttaccgaactcgtgctatagctatagtaatgggtgaagcagaggatgtgcaagagaagatgaatgccgacatgga

SEQ ID NO: 179131 - DNA, 454 bp, Glycine max
agcttgtaggattcaccccaaattttcggtgttatatgctaacttgctcccatatatacttgataatgcaatggtagccataacccctaccagggttcctcagcctctattttatcgaggatacgacttgaacacaacaggtgcatatcatggaggagttttgggacattccattgagcactgtatgaccttgaagcgtaaggtgcaaagtctaattgatgcggattggctgaaatttgaggagaatcgcttgtaaatcctaacattgacaagcgacaccacacatggggaaattttgaaagctgctgttaaatgtctctaatggctcatccggattttcaagtttatgccattattgtaaaccacagttgcaatgctaaataaaatgaataaatttgacatctttgtccctcatcctctcgtaattacatctattgcttccactagaatgtgg

SEQ ID NO: 179132 - DNA, 362 bp, Glycine max
  unsure (1)..(362): unsure at all n locations
actcctcagttgaaaacgaacagctcttataaaattcaaacgacaataaatcttgactctgatgtccgaccgaggggcgtattatatagagacgcttcaaattgagataagaagcacgtatcaaattcgaatgacaataagttttcactcggatgtccgaatgagttccgtcataaatcaagacgctcgaaattgagaacaaaagctctcgtgaatttcaaacgacaataactttatagtcgaatgtcctattgaatcccataatatatcgagatgctncaaattgaacatggaagctcgcttcacattcacacgaacataacattattcaccgttgcctgactgagtctcgcaaatattca

SEQ ID NO: 179133 - DNA, 464 bp, Glycine max
cagcttgtaagtctccagacgacgagagttttttcttgctaattttgaaaataatcagaatcggacgaccaacatcatccagataccgtcgaatttgttcacctcgattgatgaaaggagcggatgatcataaggtatctctgcctgccacctaacttgctgtccctggatgacaaaaggtgcggaagacgatgttattctctgtatgtcaacgggctcgtttgcccctggttaacgaaaggtgcggataaccatacagtatccccgcatgtcacctgacttcatgggtcaggatgacaaaaggtgcagaacacgatgttagtctctgcgcgtcaacgagctcgtttgcccctggttgacgaaaggtgtggataaccatgcggtacccccgcatgtcattggacttggcatctctagatgacataaggtgcaaaagacgaccttagtctctacgcgttaacggg

SEQ ID NO: 179134 - DNA, 444 bp, Glycine max
agcttataaagaaaaatgatggcatggttttaaccctatcacactatgttgaaaagctattgaagaagtttaattattttgatgtgaaacctgtttctactccttatgactcatccatcaagttaaagaaaaatttgagtaaaggaatttcttcacataaatatcctcaaattattggttctttgctgcatttgacaaacttctctaggcctgacattgcatatgcagttggtagattaggaaggtatactaataattctgatcattctcattggattgcattagaaagagtttttagatacttaaaaggaaccattaattatggcattcattatacatgttttcctgcagtaattgaggggtttagtgatgcaaattggattatgatttgatgcaacacaataacaagtggtatgttttacttagctggggtgcatatatgga

SEQ ID NO: 179135 - DNA, 404 bp, Glycine max
agcttcaaccaagccctattagcaaagctgtggtgttggattcttcaacatccaaaatctctcttgttaaaagtactgaagaaaaattatgtccctaccagtgttgttaaaaagtggttatggtgacaccatggcagtatggcattgcgggttttcgaataaatgccatcaaatagcggtagtgttgtgggtttcgtatggaggccgccatagccatagaggtcgttgtcaaatggaggttatggcggaagagtgctttcttgttttttttttttaaccttcgcaacacgtcgtgttaggctgacctgacccaaccctacccaaatttcgcatgcaaaaggagacgaggagcgcaagcacaaagccacgaatagcaacaggcttactccagcgacaacaaagct

SEQ ID NO: 179136 - DNA, 385 bp, Glycine max
agcttaagtcttgcttacatggaagaaaggagagctttaggtttctgctacttttatgatgaagttttttctcctgcccatagtcagacacataagaaacttcagctacaagttctggagattgtgtagaagaaagtttcatgatgatgattcaagtatgaatcaagtagttttgatgatgacaaaaagcccaaaagaatgatttcaagattgagtcaacaagttcaagatcaagattaatttcaagattcattagaagaaatcaagaagattcatgattcaagagaagttgatttcaagattcaagagaagatgaattcaagattcaagagaagaaatcaagaagacttcacaagggaagtattgaaaaagatttttcaaaaac

SEQ ID NO: 179137 - DNA, 446 bp, Glycine max
  unsure (1)..(446): unsure at all n locations
agctntaaaaaggggtttttgtcctcgaatgtgcgcttancgccattttcacgcttagcgcgagtaagtgaactttggcttatcgagccgggtgcgctaagcgccagaagagacaaatgactcactgggcgagctgataacgcgctgagcgcatgcttgcgtggtagattcccttcaaggttcctcttacttgctaagcgggctgatgcattgcttagcggatgatactcgctaagcgcatgggccaggcttagtgagacaccagctgctgcacctgaaattgaagtgaaatttgcattaattccatgtggagagtatctactgagcacnaattaaactaaacaagaaaatatttacgatcctacaaaagaaccataatttggggaaaatatatacanttttataaaacttttctatacaaaagttagtcgtagatgacgactaac

SEQ ID NO: 179138 - DNA, 447 bp, Glycine max
tgcaagctttaggagaaaccatgataattaattttttcctaaacaaaaatcaattgagggagcttcgccaagtgtccccatcgaaattgaaaaacctttattcaaacctttcaaagttagtgagaaggctaaacggaaaattagggaacttataaaaactaaatccttaactgagggtgtaggtgacaatcatagtgaattactaaacaagattggtagtttactaaaggtcattccagatactccccaaacctcggaaaatacttccaaaatggtaacaagaagtacctccaaattaattaatgttataaatgaagatagtgaccaaacctcagataacacaactgagataggatcagtgtcagaaaagaatataaatccaattaattccaaacactggaaaacaccctccaaattatattaccaacgtccaactgcccctgacct

SEQ ID NO: 179139 - DNA, 374 bp, Glycine max
  unsure (1)..(374): unsure at all n locations
ttatcaanggggtaacagcccaatatgaatgccttagaacgagctgatgattgcacatgatgattatggaatgatattgttattttaagtagttgaatcacagtttaggtggagttaattggggccaaaataattaagagcttcttattcaatttcttcacaatggccaagcctatattaatacccttaccatgcatggtgccgatattaaaaacacgcatttatgatattacataattatagtattaatttaattaggggatcacggtaccgtaccccttacatttattaatccacccacccatttaatttgctacccagatgcattggataagtacatttcacacaccacaccatacatacatacaaaatgc

SEQ ID NO: 179140 - DNA, 438 bp, Glycine max
  unsure (1)..(438): unsure at all n locations
gagaatgtatcgttgtaatccaagccttccatctgagtgtatcccatttctgcgcacgctntgtattaaattttatagtgcagcaaaggcatccgaaaggtccccttaaaaaccggttcataagggagtgtgttgaagattccatgactaatgatgagacaaaattattgttcttatctaaagatggtcaaatactttacttcttattgtgtcctttacttcagtatgtcttttcctagtatttgataaaataatcattcgaaggatggggtgcctgcaaaaggtgcaccattgctcaagttagctcggtcttggcgctaagaataatgagcgtaataaataagagtggatagaataatgggtgatactttgagaacctaactctttatatacacatanttatgggtctcaaggtcatggggtcttatctcttaatct

SEQ ID NO: 179141 - DNA, 351 bp, Glycine max
tcgtcccggatccttcagtcacctgcggcatgcaagcttcatcacatggcttttgtctaccttaatttctttcggggaccattgttcggtggcatgcaactttcgtttgaccactttgaggtacttggcacccatcgttaggcaattcgtgaagttccgagacatgtcggaaatcataaggaagcattgttacgcagtccgtgaaattccataacatgccggaaatcaaaaagaagtattgttatgcaatacatgagtttccgtaacattccgaaagctaaaaaaggagtaattacatggctcataaggatctgtgaccttacagaaagaaaacaagtgttgttaccaaat

SEQ ID NO: 179142 - DNA, 443 bp, Glycine max
  unsure (1)..(443): unsure at all n locations
agcttgtaatcgattacatcatttgtgtatttgattatcagacacaaaaattcaaatttcaagtctgaagagtcacaactcttcagaaactaactatgtaatcgattacctcatttatgtaatcgattaccaataaggaatttttgaaaataactcccaagagtcacaactgttcaagaagtttttgaatggccatcaaaagcctataagtaggtgacttcggatacgaaattccttagagttttcctgaacaaattgtcttatcctctcaataccaaattgttttataactctcaaaaagaattccttgggcaaaacacttgcaaattcaataaggaattttgagtgatcttcaattgtaatatctttctcttanagagagaattcttcttcttcttcttattcaaagaaatngattaagggactgagggtctcttaagttg

SEQ ID NO: 179143 - DNA, 434 bp, Glycine max
  unsure (1)..(434): unsure at all n locations
agcttngatgtttcgccacatgtggttttctgaaatgtgcgtgaccagttctggtgcagcccataagtgaaatgatcttcttgaacttacaaacgaccacgtcagcgacaactctatagtcggtttcgatgttttccatggaagactttaagtttgaggttgaattacatgttgtctagaattgttgttgggtctgcgacaacaacttgatgagtttctcggtgctctctagccccaacgcagcttcacgaaccacattctcttctgcaaaattgttgtttcgacattccattgtgagctccacgaccatacttacatcagagacaaagaaagagaaatagaagaaagggaatgggaagaagatgaggagttaaagagagcaaagaaaataaagagggtcaaaggcctggtcaaatgatgccaaataaaattaa

SEQ ID NO: 179144 - DNA, 407 bp, Glycine max
cttcttgagtagccgctcttggagctcatactattccaaaatcctatccactctattactaactatctcgaactctttagatcctgaatgtacaacgctcaagatgatgctctttcccctctttgcttctcgcaactaagaaaattaatctcacccataacatggatgacgtcctaatgctgccatgtacatgcgtctatcagaacatatagtgtccatatttcatcaggcatacatcgactgttgattacatgtcatagactattgatcacatggttggcccaacctacacttaaaaagcacaactaccagtccttcggagtgcttcggtaactagacatgtctccttctgtggaggagaaccgtataataatattatactcctctcttcctaactaaataaagac

SEQ ID NO: 179145 - DNA, 444 bp, Glycine max
  unsure (1)..(444): unsure at all n locations
agcttcttcttgtgtctcccttcatttgattagaactattttcttaattacctcattcaaaggtgctgcctactaaaatccttcacaaatcgcctataaaaactcactaggccatgaaaacttctcacctcggtcacacttttaggtgtaggccactcttggatagccttgaccttttcttcatcaacttgaacccctttggaactcattacaaaaccaggaaacacaacatggtctttgcaaaaaatgcatttttcaaggatggcatacaattgttccttcctaagtacacacaacatcgattttaagtgtgcaacatgtaaatcaagagttgtgctataaacaaggatatcatcaaagtacaccaccacaaatntaccaatgaattctctcaaaacatggttcattaatctcatacaagtgcttggtgcattagtcaaatcg

SEQ ID NO: 179146 - DNA, 459 bp, Glycine max
agcttcttagtctcagatgatgcagctgtgtttgtatctacctcatgcactcctctaataactatggcatcatttctggcgctaaactgctgggagttggaagccatcttctcaattaaatttctggcttcagcaggagtcatgtctccaagggctccaccactggcagcatctatcatacttctctccatattactgagtcctttcataaaaatattggagaagaagctgctccgaaatctgatggtgagggcaactggcacatagttttttaaatcgctcccagtactcatacaggctctctccactgagttgtctaatacctgagatatctttcctgatggctgtggtcctggaagcagggaaaattttttctaagaatactctcttaaggtcatcccagctcgtgatggaccttggagcaagataatacagccagtcctttgccactccctctaa

SEQ ID NO: 179147 - DNA, 451 bp, Glycine max
  unsure (1)..(451): unsure at all n locations
agcttatgcattctttgaggtaacccctatgttgtcgcatgatttcatgggcaattgcaaccccttaaggttgttgcttgttcgtcgttgcctgattcttttcttcgaggaaaatcgctaaccttatgggttatggaaatcccaaacccggaagctttttgcctcatcgtcatcgcctagttggtttttagaagcaagagtgtcgtcctgtttgggtgtcggaggtggtggttgaaaaacgtggttgtcgcctgaagcacgtcgtcgtccgcactgttcccatggaaaggagttcctcgccgtacacctcacagtcctgaagtcgcgtgatgtgtttgtgtaacatagaggctccactggtgacatcgtggactaatgataatccagggatgcatctttattgtngtggtctatacaagggaaggaataatgtatatcatgggttatgcta

SEQ ID NO: 179148 - DNA, 394 bp, Glycine max
agcttagataaaaaaataaagagtcacttgttgtgttaaaaagaaaaggaaaaagtgtgaatcaagaggaaattgagagattcaagaggaaatgaaaactagatctagggttttcaacttacccttcttccttctcttcttctctctacactttgagcttggaattgaaatgaaatgaaatggaaagtgtgtgtgtgtgcgccctaaccacacatataaggggagaaaagtgagggtaatttaggtaatagcgtaatattttaaattgtaaaccgaaaatattgctgaacaacattctaatttaagttattgtataaatacgtgtcttatttctttttttaaaatgactgctacttacacataataaaaacatcttcctatatgtgatcaagca

SEQ ID NO: 179149 - DNA, 415 bp, Glycine max
agcttgacttgagtcatcaatttattattaatatgtgaccatggcatgaatttgtaatcatctttttcaacatctctttcaacaatcaagaaatctatctttcaatcttctttctcaacatcattcaactctttcaacagattttttctgattctttttctcttcatctttctaaaagtttttgttcaaaactttttcttccaagtaaagttctttgttcaaaaacttgtgctattcatctttttcattctcttctccctttgccaaaagaacaaaggactaactgcctgaattcttttgtgtctctgttctccctttgcaagagaattcaaaggaccccgcctgagaattcttttgattcttcccttccctttaaacaaaagatctcaaaggactaaccgcctgagaatatctt

SEQ ID NO: 179150 - DNA, 445 bp, Glycine max
  unsure (1)..(445): unsure at all n locations
agctntatcctcagatccctctttttggactagacttagaccaaacaacattattgttacaacatatttaaaagaaaaacttaatccgcaaatccctcttgtatgactaagtttcaattctgcttcattcgagttctaaggcggcaatacatttcccaatgttaaaatcacctaactaggcacacaaatggttgatcagaccaagagcatacataatttatgtactgaaagaagcattgaacacaagaaacacaatcaattagatattaaaataattacatcagctgctcattagaaatccctgttagtcgatgaatacaactaactcttgtgtaagacatctgtgaaaattgtatctgactcctcccatttatgggtatatttgaacgttgtaactactcttcgtacaaatatgtaataaatacttagtactcccattgtgata

SEQ ID NO: 179151 - DNA, 351 bp, Glycine max
ctatcgctgagtctggtgttcttctcaaggaagatgattataatttacaggcatcgctgttacgtggccttgcctattactaattaggtgatcatgaaggtgccaccaaggttgcggtggggaaaatgtgttgacctacgcatttgaactattctctctatataagcaatcctatatgtgaacatataatttagcattttccgacaggcctctgcctatatccagagcattgtgaagtgagaaaggcatattttggattgaaaatctgctaaacagagcagaaatgtagcccgtatctacaatcggaatttcttttaccttgcacctgaagccattccctttgactttcct

SEQ ID NO: 179152 - DNA, 440 bp, Glycine max
  unsure (1)..(440): unsure at all n locations
agcttatatacaatgagtattgatgaactcacttagcgcagcattctcgcttagcgagtgcgttttccagaaaacgcagaaaacacaactcattttatcgcacttttcaagcctctaaaaggcatatcagacatgcaatgtgtgtgccatactcaattcagtatacaagcttacatagccctcatcttaaactaattctaacaaaacataaaaaccctaaaaatctaaagctacagttaaagtcttctaccctaaagttaaggcaagaaaaagagaaaaaggatcaaggaacttacttggatggtgtatgattgatgcttcaaagtaaaaaattcacaaagagagaacaaatgcaaaatgtgcaaattnttggagagaaagaatgtagaggcgagggttttgtaatctggaaaatgtgagtgtaactgctgttacactca

SEQ ID NO: 179153 - DNA, 441 bp, Glycine max
  unsure (1)..(441): unsure at all n locations
agctgctttttgcaattccaagacactattgagcttccaagtatatgacatgtcccacttttacttttcccatctaatttgcatcttgcaaaatcagaatctgaaaaacctattaagtttaaggaagtaccttagggatatcacaaacctacattggttgtgcccttaagatacttaatgatcctcttaacaatagttaagtgagattcctttggattggagagatatcttgcacataagcagaagcttagcatgatatctagtctacttgcagttatgtagagaagtgatccaatcatacctctatatcttgattcatccactaatttacctttctcatctaaatcaaggtatattgatgtagccataggagtagatgcttctttgcatttntccataccaaatttctttattagttctatgcaaaatctggtttgactg

SEQ ID NO: 179154 - DNA, 462 bp, Glycine max
  unsure (1)..(462): unsure at all n locations
agctngcttgtagggcttctatggaggctggatctttgagcttcaatgaggttctttaatggtgattntccaccatggagatgcagcggaagacaaaggagaagaggtgagaggaggtgccttccactagggaataagccatggaagaaggagcttcaccaccaacaagagccttggataagaagcttggaaggatgcttcaatggaggaaaagaaagagggagagaaagagagaggggggagcacgaaattgaaggaagaaaaaagggagagaagttgaactttgagttgtgtctcacaagactctcattcatcagagttataacaagtcttacacattcttctatttatagactaggtagcttccttgagaagctttcttgataaaacttccttgagaagcttctgtgagaaaactttcttgagaagctagagcttagctacacacacccctctcataac

SEQ ID NO: 179155 - DNA, 464 bp, Glycine max
  unsure (1)..(464): unsure at all n locations
agcttctccttccttntcctataaataggttatggatggaagaacaaaaatgttcaaccctcctggtatctaagaatcacttaaaattagtgagaaaaattgtttgcgtgaagaaaatccaagccgagacacttccgtaatgcttccgagacgtttccgtgggtgatttcgcaaagatattcaatcgttcttcgtcattcttcggtcttcaaccggtaagttcccgaaatcgaacttttcaattcattctatgtacccttagtggtcctcatttgtttcgcgtgcttctattttcatttcatttactttccgtacccccttttgacatactttagtcatttatttaagttattttctcacctaatcaaaaataaaataaatntccactgatcattcgtattgtaacatcctttaatttctgttaaaatgaattccgaccgttcagccatgccgtaaccactttt

SEQ ID NO: 179156 - DNA, 458 bp, Glycine max
agcttataagaacaaaattgcctcaatcatttccaaatatgcatgtgaattacgacgcatcaacaagaatcaagccaaggctattgtgcaagcaatcaatggggcaaaacacaccaaatgattatgatgatggatggctcaaattctcacaaaggtaaactcatcactttcaaattgagctttcaaaactatcatgacatgtagaggagaatcaaggatttcaagtcacaaaatgtcaagaacttttattttcaaaacaattacccatttcttgaacatatcatataattcaaagaaaaacatgcaaagtcgtacgtgcacacaaaattgacccaaaatattaaactaaaaatccgacaaaactaacaacattaacaaattaacacgactaacatattaacataaccaacaaaactagcacaaccaaagaacactccctcccatacttatacaacaca

SEQ ID NO: 179157 - DNA, 466 bp, Glycine max
  unsure (1)..(466): unsure at all n locations
agcttctcccctantttgctataaataggttaagtattgaagaagaaaagggttcagccccttaggcacttctctctctttcgaatttgctgaggaaaattatttccgtgaagaaaatccaagccgaggcgcttccgtaacgtttccgtaacgtttccgtgagtaattacgcgaagattctcgaccgttcttcaaagattcatcgttcgttcttcattttcttcagtcttcaacgggtaagtacctcaaaccaagcttttcaattcactctatgtacccgtggtggtccacattttgtttcatgtatttttattctcgttttcatttactttttatacccccttttggcgtgcttaagccatttatttaagtcatttctcgcttaatctaaaaataaaataaatttccaccgatcgttngaattgtatcatcccgttaatttggtaaaatgaatttctaccattcg

SEQ ID NO: 179158 - DNA, 456 bp, Glycine max
agcttcgtcggtccctttggtacttgtttattctatacaattaataaacataagtcaatgacaatcaacacttcatttgtagaaaatcctttttttaataataataaacacaacaaaaaggaaataccttttatgaaataggtcgtacaagatgtgtcgcccaagcaaggaaggtgttaagggcttggcccactaattgaacctcttcaacgggtatagggatgcaagcattagcacgttgaacttcctcaatacccacattcaccatatcattgcccaaaggtacgtggtgcatggtgtcgatcgctcataaactcttccaagggcagccagacagggagaagtgtcatcagcatacaacccatgtttgtctgatgcattcgtgtttaggtcttgccctaaaggatcaacacaacttccttttgtgctaacacgggcaccagaaagagcaacctt

SEQ ID NO: 179159 - DNA, 392 bp, Glycine max
acttgggaaagagcttgagattataaggaaggactatgagagctaccttaagataaaggttgggatgaaggaaatgaaagacaacaagaacaatgaacttactcctggaaaatgtttccctccaccaatttcttgccttaaaaatattaaggttgcaaacacttcaagtatctagcatatgataaggaaagtgaaatctaagttgttgaagagataaaaattcctgaagggagtgttttccatgctactaaaggggaagagaggttgaagttgtttgcccatttcctatagaaggaagagtcacaagagaagtagaaaagatatacaaatggtgcagattggagggtatgttcagtgatgaagataaaggacatgaaaccttttggaaacat

SEQ ID NO: 179160 - DNA, 418 bp, Glycine max
  unsure (1)..(418): unsure at all n locations
gcaagcttgaagaccccatcaacgcttctagttgtaattgtgcacccacaaactgcattatcttccagtaatctccctactaacaatgctgtcacacacctgattggccctctatggcccactagaactggcagacacgtgtgttgaccatcttgttctctaacccaaaccctgctcgttgagtcagacgagccactcactacatatttggccacacttgccagacacaacactgcgtgcgtgtgcccttggatagagccaccgtattgtaactgccccgcggaccagcccttgtgccattagagtatgtatgcatcanggcatccaccgtacagaattacaccatctggggttagtgttgaggccttcactgaggagcacttggcgtgtgatgtactgtgagagatgacgtggtctg

SEQ ID NO: 179161 - DNA, 443 bp, Glycine max
  unsure (1)..(443): unsure at all n locations
agcttcagacaacttcttgatattgatttctacaactatgtactcgattaaaacaaaaagtttttgcctctgaagaaatctctctaacttagaaaattttcttcacacagactatgatgatgcataatgcaagacaaatatcaaatgtactaagatgtaacaatcaaattaacaaccaatacaaatgccactcaaaggagttaggcatgtaaaagccaaaacatcttctaaagctctttcaaatttttcctagggcttaaagctttagccttagtttttttcgtgttgtcgttccccctatctctaacacttttgttaggacattgggatgcaatatgaccctttcccaaacacttaaagcatttaatggaactagtttntattgggagggggttgagtaggagaagtaggattacctcttgaagacttccattcaagatgtt

SEQ ID NO: 179162 - DNA, 439 bp, Glycine max
agcttctagccaaatggacttaccttgaattaatttccttgatagcccttttgagccttgtttccctttccttgttttgaagctcactacaagccttaagtgaaaaaccatgatattaccatatccttaaggaattttggagctttggaattgttttgggaataagtgtgggggggtttttgtttcattggacaacttgttttgttggctatgcttcatgatgtattttgggccatacttgatgtacattgtatattggttaaatgttggacatgctgaatgaaatgttgtttctcaaaggctaaaaaaaaaaaaaaattcgaaaaacaaaaaattcgaaaatagaacaagaaaagcaataaagttgagtgaataagatcttatatggcacaagaaatgatgaaactctggctctactcttcatgtttaatttttatcc

SEQ ID NO: 179163 - DNA, 443 bp, Glycine max
  unsure (1)..(443): unsure at all n locations
gcttggatttccttttaatatggaatctatccttcctaagagggagccaaacccagtcaccctcattaagaactagctcttttcttcctctattgcctttagttgaatacacctttgtttgggtctctatttggttcttaaccctctcatgcatcttctttacaaattctgacctagattccccttctttatgtataaaagaagtgtccagtgggaggggaatgaggtctaacggtgttaggggattaaacccatacacaacctcaaaaggggactgcttggtggttctatgaacccccctgttgtaggcaaattctacatgaggaagatactcatcccaagacttatggttgcctttcagaagagcccttataagggtggataaagacctattcactacctctgttngcccatcagtttgtggatgacaagtggtagagaaa

SEQ ID NO: 179164 - DNA, 454 bp, Glycine max
agcttctaaaccaccccgtttctctccctcgttggcaacatcaaaaagccaaagtacgtggtaagcaacacaagatggaagaataaaaatcaaatataactaaagttcacataatcattcataagtgaaaaccaaatataatccaatcattcataagtcaaaaccaaatataatccaatcataaaatactaagtgccaaataccgaaagataacgaaagttcagaaaatgataacttaaaaagcatagccaaatacacggcttacaataataatctaaaactaagaaggtggtggaagatcgaagcaccgatgaagataacccacatcctcttcaagctgggtgatgtgggtatccatgccatcaaagcgaccatccaaggaatcgaatcgaatcgttcaccaacataggtgcggaggccccgtaattctgaaagaacttcattcataagagct

SEQ ID NO: 179165 - DNA, 466 bp, Glycine max
  unsure (1)..(466): unsure at all n locations
ggatccttaagccacctgctgcatgcaagctccttcacatagctgactatgcttgaccttctttatgcttaaaaacagaaacattaggcataggcaaaagatcaagaggagatggtgggttaaaaccataaacaacttcaaaatgatcaaaagtattagaggtcaaaatctgatttttgcaaaacacgatatatagtgactgtttagcacgaaacaacctctcgacctcactttttgtggctaaatagctctccctcacttcaagcgttgcactcttctttagatcactctttttcctctcaagagtatgcctctttttctcactctcaagtgactggctcactttgtctttntcttttttgtcttgaagaagtatttctctcattttctttcgatcctcacacacttgttgtggactcagtggctagagcacaatcttattgtcttggagcatgaaagagatctt

SEQ ID NO: 179166 - DNA, 456 bp, Glycine max
  unsure (1)..(456): unsure at all n locations
agcttatgtggggaacaatatgtacatatctatatctctatttgtgagaaacttaaaatatgtaacttaaattgttaacagaagctttgatatgcacatccggctntctccgcagtgaacaaaaccacacaacaagattctttatatgacataaaacaagcagctgccaatggctcctgcaatttagacaatagtgtcgtatgaataacataaacatcctttatagggatacaataaatatattttacttactaattcaaataagctccaagatacacgtctcgctgtgattccataagccatttctcaatgtattcttgacatgggccacgtcgatcctttgcattcaaaattgatggcaacttaaggaatccatacanccaatttgaatccatacaccgatccttgacccaagttattcctccattcatccatatgcctatnntaaaaatttta

SEQ ID NO: 179167 - DNA, 440 bp, Glycine max
  unsure (1)..(440): unsure at all n locations
agcttgtacaaccaatattctttgtcctaccaagctcttgttggatctaatacacatcaaaggatttattgttntgtttgcaaaatgactaacaatcaataatcttatagatggatagaaaaacttagctcgtaatcttttctctcaagataatcaaggtgttttgaatgagcgcttaagttggttgttcatgtcttcaaatcttctggtatttattggcctctttcaatcaagtgttcattgtctccaaaggatatatttcttctccgaagctcgcgcctaanaatatggtcgttggggcattaaatatgtgcattaagtgcacatacatcttcatgctgtaaaattactcttcttcgctagcatgttgaaaacttcaacaagaaaccacttctttttgtgttagagcaagcctgtgcaacagagcactccttcttatg

SEQ ID NO: 179168 - DNA, 462 bp, Glycine max
  unsure (1)..(462): unsure at all n locations
agcttggatgttatatgctctttgtatagttntgggtttatgccatctaatcaatgttctttacttgccaagatccaccagctattgtaacttttctaataatccaatgttgacacttcaactgaataggtacaaatcactaagaatgccaaatacaaattcaattaatatataaaaccaaagtctgttagagtacacaaatgtcactttctacatttgtaggctttgaatcccccagtttttgaagtgttcatcctgaaatgtcgatgggggtgggtggaaaggtgggatcttttggagggaaaggatggtgggtgattgtattgttaaaattcgttggacccaaggagaagaaactatgtgcaagggagttgcggagggaagtgaagatcatgtatttagttgtgaagagagaaactgagaaaaggaagagaacaagcgaagtgagaagagaaaaaaatg

SEQ ID NO: 179169 - DNA, 460 bp, Glycine max
  unsure (1)..(460): unsure at all n locations
agcttttgtttgtataaaagcacattcttatacatatttatctatntgncatggttattatgtttgcaatttttttcatttaaatgtgtagtatgctgaattggcttccgaggtttgtcatggacgtggtaaaattccagtggcagattacaaagttgccaattatattgacaaggaggatttcaatgacgtatctgattcaggggtaacaaatcgtagttgctactctttctgcatgtgtccaggtgggcaggtaggtgttctcattttacttgcatatcatatatcattttaattggaatatgacctctntatggtgctgagtccatgcacataaatgtcatggtatagatatttactgattgatttaccaaggaggaagagggaggtgtgtctggcacatttgtatcattaaactattatttcagtgtcttaatttacccatgccattatcagatgt

SEQ ID NO: 179170 - DNA, 455 bp, Glycine max
  unsure (1)..(455): unsure at all n locations
agctnttaagatgtgctcatntgtataatctacatctatattcggggagagttcatgctcatgtaaccacaagctgcaataatgtgtgaacgtgaatagtgaagcgcaaaataccttccgcattgacaatgatgaccattcaagttaactgcctacttttgtccgccacgttgcgttatagggttgaagctctcctctacttcaaaccttgtggagtggatatcatacacgcgaacgatgtgcgtacaagcttgttcttgatttttcctcaggtctttaacaagctttgaacaatatacttgtccttcatttaactgtctttgggcttggcgaccatgctcaacaaagtactttcgacacctactgtacgttgatttcaccaatgttgttatgggaatgttgcgacaattctttagaaccttatagatacattctgagaggttggttgtcatgtg

SEQ ID NO: 179171 - DNA, 483 bp, Glycine max
  unsure (1)..(483): unsure at all n locations
ggatcttaagtcacctgcggcatgcaagcttcaccggatgatgccgatcaaacattttctaatcgacatcatccaattggtattcagcgattgaatagaataaacaatggccggtgtcgatcgttatatggccccgactgatatctttcagccgacattgcgcaatttcttttacaaacgctggccgataatgtttttttatttacgggagaggaagttttttgttttggtgttgcctaaataatttacaacgtgggacggctaggtttttccgtgcgagctcaaccgagggttcgttccgaccgacactggcatgttgttcttctcatttaggaggataagaaaacgttcgcccacctccgcaaaanacaaaaaaaaaaacattattcacggaaattgatcgataaaaatgatagcggacgtcgttatggagagatgaccgatcgaggtctaaaaaagaagcatcaccggatcacgccgatc

SEQ ID NO: 179172 - DNA, 454 bp, Glycine max
  unsure (1)..(454): unsure at all n locations
agctnnttgcataaagaatttgtatgagatcgtgtatgttcgtatccatgtcttcaaagattctagtatatataggctttcttcaacaagtgtctgttgtttataaatgaataaatttcttcacttgagctcgtgtctaaagattgtggtcattggagcatttaatgcttgcattaaatgcacatactctagtgaactttcgtgttgatcactacaacagaaaaccacttgctttaagtcagagcaggtctgtcaccaccagcgtgcgtcttttgatgatgtttgacaacttctagatcttgaacttcatttattctccataaaattcgatagatcctaggagaatgtatntgcaaaacagatctcagacacagaggaataaatgaattcttagatgccattgatttaatgctgtattagatcatgacatgacttctntatcgtctgataacac

SEQ ID NO: 179173 - DNA, 378 bp, Glycine max
  unsure (1)..(378): unsure at all n locations
tattctcaacagtcacatctttttatgtgggttcttgatggctatcaaggcctatatatatatgtgacttgagacacgaaatttaagaagagtntttggagaacaaaaaggtcttatcctattaaaaagcaaatcgtgttatcctcttacaaattccttggccaaattacttgtgattcaataaggaattatttgagtgctcaaattgttcagtctatctctttcaagagagatttcttcttttcttcttcttcattctgaanagggattaagagaccgagggtcttctgttgtgaaagaattctatacacaaacgaagggcttgtcctttgtgtgttagaaccttgtaaagggaatttacaagatagtggaactctc

SEQ ID NO: 179174 - DNA, 465 bp, Glycine max
  unsure (1)..(465): unsure at all n locations
agcttgcttgtggggcttctatggaggctggatctttgagcttcgatgaggtcctttaatggtgattttccaccatggagatgcagcggaagacaaaggagaagaggtgagaggaggcgccatccattaaggaataagccatggaagaaggagtttcaccaccaagatgagccttggataagatgcttggagaggatgcttcaatggaggaaaagaaagagggagagaaagagagaggggggagcacgaaattgaaggaataaaagaggtagagaagtggaactttgaagtatgtctcacaagactctcattcatcaaagttacaacaagtgttacacatgcttctatttatagactaggtagcttccttgagaagctntcttgagaaaacttccttgagaagcttctttgagaaaacttccttgagaagctagagcttagctacacacacccctctcataacta

SEQ ID NO: 179175 - DNA, 444 bp, Glycine max
agctttcaccaattctgcaatcgaagcatctttatctgatacgctaacttgctttacttgacaatgtaattttatcactcttaatgaaatataataaaatgaggaaggatagagatgatgtgcaagttcaaatgatgatatcaattatttaaaagacaaaaaagttcactaaaaaggataatcatgtagaatctgctcaagagatgaaacagcacataaaagagctattaaggatacaatgataagctctattttgggagtgaggggaaagagaaaagaacggggttgaattatgaatgatagtgtaagctataaaataaaagataatagaagatagtgtcattcatgaatacctgtaaactgcttgtgccacagccattaacagtgatagttccaccagtaattgctgcaccagctagtatataactggcacttgaagcatca

SEQ ID NO: 179176 - DNA, 460 bp, Glycine max
  unsure (1)..(460): unsure at all n locations
agcttggttntgggcaatagcaccccacctgacgttcccaaggtctcctgacccccgcgacatatctctaggtaccactctgtggtcaacaaacaaaagtaggaagactgactcttccacgctttctcacattaagcttgttggattatggggcacccattatatgtggtactaggtggcgatcgagcgatggcgcaaatcaactctcccactttcacaagtcaaacataaacataccatccccagttgcccacctttcaactgagctcccgcactcctacgtagcccttatcctcgttcctctcagcaccgggtccccatcaacccctccaagcttccacaatatccaagcaattcaattcgaattaccatgaaactaccctaaaccaagaaaatagggcagaggcagaaaactctgcccaaaacacattcacatatcataactttccttactcatata

SEQ ID NO: 179177 - DNA, 399 bp, Glycine max
  unsure (1)..(399): unsure at all n locations
agcttaatggtttactcatccaaagctatatatatctgtttaattcaagaaaaacagatctgttgtctttctttnggaacattgaggttctgcttcttacttttttgcctttcagtttctctggatgaagttggttagagaagcactttcttggttcccacatcagcttagtctgtcatttaggatactttttgtgccattttaaaaaatttgaggataagttaaacctaactgaaaaaaaaaagatttcaaataaactagaaaattaaagcttaaatattcaattggttatttttatattgggtttctctgaataaaaataatggctaatagaccatcttcttgggctccataccagtaaagtcatttggtctatttaagaccatagatgccaaattt

SEQ ID NO: 179178 - DNA, 457 bp, Glycine max
  unsure (1)..(457): unsure at all n locations
agcttctcgaacgtgatcaatactattattggcatagatngaaggatgaagttgtggtgcgtgatctgttttggtgtcacccagatgcagtaaagttatgcaatgcatgtcatctggtgttttttatagacagtacctacaaaacaaacaggtacagactcccactacttgactttgttggagtgacaccaacggcgatgacattctctgctgggtttgcatatctggaggctgagcgtgttaataatattgtatgggctntggaacgatttcgaggcctatttttaagacacgatcgcctccctcttgttattgtcactgacagagacctagcactgatgaatgcagtgaaaactgtgtttcccgagtctactaatttgttgtgcagggttcatatcgataagaatgtgaacgcgaagtgcaaatctttatcgggggaaaaaatgcgtgggactat

SEQ ID NO: 179179 - DNA, 380 bp, Glycine max
tataattttatactatcatctcatctaaaacaactcctagatgtatgctcttttcaaatattacacacattacagaattattttttataacatgtgattgagtcatgctataactttctttgtctgtaaataacctaattcacacacgcacacgcatgctcacgcttgcgcgcgcgcacacacacacatacatatatgtgtggtgatgattctacttgtttagttatctatcttgtcatgtacttatctgacgggataaattcaattcatgtagatcactatattggtaactctaatcgaaaacacacttcatttcattgttacacttatttggaatccacgctggatataaccatgttaatttttacagaaaaaaaata

SEQ ID NO: 179180 - DNA, 312 bp, Glycine max
tgaaacgcccccggcctttcatggttcaactgcggaaccagacaagatttctagagacttattgctaagcttctaacactctgggcagaacttgcaaactttgaaattcatccggacttcaaggtctatcgctctacagaagaaatctctagaactccatgttatccctccaaggaagaattttctgtcacccaaacgttatgaatcagaactgattgctctgattggaaatgtatcacagacggtgttttgtgaatttacacccgagaggatccacgtgggcaagtcgacagattaagaactggaaatctc

SEQ ID NO: 179181 - DNA, 461 bp, Glycine max
gacccggaacttacagcacctgcggcatgaagcttgttaaaaaagtctattatatgttatctgcagtcaatggatgcgtgatggaatataaatactatatcttaagaaatacacatgtagatggcatccttaggacttcatgcagctgatgtttgtcgccagtttcatcatccaccacccttaccttctctggcttctcacgtttattgttgttaaacccatatttatgtcttcttcccttcatgtcttgttttatcacaactttagccgaatctcctatcttcatcatagttgaatctcctgtcttattctccaatgacacactttcatggcctgtatctctttttttcatatgttctagtgcttcagcttcagaatgcatagtgggtaactccactagcacttctgagtttaattcctggatatcagatatggctgtagaggacgctatgtctattggg

SEQ ID NO: 179182 - DNA, 239 bp, Glycine max
  unsure (1)..(239): unsure at all n locations
ccaatgcacaatgtgcacccacactaacatgcaactgaatggatattatctcactactcccgctttcatatattcaagcgaattggaagacatgataggcttcccataatatccttcgctttattctaaatgatcaaacaatgtgtcatcaatttaagattttttttctaaacctgtttaaaatgatgaatcacttgctcgcagacttgacctcanatttgctagcagacttgtatatt

SEQ ID NO: 179183 - DNA, 452 bp, Glycine max
agcttccgaggactaaagatctcatcttatataacatagcagcaagcagaagaagaaacttgtttattacattatagaaggaaaattatggggtgaaaaagttctatgtcaaaccaatgattacaagcatatataggtacaaaacaaagggaaatacttatgagtgctagagaaaagaagagcatgcatagagagagagagggagactttgctggacccgagtttccttcgaggcaagagaaaattggaaagcaaggcaaagacagggaaaattggagctctggtgggaatactttttaacttttctttttcttttgctgttcatagcttttgtttttttctctagagtatatatcttggctataattgcttgcgggcattgagggtggtgtacgggtgaatggtgaattggttatagtgttggttgtgaatttatcaaaatgatcaatgct

SEQ ID NO: 179184 - DNA, 440 bp, Glycine max
ttaagccacctgtggcgtgcaagcttatccttaaggctgtgctccggacttcaacccccgtgccaccccggaagatttaagccaagcccctactttcgaggggcagcttccaccttatgacgactatcccgggcaagacgatgaggaaggagatacccatcttggccccctactccacctcaaagatccgttccccatgaactaccccaaccgaacatagtccgccatataccgacctcacccacacccgtaaaagaatctgttcccttcgcggaagataagggaaagattgaggcgcttgaagagaggttaatagcagtctagggccttggcgattacccattgctcgatttagcggatttatgtctcgtgcccaacatggttatccctcccacgttcagagtaccagactttgataagtacaaatggacgacatgtcc

SEQ ID NO: 179185 - DNA, 482 bp, Glycine max
  unsure (1)..(482): unsure at all n locations
tctaagtcacctgcggcatgcaagcttaaaggaagtgaacgaattatcatggtcagatatgtctccgcattgattggtaaatctgttccccaaatccctgaaaaatgtaaagaaccaggtacattcaacatacctagtattatagggaatagtaagtttgacaatgccatgctagatttaggagcttctgttagtgttatgcctctgtctatttttaattctctatctctaggtcccttgtagtaaactgatttggtaattcatttagctaatagaagtgttgcctatcctgctggtttcatagaggatgtcttagttagagttggtgaactgatctttcctgttgatttttatattttgaatatggaggagggattntctcaaggatcagttgccatcattctaagcagaccctttatgaaaactgctacaactaacatagatgtatatgcatgcacattatctatggagttcggcgatat

SEQ ID NO: 179186 - DNA, 456 bp, Glycine max
agcttgcaatgcctgccatcgatgacttgttcatatttcatgactactcatggatccggatgcaaaatacactattctttcccttccctcgaaaacaatggaaaagagaaagagagaagatgaataaagctttttggagttactttttcgtcaagataggcaattctgcagggcagcctggaaggaaagataaaagaataggacattacggtaacaagtgttcaatactattatggaacgtataagatgctgatttatattttaatgatcagtacttggagattggaatggagcctgtccatttggaggaaaacaaatgagaaagagctcttaaaaaaagtcacaagggcagctgggggaagcttaatttaaagcacttaaatcataatgaaaggaattgaataatttgaattggtccctcatgacaggctccctctaacgactcactttcactat

SEQ ID NO: 179187 - DNA, 458 bp, Glycine max
agctttaccaccaagagagtgtctgggataaaaagtttagagaggaagcttcaatggaggaagagaatgagagaaagaaagagcgaaaaagtagtgtgggaatgaaggaaagagaaatagagaagttgaactttgaagtgtgtctcacaaagctctcattcatcaaagttaccataagtgttacacatgcttctatttatagcctaggtagcttccttgagaagctagcgttacacccctccaatagctaagctcactctcatgccaaaatacatgaaggaagaaagtttccttgagaagcttccttgggaagcaagtgttacacccctccaatagttaagttcaccccatggaaacacacagccctggtatagctaagctcaccccaacaagatacatgaaaatacagaaaaagtccctactacaaatactattcaaaatgccctgaaatacagagc

SEQ ID NO: 179188 - DNA, 442 bp, Glycine max
  unsure (1)..(442): unsure at all n locations
agctngattacctgttgattntattttggtttcacttatttactttcaatcttattaaaagacgactggtgaggtaaacgatcggttgaaactttattctacaaggataaagtgagattacgacacaaatgatcggttgaaattcactttacatgaagtaatgagactactgatagtagaagaataagatgaagatgtacaaagcgaacaataggggacccttaagggtgcatagagcgaattcaaaaccttaaaataaacactaataagttgatgaatgaagaatgaacaaagaacgatgaagaacgatgtaggaatcaatcacagatgcaattcgaaagcgcctcagcctcattntttcttcttctttttccttcttctcctcaaattcactaattcctttcaatgtngaaagtctccaccccttccttcagccccctca

SEQ ID NO: 179189 - DNA, 407 bp, Glycine max
  unsure (1)..(407): unsure at all n locations
agctntataaacagtgaanaagttgttaatatcaattatgtaaataacaagctcctaccttgcaaagccagcgcggactatcaacagcaaactgcataccaagtgcaacaagaatacctgtgatgctagcaatatacagcattgtcctccacctgaaatatgtttctgttggtgccaaataggcattatttggaaaacaattttctgtttttaaagactataaacacataattggtggaagaatcgctgtgaatntataagtgaaggcttgatttcagtgagccatagagaagtatgttccttttacattaagttcaaaacatatcaaaatgagtctatcagccattgttaccaaacaatattgtcagcagtttttctcaatgctgcaaaacaaggctgtgagcctg

SEQ ID NO: 179190 - DNA, 439 bp, Glycine max
  unsure (1)..(439): unsure at all n locations
agctttgattttaactgagatgaatgatgtcgtatatccacggggccgatctcatctagtgcataacgcataatttttatttntattttcaatcttatgaatatatgttcttgtttttcggatttattaagtactccttgtttcttcattcctcgaatattgggttcttcttcttcttcttcaattatatgtccatataatattaccttttattcaattggacaaaatttagatctaggtccacgcgcgcttcccatgacgttctctcatcacaattagaactctaccgagatgagactccaactctgagtggagaacaatgtccaaaacacttggaagtaggaactgcatataagttatgtcttctcattctatgaaaggtgccgacttttatatataattttcttcccgatgcacaggattcattgttggtgcgtgt

SEQ ID NO: 179191 - DNA, 286 bp, Glycine max
  unsure (1)..(286): unsure at all n locations
atttattgttctgtaacgacccaanaagaccgcatcatgtctatcaatcatgaatcgtatccggattgcctcctctctacttgatacttaaggctaaaggctcaagctcacccttctatgcccaggccatgaaactttctgcgtagatgccgtccggatccacacctgactggctctacttattgtgtgacagccactgattaatttaagccttgaaacctataacaacttcgtaatttgattcttaatgtcatataaaaaaccacttgcgcccctgatattgaga

SEQ ID NO: 179192 - DNA, 423 bp, Glycine max
  unsure (1)..(423): unsure at all n locations
agctngatgcatagtttttattcttcaagtatccaatttcccaaacaaaaccttgtgcttcttgggtccttcatctaacactctttgtttaatcaatttatagcttttggaagctcttgaggagttccaaaagtaattgtcatcttcataaataacaattacatcaaattcatttccatgtttttagtaaaaacacatggacagatgagataattttatgtccttcttttataaaaaattcactaagacaattaaatcttataggagttcatcatagtctagattgttttagtccatataagacttgatcaatttgatacgataatcctctanataatattcactattgggaaaactatatccttcatcaatttcatacaaatttcattatanatagaccaatacaaataggttgtaacaata

SEQ ID NO: 179193 - DNA, 448 bp, Glycine max
  unsure (1)..(448): unsure at all n locations
gctttcataagtgaaatcaggtgcagctatcttcctaagagtcctctcacgaggtgggggttgagccatgttctcagtatgaaaattagtagtcaaatgctcaaaatcagaatattcaaaatcaccagcaacaaaatgtacagaatgatcaggatgcacactatgcctaactaatctatggaaggttttatctatttcaggatcaaagggttgtaaatcacctggatttcccctagtcatgcactatatgcagcaaataatgtgttctcaaacaagcaccaggggagggttaaaactacaactatagtcaaatgatatccaaatgagctgaaattttgtgagcaacaccctaaaatcacgaaaagatagcacagaaattttcagataaaaattcaaagtctaactatganaactggcctaggaaagtttagaaaaataagacaataat

SEQ ID NO: 179194 - DNA, 441 bp, Glycine max
  unsure (1)..(441): unsure at all n locations
agcttgtctcanaatccttctctaagttactaagccaagtccataataaaaatagtgcatcatccatgattttgttagcattgaatatgtcgttagtcaagataatgttgttccgctgctgccaaatagaccatgtcaacgctagccaccaacacttccacctgttgacctttacagcctcagccaccccaaatatatgttgaaggaaatgatgttttgggttttgcgggagaggacccacgcaattcacccaagacatcgattcccaccacagcggactgattntgctgcaatgaanaaacgcatgacctgtattctcctccagattactgcacaacacgcaactcgtatcatttaattccacctgtcgtctgtgaagggttgcccttgtaggtagtcgatctctaagtaacctccatgcgaaagctaatactntatttg

SEQ ID NO: 179195 - DNA, 445 bp, Glycine max
  unsure (1)..(445): unsure at all n locations
agctngccatgccatccccatttcggcctaaacccattctaggctcatatccatcccttaacataacccgagccaccatcaaagtagcaccagataagcgtggctgcaccggaggagattccacataagcactgctcacaatttccagtgcttggaatgatgtttccaacgactcctctacagcctcaacataaggcgtagaagacggacaacttaccagtatgtcttcctctcctgatactataaccagctgtccttcaaccacaaactttaatttctggtgcagcattgacgggaccaccccaaccgagtgcatccaaggccagcctaacaaggaactgaaggcagagcttatgcccattatntggaaggttatctaacacatgtgaggcccaatttgaattgggagatctatctctcctcttacatcccgacggctaccatc

SEQ ID NO: 179196 - DNA, 403 bp, Glycine max
  unsure (1)..(403): unsure at all n locations
cagcatgcaagctnnngaaaaccattttaaaataaaatattaatttcatttacgactttatgtctaagaggatgataaataataggattgctatataaatcacaaatctatatgagtttgggaataaagggaatctaagttacttaaggaggggggtttagttaatatatattattactgaataaatcttctaaatacattctaaatagcggattaaattttattggaaatttctaaattattgtattaatgatttctcatcaaagattaaaggaaaaaaaaatatgtatgcgtgtgtattaattactctcgcgttgactttggtggaacgattcattntgatcaagtctcctgtttctctatgcatataaaagggataagagagaaattcataaattcggat

SEQ ID NO: 179197 - DNA, 232 bp, Glycine max
  unsure (1)..(232): unsure at all n locations
ctggaagcgtctaattttggtccttcaactatgacattgagttcaaacaatctcaatgggactatttcaaaatcactttgccagtctcccaagctngatcaatgcgtatgtaaacatatttttgaaactaattggtccttaccttaacttctaaaacattttattatcaattaccactttatcgatggattgctaatcatctctttgcagtatctagattcaatgatctaac

SEQ ID NO: 179198 - DNA, 364 bp, Glycine max
tatacaagacatcttgccaaacaaagtcaggttagcgataactcgcctgtgctttttcttccatgctatatgaagcaaagtcattgatccagtcatgtttgatgagttggaaaatgaggccgcaattatactgtgccacttggagatgtattttccccctgctttctttgacatcatgattcaattgattgtgcatctggtcagaaaaatcaaatgttggggtcctgtttatctacggtggatgtacccggttgagcgatacgtgaaaatctttaaagggtatacaaagaatctatatcctccacaagcatctattgttgagaggttcattgcataagaagccattgaattttgtttagaatac

SEQ ID NO: 179199 - DNA, 443 bp, Glycine max
  unsure (1)..(443): unsure at all n locations
gcgattttgtgtattttatcttgctaagtaatgagttcattgttttaagcttatcgggtaaacactttntgagtgattaaaatatattttctatcaaacatatattggttgtgaaaaacatgagtgacttagtgacaaagaatacttgggtattaatctcagggagagattaagtatagtgttaggagtggcttaaagagtactcactataactagaagtaacatagagaatacttagttgtaatcaaagatttgatgagtggaaccctctaaggtttgaacgagaatttgggtgaaccattaaaaaacctctgtattntcattactacttctatataattgattcttttctataattcacttctacactatcatatctcaagtttgtgaatggattttttaagcacaaagtaatttcaaaccctttagacaaaatcattcat

SEQ ID NO: 179200 - DNA, 129 bp, Glycine max
aagactaatcgtgagctatacctacccatacacagggatagttgtatagtgcaaatcttagaccgaccattgcaggcgatctgatggatgccttcctttgggataacgaagaccatcttgcataccttc

SEQ ID NO: 179201 - DNA, 442 bp, Glycine max
  unsure (1)..(442): unsure at all n locations
agctgggctttctggctcagagctactctatcttctttttattaaataagccaacttcagggaagcattngaagatttgagtccaagttaatcacgaatgactcaattcatttgcatatttagtgcaaattatgctcatacatgattttgaatttgagattgaatatgtattacaccgaacaaaaataaataacaaaatgcagtacatatataaattcaaattaggaagaatctgatctgaataaactggaatctcaattatttttctgttcaatattgctggttctcgtctgtatacgggttgaagattatcagggtgatcaccctttagcatcagcaattatttgctgcaaacatttcataacataggagaaagaaggccgtctccagggttccctacagcaccagcaaatagtaaatataatgattgtaatggagtttg

SEQ ID NO: 179202 - DNA, 352 bp, Glycine max
  unsure (1)..(352): unsure at all n locations
tcatctttctttcttctccattccgctactattgatcttgaataagcaaatgactccattgatgcaaaatatgcaaggcctacaagctccacgtggagctacatcaaaaacaactttataatcgattacgagagggttgttatcgatttaaccgatgcaagacagaaatctacatgcttaagacatcttgtgtaattgattacgataaggctattatcgattaaaatagtgaagctttccttctgaagaatttgtccaactttagagattntcttcaccctcactcatggtgatgcacaaattgtatgatgtggactaagatgcaacatcccatatataaaccaatacaaat

SEQ ID NO: 179203 - DNA, 457 bp, Glycine max
  unsure (1)..(457): unsure at all n locations
agcttacaaatctgttntaaatccaagcttatttataaaataaaataaaatctagagaagataagataagatctagatgaaataatatctagatgagatcaaatctaaataatatctagataagataaagtctagataagataaaattttgtagaataaaatagtctgccctcttcaagtccaagcccaattctggattcaagcccaatgcttcattaattcctgaaattagattaaaaacatcaaattagctgaatgggcccaaataataaaactgccaaattaatttgacaattaagattaatcagtacttaaaatggtgcaaaaagggttaagaaataggagaaaataatggcacatcaaaacctcccatacttagcctttttcactcctgggcaaaataaaataaagaacaaaatccaaggatatcaaagagagacaaacaaaaacatttact

SEQ ID NO: 179204 - DNA, 441 bp, Glycine max
  unsure (1)..(441): unsure at all n locations
ctttgaatatcatctctgatttctcatctggagaagctgttgctccccctgaattcccagcttgagaagatgttgatctttctgattccttatttggagaagttgttgctctctctgattcccctgtttttccatcagacagatgaggaggatgctcagacacaggacacacaggacctgtctcagggattttaaattcctgaggattttgctttttggatattttttatataattattatatttcagtttagtgtcttagttattttggttaatgtttatatacactgctttttttgtttgggatagctagtatgcttgttntgaagcatatggaatagtttaacttgacctggatgattatgcagtgaaacatctctatctttttgngaaaaatggtgttatgaattgactttggattgaatgcatcgatgtgatggag

SEQ ID NO: 179205 - DNA, 447 bp, Glycine max
ccttgctgatctcacacttgattgaattatttgattcacgtaatggattgaagaggacctacgagtttatcacaacaacatttaagttaaatggatttaagtatgaaaacgtgaccgatattcctgaagctatagactggagggtaaaaggagctgtgactccaatcaaagaccaaggtgatcaatgtggtaagacaaataacaccatataagtacttcattatgctccatcttcttcattatttacttcatctcgttttactttttgtttggataacacaaaaaaatcaattatagcctaaaaaatcatggtcatgaaaaaatagaaatcattatttactagctctaccaagaaagcatgattaattatttctcactatgtatgaaatttaagcacactattaattgtcacttttcaaatatatgaagatattactaagatcatat

SEQ ID NO: 179206 - DNA, 448 bp, Glycine max
  unsure (1)..(448): unsure at all n locations
agcttataagaacaaaattgccttattctatttcaaatatgcatgngaattaggacgcatcaacaagaatcaagccaacgctcttgtgcaagcaatcaatggggcaaaacacaccaaaatgattatgatgatggatggctcaaattctcacaaaggtaaactcatcactttcaaattgagctttcaaaactatcatgacatgtagaggagaatcaaggatttcaagtcacaaaatgtcaaaaacttttattttcaaaacaattacccatttcttgaacatatcctataattcaaagaaaaacatgcaaagtcgtacatgcacacaaaattgacccaaaatattaaactaacaatccgacgaaactaacaacattaacaaattaacaaaaccaacagaactagcataaccaaataacacttcccgcccatacttaaacaacacattgtc

SEQ ID NO: 179207 - DNA, 412 bp, Glycine max
ttctagttggcatttatatggtggaagttagtatccatgcggacgacacgatcttctttggggaggcaacaatggaaaatgttagagcaattaaagcaatattgagggcttttgagcttgtatcgggcctcaaaattaattttgctacaagtagttttggtgctttcggggttccggatcagtggaaaatcgttgcagccaattacctcaattgtagcttgatgtcctttcctttcacatacctcggcgttcccattggagcaaatccaagaagaagtcagacttgggaccctattattagcaagtgtgagagaaaaataacgaaatggaagcaaaaacacttatctttctgggggagagtgactcttataaagtcaatgctaacatccattcctatttattttctttcttt

SEQ ID NO: 179208 - DNA, 347 bp, Glycine max
  unsure (1)..(347): unsure at all n locations
agcnngagctagaacagaactgtttaatatgttcccaacaaggaaaaaggagaatcacattttatataatacgaaaataataaaaagccacggaaaaaaccatcgcttgaattttccaaaaagaaagatggcatcaactctgagttctgaccttccactatgaacagctgcacgcatttgaagaacgcgcttcaaaatatcatctggtgtatccccagatttgcttcccatggacactacaaaaacctggcattgccaccaaatctagaattcataatttgctctcatgacactcaaaaggaaaatccttgaaataaaccataccttggcagagaaacaaaagctag

SEQ ID NO: 179209 - DNA, 303 bp, Glycine max
  unsure (1)..(303): unsure at all n locations
tgtntgatgcaaccatgatggttacagcccttatatctttctcttcatgacatgattgcacatgtaagtaaggtttgggctgcagtggaagagttgaaaagggtccttatgggtaattcattggaagaggtgaatatgaaactggacaagttttatatggttctcatcttgaggagcctacactcagactctgatcatgtgcgtgatcaagttcttgctggagaccaagtcccatcaatggattccctcatcactagacttcttcgcgtgcctcatgtgttgaaggatgaaactcttactaat

SEQ ID NO: 179210 - DNA, 350 bp, Glycine max
gacacttaaaactaagcttctcaggaagctaccagtgaataatagaatctgtgttacacttggagaacgttgatgaatgagagtcttgtgagacacaactcaaagttcaacttctctcccttttttgttccttcaattgtgtgctcccccctctctctttctcttcctctttcttttcctgcattgaagcatcctctccaagcttcttatgcaaggctgatcttggtggtgaagctccttcttccatggcttattccctagtggatggcgccatctctcacctcttctcctttgtctttcgctgcatctccatggcggaaaatcaccattaaaggacctgattgaagctc

SEQ ID NO: 179211 - DNA, 435 bp, Glycine max
  unsure (1)..(435): unsure at all n locations
agcttctgtgntcaatttctagtgtctcaatatataacgggacttaatcgggcgtccaagttaaaagttaatgtggtttgcacttgcaacgagcttccgttatcaatttcgagcgtcttgatatattacgagactcaatcggacatttgagaaaaacattattggcttttgattttgctcagaccttctgttctgaattttgagcgtctcaatatactacgggacacaatcggacattcgagtaaaacgttattgtcattttaattttctgagagcttctttttcaatttcgagcatcttgatatattacaggactcaatcagacattcgagttaaatgtcaatgtcgtttgaatntgctacaagcttctgttntcatatacgagcgtcttgatatacttcgtgagacaatcggacatccgagtaaaaattattg

SEQ ID NO: 179212 - DNA, 426 bp, Glycine max
  unsure (1)..(426): unsure at all n locations
attcaaacgacaataactttttactccgatgtccgaatgtggcccgcagtacatcgagactctcgtaattgaaaacaaaagctcgttgagaattcaaacgacaataactttttactcagatgtccgattatgtcccgtagtatatccatacgctcgtaattaaaaacagaagctcgtagcaaattcaaacgacaacaacttttaactcagatatccgattgagtgctctaatatatcgagacgctcgaaattgaaaacataagctctgaacaaattgaaaggacactaacttatatctcggatgtccgattaattcccgtaatatatcgagatgctcgaaattganaacagaagctcgtagcanatactaacgaccattactttttactcggatgtccgattgtgagccgtaatatattgagacac

SEQ ID NO: 179213 - DNA, 374 bp, Glycine max
acatgatactgctcttagactctccacgtccaaaacaggtaactcagctgacaggatattgcaataatggacgagcggaatgtccatatgtgtgtgcactctagctgaatgcagatggaaaaccaccggatgcttatcgaaatgcccgcatcatatgctgaatggagattgagccaatgatacctcaagacaatatctacaggcgcattgaacaaggacttacgatttataccgaaaacaagggtttaggcccatgagatctgtaaacacttttattacacaataattgtctgcatcacccagaacatacgcttgcgcaataattggcgatgaagatgaatataaaaagccagaataaagggctaatactacta

SEQ ID NO: 179214 - DNA, 386 bp, Glycine max
ctgactcatgtgacatcattttcaataatggccgatcggattgccatatgtttttgactctagctgattgcaaatgtattttgaccggaagtatagcatcttgcccataagtcagccgaaatggggaagtattagttgattccttatgagaatttctacatgcccatagaacttgatctaacgttttattccaattccttggctttcgtgcaatgtgttgtttaatcaagttaattacaatcttattggctgcttcgacctgaccatttgcttgcgcgtaatatggtggtgacgtaataatcgagagccagtttttggcaaattcttcattgtctgtcagtaaaactgaccttgatagtggtactgttcgggataccaactataat

SEQ ID NO: 179215 - DNA, 311 bp, Glycine max
  unsure (1)..(311): unsure at all n locations
ctgcagctgacttgcgagggactcagccttcttttctcttccctanaggaaggtgccgccagagtgataaatccttagacacacggtgcgtgtgcatggtgcgattatttccactgaagagcctcattggggcacaaaaatacaatcttcatactagctcctcaaccacgctgtcatcgcaccctctgagcgggtgcaatatgttttacctgcctcatgacgcctatacacacttaatggtgagtgtagaattatatcttggattagtgggccgaaccatgactgaaattcactggtcttaactcgtgaaa

SEQ ID NO: 179216 - DNA, 391 bp, Glycine max
  unsure (1)..(391): unsure at all n locations
ctctccttttctcctttgccttccgctgcatcttcatggtgtaaaatcaccattgaagaacctcattgaagctcaaagatccagcctccatagaagctccacaagcaagcttccatcacaccctttgtgcatgtccttcatgttttacatgcctcatgacacctaaacacacttagtagagaatcttgaatttgatcttggattagtgggctgaaccatagctgaaattcactaatcataattagtgaaatgttggctccacaaattcaagttcaaattcaagtgaaatntgaatagaaattcanaattccctccaattttgtgtgacacttatgctataaatagaggctttgtgtgtaccatttggaactntggtcatttgagaaaatag

SEQ ID NO: 179217 - DNA, 411 bp, Glycine max
  unsure (1)..(411): unsure at all n locations
agcttgaacgagagtgtgaaaagataattatatttctgattctagcataaatcacagagaatagggatattatcttcgatacagcgaaaacaaaatatcctctatttttatgtataactaatgtaagtattttgataccattttcttaacatggtatcacagccaacttcaattacttctttttttacgaattgaatattagttattaaccatgaaaatggaggataaatgaaattctactccacatatgtaggatctgtctccaatccttaaacctaagcgtattgatggtcaaattaagctgaatggaccctaaacgcagagagtaagattagaggtcgtatgcgttaggcgtacaccaataaacctttgcaccagttgcaaagntcagtacatcgatggtattattat

SEQ ID NO: 179218 - DNA, 364 bp, Glycine max
ctaacaacatctataaaggctttttttttcttctatcattcaaaattcatagggaactttgtttacataacacactatcactatggcaagaatgcttttcaaaatcttcaaacatctaagaggaacattatgaggtgaattataattctttcccatatgagataaaatgcataatctattccactattcaccttttttcaatttttaaatcctttcgaagtaaatggacttgattttttagaaaatatataacattgaaaacaaaagaatgcaccttctagtgaatactctaaccaaggtaaaattctaaaccaacaagcttgatatcgacaaggatgatcttcttgaccacaaagtggataca

SEQ ID NO: 179219 - DNA, 379 bp, Glycine max
gaaggaatatatgatcattacgattggcatgtacatcatcctcctcatccttagcattcatcaaaggcattggttgggagaaagctgacatcttctgacatcaagtgttgaaccatcaatgtggtgaccgatacaagatgttcgtccttgtataaccactaatcatcttgaattgcacggatcttggacaaaaaacacctatctaacttgcactgccatgatgaatgggttgttcttgtaaccggccttttgaatgtcaactatagttagtcccattttgtcttgacgcactccgatatttccatttactcactgacacttgaagatagacactctatatcacctgtatcaaagctccaaatatcttcaatgactccat

SEQ ID NO: 179220 - DNA, 447 bp, Glycine max
  unsure (1)..(447): unsure at all n locations
agcttgtagaatggccagacatgatacatgttatggttcggnttggatcaagggtaaaagggatgccccacattatttccatgacacaaatgcaaaaatgatgatttggaaactttatgcaaaactggtcatgcatgcacctatgtggacactcaagtgtcaaatttttatgctcatgtgatgctagggctcaggattcattccctctattttagtcaacccaatgtttccaaaatatgttcttttatccatttgtgcattcatccgagtccattttgggcgtacggggaaatttcactgcgttcacccttcgggtgtacacacatttttttcaaaaaccagctatgatcggcgaatttcccaaagaagagttggtagtcatctcttttcaaaagcatgtcggttcttcagctaaacaacttattcttggtttctttttccatcttt

SEQ ID NO: 179221 - DNA, 403 bp, Glycine max
  unsure (1)..(403): unsure at all n locations
tttcgattcattctatgtgcccgtagtggccatattgtgtttcgtgcattnttattctcnggttgtttactttttataccccttgttgacgtgcttaagccattttacttaagtcatttctcgcttaacttaaaaataaaataaatttccaccgaacgtttgaattgtattatccattaacttcggttaaaataaattccgaccgttcggtcgtgccgtaaccacgttggaaatcaaaaagaggtaaaaaataaaggctaaaatcaattcgcctagtcaagctcgtccataaaaaatagggcttttgaagttgtcatttcatttcctcactaagtaaaatggatcatttttaaggtccaacgccttaaaatgatcacctcttacagtaaaaaagaatcacttg

SEQ ID NO: 179222 - DNA, 432 bp, Glycine max
  unsure (1)..(432): unsure at all n locations
agcttatattggttaagatacaacgtatttatctttattcaagntgttttaattccaattgatacaaaaatctaagttaactatacttctgatccttttagttgggattatgtacaaattttggtgctaaagtttttgtcattctagatcctttacttttaaaactaagtgaactcattctctactcaatttccttctatgttttttatccaaatatttaatggtttatggtgaactcgcaatatgaaataattttaagactgtcgtattttctcaaaaaaaataataatgaaatttgatagatttttgtaagacttcatattaggatatcaaaatagtttaagtcggttggttgaattgaataaaaataaaaatgctgtattaggatttgagtaggggatatcttattattttggctatattagatatttt

SEQ ID NO: 179223 - DNA, 434 bp, Glycine max
  unsure (1)..(434): unsure at all n locations
aactnagctttgaaaggggggggtttcaccctctcgctatttttttgttggtttatcgagcgtccgctaagcataacactcatgggcttagcacgaggaagactctggaagaagatgagttatacaggttcgctgagcgcaccactttattccactcagtgcaccgcttcagtccatccactaagcgagaaaggcacgcactaagccaaaattcaccaatgtgcgctcagcggtccataattgtgctaagcgcatgagcacgaacaaagccacctatntaagcctgaaatcagattntagagggggagtttgggttgggattcaaagctttgcatgtctagagattctagagagagaaaggtccaagttccaaagagttttgaagcttatgtgtgtgaagatctgaagacttagcttgaacagaaccggttgag

SEQ ID NO: 179224 - DNA, 435 bp, Glycine max
  unsure (1)..(435): unsure at all n locations
agcttaaagtatgcccgagtcatttatctctatgagatgtngnngaagtattggcgatcaaaattgccattccttggattatagggttgaaccaagctcatgcttttacaaaaagggtcatcaagtcaagttgaaatatggaagtaatcgtcttgcaaaattggggcaaaagatgaatcgagtcacatcactgcttcatctactgccaaacatatttaggattattgatgtccttgttacttccagtttcaccttgacaaagatgtcatggaccatgttgaaaatctaaattgattcaaccccatatcttgcgtaaaaattcgcaatactttaattgtacatcattcgcatgcatccatgcttttcattggttgcattgctcgttgcattctttcctggataaaataanataaaatgaacttaatcattgttatc

SEQ ID NO: 179225 - DNA, 453 bp, Glycine max
  unsure (1)..(453): unsure at all n locations
tcagctgacattgggaagcaaaaacccatacctctcatattttctttcttgngtatgccgattgaacttgcaggtctgttgtgatgtggctttgacatgtcacattgacatatcaaacttttcctaataagtaaattcaaaaatttggagccggtgttattgctaaatgttagatgcattaattttttaaatgatgaaaataccaccaaaaaaattatttgaataagtctttcaacactgtgtcatgactacaacattttaaaaaaacagaccccgagtgtatttgttcatcactctcaccgaaattaataaacattcatgcttctagtgtcttttaactggtcagataacgtcggcgacccatggacatagattctgacattgcaaccaagaatcaanggtaaatntgtgttataagttacacatattgctagcatcctacttaatttcata

SEQ ID NO: 179226 - DNA, 449 bp, Glycine max
  unsure (1)..(449): unsure at all n locations
agcttatctcaaaagagtncttcatcttttttctttgcaagaataataatcttcctaggagcttctcacaaaagaacccttccattggccgcaaatgcaccaaattagctaaggaacagaaagcaaggttttacatcatgaggaggtgtgatgccatgttggtttgctggcacaagcatggggattcatgaaagaagtgcacagatcttgngcttagtttttattggtttatgatccttttattggcccactttgaatactatagattcgattgtaattacgagttgactaaggtgagttataagatttacacattgctggaaatatgtatatgatcaattggactccagattaatgtccccctcctacgtttgattntatctcttacacctaaactttatgatgatttttaaaatgaatgtgctaataaaactatcatgtgttaaatc

SEQ ID NO: 179227 - DNA, 457 bp, Glycine max
tctccttgtgtacatatcaaattaaccagttggtatttttattttttcttgagaggaagtacaaccatgaggaagccagaggcgagtaattataatactaaaaacaacaacaacaatagcaagaagcttagaaaggggttgtggtcacctgaagaagatgacaagctcatgaactacatgctaaaccatggacaaaggtgttggagcgatgtggcaagaaatgctggcctccaaaggtgtggcaaaagttgtcgccttctatggatcaattacttgaggcctgatcttaagagaggtgccttctcaccccaagaagaggaactcatcatccacatccattcccttcttggaaacaggttcatcttatatatatgatcatttccactccatcacccttatattatgatataagtctatccataatcttcattaccaattattaattctatagatccat

SEQ ID NO: 179228 - DNA, 439 bp, Glycine max
  unsure (1)..(439): unsure at all n locations
gacccgggatcttaagtcaccgcggctgcaagctgcgattcttcttagncttttttctttttttgggnnnccttttttttttttttaaatttggactgtggggatgtgcgtgtaggccatcactgtccccaatacgtccccacaaaatgaagccattgtccccgttttggtcagccatacccaataagtcatgatgtcccctggccattccttggtcgtacctgtcccatccccttccctgtgcttcatagtttttaagtgtaactctgtagcacggtgattagtaagttgacctattttactaaataggtataaagaaccctgtaagattgattatgtgtgcacattcattggtcaagtatggcctcttggttgccacacacattctcctgtatctgagccaagttggttacaaacttcaatcctttttttttttttt

SEQ ID NO: 179229 - DNA, 373 bp, Glycine max
aactaagcttcttgagttgctcaagatgggagcagtgtactttttttggaaccccctttatcagagaaagaaaccacaacattgtttaccaataccttgcgtgagccattttatgacatgatgattgggtgcacctcgtcaaacttttttgatatagttgtcataggggagagagtggagaacgacatgaagaaagggaggattgattctcctaaagcagccaattcaaaaactcttccaagcgggtcggggaagaaaaaaaaaagggaacaccaatgcaatgatgtttcattctcctggggcaccaaattataaaactcctcaaattaccaccatctcacaaattcctcacccaacttcacccagtacacca

SEQ ID NO: 179230 - DNA, 439 bp, Glycine max
tcaagcttgagatagccatagcttatagagtttggaagaggtattgcgcttgaaaatgaaaagtgcatggaatgttaaactaggagcctttatttatagtcaaaagataatactacaaacaatcagggagcgttagcttgcttaaactcttcactcttcaatatgcgtgtataaggattgttaattaaaaataaaaacaaataatgaaaaagttcatggaatgtgaaactaggagtatttatttatagttagaagagaatactacaaacaatgggtactagcttgcttaaacacttcaatatgcgtgtataaagattgttaaataaaaattataacagaaaacaaaattataaataattctcactgctctactctatttattttttaaattttcgattaaaagcatatggcaaaattaattgattaaatataatagcat

SEQ ID NO: 179231 - DNA, 411 bp, Glycine max
  unsure (1)..(411): unsure at all n locations
gacactatataatactaagctctcacatcctagacgtgattgctaattctttatgaattttcaaaagggccacatccttgtctctcattcattggattgaattcgatgaacaagcgttgatattgaagccctaaaccagctttggggcaacagctgaacgcaatcctcttaattattaaacacaaacataacaaatggttctaaatgcaatcctcgtcatacctgacagagaacatccatagtgctctgacccccactttcggccaacagcttgacacgaaacttttgcacgccgccacctttgacatcttgttgtgtatcagccttgggcaccgctttcacaatcttancccccacagaagaaagattccttctgcgaggggaaactgatggacctcccgtaatcatcaa

SEQ ID NO: 179232 - DNA, 422 bp, Glycine max
  unsure (1)..(422): unsure at all n locations
agcttattgtttggtcctatgatactgttgttggcatccttggatacatttctcttagtggacaatgttcgtcctatagaagaaataataaaacaattctgggatattcttgcattgtatatccccctgctgctgtgtacagagatccatattccattcagttgttttaatttttgcccctctataaataagatttgcatcatcagttttctaatatactaaatatggagaataaatttctctatttttgccatttattttatagaaaacattatcatctcagaggggagtgattggaaggaatggtttaccaaatttctttaaagcctgatactttntttttctttattgttgcctttcttactggacaaaacttctagaattcttgggtactttgttaatttcctacaattttttcagta

SEQ ID NO: 179233 - DNA, 444 bp, Glycine max
  unsure (1)..(444): unsure at all n locations
tgcgcacaagattctccttgcctggcacttcaaaaccttctggttgggtcatatagatggcttcctctaaatccccatgcaagaatgcagttttaacatctaactgctccaagtgaagattctctgcaactacaatactcagaataactctgatggtgatcatctttacaactggagagaagatctctgtgaaatcaattccttgtttctgcttaaaccctttcaccacaagtctcgccttgtatcttcttctaccgtcagattcttcctttagcctatagacccacctattctgtaacgctttctttccttctggaaatttagttaaagaccacgtcttattcttctgaaggaatttcatctcatttntcattgctagctcccactcaatagtgtcattcccctgcgtagcctcactgaaacattatggctcaccagcatcag

SEQ ID NO: 179234 - DNA, 460 bp, Glycine max
agcttttcaacccatctccttaccacagctacggtcctcgctcgtcttcaagaagacaagttactggaccgcaagaaacacacctccaaaagttcgtttggctcccctccacctctaaatccacctgcctcatatccaaacactcaccacacacctcgcccgaaaaccccatttatccaaagaacccaagaaacacacctccaaaagaccattcctctcttcaaccccacatcagccttcacgcactggccggtgtctccgcctctgatacttttcgcctgtatggactgatcagtagtgctcgtatcaccatattggttgatagtggaagcactcataactttgttcaaccacgtgtcgcgaaattctcaacttacccatggaggatacgatggcacttagagtgatggtgggcaatgtgttcattcagcattgcgagcaactgtgccctgatacaaag

SEQ ID NO: 179235 - DNA, 317 bp, Glycine max
  unsure (1)..(317): unsure at all n locations
aagaatattctggagggcccaagtgggcctggttgctatgtgcacctactaaatacaccctttgctctttttggtgattctttttcccgaacgttacgaaactttatgaatttcgtaacgatgcttgtgttctttccgtaatgttatgaaaccttacagatnacttaatcatcccttttttgccttccaaaacgttacgaaactttaaggagtgcgcactaacacttcctcttaatttccggcatgtcacagaacttcacggattatgctacaatcgctatctttgacattcggcatgtcatggaactacacgaaat

SEQ ID NO: 179236 - DNA, 443 bp, Glycine max
  unsure (1)..(443): unsure at all n locations
agcttatattcttgaatcaaaatttatattgttcgttatgataaaaaaaaaggaaagattgttagaactagttgatctatcactagacgatcccttcattactaatgacttaagggtaagtgtacatgacacatcatatgaagcttatgtagtaatatatcccctatcctttaactctgttaatatggttggccacactaccttacaagaacttgtttatattaagttatacacaatgtccattgcgttgttaataaaacaagatttaattattaaaaaccaatgactcatctaatgtcccttttatcaagcatccaatggacattaatcacttacatgaaactntctatttgtattaagggtattcttataggaatctatctcaattatgttattccttggtacttgatntaagtaacattngaattctgtatgattaatac

SEQ ID NO: 179237 - DNA, 461 bp, Glycine max
  unsure (1)..(461): unsure at all n locations
nttaaagagcaagagtagaaaaacaaatcaccgtagattatactagaactcttttaagcaaaaactattaacttaaaatctcaactaggaaacaagaagcaacaaaattccatgccattagttaagcatcaaatatgaatttcaaaattatatataacacaagttcaatcaattaaactctagacaggggaaaaaaatttatatataacacaagttcaattaattaaatgaagaatttatgttcagtcatgcgctcaaactaacatagtgtaagtcttccatatcttaatttagcaatgcatgttattttacttgttgtaactaataaatacatcttaagaaaatgattaattatatgatattttataaaattattatttcattaaaatatccttattccataaagcattaattaattacattatacaattacaactataaatatttatttcttaagagta

SEQ ID NO: 179238 - DNA, 424 bp, Glycine max
  unsure (1)..(424): unsure at all n locations
agcttgcaacaaacataatgtctggtctttttgctgacagatacaacaaactaccaattatacttctataaacaaaatcatctgctttatcaataccatcgttcattgataacttttcattcacaacaattggagtggcaacaggcttgcattgctccatgcaaaacttcaatatcaccaaagcatatttcttttgtgaaatgaagatcccgtcattaaattgagaaatctccattctaagaaaatacttaatttcacccaagtcaatcatttcaaattctttttccatgtcctttatttcacctaagacagtcatttttccacttcttcacgtacaagggtggcttcattatcacttcttctaaagccctttttcaaaagataactgtcaatcctgctatanccaagctcttggagcctgttt

SEQ ID NO: 179239 - DNA, 357 bp, Glycine max
  unsure (1)..(357): unsure at all n locations
ctgggacaaaaatgtggttctcatgcaattccataattctcattcaccttatcctaagactaacacacgtatatatgcatggtctgcaaccgtcacacttaactagtaacttttctgatgaagagatttaagtttctaggaaaatttattgtatgatcagataacatatttcaaattatctccatcagtattctcatggtagatgtatgctctaacaaactactactaataatttatctaatttttcattttatttattatttacagtgcaacttatattttgtctacttgggattatcagcaatggttgccctcatgggtaatcccaattcaaaaccaattnttgatttacttttt

SEQ ID NO: 179240 - DNA, 434 bp, Glycine max
agcttcccaccaatggtattcgaagtttaatgatacccttgtctccttcgcgattaaggaaaatactatcgatcagtgtatatatctgaaggtcaatgggagaaaggttattattctaattctgcatgtcgacgatattcccaactaatgatcttggtcttcttcatgaaactaagaagtttcctctctggtcactttgaaatgaaatacttgggtgaggtacagctatgtcatctggatataaatattccatactatatcacaaagatttttacacttatctctcaaagcatatatcaataaagtaattgagagaattaaaatacaaatatgttgagcatctcctatttcattttacaaagaagacaaactctacctcgctcactgtcctagaaatgatatggaacgaatacaaatggaagcaattccatatg

SEQ ID NO: 179241 - DNA, 455 bp, Glycine max
  unsure (1)..(455): unsure at all n locations
tcaataactacattcacgactacaaacaaaataaagggagttaatgtttcatgcatttacacatcaagaaagacacactcatccaagatatatatatggtccaaaaggttcttgcaacactaatccacgcatcaaaggagaaataagctaactaacaacatacacacaggatgataaaggttcattaacacattatcaatcaatatcaagactacttgcatcacccaatggcttgccataatgtccaaccgcacttcgcaattatagagatggccagtctcataactcatgactcaacagtggatttatggtatagcagacattaaggatgcaaggcacatacaagcattattattaagtcttatntaatcatgtaagagaaaatacaaataataattcaagcatgctcaacaaaagtactcataagtaaccacacagagtgcacaccagaatat

SEQ ID NO: 179242 - DNA, 404 bp, Glycine max
agctttgtataccagggaggggatttgttcttaatgttgatgggcaacctttgaagattctgagaaagaacatgaccactctatctcagacatggagcgttctttccttctcgaacctcattcccacctcccatacatatgatgtgaccttggacagagccaagttgatttatggtataattatgaatatggatatgaacttggggtacctcatctcccaccagatctctctgattgcacaacataatacatccaaacttggattccctgccttgatcacagctctatgcaaggccaaaaaagttcagccaaactttagatccctagagagcttgagccctgccattagcttggcatatattaagaagaattgttagaatcttgatgattcaacagtgacattt

SEQ ID NO: 179243 - DNA, 329 bp, Glycine max
acataaaaccagctgataaacaattctatattccaaaccttttttatatacaattgctcattcaaatcattctcaaacactcatttcatgcaaaacaatccactacatatcattttcaatcaattcattgttcaaacacgcttttggtacaaacaaacaactcaaagtgctgaaatttatataattgaaatttaaaaaaattgaaatataaaatctgaaattaaaatgactgaacataaatcataaaataattgaaaataaactaaaatgttcgagatgcacaaatttaaatgtcctgctcctgtgggtgctcctatgcatgctcatta

SEQ ID NO: 179244 - DNA, 412 bp, Glycine max
tggatggcgaaattgatgtgcgggattcataatcatgaatttgccaagtcattagttggacatccatatgttaggcgattgagtaaagctaaaaagacacttattgctgatatgacgaagtgaatggtcaaaccaagaaacattctgctaactctgaaggagcacaatgccaatagttgtacgaccatcaaacaaatatacaatgcaagaagttcatacccttcttccataagaggaagtgataccgaaatgcaacatctaatgaagtttcttgaacgggatcgatatattcatttgcacagattaaaggatgaagatgtggtttgtgatatcttttggtgtcaccctgatgcagtgaagttagtcaatgcatgtaatttggtatttcggatagacagtacctacaaaacaa

SEQ ID NO: 179245 - DNA, 448 bp, Glycine max
  unsure (1)..(448): unsure at all n locations
ctgatggaaacgcgtaagttctctntgttacagatcattctgcaatcagacgatttaaaacaaaaggaaaataaattttcttctatattagccataacccaaaaagccaaagaattaaagtgaaaatactgcggattgtgaatctgccatttaattacgaattatattattaacgcaatatttcttacaatattttctacagactacaatatagtgttatttttaattttaccttcttcacatcaactattttattttatacttttgttatcaattatgtgcgaaaactgtgaagatgtgatgcttccttcatgtgcccaagttaaacttccacttcaatccaagatatgctgaaatagagagaaagagggtcaagatgtacgactttcaatacctcctttgcttgtaagaatgttctcaacaagtaccagtcaaaatcaagaaacgt

SEQ ID NO: 179246 - DNA, 229 bp, Glycine max
agcacattcgagaaattaccctgcgatgctttccgcctaaagccaagttgcacagtggtacatgccttctatggcacccggtagaggatagggagatatcaacctccctgttctgaataccctcacaccacgcaagaaaccctcgaatgagggggtgaaccacacctacatctggctgtggtggcccccagagatccactcggggggagacgtgacctatacactacac

SEQ ID NO: 179247 - DNA, 377 bp, Glycine max
  unsure (1)..(377): unsure at all n locations
ntgcacgtatcggtcaagtgtatggaccacgctgtntccaatgtgctcatcgataatggttccagtttaaacgtgatgcccaagagcactttggagaaattaccattcaatgcttcccacctaaagccaagttccatggtggttcgtgccttctaaggcacccggcgagaggttaaaggagaaatcgacctccctgtacagatagaccctcacacctgtcaagttaccttccaaataatggatattaaccccccttacagctgcctgttggggcgcccgtggatccactcggtgggagttgttccctctacactccaccaaaagttgaaattcgtagtggaagggcatctggtcatcgtatcatgcgaggaagacat

SEQ ID NO: 179248 - DNA, 401 bp, Glycine max
gttcaatgcttgccttagaaaagagacctaagtgcttatgccataatgctcttgagttagtattatcaattctacgctgactaccacacaattctacattaaaggattcaccatcggaagctatagtgtcaagtcaatattgattatgattagccaatagtgaactagttgcaacaatatctgaattgaaagacaacctacacacattgtttccaaatgaacacaaataaccgaatttgccaaataagaaactaaaaccaaattccgactaaatgacggtacaacagaattgtctttcaaatccaaataattcccagtacgtaatagtaatctaaaatgccttatagcttccacctgtaccaatgtaccatatccaacatacatccatctgtcagaatcaa

SEQ ID NO: 179249 - DNA, 455 bp, Glycine max
  unsure (1)..(455): unsure at all n locations
agcttactcggggccatttcctgcgaaggtatacatttggaaagttagttttaccaagaaatgctacccttaaaacaaaaacggcatacaacctcctccaataaatacaaacatcaatgttaatntatagcgagcttatgcgcatacttctttacgagcgttcacttgcacaagacattcttataactaagaaaaatgcacccatatacaatcaaggcacctttgttacctagattatttatatgtacttccaaggagtatttgttacctacatcacacgcatttcctttgctaaatttacatacatgcatactcaaagcactttggctatcaaaaattgcatacgtgcacattctggtatttctaatacctatacatacacaaacttcatgatgaatcttgactatctacacaataaggtgctacatttcatgcttttntcaagtgtttttact

SEQ ID NO: 179250 - DNA, 260 bp, Glycine max
acttgttgtggacggtataatcgcatattctcagtcttaaagaaaagatttgaattatgtgtttactccggttgcttcatttatgtaacaaaagacatgtgccttgactttacgaaattctgcctttcagaatgatatcttctatgcatggcacttttaactccatgggatttaggaacttgtcctgactctaaatgccacttgtttattatgaaaaaggacgcggcaatggttatttttagtatgcgatattgagacaa

SEQ ID NO: 179251 - DNA, 164 bp, Glycine max
tcccgccctctaactccctttagccccccaccaactagtgttacccctcattcaagggttctaggtgaaaggaatccaaagagggaattgtagcaactctacctccaccagtcataacataatataaattgtcaaccgggttcgctctaaaaccccccattaaa

SEQ ID NO: 179252 - DNA, 448 bp, Glycine max
agcttagagaataaaagacaattctttcacttcatatttgattctaactaaggatgaaaaagactctagactatatcaaacacatgtctagtctaaaacattcaatacatatgctacatctattaaacatgtttgacattacaaaattatcaaatcaaaaccaaaactaaagacttcaagctttgaattaacactttatgaacatgctacactatttatgtaactgattttttattttcggctgcatatttatataactgatttgatgcttctaaactttattcatatggcatatttattttctctttgctaattggtctctaatgcgaattcattttcactaagttacaattctctctttgtgaactgaattccatttccttctctttagctggagcttcttgcctcctgccccaacctcagaggctttaatagatatatatactac

SEQ ID NO: 179253 - DNA, 451 bp, Glycine max
agcttcttgttaagactttaaatctttttaatctacctcactatcttgttctgtggttgaggctttagagatggtgttagcaattaaacatagatttttttcttcttcattagcttctcctaatgatgtatcttctagatcctcctacattgacatcaaccctttcttgaacacttatactcaaaccccccctttcctctccaaaatttctcacttatcttacttttgtatactccaagatacccaaattaagttttagtgctttagtttcctacaccaacacttggttgttaaggaattttggtgagttttctccttgctttccctctttattttctaaacaaaaaatttctcatcctcctaacactcttaattgatttttcatcatccaaatcacactttgttggcacccttttagaatcgcaaggagatagctacaaagcttcaactt

SEQ ID NO: 179254 - DNA, 450 bp, Glycine max
agcttatccttccttttcctattaatgtgttaatgatggaagaacaaaattttttaaccctcctggtatctgagattcacttaaaattaggtagaaaaattgtttccgtgaagaaaatccaagccgaggcgcttccgtaacgctttcgtaacgtttccgtgggtgatttcgcaaagattttcaacagttcttcgtcgttcttcgttcgttcttcgtcgttctttgatcttcaaccggtaagttccagaaatcgaacttttcaattcattctatgtacccttagtggttctcatttgttccacgtgcttttatttccatttcatttactttctgtacccccttttgacgtgctgtagtcatttatttaagtcattttctcgtctaataaaagataaaataaattttcaccgatcattcgtattggaacatcctctaatttctggtaaaatg

SEQ ID NO: 179255 - DNA, 405 bp, Glycine max
  unsure (1)..(405): unsure at all n locations
tcatgatgaatcaagattgattcaaagaagttttgatgataacaaaggtgatgacaaaaagctcaaaggtcaagaatacttcatgataacaaagatgatgatctcaagaatcaaagaatgagttcaagatgttcaagattgaatcaagattcaaggttcaagcttccaagaatcaagagaagaattaataaagataagtatgaaaaagtttttcaaaaactgagtagcacatggatttttctcaaaacttgtttaccaaagagttnttactctctggtaatcaattaccagattgttgtaatcgattaccagtagcaaaatggatttgaaaaagttntcaactcgaattacaacgttccaatngatttcaaaaatctgtaatcgattacaatgttttgggtatcg

SEQ ID NO: 179256 - DNA, 442 bp, Glycine max
agcttcacacaatttatttttctcaaacttgagtgttggaagaccaattactaagtctttcttaactagatgattaagatgatgcatgtttatgtgtgcagtcctacaatgccacaaccaagagtcatctatcttaccaaacaactcagctcctaaaatgatgcatgttcaatatttaacatatagatattacctactctcttgccaatatggacatcctgaccagacatagcttcactaataagacaataattcttgttgaattcaattttgaagcctttgtcacatagttgactaatacccaagaggttatgctttagtccatccacatatagaactttctttatctgagttgtgactgatttccaatatttccttcttccattatctttccttgggtattggctccaaaagtgacatattctccttcttttgacacaaa

SEQ ID NO: 179257 - DNA, 456 bp, Glycine max
tggagaggatgcttcaatggaggaaaagaaagagggtgagaaagagagaggggggagcacgaaattgaaggaagaaaaagggagagtagttgaactttgagttgtgtctcacaagactctcattcatcaaagttacaacaagtgttacacatgtttctatttatagactaggtagcttccttgagaagcttctttgagaaaacttccttaagaagctagagcttagctacacacacccctctaataactaagctcacctccttgagaaacttccttgaaaagattcctaaagaagctagagcttagctacacatacctttctaatagctaagctcaccttcttgagatgagaagctagaacttatctacacaccccctataataattaagctcaccctccatgaaaaatacatgaaaatacaaaaaaaatccctactacaaagactactcaaaata

SEQ ID NO: 179258 - DNA, 397 bp, Glycine max
tgcggattttgtctttatcagttataggatcgatgcgggcccgaaaagaggcacaatttgatcatcctactatgacgactgaaaaaactggggcaaatgaagagggtgagaaatagggagaaacccatgctgtgactgccattcctatacggccaagtttcccaccaacccaacaatgtcattactcagccaataacaaacctcctccttacccactgcccagttatccacaaaggccatccctaaatcaaccacaaagcctgtctaccggactttcaatgacgaaaaccacctttagcacaaaccaaaaaaacaccaacaaaaaggaattttgcatcaaaaagcctgtaagggtcaccccaaatttcgttgcatatgctaaacttgatcccatatc

SEQ ID NO: 179259 - DNA, 423 bp, Glycine max
ctgatgcaacatttggagaggttaatgaaacaacgagtttatgcgctccatgagagggtggaatagagatcattatgaagaagaaaggaggagaatatggaatgatggtgttcctagacaaaaccgaattgatggtattaaactcaacattcctccatttaaaggaaagaatgatccggaggcctacttggagtgggagatgaaaatagaccatgttttctcatgcaacaactatgaggaggaccagaaggtgaagcttgccgccacggagtttttcgactatgctcttgtgtggtggaacaagctacacaaggagagagcaagaaatgaagagccaatggttgatacatggaccgagatgaaaaagatcatgaggaagcggtatgtgccggctagttactcaagggacttgtaattcaagct

SEQ ID NO: 179260 - DNA, 385 bp, Glycine max
gactcagcagcaactttgaagaatgcgtaggggttttctcttgtcttttggggcctgcacacatacatgtcaattatgccaacagcttgaggacactccatatggaattgagcgcccatattcatgatcatatgaaagactaacctttgctgaaatatttatttactaacaatatgtatctctgttaacaatttgggggctgatacatgcattcatattatcccaaaccactcattgggaatcctttatgataataagccataaacatatcaataaggtatattgtcattattctttcttgcgtaaagggctattgatcagaataataaatacttatgctatccattctagagatatgtcagtcatcaccccatgattgatgcat

SEQ ID NO: 179261 - DNA, 411 bp, Glycine max
ttaatcacctgcggcatgcaagcttccatctcttccttccacctgtttccagatgtaatattgagggaggcatttgaaagatttataggtttattgcggaaaactcccactcacggtttttcagaaccaatacaactcaacatattcatagatgggttgaaaccacaatctaagcagctcttggatgcttcagctgggggtaaaatgatgcaatcctactccgcaagggcattggatataccagactccaagtatattacgccatggatccaagggaatgccctacggttcttatgagcctaagggtagatttcgggccaatgggctaagaatgagctctcttatctgtgtaaatattagaatagggttttcctcattttgggccttgaatcttggccattctagtagtat

SEQ ID NO: 179262 - DNA, 474 bp, Glycine max
actcagcttgtctcagtgttatgcgagacagagaccaacatgttttctatcatcgccaagtacgaagaagaggtaggtctagccacggcccacgagcatagaatcgcggatgagtatgctcaagtatatgcggaaaaagaggctagaggaagggtgatcgactctttacaccgagaggcaaccatgtgggtgggtcggtttgctcttaccttgaacgggagtcaagaacttccccgattgttagccaaggccaaggcgatggcagacacctactccgcccccgaagagatccatgggcttctcggctattgtcagcatatgatagacttaatggcccacataattagaaatcgttaggaaacttgtatggtctctcagaccttgactagatatgatttctttttttgaaataaaatgagttggtcccatgttcttactccacaaaaaaaacttgtgcagatcaaatcactccta

SEQ ID NO: 179263 - DNA, 439 bp, Glycine max
  unsure (1)..(439): unsure at all n locations
agcttgcctcanagagatctaggaaagacttagcgactgaaggaaccagttccgctcccgaatatgatagccatcgttttaggagcgctgagcaccggcagtgcttcgaggccatcaaaggatggtcattcctccgggagagacacgtccagctcagggacaatgagtatactgacttccaggaagagatagttcgccggcggtgggcatcgctggttacccccatggccaagttcaacccagacatagtcctcgagttttatgccaatgcttggcctacagaggagggtgtgcgagatatgcgatcttgggtgaggggtcagtggatccctttcgatgcggatgccctcaaccagttcctgggataccttttagtgctagaggagggccaggagtgcgagtatggccagaggaggaatcangctgatgggtttgatga

SEQ ID NO: 179264 - DNA, 313 bp, Glycine max
ctctaaactagtgagaaaaattgtctcctgacaaaaatccaagccgacgcacttccgtaacagctctgagaccataccctgggtgaatttcaaaaatttaaaccgttcttcgccgtctcattcggctatgcaaacttcgctgttctccggtgagtcctgaatcgaacctttcaatcattcatgcaccctagaggcctcatggttcgtgtgcgcttattacatctcatactttcctacacctttgaccgcttagcattatcaagcaatttccgccactaaaaaacgttatcccactgacatcgattgtacacct

SEQ ID NO: 179265 - DNA, 435 bp, Glycine max
  unsure (1)..(435): unsure at all n locations
agcttattacaacttcttgtatggatactctggttataatcaaatnacgggggaccccaaggatcaggagaagacgaccttcacatgaccttttggtgtctttgctttagaggtgcatgttggcaatttttgtagatatggtggagaaaagtatcgaggtattcatggatgatttctcggtatatgggccttcttttgaatcctgcttgaagaacttggagatggtgctacaaagatgcatggaaacaaacctagttctaaactgggagaaccacttcatggtttgagaaggcataatcttgggcaaaaaatttcagcccgagagattgaggtaaaccgggccaagattgatgtcatcgagaagtctccaccaccatcgaattgttaaggcattaggagcttcctaggacatgccggatttacatgagatttatc

SEQ ID NO: 179266 - DNA, 460 bp, Glycine max
  unsure (1)..(460): unsure at all n locations
agcntatcanctacttgggtactctctcttttattattcgccaaacaaagcttcctgtgggttcctcaaaagccttgaaatttcaaatcatgctctaagacaagtgaaatgaagggcctccattattcaaaagtgaaatagcctcaaaggaatcagattccaacatgaattgcttgaatcttctactccgcgcaatttcaattccaagcatgatagccttgagttctgcagttacaactaaacaatagcatacatcaataacaaaagagaagttcgctttgccattataatccttgagaactccaccaacaatggccttcttcgtgtctctattgattgaaccattaattattgagttgaactatccatttgaaggcttgctccaacttatgcttgtatgacccaaaactctaccttcattgtgggcaataaatttcatataggtcatactttctgcttt

SEQ ID NO: 179267 - DNA, 409 bp, Glycine max
  unsure (1)..(409): unsure at all n locations
tctaagtcacctgcggcatgcagcnngatctagataggactttattgctttgacataangttatcatcctatgactagcaatgattccattatgatatcttctctttctggtctattaaaagttatcctctgtcgagcatctaacccctaatataatgaaaagatgagcaatgcatgagaatttaaataataaaagacaataggatagaaaacatctgtgcattgataaatatggagtacatcatacatctcttggcttttaaggcctgctaaaccctaactaaggttttagcctctcatgaccattgatggccttgcactaaaatggaggtataagaagggatggaagaatggaatataaaaatgatgggagagagaagagaattccctaaggaaaagttcttacgct

SEQ ID NO: 179268 - DNA, 455 bp, Glycine max
  unsure (1)..(455): unsure at all n locations
tgcanatggttgcttagttcggaaaccattttattgtgttaattcccttcactattgggaggctgaaagagttgaatttcttgcaccttatgcagaatgggcttgtgggtgagattcctgccacacttgggaactgtcataaacttggtgtgcttgatctggcagataataagctctcaggtgccattccttcaacatttgggttcctccgggagttgaaacagttcatgctctacaacaattctcttcaaggtagtcttcctcaccaacttgtaaatgtagcanacatgaccagagtgaatctttcaaacaacacactgaatggtagtttggatgcattgtgtagctctaggtctttcctctcttttgatgtcacagataatagaattgatggtgaaataccttttctcctgcgggaatcaccctcccttgataggcttgagatatgtaacaac

SEQ ID NO: 179269 - DNA, 448 bp, Glycine max
  unsure (1)..(448): unsure at all n locations
ctgcaagcttgcatatcctctgataaactttttatagtaaccagggaggcctaagaaacctctcagctgcttgatattgagtggtgtaggccactctaaaactgcctgcaccttantagcatccatagcaactccttcacctgaaactatatgtcccaagtactctttctccaatacaccaaaagagcatttagaaaacttagcaaacaaaacaatttctttcaacactttcaatacagcctctagatggcataagtgttcatgccatgtanaactatataccaatatatcatcaaaaaaacactaacacatatttccttaaagcatgttggaaaatatggttcatcaaacactgaaaagaagccgaagcattggtcaaaccaaatggcattaccaaccactcataatggccatgggtgagtcgaaaggctgttttatgtctatcctc

SEQ ID NO: 179270 - DNA, 396 bp, Glycine max
  unsure (1)..(396): unsure at all n locations
taacaagactttgtgtgattggtataaagatataatctttgcagatgagaatgctttataaacattaagaaagctagcagataagcctgaaagaacctggcaaggatccgacataaacaagtcttcattttacacaaaagcacaagatgacaaaagttcaacgcacaacagcggggtcaccctaagggctgagtcttcacactttccaagtgtcaatgacgccactcccaatgtagcttccatcccttactttgtgtcattgatganatccgggagcttaattatgtgacaatacaaaatgtcgttcaaaagtaaatggttgacagcacatcggtgtcgcacccatgaataggattacgctgtagatctaaaaacttggttccacaatgacccttt

SEQ ID NO: 179271 - DNA, 434 bp, Glycine max
catgcaagcttgcagcgtacctgaaagcttgctatggtttatggttccttttccctgccttgaaaaaagaaaattcaaaataatgttagagaacattgctccctttctgggatatcatccaaaagaaattacaacatggaacatcatcgcaaacttgctcctgcaaaatcctcgtagggaagcttcaaaattttgaaacagaaatttgcatatagcaactatgacacataccattggatatttattatatagtttcaagcgatagagcaaaattagcttgagctaacattatcggttcattttaactaaatttaccaaaaacatttattttttacaaactacaataagaaagagtgggtttcacttttatctgttttattatttaggtaaagaacttggacttccagtctgccaataacatgatggaatttctt

SEQ ID NO: 179272 - DNA, 404 bp, Glycine max
agccaatccttatggcgtggccttctgatttcattccccgtgccaccctggaagatctatgccaagcccctacttttgaggggcaactcccgccttatgacgactatcccggacaagacgatggggaaggagatacccatcttggccccctgctccacctcaaagatccgtccccccatgaactacccccaccgaacatagtccgccatatcccggcctcacccacacccgtaaaaaaatctgttcccttcgcggaagataagggaaagattgacgcgcttgaagaaaggttaagagcagtcgagggccttggcaattacccattcttggatttaacggatttatgtctcgtgcccaatatcgtcattcctccctcatttaaagtaccggactttgatatgtac

SEQ ID NO: 179273 - DNA, 386 bp, Glycine max
tatgctaatctaccttgcaccccaagtgcaacacggtgttcttatttatcaaacactatcatatataggcataggcgcatccatcattctctcatcaattcatccattattagcttgcttgtttcttcaattgtttcccatttctttatcccacaattccaaggaacaaaaatgatgagagagggtcaacaacatggtatggtgagatcttattggatcctactaaatccacttaatcctagacctaataccacaatcatgaatcgggctaattccccttacacaactagaatattcgttagggtttcttctgagccaactaatcacatcttacacacaagacagtgtggcaaaccacgtatgcctggttgccacctctacctcac

SEQ ID NO: 179274 - DNA, 427 bp, Glycine max
  unsure (1)..(427): unsure at all n locations
agctttaaaatgtgaaactcaactttctttttgagaggatgttnctgcgtgtctttcaaaagcttcaggcctttntttttataaatatatcacggatgaaaaacttggccatattaagttatatatatatatataagcagcacatcttctttctgctacaggatattattttaatatataaaaatttaagcttcaggcttttctgttaattacgcttttgataccgtatacctctttaaaaaaaatataaaaaaaatactattcatctttcttctctattgaacaaaacacaatagaagtaaggcaaaagcactggaatggctctcatactaaatgtaaattgaacgggtactcatctaaacatgcaaattaatttaaatgacatattcagattaaacaacggaaactaaatattaggaccatatct

SEQ ID NO: 179275 - DNA, 309 bp, Glycine max
  unsure (1)..(309): unsure at all n locations
tgttaacatagattattgaccatatgaagtttatatttatnttctctaaccacgacattaatgagtacataaagctacttgacataagcaatctcaccaatatacatcatgagactattgcacgacaaacaaatgattttacaaagttttatgtatgctcataatgttttatggcaacatgattgtgatgctttctagtagcttattatcaacttttcatacacaagcctggtgagatatgcaaaatcaccgccctgtntcatgttgatctggagatcaccactagtctaagcactccataactgaaca

SEQ ID NO: 179276 - DNA, 418 bp, Glycine max
  unsure (1)..(418): unsure at all n locations
agctntaccaccactagagttcttgaacttaatagggggtggataaaaagcatgacccatcactttacttgaatcatttgtgagtttcagtaccccatttggctctatttctgcaaccccatcaagggtcatgttgttgcttcccagacccttgaatccaacatataagagctggtttggctgaaatgaaactgggatcagaaggaacaccaacaaaggcaggagcttgaggagcatgttgagtttggtggccatgaggcaagatatggaaaatcaaggactttgaatgattacaagggtttgaactttgagccttgacggttcaaaacattaattgctatgaacagatagaatgtgttgtgagtaaaaaggtggcaaaataataataataaaaaaggtcacactgacgctctgctca

SEQ ID NO: 179277 - DNA, 338 bp, Glycine max
tgagaaaactttcttgagaagcttctttgagaatactttcttgagaagctagagcttagcttcacacacccctcttataactaagctcaccttcttgagaagcttccttaagaagattcctaaagatgcttgagcttaactacacatacctctctaatagctaagctcaccttcttgagatgagaagctagagcttatctcccaccccctataatagcttagctcacccctatgacaaaaaacattgaaatacaaaaaaaaagtccttactaccaagactacttcaaatgccccgaaatacaagggctaaaccctatactactagaatgggccaaata

SEQ ID NO: 179278 - DNA, 313 bp, Glycine max
tactcggagaacattctcaacagacccaacttcgtatgcggcacccgacaggctatcaaaggcctatgtatatgtgacacgatacaccaatttgcgaagagttcttcagaacaaaaaggtcttatcctcttaaaaagcaaaatccggttatcctcttaccaattccttggccacaaaacctgtgattcaataacgaatcatttgagtgctcaatttgttcaatctatcctcttcaagagagagtacttcttctcttcttcttcattctgaatagggattaacagaccgagggtctcttgtgaagagatctaaa

SEQ ID NO: 179279 - DNA, 204 bp, Glycine max
tacaacagggactctaaattgaccatcatcaagctcccacatattcttgaatcactccacactaaggcatggaagctcgcactggattatcatctactacactgcttaagtgaactgaacgagcatgaacagtgatcccactgatcggcacatcacttacgagatcgtgtgactctgggcagaaagaatatgtgttgatatcat

SEQ ID NO: 179280 - DNA, 442 bp, Glycine max
tactaagctctcgaaggctagtgatctccatttctgaaatgtcttaaaccgagcaagatgtctttccttatccttcttagaaggtgccaatggatatggcacctctctcccttcagctggagttgcctcttttttcttctccctagccagctcactataggtttttctcttctcttctctctcactctcttttactttttcattgttttcattttcattccaattttcttcttctttatttatttctttctcattcacacttattggtgtctctttcctctggtcattctctacttcttcttcctcctcaaatttacacaaaggctcaactactggttcaatggctggctcaatcaccagctgttatttttcttcacctaccctcttctcatcctctttcatgcgtgccatcctaccacgggtgatgcaatcctatcctgca

SEQ ID NO: 179281 - DNA, 446 bp, Glycine max
agcttgtaaggttaaagtctcacgattgtcacttgctcatgcaacaattgttagtcgtggctatacgagacatcttgccaaacaaagtcaggttaacgataactcgcctgtgctttttcttccatgctatatgtagcaaagtcattgatccagtcatgtttgatgagttggaaaatgaggctgcaattatactatgccagttggagatgtattttccccttgctttctttgacatcatgattcacttgattgtgcatctggtgagagaaatcaaatgttgtggtcctgtttatctacggaggatgtacccggttgagcgatacatgaagatcttaaaagggtatacaaagaatctatatcattcagaagcatctattttgagaggtacattgcagaagaagccatcgaattttgttcagaatacttagagaaggctaaacctgttg

SEQ ID NO: 179282 - DNA, 444 bp, Glycine max
agcttctttgggtgattctcctccaaaccttatttggcaagggctttatcaattattcccagtttctgcctctttcttctgcacccttttcttgcaatttggttatcaaacacagttgtccttctcttgttcttttgagacctataatcactgtttactctattttctatgatagattgaagactatggagtttgagagcacaggattcagcatatttctgcaaattgattttccaaggtggtggtggtgtaggtactgaaacttgaggctttttggttccatcagtaaccatggtaaagaactaagcaaaaccaaaaaaaataaaaaaaaaatagtttacaactttgcattgtacagacacaaattatgctgtaaagcgtaaataaaacccttcgcctaattgggcgatccaatcagaataaaatttacaccaccatagtcca

SEQ ID NO: 179283 - DNA, 311 bp, Glycine max
  unsure (1)..(311): unsure at all n locations
ntacaatcagactggaaggaggcgggggaggggagtattgattatttaccatatttctngcagaacttggtgtgcaacataaattgatctgtccacacactcacatcataatggagtggtggaaaggaaacacagacacattnttttttttggtaccataaatcaaacatattaattgagtaccagaggtgccaaaagaaatgaatcacaggaatcatgccatctctactgtatatctcatcaatcgccttccatgattatctatccatcaaaaggtaccttataaaaaattgttgaagaaacttgcagat

SEQ ID NO: 179284 - DNA, 287 bp, Glycine max
aaattccaattgtgctaactattcacacggatgtccgattccggcgcataatatgtccagaggctctaaattgtacaacgaaactccttggaaatttaattgggctaacttttcacacggatggccaatataggccaatctcatattccaaaccctaaaattgaacaccggaatctcttagaaaacaaaggggataacttttacacggattcccactcaggttaaattatggcacgcccaaaaaaaacacgaaaccctcgatagtaatagtataccttcccccgagg

SEQ ID NO: 179285 - DNA, 274 bp, Glycine max
aaatttacatacatgcatactcaaagcatatttgggtacccaaaattgcacatgtgcaccacttggtatttccaatacctatacatacacaaacttcatgatgaatcttgactatctacacaataaggtgctacatttcatgctctttgtaagattttgctaactaataccgcatgcaaatacagtatattttcctttctgactaaattgattcaatacaaagttacatttttggtaagatctcttactaacatccacatattatgatattttt

SEQ ID NO: 179286 - DNA, 447 bp, Glycine max
  unsure (1)..(447): unsure at all n locations
agctngntaccgaacttaggaaagataatttcttttcttttcgcacatcggncgcgtgtatgatatccactccacaaggttggaagtaaaggaaaccttcaattctataacgcaacgtggcggaaaaaaatgggccgataacttgaatggccattattgtcaatgcggaaggtattctgcacttcactatccatgttcacacattattgcagcttgtggttacgtgagcatgaactactaccaatatatagatgttgtttacaccaatgagcacatcttaaaagcatactccgcacagaggtggcctcttgggaatgaagcggcaattcctccttctgatgaggcgtggacattaatccctgacccaacaacaatttgtgcgaaaggtcggccaaaatcaacaaggataaggaatgagatggattgggtcgaaccatttgaccaccg

SEQ ID NO: 179287 - DNA, 394 bp, Glycine max
tactaagctcaggggaaatgctagctactccgtcatagagggaggtttctttacttatgaggcttcacaacccctctattgaagcgcctaactcgggattagggcgagtacatgatgtatagagggatttgtgaaatgcacacagatctcgatcgatgattacctgagtactcatggtcgaatactactagccaacaatgagaaaagactgcacaatatatgtgaagagtaccaaaagtttggctatatatctcaccaaccagtaaaagaattacacaacatagtggcttcatcgcccttcgccacttagaaatgagacatactaggacctttccccctacaaaaagacaaagtaaagttctcctatgtgtcattgggcacttcacgaaatgga

SEQ ID NO: 179288 - DNA, 156 bp, Glycine max
ccaaaatcccgcgaaaaacaacaggcgatttaccacgcgtcccacaataaaagactgagaacaaggctccaaacagaagcaacccaaacctcccaattgcggaaaaaagacatgccaaactaaaccaaggcgaagacaacacaggaacaccaggaa

SEQ ID NO: 179289 - DNA, 454 bp, Glycine max
ttagggggagagtctcgtggttgtttctcccaatcaatcactattcaaagttggttgtctcccaatcagccaccaatctgagcaaaattacttgaggtgatcttgtatctattggctgcattgctgtcatgttggaaggttgattggttaaagcttgatcagtttttgttgttggagtagatgtgagttcattgctgccatgggtttcagtttgttcctccgcagcatctgagttagaagaagaatcttcagttctttggcattgtattttgtgcactggagttctctaccttggagttgttttgggtttaaagaatgggaattattttggagttgttttcatcctctgatgcttcagtttatatgttccaagctaggagccattaatttatatgcttcagctttacggggagcgctagaatagttgtcttattatatattgttcagcttttat

SEQ ID NO: 179290 - DNA, 437 bp, Glycine max
  unsure (1)..(437): unsure at all n locations
agcttgaaacataacatctattgtatgtatccccgctttagcaactttgttttttatcgctttctccattgcatcctaaaataaccaaaaagagaattcaccatgtaatacgtattctgaatcggtaataaagaaaatggaaaacatggacaattgaaataaaaaatagtatgcaggatcaaaccatgaaagcatacgcagaaatggacccctaaatatatattnttatcaaaaaggtttttcctattaatagttgatagttcttgcatatagcaaacccttaagaaaattaaatatatatatatatatatatatatatatatatatatataatcaaaacacccgctaacactcattcttaagacagggataactggacaagtaacccatggatgaataaacaatcccttgttgtcttcaagactaggacaacaaat

SEQ ID NO: 179291 - DNA, 448 bp, Glycine max
  unsure (1)..(448): unsure at all n locations
tggttcgaggtacttacccgttgaagatcgatgttcgttgtataacgaatgaagaacgtcgaagaacggttgaaacctttgcgagattcctcacggaaaacgttaccgaaatgtttcggaagcgcctcggcttagattttcttcacggaaacaatttttccaagcaaattcgaaagagagagaagtgcctaaggggctgggatccttttcttcttcacttcctcccctatttatagcaaaataggggaggtggttgccgcccagctcgcccaggcgagctcagctcgcccaggcgagcagggttgcttcctccagaagcaaccgccttctggaggaatcttctggagggcccaagtgggcctgggtgctatttgcacccccatttntactaagtacacccccctctgctggttttggtgattctttttcgaaagtacggaacttacaa

SEQ ID NO: 179292 - DNA, 416 bp, Glycine max
  unsure (1)..(416): unsure at all n locations
agctngagaactggttctggatcaaggtttctctcatactcaaatgcacacacttaagcatgagaaagattgcaatgataaaatacaatggtctacttgcgcatatgaatatttgtagtgctgacatgtacatatgaatatttaaaagctatttttaattggctgcggagaaaaattggtcaaattgtcctatgctatttttaatttttttttttaattcaacatactttgatatcaaagggaagctattaacttttttttgtgccctttgtttccagcaatgctcatacaccaaggaacatctcttgtcccgtttctccctcttagccttataaatcattgcatacaagtggaaggatgtctccttctccaatacccagccctcatactgcatctggccaatcttcgccactaac

SEQ ID NO: 179293 - DNA, 432 bp, Glycine max
tggattccagacataaaactcagacttgcaagctggcttttcccagaaccgtgtctgaacaactaagaaaacaaaaccccagatttgatatctagggttttgacagaagaatgcgggggaaaaggacaaatggggtgtgagagttgggagttgagaaggggaaaaagaataaaaatgagcttttgaattgaagtggggttagtgaagtagtgaaacagatgggtatagaaaggggtaaataaaaagacccttcgttgtgtaatggtgagggtggtgtattggcaagtatctgaccaacaaggcagagagattaaaaaaaaaaggaaacataacatcaaaagaagactaacagggacggcagaaatgtgggcattggagggaaagtgtggcctactaaagtactaaaacttgatgtcctttctctgactgcta

SEQ ID NO: 179294 - DNA, 377 bp, Glycine max
agcttgtatagctccccaaaatattgttatttcgtagtgactaatcgcaaataaacctgtgtgttatgggtaatgttgcctctataacatttccattagacctaatgatgaaatccgtgcactttcaagaggagacacaaagctggcgcaaatcaaacgaatggatgaaagcatgaaagaatgcatatttcacacatgccatttaggaatgcaggggtccggggaatttgtccccttctctatataccacgtctaggggtggcaaaatgccccaacctacatttttttttaagaaggcgacacggaccctccgttggtgtgttacaaaagggatcaaaacagaacccgtatgcgatacctatgcaaaacacacaatt

SEQ ID NO: 179295 - DNA, 424 bp, Glycine max
  unsure (1)..(424): unsure at all n locations
ggacctataaaactcagcttaatgatgtcgacaagaaatcacatgtgcgtcatcatctaaaatgtggaaaatgtgaatgtctgtatacatgattttgatgatgtcaaagaagaatcttacaaggctgcttcaaatgataagcattttcttcaagaataattcaagattgcttcaacaaacaaagccttgtttcaagattcactaaagaccaagtcttgccttaaaacaaagtgctttcaagacatgcaaagctctggtaatcaattaccacgaagtgtaatcgattaccagaaaacaaggttgagcaatatctgttgaaaaggatcttgatntgaatttcaacatgtaatcgattccatatatctgtattcgataccaccaacaaatttccgaaatcaaatcaaaggctgaccctcaatatact

SEQ ID NO: 179296 - DNA, 383 bp, Glycine max
acctctttatgaactgaaacggcccataaaacctcgcagccagtgtaggattgattctctctgctacaaattgctgcctatgaggccttaacttaagaaaaacccattcccctactgcaaactgaacttcccttctcttcttatctgcatcttttttcatttgttgaggtgctctcagcaaatgagccttccactgattcaaagcctcgtctctttcacacaactccatagctacaagagcaactttggtctcattactcaagaaacggatgatgtttggtggctgcctcccatagactacctcagaaggagtcttacgcatatatacatgaaaggtggaattataccagaactcagcccatggaatccagtgtgaccatgtc

SEQ ID NO: 179297 - DNA, 440 bp, Glycine max
tgtggaaggacatcaactatatcataattctatcaattcatggaagctgcgaaatggaagatgattaggttgtgatggataagttgcaatttcctctattattttaatttgaagaacaaattactttcttaacctgtttcttttttggaatttctggtgcgacaatattatgttttgtgacatcccaattttctcaggttgtgaagtttgatgtagaaattgtctatgtttgttgatatgcaatgtagtagtattattcttagtgtaatcatacatataagacatagaaccatcatcattagataatcatgtgacctatatttaagtcttgagtctaaggagtagtggtttagatacatagagcccttagtcaaattgtacgacttgcctcgtccataattttcctatgaagaacacaggtacttactacaaattatact

SEQ ID NO: 179298 - DNA, 274 bp, Glycine max
  unsure (1)..(274): unsure at all n locations
cagacagacttgcagatcaccctgttgataaaagaagacagcatacagagcccttatacaacttactatggacatggtaaaagtatataaattaaccagtgtgtaataacggcttgtgggttacgcatgataccaccgccaccacaattnctaaaaagaggggcatacttcagggatatttgggccaattgtgaaataaaacatgatttatttatcgcaatcgcaacagaaatgtgctatttcaaagcaaaaaaaaatgcttcacaaaaaatgt

SEQ ID NO: 179299 - DNA, 419 bp, Glycine max
tgacccccctctctgttagtccaatgggattaatgagtgaaatgttgaaagatcatgtaattcaatccctaactacctgataatgagtttcaattcttttgaagcgaaaatgagtttcaattcaatctctctttttcctttcttctttactcatgttggctcacttcattcaccatgtgtgtataggcatgtgcacgtgtattttttgcccttcttcaccttctttttatgttgattttcagatgggctgcagcttctaatgatatttcactaaatgcaatgattcttccagttgctttgtatttttggaaaataccacactttatggccttagcctaattgtgtcgcgatgatattgctgctggaaggtaatgtcttatatctttgtttatagcgacaaatctttgtcataccactat

SEQ ID NO: 179300 - DNA, 446 bp, Glycine max
  unsure (1)..(446): unsure at all n locations
tgggctgcagctatgatgatgataagatgatttttgtgtnttgatgataaccaagatgatgacaaaaagcccaagagaatgagttcaagattgagtcaagaacacttcaagaatcaagaattaagaataatcaagttgaagattcaaaaatcaagaaaagactcaatcaagataagtactaaaaagttttttcaaaacattgagtagcacatgaatttttcacaaaaccttttaccaaagagttttttctctctagtaatcgattaccagtttattgtaatcgattaccaatagcaaagattgttttcaaaaaacttttaactgaatttacaacgttccaattgatttcaaaatggtgtaatcgattacaatganttggtaatcgattaccaatatgtttgaacgttgaaattcaattcaatttgaagagtcacatctttccagaa

SEQ ID NO: 179301 - DNA, 413 bp, Glycine max
ttagatactaagctgttgcaatcgctaaacttgagtgatacaagcatccttttttatccttccttccaccttttcgtcatgccgacactcgagaagcccaataggtttttccttttcaatatactatgaacaaaattcagtaacttcttctgctatgtacctttcaacaataggtgcttcaagacattgtagattctttgtatacccttttaagatcttcatgtattgctcaaccgggtacatccaccgcaaataaatgggaccacaacatttgatttcccttactagatgaataattaagtgaaccatgatgtcgaaacgcgaatgaggaaaatacatctccaactgacacaatatagtggcagcctcgttttccagctcatctaacttgacagtgtcgcaacgtgcccttc

SEQ ID NO: 179302 - DNA, 449 bp, Glycine max
agcttatgcatggaaaatgtgaatatgatattgttatttccgaagaaacaccatttcctagctaaccatgcattaggtaccatgttcaattattttttaaagtgaaacgggtttatgatcccaacatggttggctcgtggtgcctaacacatgaaactaagaatgtagtgtgaagtttcacgcttccccttttttgtttttgtagaggaaaacactgggatgagcaaacatgaagacaaatggtatgcaattttgcagatcaaaaagtttgttgaacgcatatgcatgatgatgccatgactcatgccaaatgtgaggctggaatatgataacggacaaatgcaggatatgtccattatgatgttatgacgagatgcttatgcgatgcatgatatgaatgcattttacagacacgagagcccggaaaattatctcttcttacttgcgca

SEQ ID NO: 179303 - DNA, 378 bp, Glycine max
gagaaagaagttgtcttcgacccggagatgggtttgggtgcacatgaaaaagaaaggtttcggaacaaggaaatcaaagcttcaccaaggggagatggaccatttcaagtgcttgaaagaatcaatgacaatgcttacaaagttgagctgcccggtgagtataatgttagttccaccttcaatgtctctgatttatctctttttgatgcagatggagaatccgatttgaggacaaatccttctcaagagggagagaatgatgaggacatgaccaagagcaagggccaggatccacttgaatgacttggaggacctattgatgaggacatgaccaagagcaagggcaaggatccacttgaaggacttggaggacctatg

SEQ ID NO: 179304 - DNA, 417 bp, Glycine max
  unsure (1)..(417): unsure at all n locations
agcttctcctctatcctataatagggggatgtgggaataacaaaaagattcaaccctcctggtatctgaggatcacttaaaattagggagaaaaatcatttccgtgaagaaaatcaaagccgaggcgcttccgtaacacgtctgagacgtttccgtgggggatatcgtgatgatattccgccgttcttcgtcgatgttcggtcttcaactgggaagttcctgaaatcaaactttntaattcatcctatgtaccctgggtggtccccacttgtttcgcgtactttaattttcatttcatttactctccgtatcccctatggacgtgcgttagtcatttatttaagtcattgtctcgcctaatcaaaaaagaaaatgaatttccaccgatcatttgaattggacatctgtaattttatt

SEQ ID NO: 179305 - DNA, 319 bp, Glycine max
  unsure (1)..(319): unsure at all n locations
ggatccttaagcaccgcggctgcagcttgtgagaacaaactattttttagtggtntgacattgacttgtttatttgataattttgggcttattctcctttgcattttttcttgtgtccctcccaaatcgttagcaagtccatcttctggatctgaggattttggcaaacccattgtccacctggaaacctacttttcttctacggatctgacaaaatggactgatgccaaatccactcagatctggcttaagtgtcttaacagtatgttaatgtgtgtacacaatagggggaatacatggatggtgaataacattttat

SEQ ID NO: 179306 - DNA, 426 bp, Glycine max
  unsure (1)..(426): unsure at all n locations
gatccttaagcaccgcggctgcagctgaatcggcatccgtggaaggttantttctttgaattncacgagagcttccgttgttctatttcaagtgtcactatatgtgatgcgcccaaataggacatccgagttaaatgttatgaccatttgaatttctcaagagcttccgttgttcaattctgagcgtctcgttatgtgatttgtctgaatcggacattcgtgtgaaaaggtatgacgcattgtatttctcaggagcttgcgaagtttaatttctagcctctcgacatattatgcgcccgaatcggacatccgtgtgaaaagttatgaccatttgtatttctcaagagcttacgatgtgtaatctccagccgctcggcatattatgcgcccaaatcggacatccgtgtggaaaggtatgaccatttg

SEQ ID NO: 179307 - DNA, 314 bp, Glycine max
  unsure (1)..(314): unsure at all n locations
tataatatattgatacgctcganattaaacgtcggattctctttaaaattcaaatgggcatgacttttcacacggatgtccgattcgggcgcataatatgtcgagaggctcgaaattgaacaacggaagctcttgagaaattcaaatggtcataacttttcacacggatgtccgattcaggagcatcacatatagagacgcacgaaattcaaatggtcataacttctcacactgaagttcgacataagcttataatatattgatccgctcgaaccaaacattgtaaactctctaaaattgaaagggcaaacttt

SEQ ID NO: 179308 - DNA, 257 bp, Glycine max
acatcctgaatgtacaaccttaagattggtgctcgcccccctctttcgtttctgcggcaaagaaacataaatgctctcacaacatggatgctgtcctaggatactcaatctctaggaaaccacggatgaaatcagaaatactagcccaacgacctatctttctgagtccatcgagtaacaggtctgggctacttatgtgctggggcatagttgataatcataaacttttgccttccaaaaaaaacttaccactaatc

SEQ ID NO: 179309 - DNA, 220 bp, Glycine max
acaacaattatactatcgaacattttttttggtacgactaaggcaggtaatagagttaggtaaagatgtacctattcagcgacttaatcctagtgcatggctgctgcttcctgcttgccatatcactcaaattgttatagtcgttgtaactattgtgcaagcctagaaggagatgtggatacttctgcaagaaactcctccaaatagttttcccgcatat

SEQ ID NO: 179310 - DNA, 446 bp, Glycine max
agcttgagatgaggaagtgttgaagggtttatacttcctgcttttattgttgaccacagagtggtacctggagatatgtcgcgggggtcaagagaccttggggacgtcaggtggggtgctattgcccaaaaccaagcttgaccaatcccgacccaacccgggcatagtcggtcagtgagaacctgtgatgtacctaagcaggcgagctcctggcagtcaacagataaaaggaacaaagaccacaaagcaaggaggcttgtggtggctggccagctgtgaaacttgattgatatgtgagatatggtctctggtaatcgattaccaagggtgggtaatcgattacaaggcttaaaaatgaagacagggggctaagatggtctttggtaatcgattaccaggcttgaaaacgaagtcaggaagctaagggagcctctggtaatcgatta

SEQ ID NO: 179311 - DNA, 405 bp, Glycine max
tcaagagatcatcccctcgacaacattattggtgttatcttaatatgggtaacaactagacattctcttaaagatgtatgcaataatatggcttttgtatccatgattgaacctaaaaatataaaagaagccataatagatgataattggatcattgccatgcaagaagaactaaaccaatttgaaagaaacaatgtgtggaaattagtagaaaaacctgaaaattatcctgtcataggaacaaaatgggtttttagaaataaattagatgaacatggtataattattagaaataaagcaaggttagtagcaaaagggtgtaatcaagaagagggaattgactatgaagaaacatatgctcctgttgcaagattagaagccattataatgcttttggcatatgca

SEQ ID NO: 179312 - DNA, 453 bp, Glycine max
ttaaatcgactgcagcatgcaacttctacccattttatttttttggggagaaggaagtaaaacaggctcaccccttatgcacttctctctctttcgaatctgcttaagaaaattgtgtccgtgaagaataaccaagccgaggcgcttccgtaacgtttccgtgagtgatttcgcaaaggttttccaccggtcttcgacgttcttcattcaatcttcatcgttcttcaggcttcaacggggaatttcctcaaaccaagcttttcaattcattctatgtacccgtggtggtccacatttggtttcatgtatttttattctcgctacattcaccttttatacccactttggacgtgcttaagcccatttatttaagtcatttcttgcttaacctaacaatgaaataaatttccaccgaatcgttgaataggattatacgctaactttggtcgaatg

SEQ ID NO: 179313 - DNA, 356 bp, Glycine max
tgagatgaggaagcgttgaacggtgaaacttcctgcttttattgttgaccacagagtggtacctggagatatgtcgcgggggtcaagagaccttggggacgtcaggtggggtgctattgtccaaaaccaagcttgaccaatcccgacccaacccgggcatagtcggtcagtgagaacctgtgatgtacctaagcaggcgagctccttgcagtcaaccgataaaaggaaaacaaagaccacaaagcacggaggcttgtggtggctgaccagctgtgaatttgtgtgatatgtggagtatagtctctggtaatcgattaccaagggtgggtaattgattacaacgcttaaaaatgaag

SEQ ID NO: 179314 - DNA, 196 bp, Glycine max
agctttaattcactgcttcaagtattgttctatattcttctagaggaaaacacgttacctaaaagttactatcaggcgaagaagatattgtgtccgatgggtatggagtatcagaagattcatgcttggccaaatgattgcatattgtatagacatgaatttgaagaaatgtccaaattccctaggtgtggggttt

SEQ ID NO: 179315 - DNA, 281 bp, Glycine max
  unsure (1)..(281): unsure at all n locations
aacaacacaccccccagaagcacttatcttgaactgggacnaaaaaaaccgggcaaagagaaaaaccggtttgattggcgcacacaccagaactgggtatagcccgcggattaaaaaccacaggtgggggaaaaatcttcaaaggagcgcccggaaggaaaaccggaaaaacaaaaatcgggcgaaaagggtcctgggaaaaccaattaaaggccaaggaaaaccgaaccccaaaccgggggagaggattctaacccagggggaacggggccaaaaaaaaa

SEQ ID NO: 179316 - DNA, 384 bp, Glycine max
  unsure (1)..(384): unsure at all n locations
agcttgtcgtgccatcgncatttctactctttacccattctgggctcatacctatcccttaacatgactcgggccaccatcaaggaggcaccaaataaatgtggtttcaccggaggagcctccacataagcatttttcacaatttctagtgcttgaaaagatgtttccaatgactcttccgcagcttccacatagggtgtagaggatggacaactcactagtatatcttcttcactcgacactataactagttgtccttccaccacaaacttcaatttctggtgcaatgttgacgggaccaccccaatagaatggatccaaggctgacctagtaggcaattgtagacggggtttatgtccattacttggaaagttatctggaaa

SEQ ID NO: 179317 - DNA, 459 bp, Glycine max
  unsure (1)..(459): unsure at all n locations
tgacctattaatctcagcttcaattgttgggcagagacatataaatgtatgcttctttctaaagcacaagcatttttggaaagaaaggagagaatcaacaaaacttactcttgagatactttgttgcatttggaaatgttttgaataactgaaaagtttctaaacaaatatttgggtgagactgactgtttacaaaagattgtacacaactctcaaatccttcctaacaattaaactgctataaaacatagggtttagataggagaacctcaggtatcttcttctcttctgcaaatgcaattgagacctctgaatggcatataataaacactatagccccagcacctgtgtcatatgaatgagagtgtcaaagcaactaagaaatatanagttaatttgaaanatgaatatttgtacaatgagatattctccctgtaccatgcaccattttgaattact

SEQ ID NO: 179318 - DNA, 384 bp, Glycine max
tcatcaattacaacttgctcttgttgcttctgctcaagtagttgatgtacattttttttttcaaaacttgaatatgattgtaaatgttatgtgttcttgtaaacgcaatgatgagttacaagtttcttatgtaactaaaattgctcatttggttgcaaatgtggatattgagactagaaggagagctaatcaaattggcacactatagagacctagagatagtagatgaagttcttatttctattcaatttgtagtcttttacgcatgtataactatttcagttcttgaagatttagctgttaaaggatctacttttgctcaataaggtgatgctactatgcctcgaaagaattgattcatttgatttgttttactctacatgc

SEQ ID NO: 179319 - DNA, 417 bp, Glycine max
cgagcgtctcgatatattatgcgccgaatcggcattctgtgaaaagttatgaccatttcaatttctcgagagcttctgttgttgaatttcaagcggctcgatatgtgatgtgcctgaatcggacctccgtgtgaaaaggtatgaccatttgaatttctcgagagctttcgctgttcaatttcgagcgtctcgagatgtgatgtgcctgaatacgacccccgttgtgtatgttatgaccatttgaatttctcgagagctttcgttgttcaatttcgagggtcttgatatttgatgcgcctgaatctgacatccgcgtgaaaagttatgacacattatgtttctcgagagcgtccagcgttcaatttcgagcgggtcgatatattatgcgcctgaatcggccttcgcgtgaaaagtatg

SEQ ID NO: 179320 - DNA, 337 bp, Glycine max
  unsure (1)..(337): unsure at all n locations
ttcccacaactctcataaatgggagagaaatgttcatctaaagcatacaagtccctaatattatcaaatcctaaaatttgagctcctagggagcaaaacaatgtgtgtctcctaaagagggcatcagctaccacatttgtttttccctttttgtatttgataacatatggaaattgctctaggtactctacccattttgcatgcctcttgtttaacttgctttgccctctaatgtacttaagtgattgatgatcactatgaatgacaaattccttggaaacaacgtaatgttcccaagtttggagggctcttattaatgcataaagctctntatcat

SEQ ID NO: 179321 - DNA, 305 bp, Glycine max
aatgttactgatgttcctgactgatatactttaccatgccattatattctacacgttaatatgagcattgcaatacttccaatgtcacaagaactcaactggaacagcgcatcagttggtctaatagaatcatctctattctggggatatctacttacttcggcgcttttgatatatacgaaaaatgtgttcttaaccagaaattggtatcataattagtcttcaagtgagcattaaagatccactagctgttgaacatgccataacatatagtgctcttaaacactatatgcttactatctcac

SEQ ID NO: 179322 - DNA, 345 bp, Glycine max
ctaattccttgatgctcgggggatctaagcttttaaccttgacttggtaaaacctcttgccgggttgatttgtccctatgcttactaaagagagacaaaaagctggtgccaattaaaggaatggatgaatgcgtgaaggaatgctttttacacagatgcaatcttggaatgcaggggtccggggaatttgtcccctttctagatacgacgtctatgggtagcaaaatgccccaacgttcattttttttttataaggcgacacggaccctccgttggtttgttttcagaagggatcaagacaaaacccatatgcgatgcctatgccaaagacacaatgcgggaatg

SEQ ID NO: 179323 - DNA, 165 bp, Glycine max
tcccgccatctaactccctttagcccccaccaaactagtgtttcactttcattaagggtgtctaggtggaaggaaatcaaagagggaattgtagcaactctacctccaccatccataacataatataaattgtcaaacgggttcgcttaaaacccccccattaaa

SEQ ID NO: 179324 - DNA, 453 bp, Glycine max
  unsure (1)..(453): unsure at all n locations
agcttccttaagaagattcctaaagaagctagagcttatctacacaccccctataatagctaagctcacccccatgacaaaatatatgaaaatacaaaaaaaatctctactacaaagactactcaaaatgcctcgaaatacaaggctaaaaccctatactactagaatggccaaaatacaaggcccaaatgaaggaaaaacctattctaatatttacaaagataagcgggctcatacttagcccatgggctcaaaatctaccctaaggctcatgagaaccctagggccttcccttggatctctagcctaatctacttggagtcttctacccaatgcccttgcggggtaggattgcatcaagccacaactcagcaccacaactcaacttcatcataggcatcatgtaggaaacttagaaaacaaaaaaagttcaagaacanaactatgtggcgt

SEQ ID NO: 179325 - DNA, 454 bp, Glycine max
  unsure (1)..(454): unsure at all n locations
ctggctaactntataggagacatcctaaaggggctatttaatggttccagcaccgagtaccaagtctatggaaatcactatctctctctcaggtgataaaccagatatatcctccaggaacacttcaggaaactctctaacaataaagaggtcacccatggaaaccattgtctctacttctaggttagatgagatcatgtacacttgagaatcttcttttaaagatgtcataactaggttggcagagataaacatcctatccttactcactctagaatcatcaaacacaagagttntatcaaaacagtttaacaagacatggttggaagataacgagtccatacctagaattacatcaatttatctcanaggcaaacaagtcagatcaatcaataatgttctaccaggaatttccacaggacaattcatacacacattagaagttaacacataa

SEQ ID NO: 179326 - DNA, 448 bp, Glycine max
agcttaaaattgaataaattttcttttctgctggtaatcgattaccatatatgtgtaatcgattacatagtgcaaattttgaattcagattttaatagctgttattaatcagttttggccactggtaatcgattacatcctctggtaatcgattaccagagagtaaatttcttgaaaaagactttttaacttaaatttcttggccaaaccttttgctacttcaattggaattcccttcctattaaatataccctttctaagactctagagactatcctgatcatccatcttgaatatctttaattcctttgtcttgaataaagctttgagacgcatgtgaacctttggcatcatcaaaacattcagcttgatcctttgtctacatattggttagccatgaatctctaaccttgcttccctagcatggataaattaaatgcatgcaaat

SEQ ID NO: 179327 - DNA, 91 bp, Glycine max
agcttcttgcgcacttctccttgtacaatttatttgaagaaggatcattagggtttgataaacaaataggaaagtcaaaagggtttgctct

SEQ ID NO: 179328 - DNA, 397 bp, Glycine max
  unsure (1)..(397): unsure at all n locations
agctnttaatgggctttcttttaaagactacaatncatgccgggcaaagnacgattattgaatcgtaaatttaaacttaattataatcaacatatagaatttaagttaaatccaattatatatatatatatatatatgttgcataagcaaatatttgtaaagacaaatattacaagaaaagaaattaaattttaattttttactaaatttaaaacctttttcgagtacaacaacaattatcctttgataaagtaaaacttaagaaaataaatataagatgtttgcaagactaataagacgattatttcaaatctttatatagcatataaaagattctaaaagtaaagaccaaattcaaatcctagggtcaggtcaataacagaagatataataaagg

SEQ ID NO: 179329 - DNA, 265 bp, Glycine max
taatttccaccatgttcatgttgtcattctgtccaaatttcttgtttgcatatattctcattttacttaaccttttcagggttttttttgcctcaattgcatttcaaaatgacctctttcaccccatgttggaaacgctccaactcgacttctgttggctgtaaaatgaataaaagtttaaatacgttttttactccactgatatgtgaatttcatcctagaattaatcccaattgtagcaacgtgagggggagtcacatcatgt

SEQ ID NO: 179330 - DNA, 435 bp, Glycine max
agcttacagttcagagaaatgttcaaagttcttatagccaccaagagacagactcacagctcaccctgtttctaagtgaagacagcatacagatactttatacaacatactatgaacatgtaaaaagtatataaataatccattgttaaataacgtctaatgggttacgcatgataccaccaccaccacaatttctaaaaagaggggcatacttctgggatatttgggccacttttaaaataaaactgatttattcatcagaaaccaaaaagaaatgtactattttaaagcaaaaaaaaatgcttcaacaaaaaatgtttctctggcgactatagaaatattaattcagataagaaaaaaatcaaaagaaaagtataatagaaaagttcataatttggcagtctacctgttatctaaaatacgcttttcagcttt

SEQ ID NO: 179331 - DNA, 422 bp, Glycine max
  unsure (1)..(422): unsure at all n locations
taacccccctctttgttagtccaatgggatttatgagtgttttgttgaaagatcatgtaattcaatccctaactacctgaaaatgagtttcaattcttttgaagtgaaaatgagtttcaattcaatctctctttttcctttcttctttactcatgttgtctcacttcattcaccatgtgtgtataagcatgtgcacgtgtattttttgcccttcttcaccttctttttatgttgattttcagatgggctgcagcttctaatgatatttcactaaatgcaatgattcttccagttgctttgtatntttggaaaataccacactttatggccttagcctatttgtgtcgtgatgattttgctgctggagggtatgntcttatatctnttgttatagtgacaacttttntcatacaactattttg

SEQ ID NO: 179332 - DNA, 414 bp, Glycine max
agctcgcactataaataatattttttatttaaatccatcaatatagttatccaggctaggctacaaattcccgttgacttagcattcactttcaaactcgaggcatactattgaacgaggtaaaaaggtgtcctttttttatggtaaaaaaacgcgtcctttgaatcttgatgtgttaataattttacaatagaattactaccctcactttttttacgtttaactagggagtagatcttctcatcactcttctctttgagtcttggacacgcgcaccaaaagaataggaaaggagcagtaacatgctatctgacattgcaagaggagaataaatatgagttacacattttttacggttaccatataaattaaatttggcgaaattgtgattcattccaacacatcacattatat

SEQ ID NO: 179333 - DNA, 299 bp, Glycine max
cttagaaactaagctctggatcagcgatccgtaagccactgttaagttatctcccacgagccataaggcataaaaattaactcgcggatcaactcgatccgtaggtcctaaaaatcaacttgtggatcaagctgaaccattagtcttaaaaatctactcgtgaatcaacttggtccataagaagctcactaatcaagatgattcataaaagactttagaatcagcttgatctgaaagcttcaaagacaacttgcagatcaacttgatccgtgacggatcacgttgacccataaaagact

SEQ ID NO: 179334 - DNA, 392 bp, Glycine max
aagcattctagtggacatcagaggcagagacaacatttgttcaattgcagaaagtcatgacttcagccccagtgttagctcttcctaatttcgagctgcccttcattctggaaactgatgcttccgacactggtattggagcagtattacctcaaaatggccacccaatagcatttttctccaagaaacttgcacctagagtgcaaaagaaatctgcctactttagagagatgttagcaattgctgaagctatagctaagtttagacactacttgctgggacacaaatttattatcagaactgatcaaaaaagcttgagatcattgatggaacaacccctacagacacctgaacaacaagagtggttacacacgtttttgggatatgaattt

SEQ ID NO: 179335 - DNA, 418 bp, Glycine max
  unsure (1)..(418): unsure at all n locations
gattattagccaattcattgcaggaaactttcaaagaaaaacgtccgattgatatttttgattattttattattttttttttgaagattattttgattattttattattattttgctttttttattcaaccgaagttacaacgtgaacgattggttggattntatttaaatagtgattaaacgagattacaacacacatgatcggttgaaattcattttattaattattaatcaagataacggcttaaataaacggtaaaaagctcgttaaaagcgggacaaaagaaaatcgaaagtgaacgatatgaagatgaaagccaacaaaacaagaaatgaattgaaagtctcggattcgaacactcaccgtgtgaagaccgaagaacaagcaaagaacaattgaagaacggtgaagaatgac

SEQ ID NO: 179336 - DNA, 429 bp, Glycine max
  unsure (1)..(429): unsure at all n locations
tctcaagcaagcttccatcaagtggtatcagagcaaaagagcttcatgtatgtgctccttaaacctccattaagtttcagctttaccttctcctccattgttgcttcttcatttttctctatgtatctcctcacatgtcttgtgctgaatgttgttaagattaatttttagaaattccaccgattaaacttgctatagaagctagatttgattttctatggttcaaatttcttgtttttgttcttgaaccatgaattgtgttgagtttaggttcctttaagttttgtcttactatttttgtggctgaaacctaaaccacaaaattcatacaaaaacattaaagtagaagaaaaccttcaaaatctagagtgacttgttcacctattgtaattttgntatagaagtcatgtctaatcatgaaaatagtca

SEQ ID NO: 179337 - DNA, 401 bp, Glycine max
gttccaaagagttctgagagattttgctatgtgaagatctgcacacaccatagctcaaagcgagagccgttctgaaagcttgagatgagtttttgagtgattgtgagatcctagaggtgaagtatacatcctcaccacttgtatttttgcaatctttcatcttgttcttctctgtgtattaaaagaggtttttggactatggaaagctaaatcctctgttggatcttccctgtaggtaccagatgtaaatatatttctatttatgtaatgatgttttgtgtgttctctatgctatctgcttttcattccagtatgcctttaccttgatcacgtagatgcatgctctgttaagggcattcaataatggaaactggtctgattctaaagtccttgatagtatg

SEQ ID NO: 179338 - DNA, 321 bp, Glycine max
acaaaatctaagtgtgcaaaaccactaagttcaatggcttttctaagcttgagaggaggaatgtacaatgaggttaattcggagcaaactctaacctcacacaagtctataacatgaatctaaacgtgctcaaactggatttacacctaaatttccaccgaatcataatttgactcctcaacacccaattgtgccctacaaatggctcttggttcactgtggtcattcgattttctctttagactcagctaaccttttgacatggcctcaaggacatttaaagctatgattaactcactttaacctccaatgaccacagaa

SEQ ID NO: 179339 - DNA, 376 bp, Glycine max
  unsure (1)..(376): unsure at all n locations
gggacaggggaaccattagcctangcgacatctggtaaataactacattgaaatacttcggcgtggccatgactatacttctaatagcacccatgatattaaaagtccctgtttgtcaacctaaattcagtgtagttaaaaaaaattcaggtcccttcctcctaatttttatctcatgtttcccacttttttctccaatctctcttcattatctgattatatttcaatgattcaactctctccataacctgtcctgacatgttggaattttctttaacctacttagatcgaagacgaggaatatcaataatgaggcataatatttctcctacatatagtccattctatacttcaaattaaaatctgaaaacctttg

SEQ ID NO: 179340 - DNA, 281 bp, Glycine max
  unsure (1)..(281): unsure at all n locations
tttaaacagcaaaagggggggtgggagaaaaacanacacacgagagagaagaagaaggggaaaagagaggaaggaagaaggagagagagaaagagaaaaggagagagggagaagagaaaagggaaagagaggaaaggagaaaaggaggggggggggaggagaaagaataaaaaaaaaaaaaagaaaaaagaaaggagaggagaggagaggaaggagaaagaaaaagaaaaaggagagagggggaaaggagagaaagagaagagggagaaaggagagaagga

SEQ ID NO: 179341 - DNA, 410 bp, Glycine max
  unsure (1)..(410): unsure at all n locations
accactagcataccgcaaccacaaggaaagagggcggagtttcccttccgtggatgnagcctctctcaaggtgaaccacgtaatcatgtgtgtgccctccctcatactactctctttcacctttgctgcacaattcggtgtgcatgacatttctggtctgctgcatattctgctgttgttcttgcttgatcttcatcacttacataacagactatatacaccttctttgctacatgggctactggcaatgaaaagagtatctaagcaatcttaacgaaagaattcatggacatttccctcggtatctgcatcaagaaagagaggagagataagtgattggtatgattggtgatcgaatatatataattggcgatgaatatggtatacacaaaagataaagagaaattgag

SEQ ID NO: 179342 - DNA, 271 bp, Glycine max
agcaaggaggacatgacatctaggaagacatgtggggggcgtgtgatacaaccaacaaaattgccgcatagagtaagaacctcgctgtggactctattttaacaatatgggttaaaatctaaaacgttccgaccaggtggatggccacgtattccatatattgcagagttggaaacgatacggcgaatagatcgcatgacgttcgttcggttaaatggcaagcataccaatttcgataagtacaaactaaaatggtaagttcgaggatcgc

SEQ ID NO: 179343 - DNA, 84 bp, Glycine max
acctccattaaggttcagctttaccttctcatccagttgccgcttcttgatacttctcaatggatcacgtcacatggcttgagc

SEQ ID NO: 179344 - DNA, 371 bp, Glycine max
gcatccatgtttggaaaacaaatgtatgtatgtatgattactaataaattaaaactcctctgtgcaccctctttagacttgttagtttacttacccttaaggcaatctacacaagtttcaaaatcatcgaaatccaaaatactaagtactgcttgatttactaatcgcttgattctttcaatagagatatgtcctaatctctggtgccacaacatataggatgtttcattcacaatacattgttttaacccaacagagacatgcatagaagtagcgtcattcttcaattcaatcgaataaagaccatcaaccaattgaccacaaccaataatttcaatattatttagtgaaataaaaccaaagtctgtaaa

SEQ ID NO: 179345 - DNA, 403 bp, Glycine max
  unsure (1)..(403): unsure at all n locations
tcnttaannactctggggcatgcatattcatgtttttattacttattngattnctttattatataaaatttaagaattaatattcatgattttaggaactaataaataaataaggattaaattatgattgagttaaattagagtaatttttacagataacttctattggatgaaaatagtgattatcaagagattaatatccattcactaaattcatactaaaaaaattgttctctttaaaaaaaaaatgcaccaaagacttaataaaaatcttactataacaaagatatattttactctctaataattatgtggtatggactaattaataaataattattaaaaactaaattatgatttgagtaaacctggtatagcttttataaattattattatttgatg

SEQ ID NO: 179346 - DNA, 358 bp, Glycine max
  unsure (1)..(358): unsure at all n locations
gggtcctaagaaatttgggcttaataaatatgtccaaaaacttgccaaacaatctacatgtgcctatgtggttcctgatgaggtgagttgaatttctgaaaaactcaagtgttcttctggcttgtatatattttgtttttgtttttttgataagcaaatgttttatagtttgatggatgttctggtgtgtaggatatataggaattcattttacttttgaaagtgcttcaaactacaaaaggtttgaataattgatattgattgcataaagtttatttaatttcatattgtaatgtgtgtttattccttgaattattgacgnttcaagtttgtgatgatgaataccaaaaaaaattta

SEQ ID NO: 179347 - DNA, 444 bp, Glycine max
  unsure (1)..(444): unsure at all n locations
agcttgtaatggtgagagaagtttacactttcagtcatctaataagtagcaagtatttaaaaaaaaaactgtaagtataaaatagaagtgtgtgtgctgctatttaagaaaaagaaaagctaagtgcggaaaggcaagtaatagagttggaataaaaataaaaaggttgatctatgtatgaatgctctcttaaaacctaagcttttgcatcctataaaaaccatgaattgattgcagcccagcctcgttacaagcctagtaaagtccttcagattcaatttgtgtgttcttgactatatggcatgagatgaattgcaaagattaagacttgtgttagttgttgattgttgaataagcctaaacacttgtgtntgagtgaaacagtagctgtgtgaccttggataatgatccttccttgatatctcttgctcttactagcttatt

SEQ ID NO: 179348 - DNA, 257 bp, Glycine max
ctcatatgacatcatttatcaatggaggtcgatcggaatgtatccttcgtaaatgtactgtatctgattgctaatgtatacctaccggatgtataacatactgcccattatttactctaaccggagcggaatttcatgagtcactacgagaaacaccatatgcctatagagcatgaactcacgttctgtatctgaatattcacatctgcgcgatgagtactctcaataactctagatgaccattagtggttgcttat

SEQ ID NO: 179349 - DNA, 454 bp, Glycine max
  unsure (1)..(454): unsure at all n locations
agagacgacccgcggcatgcaagcttcttcatcatgaaggaaagggatgctgtttttcttgcttcanacaaacaacaagggagattttgtagtatgggtatacttttacttaacaaacaatgtaactatgtatgcggccaatatcaaggcttttgctgtgaaaatccaacgcagcttatagacatcaatgctgaacatgacgcctacatgccgagacttagttccatctattgaatgttccaagtagctctaactatcgagataatacatgcggtgtcccccatgggcatatgtcaggaaactagaaaagctattcctgttccctaaagatggccatgcactatgtacttactgacataaaaccactttctcacttccagttaaaaatgattcataacctttagatcagactactccagaggctagcgaatatgactttgactgacgaacactt

SEQ ID NO: 179350 - DNA, 385 bp, Glycine max
tactaagcttgctttcggcggacccgttcggtctgaaccaagtgaattttcttcccttccatggtgcatcctctacctccaagtcatcaatccaatcgttaaactccttaatgctactatctccgtcccctctgtggcagttccccgtcctctctgctggatgtcttacattgttgaagtcacccaagatactccatagtcccccattgtgtggatttctcagctgcttgatagtttcccatagtagtcttttattctgaatatcacatggtgaataaatgcagacaatgtgaacttgctggtcctccttaaaacctctcagatagataaaacctcctccaatgactttgtcttgtagtttgaaagtttctttgctccacataca

SEQ ID NO: 179351 - DNA, 455 bp, Glycine max
cttaaacaactagtttaatcaattatgttattgttgtaatcgattaaaacagagtttttccttttgaagaaacttttctaacttagaaatttttcttctcacttactcatgatgatgcatgatgcacaaaagatatgatatggactaagttgcaacattcaatataacaaccaatacaaatgccactcaagggagttgggcatgtaaaagacaaagcatcttcaagcttttctccaagcttcaagctttagtctacatgttgttcatgttgccccctatctctaacaaggcaaagttgttttggtgggtggttttgatggctgcggtatgggctttatggaactacaagaaaaatgttggttttcgatggccaaaatccgtcaataaggttgacaatctatcaataaataggttactgtgttttctgacggattatttgttggtaatggaactac

SEQ ID NO: 179352 - DNA, 418 bp, Glycine max
  unsure (1)..(418): unsure at all n locations
gcagggccacttcgctgcnctgccctcaccttgaatggctatattattgtgaactcgtcancattttccttgatcaagtataaccacatcattctgttgtgctcatctacaaatgatgtgaagtacttgttcccacctagagatggtacctcaaaaggaccacacacatctgaatgcacaacaccaagtacactagaagctctcattggcaaatgggaattaaaggaatttcttggttgcttgccaatgagacacacatcacacaccttctttgctacatttaattttggcagacctataaccatattattaattactaacatattcaaacttttgatattttagtgaccaaacctgagatgccaaagccagctcaattggtttatctctatagtcattaaacattgtacttttgatg

SEQ ID NO: 179353 - DNA, 432 bp, Glycine max
  unsure (1)..(432): unsure at all n locations
cgtgcagagctttattattgttcagccaagagatatatttttttttttagagccttgactnacagagaacatcgtcaatatcatcatggtcttggtaaaaaacaaaatgttgtcctgtaaggtggaaatgtactctttcaaaagcaggcttcctgccatgaattggaaaaccaaagatcctccaagtagcttcactgggagaaatgtatctgttattaagacaaccatcaattaaaaatgatatagctgatataaattatatcttacaaattacgagatattctttgatctcatcatgatggcttgcaacatgcaaggttgcatcattttcatcatgaactataacagcagcaactctatcatatcccttgtttacatacttgaacaaatatttgatagaagcgttctggttacaccattcaatattgatat

SEQ ID NO: 179354 - DNA, 431 bp, Glycine max
  unsure (1)..(431): unsure at all n locations
agagatgatccatgggattaaggagtggacggagctttttcactttattttgactcangaatgacccttgctcaactatggaaaccgcgtacatcaactaccaaatgtggtgtgcttcacttttgaaatatttacttaaaaaggctaaagtagagttttgctaaaaatgagtattctcgctttataccaaaactagtaaattatatcttaaatgccttgattactatgctaatcttcttaagattacgtgtaactagaatgaacctcacacatagatcattctcacacagagttaaattacactatcacttactgtacaacacaactttgttacaaatggaattttcatttaggcagtttccatatcattgtcaagttagactaaacaaattatctacactaaatatatatatatatatatatatatatat

SEQ ID NO: 179355 - DNA, 460 bp, Glycine max
  unsure (1)..(460): unsure at all n locations
gctggttaaagcggaagagaagagaactgtattttttttattttaaagtgaaagtacacaaaacaagtagggaccactaagggtgcatacaatgaattgaaagattcgatttctggaacttaccggttgaagactaaagaatcacgaagaacgaacgaagaacggtgaagaacgatgaagaattttcacagaatcgcttaccgaagcgttacggaagcacttcgactcgatttttcttcatgaaaatgtgttttttgcccaaaatagccgaaatgcatagccaaggggtctggaatatttttgaaacagccccctcccctatttatagggaaaaagagaggtgcttgccgcccacaggcttcttgaggaagatttctaagcgcaccctaattactaagttcacccacttttttgtactctacggaaaagttacggaagtgtntctgatttgattttcatc

SEQ ID NO: 179356 - DNA, 360 bp, Glycine max
gaagaacgtcgaagaacgggtgaaatctgtgcgaaatacctcacagagaacgtataccgaaacctctctgaagcgcctcggcttacattttcttcacagaaacaatttttccaagcaaattctaaagagagagaagtgcctaaggggctgaaccccttccttcttgccttcctcccctatttatagcaaaatacgggaagtggttggcgcccagctcgcccatgcgagcagggttgcttccttcagaagcaacccgcttctggaggaatattcccgacggcccaaatgggtctgggtgctatttggcaccccatttttactaacaacacccccctctgctggttttgtggatcttttttc

SEQ ID NO: 179357 - DNA, 431 bp, Glycine max
  unsure (1)..(431): unsure at all n locations
tatanaatactcaaccttaattggcgcatagnctgagtatcttgattttttccctctttttcttaaagnaactgaggccatttttccaacatcctattcttgataactcacttctctctaagagacagacttttcggaatgataaaatgaggtcatatgaacgtcttgaaaacacagtcaatcaaatgctttttttttattttttttattttgaaacttatttgttttgaactttacacgttgttttacggcacccccaccaacgtgcaagacgagtaatttctgattgaacggtcttggaagtcaacactcagaagcgcatgtcgctcgagcaaacagaccaatggcttgcactcacattccaggggaagcaaagatgtaattatgaggggatgagagagacaaggatgtccaatttatccattttattt

SEQ ID NO: 179358 - DNA, 368 bp, Glycine max
  unsure (1)..(368): unsure at all n locations
aaccacgcncaaactcaagccggagacagtccacacttaagctcggctttacccacgcttaagccttaaaaccaagaacccatttccccttgcaagccatctcgcttgagcacgaactactccttgctaaagcaccacaacattatagagcttcaaaaagtgagttttccactaccaatggctttcaatcaacccaaagctaatcctaatcatattaaacatttccacaacattaaacacccaaaatgaaaacaatttacaagttagaaaaaccttagcatgaaatctaaaggaaaaggacctaaagtgttgatttatggagagctaaatttctatgctcctacaacacatttaatagaggatactcc

SEQ ID NO: 179359 - DNA, 279 bp, Glycine max
acaaacccccatcatattccaaaaccctaccccgaaatttagagagaaagagcccccaaccggattttcaagcccactcgagcccgccttacgactcgaaagctctctttcacgattggagcaaagagtaccaaagtgggcttgtggggttcatggggagggagaaagaaaaaagctggtgaaagagggagcgctaaaatttggggctgaggagaagagaaactttggcttaataaagttccttttttatatttataagcttgccatgtcctattgatg

SEQ ID NO: 179360 - DNA, 459 bp, Glycine max
  unsure (1)..(459): unsure at all n locations
agctntattcaagacaaagcaattatttatattaagatggatgatcaagacagtctatagagtcttagaaagggtatattaaataggaagtgaattccaattgaagtagcaaaaggtttggccatgaaaattaagttaaaaagtattttacaagaaatttactctctggtaatcaattaccagaggatgtaatcgattaccagtggccaaaactaatttacaacagctattaaaatttgaattcaaaatttgcccagtgtaatcgattacacatatatggtaatcgattaccagcagtttctaaacgttttaattcaaattttaaagcttgtaatcgattacacatatactgtaatcgattaccagtgtagattttcagaaaatattctcaacagtcacatctttttatgtggttcttgaatggctatcaaaggcctatatatatgtgacttgagacac

SEQ ID NO: 179361 - DNA, 457 bp, Glycine max
  unsure (1)..(457): unsure at all n locations
agcttatgattntcaatgatgatcaatgtattgtttgtataaaggatttcaaaatttcaagctttgttgcctatagtgctctcactcaactagaacaagattggtctataccaaacaagtcattttgatgtatgatattttgaattcacttaaaaatttaattcctctctcaaaactccccatccaaattcactattgtgctactttggatactctgtgtagtgtcttaaaaaattagggaaaatagtatccttgtgccaggaaaatggccaagtattggtggggtacctgtattcacatgattcacctggatatgtatcttgggtgaatcttttaattttgtttatgctcttaaagtattttattgaccaataagttttttacgcaacttttatacttggaataagattacaactacaactntatcttttactntgtatcctatactaaatagaaa

SEQ ID NO: 179362 - DNA, 396 bp, Glycine max
gctataccacaaattcggacgaaaaagttgattcttgtaattcctgccccaaaacagcatttgcttggattatgttctttaccctctctgctatgtcattttcgtcgctgcaaaaaatgaagacaaaaaccctaagcatcagttattaccatttactgtaaaagaattattggagttgggcaaaaaagaacaggggatcaggaatcctcctaaaacaaaagaaaagcctctaatccctcaaaatatgcaccaaagaaatgacttttggaacaccatgtgcataatcccacatggaagcacaaaaaaataattctatcccaaataatattcacatgagaagactagtggcagaaaattctggcatctcatactagttaaatacactacacacatgct

SEQ ID NO: 179363 - DNA, 349 bp, Glycine max
  unsure (1)..(349): unsure at all n locations
tgtaggccttaaatcttcttcatcagtggtgttctttgtttcttgaagatcaatggtagtggaatggagaaggaagaaagattattggagacacgaattcaaggagaagatgagtcaagaacaagctcaccaccataggaagccatggataatagcttgaaggtaggagaagatgagtggagggaggaagagagaaggagcacgaaattttatgcctcaaatgaggtctgaactttgaagtgtaattctcaaatgatcaaagttgaaaaaaattgcacacataagacctctatttattggctaagtgtcacacaaaatgggaaggaaatttgattntacttgaaattga

SEQ ID NO: 179364 - DNA, 453 bp, Glycine max
  unsure (1)..(453): unsure at all n locations
agctngaataaaatcaaatattattattattataaaaacaggaattctaaagagcaaaaattagagatactaggatgcatcctaggagcacttctttaacatcttgagccgaacgcggaatgatgattgattgatcatgggcccaacacttgctcgtacttgtccctaagatttgaacaaaagaaatgacaccatgtgacaaaaatgcgaaacaacaccacaaaatgcctgcattacctttcactttccctcatcttcatttcggtgtggtattggccatcactcaaaatgacttttattcatcctctaatctacaggatgacaagatgcgaatgcatgcatgcttatgatttggatttttaagtgcaacaattaaacaggtgttgtcgcaacctacccatcggtgggagggcgacgcanggctcacgggtgcgtcttccatgggaggaaaat

SEQ ID NO: 179365 - DNA, 348 bp, Glycine max
tgtttattttatataacaaacagacattatttaccgggatgccccatccaaatggcataagcttctttggaaacctctcgggaaaggcccgtgctggctgtctcgttataaactctatgagtaagcaaaagctatagtcccattcacatactcacatccatgcatgcattgataatacattggcttgtttgagctatttattttgtatgtatcaattaaataggcaacattttcaatatgtaatctgggccatttttatatgtgcaaatagagaggttatatcgtgtcacattaaaattgattgaactcctatgatatgactatgtaacaaatctcttcatctttatg

SEQ ID NO: 179366 - DNA, 454 bp, Glycine max
  unsure (1)..(454): unsure at all n locations
agctntaggaattgaaactagagtacattctatttctaattgtcttatttagttcatatattaaaattataatttcaattttaaatccggttttatagaattagaatctaaatcgtttatactgtatttaattaatattttaggctctaaaattataattttaagtgccaaaaccattaagttaaaattagtatttcacaatttatgattgataattgcagttacttatataatggaaagactacggtcattgccaaacaatataagggaccacttggttacgagagtttctatggtatccccaattagagaagttttgatatggttagttttttaactaatcaaattatatgtgattatttcattaattattttgtttttttttcaaattagtcctggatcattatttttaaagttttaaaattaccaattttttaaattagaaaatatgagt

SEQ ID NO: 179367 - DNA, 391 bp, Glycine max
  unsure (1)..(391): unsure at all n locations
actcaagcttattgaagaagcttgaagaganaagacacaaagaggaagcttgtgaattacatagaatgacttacaaaaattggttattacaacagattatatagttagttataagaataactaactctcaactaattccactaattgtagttacatgagattaacctattaaccaactctagttacaatgttctatgctaagaagactgtgcaaagcacaagcacaatctacttcactagctttaagttttaacaaccgcgtacaatgttttgtgagtaggcatggcaaaccagacgggaaaaatccgagttgaccgggattggggtcgaggtcagattttccccgatagccaaagttgggttcgggatcgggatgggataattaataccc

SEQ ID NO: 179368 - DNA, 458 bp, Glycine max
  unsure (1)..(458): unsure at all n locations
agctnaccttcagaatgctgaggtgcatgttgttttttagctagcctttntgatgaggacgaggacgaagaggtaatgagtctaaagttggaaactgagagtttgactgtacccacaaaacggcaatcaagaaggaacacaccattgcctagcagaattagtggtgcatcatctccttctctgcctgatcatggcattcgaaatcatccagagccataaatcatggacaccaaggaatcatatcattattttggaccgaccacaaccacgaccacataggctagtaggatggatagatgaaccatggatgtgtgcatatgtaacataaactgagaaagcaagctagtgtgatcagcacaaactgtaaggtagagattattattatttcgaattttgttaatagtgaatttgttcccttacaccacggaatgctgtaaattatccaagagctgaatcat

SEQ ID NO: 179369 - DNA, 428 bp, Glycine max
  unsure (1)..(428): unsure at all n locations
aactaacctgcatatctngccatgtacggagcgggaatgcgtgtttttttatttagcgtaaatatacagagaatgatataattggacattcaaaatgacatttaataccaagtatgagagacagagaataaaaattataagtgcggtggatagatagataagtagtctattctgatagatagatataaaggctatataatctgatctatggaacgagagattgagaaaaataagaaatattgatataatgtttaaaataagaattcgtctaagtgatcctaagtaaaaatgaaattaaaatagatccatcttaaataatttatttatagaatttagataattatcttatttctaaatttatcattcacacttaatgcatcattgttaatttgttntatatcatttatgtgtgaaattaaaattttata

SEQ ID NO: 179370 - DNA, 412 bp, Glycine max
  unsure (1)..(412): unsure at all n locations
ntataagcgcgggtctgggagacaaaggtcaagagttcgttattgctaagatgatgttccgagtactttggatttggtacgaccatgccttcctaatttccagctgggaaattggcgagtggaggaacgccccggcatttacgcaacgagcataatgtaaacctttacgggtttaaaagctctatagttgggcctaggctttaaagtttttccttttgttatggcttaatgtcttttgtttttgaatttataatacaaggatctttcttcatctgttcctggtctctacccattctcattcatttgcatgtttacttctttttctgaaacggcagatccgatgacgagtcccccgaaggtactaatacctgngacccgcctatcaacttcgagcaagaaatgaatcaaacgg

SEQ ID NO: 179371 - DNA, 414 bp, Glycine max
  unsure (1)..(414): unsure at all n locations
cccttttgagccttgtttccctttccttgttttgaacctcactacaagccttaagtggaaaaccatgatattaccatatccttaaggaattttggagctttggaattgttctgggaataagtgtggggggtttttgtttcattggacaacttgttttgttggctatgcttcatgatgtattttgggccatacttgatgtacattgtatattggttaaatgttggacatgctgaatgaaatgttgtttttcataggccaaagagtaaaaaaaaaaaaaaaattcacaacaaaaaaatctaacaaagaaaaagaaaagcaataaaattgagtgaataagatcttgaatggcacaagaatgatgaaactctcggttctactcttcatgtttnaattttatctttacttctttttatt

SEQ ID NO: 179372 - DNA, 299 bp, Glycine max
  unsure (1)..(299): unsure at all n locations
agatgaggaagngnngaagggngagagcgactacggtttttgtttttcttttatnggnacctggagatatgtcgcgagggtcaagagacctcgtggacgtcaagtggggtgctattgcccaaaaccaagcttgaccaatcccgacccaacccgggcatagtcggtcagtgagaacctgtgatgtacctaagcaagcgagctcctggcagtctacagattaaaggaacaaagaccaccaagcaaggaggcttgtggtagctggccaactgagaattttgtgtgatatgtgggttgtggct

SEQ ID NO: 179373 - DNA, 416 bp, Glycine max
  unsure (1)..(416): unsure at all n locations
aaacaagaaagncgcaagagggtcaccttgcctaaggcctttatgcatanaaaattcctctatggggctaccattcataaggattgaaatcgataatgatatcaacccctcttttatccacttaatccatttctcactaaaccccatccgcctcatcatgtaacaaaaggaaattccaatcaataaagtcataagcatcctcgaaatccaccttaaaaatgacctcctttttttccctcttcatctccttaacaacctcatttgcaacaaggacccagtccaacatatttcttcctcaaaggaaagaacatcgtcgatcatcaataattttactcaatacgcccgtcaacctcattgacaacactttagcaatgaccttatatgtgaacccaatgacagaggtaggtctataatca

SEQ ID NO: 179374 - DNA, 412 bp, Glycine max
  unsure (1)..(412): unsure at all n locations
ctaagctntncactggcaaagcttgctgccagttgtggggcctcattcagctgtctcaattgcaaatgtaaggacacatgcttgcatgcaagatcttcagtaatgcaccccatgctttcagccctttcgtatattgacaggagatgtgatatatagtttacagcacaacctgatgacccatttatatcagtttctccttccttaggagctataatatctgttagaaaatttgcatacaaactaaacatagttcctgatggcacatttttcaaagcctcctcataaacctacaaaacagaaaaaggcccaaggttcactacaccaacaggcacacaagaaacaaagaatcataggcattatcactatctaacaattactattcctagagcagggatacaatttaaattaaaat

SEQ ID NO: 179375 - DNA, 439 bp, Glycine max
  unsure (1)..(439): unsure at all n locations
agctngagtgcctagttcacaaatgtttttatttctaatcttttgtgcaaaggcgagattttcttttttccttttcttcatcttcctattggttggacttgggctatcttcggaggtaaatcatgcccttgcttcgacgtgctagttgctatggcttatcttacggcatgccccgaaacgaaccactaaagaatttgatgctcgaacttcacaactcctgtacgtattggacatgtttctgtcaattacttttttttttttgagggagtttatgtcaattacttaaatggtctgaataatcttgattgtattttaccgtgtacttttcaattttatttttaacatatggttgtttgacaaaaattaataaatagtggattagatagcttacagcagatagcctatacctaatagcaatatgcatagagtttttttttta

SEQ ID NO: 179376 - DNA, 413 bp, Glycine max
ccttccatcacactcgatccagacgtaagatggattacgaatatggagtgcaaaaacagatgaaggccgacctgtcgggcttaaaagatcaaagggcttctatcacggaggccatgctaaaactccaaaaaaactatagaagataatgctacggcggccgcttccaatacagctagggaagcggaaccggtgctacaacctgcaataaacttgggccgagatagaaacacgacggttttcaatcagaggtatagtcctcaagcctacccttatggtttgcctctggacttcactccccgtaattctccagacgatttgagccaagcccctaccttcgagggatagctccctcctcatgctgactatcctctacaagaagatgatgaaggagatgcccattcaggccctctact

SEQ ID NO: 179377 - DNA, 423 bp, Glycine max
gtcctcaaatccctctggtgtgatttttatttagactaaatagaattatggtaacaacatacttaaaaccaaaactcactccacagatccctcttgtaagactaagtttcaattctgcttcattcaagttctaaggcaacaatacatttcccaatgctaaagtcacctaactatgcacacaaatgggtgatcagaccaagagcatacggaatttaagcactgaaagaagcattgaacacacgaaacacaatcaattagatattaaagtaattacatcagttgttctttagaaatccccaacaagggtgttttgccagccattatagaagaaaccctaacaataatgagattaaaaaacctaggtatctttgcaaaagtttctcctcttgctgcctccagagctcttttcccgaaataggcact

SEQ ID NO: 179378 - DNA, 395 bp, Glycine max
  unsure (1)..(395): unsure at all n locations
ggggtacccatcacatgtggtattangtttttttccggcgacggcgcaagacaattcttcacattcacaaatcacgtataaacccaccatcccctgttgcccacctccaactgagctcacgtactcccacgtagcccttatcctcgttcctctcaacgccgggtccccatcaatcctctcaagctcccacaacatccaagaaatccaacatcccatcatcacaaactaacaaaaccaagcaaaacaggcaaaggcagaaaactctgcccagaacacaaaccaaaaatcacagcttttcacatacaaatactccagtaacattttcttcgttccaattcgttaaccgtcggatcgactcgaaaattttactggaagtctctagtacataagtctac

SEQ ID NO: 179379 - DNA, 419 bp, Glycine max
agccaacgggtgagtcgccgccaagtagttcctaaaaaggtccgcctcacagtgatcaagaatgaaaaggatgagcttatccccacaagagtgcagaacaactggtgagtctgcattgattataggaggctgaaccaggtaaccagaaaagatcattttccgctgccattcattgatcaaatgcttgagcgcttggcaggtaaatctcattactgttttcttgatggtttttctggttatatgcaaatcactattgctcctgaggatcaggaaaagaccacattcatctgccacttcgacacttttgattataggaggatgcctttcggcctgtgcaatgtccctagtaccttccagcggggcatgattagtattttcagtgagtttttagaaaattgcatataggtgtttatggatga

SEQ ID NO: 179380 - DNA, 430 bp, Glycine max
  unsure (1)..(430): unsure at all n locations
actgaagcttcatgatgaatcacgatagatgcaaagaagttttgatgttttacttaggcgaggacaaaaagcttaaagatcaagaacaattcatgataacaaagatgatgatctcaagaatcaaagaataagttcaagatgttcaagattgaattaagaacacttcaaggttcaagaggaaatttgatttctagaaacaagaatcaagattcaagactcaagattccagaatcaagagaagacttaatcaagataagtatgaaattttttttttcaaaaactgagtagcacaaggagttttctcaaacaaaccaaagagtttntactctctggtaatcaattaccagattgttctaatcgattaccagtagcaaaatgtgtttgaaatagtcttcaactgaatttataacgttccaattgatttccaaaa

SEQ ID NO: 179381 - DNA, 342 bp, Glycine max
  unsure (1)..(342): unsure at all n locations
tctctatggatatggaggtacacaaaaacatacatttggaaaacacttgcaagtttactgagagctgacaataaaatcgtaataatggtggcctctaacggcataatttctatgctattgcctagaggtagaactcgtacattctaaatttaaaattccanttccagtttttgaagactcaacttgcaatatgcatcaaggaactcaattatctgacctattaaactacacaagtcaaatcatttgggatgaagcacccatggctcacaaattctgctttgaggcattcgatcacagtcttagagatatcatcacacacaactcataggacagtacaatctt

SEQ ID NO: 179382 - DNA, 241 bp, Glycine max
ggcctgtatggcggtcaccagaggagcatataccacaaactcttgcgacaggtatagatttctgattcaaggccagctgggttaccaagttaaccaatgcatcaagtttgccttcaagcttcttagtttcaaatgatgcagatgagtttgtagctacctcatgcactcctctaatgactatggcatcatttctggcgctaaactgctgggagttggaagccatcttcttaatcaagtttct

SEQ ID NO: 179383 - DNA, 370 bp, Glycine max
  unsure (1)..(370): unsure at all n locations
ataactgaatacctactactttttaatctacaactataaatatcttttataaaaaaatcttgtttaatctgagaacatagtacgttagtaacatagaaaaattaactcttttaatagttnttttcggacacaacatttgaatctatacttgttccaaaggaatctcaaactactcactggtaattggcaaacagctaacaactttgtatacaaacaattaaattatgatagttagttaaatatatattatttctttttatttaaaaatggccatcgaaatttcaatctcacgggagaattcgtgacaaagaacaaaacgcttgcagacacaacttttatcgtacaatgaggaaaaaaatgagggaaaccc

SEQ ID NO: 179384 - DNA, 406 bp, Glycine max
taaatattcaatttcgagcgtttcgttatattacgggactcattcagacatccgagtaaaaagttattgtcgtatgaattggcttaaagcttaaacattaaactttgagcgtctcgatatattactggactcaatcagacattcgagtaaaaagttattgtcgtttgaattggctcagaggttgaacattcaatttcgagcgtctcgatatattatgggactcaatcagacatccgagtaaaaagttattgtcgtatgaattggcttatagcttaaacattcaattttgagcgtctcgatatattacgggactcaatcagacatccgagtaaaaagttattgccgtttgaattggctcataggttcaacattcaattcgagcgtctcgtatattacgggactcaat

SEQ ID NO: 179385 - DNA, 389 bp, Glycine max
agctttgagcaaattcgaacgtattttacttttactcgcatgtctggttgagtcccgtaatatatcaggacgcactcaattgaatgttgaagctgagagcaaattcaaacgacaataactttttactcggatgtctgattgagtcccgtaatatatcgagacgctcgaaattgaatgttgaaggtcagagcaaattcaaacgacaataactgtttacccggatgtctgattgagttccgtcatatatcgagacgctcaaaattgaatgttgaacctctgagccaattcaaacgacaataactttttactcggatgtctgattgagtcccgtaatatatcgagacgctcgaaattgaatgttgaacatatgagccaattcaaacgacaat

SEQ ID NO: 179386 - DNA, 380 bp, Glycine max
tccttaagaagattcctaaagaagctagagcttagctacacatacctctctaatagctaagctcacctccttgagatgagaagctagaacttagctacacaccccctataatagctaagctcacccccatgacaaaaaacatgaaaatacaaaaaaaagtccttactacaaagacaactcaaaatgccccgaaatacaaggctaaaaccctatactactagaatgaccaaaatacaaggcccaaacgaaggaaaaacctattctaatatttacaaagataagcgggatcatacttagcccatgggctcgaaatctaccctaaggctcatgagaaccctagggcctacccttggatctccagcccaatctacttggagtct

SEQ ID NO: 179387 - DNA, 394 bp, Glycine max
  unsure (1)..(394): unsure at all n locations
aaaatgttgtttctacttcaaaaccttttgaacttcttcacattgatttatttggtccctctagaactatgagttttgggtggtaattactatgtgtcgcaacctacccttcggcgggagggcgacgcgagactcgcgggatgcgtgttccatgaaaggaatacgcgcagagtcgccaccaacatttatttgaggaaaacgtcggaaaaaccggaaaagatgcgatctactaacttttaagtgaaaggttcgggagttgtatttacgcacggcgaaggtattagcaccccacacgtccgtcccaagggacggcagcctttaatcgaatgtgcaaacatgaccttgatttntatgttcccttttaagtccttacatcctttataccccttttata

SEQ ID NO: 179388 - DNA, 362 bp, Glycine max
aaactctcaatcctatcacgcaacgtgacagacaaaagcgggcactaactagaatgaccattagtggcaaagcgaaaggaatttcgcgctaaactatccatggtcacacattaatgcaacctggggatatgtgagcatgaactactaccaatatatacatgttgtttacacaaatgagcacatcttaaaagaatactccgcacaatggtggcctcctaaggaatgaagcggcatttcctccttctgatgatgcatggacacttatccctgacccaactaccatacgtgcgaaaggtcgggccaaatcaacaaggataatgaatgagatggattggctcgaaccatctgaccaccaacaaaaa

SEQ ID NO: 179389 - DNA, 417 bp, Glycine max
atcacaaaacggaaggactaagtatgtattacctatatctaacacaaaatacttataacactacaaaataaccataaattggagaagtttgatacaatttacacaagttttatacacaaaagttagtcgtattcaccgactaacagatgtcactgaccatggtaagttcaatatctaggcaatgatggaagttgcaagtgaaagagaggagtaaggacatatcacggaaagacaaaggaaaagaaaaggaaaatacaaaaaaatctaaccctccattaaaaagataagcgattagtagatctattcaaaatcaaagttgggagagagagagaataagaagaatatgatgagtgcacaactgattatataccggtttaccccaacttgggctatgtccaagtttcaccctttaagatg

SEQ ID NO: 179390 - DNA, 437 bp, Glycine max
aagcttttagtgacttgtgtacatgaatcctaaattggacacttttgatattttcaaaatactatagcttagagtagccctatgaagtagtatctatactaaatttgaggtctctaaggatcactatagctcaatgtacactcctagaggttccaaaatcaagttatttaagccgctaaattgtttaagacatggattaaaaacccaaactccactcacctttaacttcaaagggttatgaactcaaaccccttcttgccattcaaccacttcaccttcccactaatcctcacactcttcttggattctttaaaaataatattagaatacattattgtaagtagattctaattaaattctttaaaaacttaagactcaatccctaactcacaaagttggatgcaaattaatcatatctaatttgtggttgtcttaca

SEQ ID NO: 179391 - DNA, 270 bp, Glycine max
tccctaaccttccatagggaaggacggatccttgtgaaaactaatctcccttcgcacacttcatgacacacatgtaatcccggcggaactagactaaatccaagctcatcccaattaatgccaacatacttctccccagcaggactgaggttcagacaaaagagggtaaccaaagctcagattcaaaatcaccaataaaaccaagttcatacattattatctactagtacaacaacattggcgtactcatcaaaaaaaaaagaccataac

SEQ ID NO: 179392 - DNA, 365 bp, Glycine max
  unsure (1)..(365): unsure at all n locations
cacaaancgangggccaataangcgacatacgncgcaaaaacataacnnacaggcatttctctctattttaatcaatttaatttgttacttcttaattcctattgttacttccttcggcggtcgtacattattgtggtcttaattaatctctatatgacatgtaattgttattaacttttctcaaaatttaaaagctttaatacatcatttaaaaattggccaagaccaataatacatgctatgggatgtctgcatgtcaagaccatgaatacaatactgaacttaaccatctctttatactcttctaagatatttctctatgcttaacttggcttctataaaccacgctctangtcctaccttt

SEQ ID NO: 179393 - DNA, 373 bp, Glycine max
tggcttcacgcttcaacctaatcagttccttttgctggtttaagataacacagaaattatttttaaaaatggcaatattgaaaacaaaacataacaaatccaacgctccaagattcaattataattttaattctaatacctgctcgtcgtattcctttgagtattgtttggctctgttaaaaatcagcttccgcgtttcgaacctcattttcttagcggcatcgagttcctgcttcttcgccaaagcccactcctcgttccttttctccttcttcaccaccgattccggaaccaaggcctttgcttcgcccattcttcatacaacaagggttataaattagcgatgtgtcataatttgcttaagaattcatca

SEQ ID NO: 179394 - DNA, 448 bp, Glycine max
  unsure (1)..(448): unsure at all n locations
agctgggttacacaaattcttagggtatgaattttattattgaatataagcctgngaaagataatcaagcagctgatgctttatcaagaatgtttatgctagcatggtcagaacctcattctatcttcttggaagaattgagagctagactaattagtgatcctcatttgaaacagttgatggagacatacaagcaaggtgctgatgcaagtcattatacagttagggaaggcttactgtattggaaagatagagtagtaatacctgctgaggaagagattgtgaacaaaatactccaagaatatcatagctcacctattggagggcatgcaggtataactagaactctggaaggctgaaagctcaattctactgcctaagatcaggaagatgtcaagcttattacagaaatgcttgatttgtaacaagctaaatcaaacaatacact

SEQ ID NO: 179395 - DNA, 408 bp, Glycine max
  unsure (1)..(408): unsure at all n locations
tgaaatgaggaagtgtagaagggtgagacttcctgcttttattcgttgaccacagagtggtacctggagatatgtcgcgggggtcaagagaccttggggacgtcaagtggggtgctattgcccaaaaccaagcttgaccaatcccgacccaacccgggcatagtcagtcagtgagaacctgtgatgtacctaagcaggcgagctcctgtcagtcaacagataaaaggaacaaagaccacaaagcaaggaggcttgtgtggtggttggccagctgtgaactttgattgatatatgggatatggcctctggtaatcgattaccaagggtgggtaatcgattacaaggcttaaaaatgaagacaggagactaagatggtctctggtaatcgattaccaanggagtgtaatc

SEQ ID NO: 179396 - DNA, 450 bp, Glycine max
  unsure (1)..(450): unsure at all n locations
agcttacaaatctantttaaatccattcccttttttaaaataaaatcaaatctagataagataaaataagataagatctagatgaaataatatctagatgagatcaaatctaaataatatctagataagataaagtctagataagataaaattttgtagaataaaatagtctgtcctcttcaagtccaggcccaattctggattcaagcccaatacttcattaattcctgaaattagattaaaaacatcaaattagctgaatgatcccaaataatagaactacctaattaatttgacaattaagactaatcattaattaaaatggtggcaaaagggttaagaaataggagaaaataatggcacatcagagagtttgagagatnttgtatgcaaagacctgcagagaccgaagcttgaagaggaagtcgtcctgagagcttgagatgagtt

SEQ ID NO: 179397 - DNA, 411 bp, Glycine max
  unsure (1)..(411): unsure at all n locations
tggttacctccttcttcactacatcaagaatcactgggttgagtcttctttgtggctgtcttactggtttagccccatcctctaaatttatttgatgcatacatgtggatgggctaataccaggaatgtccgccagggtccagcctatagccttcttatgcttcttgagaactgataacagcctctcctcttgctcatcagcaagggaggcagatataattactggaaaactttttctatcatccaagtaagcatattttaaaattgatggtagaggcatcaattctggtgtggccggctggatagtggtagaaagggatggtttctcagcttgtacctcataaagaaagtcagaggtatgtgtacttcctgaaacatggttagttctatctgactntataaaatcaatct

SEQ ID NO: 179398 - DNA, 451 bp, Glycine max
  unsure (1)..(451): unsure at all n locations
agctntgaagcaggatcctggtctctaaattattttatggagaggctnggaacaagggccatcaaagcagtatttctctcaatggtggtctgacctaaggtctattaatcaacatccgagtatggttgatgtctctaaacagttttcttggaaggtgggtaggggagatcagattcttttctgggaagattcttgggtgatggtgggatacctcttaaagatcaatttccataattatatcaaatttcttcccaaagattacagcttgtggcagatatgggctctttctttgaaaatgggtgggaatggactttctcttggagatgaaatttgtttgacagtgagatggggatagcttcaatatttattgaccaaattgcagcaatcagcctaaatgttaatctgaaggacacttgggtgtggggagctgaatctaatgggatcttttcta

SEQ ID NO: 179399 - DNA, 421 bp, Glycine max
cgcgggctgcggggctcgcaggacacatgagcttgggtgttttttatgcgagggggaagagctttgggtgaagaaaacgttccccctccacctctttatatattcgtacacgggttgctcgcccaggcgagctaacctgtaccctgtttttttttttttgaggggaacattaaccatgtctcctcctttcttatgggttagcgcttgcccacttgaacctacttaaattagaattaggtgtcgattacttatttaaaacaaacaatatttaaagaaactgcgaatgcaaaggatactgggctgccttgcaacgacgttctctgcttgtttagtgccgcgaaggggcaacgatcggtcggtcgtgaccctatccccacttggatccgtccctatgtaccttgtagtatgaaacaaaaaatcc

SEQ ID NO: 179400 - DNA, 213 bp, Glycine max
  unsure (1)..(213): unsure at all n locations
agctttaggaattagggttttcaattttaactaantgggcgggtcggcgttggggcggatatctttaataccatacaccccacccccccgctttgagattatcnaaaaaaaccccaacccgaccccgaacccgacctcgaacccgatcaacacggttgttattcgaaaaagacggcgcggggagaattccgctacggcggggtaaaaaatggt

SEQ ID NO: 179401 - DNA, 331 bp, Glycine max
taatgctgatgggcagcctttgaagattttgatgatgaatatgaccattctagctcagacatggagcgttctctccttttctaacctcattcctacctcccacacatctgatgtcaccttggacagagccaagttgatttatggtattattatgaagatggatatgaacttggggtacctcatctcccaccagatctctctgattgcacagcatgacacatccagacttggattgcctgccttgatcacaactctatgcaaggctagaaaagtccagtcagattctagatccctggagaacttgagccctgccattaacttggcatatatt

SEQ ID NO: 179402 - DNA, 415 bp, Glycine max
  unsure (1)..(415): unsure at all n locations
tggaaagnnagttttaccggggggacactactcttaaaacaaaaatggcatacaacttccccccatcaatgtaaatttagagtaagcttatgcgcatatttccttacgaacgttcacttgcacaagacattctattaactaagaaaaaatgcacccatatacaatcaaggcagcttcgttatctagattatttacatgtacttccaaggtgtatttgttacttacatcacacacatctccttggctaaatttacatacatgcatactcaaagcattttggggtaccaaaaattgcacatgtgcacatcttggtatttctaatacctatacatacacaaacttcatgatgaatcttgactatctacacaataaggggctacatttcatgctctnttcaagttnttgctacctaaag

SEQ ID NO: 179403 - DNA, 369 bp, Glycine max
tgtattcaaatgggaaatgttacaatgattagaacattttttaacatgatcgtttggatgtcctaacctgaaacaacagattttgagcctatgctagagctattattgacagtagcaattgaataagagaagtcagcatttgtaacaggggcagaagtagacatcagcagggaaggattgccttgaagctggagattgtgaaatgaataaaggccatcaacacccacaactccttgaaggaggaccttatgtgtctcctgagatttcacaagacagatatgaggatgaaactcacaaaacacaaagttatctttggcaaactgactcacaattatacaaattttcgaaatagaaagaacatgtaacaat

SEQ ID NO: 179404 - DNA, 436 bp, Glycine max
  unsure (1)..(436): unsure at all n locations
agctntgatggtgtcgagaataaattattgtttgtcatcatcaaaaagggggagaatgtgaatgtatgtatacatgattttgatgatgtcaaagaagaatctaacaaggctgcttcaaatgataagcatttgtgtcgcaacctacccttcggcgggagggcgacgcgagactcgcgggatgcgtgttccacgaaaggaatacgcgcggagtcgccaccaacgtttatttgaggaaaacgtcggaaaaaaccagaaaagacgcgatctacgaacttttaagtgaaaggttcgggagttgtatttacgcacggngaaggtattagcaccccacacgtccgtcccaagggacggcagcctttaatcgaatgtgcaaacatgactttgatttttacgttcccttttatgtccttatatcctttataccctttttatattt

SEQ ID NO: 179405 - DNA, 425 bp, Glycine max
  unsure (1)..(425): unsure at all n locations
tgaacgagaacttgataccttggtcaacctagtaactcagcttgccatgaatcacaaatctacacctgttgccagagttctgggtataagttcttctgcatatcaccattcagatctttgtccttctttgcagcaatttggagtcaatgagcaacctgaagcttatgctgcaaacatttataatatacctcctcagcagcaaaaccaacaacaacataataattatgacctttcaagcaatagatacaatccaagttggaggaatcatccaaatctgagatggacaagtccttcacaaaaacaacagcctgtccctccttttcagaatgtncgtggtccaagcaagccatatgttccttctccaatgtagcaacaacaacagcagcagcaatcacaacatagacaaccagcaactgagggctctc

SEQ ID NO: 179406 - DNA, 436 bp, Glycine max
taccaattcagaatacacaggcaatttttatacttaaagggaatgagatttgagtgttgaaatgattgaatgcattccaaactctcatcggaaaagaaatccatatctatgaacttagggtctatgatagaacgagaggagaagaggtttgtgtatcgtatacgttgttcttccaatgagaacaatgaggaggaggaaatggaggaatgaattggagtatcctgaacctcggaatgccgttgacttctacttgaagaacctttgagcttctttgatggttccgccatttgagagacttctttgaaatttcaatcggttgaaatgaaagagaatgaaaaaatatgaattttgggctttgtgggaagcgattcggataataaatgagtgagttatggcataaatactaattgggaacgagggtttcgcgagagaaatg

SEQ ID NO: 179407 - DNA, 434 bp, Glycine max
gaaactcagctgcctaattacctgaaatgagagaaattattattgtatcacacattatagaagtactaaatatttattacctatacttaacagaaaatacttattacactacaaaataaccataaattggaagagtttgatacaatttacacaagttttatacacaaaagttaatcgtattcaccgactaacaactcccccaaatttatagttttgcttgtcctcaagcaaaaagagaacagctcacttgtcctcaagtgacaatgacatgcagtgactatgtacaaaggtgtatgcaacaaaagtgattgattgcatgataagagaatggagtaaaatgccctcatcacttgtctttcacaaggtatgcagttattcaaagagaagaataaaatgtaacctgaacaattagatggagcttatcataagacata

SEQ ID NO: 179408 - DNA, 440 bp, Glycine max
  unsure (1)..(440): unsure at all n locations
agtgaatcccggagaagccattttatgattgctaaatcctgnatgagagaagctgctaacaagaggttatctgtcaacacgtgatcaaaccataaaaaaggcaataaactcataaaagaagcaattatattgaaatcgcattaaatggatagtaaagatcattacatcaagagtgtttgcttgccaagtccccaacaatgggtgatttagcctctcatagtgatgagaggctcacaaatacaaaataaagcaaaggggatgaaagaaaatagaagaagaagggctcaaagtgagtggatttttgttccctcttgcgccctcttatttgtctgtctcataatattgcgctccccccttttctatacttcaaaaatgctgcacatccatcgttttcaaaaatgatngtgtgttaagcctacatgtgcgtgctgggcgtacat

SEQ ID NO: 179409 - DNA, 412 bp, Glycine max
  unsure (1)..(412): unsure at all n locations
ttccaggttcaagaaaccgcacccaatccttaagagctcttctggacatgttttgaacaagatgactaatgtacttatagtagtataaatatcccatcatttcattgtttttgttacttctggacaactattaggatgtccatcgtcattttcgtgtgtgtctacttcgaccactttcttaattaacagtgcttttgatgaaaagtaattggagttttagttatcataaccattgctttaagcgcaaacaaggtatgcccaaagcatgtctctaccaaaatgcaaaacataaattgaaatatgaaaccaaatatttattatgcattaactccctaaattcttattccctcataaatcctattttctttntcttttaaaagtcatttaatcacgttgtaacttacaaggcaat

SEQ ID NO: 179410 - DNA, 411 bp, Glycine max
  unsure (1)..(411): unsure at all n locations
caccgcgcagtactagtgagaaattgtggcacacttgtacttgagtagtcttcaagggttactcgtttaggttgctcatcagccattgtgttggcttcaagcaatgctgtatctgattcccttgtttctggaaaactagaaaatgactctaaagactgaggttcttcaaaaattgctgctgcttctatattttgctaaaattttctacacctttctgctttattccttctacaagttgctttgatttccaagtctattataaccaaattacctgtagaggactttctatgcatacacaactaagaataaacagcagttaaccaattccgaagaaaaataatttctgctgtaaacaaatattctgaaaaacaaaacantgaatcaaagaataaagaataaacacctacaaac

SEQ ID NO: 179411 - DNA, 410 bp, Glycine max
  unsure (1)..(410): unsure at all n locations
actaanacatnntgatgncccaagtnttcataggtctttgcagggtgacagatctcttcataagcactcttaagggagttctcattattcgtttgtttcaaccattgagagccccactgagtgtccacagaaagatcactcatctttctaaaaggctctttccctcaattctcttggaaggaaagtgcgccacaagaattggcgtatttactacacttgccttcccaggtctatttttcaagctggggatgaaccttatagagggtgttctttggagaaattcttccctgcatctatgaccactgccatcagaaaagacatttcatgcatcaggaaacttggtgtgtgcaagctgccctcaccaccagatatctgagcaacttcttcttcaatatttttatgaaggactc

SEQ ID NO: 179412 - DNA, 415 bp, Glycine max
gaaagacagaggggggagcacgaatttgaaggaacaacaacgcacacaaattgaactttgagttgtgtctcacaagactctcatttatcaaagttacaacaagtgttacacatgcttctattcatagactaggtagcttccttgacaagctttcttgagaaaatttccttgagaagcttctctgataaaacttccttgagaggctagagctatacctccacacacccatctcataactaagctcacctccttgagaagcttccttacgaagattcctaaagaagttagagcttaactacacatacctctctaatagattagcccacctccttgatttgagaagctagagcttagctacaccctgcctataatagctaagctcacccccatgacacaaaacatgaaatacataaaa

SEQ ID NO: 179413 - DNA, 426 bp, Glycine max
  unsure (1)..(426): unsure at all n locations
aagcttaagctctgcagnttatcttattaatagagttccctcatatgtgttttactttaagagacctcttgatgccctttctcatcatttcaccctaaattttgtcaatcatttaccaccccatatttttggttgtgtcatatatgtgtatttgcatcctcaccagcgaacaaaattagaatctagagcaatgaaatgtgtttttgtgggatacaacaccactcaaaaaggatataaggcctatcatccatctacaaaaatattttttgtatcaatgaatgttacatttcatgagcatgaaatgttttttcccttgaaaactcttaattcttcacctcaaagggggggtgatttggaggttcacaatcatgatagacttgaccaagatattatgttatctgatgttatgccaacaacagcagatga

SEQ ID NO: 179414 - DNA, 170 bp, Glycine max
gaatgatcgggagatcctagatgtgaacgagacaacctcaccacttgtgcttatgcacgctctaaacttgttcttctctttgtcgaaaggaggtttctggactatggaaagctaaatcctctgttggaccttaccctgtaagaacccgatgcaacaataactctatctat

SEQ ID NO: 179415 - DNA, 404 bp, Glycine max
  unsure (1)..(404): unsure at all n locations
tagtatctntaggaccactatgtcggtggtcgacactatgatcaaagcttaagcataataatattaaagctttgtgttgttatgactattgtggcacctgtgatggacaccaaaattggagttgaaacataataatatagaagctcagtgttgtaaggactattgtgcctgtagtcgatgccattttggagttgaggcaagatggtttcctagtaaagcatgtaatttctctggctttcaagcacacaagagaaattatggattgacaaagaaaatggcaatatgactttataattacattggcatgtcattttcttgctacactccacattgatgactaatcaatggagtcggtaatatttgtaatcatggaaagtgttgcatcaatgagggatggaattact

SEQ ID NO: 179416 - DNA, 358 bp, Glycine max
  unsure (1)..(358): unsure at all n locations
agctngaagaacttagggaactgttttatttattctatcatgtcacactacacacatgagtccgcttagaggtaatgcgatgaattactcacgcttgggaattagaatgaacatgtgtatggatccttaaagggttaattttgggttattttgtgtttttttatgaaattcaatttcgtttgcatgcttttaatcgtgaattgactgtgttgatggatgatcgagaccgtacccgaatcaaataaacattaaaatgcagtaactaggaagtgatcctaggtcgtttcccaacgagcaatgataaaccaaatgttcataacaggtagtaggaaaatagtaacgaattgggggggggggg

SEQ ID NO: 179417 - DNA, 404 bp, Glycine max
tcttagtctcacctgatgaattcgtggctacttcatgcactcctctaatgacaatagcatcacttatggcactaaattgctgggagtttgaagccatcttctcaattaaatttctggcttcagcaggggtcatgtcttcaagggctccactactggcagcatctatcatacttctctccatgttgttgagtccttcataaaaatattggagaagaagctgctttgaaatctggtggtgagggcaactggcacataattttttaaatctctcctagtattcatataggttctctccactaagttgtctaatacctgaaatatcctttctgatggtcgtggtcctggaagcagggaaaaaattttctaagaatactctcttgaggtcatcccagctcgtgatggac

SEQ ID NO: 179418 - DNA, 465 bp, Glycine max
ttaagtcacgcggatcagctttagtaaccattcaccttcttttagtcaggaattttattctggttctcgtcatgcaaaaacttctaaatccctagttcaggcctttagcttgtcaaactctcttgttagcacatcagcatgctcttgccccttctgtaaagtagcatctttatccttaatcaaatttagaggatcaacatcacccaaagaccgcctcaactctagaagacttttatagcccagagtaacataagtcagataccctttcaccccagctaaaattgacatggcaaaatcttagttggcaagaccattcttttgaatggactccctatcttcaaaaacgatgacacggtaaatatctttgcccatgacatccacacaagaggaccaccaaacttactagcaagaaccaagctagagtcggttagttccatgttgtcataatattgacgaccctctgtc

SEQ ID NO: 179419 - DNA, 425 bp, Glycine max
  unsure (1)..(425): unsure at all n locations
gacctatgaaactaagcttttgatcgagcataataagagatgaaagaagatcttatgatcactttggtccatttaaacacgaaactcaaacaaagttactataaacagaaagtgagcaatgagatgctttcaatttcattgctttccaatagatggtgttccattgctagacaaacaacaatgaaattatgaaactaaaaccccacattccagctaccttctttcgaagcccactggttccagtcttttgtccctcgatgggcttggttggaatcgatttaatcttgcaacaaaagaaaacaaaaaatgtcagattttagaactgttacagcgcatatnagaaggaacaatggatgaagagagagagatagagagagagagagagagagaacccttatgccttcacgttcggcaatggtngtgga

SEQ ID NO: 179420 - DNA, 405 bp, Glycine max
ctggatcttatcctatgtactcagccattgtgttattcccgcccaggcagtcccgaagaagaccggcctcacagggatcaaaaatgacaatgaggagcttattcctactctggtgcagaacagatggagagtctgcattgactatatgaggctgaaccacgttaccaaatacgaccattttcccttgccattcattgatcagatgcttgaacgcctgacaagtaaatctcactactatttccttgatggctattccggttatatgcaaattactatcgctcctgaagatcatgataagaccacattcacctgccccttcggcacttttgcctatacgaggatgcctttcagcctgtgcaatgcccctggaacctttcagcggtgcatgattactatctttagtga

SEQ ID NO: 179421 - DNA, 352 bp, Glycine max
gaggccatcctggaatggccttgatttctcaggcccactgaccccattttccaactacaaaccctagaaaacttattatctacacaaaaggtcacttctttatatttgcatatacggcgtttttcctaaagactgaaagaactttcctgagatgtcctaagtgatcatcaaggatcctactgtgcactaaaatatcatcaaaataaacaactacaaatctacctataaaatcccttaagacatgatgcataagcctcaaaaaggttcttggtgcattagtgagcccaaaaggcattactagccattcatacaaaccaaacttggtcttgaaagcggttttccactcatcacc

SEQ ID NO: 179422 - DNA, 359 bp, Glycine max
gtcatgaaatctcttctttggtaagcgattacacatatctaaagtccaatcagttcatgcctttatgtcaccaattcaaaatttcaaaatgccatcttcatggtctctttggtaatcgattaccaattcaaaaatatcttacttttgaactgattaaactttgataaaggcattttgataaaagattttgaagccaaaatattgcgaataaaaatgagattcttttaacaatgtgactaagtccttatctgcgattgtcttgatcttgtgtgttgacttgaatcaatctgtgcttttatcaagtgaattcttttggcatcatcaaaaactgcatgaatcataatctcccctttttgatg

SEQ ID NO: 179423 - DNA, 437 bp, Glycine max
aagcgcgggctggtatttttatgtaagtggtcgcgatatgcgaagatgatgttccgagtgcattggatttggtacgaccatgccctcctgatttccagctgggaaattggcgagtggaggaacgccccggcatttacgcaacgagcataatgtaaacctttacggttttaaaagctctatagttgggcctaggctttagagtttttccttttgttaaggctttgtgtcttttgtttttgactttataatacaaggatctttcttcatctgttcctatgtctctacctattctcattcatttgcatgtttacttctttatttctgaaacgacagatccgatgacgagtcccccgaaggtactaatacctgggacccgcttatcagcttcgagcaagaaacgaatcaaacggaagatgaagggaacgaggatgtgggac

SEQ ID NO: 179424 - DNA, 413 bp, Glycine max
tattccacccaattgttttttttaaaaaaaactttttactgcatgtagattaaggagatgaagattgagaaaatttgttgaaactcttttcatgtgagatttaaaatcatcaaatgagtttgcattgaaaataaagaaaaaaataagatgagtttgcattgacgcaaatttattacttgcctactaacaaaacaaatgcatagaaagatcaacaatttggtttgtcacggcgacaatcccgtaaaataacatcaatgctgaaagttacaagaaaatcatgataaaagaaacaaaaaaacacatagaaagaacagcttatttccataatcagttttagtgttatgcaatgaaccttatgaaccaaaaatggcaaacagtattttttttattaacaaatgttactttattggaat

SEQ ID NO: 179425 - DNA, 429 bp, Glycine max
  unsure (1)..(429): unsure at all n locations
agctngcaagtattttatagcttgagttctttccaaagttaaggttaatccaacacgaattatctaggaaggatttgagtggttggctgaactaggattatcgcaggaaattcgatctccactcatttatgcaaaatgggtttggcttcatggtgactaaggaattcttactcatgttccagttgacatgaacttggacagtgaatagctctcaatttccaagttggagattagatggaacttgacaaancaacaactaatatagaatttgagctttgattgaggttaacccaaacgttacatacccccataaaaatgtaaatttcttagattacaaaaaaaaaaaaaaaaaaactatttcattattttgccctttcttatcaatcaatttattgatttatataggcctctagcgggaattccacatcc

SEQ ID NO: 179426 - DNA, 411 bp, Glycine max
  unsure (1)..(411): unsure at all n locations
ttcgacatttttctcttatctgaacattaaacccttctcgattattaggattttcctcaacggtggttattatttttgagaaattggtttttgtcttttttatatattggatgctttttggttgtgcctttttgcagatttccctttttcacttggcattcttgcacactttgagcaaccatttctctggatttcgcttggctttttttctcttatgtttaagcatctgtatatttaattatttgtgatatataattgaattggttagttaactagtttatatttggtgcctgtaaatgcaaactagtctatgtggaattcatggcttatataattatcaaatagcaaacttggtaactatttaaagaaaaatcctatgggtagntatcaatactatatcatatngttttc

SEQ ID NO: 179427 - DNA, 422 bp, Glycine max
  unsure (1)..(422): unsure at all n locations
acaaaaacttgtgtgtctaagtgtgttaggatatgcacaacagaatacaatttaaataccttaagagagaagcaaaaacactcaattttatattggttcacttaatctgagctacatccagttctatttcacaatcatatgaaggattctactaatcataattcactcctagaaaatgatgaatagaaaccaaaatgagcaaccaacaaaagtgggtgaccaatagagactaaaaatatcatttgttatttgcccaaatcagtgattgtattggcgatcaagttttttgattaaccgacaaaagtgagtgttnttttatatgaatctttataacatttcagttctgcttaaccgatgtnagttttacaaacaccgttctgttgtggtggagaagcatgggagggttaagattcatgcactct

SEQ ID NO: 179428 - DNA, 396 bp, Glycine max
  unsure (1)..(396): unsure at all n locations
actaagcttgctgagattgcctcgatcgatccaaagcgtgccaaaatgtgtgtttatgttgnggcatttgacatactaacatgttgcctgtgaactgattgacttggttttggggtcattttcaggattttggccaaccggcaatcggctgcgcgatccaaagagcggaagatgcggtacatttcggagctagaacacaaggttcagactctacagacagaagccaccacactatctgcacagcttactctgttacaggtgggggacctctttttgttggtggtaatttagtactgtgatcatgaattttgttgttaatttgatttaattcctttcaatcatgtgatcacagagagattccgctggactcactaaccagaatagtgagttgaagtt

SEQ ID NO: 179429 - DNA, 122 bp, Glycine max
  unsure (1)..(122): unsure at all n locations
aaaaaaaagaaaccacaccaagananagcacccgacgaagaaaaccaaaccgcgggcgcccagcgaccaaccccaaacgcgcaaggacacagaacaggcaaccccaaacaagaggacaaccc

SEQ ID NO: 179430 - DNA, 337 bp, Glycine max
ccacaaccatgcagatgcagcactccacataatatagcaactatgatgttactatacaggctaaccacgttacagggtatatgatggaattatattcctttttggttttaaccatacaacaatatatcatttatatttctgaaaaaaattctttggctgtaggcagtacgttgaggcaaaaagttagaaagaaaattcttgtttcacaagcgtccgacttgactttgttgtgtttggtttgccactcctctgatcccactcgtactacctattcactgtattcgtttggtatggatttctttcactcccaccactgataattacattggtattgata

SEQ ID NO: 179431 - DNA, 407 bp, Glycine max
  unsure (1)..(407): unsure at all n locations
agctntattagatggagtgcggtgcagaattttatttatataacatctatttttaaccaacaatgaaagaaggtttgtgcctatgattgtgtgtgagagaaaaggttacatagaactgtgaatttatttttcatacaagtgctcacgttatatatagattgtaggaatagtattaacaatcttctgcagttacttgttaaatattgtttgttgcattatacaaatattggtgatgctcgacacaagaggtttataattagtaaagctgaagttacaatgcgcatgttattgatgcataataggacattgttaaatgtggtgattacagagaactaaaggtgtctctttaaaagtagtacgtgtttataatgccattaatgaaattataatttagttttgcctagaga

SEQ ID NO: 179432 - DNA, 422 bp, Glycine max
  unsure (1)..(422): unsure at all n locations
tgaaantcattanattaaaaaatgaatagcataccttcctattaagattaaaccattcaagaggaaacactgaccagtgcgcatcaatagcttgttggacctcatacacagaataacaacgcgatgaaggcaacacgcctctactaaaccttccaaccatagaaacccacccaccttcactttcactttcgcgttcatcgcaacactcttcacttcatcacccacatttgctacctttttgttgccttcaatcttggtgtacagtcatatattgaagttatggatgattatttaaataaaaaacaagacaaagatgaaagagaataaattaaaagagatgattttgggctcatgccccgttgaatataaaaacatacataaaaggcttaaaagatttagtacagatgaattaaaagtaatag

SEQ ID NO: 179433 - DNA, 387 bp, Glycine max
  unsure (1)..(387): unsure at all n locations
gcctttcatgattaaatccaccgcaccctagaaatcggattcacacacgatgggtttgtaacccaaattccaagccaaattcataccaaaatagattgcagggagctcaacattcaagctagtagtgtaaccacagcttccaaaataaccactgatccagttgccatgctgatccccgttgataccaccaaatccagcattaacagggttgcctatggaggttccgtcaacgctcatatcttcattatccataaccatctttccccaactaaatttttatcttaattgtgttaacaggtttatggagtcaatatccacaatctaggggcctgtttgatttcttttcttnttaaacacaaaaatattccatagaactatttcagacta

SEQ ID NO: 179434 - DNA, 423 bp, Glycine max
  unsure (1)..(423): unsure at all n locations
aagctggngagggggaananctgagctgggagctgttcgagttaattttgggctcacgttgagactagtgaggtttgtgaagatgatgaattgcttccctgaaaccacacctcccaatttcttcatggaaaggtctatggaagttacaattgttgagtcattgttacacttgatgccggaccaagaacatgcataggatttcccagttaattttcctccagagggcaccacccaattgtgcaagctgttgtcatcatctacaagctccgattttaggctgagaagtgcctctgagtaagggtcaattgctagaactgctgatgataccatgaagaaggtacaagaataagatttttgatgtagaagcatttgaaaatctccattggaacttggagagcatcacaaggtagagagggacaattg

SEQ ID NO: 179435 - DNA, 398 bp, Glycine max
ttttaagccgaaggtcggccttcatctgttcttccactccctcttcattatccatttttctggatcgagtgttatagggtgcctctgcgctttcttagttattgtgagttccctaaagaaacaaacaatggtgagtatgccaccaaaacatgaatatgctaatgaatgatcggagcacttggatccacctcaagatttttagataacgcgatgagtttcataacttcttgttttataaaaaggaacaaagcttttatctagccaagatcatacaaaagtgttacaacagaacctaacgcgttctaattatatgggccatcaaatctatcatgtgttgacacgtagtgattagcccataaattttctcaggggctgtacacactacagcgatggccttt

SEQ ID NO: 179436 - DNA, 356 bp, Glycine max
  unsure (1)..(356): unsure at all n locations
ntatgatgcaatagaaatcaaaatgaaatggctaaaaggaaagtgtataaagaaagagacatctttgtaagcagggttttgggctactcttactcacaaaggttaccaatgtctaccatctgattgcagaatttatctcaaaggatgtacagtttaatgaatcaaaaattcactatcgtaccctattttcttcaaaccctaaccctattatagttgaccaatcaaatccaactcctctcacaactttaatagaaatgggacttcgactttatggaatttctctgtgaagcttagaaacacatgtcagggttgtcgacatatattacctgtttcacaaagtgagtacgggtgcgcgt

SEQ ID NO: 179437 - DNA, 328 bp, Glycine max
gctgatcattagaattgcaacatctgttaatttctgtgcaaatgaaatctgaccgtacggtcatgtacaaatgaaatctgaccgctcggtcatgccataaccactttggaaaccaaactgaggtttcataaataatttaataatcaatagatatcttttattaaaatgaatcaaaaaatcactcggacgttttctctttgggattattctttcttaattgaattgactaataactaaagtgaacctaaggctaaaatcattttacaaaatcaagctttgtccataaaaatcactgaaaaaaacattttaaggcccaacgccttaaacg

SEQ ID NO: 179438 - DNA, 405 bp, Glycine max
taccttgaaggatgagacgccatttaagattgtgcaatatcatttcataccacgagagggtagaaaaaaacaagagtaagaatctgttccaagaaaaaactactaaactaaaattccaaattgctaagaatgtaaaggaatagacattggaggaagatgcagccataacttcaatttcgcgttgattgttcacataataagtcacccccggcaacctgtttgctacaatgaagaaagtgtaactatggtaataatattctaaaacattttaaacaaaataacagaattttgtcaacatacctttacagacaagatgtcggcaacagattacacaatcttctgcttgttaactctcacgttgagggcactcattagctttgagaggtgacttgctcggactgttac

SEQ ID NO: 179439 - DNA, 418 bp, Glycine max
tggttcttacaattccaagatacaagagagctttctaagtatatgacatgtccaatttgtgcttttcctatctagcttgcatcttgcaaagtcaaaatctgaaaagccaatttgatttaaagaggtacctttggggtaccataaaccaacattggttgtgcccttaaggtacttagtgatctttttaacagctgttaagtgagattccttagggttagcttgataccttgcacacaagcaaacactaaacataatatctgctcggcttatagttaagtaaagaagtgagccaatcatacctctatactttgattcatccactaatttacctttttcatctaagtcaagataagtggatgttgcgactggtgttgatgcttctttgcaattttccatactaaaattcttaattaggttt

SEQ ID NO: 179440 - DNA, 389 bp, Glycine max
aactgaaatttaaaagctgaagtagaaacataaatctaaagactgaagcataaacataaatctaaattataaaatgtactaaagacatgataataataaaacttttcaaaacacagggaaataaaaatcatgatcctgtcaatgatcctgcatagagtccatggcatgctcattcaaatccagtgcaggagtgcctgatgatgaatcctaaggaaggggcaggtctaacactggtgcagatgactcacgctgagaaaagacatgtccgcactacagtggaaggctctggtgcacaggtggggtagttgctactggatcaatctcaaaaatgaaaggctcaggtggagtgggctctgaggcctctataatgtcatcctcctggttcaact

SEQ ID NO: 179441 - DNA, 189 bp, Glycine max
  unsure (1)..(189): unsure at all n locations
actcttgggggggacaatgtcanccttttttcttgacgaccatggggctccgaataaaagtggagaatggagaactggcgcttcatctatgcaatcacaactccggggctccagactctaacggggatgacacaatatccacctctggcaatgacataacttgggctcctgcaaaaacaggagaatgga

SEQ ID NO: 179442 - DNA, 397 bp, Glycine max
tagaggcactagagggtatcttgcacctgagtggatcacaaactgtgccatattagagaaaagtgatgtttatagctatggtatggtgttgctagagatcattggggggaggaaaaactatgatcccagtgaaacctcaaagaaatcctatttcccatcttttgcttttaaaatggtggaagaagggaatgtgatagagattcttgactcaaaggtggaaacttatgaaaatgatcaaagggttcacattgttgggaatgttgcattgtggtgcatacaggaagacatgtctcttatgccttccatgaccaaagttgtccaaatgttagagggtttatgcactgttcataagccaccaacttgttttgtcttacgttctcgattttcttcaactagt

SEQ ID NO: 179443 - DNA, 405 bp, Glycine max
tggagaggatgcttcaatggaggaaaagatagagggagagaaagagagaggggggagcacgaaattgaaggaagaaaaagggagagaagttgaactttgagttgtgtttcacaagactctcattcatcaaagttgccacaagtgttacacatgcttctatttatagactaggtagcttccttgagaagctttcttgagaaaacatccttgagaagcttctttgagaaaacttccttgagaagctaaagcttagctacacacacccctctcataactaagctcacttccttgagaagcttccttaagaagattcctaaagaagctagagcttagctacacatacctctctaatagctaagctcaccttcattagatgagaagcttgagcttagctacacacaccct

SEQ ID NO: 179444 - DNA, 454 bp, Glycine max
agctttgatcccctcacgcaagtccttctgtatgcagtcgtctcttaaatcaatcgattttaagagtttctggaatgttgtccaaatcaaggttttggtgatgttgacagactgtggcgtaaaaaaaatggcaggttagctcgcttgggcgagctgagctcgcctgggcgagcaacccttgcactaaaatataaaaaaatgagggaggggaacgttgttgcactcaaaaactccccccccccccctcattcaaaagacccaagctcacgggaaccacgaaagcagcagcccccaagcctccattgttgagtttttgcttcccttttcacgctttaattcactccccgcaagtaagtgcgctttcccttgtttatttgactctccattgatgtgttttggtgttttagttgctcattttttgcagaatttgtgaagcacttcacatgtgaattca

SEQ ID NO: 179445 - DNA, 427 bp, Glycine max
  unsure (1)..(427): unsure at all n locations
agcttanataaaatatcttctctcctattttataaaccatgtttatataatgtcaagtatagacaataattaatcaaggttgaccaatataatgtacccattgatgaggcataactcccagtatcaattctctgaattccctgcattcaaactagaatttcacatgtcaaaggaagcaacctttatgaggattaacaaggaaaggaaaaagaatgaaaaagttattaatttggatttacatcattacttacacataacaatatttaaacttaaaggtgaaatttatcaaaataactcaaacacatcacatatcttatttaaaaaattgcacgtgtcaagattcaagatggttagattcgcaaacatctgcaaataaaataaacgaagaaagaaatgagtgagtagatttgtactgaatttatttatt

SEQ ID NO: 179446 - DNA, 233 bp, Glycine max
aacaacacccctaagaggagaactacgacggcgggccaacaaaaaggcgataaacacggcacacaccactaagacaaaataacggggggcagacaagcatacacagactcgacaaaaactaaagtgcccaccgaagataaacaatcaagaaacacaggctgacaacgaatatattcacattaccagccacctacaacagggaacaacaccttcatggcgccacaatctgccgc

SEQ ID NO: 179447 - DNA, 423 bp, Glycine max
  unsure (1)..(423): unsure at all n locations
gcttnatatctcaagctaagcgcatattgcagaaaattttgtgttgcanaatgcgctaagcgcagcctgttgcgctaagccccaaatgcttactggactttacaacttcaagttgggcttagcgtgaggataggctaagcgcttgggtcttaaactcatacgtcacatgggcacgctaagcgtagctctagctaagcgcaactctgcactaaatatgccatacgaatttcagttnttaaaaatcaaaggcaaaggcactttgagtgctacctttgcacccaaacctttgcacctttctaactctgagattgtgtgcttcccttttgcgtgctcatactaacttgtctggtttatcattgcttcattctgcattacaatcacaactcaagtaagtgggcacatnttccattttatttttcattc

SEQ ID NO: 179448 - DNA, 361 bp, Glycine max
tgcgtgttaaatggttgtctgatgtcatcgggcccgccgcctctggatgacaaaaagcacagaagacgatgttagtctctgcgtgctatcaagctttgagtcttatagatagcaaaaaggtgtaggaccaaatggttcccacatgtcatcgggccctgagtattatagatagcaaaaatattttaaaagtgcgggaccaaatggttcccgcgtgtcatcgggcccgccgcctttggatgacaaaaggtgcataagacgacgttagtctctacgtgctatcatgctttgaatcttatagatagcaaaagatcttaaaagcgcggaccaaatggtttccgcatgtcatctggcccgccgcctc

SEQ ID NO: 179449 - DNA, 314 bp, Glycine max
acccggcgcaaacgaaaacggtgagaatgagggaaaaacccacaccgcgactgccattccgatacaaccaagtttcccaccaacccaacaatgtcattacacacgcaataacaaaccatctccttacccacctccctggtatccacacaggccaaccctaaatcaaccacaaagcctgtctaccgcacttccaatgatgaacaccacctttagcacaaaccaaaacaccaaccaggaaatgaattttgcagcaaaaaagacctgagaatacaccccaattctggtgcctatgctgacttgcttccatatcttct

SEQ ID NO: 179450 - DNA, 322 bp, Glycine max
  unsure (1)..(322): unsure at all n locations
cataaaacacaagagcatgattgattacagaaatatatctatacgcatcaacttgtttgttagaatcacccaacatttctacctattactgagacttttacttactttgcattttatagtttctagcatataagcttgggttaaaatatgtttgaaattatcaatcatacatgttctctcaacaatgcttcatttctgaacttaattcacgctaacattaattccctgtgtaccatactccggttcatgcgttttaatttttatatacttgacgattcagtgcgccttctggcaaaccagatntcccttgaatatacttgaa

SEQ ID NO: 179451 - DNA, 345 bp, Glycine max
ctagaactgccaagtctcttcacctatgggcatattcgttgaaaaatctgtgaccctttttgcacatgttctgaggttgcatcctatccggaaccatatcaaaattgtactgatactgcctaatgaaggcaaccattacgtccttacatgagtggactcgagaaggttccatattagtgtaccaggtaacagctaccccagtaagattttcttggaaggaatgtatcagcagttcctcatcttttgtgcatgcccccatcttccgataatacatctttagatggttcttggggcaagtagtccccttgtacttgtcaaagtccagcaccttgaacttgggacggg

SEQ ID NO: 179452 - DNA, 330 bp, Glycine max
agtgattagtccacccactcaccaatgataaaaacacaaaaggaaacgtccgatggattgcccgctttatattactaagagaggctgataaaataagaacctcatgagaccacctcgatttccgaatccaacgtggttactacaagaccgaacggtccgaattcattgtaaccgaagcttacagataatacaacccaaacgatcggtggaaatgtaatatatttttaggttaagccagaaatgacttaaataaaatggcttaagcacgtcaaaaggcggtataaaaagttaatgacatgagaatgagaatacacgacacacaatgtggac

SEQ ID NO: 179453 - DNA, 347 bp, Glycine max
  unsure (1)..(347): unsure at all n locations
ctcatgagtgcgaagttgaggactaagtggattggtctttttgnngntactaatgttcttccttatggtacagttgagatcaaaagcgactccacaaacaagagcttcaaggtcaatggacaccgacttaagtcattcctcacaaacccttctttattggacgtagtggtggaagagacttccttactccaccttactcctcctctaccatgacttagggagtttntctttcctatctccttttttacttttattacatttgtccgattctatttgatggtttaattgcttttaatcttttaattgtgccacattgaggacaatgtggtgttaagtatggggggagt

SEQ ID NO: 179454 - DNA, 374 bp, Glycine max
cgccactacctacggctggcacaaaaggtgttgacacctcaactcatgttctttatgcagacgacatatatgttatttctttttttgtagaggaacaaagaaaaatccaaaaaacttgatgactccttctcaattttacagggaggcctcaggccacctggctaactctaaaaaatgcaactacttttgtggcgctatgaaccaccgtggcgctatgaaccatcctcgtgcggaggagaatatgattaatcacgggtacaggtcacctgcaaacccaaattgatccaaaccaacctaaacagtttgggttaagtattcttgttatgctcaggccaaactcaactcaactgacacccattgacgttttaaatcga

SEQ ID NO: 179455 - DNA, 413 bp, Glycine max
  unsure (1)..(413): unsure at all n locations
ntaatatatatccaatgacagacctatattcatatgagtgtgagtaaatacatccttcaatttaataaaatcactagtatgtgtcttagaattttatattttgcactacctaattttatgtgtttgaacccttaatttattctcaagtgaaagtaagcaactacatccttttattttaataaaatgacaaatattntatattttgtacatctaatttttacatgtttaaactcattatctcattntcattcttcttatatctttatttatgtatttattattggatgcatgagtaattttactacctttggtccaatatataagaaacaaatgaaaatgtttgttttctaaatataaggtacatattatcacctttacatgcattaattgccattttcttctatactcttatt

SEQ ID NO: 179456 - DNA, 411 bp, Glycine max
  unsure (1)..(411): unsure at all n locations
cttctangatttctccggcttaattcttattctgatgcagcttcaagaaattccttttaagtgtaatgttcagtagctgtttacaggggaatgctgttttttactgttatgctgctaattacaatacacgatcattgatgttactggttgcaaatgttgaataggaatatagaaacatattgctacagtttgtctatgacgattagatgaatggaaattctaggaccttgaatttgagagttaatagctaatcttagtctgtagttgtctatacaagaagttgcacggcaaaggctggttatgaatgcaagttataaatgatatgctattgtgggaaaaaaaaacttcggcaaagaggctgtttccggattctaacccatgaccaacaagtcaccaaggcacaactttacc

SEQ ID NO: 179457 - DNA, 392 bp, Glycine max
  unsure (1)..(392): unsure at all n locations
tctananaaagctacatgaagctgcctttgtaaaatctctgtccagccttcattaaccgttggatcttcacgaaatttggtctgcaacttcacaaaacaattttccctgatctgaccgttgggatcttggagaagatgtatggactgtgctagaagcctcttaaagaagcttctggaggaagcctcttaataaagcttctagagaaaactacatgaagctgcctcggtagaaacgcttcccagcctccgttaaccgttggattttctcgaaatttggtttgcgacttcacaagacactttaccatgatttagacgttgggatctttgagacaatatctggagtgtgctagaagcttccgttcccgagagcatctcttatttaagcatttcag

SEQ ID NO: 179458 - DNA, 393 bp, Glycine max
  unsure (1)..(393): unsure at all n locations
catgcaagcnnaacactcatcgcggagtatttagtaangtttcgngagancncnaaaaaaggacagccaataacacaaaatcgggggtgaacttatcaagataggggtgtaaatagcaattcgaatctaggcccttccgacacattttgcaagttgggttgctcaaggaagaagtaactgggcggaaagctcctccacgttttgttgaaaaatggttttcagggcttccataatgcttccgtaaaatttccaaaaaccttgggtaagcatatttcacttaatattggtgaaagggaagagaaaaaaagatgaaaatcaaatctaaaatactttcgtgaggcttccgtaacttttctgtaaagtacaaaaaggggggtgaacttaataatcggg

SEQ ID NO: 179459 - DNA, 147 bp, Glycine max
gtaatcatcttcaagggacttcatcctatgtcttttgttggacctaaggtcaagactaaagccccaactgaggtgtttgttacacggcccttcaccacaaatacctcttggaacgagcaattaatggcttgtgtatgtaaaaaactt

SEQ ID NO: 179460 - DNA, 305 bp, Glycine max
tgtgagtcatctgatgagtgctgagtgtgttgtttattatttgcttaactaaactgtttaccccaacaaacccttgattatttcataacgaatgtaataaataaatacaaatgatataattttcctgattactacctttgcttggcatactgaactttggcactagactgaacttagacataatgatacacgtttcgaatacaaatcataattgatattcttgataatataatgatttactcggaacagtcatatcaaaaggctttacaagtggatccttcttacaaagcagctgctgagtgcct

SEQ ID NO: 179461 - DNA, 376 bp, Glycine max
agcctttatattgaagatcttctccattatcaaattatattaggaagagtcttacaattggttgactctatcatttataaagatggtatgtgatcttaaataagattgtaatactagaaatgttgacagtgttgatgcatcggcataaggcggaaatatgcactgtagctcgatatattttaacaatcagaacaaacgtatgtaattcttttaaatctcataaaaaatttgtatagatttcataaaaagagaaaatatgtctaatcttttaaaatctcaagacagatttatgtgactctaatctttattatacatatcatggagttgaattctgataggagaacaatacccacaccttaaaagtacttaaagaact

SEQ ID NO: 179462 - DNA, 295 bp, Glycine max
gtttatcgaatgtaaaattgagggtgtgcatgcggactttgtaaagagtatcacgtgagtaacacctatcaaagctatcctctttgcgagaccacatggcaaagatatattagactagtgctggttacaagagaagcttatgttgagaatagtttcatgtgaagctaatttgggaaaagaaaattgcgaagatggaggttatcttctctcggccgcctcataaataaacgcacctccctgcggatcatcctttaaaagaaaacgtgggaatctagagcgtagctcgcctacctgt

SEQ ID NO: 179463 - DNA, 410 bp, Glycine max
acaaaagaaaatcgtaataataaccctctagctagcttactagggattagtgctactaataataatgtttatctgtcacaatgaaatattatcttaatgtgatttgctccatcgtacttcatgccacatgtttatccaagtctctatttcgatgttgataatttataatatactaaaagaaaaaaattgagttatcttaacttatattaatcatgacattatataattaaataatacaattaatgaaatactacatatataattataattaaggaatattttaatataaataatatcaatataaatataacatcatgttaaacataacatcaattattaagtaattaaaggattgaagttatatttttcatacataattatgtcacaatcatactattaacaaaatgaca

SEQ ID NO: 179464 - DNA, 427 bp, Glycine max
caaactcaacctttgagaaacatgtgatcctttggcatgatgaaaacattcttcttgattctttgtctacaatctccccctttttgatgatgacaatccctgaaatcaagacaagctatatacaagatgatagcacgttcacacaacccttactccctctatcttttggcatgtatgcctaactttaaggaatgatttttaatgatagaattctaattgattttaattgatttctaacccaagttctaagttctctccccctatggaaacataaaaaagaactaagcaaaacaatcaatatctaaacagagccaaacattaaaccaaaataagtccatacattgtcataaccaaccaaagcaaagtcaagaaatataatagatgtgccagattacgataacaagaccacaaatagccaaatacacgg

SEQ ID NO: 179465 - DNA, 274 bp, Glycine max
gactcaccagcaaacgctagaggatgagtacgccaacatatcaacacaaagggaagcaagggaaagggtaattgattcatcgcaccaagaggcaacaacgaggacgggccgatttgctcttactttgaacaggagacaagaacttccccgactgctcaccaaggccaaagcaatggcggacacctactccgcccccaaggagatccacggacttctcagctattgtcagcatatgacacacttaacggaccatatgattagaaaccgctaggaa

SEQ ID NO: 179466 - DNA, 272 bp, Glycine max
cacacacgctcatatacacgagaagaaacacagatactcaccctaagcatgctttccatataaaacaaagcatacatccatccttcaaaataaacaaacatattcactacaacaccaacaaacattaagataaactgttccaaatgctgcaggacgagcaactacactactcctgcacaaaactaataaacagtgaataatggactaaaaccatcactatactaataaatcaaatagcacataaaatcaacacgaatttaaaaatcacgtga

SEQ ID NO: 179467 - DNA, 243 bp, Glycine max
cccagcaagggaggcccgggaggggaacgcccaacagggccccaggtacaaaaaaaccagggaaccacaccaccaacaagaccagccgagaaccaccactcgacaaaccgcccaagagcgcacaaagaaagaacaccgacacaaggaagagcaaccagagaaaaggagacccaaaaaccccagtcaagaaaagaacccgaagaagccccagaaccccgctccccgagcaaccagaagaaaaag

SEQ ID NO: 179468 - DNA, 380 bp, Glycine max
  unsure (1)..(380): unsure at all n locations
tgttaatcgtatttacgaggctntggtggtattggacaatgaggttgattattaaaaaagtgttatgagagcgtgttttattggctagttagaaaagtgactaacttatttaattttcttgtttttttttcttataagggtttatggaaaatttacccaacagggcatagaactttatttgttttgacactaatatcctataattagtgtaaaatgagagaaatatanagggataatggactgaaactgtgtgtcagagtacacaatgaatgcttgttaatataaacaggtagtattgattacacataattagaggatattcaatttcctctaaatcagatccctctaatcaaatatcatatcctatcacattattatac

SEQ ID NO: 179469 - DNA, 464 bp, Glycine max
catgcaagctcgcctaattaacctgaaattgagagaaaatgattattaaacacacaaaatgaaaatactaagtatttattacctatacttaatagaaaatacttataacactacaaaataaccataaacaaagagagtttgatacaatttatacaagttttatacacaaaagttagtcgttttcaccgactaacaactcccccaaatttacagttttgcttgtcctcaagcaaaaaagagaacaactcacttgtcctcaagtgacaatgacatgcagtgactatgtacaaaggtgtatgctacaaaagttactgattgcataataagagaatggagtaaaatgccctcatcacttgtctttcacaaggtatgctgttatccaaagagaagaacgaaatgtaacctaaacaaatagatggagtttggcataagatagatattaaggaaagtagcttataccacag

SEQ ID NO: 179470 - DNA, 421 bp, Glycine max
taaccgaagttaacactcaagtacaacatttattatatacattttgagttataaattacacctcaacatcgaacaaattgctatagaaagactgtattattgtccatgagaaaccttaggccctgttccaaagaatctattccatctcaaactcctacaaattaatacaagtgacgttgctgtagcaagtaaacatttattagatattgtaacttcggtggaatctctattaacttgagtgtgccttttgcatgttaccgatccattttcatgtagtctcggcctcgtcaaagaactcaaccagtgaacgacctataacattacaatttatcctaatcaatattcatcataattcaatcacaatcaatacatcattctccaaatcagatacatcatcttcaattcaacttaccaatatcaa

SEQ ID NO: 179471 - DNA, 396 bp, Glycine max
  unsure (1)..(396): unsure at all n locations
agcttgtgataactcctcaacaattgatggaaattntgtcacaagaggctagaaccaaggagttgatagagagtgttaggattgtagccaaatgtggggttgctgcaggtggcattttaccagcatcagctgcaccaagcatattatctgatcagtggagcctttccagcagtggtaggagtgcttgtgattcctctaaggttgatgcattagtggttgacatttagtacattagcacaatgtatgaaaaaagattagcaacgtggtttaactctttcttaatttctagtccttactaagctccttttttttattgccatatatgtttctttgttgattttgtttgcttggaaaagttcagtttagacacattctgtcatgtaatgtataatctct

SEQ ID NO: 179472 - DNA, 432 bp, Glycine max
gacctataaatctaagcttgccaaaccgtttgacatcttctttcatacctttccattataaattggaagtcaacctccgatatgtcctataaaaacccgaatgaccagcctgaggagtagaatgaaattcctctagtaacttctgaatccaaggagatttctcatgcaccaccaacctccctttataaagcagcactccctgattataggagaaaccggtatgggcctctttatcctgtcgcaaatcacaaataacctttttccagtgggtatcttgctgcacctcatgagtcaactgctgccaatctaaccactcaagataagagatcatattagtcaattcggcgtcctccaaactccttgacagggcatcagctcctttattctcgttcccaggcttataaattatctcaaaattataccccatcaact

SEQ ID NO: 179473 - DNA, 438 bp, Glycine max
  unsure (1)..(438): unsure at all n locations
agctnttcgattcattctatgtacccgttgttgtccacattgtgtttcgtgtattttccttctcgttttcatttactttccataccccttttgacgtgcttaagccattttatttaagttatttctcgcttaacctaaaaataaaataaatttccaccgatcgtttgaattgtattatccgttaacttcggttaaaatgaattccgaccgtttggtcgtgccgtaaccacgttggaaatcaaaaaagaggtaaaataataatataataataataaaaatgtcttttagtaaaataaagcgaaaaatcaattggacgttttctctttgggatttctcattcttgattgaattgactaataactaaagtgaaactaaggctaaaatcaactcgcctagtcaagctcgttcataanaaatagggtttttgaagttatcatt

SEQ ID NO: 179474 - DNA, 427 bp, Glycine max
tggagaggatgcttcaatggaggaaaagaaagagggagtgtttttagagaggggggagcacgaaattgaaggaagaaaaaagggagagaagttgaactttgagttatgtctcacaagactctcattcatcaaagttgcaacaagtgttacacatgcttctatttatagactaggtagcttccttgagaagctttcttgagaaaacttccttgagaagcttctttgagaaaacttccttggcaagctagagcttatctacacacacccctctcataactaagctcacctccttgagaagcttccttgagaagattcctaaagaagctagagcttagctacacacacctttctaatagctaagctcacctccttgagatgaaaagcttgggcttagcttcacaccccctataatagctaagctcacccc

SEQ ID NO: 179475 - DNA, 366 bp, Glycine max
taagcgacgggctgcgctccagataggagctttttttttcttagagaatatccgatagttgaaagtttttttaaaaactaataccaggatttttcaaacctgttaccaaaagttactctctggtaatcatacccattgttgtatcattccagtagtaaaatgatttgaaaaagtttcaactgattacaacgttccattgatttaaaagatgtaatcattacatgttggaataatactatgtgctgacgtgaatcaattcaatgtgagagacatttttccaaaaacttggtatcgatacctgttggatcataccatatagtatagaaacaaaagtactttcaaatttgatttcaatggttagttttt

SEQ ID NO: 179476 - DNA, 388 bp, Glycine max
  unsure (1)..(388): unsure at all n locations
tgagttcgtttttcctgcccccatagagcccctcataacttgtttcggccccactcttcttttcgggctctctttgtttctcgctccaaagcttcggtcatggccatgttgacatccctcaactcgtcatactctttcctgaccctagtggctgccatcttgaacttttctttgaccactctcgtcctttccagtttcgctttcaaggcttgcacttcctctctctccgcagggacttcagcttcttccccacttgaaatctttagcttcaggagccaagctatcccttacatctgaacctttaaccatttatgatagtcgctgataacaccgntgntgcttcctctaagctccttatcttttctttccacggcattccatgcttttt

SEQ ID NO: 179477 - DNA, 441 bp, Glycine max
  unsure (1)..(441): unsure at all n locations
agcttcatcgatgcgagatttttgtgtctctatttctaaaaactcactcaaagataagtgcattgggatcaagaattntaggaacaaccaaacaaaagtgtgccataacagagcgactagtgagacctacgaaagagaaacaaaagcacttancgagggttgtgtgctgtcggtggttttcaggctcttagaattataaaggggagtataaaatcatgtgtgaagattaattttcagggtattgcgagggcaaaaaattataaaggacagtgtattagtaataaagggaagtataaatagcaatttctatggtctatatatcctcagcctgctttctgttttcttttttgtttacctgggtccttaccagactcttagatgttgtgttgagactttctatgtgcacccagcagagttgctggtacacctaacaaataacct

SEQ ID NO: 179478 - DNA, 383 bp, Glycine max
tcggaagaaagggatgaggtgcaagcgctaaaggcttatcttgaaagagcccgggtagtcaaatagaagttcaagtccatagccatcaaagtctgaagagagtatgatgaactaagggacgttaatatggccaccgatgaagccttggaatgagaaaccaagaaggcccgaaaggaagaacacgtgccagcaaagttttgaggggctttatagggcagcaatagtaagctcaagctccgaagaggtgaaaggaatcatcacgggtcaaaggcatgatcttgaaggacgagctaaaggcttaccttatgtcgaaaagaaatttgtcccaacagttaagcgagactgaagggaatatgtgggccgtcatcgatgagtgcaaagag

SEQ ID NO: 179479 - DNA, 371 bp, Glycine max
  unsure (1)..(371): unsure at all n locations
agcttccatcaagacttagtttccatgtcctacaactcagatttgaacttggatagagccaggttggtttatggcttantaacccacatggatatgaacatcggcgtcctaatctcatgtcaaatctcttctattgctcagagtaactcctctaggcttggatttccagccttgatcactaccctctgcaaagctagaggagttacctctgacagtctaacttatgagagcctgagcctggccattaacttggcctacattaagaaaaactgttggaatgtgggtgatctgatagttaacttcaaaggggtaaggaaggcaagggctcgaccacctgatgttccttcttctacttcacctaactctttcac

SEQ ID NO: 179480 - DNA, 419 bp, Glycine max
  unsure (1)..(419): unsure at all n locations
tgctgcaccattgacagatntacttaagaaagaagcattctagtggtcttcataggcagagacaacatttgttcaattgcagaaagtcatgacttcagccccagtgttagctcttcctaatatcgagctgcccttcattctggaaactgatgcttccgacactggtattggagcagtattacctcaaaatggccacccaatagcacttttctccaagaaacttgcacctagagtgcaaaagaaatctgcctactttagagagatgttagcaattgctgaagctatagctaagtgtagacactacttgctgggacacaaatttattatcagaactgatcaaaacagcttgagatcattgatggaacaactcctacagacacctgaacaacaagagtggttacacagagattctgggatat

SEQ ID NO: 179481 - DNA, 436 bp, Glycine max
  unsure (1)..(436): unsure at all n locations
agctggtttggagttgatttagcctttgtttcactttgattattagncaattcattcaaggaaactttcaaagaanaacgtccgatcgattcttttgattattttattattttttttttgaagattattttgattattttattattattttgctttttttattcaaccgaagttacaacgtgaacgattggttggattttatttaaatagtgattaaacgagattacaacacaaatgatcggttgaaattcattttatcaattattaagcaagataacggcttaaataaacggtaaaaagctcgttaaaagcgggacaaaagataatcgaaagtgaacgagatgaagatgaacgccaacaacacaagaaatgaattgaaagtctcggattcgaacacttaccggttgaagaccgcagaacaagcaaagaacaattg

SEQ ID NO: 179482 - DNA, 422 bp, Glycine max
  unsure (1)..(422): unsure at all n locations
tcctctaccgtgtgaaaaacattgtcggccagcgcttgttttattattgcgcaatgtcngctgaaaaacatcagttggggctgtttaactaccgatgctggctactggtttttctattccacccctgaataatacttggacgatgtcgatttggaaatgttcgatcggagtcatccggtcatgcttctttttaagacctcgatctgtcatcttttcctggccgacgtcggctagcatttttttcgatcaatatcggtgaatcatgctttttgccaaagtgggctaacgttttcgtggctcatgaaatgaaagcatgccagtgttggccgaaacacaatctcgcacgaaaaaccctagccgacctacatttgtatttcgtatgcaataccgaacagcagaacttcgtctaccataaagaaata

SEQ ID NO: 179483 - DNA, 457 bp, Glycine max
  unsure (1)..(457): unsure at all n locations
agcttcacctttttgtcctcctcaggtgttgcatgagattacatgctctattttcatctgccactccaagtaggcctccggatcattctttcctttatatggaggaatgttgagtttaataccatcaattcggttntgtctaggaacaccatcattccctcttctcctcctttcttcttcattatgatctctattctccatttgatccaacctctcatggagcgcatcatctcgttgttatattaacctcctgaaatgttgcatcaaagcttgcatttggaattgcgaaagccccactccatcattaggattagtacctgacatctcacacaaacaaatcaaacgtaacaagacaattatagttgctgtttgaatacctcacccactcaagtgtatcacacaatnatggctttctctaataaacactcttgcctttaccatctattcccttgagtct

SEQ ID NO: 179484 - DNA, 203 bp, Glycine max
atgatatctcattatgagggaactcatctttattttatcgctaccagtacgctgactgccatctcatcgtgatggtccgatagaaacaccaaaaaaaactatgccataagaaggggatctattggcggctacatctctctcacacgccctgtgtccctttaataaataccgacacaaggtataactttccctacgatcgcaaa

SEQ ID NO: 179485 - DNA, 371 bp, Glycine max
  unsure (1)..(371): unsure at all n locations
ctcgcccaggcgagctaggggtgcgtgctttatatgtatttcgncttctggaggaancatctggaagggccaagtgggtctggttgctatttgcacccccatttttactacatacaccccctcgctctattatggtgattctttattcataacgttacgaaactatacgaatatgtaacgatacttggtttctttccgaaatgttacgaaaccttatggattacgtaatcatccccttttttgccttgcagaacgttacataactttacggattgcgcactaacacttccttataatttctggcaagtcacggaaccttactgattgtgctaccatgctttctttngacttccggcatatcacaaaacttc

SEQ ID NO: 179486 - DNA, 460 bp, Glycine max
agcacctgaggctgcaagctgcggtggacaagacgggaatgtttcccccctgcctcataagcaggagcttcatatgcgcgggtctggaggacgaatgtcaagtggtcccgatataccaagataatattccgagtacattggatttggtaccaccatgccctcctgattttcagctgggaaattgtcgagtggaagaaccccccggcatttacgcgacgagcataatgtaaacctctacgattttaaaagctctatagctgggcctaggctctatagttcttcttttgttaacgcttggtgtctttcgttcttgaatttataatacaaggatctttctttatctgttcctacgcctctacccattctcatccatttgcatgtttactcttctatttttgaaatggcagattcgatgatgagctcctcgaaggtactaatatctgggacccgcctattaact

SEQ ID NO: 179487 - DNA, 372 bp, Glycine max
atgtgctgaagaagtttctaactctacaaacaatcttactatctctacatgatgatgcatgatgtacaaatggatagattaagactcagatgccacaatctataccaatgtcactcaatgagttaagcatgtaaaaggacataactttttcacacttcaaagcttaatcttcatgttgctccccatatctctaacaacacgaaccctaagcaacttattaattaattgtgagtaaggaaaatataccctatacctaaaccctaccactacacatgtgacactttttgtgttaagatccctactctatctaatcacatgaaccctaagcaccttgattattaagtttcattaactacaatatactacatgaag

SEQ ID NO: 179488 - DNA, 355 bp, Glycine max
cgctggcgctggcagcttgaacatatgaacttgcataaattactataaattggtcactattatttttgagcacgtgatttggaaaaaaggaaaaaaattgaaaaatctcacatgttggcagaaaaatcactgtctgggaaaaagaaagtaaaagggaagtgtgattgtcgttttggctcaaaatttattctataattggtgcctattttataccaatcttagttctgcaatttaaattgaaaattactgtgaaaaaaagtgtcaaaactacaggcttcttgaattttctttctatgttttttactctactctagagccattctaggtttctctttgagtcctagctttcttttat

SEQ ID NO: 179489 - DNA, 243 bp, Glycine max
  unsure (1)..(243): unsure at all n locations
tctcatcttgtacatgacaatcttggacgagtcaatggggtgtatgctgtggcaacatgacgaatccggaaagaaagagcgtgttgtttactacctaagtaagaagttcacgacctatgatatgaattactccttgctcacaagaacgtgttgtgctctagtatgggcatcccatcacctaaggcagtacatgctgagccatanctacctggtgatatccaagatggacccggtaagtacatc

SEQ ID NO: 179490 - DNA, 430 bp, Glycine max
agcttctcatctcaaggaggtgagcttatctattagagaggtgtgtgtagctaagctctagcttctttaggaatcttttcaaggaagcttctcaaggaggtgagcttagttattagaggagtgtgtgtagctaagctctagcttctcaaggaagttttctcaaagaagcttatcaaggaagttttctcaagaaagcttctcaaggaagctacctagtctataaatagaaacatgtgtaacacttgttgtaactttgatgaatgagagtcttgtgagacatacttcaaagttccacttctctccctcttttattccttcaatttcgtgcctccccctctctctttctctccctctttcttttcctccattgaagcatccttccaagcttcttatccaaggctcatcttggtggtgaaagctccttcttcat

SEQ ID NO: 179491 - DNA, 468 bp, Glycine max
  unsure (1)..(468): unsure at all n locations
ntgatttcctttgttccggagacctttcttttcttatgtgcacccaaacccaatctctgggttcgaagacaaccttctttctccatttgttggcttgtttagcataacttttatttctcctctcaatttgatttttgactctctcatgaaacttcttcacatagttcgcctttgcttcaccttctttatgcttaanaacagaaacattatgcataggcaaaagatcaagaggagttagagggttaaaaccataaacaacttcaaaaggagaacaattagtggtgctatgaacagctctattgtaagcaaactcaacatggggtaaacaagtttcccaagtttntaagttcttcctcaaaactgtcctaagcacagttcccaatgtcctgttaacaacttccattttgcccatcatttgtgggtgacaagtggttgaacataacaacttagtacccaactttgcccaca

SEQ ID NO: 179492 - DNA, 430 bp, Glycine max
  unsure (1)..(430): unsure at all n locations
agcttgtagaccttggttccttgaagatgtcttaacactttctttgcaactttctggtgctccaaaacttgcccaaatatgctcaccaattctacttgaagttattgatgaactcctcttgtatacatataatgtcttgtttgtaagtatgtagcaaagttgagaggagcaccacaagatacgccactgtttgaaatctcatcgtttacatgatcgtaatcaacatcaatgttaccattgtatgtatcttgttcatcttcaacaatcatgttatgcaatataatgcatgccaatataatatttttcattgtatcgatgtgtcaattatgcgaaggaccacatgtaattgcaaaatcaaaatttaacacatcaaatgctctctccacatcctttctcgccgattcttgatattntgcaaataactttcttt

SEQ ID NO: 179493 - DNA, 461 bp, Glycine max
  unsure (1)..(461): unsure at all n locations
gctcaattactccaggatgctgcatggtatgtttattgtctgtatggnggncagcagaggagcacaaaccacaaacccttgcgacaggtacagatttctgattcaaggccagctgggttaccaagttgaccaacgcatccagtttgccttcaagcttcttagtttcagatgatgcagatgggtttgtagctacctcatgcactcctctaatgactatggcatcatttctggcgctaaactgctgggagttggaggccatcttctcaattaaatttctggcttcagcaggggtcatgtctccaagggctccaccactggcagcatctatcatacttctctccatattactgagtccttcataanaatattggagaagaagcctgtctgaaatctgatggtgggggcaactggcacatagtttcttaaatctctcccagtactcatacaagctctctccactg

SEQ ID NO: 179494 - DNA, 389 bp, Glycine max
tggcatcggacttctgcattaattcatcttataattgttcactctcccttatgattcctttttctccaattttcaacaaaaatattcaagggaaatgaaacaccggaaaacgcaccgggtcgtcatgtatttaagattaaaacagactgattcgagtatcgaactcagggaacttgcttattaaacagagtcttattcacaaataaggcattgttggaataacattgataatggacggttaaaacaaaaataaactatttctatggtaaaaacaatagatgcaacgtaataaaagctgacaacaataggtaaaaagagttgggtctttctaacaaacatgctgatgcatatgaagatgtttctctaatcaatcatgcctttgtgttcta

SEQ ID NO: 179495 - DNA, 362 bp, Glycine max
gcagctctttcttttttgcacccaccaccttatcaacaactttgcctttctttatcaatatgaatgttggcattgcctgcaccctgaattcttgacagacctcctgtttacaatctaattacaatatgaacacttgataccactccgccgattttaaatatctaaacgaggatacagcgcacaaaaataataatacatgtacaataatgtacatatactatatactatatagcctgtttctcttgacattaagaggcatatgagtaataatgaaagaaaagaaaaagagcaattccctccattcctccacatcaattctgatgaattccacgttggtgtcctttgcaacatactcttggata

SEQ ID NO: 179496 - DNA, 351 bp, Glycine max
cttctcacattgcgaggccaaggcccttgctagtgacatagataaagcatgaaaccctgtgcaaaattaaaaaacgcacaccccatgtaaatacctagacaaaaaaatctgatatataacgcactcagtaagatgtgaagcacacacaaccctttatcaatacattcttagaatatgtttgaatggaggagtttatagagaagtatcagaaatgataaagggacactacgcgtgtgtttatattagcttattgcgttgaaaacaacttattatgcaaaccaacattggaataacatatacaacggtgtaatcagctatgatccctatagacaatcgatctacatctatgag

SEQ ID NO: 179497 - DNA, 368 bp, Glycine max
cctgcggcatgcagctttcttgtgggcttctatggaggttgtatctttgagcttcaatgaggtcctttaatggtgattttccaccatggagatgcagcacaagacaacaaagaagaggtgagaggaggcgccatccactatggaataagccatggaagaaggagcttcaccaccaagatgagccttggataaaaaagcttggaaggatgcttcaatggaggaaaagaaagagggagagaaagagagatggggggagcacgaaatccatggaaaaaaaagggagagaagtggaactttgaagtatgtctcacaagacttctattcatcaaagttacaacaagtgttacacatgcttctatttatagact

SEQ ID NO: 179498 - DNA, 457 bp, Glycine max
  unsure (1)..(457): unsure at all n locations
tctcttcagaaatcatccagcttttctctatatcgnagtttaagnagcaattcatcttgctcttctttattgtctgaaaaccccttttccaagccatggctcactccccttttctattattgtcaaatcttcaaggcttttggncttctttgcttgctatattcacttgctttaccattatgatcaaagccctaagatacaacttcattgagaactattccaacaaaccaaagccaaaaccaaaactacccccaggcccaaaatcatggcccatatatagttgggaaccttcctgaaatatttcatgaaagaaatgaacaccgaaattgcgtgtattcgcttacgaaatgcctatgttatcccactgacatgccccaccattgccagtgagttcttgagaaaacaagaatgcaactttacatcaagatcactaagcatgttccgtgatctcatcact

SEQ ID NO: 179499 - DNA, 360 bp, Glycine max
  unsure (1)..(360): unsure at all n locations
atgctagcctgggtgagctagggtctagaaaaatccagaaaagaccctattgcccccttccttggtatctttttgttttcttgatcaaaacatcgagtgattccttgcttcgcactgtaactggcgccaaatactataattcgactagcaagaatcataatatcatattgaatgatatttttcggacgaattagggtctgacagttgcccctctttacttatcttttattgaaaatgaaaaggtaagtaaagataaggacactaatttcatttgagcgatcttgttattcgaaatcgggcactagaggaaacaaaggaagtgaaaccaaanaagcaaaaggacatttacaatgaaatatc

SEQ ID NO: 179500 - DNA, 453 bp, Glycine max
  unsure (1)..(453): unsure at all n locations
tgccgcatgcaagcttcttatccaaggctcatcttggtgtttatatcttcttcttccatggcttattccctagnggatggcgcctcctctcacctcttctcctttgtctttcgctgcatctccatggnggaaaaccaccattaaaggacctcattgaagctcaaagatccaccctccatagaagctccacaagcaagcttccatcacctttcctaatgcttctaaactttatgtaataacacctctgcttccttagctcgaatacaacttgcacaatttgaattttgaaattgtggtttgttggtgcttgttgttgttagttgtttatgattccttcttcaacttagtcgtaagatgctaattgaggagattgtttcttctacaaaattntgctgcattgttgcttctgataattgcaaatattgttaaacaatcttccttgctcctcctaat

SEQ ID NO: 179501 - DNA, 465 bp, Glycine max
  unsure (1)..(465): unsure at all n locations
ctcagcttacatggagctacgtcagctcttggtgtttcatgtttttattttattattttgattcattggttntgatatgattgtgtgaaacttgttgaggggttttactccccatgttgtgagaaatatttntgtataaattgtttgtacattggacaagatttgctatattagcatgataaattgttatattgagattatgaaattgtgattaaaattgtgcctaagtgataaattgaatatgtgataaattgtgaaataacatgctgctttgagatcataacattgctattgggattgagtataagtataaagttgaacatgcattgattngtgagatacacgtaaacatgtgatggtggattgtgacgttgtgatatgctaaaatagattattattgaaattggttgtgaataagtgtgtggttaacactttgatgtgaaaaatacttgtgttgtgagttgt

SEQ ID NO: 179502 - DNA, 406 bp, Glycine max
atacatatcgattggggctgagtaatgtcttatatgctcctaatgttgcacaagccttggttttttctcaattagttatgcaagtctaaccaagtttttttttttattaaggtctaaatgaaggaaatgcatcattgcgagttgcttactccatcaatctcttctcatgcctactcaattcagacttctacctcctttcgtcattggcatcaaagactcggtcatcccattcacctctcgtgtcctttattgtgcgcctcaagtccaacaaaattcttattcttgtctcatctggagtcttggaattaatacgagtcataaattaccattcaatgaatcttcttgacccgcacaatcctttagaattatgatatagctgatgtttgcagggggacttctctttgtt

SEQ ID NO: 179503 - DNA, 457 bp, Glycine max
  unsure (1)..(457): unsure at all n locations
attctggtttagatattcgtgaattactaccgtgctatttgaaagttttaattcagnggaaaaatctccctcccagtgaaaatagttgggaatctgtggctaaattacaagaggtttttccgacttatcaccttgaggacaaggtgagtcttttaggcggtggtattgataagaataagcataagccacacatcaccaaggtgtacacccgcaaaaatcccaaggggtgcaaaccacccaacagttacaacccacccaaagggtgtaaactacccaatagttacgattcacccatagggtgcaaggtcaaaagatgtgaatcaaggagacatgacccttgcgaacagtcaaaaccaaccgaaaggggacataacccttgcgaacaatcacaaccaaccaatagatgtgaatcaaggtgacatgacccttgggaacagtcacaaccaaccattatgat

SEQ ID NO: 179504 - DNA, 466 bp, Glycine max
  unsure (1)..(466): unsure at all n locations
agcttatcttgattagacatacgaacaaattttgtgaatttttccattttcatttctacgtaagactcatctagctctaacaatgttgngtcaagcttgttgtcattaaatcttacatgaatggccttttctacagtcaaggttctggagttatgcactctgtatgccttggacaattcaaagtattcaagtaagattctagaatcacactaggagtcaaactttccaagtttatccttggtgtttaggatgaaacgctgacatccaaatgagtggaagtaagagatattgggcttacgtctcttccataattcatagggacttctttaagataggccttatgtaaattttgttctataaataccaggaaacatttacagcttcaacccataaatctttgggagttgagtgatcgttaagcattgttcatgccatctcctgaagagaattttnnttctctcacaac

SEQ ID NO: 179505 - DNA, 391 bp, Glycine max
gcgagctcgaaagacagagtggtgaaatatattatatacggcagtcactagggtcaggaaaaagtgtgatgagctgaaagatatcaacatgaccagggttaaaacattagagcgggaaacaaaaagggcccaaaaggaagaatggagcaagaacaaattctgaggggttctatggggcagcagtaacaagcttaagcttagaaaggccgagagagacaaatcaaggatgaaaaacatggtgttagaggataagttaaaggcttattagaggttgaagagatgtttgacagaacagttgagcaaaacataagagaatatgttgataatcatttatcaatataaggagaaggtgaacctagctgttagtcatgggcagattctggaagatgta

SEQ ID NO: 179506 - DNA, 458 bp, Glycine max
  unsure (1)..(458): unsure at all n locations
agcttccagattagtgtaccaaatgaccgtttctccactcttctatctnggaaaaagtgcattaacaacttttcatccctaggacaagtcgtccctttgtacttgtcgaaatcaggtaccttgaattttggggggatgacgacgtctggtaccaagcaaaggtctgccatgtctgcgaatgaatagtcgccaaagccttcaacagctctcaatctctcttcaatgagatcgagttttcttctttcttctgctgccggaggtggtccttctgtggacaagaatattggctgtgctgggaaattgggctgaggcagtatgatgggtgccaccccctcgacagggaccggggggtagaaatcgatgtctacttgggcatgatcctcatgaacctcgtctaactatcgaggaggctccccttcaaggaccggggaaggaacatgacccgcgtcatcacacat

SEQ ID NO: 179507 - DNA, 432 bp, Glycine max
  unsure (1)..(432): unsure at all n locations
aacaacccatcaagaaaagcatgatatgattgctattcacaccaacaagcccttcaaagccttgcatctggcacattattacaattcatcactactaaaaaaactatattttatgactcggtatctacaatggttgtcatatacccgtcttagaaagcataccggtggcatttttgcaaatattgagatttaaaacaaaggtggttttatttacccgtctttaaatgagctattctatgacggttatttataaaaccgccttagaatgtatttgtgaaaagcaacattaatacttaagatccctggctcacacttaagacttaagagtgagtagtagtgagaggcttctggaatcctaatcactcactctttttcttccccgcaaaccctagagcgttcccttccatcgttccncccagcccccttcccctc

SEQ ID NO: 179508 - DNA, 426 bp, Glycine max
  unsure (1)..(426): unsure at all n locations
agctctacgaatctcacagctatgggggctcatgtnttttatatcgaggnatataaccacttcaagaaggttcatttgctactccaaatgcatttgtacctgcttggaaaaattctggagacccaagaaggaaggttattaacggacattgcttcttcttttgatatgtaggattctgagagtgcctgaatttgggattctgagcttaaattgatggaaatatatatcgagagagatacattgtttatatatcagtcatcagtggccaatttggcaactgactagctaacttgagcaaacaaacaaaagtaactaataactntatttctctaactgctagctcaattcttaatacaacatcaataatatatttacatgtatacgacaaataatggaagaaataagaataatagaatttagtttaaa

SEQ ID NO: 179509 - DNA, 460 bp, Glycine max
  unsure (1)..(460): unsure at all n locations
tgtcaggcacggggcttatgtgctaccactctttataattctacagtganggctcacatggactggttagggttagcaggcctagttatgatgcaatatcctaccacaaacaatggcttcatgaatgcctttgtggagaggtggcactaggaggcgtcttcattccacctgcttatcggagagatgtatatcactctagatgatgtgtcttatttgttgcatttgcctatgacaagcaagctcattaatgatgtcctttccacctttgacagagtcatgatgaagattctgttgatgactcgccttggcattccaactgaggaagagactatagaggcaacaatctcatgtgccagcgtgaagatgacgtggctggcacagttgcatcactggaacgctcgttatggtatgcatgtgggctgcacgactatcttttgccttggcgaagtatatcttgctg

SEQ ID NO: 179510 - DNA, 364 bp, Glycine max
agctgtcaacaagagggggttatttaactatcacgaagcagaaaactaacgaaactgcgcatcatatctcccaaaaccccatacccacgataatcaaaggagaaagaagtccacccaaacctaaaatttcgaagtcccactcgtagacacacacttcacgactccgaaaatgcccttctttcgcgatttggagcagaaacgggcactaaagggtgaagctttgttgggcaacaatggtggatgggagaaaagaacaaaaaggctgcgtgagagagagggagagctgtctgatatttctgttttgctgagtgaggagagagaacaactttttggtttaaataaaggggttctctcttttattatt

SEQ ID NO: 179511 - DNA, 452 bp, Glycine max
  unsure (1)..(452): unsure at all n locations
ctgaaatngaataatggaagctctcgagaaaattatgttcatacttttcacncggantgccgaatcacgtgcataacatatcgagacgctcaaaattgaacaacagaagctctcgagaaattcaaatggtcataagttntcacatggatatccgattctgtgttataatatatcgagacggtcgaaattgaacaacgactcgagaaattcaaatggtcataacttatcactcggatgttcgattcacgcgcataacatatcgagacactctgaattgaacaatggaagctctcgagaaatacaaatggtcataacttttcactctgatgtgcgattaaggcgcatcacatatcgagacgctcaaaattgaacaacggaagctctctagaaattcaaatggtattactgttaactcagatgtgcgcatcgggataaatatatcgagacgctcg

SEQ ID NO: 179512 - DNA, 361 bp, Glycine max
  unsure (1)..(361): unsure at all n locations
agcctggatagnnccccaatttatggntatttttgagcaaatttttgtacaaaatatcgccntatggntaaggttgtctctagaacatttccattggatttaatgatgaaatctatgcattttcaggtgaaaaagaggctaagttttgaattgcaaaaagtaacagttaggctaagctcagcagttgggctaagcgcatatccaccactaagcgtagcttcagcgcgcttagcgcaaaagagaatctggcagagcatcagcatcaaagtcgcacgcttagcgcaagatcagtgcgctaagcccagcaggtgctcttagccacgctaagcgcgagactggcgctaagctcaatttcacttac

SEQ ID NO: 179513 - DNA, 345 bp, Glycine max
  unsure (1)..(345): unsure at all n locations
cttgaactaccgggcgagcatggagcgcattatngtgntttgtgttngactcgaagagtatctcttgttcttcctatataaagatcggcgtaatattctagtagacaatggcatgaactgatcttcatatttgatttattcttgctttttttttttggatcgttaatatatagttgattcgatctgtccttttttttattccatggctcgaccccacttcttggtgtttcacttctgctgtacagagcatataggaacaaagactgccgcgcaaataaggagtcatgcacagaagttctttacaaaggtcaatgggtaccttcttaccttggtttatatgtgtaa

SEQ ID NO: 179514 - DNA, 285 bp, Glycine max
  unsure (1)..(285): unsure at all n locations
acggagacgctaaaaaaanatcaaataccagagacttacaagttcacttatntttattgatctgagctgatcaatgaccataccactcaatttagacgggtaaagtttataatcatctaccacgccttccacagaaaataaatcttgacgatgacgagctgttcctttacacccactaagctacaaagaattgacaattcttaagtgcgtgactggcttatcaattctctacttttcaacgcacgctggatgaaaattccttcttttatgtcttaaagcatcacg

SEQ ID NO: 179515 - DNA, 473 bp, Glycine max
  unsure (1)..(473): unsure at all n locations
cctttaacaacanacaaaacanaancnnaccccattaagttatgttggttcancgancacatgatgtcattcaacacggttaaaaatcaaagctttgggtatatcatttagcttgagatctcctctaacatcaacccataatgtcttttcttagtctcactctcctcatttttacaggactaaaaatcatgaaatctattcttctgagttacatctcttgtattcatcaaaaagaagaaaaaagacttgcaccacttgcggccttgtttgtacatgtttaaactangggtgtgcaaaaaaattgggtcagacctaatcagactataactaacccgacccaacctagtttcgtactcaatatgggtctagagaaaaaactgccatgttttataactagtttggttcaatctaacttgtttcgngcaaaggaactcagtgacccgaactagactctctttgattcctcgcgtctc

SEQ ID NO: 179516 - DNA, 462 bp, Glycine max
  unsure (1)..(462): unsure at all n locations
ggctgcagctttgttaccaagatgtgaatgngtatttatagatcaagataagcctatgacttattatgatgccattattgagcctaaatctgagaagtggcttaagaccataggatctaagattgaatccatgtacactaacttggtttggaccttgttaagtcaaaagacatatgtgtcttaagatgaatcaggatccttaattattttgattaaatgctaacagatacaaaggttaaaattgtgtcttatgtgatctgagaacatgcttcatgaattttgataagatgtttcacatgatagcaagctaaagtcgtgatctgataaaatattaaaggatgacatttaagacttcatttaatactcaatttgagatttgttttgcaaatacattttcctaaaaatggccaccaaaagaagcactctgctattcatacctactctgatgtaaaaggaaatggt

SEQ ID NO: 179517 - DNA, 362 bp, Glycine max
  unsure (1)..(362): unsure at all n locations
agctntaagcaactataatatctgtggagttgatactgccccatatgactttctctctctctaccacctattttccccatgccacttatgagcaccaaagtaacctaagtttctcttcatctctgtcggcgcttgcaacaaaaattaatcaaaatgaaattaaatagaaaaatgcttaattgacacttattaatctatccaacacaaagagacatataaaaaatataaatatgatgagatttaattatgatgtgtcaagacagcttgaaataaaggattaataagatgttcaaaattaaaaaatatttatatatcattatacaatcaaatattattcacataagtaaaactgagacacagcc

SEQ ID NO: 179518 - DNA, 313 bp, Glycine max
cttcatcactttttatcagctggttcggttcctgaaatgccctactgccattgtgttcattttggtatgataaatcttgatgaaagactgatagtggttcattggcttcaaacagatgccatatattcctcaacacctagaggtgccactgcttaattttagcttaatgtgttgttaagtctccgggtttgattaatatcttttgcttatttcacagccaactcctcatattgggcaacttgcagctgccgcctcttaataatatgcccgcttttatcactgagttgaatgagagaaactgctctacaacata

SEQ ID NO: 179519 - DNA, 405 bp, Glycine max
acctcatcagaagcatgccttgacaatatctctatcactgaaatgtcaataagggtctcgaacttgggtgtgattgttctcagatatgccttttgaggatccttcaccatctcatcatattctttggttccttcttctgggataaaccttctggctagagttggacggttcacgatataacctccataagggtattgcccaaaattaacagctgcatggagagccgaagctgtccatatgataatagagcaggattgaatgagatcctccacagtctgcagtttaggccaccaaggcttatcttttaagtcaccatgacccttctccacaacttccttccaccatgcttgaagattagtgtcttgttgaattgctgcatcttgtgggaatacacagacacatact

SEQ ID NO: 179520 - DNA, 290 bp, Glycine max
  unsure (1)..(290): unsure at all n locations
acccaatccacacaaaanaggattatacatttataaatttactcatttaatttggagcatcattatgtggtgaatgtgttgccccatccatacgatgccttttcgatttaattgagtgattgtttttggcatttataggcctcccgatatatattactctagggctttctattttattaggttatttttaggaatatctaagttttaaaaaataatcttcatccgtcataatattgttctgattaaaaattaaattccaacattcatctgatctttatagtccatgtaat

SEQ ID NO: 179521 - DNA, 431 bp, Glycine max
  unsure (1)..(431): unsure at all n locations
tgagccttttgaaatggcacataaagagcatgaattgtgggtgtgtaactctcaagncatcaactacttctgcctgagaggtaccctataggtactggggtattgacgatgggagcttcccataagtggctgcggatattgaaataccagtgctcaaatgaaccaaggtattgtatgaccactccgtaataggaagatacttgaaccactatgatggtcgatcatggacaaacgaatggaagtattgctctaaaacatggttgaggacctccatctgtctatcgatttggggatgataggcagtgctcatccatagcttcgtcccacataagcgaaagagttcccgccaaaaggcacttatgaaaagaggatccttgtctgacacgagactacgcatatagccatgtaatttgtagactatgtcgaggaac

SEQ ID NO: 179522 - DNA, 447 bp, Glycine max
  unsure (1)..(447): unsure at all n locations
ctgcgctgcagctttataccatgagctnnnaagtttgggtcattttataaagctgttataagtgagttgtaattgggcattttagttttgtactcccttatttgaattttgtacctttcattgtatatgtattttggaatgtttatttcaaaatgaaatttttttgaaatagaaaagcaggcacaatagctcatgatctttctcctagtggctggcttaagtgggccaataaggcacctgttaagcgaggtcaatgaccttccaaagttctccatactacatccagttatggaaatattttcagttaggctctattgcagtacaacttgtattttcataaagggacgcaatcccagggtctcccttggcgaaaccatgtcaaccaagtcaaggctaaccctaaagaaaccaagttgatatatccaagttgtttataaccatctttta

SEQ ID NO: 179523 - DNA, 407 bp, Glycine max
  unsure (1)..(407): unsure at all n locations
taaaactaagccttgccctaaacccttatgtaaattgacagcctcgtttctctttttttgaanacccactaaaaactgcctaaccccccctgctgttactccataatatattctgcaataactgcttaaggcagttacatatggtcctaaatcactacagatttagttacgattaaccctttctgcctaactagggtttcgaaacatcacaacagagatagaccattgaacaatggattttcatcattaacatacaacaaagacataccttcgatggaagcgcagacacgaactccacaaacgcgaactcgacaatgtggttgcagtcacggaagcgcagcccagtttgcgacaaacacgaactcatgcagaaggagatacaacattaacgctctgngagtaccctt

SEQ ID NO: 179524 - DNA, 378 bp, Glycine max
  unsure (1)..(378): unsure at all n locations
gaacccncaccggacgaatacactgacaaaaacttatcttctccttcttggacaaagtatggcaggctgggggcaagtaaattttcttcccatcacaccttggatgcaactgtgatcgtatacccatatcagctagatcttgacgggtattcaagccatccttcatcttgccttgaatgttaaggagcgtcccaatgacactatcacagacatttttctccacatgcataacatcaatacaatgtctaacgtcaagatcacaccagtacggaagatcaaagaanatggacctcttcttcatatgcaactttgacttttatccttcttttgggtcttcccaaaacagtattcaggggtccaacccgctgatatacctgc

SEQ ID NO: 179525 - DNA, 444 bp, Glycine max
  unsure (1)..(444): unsure at all n locations
cagatgaagatggatccgtggccaccttatggtctcctctttgtacaataacaccannccttgcactgaattattgggagtgggaagccatcttctcaatcaaattcctagcctcaacaggattcatatcaccaagggctccaccactggcagcatcaatcatacttctctccactgttctaagtcccttatagaaatattgcataaggagttgctcataaatctggtggtgagggcagcttgcacataatttcttgaatctttcctagtactcatacaagctctctccactaagatgcatgatgcctgaaatgtcttttctgatggcagtgcgtctagatgcaggaaagaatatctccaagaacaccctcttatggtcatcctatctgaaaatggacctggagcaacgtgtacattcatcttttgcactgctccaaatatgag

SEQ ID NO: 179526 - DNA, 474 bp, Glycine max
  unsure (1)..(474): unsure at all n locations
ngagattgtgaaaggaataaagaccatctgcaccaacaactccatgaagaaggactctattggtcccctgagatttaacaagacatatatgaggatggaactcaaagaaaaccgaattatctttagcaaattgactcacactaataaattttttgttattgaaggaacatgcaataatttgtgaagtttaaaagtaaattgagagtcattangagacataaatgaagtggaaccagcaccaaaaatacttaaaccttcaccatttcctatgaaaatctgatcagggaactcaaagaaggactctattggtcccctgagatttaacaagacataaattgagagtcattaggagacataaatgaagtggaaccagcaccaaaaatacttataccttcaccatttcctatgaaaatctgatcagggccatcaaagtgaattatattgtngatattctaaggttcaccaggtacatgg

SEQ ID NO: 179527 - DNA, 408 bp, Glycine max
gctgaggattatggggtacccatcacatgtggtactaggtgtcgatcggtcgatggtgcaagacaattctccacatccacaaatcacgtataaacccaccatcccctgttgcccacctccaactgagctcacgtactcccacgtagcccttatcctcgttcctctcaacaccgggtccccatcaatcctcccaagcttccacaacatccaagtaattccacatccaatcatcatgaactaacaaaaccaagcaaaataggcaaaggcagaatactctgcccacaacacaaaccaatatcacagcttttcacatacaaataccctagtaacattctcttcgttccaattcgttaaccgttggatcgaactcgaaatttactggaagtctctagtacatacagtctacat

SEQ ID NO: 179528 - DNA, 468 bp, Glycine max
agcttgtctcatcgtttatgcgagacggattctaacattctatctatcatcgccaagtaccaagaagagttaggtctagccacggcccacgagcatagaatcgcggatgagtatgcccaagtatacgcggaaaaagaggctagaggaagggtgatcgactctttacaccaagaggcaaccatgtggatggatcggttcgcccttaccttgaacgggagtcaagaacttccccgattgttagccaaggccaaggcgatggcagacacctactccgcccccgaagagattcatgggcttctcggctattgtcagcatatgatagacttaatggcccacataattagaaatcgttaggaaacttgtatgggctctcagaccttgactagatatgactctctttttgaaataaaatgagttggtcccatgtttctactccaaaaagcttgtgcaaatcaaaatcactctaca

SEQ ID NO: 179529 - DNA, 470 bp, Glycine max
  unsure (1)..(470): unsure at all n locations
gcttacgacacttagagatctaatcggcaaggcgttttcngttgnatttccattctaaccgagggatgcttacaagcttgcaacatctacatctgagtggaaattctcttcttggagaaatcccttctgaagtagggaagcttacagccttacgatatctagatctaagttataatgtggctattcatggagagatcccttatcactttaaaaacctctcacaactgcaatatctttgtcttggagaacataatctttccggaccaatacctttccgggttgggaatcttcctatctttcatactcttagacttgaaggcaattttgatcttaaaattaacgatgcaaagtggctatcttctctctctttttaacaactcttgacctgacatcattgcataatcttggctcctctcgttactggcaacaagtgatcggtgagcttataacacacttgagagaagtgagtc

SEQ ID NO: 179530 - DNA, 362 bp, Glycine max
caaagtgcagccggaaactcgggccttttagatctatcaaacaatcagataaaggaacaagttccagattgttggaagcgtgtagatacactactggttcttgatttaagccacaataaattgtctgggaagattcccatttccttgagcaccctcgttaaattgaaagcattggttttaggctacaataatttaatgggtggattgccttctactctgaagaattgcagcaatttaattatgcttgatgtgggtgaaaatatgttatccgcgccaataccatcatggatcggagagagtatgcaccaactgattatcttgaacatgagagggaataactcctctggacatcttctcaatca

SEQ ID NO: 179531 - DNA, 433 bp, Glycine max
  unsure (1)..(433): unsure at all n locations
actaagctcgagtcaagcttttaatacatgtcagtcatcttgcgtgcatactatgaaatcaatagttttctaaaaagaaatactatgaaactacagagttatatntgattttttgacaaattaacgtggagtacgtgcatctgagacttggaaccagacaaacattacgtctttaaccaaggtgacatgattttatgagtaagagtctaagacgcatagttccaaataatagagcataccaacctgttaatctgaaaattgaattaataaatattgtttaactatctttaattgattgctttaacttttacaaaatggtaagattgctctgcattacttggtttaatatatagagaataagtgtgtgtttctctctataaaanaaaagtgtggtttattttcacaaatcacacatcccaatatcccatgacat

SEQ ID NO: 179532 - DNA, 439 bp, Glycine max
  unsure (1)..(439): unsure at all n locations
agcttgaatcgacagggactttggtgggataagtggtgccgctattcatagcagcgggacagactgactaggagagagggggtaacgccattggtgttggcaggataggctgagtaggagagaggatggggtaccaccattggtgctggcgggacgtgccaacgtgaagcatgccgtcaataagaatggcgggacatgccaataatttgacatatgtataagttcatttattcaaatttacataaaaaaaatattctattgtttatgaaaaatacaaaaaaatgcttaattaataaaatagtatcaacaatacaatcatgcatagacactttagtctttaaaatagtgaacgtgtactaatttattccttaagaaattattaataacctatacttataatcttgatagaatatctagtctcctttnttttctcataaat

SEQ ID NO: 179533 - DNA, 273 bp, Glycine max
  unsure (1)..(273): unsure at all n locations
caactcaagttaacttctctcctttttcttcttaatntgtctcccctctctcttctttctcttctttctcattgacatctctcagcttttatcaagtcacttgtgggaagctcttttcatggtattcctatgatggcctcttaccttttcttgcttcctgatctcatgggaaatacattagacctatgactaaacacctctaagtcacaacactcatcatggataaccaaactcagtaggtctaactcatatgtttgttactcctcatgtttc

SEQ ID NO: 179534 - DNA, 483 bp, Glycine max
  unsure (1)..(483): unsure at all n locations
gaccctaagcaccgcggctgcaacttgcgaaggctatctttggagcttattatcaactgncctaactctttcagactggcgactcctaggctcttgatcttgacttgatagaacctctttttaagcgaaggcgcttgactcaatcccatgttcttactaaagtggaataaaaaccagtgcgaattaagactccgacatctatcataggtgaaatggatgaatgcatgaagaaatgcgtatggcatagatgcatttaacggatacgagatcctgggagattatctctttcttaaatacaacatttgagcagcatagcactcgatgcatgcatttaagaaggcgacacagaccttccatcttctcgtgacaaagtgaggggatcaagacgcaacccgtgcatgatgacatgatgcagatgcgaaaaagggggaagggtaacaaggagatgtacaaaacatggcaatatcctcatataatcacaca

SEQ ID NO: 179535 - DNA, 395 bp, Glycine max
tcggaagaaagcgatgaggtacaagtcctaaaggcaaatcttgaaatatcccgggtagtcaaagagaagttcaagtccataaccatcaaagtctgaagagagtatgatgaactaatggacgtcaatatggccaccgatgaagccttggaatgagaaaccaagaaggcccgaaaggaagaacgcgaccaaaacaagttttgaggggctttatatggcagcaatagtgagctcaagctccgaagaggtgaaaggaatcatcacgggtcaaaggcatgatctggaaggacgagctaaaggcttgccttaggtcgaaaagaaatttgtcccaatagttaaagcgagactgaagggaatatgtgggccatcatcgataagtgcaaagagaagctaaatct

SEQ ID NO: 179536 - DNA, 445 bp, Glycine max
  unsure (1)..(445): unsure at all n locations
agctnttctttacaatcaatctatcaatttcatgaaaagaaacacaaattccatcaaaatcatgcactcaatttaaaataaatacatacacccatttttcacaaaaagataaaagtgtttcactgccatgtcatcaaaatcaagttaaactgttcaaaatgctttagaataagtaaatcaactatccataaatagaactagcagtgtatataaacataaaagaatttctatactaaaaccataatcaaaataataataaaccaaaaagcaaaaagtgtcatcaggaatcaaaattcttgtgactggtccttggtgtcctatgtctgaacatcctcctcatctgtcagatgcaatactggagtagctggaggagaagtgtccatagccaggactaatgtagtcgtgtcctctgtcatctctaaaaaaggagtggangggtctgctg

SEQ ID NO: 179537 - DNA, 370 bp, Glycine max
tctatggaggctggatctttgagcttcaatgttgttcttctatggtgattttccaccatggagatgcagcggaagataaaggataagaggtgagaggagacgccatccactatggaataagccatggaagaaggagtttcaccaccaagagagtgccttggataagaagcttatagaggaagcttcaatggaggaaaagaaagagagagacagggggggggagcatgaaattgaaggaggaaaagaaggagagaagttgaactttaaagtgtgtctcacaagactctcattcatcaaagttacaacaagtggtacacataattctatttatagcctaggtaacttcgttgagaatcttcatggagaaact

SEQ ID NO: 179538 - DNA, 189 bp, Glycine max
  unsure (1)..(189): unsure at all n locations
agctttagccaaaggatttcttgaataattccttngatagcccctttgagcctattttcccctttctttgttttgaagctcattacaagccttaagtgaaaaaccatgatatcaccttacccttaaggaatttcagagctttggaattgttttgggaataagctgggaataagtgtggggggggggggg

SEQ ID NO: 179539 - DNA, 429 bp, Glycine max
  unsure (1)..(429): unsure at all n locations
agctttttcctctctttctctcncgcncgttcatttgagccttacttaagcatataatggctttattctcctagctcatattcttacttgagggccacagtcctctattttgcaagtccctcctcttatcaaaggtacctctctaagctgacatgtgaagtccgagaccccatttcagccacatccaccttgacgtgtcacggttctagattntgataagaacatcatttgtgccaatatttaatgggcttaacttctttaactagaatgagcaagtccaatttcaccttggtgtatggatcttgatcttgctatattagaagaaaagcctgcagctattattgattctagtagcaatgatgagaaagcccattataaagcttgggaaaatctaacagactcaacctaatgttcatgagaatgactgtt

SEQ ID NO: 179540 - DNA, 423 bp, Glycine max
  unsure (1)..(423): unsure at all n locations
tattgggatcgtgaaggtggttggaggctaatttancattggctctctcgattcgttccatattggacttggatcgtgtggattccgccatggacaacactctcaatgaaggcaccaaagttgttatggccgaaatccctaatctgcaatttcctagaattcgagagctaggactctccagaagcaagatagagaagatgatgtttattcattctgccctctttcattacatggtaattgctttatatagtattcttgtgaattgatactaactgaattgaaaaattctggtgctatggcctaacagaaaaaaagctctaaaagattcaagaagattccatcctaacagaattgtatagctcgtcgctnattccataatgggccactcttagccacgtcagctttctttttcctttacacaat

SEQ ID NO: 179541 - DNA, 458 bp, Glycine max
caccgacgaaaggatcgaagtgtgtctatattatgcaaattcgattatcctgctctgatgaataggaagcttgaggcaaatgaacagaatgagaaggagggatgaacctatgctgtgactgtcgttcctacatgaccaaatttcccaccagctcaacaatatcaatattcaaccaatattagcccttgtcacaacctacccttctgcgggagggcgacgcgttgactcgcgggatgcgtgttccacgaaaggaatacgcgcggagtcgccaccaacgtttatttgaggaaaacgtcggaaaaaccggataagacgctatctacgaacttttaagtgaaaggttcgggagttgtatttacgcacggtgaaagtattagcaccccacacgtccatcccaacggacggcagcctttaatcgaatgtgcaaacatgactttgattcttacgttccctttatg

SEQ ID NO: 179542 - DNA, 407 bp, Glycine max
  unsure (1)..(407): unsure at all n locations
acgctgcagctttaagcagctacancannggttatgtttttttggaccactttctagcctccatagataatgtcttatatgttgaaggtctaaattataacctccttagcataagtcaattttgttatattgtttccttcaacaaagacaagtgtatagtcaagaaaaaatatggcaagtctttctttattgccagacgccacaacaatctatatgagattaatctaatagatgttagtcaacaaaatgtaatgtgttggctatgcacagaagatgaaaaatggctttggcataaaagacttgggcatgttaacttaaaaacatatttcaaaactatccaaaaataattaagttaaaggattgcccacgatctgttggacaactcatattctctatgatgcatgtca

SEQ ID NO: 179543 - DNA, 472 bp, Glycine max
  unsure (1)..(472): unsure at all n locations
tgaggttgggagacagtcattggttcctccacccattgttcatttgtgatcactgctacctctatggtatcattagagaagaagggaaagtcattccctcctcatggacatgaaagagatgtagttcttccgagaagtcaggaaaagctcatatctcttgttactgaaggaaaaggaaaaaataatgcacaacaatcatggagtgaacccactgccagaagaatgccaatgccccatgacggtccagctaaatggaattcatcttgccaaccatcaagggccctagaggatgatgcatcttcttttgccttanaacacanaactcaaacacaagaacagatgttaagcagtgaaagatattcatctgggtctacaacgagtgatatgcaagtaaaaagggtatcatcatctatgagtgctgtgaatggaactaaagatcttgttgctatgaatagacgtctaagtggtcgat

SEQ ID NO: 179544 - DNA, 423 bp, Glycine max
  unsure (1)..(423): unsure at all n locations
catatggagctacaaacgtcttggaatcgatacatacagatatttgtgggccatttcatacaccttcatggaatggtcaacaatattttatattattcatagacgattactccagatatgcatacttgtttcttatacatgacaagtcacaatctttggatgtgttcaaaatatttaaagttgaagttgaaaatcaacttaacaaaaagaataaaatgtgtcagatttgaccgtgatggtgaatattatgacagatatgacggttcaggtgaacaacattcgggaccttttgccaggtacctagaggaatgtggaatcgtcccacagtacaccatgccagggtcacctagcatgaatggtgtgctgaaagatgacacatatctcttaaggatatgataaaaagcatgatntgtcattctaact

SEQ ID NO: 179545 - DNA, 451 bp, Glycine max
  unsure (1)..(451): unsure at all n locations
ggtagaatggctacacatgatacatgtcagggctaggtttggtttaatgtatttatggatgccccacattatttccatgacacaaattgcaaaatgatgatttggaaactttatgcaaaactggtcatgcatgcgcctatgcggacgctcaagtgtcataattttatggtcaggtgatgctagggttcangattcatttcctctatattaaatcaacccaatgtttccaaaatatgttcttctatcaatntgtgcattcctccaagtccatatcgggcgtccggggaaattttcacagcattcacccttcaggtgtagacacgtttttttcttaaaaatcggtatgatcatgaatttttctcaagaaaattggaatctctctttaaaagctgcggttttactaacacttattctcttctccgcttttcttactgccttccccctttttcta

SEQ ID NO: 179546 - DNA, 483 bp, Glycine max
  unsure (1)..(483): unsure at all n locations
ctgaggcatgcaagctcgagcttggntcaacccngtaatctatatgaatgttttattctgancgccaattcttcaacaacatctcatagggatgaatgactcgggcatactttaagcttatgcacggaaaatgtaattatgaaattgagatgcccgaagaaacaccatttcctagttaaccatgcattaggtaccatgttcaattattttgtttttaagtgaaacgggtttatgatcccaacatggttggctcctaacacatgaaactaagaatgtagtgtgaagttccacgcttcccccttctttgtttttgttttgtagaggaaaacgcaaggatgatcaaacatgaaaacaaatggtgtgcaatnttgcagatcaaaaagtttggtgaacgcatatgcatgatgatgccatgactcatgcacaatgtgaggctggaatatgataacggacaaatgcacgatatgtccattatgatgttat

SEQ ID NO: 179547 - DNA, 474 bp, Glycine max
  unsure (1)..(474): unsure at all n locations
ggaccttaaaactaagcttctgggggacatcttgcttgcttccatctgactttttcatatattctgccttcttctatattcagatggggaatgcctctaacagcacctttgtcaatgattatcttcatgcctcttaagtgcagatgtccaaatctttgatgccatattttgacttcatcttctttggagaataggcatgtggaggagtaactggtttcttgaggtgtccataggtaacagttgtcctttgatctgctgcccttcattaggacttcactcttctcatttgtcaccaagcattctgactttgtgaagtttacattgaatccttcatcacatagctgactgatgctgatcaagtttgcagtcagtcccttcaccagcagtactttgtccagactaggaagtccatcatggactacgctntccattccagtgatctttcctttagaaccatctccaaatgtcacatag

SEQ ID NO: 179548 - DNA, 492 bp, Glycine max
acctgcggcatgcaagcttgaggatatggcgaccatcatattggattttgtggcggccgggcgatggcgcaagacaattctccacatccataaatcacgtataacccaccatcccctgttgcccacctccaactgagctcacgtactcccacgtagcccttatcctcgttcctctcaacgctgggtccccatcaatcctcccaagcttccacaacatccaggtaattccacatccaatcatcatggactaacaaaatcaagcaaaacagggcaaaggcagaaaactctgcccaaaacacaactcaaaatcacaacttttcacatacaaataccccaataacatttccttcgttccaattcgttaaccattggatcgactcgaacatattactggaagtctcaggtacataagtctacatttcgaccgttgggatctgctagcaaatgtccacaaccccatatgtactacccttttcaaaccatccatacaca

SEQ ID NO: 179549 - DNA, 294 bp, Glycine max
atctctacccactcaaggaagggctctcaaagaagcttctcaatgaaactgcctacgctataaatagaagcatgagtaacactcgttgtaactttgatgaatgaaagtcttatgagacacacttcatagtttcacttctctctctcttttattccttcaattacatgctcctcctttctctcttactttacctccatggaagcatcctctccaagtcacattcttggcggagaagctccttcttccatggcttattcccttgtggacagcgccttctctcacctgttctccttt

SEQ ID NO: 179550 - DNA, 409 bp, Glycine max
  unsure (1)..(409): unsure at all n locations
agctttgggagacaaaatttgaccaatatatttatncaaaaagaacgcntatctagacaaggtctgagagaccatacaagtttcctagcgatttctaattatgtgggccattaagtctatcatatgctgacaatagcctacaggcccatgaatttcttccggggcggagtaggtgtacgccatcgacttggccttggctaacaatcggggaagattttgactcccgttcaaggtaagagcaaaccgatccatccacatgggtgcctcttggtgtaaagagtcaatcacccttcctctagcctctttttccgcgtatacttgggcatactcgaccacgatcctatgctcgtgggccgaggctagacctaactcttcttggtacttggcgatgatagctagcatgttggtc

SEQ ID NO: 179551 - DNA, 461 bp, Glycine max
  unsure (1)..(461): unsure at all n locations
tcaacacatttaagggttgggtgcattctgagttttctctcaagtntactgaccacccattggctatttacttgtttgttgttcacttctatgcaacaattatggttatgcttaaatgactttatctgaaaagagtttcttacttcattctttgcacagtagatctccccatcacaagatgccttcttgcattttgctctactcctctgtttatcattcgtcttccacttgaactccttgcccatcaatatgctatactccctcaaggcgaaattaaattcatccaaagtaccaaacttcatccctaattccaacttctgttcaccaactccactactctgactatattgaggataaacttcaacatccttatcttcatcatcactattaatggggatgttaagnctctctgaatgataaccatttgtctcaacttcaacttcacttcatcatcatacaag

SEQ ID NO: 179552 - DNA, 471 bp, Glycine max
agcttatcttcattatatcattaaagcattaattattaccttttgctaaaaaaattctgtcctagacagcctctcctctaaagtataccaaataccagcacaagaaaaactactacaccagccacaattgcagccacggaacctgcagacatgctacttccattttctgaggaaaggatgaagtctgcttgattgttatagaagacattgttatacgagcttatatggcatgttttaattgttcctgggaatataaagaatattcccaactaattttataattaaccaacacattttttattaaatacttaagaataatattctcatgttttattttcaggaataatacttccaagacaaaaaaagttatctatgagacaaacactccattagtagttaaagataagtataactaactgggatttacaggtatagctgatataagacgaccatatacggactaaatggata

SEQ ID NO: 179553 - DNA, 426 bp, Glycine max
  unsure (1)..(426): unsure at all n locations
tgaccaatcccgacccaacccgggcatagtcggtcgngtgaacctgtgatgtacctaaacaggcgagctcctggcagtcaacagataaaaggaaaataagaccacaaagcaaggaggcttgtggtggctggccagctgtgaattttgtgtaatatgtggattgtggcctctggtaatcgattaccaagggtgggtaatcgattacaaggcttaaaattgaggacaggaggctaagatggtctctggtaatcgattaccaaggggtgtaatcgattaccaggcttgaaaacgaagtcaggaaacttagggagcctctggtaatcgattaccagcctgtgtaatcgattacacagaggaatgggtcactggtaatcgattaccaggcatgtgtaatcgattacacagtgtattattgcatatttcatg

SEQ ID NO: 179554 - DNA, 415 bp, Glycine max
ggctgcagcttcggcattaattctgtaagtttttatattacgggactcaatcagacatccgagtaaaacgttagtgtcgtttgaatttgctcagagcttcgataatcaattttgagcgtctcgatatattacgggactcagtcagacaaccgagtgaaaagttattgtcgtttgaatttgctcagagcttcaacattcaatttctaacatctcgatatattacatgactcaatcaaacatccgagtaaagagttattgtcgtttgaatttgctcagagcttcaacattcaattttggtcgttttgatatatgacgggattcaatcggacatccgagtaaaaagcttttggcgtttgaatatgcctagagattcggcattcaagtccgagcctctcgatatactacgggactcaat

SEQ ID NO: 179555 - DNA, 203 bp, Glycine max
  unsure (1)..(203): unsure at all n locations
gcacgctttgtattctgttaaaatgcatgaagatagatcagtctgagaacaattgggttcgtttaataaaatgattctagatcttgactatatcgatgtcatcattgatgatgaggatcacgctntgctattgctatgctcttcgcctaagagttactctcatttcatagagactgtactatttggaagagactctgtttctc

SEQ ID NO: 179556 - DNA, 420 bp, Glycine max
agcttgccacccagctcgcccaggcgagttgagctcgcccagtttatcaaggttgcttcctccagaagcaacagccttctggaggaatcttctggagggcccaagtgggcctggtttctatttgcacctccctgtttactaaatgcaccccctttctattttttttgtaattctttttccgtaacattacgaaactttacaaatttcgtaacaatacatattttccttccgcaaggttacgaatccttacagattatgtatttactcttttttagctttcgaagaagttacggaaactcacggattgcgcaaaaacacctcttttcgatttccgccacattacggaatttcacgaatcacgcaagcctgctttctttcgaattttgagacgtctcgggacttcatttattgcatgtcatc

SEQ ID NO: 179557 - DNA, 445 bp, Glycine max
  unsure (1)..(445): unsure at all n locations
cttatggcgggttggtcccatgataaataaaatgtgtgttttatatactattaggntattgcgagagttcgttgttagtaaatcacacatagttgttgtgtaggtaggtgtgtgatatttctttgtttgtggcttctaagggagcaatgaactcaccctttaaacaaaactttttatggttagatggtgttgagccgaatttaccctcgtctatggattatcaagtttgaggttaggtggacccacaacaaaacatgtgaatagtgttggaattggtggttgtttaatttctccaaataatacacctgtgcagatccttcttaaaatccaacctttatgtccaataatgaagcaaaaataaggattaatagtgggttacaatattattgatctacgccaaacacgtttgataagggctttgagtatcatcatcattaaccataat

SEQ ID NO: 179558 - DNA, 466 bp, Glycine max
  unsure (1)..(466): unsure at all n locations
agcttgctctgtgaagaagtttcttctgatatatctttggacatatagtcttataaactggttctccaaatcttataaggaaatctctttcaaaaaagttaagtttttcttaacacactattcaatcccttgtagtgtgttgcatttatttcatggattctcatgtttaaaatcaatttgaaacatgtaggaattaatattagaccccctacgtttttgtgtttgaagatttgggtcaattagggagcaatgaaatccaaattatgcagaaaatcggacaaaatgtaagcacgattaagattgctctaggcttaaataaatnttttttgtatctataaaatagcgatgattctgattctggtacctaactcttttttcggactcgacaaatattatttattnttaacaaaagatatctacatgacaataacttgactgttaaataagtaattcttccatgatatgg

SEQ ID NO: 179559 - DNA, 402 bp, Glycine max
agtaatatattaaattctagaggagaaatattctaaaaacttattccagcgtataataatacaccaagacatctgtcttgtataatcccttaagttatagtaagtcacatcattccaagatcacttgaagatactgacatttgaattgttaacaccttgatacatattaaaatgaagtaataaaacagttaagctttgttaacttaaactagggcttcagtcaagcgtttccaaaccctgttgggagaggggtatctaatagcatgtacatatctttcccactccccccaccttgggctaatttcatatccacaaattgttaatctggtagtatacatgcagcttacactttaatgcaccacatcaaatcatagaaaagagacattatgatagtggaattca

SEQ ID NO: 179560 - DNA, 395 bp, Glycine max
  unsure (1)..(395): unsure at all n locations
acctctaagncacctgaggcatgaagcttttatagtatatgntncaccccagttgttcccacttcatcacttgcagagaaaaggccaaaggaacaggaaaagagcaccaaagcactgagaaccagattgggatgacgacaccacagaatcaaattgaaacccatgttggtgtgatttggaggcaattctcagatcatggaaacgccacaaagtgagtgacccacaagggtantgttagtggatgaataattaaataataacgagaaatctttatcagtggggaatgtggtaatcatgagtcaggggctattatgtacttaaaaataatcacacaattgttgacacaaaatctatgatacgatgatgaattgatgatgctgtttgcctagttaaaa

SEQ ID NO: 179561 - DNA, 412 bp, Glycine max
  unsure (1)..(412): unsure at all n locations
ctcaagcttatgtttgtttgatgcataaaggtaacagaccttttctttatattatgtcatatagagctacatacgtcttggaattgatacatacgaacatttgtgggccatttcatacaccttcatggaatggtcaacaatatnttatatcattcatagacgattactccagatatgcatacttgtttcttatacatgaaaagttccaatctttggatgtgttcataagatttaaagtttaagttgaaaatcaactcaacaaaagaataaagtgtgttagatctgattgtgatggtgaatactatggtagatatgacggttcatgtgaataacgtccggagccttttgccatgtacctagaggaatatggaattgtcccactgtacatcattgctgtgtcacctagcatgaa

SEQ ID NO: 179562 - DNA, 481 bp, Glycine max
  unsure (1)..(481): unsure at all n locations
agcttgaacactttaccaacacatatcaatttgtttcccaaagtatatcgatatacgagaaacaaattgaattatggatgcttcataagtttgggtacactactatatatcttatctaactttaacaacttttttattgtttaatacttaataaaaaatattatcaaaagtcttttgatcaaattcaaaaaatgttgttaaataataaataaatgttactgatattttttttaatattttatcaaatattatatataatctgttactaaaatttaaaaatatcaaaaaaaatttaacaacataagatatatgaaacatttcataaatatcacaaaaatatattaataacatttattcataatcttgtaaaaaaaattaaatgtcgccaaaagcttttagtaacatttttattagcgttgatacnaaaatatactaaatatcatattgttagtagagatacttcaacaatatctatatatac

SEQ ID NO: 179563 - DNA, 445 bp, Glycine max
  unsure (1)..(445): unsure at all n locations
ggtttcataagatctccatacctggctttttctttttttcacctaatctaaaagtgactacttcctattcactgctggttctggtctatccactggtggttttcctagcttacctcaaatttccaaagatataaacaatcctggctggcccaaataaatacaatttgacagagattcagcattactccaaaatttgttcaagctcaaggctctcttggggacctaaaattctttaaccaaaggcatttctctatgccaatgcacaccgtttctctactggaatatatacaggcttcctaggggctaaacaaaaccagtgtcgttgtctatagatcccaacctccaatttaatgggatgctggtgatctattagaagatntatctctatagagaagatagattggtagtttaatgtacttaatgacctcaaagttgacatcacatg

SEQ ID NO: 179564 - DNA, 412 bp, Glycine max
  unsure (1)..(412): unsure at all n locations
atggaagatgctgtgactaccttcttcttttggttcatcttatctcatttgccaccacttgttttgtatgttgccatcaacaagtgccacgttcactgctttggttgacacaagggaagttatcctacaagagtagcttactgccactgctatatgacaactaagtgtatggaaaatcctaagctagattgacaggatgacatattgacatattagcgagaagctaatnttgatatttgcataattgactgagaaggttgtaaaatgagtatgtcttatgttcaaagcagcttaaagataactacgtctcattgttaatctgcttaatgaagagacccaactatcatctattccacgcacttcaataaagctatttctgtcagctatntatttgcatgtgcaaacggaactc

SEQ ID NO: 179565 - DNA, 420 bp, Glycine max
tagcatggttcagtctcacactgatcagataaggaatctgattctgaaatataaaaatttgaggtggagactgatgataaacatgttgaaacacaagttcgttaattggccttttgatgatgaaaaatcttgagaagatgaacaagaagatgctgactatgtgttggcttgagatagaatcagaatggaaatcaaacaaccttagaggtatggatatgctgatctaatagcatatgctctggtagctgctagtgaagttttggaggaagatccaaaaactgttaaagttgtcttagctagtaaggagaaagaaacatggctaagtgccatgaatgaagagattatgtctctgcatgatcaccatatatgggaattgatataaaaccacctggttctagagtggtcagctgcaaatggatc

SEQ ID NO: 179566 - DNA, 461 bp, Glycine max
  unsure (1)..(461): unsure at all n locations
tctgccgcatcaagcttataagagctcctccaaattttttttataggcttcttccacattcttcctcgtggcttctttgagaagaattctcaaaagactcctttgagaagctagatccttatctatccacacccctctattaactaaattaacctccttaaaaataattacggatgaaaataacgcaacacataatcaaacatcaaacataattactaataatatatagatatatatatcagggcgttacaatttcgctccaattaagatattcctcttggtttgggggttcgacggcaagcaacggcgactcatagtggccaccattggtcgtgggtggtggagaaggaggtgttanggtctgggtggcgtcttgaaaaaaggagagtaaaaatcatgttttccacctgaggaatgtattataatctgtaatctccttagcgtctcattcactaatggga

SEQ ID NO: 179567 - DNA, 298 bp, Glycine max
tgaacctgcgcctggaggagcaaaggttatagtgttaccttgcacttgcaaaaaagaaactctttcaataagcctctggtaagtacttagcctaacactgaatgacatgctctctgaggtacatatataaacattttttcttattaattactaacgccgtctgctgaaaataattaagtattcacaacacaacaagttataattaagaatcaggtataccttgcctgcgttgattgaagaagcaaaattggactcttttaacataccaaccgttgagcctacaatcgaggacattatg

SEQ ID NO: 179568 - DNA, 315 bp, Glycine max
  unsure (1)..(315): unsure at all n locations
catgcaagctggcatcttacaagagaaaaccaacatttttacgattattctaagaancaaagagcgcagcactggggaaaacctgtctacagataaaaccaacatatacctaccattaacacgcaacctacgaattagcatattgcatattactctgaaacttaccaatccaatccgaagaccagatatgccatcatcgcttactaaaccaactctctttttacctcgaatataaacttccccctgtcaatttgacaacaacaacattcaagaagtgaactcagttggtcgaaattaaaatcacatacccaaaat

SEQ ID NO: 179569 - DNA, 275 bp, Glycine max
gacactcccagcttgctctgctctataatttgaaagcttaattttctgcaccacattggaagatacgatatgatgaacgatcatatattatgtatatagtttgatatattttcacgattatacgttggaatgaatagtttgaagagcataaacgatgaattctggagaacaatcttccctatctttacaatgttggctctacctcgtacttttttttaccactgtataaaatagtacgagaaactgtttggtgaacaaatatgttggagtgatct

SEQ ID NO: 179570 - DNA, 355 bp, Glycine max
  unsure (1)..(355): unsure at all n locations
agctncaatgtggcaccagttctttgtcattctggccacaccttttttgaggccacttctagagacaatattgcaatgagggatacaaaatagtgcacaaaaaaaaaaatgtttgtttacctattattaatcacctcattggaagaaccattaagtgccatcaatagggattgattcttgttacctgtgattctgaaaggccacggtttcttattttattggtctaaaaagtatctgaggtgtttatatggcacccgctggtcacttcgcatataatatacatatatggagagttatgtgctatcctgtgtgtggtggtgctgtttttcttcaatcctagatactaaatatattc

SEQ ID NO: 179571 - DNA, 445 bp, Glycine max
tctagacaaatagtacaaagagggagaaagtatattttttcattacatttatgactagatgaaggagaaagcgaatacagtgactgaaggtccacatactggcccagaaactctatgcccaaattcatcgacccttaacttaacttctccacagctaccaccaccaccacaaagactggttccttctctaactctctggtacttttcttgcctctctcttctaagcagatactacagcgaaggagcatctttcattgtcaaaccttatgttttacattctagctacaagggcaggggaatttttgtattcttttttacacgcatatacctttgggcaatatagtattgaagtatgcatgtagttaaactttatcaagtaccaagtaaatgatatataataacaagttgatttatgaatttatggtccaatgtcattatagatcct

SEQ ID NO: 179572 - DNA, 408 bp, Glycine max
agcttgttcgcacatcgtctctgtctattatatccactcgacaaggctggaagtataggaggccttcaatcctataacgcaacgcggcagataaaagtgtgcacgctaacttgaatgaccattattgccaatgcggaaagtattctgcacttcactatccatgttcacacattattgtcgctcgtggttacgtgagcatggattacttgcaacatgtagatgttgtttacataaatgagcacatcttaaaagcttactccgcacaatggtgacctcttggaaatgaagaggaaatttctccttttgaagactcatggacacttatccctgatccaactacaatccgcgtgtaaggtcacccaaaatgaactaggatacggaatgtgatggattggctccaaccatctg

SEQ ID NO: 179573 - DNA, 314 bp, Glycine max
ctccgcgcatgcttaattataagaggggatggtataacgcggaatacctcgtccacaccgaagcggtgaggagaaaaagtcaatacctgtcacgagacgacaatgaaacgttacctgtacctcccaccctgttgctatgtcaaacatcctcaatccaacctaacctactcccatacttttccaagccaaagaatctgatatgagattttgaaccctcaatcgagcagcctcacctctaagaacaaaatatatgtgagattttaatactttaccttaacttgcccttctctggcctttcacccaaacttttattc

SEQ ID NO: 179574 - DNA, 314 bp, Glycine max
  unsure (1)..(314): unsure at all n locations
ccaggcgccgaccaatgaatacacatnttgactacatacaactaaactatacaagtcctcgtcggaggaggccaatggactataccatctgatgacaaagctctaacggctctatatgaagtgtgctcatagtccaaccacatccatatgagtgcaatactacataaggattcccttaccactagttcaatgaaaatgacttcaaactacggatagagcggcgtaggattattgtgaatgtacgccacacggaaaagctgaccatccctcaatggctccccttgaacttcccctttgaacatatcaacgcgtaa

SEQ ID NO: 179575 - DNA, 394 bp, Glycine max
  unsure (1)..(394): unsure at all n locations
gcttctgcaacatgagttgctctgccacatcataattattatattntggtcccatatgggacaagaactgatcttctaatgagcctacatgtggattaccattaaaatgcctatttaacccatattcatcaacccatgtctccctgaaaggaggctgattatccatgccaccaacagagctttgatcagcaaaagcagcatctctatcaattaatggatctagaaaatgaccctggtcacccaatctctaagaactattggaagattgtgcacgccttatatgagaaccatctctgatttcatacatcaatatcccaaaagggtgcaacttatcggcctcattattatgagtatcattcactggaacttcatttccacacgttttccacacgat

SEQ ID NO: 179576 - DNA, 386 bp, Glycine max
  unsure (1)..(386): unsure at all n locations
agcttgtcggaaccatggacttagntatgtggtgtccaccattgttaccctcgttcctctcctcaaagaagctggtgctctctggctttgaaaatgcacccaccaccaattaacgctatctaagtataaataaacaaaaaaatatgagagagggtaaaaaaaaaagaagaggttttattaaacagtggttatcgttattattattatcaatcacaggaaggggatgaatgaagtggccttttgcgagactcttcttcttccattcttccattttggatacactactactactacttgcagcagcagcagctgcttctaactgactagttaatcaatctttcttttctttctttcttttacgttcatgctctttttattcttatttt

SEQ ID NO: 179577 - DNA, 285 bp, Glycine max
cactatcacaaatattatcttctaattgcccatttgatcgataagaccaaccattagtgcttgcactattccagactccatatgtcgtcacatccttagaatgttcaggaagtttaagactctctactgcatttcatacctagaggagtgtcagagctcccacgcatctcgtactacatatctttctctatcatctctgctgtcataattatgttgaatttcaggatgtctatcctttctgtatgctgtagatatgctcaaaactgacttgttacatcctccgga

SEQ ID NO: 179578 - DNA, 456 bp, Glycine max
  unsure (1)..(456): unsure at all n locations
tcaccttctggtcctcctcatagttgtggcatgaganattatggtctattntcatctcccactccaagtaggcctccggatcattctttcctttaaatggaggaatgttgagtttaataccatcaattcggttntgtctaggaacaccatcattccctcttctcctcctttcttcttcattatgatctctattctccatttgatccaacctctcatggagcgcatcatctcgttgtttcattaacctctccaaatgttgcatcaaagcttgcatttggaattgcgaaagccccactccatcattaggattagtacctgacatctcaaacaaacaaatcaaacgtaacaagacaattatagttgctgtttgaatacctcacccactcaagtgtatcacacaattatggctnttctctatgaaacactcttgcctttacactcaattcccttgagtct

SEQ ID NO: 179579 - DNA, 419 bp, Glycine max
  unsure (1)..(419): unsure at all n locations
agcttgttcatagctttatgagaaaangttttacaaatgtgaaagaaaatagccatttctagggtaaattgggcgttgagaggtcaaattttgaataggtggagttttcaccttaaaacctgattgagcaagtctaaatcaatgttatagacttgattgagatgagagtttaccccaaaattacccaattctcattttcacctttcaaaccttgagaattcactaaattgatgggttttggatacctatattttgatttgccttggtctgaagtttacttttggtctaaacatgatttaaacatggtttaggacttgtaggatccaatttgagtaaaattggatgtatgcaagatggatttcaaaatctgccacattatgcagaaaaatgttgtaaattgtgcgcagatttgaccaatg

SEQ ID NO: 179580 - DNA, 417 bp, Glycine max
  unsure (1)..(417): unsure at all n locations
tttcattttcattttataggagtcagataatgatctgaggatgtgcaatgaagagttcaaagagtttgagaggcangatgtgaagtatcgagaggattttaagcacgtgaatcataagatcaaaaagcctgaggatatagtagaaaacgtagagggaagtcatagtttatggcaactgatagtaaaagtatgtgttcatgagacatcttatcctttcgtttatactttctatgtcaggattcatcaaaaattgaagcccttataaaagagggtgaggaatcaactgttctgatactcaaaacttgaggacaatatcccaaaattgcataagttgttgctcgatgaggagaatgtcttataataaatcacagagagtatcanacgtgaagtcttttctttttatatacaccatatatt

SEQ ID NO: 179581 - DNA, 449 bp, Glycine max
  unsure (1)..(449): unsure at all n locations
acctgaggcatgcaagctnaaagaccgagctacatccttatagtgggctatgtaagcaantaacaaaattccttatgaactntggactagcaaaaggccaagcattaaacacatgcatatttgagattttcaactaaggcacaatcttataggtcgtatgaaagaaagctggattcaagaacaattaactactattttgttggctatgtcgaacgctctcatgatataagttttacgatcccactttaagaaccttttttgaaacaagaaatgcgagatttattgagaaagttgaatttgggaaagaatgttgtctttcttgaataacctcttattgacagtgtgatgtagctctatatggagcttgtaggccttggatcttcttcatcaatggagntctttgcttcttgaagatgaatgccagcggaatggagaacgaagaatgatga

SEQ ID NO: 179582 - DNA, 441 bp, Glycine max
  unsure (1)..(441): unsure at all n locations
gaaatatggacatacgcatcggatagggncttcttattttctggcctatcaactggctttgttggtcctttttgtacatgtttatcctacataattaataaacataagtcaatgacattaaacaccttatttgtaatgaatcatattttaataataataaacgcatcataaaggaaaaacatttttctgaaaaaagttgtacaagatgtgttttccaagcaaggaaggtattaatggtctgccccattaactaaacctcttcagttggtatagggatatgagcattagcatctctaactttctcaacacctaccatcaccaaatcattttctcaagggacatggtgcacgattgtcgatccctcataaattcttccaatggaatcatatggagaggattgtcatcatcatacaacccatgcatatctgatgcaatcgtgtc

SEQ ID NO: 179583 - DNA, 484 bp, Glycine max
  unsure (1)..(484): unsure at all n locations
agcttcatggtgaatcaaaggggattcatttgtgtntttatgataataatgatgataacaaaagatgatgacaaaggtgatgacaaaaagctcaaagatcaataaaagaacaactcacgtgaatcaagaacaattcaagagttcaagataaaaatcaagaagaattcaagactcaaggagaaagtttagagtcaagaatcaaaattcaaggttcaacatctcaagaatcaagatcaagattcaagactcaagattcaagaatcaagagaaggcttaatcaagataagtatgaaaagtttttctcaaaaattgaatagcatatgatttttctcaaaacatgtttaccaaagagtntttactctctggtaatcgatattaccagtagcaaaattctcttgaaaaagttttcaaattgaatttacaatggttcaattatattcaacaagctggtatcgattacaatgtgtcggtaatcgattaccag

SEQ ID NO: 179584 - DNA, 432 bp, Glycine max
  unsure (1)..(432): unsure at all n locations
agctngaagctcatagtccttcaagagccttttaatgtttctccttctttngggcctcgtaacctgatgtttgaagttactattcgtaacattcccgcgatcttcaattagcaccttgtcctcaaggtgatactgttccttgaggccttcccactcttcccatgatgtttcatctggatgcaagccttgccattgcaccagaaccatgcgtgtaagcccctggtctgttggaaccattttttgacccacaatggctaaaggtgtcgtgagtggttgattgtccacagctccggcaggaagtgtttctactttcaccgactcagtcgagcccactaagggcttcaagagtgagcaatggaacaccgggtgaatgtgagagtgttccggtagttctagcttgtacgctacggggcccattctctcaataatcct

SEQ ID NO: 179585 - DNA, 372 bp, Glycine max
  unsure (1)..(372): unsure at all n locations
tcctcacagatatgccgncatcttatcaaccgacagtanngctttttggttcatggattgaatggaaaactctatatcctacatcggtcgtgaaataactccgactgatttttttcagccgacattgagcaatctttttttgaaaaactctccccggtagataattgttctcttaccgcagaggaagtattcttgttttggcgctgcatataaaatttacaatgtatgccggntaggattatttgtgcgagctcaaccgatcgtttgtttccgctgaaactggcatgttcccatttatgctggccaagaacacattaacaccagctaggcaaaaaaatattcgccaaccgactatatgcttatttcattcac

SEQ ID NO: 179586 - DNA, 472 bp, Glycine max
acctgaggcatgcaagctcgttaccccatgttgaacttgctgtcattacagttgttcatagcaccactaattgttctccttctgaagttgtttatggttttaacccactaactcctcttgatcttttgcctatgcctaatgtttctggttttaagcataaagaaggtcaagcaaaggcggactatgtgaagaagcttcatgagagagtcaaagatcaaattgagaggaaaaataaaagctatgctaaacaagccacacaaagggagaaagaaggttgtcttccaacccggagattgggtttgggtgcacatgaaaaaagaaaggtttccggaacaaaggaaatcatatcttcaaccaacgggagatggaccatttcaagcgctcgaaagaatcaatgacaatgcttacacaattgacctgcccggcgagtataatgtcacgtccactctcaatgcctctgatttattctctt

SEQ ID NO: 179587 - DNA, 194 bp, Glycine max
acgcaccagcgcaacgatgaaaggaacaggacctcccaccacaagaccgctccgccgccgacgccccccacataccggcaaacctcgccgggaaaatcaccgcaaaccgaaagaacaacgaaaacaatgcaccaacgaacggaaacacaaggaagaaccaaacgacggcgacaaatgaacggagcagcggagag

SEQ ID NO: 179588 - DNA, 283 bp, Glycine max
  unsure (1)..(283): unsure at all n locations
tctttctatcctataaccggcgactcggaggtttttgtctttaattatcttagcctttagcggaaattttattcttcatttagnttcttccacttatttccattattctcatcttcaatggccaacgagaaaaggaattaaatttcagtgagctcattaggaagtaaataggagtaccacccattagcttaaaagtacaaacatcaggatagaaaaaaatattttggagaatatcacatcacataaaaattagtggcagcactattctccctagaacacatgg

SEQ ID NO: 179589 - DNA, 424 bp, Glycine max
  unsure (1)..(424): unsure at all n locations
aacactcaaccctggatacaccgggaacancagaacctaagggatttactttgtttggtatattccaaatgcgacttggacgcaactagacttagcaaactacatgattcacactgtctttaggntctattgtgcgtaccatatttgtaacaagcttgactcatatcatacatatgctctaacttgaggaggagtcagagactgagttttgatattattgctgatattatatattttattacaagattttatttcttattaaccattaattgattgatccttgtaattaatgttgactgtccttttaatattataaatagcatgaggtgtgatttaagataaacattgttatattattaatgtaatattagaacacctctatattatgacattataccgataagatatgctatgcagtcgctaa

SEQ ID NO: 179590 - DNA, 456 bp, Glycine max
  unsure (1)..(456): unsure at all n locations
agctctcactaataaaaatttactctncaaaagcttttacttattttgttaagagaataaggagtagaagagaaacttaaccaaaagtaaaaacagaaattaaaatgcacaccggaaagtaaaagagtagggaagaaggagacaaacacacaagagtttttatactggttcggcaacaactcgtgcctacatccagtccctaagcgacctgcggtccttgagatttctttcaaccttgtaaaaatccatttacaaacaaagatccataagggatgtaccctcccttgttctctttgaacctagtggatgtaccctccactagaactgatccacaagagatgtaccctcttttgttctcagtcaaacccaagtagatgtaccctctacttgtaccacaaaggatgtaccctccaatgtgttaagaaaagatctaggcggtaaacctttgatacttgg

SEQ ID NO: 179591 - DNA, 415 bp, Glycine max
  unsure (1)..(415): unsure at all n locations
ggccacccagctcgcccaggcgagcagaggtgtttcatantaatctcagccttctggagggcccaagtgggcctgtgtgctatttgcacccccacttttactaaatacacccccttgcctttttttggtgattcttttttcgtaaagttacggaaacttacgaatctcgtaatgatacttgttttctttccataatgttacggaaccttgcggattacataatcatcccttttttgacttacggaatgttacagaatctcactaattgtgcaacaatgcttccttttgatttccggtgtgtcacggaatcttactgattatgcatcaatatcttcttttgacttccggcacgtcacggaatttcacaaattgcctaatgatgggcgccaagcacctcaaaatgaccaaacacaag

SEQ ID NO: 179592 - DNA, 246 bp, Glycine max
  unsure (1)..(246): unsure at all n locations
ctcagcttttaaagcatactctctaaatgccttcgatctacattttagtctacaaagcaaggctttgttttacatttgaagatctatcttttccaattcattctttacacaagcaatttttccacattgatttctgagtctctttgaacttcttcttcttctttctttgtcaaaagctctctaaagttntctgggtttctaaacttnntgaaactgtgttattcattcttttcatctcttctccct

SEQ ID NO: 179593 - DNA, 430 bp, Glycine max
cgcttgagccaaaatcctgactcaccatataccttgacccattgtgagaatgtcaattcttaccctcggaagcgaaaagaatagaaggaaggtttccaatcaaagagaaagcaaaaaagaaaagaaggaaaattcccaatcaaagagtgggagaaagcaaaaagaaaagaaagaaaattcccaatcaaagaatgggagaaagtcaaaaaggaagaagaagaaggaaagaaagctcctgatcagggatcgaaagaaaacagaagaaatgtgcagaaaggtctttggaccggacaatatctgaacaatacagaattgtcaccaaatgaacaaaaagaatgaaaggaaaccacgacctataatggtcttctctctttgattaccaactcaaaatcccgtgctgctagcgactttttcgccccgcactaaacaa

SEQ ID NO: 179594 - DNA, 413 bp, Glycine max
  unsure (1)..(413): unsure at all n locations
gctaagctctagctgttttaggaatcttatcaagttggtgagcttacttattagaggggtgtgtgtagctaagctctagcttctcaaggaagttttctcaaagaagcttctcaaggagcctaaagtatgaagaacctcaggatttgaggtcaaatcctttccaaggtggagggtatgatgcaatcctaccccccaagggtattggatagaagaatccaagaggattgggctagagctactaaagaaggccctagggttctcatgaacctcagggtagatntttgagcccatgggccaagggtgggcccattcttctttgaaatattagaataggttttttttcttcttttgggccttgtattttggccattctaattgtatagaagtttagcctcgtatttcacggcattttg

SEQ ID NO: 179595 - DNA, 159 bp, Glycine max
aacaagtcccaccgtcaatcactatacctagagggccattctatacactaacctatctactctcctgggcggctctatgcgccgttgcgtaagataacctgacaaataaagcttacaatacttatacctcgctacatacaataaaatatacattccaca

SEQ ID NO: 179596 - DNA, 454 bp, Glycine max
  unsure (1)..(454): unsure at all n locations
tgcaccctgaatatacttcttattattcctctcacacctctaattatttccaccgcacaaaatctgcactataaagtccatcacctcctcttgtattcaccaaatagactattagacccagaggtccaagactgaccctaatcacactnntataattattttttttcgtgttggcatatttcctttttctaaactttttgttctctttttgtttgtggtagatccatgagccagaaaacaaaatcacattcatgggccttctttgcagatctacttggttggaattcattgatcgtgtcttatatttctttgccctctcttttatgctttgtcttaccctttgcggtaaccatggccaataaacatcttcaacgaccatgaattcattgattaattaaataaggtaanagttctaattcnttcgtattctaaactgagtcatctaatagtcaca

SEQ ID NO: 179597 - DNA, 441 bp, Glycine max
  unsure (1)..(441): unsure at all n locations
agcttggatntcctcttagtagggaatttattcttcctattatggagccaaacccagtccccttcattaagaactagctcatttcttcctctatttcctttagtagcatacacctttggttggttcctaaccctctcatgcaacttctttacaaactctaaccttgattccccttctttatgtataaaagaagtgtcaagtgggaggggaattaggtcttacggtgttagaggattgaacccatagataacctcaaaaggggattgcttggttgttctatgaatccccctgttgtaggaaaattctacatgaggaagatactaatcctaagacttatgggttcctttcagaacagcccttacaagggtggatagagacccattcactacctctgtttgcccatcacattatggatgacaagtggtagagaaaagaagctta

SEQ ID NO: 179598 - DNA, 289 bp, Glycine max
  unsure (1)..(289): unsure at all n locations
cttctcaggaaacttctcanagaagtttctcaatggaaatttgtgatattgtgttntgattattgagtacgtgaatgatgtgaaaatggttatttcttcttcatttcaacattgcatgtatttgagaggggggcaaaaacaattgttntataatgttggtacttagttcttcaagcaatcgtgttagtgaacatatttctttcaatcctcccggtgaaataatgaagaattgcttatgatctttgagctaaacaatntgaattgactagtaattnttatgtcaatctta

SEQ ID NO: 179599 - DNA, 454 bp, Glycine max
  unsure (1)..(454): unsure at all n locations
agcttntctggcatttgggatggatttgattactatttcgnnnnaanngattacatgttgtggtttatgacttattttggctttttgttctcttttaatcgattaccttaagttttaattgattacaaaggcctcagggggagtttttctggcatattcaatcgattacacctgtgttttaatcaattacttgtatcagcttttggttttgagtgaaaacgagggccaatttaatcgattacttgcatgtctgttgtgtgtaatccattacatctcttcatcttcacctcattaaccacctttattacagcaattgctttcaccacccacctcagccaaccaaaatgatgcaacatctctataaaaggcaacctaaacccattcacaaatcacactaacacctnctctaacacccttctctgaacccaaataacttatactctcaaaccctcta

SEQ ID NO: 179600 - DNA, 374 bp, Glycine max
  unsure (1)..(374): unsure at all n locations
caaccagaattcatcagcataacatatatggtctaatctatctccaagaaataatataattctacttacccatagcttctgagaactttcgacgatctgcatggtgtgcctccaaatgaatgagatgcgcctataccactctttacacaaatgtataatngctgcttttaatgtctctctggctgataaagtaaaactttttggtgggtcctctttatcaattttgatgacagcatcttcacccactggcctggtgttttgatcacttgtagaggtttcagcttgatgttcaagaaactcagcgtacgttctccaaaactcgaatagcaattctcctcttctagcacctgaaccaatccaggttcccaaagctt

SEQ ID NO: 179601 - DNA, 479 bp, Glycine max
  unsure (1)..(479): unsure at all n locations
cctgaggcatgcaagcttgcacaatatggaactgagacttataatatgattatttngagaaaagaggcataccccaagccggaatgcagtcccccgattgcggcaatcttcacccaatattttagtagcattcaaggcttcttccatactagctccggaagcaatcacagcacaaactatagctccagctgaggaaccggctaacggtgttgtttcctgcacacgcacgtcactctcattagtatataaagccagtaataataagtgattaaaaagaaaatagaaaaagaccttaatgtaaccattttgaatgagaaattgagcgacaccaagatggtaagggaagagaagtccagcggcagagaaactaaagccagggctggtgacgaggcggctatacctattgcgctcccgctccacgtctttcactctntgctcccaaaccacgtcgggatcaatctcgtcctccaccaccgctc

SEQ ID NO: 179602 - DNA, 484 bp, Glycine max
  unsure (1)..(484): unsure at all n locations
agcttatgcgcatatttccttacgaacgttctctngcatatacattctatnaactaagacaaatgcacccatatacaatcaaggcagcttcgttacctagattatttacacgtacttccaaggtgtatttgttacttacatcacacacatctgcttggctaaatttacatacatgcatactcaaagcattttgaggtaccaaaaattgcacatgtgcacatcttggtatttctaatacctatacatacacaaacttcatgatgaatcttgactatctacacaataaggtgctacattccatgcctctcttcaagtttttgctacctaaagccgcatgcaaattcaagtatattttcctttgctgactaacaatgtattcaaattaaaggggatacattttntttgtaatgtattctctttacataacatgcaacatatttatgtatnatttttgtgagacattctgactanccacaaatatatg

SEQ ID NO: 179603 - DNA, 413 bp, Glycine max
  unsure (1)..(413): unsure at all n locations
cctttctaagtgtatctggttcaacaataatcttatacattatccggacgtaaaaataaagccagtttttgatcgtaagaaacctaacgccacagcctttcgtatcggaatttattcctttacattgaacaagtgtataaaataataacanaaaataacattgcatctaccattgattttaaattataagatcctttaatataaactgacggcaaaatatagttttattttatcactttgcataccaagtctatccgttcttatatatataatacggcaatatacaaactcatcggaacttaattaaacacataaagaaagagtatgctagaactacgtacgatatgaagcacattgctatgtatagacgataggcatcacaactaattgaatatgcagatcactgatgcatg

SEQ ID NO: 179604 - DNA, 429 bp, Glycine max
agcttatataaggaggattgtttacttttcggatcactcaccatcttattggtcaatatgcagatgtctagtcttgtaagttttttacacttgagatatcaaattatcagtgtgaggatgtgtgttagagattttacattgactgattgtatggctaaaatggtgtataaaagtgaagaaaatccttatcacatgagctaggtaatttttgggtcccaaatcctaattataagctgacattagagtatatcctagtgattattgttagacttgtggcccctatctggctactatacgaccatgtgcagagatgtctagtattgtaaatttcgctctccgcgatatcaaattctgaacacgaaaggggtgtgttagaaatcttacatttgctagctgggtaaccctcatctttattttcccatgaaatat

SEQ ID NO: 179605 - DNA, 439 bp, Glycine max
  unsure (1)..(439): unsure at all n locations
tatacattacttaacctatcttttctatatcatgacctcatgtgcaatattntnttcttcatattttattctgtctactttcacaacgttgcaatcaactccaagctgcagtggattttagcaaagttgaggacattacatgataaactccaataaagtagttttgcatttcacttanattaatatgttttagaagctgcgtgattaaatttctaaacctcttgagttaaagtcgaataattgttgttgtagtatataaaagtacaactgttcacatttttcattcatcatcatgtattgctttaatctatatatgtacgtttaactctcattgctttacctccaaactccttnttctttttcttttttgatttctaacttctagttaaaaatagctgatgattanagaaagcaaatccggatcttgttttgttcaaaa

SEQ ID NO: 179606 - DNA, 456 bp, Glycine max
agcttcggagctaagtaagtctctttggaattataatttcagatttgttttcattcttggctgacaaaatcacaactgcaaacttaaccatcttggattttatcaaacaatgaaatgaaggaacatctttcagattattggttatggagagattatgatggaattgaatcattttttggttctgttgtgggtttgccaagcatttctattttcaccaaagttgtgatttaatttcaattaattgttagggattttggccccttggttaccgatcagagaaaaggaaaagacataagggagaggaaaaaaatcatgtgcagagggtgtaccaaattaacttgtggactagatgaattcaggatgtcaaaaatgatcaccatagatacatgacccattattaccctggcttcgtcatataaaataatacctgaagggctgcaaatcccttcaacctct

SEQ ID NO: 179607 - DNA, 417 bp, Glycine max
  unsure (1)..(417): unsure at all n locations
gaccttagaatactaagcttctataaggtntttattcaaagcctgtctcatcttgcttgttatgccctcagccactatattaaagagcatatgagccaaagggtctccatgtctcaatcctctagaggggactatttcctttgtatgactcccattaactaaaattgagatagtcgctgagtgaagacatgcagagatccactatcttcatttaaagcagaaacctatgcctgtccatcatgtcatccaagaaagcccacgatattgaatcatatactttttcgaaatccactcttaaaatcatagcacgcttctttctctgagtagcttcatccaccacctcatggagaatgagaattccatggagaatgtgcctatgtcttatgaaagttgtctaccttctataattaacccatc

SEQ ID NO: 179608 - DNA, 470 bp, Glycine max
  unsure (1)..(470): unsure at all n locations
agcttgaggaatcttaggaaatttctagttattccgctatcgnggtcagaatacacacatgagcccgcttagaggtaagggatgagtttatcacaattgaggttagaatgaacatgtgtaggaatccttaggggatcaaattgaggtttattttgggatgtttatagaattataattttcctttacaattataaatatgatattgctgtgttgatggaccaattgatgtcctaatgcgaattagttgataaacttgagtgctcttggtgttttcatatttttgacctatgatttgattaattgattttaatatgattgtgtggaattgtttgaggggttttacttcccatgttgtgagaagcattttgtataaattggtacattgagattatgaaattgtgattcacatcggaataagtgacaaactgaacctgtgatgaatggttaaatacatgtgtatcgacatgtgt

SEQ ID NO: 179609 - DNA, 411 bp, Glycine max
  unsure (1)..(411): unsure at all n locations
ctcagctttgggtacccgatgcacctttgtgctcatggtagttacttgaaaaacatgaaccttcacacggttgggctatgatcttgggcttaagaagatacagaacaaaatatatacgtataatttgaatgtgttgacgatttgattaattaaaataaaataacgttattatattttggttcactcgtcccccagaataattaagtggaatatatggaccataaacatgaataaaaagttaatagaatattaggactttcaaaacatatcaagggaatgaacaatgattgaagtagaggtacctacccccttgactttacattctcaaggcattgaatttaagttagcttanaaacaaaagtttgaatttattatcctatgtctgtgtgctttcgaataagcagaagtttc

SEQ ID NO: 179610 - DNA, 456 bp, Glycine max
ggctgcagctttgcccaaagctttatgagtaattatatcacattacatctggcttaaaggagctccttagcagtatccatctacatatctgtacagtttttttctgttatgacgggcaacacaaatccactagccaatcccaaaataaattaagaattgcaataaacaaaaacaaaaaattagtgtcataatattgcccaagtgaacatgaacatgaatgcatgatggattcaatggtgtacaagtgacacatgaacatgaatgcatgatggattcaatggtgaaacgttacaagagataagtcaaccttcacgcttcaaataattcgactgataaaaactgtaccagtaaggtaaatttgctagaagcgagtgaaacaaatatcatcattactaaacactatcagaaagacagacaccacatttttttgagataattaattacaacgagcactac

SEQ ID NO: 179611 - DNA, 357 bp, Glycine max
aatcatcagtctaggcacggatgtctggttctgtcttatcgggtaccctcattgtggtccagcgaaaagtggggtgtaactaattccggcacgcatacccaaaagaggcacgttgggatattcaccaacaactacaataatctctccaacgctactatctgcttggtaccaaacgatgtcacatgggtctaagagtcatgattcggcgaggccaacatagattgtcatcattggtcttgaaggcacgggatcgaggtaagtgggaggtacacctccgatcgagtacaggtgcacatcataaaatggttcccatggcatcctgtgtactgccatggatatagtggcacgtatcggcca

SEQ ID NO: 179612 - DNA, 323 bp, Glycine max
  unsure (1)..(323): unsure at all n locations
tcttcctgcgagctcaaccgaagttgtatttctgccgacgccggcattttgtctgtcacgaaaacattatcccacctcggctaaaaaaaaacatgattcaccgcgtttgacagaataataagcttggccttagtcgggcaggaaagatgaccgatcgaggtctaaaaaagaagcatgaccggattacgccgatcgaacgtttcctaatagatatcctccaagtattattcacggattgaatggaaataacaatagccgacatcggtagataaattgccgtgactgatatttntcagccaacattgcgtcacttctttcacaaa

SEQ ID NO: 179613 - DNA, 330 bp, Glycine max
agcttttgtattcattctctagcgcccccatatatgacgggactcaaacatacatccgagtaaaacgtcttcgtcctttgaaaatcctccgacgcttggaattcaattcccagcgcgtcgacatattacggtgctcaatcagacatccgagtaaaaaggcattgtcgcttgaattacccttcgaggtacagaatccaatctcgagcgtctcaatacattacgggactcaataagacattcgagccaaaaggcgttgtcgcttgaattaactcagacctccagaattcaattccgaccggctcgatatattatcggactcaatcacacatc

SEQ ID NO: 179614 - DNA, 421 bp, Glycine max
  unsure (1)..(421): unsure at all n locations
actcagcttattaatgtgcatttaacatcacttcctccaatgtgtatatttgttgcacttctagcatnagatacttgtttgattgatgtacaactattggcattgtgctccttcaacgttagcaaaatgtttcttggtttcaccattgactttgtcatatcaacaataattgtcttttcatccttaatcaatcgcctagcgtatggatgtccaactaatgactttaccaattcatgattatgactctcacacatcaacttcaccatccaaccttaccctccaaccaatggtttctcatgaagcttgaaggaacacccacatttcctacttccagtatctcttctaacaaaatctttcttcctaaacctatactaaccactcctttgacaaccaattaacacaaatgaagttttcctctata

SEQ ID NO: 179615 - DNA, 504 bp, Glycine max
  unsure (1)..(504): unsure at all n locations
tcagagcgacctgaggcatgcaagcttgctaagcccaattccacaaatttttttacagattttgatttgcgcttatcgcggaaagatgcgcttagtgcgactactctattggacaacagtgacttagtgagcaagctcgctaagcccaaatccaacaatttgaaaaacggagagataattgcgcttagtgtgatagggcatgcttagcgcatagcaaaacacaaaaattctaagtgtttgagaacacaacacttgcttagtgtatagacacgcttagcgaggtcatacgcaattgaattttcaatcagagaagatgaacgcgcttagagggacatggccacgcttagcgagttcatctggaaatccagatattcaacaaaaaatgatgaactcgcttagcgcacagccacgcttagcgcgctaatcgcgaattccagaanaagcaggggcttctcaccccttcatttaggcctctattaggtcgtctaaccttaatcaaaacaa

SEQ ID NO: 179616 - DNA, 409 bp, Glycine max
  unsure (1)..(409): unsure at all n locations
aggcatgcacgcctattatcagatcatcataaagctgtttttcaaaactgnttctgngatagctctcgctcttcaatgactacttcctccaaaacaaagggcttatcaaatatgcactaggggggtcgctttacccttgggatacaatttgttgatatgtcatgtgacaatgttaaaaactcaagctgacattggtttatttttttggtatgtgtgtctctctttgctgcatgtatgcatatttctatttgngtatatatatatatatatgtgtgtgcgtgtgtcaaaattgcctcctcaactaacctgttgatcatgcttaaccaggcatgaatactaccacaagccataacaagtggttgtgacactatttgcaaaaggaatatcagcaagcgatgtagttgttgac

SEQ ID NO: 179617 - DNA, 471 bp, Glycine max
  unsure (1)..(471): unsure at all n locations
agctntngtttcaatacactgcccgctttttatctgtaccaacgacaaacagcagataaagatcatatatcaaattcaaatgaaacaaattattaaaatcaacagcctaatcacaagagaaaatccatcctactgcatcatatatctcatcattcttctcaaaatcaccacttttccgagggataagatgaatgtgaacatggggtactgtctgtcctgcttgtggcccatcctaaggtacagaaagataactcggttatttttgtgagacacagtagcaaatcatccacacagcacagtctattatagtagggaaaatatttaagaacataacttagatacagttctctaatcaaaattagcacttcatgttggtgaccactacttttatcttggaagccaaaaccggcagtggttagtgagaaaaaaattaattggaaacaacaccacactacctgactcgtgtaattt

SEQ ID NO: 179618 - DNA, 469 bp, Glycine max
  unsure (1)..(469): unsure at all n locations
actaagcttaacatcagaccacttccagggggctggaacgacttctcatggatttgttggggcctatgcaagnngaaagccttggaggaaaaaggtatgcctatgttgttgtggatgatttctccagatttacctgtgtcaactttatcagagaaaaatcagacacctttgaagtattcaaggagttgagtctaagacttcaaagagaaaaagactgtgtcattaagagaatcaggagtgaccatggcagagagtntgaaaacagcaggttcactgaattctgcacatctgaaggcatcactcatgagttctctgcagccattacaccacaacagaatggcatagttgagaggaacaacacgactttgctagaggctgctatggtcatgcttcatgccaaagaacttccctataatctctgggctgaagccatgaacacagcatgctacattcactacagagtcacact

SEQ ID NO: 179619 - DNA, 422 bp, Glycine max
  unsure (1)..(422): unsure at all n locations
agctngactaggcgagtggatttagccttatttcactttattattagncaattcaattaagaatgagaaatcccacagagaaaacgtccgattgatttttcgctttattttactaaaaggtattttttattattatattattattttacctcttttttgatttccaacgtnattacggcacgaccgaacggtcggaattcattttaaccgaaattaacggatgatacaattcaaatgatcggtggaaatttattttatttttagattaggcgagaaatgacttaaataaatgactgaagcacgtcaaaaggggatatagaaagcgaatgacaatgagaataacaatacatgaaataaaatgtggaccaccacgggtacatagaatgaattgaaaagctcgtgttgaggtacttacccgctga

SEQ ID NO: 179620 - DNA, 406 bp, Glycine max
  unsure (1)..(406): unsure at all n locations
gggagaatgtgaatgtatgtatacatgattttgatgatgtcaaaaaaagaatcaaataaggctcattntgcttcaagattaatacaagattgtttcaacaaacaaagccttgattcaagatttcttcaagatcaagccttgcctcaaaatgtagagatttcaagtcatccaaggcacatgtaatcgattaccaatacatgcaatcgattaccaaggcacatgaaagtgtgtaatcgattacacatcatatgtaatcgattaccagagactctgaatgttgggaattcaaattntaaatgaagagtcacaactgttcaagaaaaacaactgtgtaatcgattacactaattntgtaatcgattactagagagggatttcaaggaatatcgccaacagtcacatctta

SEQ ID NO: 179621 - DNA, 410 bp, Glycine max
agcttgtaatgaagatgaacataaacttatgatcacttatttctggtcagatttcactcattgctcaatccaactccttgcggcttggatttccaaccctgattactgccttgtgcaaggcccgaggagtcacctcagattctcttaccttcgagtcactcagcctagccattaatttggcctatattaagaagaattgttggaacctggatgacccttttgtcacttttccaaggacccaaaaatccagggctagaaaatctgaggacccatctctctctgctccccctacttctgctcttccttcaccaccagcagctccaattctttcaggtccctccacttggagctcagagcctttcatgtttatgctacagagcctgcaccaggggccagctctgattatgcat

SEQ ID NO: 179622 - DNA, 349 bp, Glycine max
  unsure (1)..(349): unsure at all n locations
agctcatagaagattttgggaaacaataaaaataaatcattttaattaaacaaccatttatccaaaagtattttatagctctcaaatttttattctttaagtaattattcgctttttgctcaaattgcttcaattaaagagcaccaataacatttagtatttaaagttaactaaacttttattccttgaaatttttcaaaattcaatttttaatccttcaacaaagatttaattggtcatgcttctttaaatgtttaatccctaaataaaaatttaattgatcaagacccctaaactttanaaaanaatgggagttgctacgtgcacccagcaatattgcgggggaccc

SEQ ID NO: 179623 - DNA, 369 bp, Glycine max
agcttgatggtcgccagatcttgctattataactttctaaataaaatgagttgatcccatatttctactccaaagttagtgcgaatcaaatcacttttgcattttatctctagcatacattcattattctttacctactcctcacgtttgggttttttttaggaaaaacaccataactaaacgcgccacaaggcatccctatcgcaccagatccaaatctataacgatgggtgaccaagaggagacataggaatagatgaaagccgacatgtcggctttgaaagaacaaatggcttctatgatggaggccatgctaggaatgaggcaactaatggagaaaaacgtggccaccgctgccgctgtcagttc

SEQ ID NO: 179624 - DNA, 458 bp, Glycine max
  unsure (1)..(458): unsure at all n locations
tgttgtgataattntgttacaactcaataacctaataatttcatcttttgtaccgctattttcacaattttacaatttcccccatttttcacaaatttgtctcttattttttatattttgtgaatccatattttcttctaacataaaagtcaacattcaaagaaagtagtgtcaaattcgagaacaatatcaaaatcatgatgtatgaagacatatgagatgcatggtcaatagaaaataaataattcatgttttttttatagcacacatttgtctcttatttcttatattttttgaatccatactttcctccaacatgaaagtcgatcaacattcgaagaaagtagtgttaagttcgagaacaatatcatgatcatgatgtgtgaagacatatgagatgtatggcaatagaaagcacatattcatgtattcttttctatacacacatctgctctatt

SEQ ID NO: 179625 - DNA, 421 bp, Glycine max
  unsure (1)..(421): unsure at all n locations
agcttccaccttcattcagttttatanatantctccaaaaataattaaaaaatcctgaatcaaaaaatcgtcttcaattcatcaacttcctgcacaaggaaaaagcattgatcattattaataagcatacattggtaactataaataagcatatttttaacgaattaacaccgatgtacatgcttaataataattttttatgcataaaaaaattatgtagtacctgatgacaatgaaggactgttaatactcaaattgggctgagacaatggaagggtgtgtgtttgttacttgggtatcaaactatgcacattactgaagcaaaaatgtgaatagctaccaagatgatgatgtactgtactgatcatgtgttaggcaaagcatgactgtcgcccacaactacagattataaactgacaaa

SEQ ID NO: 179626 - DNA, 455 bp, Glycine max
  unsure (1)..(455): unsure at all n locations
tggtgctggcttcagagcagcaaacacctccctctcttttcttggaggataacatgctactgcaatcactgacctcaatggcctgatgagcctagttgtttggatcagcacttcttttgttcaacttttagattatttttttttatcattcagaaagagaaatcatttaaatttgtttctaataggttttgctatgtgattgaaaattttaattataaactctcgttgagatttgaataaatatgtctccagcagcaatccacttatacaactaaagggttatggatttggtgaaattgcttaggttgatttccttaatgcctcttaagtcttatcacatcagatntgaagttnttggatttgcaacatccattattaaaaaacggctgcagtttctagttaagcatatatttccctttcattcactcaatatctccctttctcttatgattcat

SEQ ID NO: 179627 - DNA, 465 bp, Glycine max
  unsure (1)..(465): unsure at all n locations
agctcgctcgtcttgctgatatttatcatgtagacttttctgatgatgaccgaggaacaattagggatcaacttgaaacttatgtgcttcaagtgagaagaaatgcttctttttccacttgtgaagatgttcaaagtttggctatgaagatggttcaaactgagaaacatttggtatttccattggtttataaacttattgagctagctttgatattgccggtgtcgacagcatccgttgaaagagctttttcagcaatgaagattatcaagtctaaattgcgcaataagatcaacgatgtgtggttcaatgacttgatggtatgttacaccgagcggaagatattcaagtcacttgatgatattgatattattcgaacatttaccgcanagaagtctcggagaggacacttgcctcgtaatttatttacccgctattgcagattatgttatctctttatttaac

SEQ ID NO: 179628 - DNA, 313 bp, Glycine max
  unsure (1)..(313): unsure at all n locations
ctacaacatataacacataagcatgattgattagagaggcatccttatacacatcagctggtctgttagaaagacccaacacttctacctactgctgtcaattntacttacttgcatttntactgtttttagcctagacttagtttaatcctgttctatatcaccgattattaatgtttctttcaacaatgccttatttctgaatataaccctgtcttagactagttccctgagttcgatactcggattcatccgtntaatttaaatacttgagatacggtgcgctttcctgcaaccggattcccttgacata

SEQ ID NO: 179629 - DNA, 458 bp, Glycine max
  unsure (1)..(458): unsure at all n locations
agctttattaaaatgctcaactccctntcttaaatctgatttcaggcttaaataggtggctttttgttcgtgctcgtacacttagcgcaattctgaaccgcttagtgcgcattaatgaattttggcttagcgcggcttttgttgctcaccggatggactgaagtggtgcacttatctggaagacccttcgctcagcgaacatgcacaactcatccttcttccagattcttcctcgtacttagccgaggaatgatgcgctcagcggatggctcgctaagccagcagattggcttagtgagagggtgaaaatcaacacttcaaagcttgcctcattatcctaaaattgagaganaattattattaaagacacaaaatgaaagtgataagtatttattacctcatctttacaaaatgtaattacaacactacanaataaccataaatggaggggttgatac

SEQ ID NO: 179630 - DNA, 460 bp, Glycine max
  unsure (1)..(460): unsure at all n locations
cttgaattcattctctgcacccttatgggtctatctgttctttgcatgncnncatcttcattcttctaccatcggtgatctttttctttgttttaagcgagtttcgatcggttgcttaagccgtaatctcacttaatcactgttaaaatgaatntcaaccgattgattgtattgtaatcttgtttaatcaccgctaaaataaaattcaacccatcgtttgtgttgtaacctcggttaatgattgaaaaaataagtttcaaccgatcgtttactttgcaagtcctcttttaatgagttcgaaaataaccaagtgaaaccaaagctaaaatcaacccataatcaaagcttttatccacaaagaatcactcgaatccgttcaaggtccaatgccttaatagtctctgttactttaacggttaaatgaacctcttaaagtctaaatcactctcgcataactctt

SEQ ID NO: 179631 - DNA, 407 bp, Glycine max
  unsure (1)..(407): unsure at all n locations
atagcaattcttgtccncaacaaagcatttcttcaaccaaaaccaatgcatttttcaggttaccatcgctacattccttacttacaaatgaattgaaagtgggtaccatggattcttcaagatccaaagtaatgtgtttgtcatactcatcaacatctgtatccaaataaagtccatttccaacctcatcaaagaactctgttttcgaaagtcccccatcattgtctcgtttcaacttcacactcaaagggcccaagcccaaaatcagagaagccttggaaatcggattctccatcaaagcaagcttaatcaatccacggntctccatctcatgaatcaaacttttcacttcatcaaaccgcctagacttacaatagcncgcaataaagactctgaaagtcgaaata

SEQ ID NO: 179632 - DNA, 433 bp, Glycine max
  unsure (1)..(433): unsure at all n locations
cccctccaaagtgtgttgcacgggtataccaccaactgcttgcccttcagtggcatatacgaggcaaggctcgaagtcagctagattgtggtggggaatttcatgtgtctcccccatgggttgagagacatgtacatgatgaggttgttggctctcaatgagtatgggagctaagttatagacatcctcattgggagtgtatgccacattgggtggtgtatagttgggaggcaagccatatggcgggaagtcgtgctcattttgaatgtgcacatcatggggtcgtctgtacttcccanatctttgactacctatatgaggttggatgattcatttcggtaaggatacatgggggcatcgggctcaccttatctatagcgttcgtagccgcaactacaaccgcattggcttccattatcctactcatgctcat

SEQ ID NO: 179633 - DNA, 471 bp, Glycine max
  unsure (1)..(471): unsure at all n locations
tcagcttataaaagttatatggcttgaaacaaggaccgagacttttgttttagatgtttaatgagtttatgagcaactcgggattcaacagatgtgacatggaccattgctgctacgttaagaaatatactaatagttatgttatacttgccatgtatgttgatgacatgttgattgcaggatctagtatggcaaaaatcaataggttgaaacaacagttggtagaaaactttgaaatgaaggatcttggtccagctaaacaaatccttggtatgagaattcttagaaatagatcagaaggaattttgaagctatcccgggagaaatatatacacaagctacttgacaggttttaccttgaagattctaagaccagggagttgataaatgatggagacttatctttgctgaagatcttatgatcagaggatccaacagatatgttgactaaagcntgtacaactgacaagc

SEQ ID NO: 179634 - DNA, 495 bp, Glycine max
  unsure (1)..(495): unsure at all n locations
ggaactataaaactaagcttatgtaaagatggactcttacatttgtattttattttaacgttcaaaggcatnggtaatcgattaccaaaacattgtaatcaattacagccttttgaaatcaattggaacattgtaaattcatttgaaaactttttcaaaaacattttgctactggtaatcgattacaacaatctggtaatcaattaccagagagtaaaaaactctttggtaaacatgttttgagaaaaaattcatgtgctactcagtttttgaaaaaaacttttcatacttatcttgattatgctttttcttgattcttgaatagccttttcttgattcttgaatcttgagtcttgaatcttgatctcttgaatcttgaagtgttcttgattctatcttgaacatcttgaactcattctttgattgacctttgagctntttgtcatcacctttgtcatcatcttttggtatcatctttggtatcatcaaaacatc

SEQ ID NO: 179635 - DNA, 80 bp, Glycine max
tgaatatcttgaaattattggctcacctttactcattttatataagtgcgattaacacttatatattagtggtaaaaaca

SEQ ID NO: 179636 - DNA, 480 bp, Glycine max
  unsure (1)..(480): unsure at all n locations
ttccttcttnattaatgcatgtgtggcnctgtttcttatttgtttaatngnnactccctcacttcattatctctcaacaggttgtgctntttcctgtgttggctggtgcatttctgaaccagtttttcaaaccttttgttaaacttgtctctccattgatgccacccattgcagtaacaactgtggcaattttgtgtggaaactctattgcccagagttcttcagcaatccttgtgtgtggtggacaagtgattttagctacctttcttctccatgcttctgggtttttctttggttacatatttggaagattgcttgggttagatgtgtcatcatcgcgaaccatatccactcaggttggcatgaaggtaaattaagttggtagttcctttgaataacatantgaaattaatttggtgtcaacatgtatcaatgcatganaatgtacatggntgtagagagtacgtacgtaatgattca

SEQ ID NO: 179637 - DNA, 479 bp, Glycine max
  unsure (1)..(479): unsure at all n locations
tgttgaagatcacagaaacttctttgctgggatctttttttttattatttgctntaaagnacttntggtacatgaatctttgatttctaactatgttattcttttgggatgagattctctagaatagggattttttgtttggttattatttcactttttcaaaaataatgagttagttaggaatgtactaatgatgtaaaatagctttacactgtcattaaatttaaattattgtctataaagttaacaaatttattataaataataatttttgattggacaatgtaaaatgtttttattgtatcaatgcatagtcatttttctcataaatgaaattatgatgagaaactttagtaatcattcactcaattattgtgagaattattaattntcacttcataaatattctaagaatctttntagggaaatattttattctattgtagcanatatggaaacatttattcttgtacaaacgt

SEQ ID NO: 179638 - DNA, 479 bp, Glycine max
  unsure (1)..(479): unsure at all n locations
ntataatgcacaccttccatctacatcttagtatcatctctattcatctgcaatattcctaccacatgaaatctacactataaagtgcatcatctcctcttgttctcaccaaataggttattagacccagaggtctaagactgactttgtccacactttataattattttttatcgngtntgtatcttttttgtgtatgctagatccatgagccaaggaacaaaaccccattcatggacctccattgcagatctactcagatggaattcgttgaccatgtctcatatttctttgccctctcttttatgctttgccgtatcgtttgttctaaccatggccaataaacatcttcaagctgcaacgaccatgatttctttgattaactatataagggtaaaattctacctctnttgttattgtaaattaactcatttattaataacaattacatgattaatttgatcatcactaaagacatg

SEQ ID NO: 179639 - DNA, 458 bp, Glycine max
  unsure (1)..(458): unsure at all n locations
ctaagctttgagcannattaatgacaataacattattctcggggttcggnntgagcccgaaatatcgagacgctccaaattgaaaacggaaactcttagaaaattcaaatgacaataactttttactcggatgcccgagagattgtcgtaatttatcgagagatgctccaaattgaaaacagaagctcgtatcanattcaaacgaacaataacttttactcggatgcccgacagagtgtcgtaatttatcgagggatgctccaaattgaaaacggaagctcgtatcaaattcaaacgacaataactttttactatgatgtctgatggagtcccgtaatatatcgagacgctcaaaactttgatccgaagctctgagaaaatngaattgacaataactttatacatggatgtccggntgagtcctgtaatatatcgagacgctgcaactgaaacggagc

SEQ ID NO: 179640 - DNA, 474 bp, Glycine max
  unsure (1)..(474): unsure at all n locations
cgcttgtccgcanaaatcactaanaaccgtttntattgtccattgtcttaaacggncttctttgcttntatcggttaacatggaccgttcaaaagcataaaatcaagacgtaactttaccgcttttgcaagaactacgtaggtttgatttcctaatagcaattgaggatacataggagcaaaagccccgcttttgttgaccaccccaagagatcgttaatggtctgacgccttaacgtttctctcctttcaaaacaaagagatcattaatggtccaacgccttaacgtttatctcctttcaaaagaatcaaaagatcgttcaatggtccaacgccttaaacgaaatttgttcgattaaaatatatcttgcgaaaaaagataaaaacaacttaaccaacatttagttctaaaagaactacgtaggtctgatttcctcatcgccattgaggatacgtangagtgaaggaaacaccc

SEQ ID NO: 179641 - DNA, 362 bp, Glycine max
agctgaccaagtcaccgggttttactcggctatatttgtttctttttagcaactcactaagtgttagtgatcaacaaatgcaggtgagagacgaaaagcgacccccgcactaaaagtagaggaaaacctcaagtcgagaggaaagagaacaccgggacatggggctttacacatacttataaaggcggacgtaacacacccacataaatacctgagtggtacacacacttcacaacaaaagtacctttgacacatacacaggaagtaagaacagatgcagatacacacacatgacctgatgcatgaccaagactttaccgtgaaggacccatggctacctgcactactaggccaaataaggc

SEQ ID NO: 179642 - DNA, 411 bp, Glycine max
  unsure (1)..(411): unsure at all n locations
ctatatcgacacgctcgaaattgaatgttgatgctctgagcaaattcaaacgacaataactnttaactcggatgtttgattaagtcccgtaatatatcgagaagttcgaaattgaataccgaagctctaagcaaattcaaacaacaataactatttactcggatgtccgattgagtcccagaatatatcgaaacactcgaaattgaatgttgaagctctcagccaattcaaacgtcaataacttttaactaggatgtcggattaagtctcgtaatatatcgacacgctcgcaaatgaatggtgatgctctgatcaaattcaaacgataataactnttaactcggatgtcggaattagtcccgtaatatatcgagacactcgaaattgataccgaagctctgagcaaattca

SEQ ID NO: 179643 - DNA, 488 bp, Glycine max
  unsure (1)..(488): unsure at all n locations
ctaagcttttcctatttctcgagaaaaggagaaccaagtttattatgtgtttttgcaaaagaactagtttgcagttttagctaaatagattaaccgttaaggtatcaatgtcaacattatattcagtttaagttttgaagttaggcaccaaatattatagccaacttgattgaacttttagctagtttagcaaccttgtaagcaactgtgtttgtgtgatgcaaaaacacatacgagaaaacaacaaatttagatgactcttgtcaaaaaaggcaattgataacataatttaaactaaacatttggttagaagttagctacaaaataattagcaaacatggcagtcacaagtaccccaaaagtcctaaaatgccataactaaagaagaagaaaaaaacaatnttcctgaagtgaaaagtactcacaataaaattaaattaatgagtaccaacagacaacaccaccatccatatgatgaaatgatttct

SEQ ID NO: 179644 - DNA, 390 bp, Glycine max
  unsure (1)..(390): unsure at all n locations
atggagaaatgcactaagcaatcactacgcatggctccaagctccagggtgaaggacgcatgaacgaaatcgccattcatggggctccgaaaaagggttgaggatggcgaattgcactaagcaatcactatgcaaggctccaacctcctgggtggaggacgcatgaacgaaaacgcaattcatggggctccgaaaaagggttgaggatggagaattgcactaagcaatcacttcgcatggctccaagctcgtgggtggaggacgcatgaacgaaaacgcaactcatggggctccgaaataggattgagaatggagaatngcactaagcacattacggcacatggctccaaactcatgggtggaggacgcatgaacaaaaacgccattcat

SEQ ID NO: 179645 - DNA, 449 bp, Glycine max
  unsure (1)..(449): unsure at all n locations
gttggatttaatttgtgaggggaccattattagttgtactttatattttatggncatataaaagttaccgatgaccatctaccacagatttattagctaaagtaaaagtatttattaggtgaactaagatatttctggacatgaatttggagacttatcttttaaattatgaagatttatttattcaagaaactagtctttcttactcttaacaaatattctttcatatatacaaatttaagcatcaaatacttcaaaaatataactttgtgtcaaccatgcgacattattttattgttccagggaaacaaagcctaagtttatttcttttctttgatattgttttggataaagaatagtttaacattataaaagcctgattatttcacatgctaaacggagttctgtgaaagtggaananaaaagtatcattcatttaacgtgtcttg

SEQ ID NO: 179646 - DNA, 441 bp, Glycine max
  unsure (1)..(441): unsure at all n locations
tgttctnngattttcctaagttctntaacaagcttagtttctttacttggccttcgtttaattgtctttgggcttggcgaccacgatcaacaaagtactttcggcacctactatatgttgacttgaccagcgctgttattggaatgctgcgacaatctttcaacaccttattcacacattctgagaggttggttgtcatgtgaccatatcttcgtccagatgtattgtaagccatgctccatttttcctttgaaatgcgatcaatccatgttgctatggctggagtcaattgatgaattttttctaagttttgatcaaacacatgcttgcaaggcgtgtacgctgcatcaaaattgttaccatcaaaagttgtaggtagatatgaaactcaaattaactttcatgtataaaataaaccttacccaattcttgaacatctct

SEQ ID NO: 179647 - DNA, 488 bp, Glycine max
  unsure (1)..(488): unsure at all n locations
ctatgaaactaagcttcacacaatttattttctcaaacttaagnnttgtatgtatctttatcttgncnnccctaactagatgattgagatgatgcatgtttacgtgtgcagtcctacgatgcgacaaccaagaatcatctattttacttgccaaacaactaagctcatgaaatgatgcatgtttaatgtttagcatatagatattacctgtccttttactaatatggacaacctcaccagacatggcttcactaatatggcaataattcttattgaattcgatattgaagcctgtgtcacataattgactaatgctcaggaggttatgctttagtccatcaacatatagaacattctttatctgagttttgtaccgatttccaatatttccttctcccataattntccctttattggtgtctccaaaagtgatgtatccttcatctntttgacacaaagtcagtgagttagaacttgtctccgtcatg

SEQ ID NO: 179648 - DNA, 279 bp, Glycine max
aacggaacaaaaccaaggcggaaaacacgcaggaaagaaaacgcaaagcaaggtcacgagtcaccgaccaagaccaacaaaagcagaacaaaaacaacgaaacgcatcgaaagaaagcacaaaaccaaaaggccacaaaaaaaacattcccggcgcaccgcaccccgcccggaacccgagagaaagaaccgaaaacgacgcacccaaaacaacaaaacgcaaaacaccacaaaaaacgccaacgcaaccaccaagccaggccgcagcacaacagccaaa

SEQ ID NO: 179649 - DNA, 319 bp, Glycine max
  unsure (1)..(319): unsure at all n locations
actcagcttgaaaatgttgggtttcaccttctctctaagccaatcttctggcttagngagcttccgctaagtgcaacactcatgggttaagcacgaggaagactctggaagaagatgagctatacaggttcgctaagcgcaccgcttcatctcactaagtgcaccgcttcagttcatccactaagcgagaaaggcacgcgctaagccgaaattcactaatgtgcgctaagcggtccataattgcactaagcgcacgaactcgaacaaggccacctatttaagcctgaaatcagattttagagaagggagttggactggg

SEQ ID NO: 179650 - DNA, 391 bp, Glycine max
  unsure (1)..(391): unsure at all n locations
caagttgatccatccatccattgcaaggaaaaacacatcttggccatcattgcttctaaaaatccacaatttgcatgatcataagccttgcttatgtcaatctttaaggccacttccccccttcctttcgttcgacatttgaaataatggattaccttagtcaacaccaacacattatccattatgggtatctcttctatgaatgttgcttgctcctccacaatacacttactaaggaccctcttcattntgtttgcaagttctttcaataatatnttgtaagcaatgttgcataatgagattattctctcatcaagctaggtttatcacactntggaatcaatacgatattcgtatcatttaaatngatggaaaatatccccgctacaca

SEQ ID NO: 179651 - DNA, 484 bp, Glycine max
  unsure (1)..(484): unsure at all n locations
actaagctgagccaaattggaacaagccagaactagnnncatcttttttgttttntcacnnnagcttagncaaaatcttaagctcaactaagagtcactcacaataaataatttagcttttccataaataaggcttgactgccatttataaagtgaggggggagttcttcatttggcatgaattcacagtccatcgagaggggaagcttcctttgggctccactcttcatctttttcctccctccatgtgttttgaggctacccatggaaatgggtagctaaatcctccaccattgnggttagatgcaaccaaactcatattctcttctatcttttgatatcttaatatatatatatatatatatatatatatatatagtattaatggtagcatctgcttctttatttaatgtttgttgtggaatttccaaccatggcactgtttttgtacttgatatgtgtagaaaatgctttcatagtcttg

SEQ ID NO: 179652 - DNA, 91 bp, Glycine max
tatgagcctgagatactagacctgctcatctcttcatgtgatacaagtaacccattctgacactgactgagcattcgtgatccagctccta

SEQ ID NO: 179653 - DNA, 349 bp, Glycine max
ttaatatcactctgaacagaggcatcactgaatctacgaccaatcaatctcttggcatctgcaagaggcacaaagaaaaatataaatatgcaatcctataataattcacattaacaaatacaaaccaacatctatcctgagagaaaaggcactgaacaaatgctaaaacaacctcaatgacaattcaatctacttagtcaaaacagtcaatatatagtcaaaaccctaactgttttacttaataatgacaacagtatgctttcacttaacaaatacaaaccaacatcttctgagagaaaaggcactgaacaaatactaaaacaacctgatctgcaagcaatgtcaattc

SEQ ID NO: 179654 - DNA, 482 bp, Glycine max
  unsure (1)..(482): unsure at all n locations
tagaannactaagcttgagaacaaaactcaatgtgaaagaattcactcgcacctcgtgttttgtgctttgcgccaagttgagggggactgattgccatcaaggtcatgtctgaattgcccttcaattcgatcaatttaccttcatgaataaatttcatggttaagtcgttgtaattagtcaagacgggatcgagggacttgagccattgaacccctaaaacaatgttagcttcgcatagaggaaggacatgcaagtccatggtgaagatgcgtccctgaacctgcaccgcaatgttcaggcataattgataacattccacctcattgtcgttgctgacaagcactcgcaatgttggggttggctgtgggtttaacccanaggatttgacgaggcatgcttgcacaaaattgtgtgtgctgcctccatcaacgaggatcaccacctggtggtgagaaatctggtcgttcatgtgcagtgtctc

SEQ ID NO: 179655 - DNA, 485 bp, Glycine max
  unsure (1)..(485): unsure at all n locations
aactacgcttgcgatgggctaaaagaaggggaaacntgcaaggtancttataaacaagnattccttctatacaaaagtgcaagacgagaaaagcacaatgcaaaatagtgaggtcatcctaagggctgaatctcaacactctgctagtgtacatgatgataatccccgtgtagctttcatcccttactttgggttcattgaaaaaatttgggagcttaactatatcaaatttattgtctgtgttttcaaatgtaaatgggttgacagcaacacttgtgtgcggactgatgatgtaggatttacgttggtatatctaaagaaactcgcttaccagaataaccctttcaacatggcagaacaagctaaatagctattntatgttcaagacccttgtgatgaaaggtggttagtggttcttcacaggaaaaaaatggcgttaatgttgaagatgatgattcatacattgatacttatggtagtccttt

SEQ ID NO: 179656 - DNA, 328 bp, Glycine max
  unsure (1)..(328): unsure at all n locations
tggttatctccttcttcactacatcaagaanattcgggttgattcttctctatggctggcttactggtttagctccatcctctaaatttattcaatgcatacatgtgaatgggctaataccaggaatgtccgccagggtccaacctatagccttcttatgctctttgagaactgacaacaacttctcctcttgctcatcagccagggaggccgatataatcactggaaaactcttgctatcatccaaagtagcgtattttaaaattgatggcagaggcttcaattctggtgtggtccgctggacaatggtanaaagggatggtttctc

SEQ ID NO: 179657 - DNA, 477 bp, Glycine max
  unsure (1)..(477): unsure at all n locations
tgtgtcgaaagaatattaaagaagcacgattaggtatacatgatttgtcttctcatttccccaactgtgcctaccaaatgataaatgtaatatgtcaaaccaaactaccaaaggtatcccaacatgaaaattagcaaatatggcatccatttgaagacagtcacagacaaatagattgaaacacaagtcaacatgttttgaattcacttcttggtcctctntgggcttgtcactcatcactttccactgcaattgcaacaaagccctttgcctgtcttcctgcaatatattccaaagaataaatataataataaaaattatgacaagaaattaatttatcatatcaaggtattccatactttggatttttgaagatgcaactcctcttccagcttccgacactcatcttcaagttcacacctcaatgcttngatctgagcttcatgatcattcctcataaaacattgtttctacata

SEQ ID NO: 179658 - DNA, 486 bp, Glycine max
  unsure (1)..(486): unsure at all n locations
ctggccgccacggaatttccgactatgctcttgtgtggngttcttgctacaaaaggagagagcaagaaatgaagagccaatggttgatacatggacggagatgaaaaagatcatgaggaagcggtatgtgccggctagttactcaagggacttgaaattcaagctccaaaaactaacccaaggcaacaagggggttgaggagtatttcaaggaaatggatgtgctcatgattcaagcaaatattgaagaagatgaggaggtaactatggctcgatttcttaatggtttgactaatgatatccgtgatattgttgagctgcaggagtttgttgaaatggatgatttgcttcacaaagcaatccaagtggagcaacaattaaaaaggaagggagtggctaagaggagttntaccaactttggttcttctagttggaaagacaaaggtaagaaagatggggctgctacttctagtagttccacacctat

SEQ ID NO: 179659 - DNA, 475 bp, Glycine max
  unsure (1)..(475): unsure at all n locations
tctcaaggaagctacctagtctataaatagaagcatgtgttacacttgnnngaactntgatgaatgagagtcttatgagacatacttcaaagttccacttctctccctcttttattccttcaatttcgtgctcccccctctctctttctctccctctttcttttcctccattgaagcatccttccaagcttcttatccaaggctcatcttggtggtaaagctccttcttccatggcttattccctagtggatggcgcctcgtctcacctcttctcttttgtcttccgctgcatctccatggtggataatcaccattagaggacctcattgaagctcanagatccagcctccatagaagccccacaagcaagcttccatcagctaggatcaatattntagttgatctattaaatgtcaaatggctccactggccgcagccaaaactgtcaagtgattaaatcaaaacatacactct

SEQ ID NO: 179660 - DNA, 495 bp, Glycine max
  unsure (1)..(495): unsure at all n locations
ggaccttgaaactcagcttaagaaaatttgaacatcgntnnggatatttatcatgatcattctatnncttgacattggtaccttggtaattatattatttctcccatctctgatggaaagactggaatctttcatgtgaatatcatagccttttttgagtaattgtcccaaactcaaaatattgttcttcatatttgggacgtagtagacatttgatatgaattcatgtcttgcatccttcaaatggattatgatcttacctttttccttttataggaatattggaattattaccaaattaggcattgccacttactgactcatcaagatccacgaacatgcttctttntccacacatatggttgcttgcaccagtctccaggtaccatgtgttttcttggttacctttattacctncatgtgctanngagaacttgttcaaacttccatctnnttgcttcacatagttagtctccctctcaactctattcttgg

SEQ ID NO: 179661 - DNA, 471 bp, Glycine max
  unsure (1)..(471): unsure at all n locations
tatgggctgatgtaatgggcgtgttatttatagattttaatggtagatggataatataaccacatggtccacacccatatattntagaatnttgacaatntgtttcctctttttgcttactagatatcagctttaaagctcatttaatcacttatacaattggtttagtttaaatgttcaactgatccaagatcatttagtagcttcaaacttcttttctgattcttttattagagctccagctttatggcatttgagtttgtttattgcttgtagaagtttctgacaactcatgctttaattaaaacaaatggattattctttagttgtacttgttcctttaatatttcaggtgttgnggactttcatcactaaatgggatgagggaaaggctgtctgtgatacactgctttcaacanagaanactacacatatngtatgcagaacgttggcagagctttgctgtgatct

SEQ ID NO: 179662 - DNA, 485 bp, Glycine max
  unsure (1)..(485): unsure at all n locations
nttagcacaacacttcaatgccacatgtcagctccctgttgaatttcgctcctgcctctggggcaatgcanataaaaacagacccccttttgataaataatttgaaaaaggaccccanacgggtggttttgcctttcttgatgtatagcaacttccgacttttattagccagttgtttttttggattctttanggattatctctcataggatagtcttaatgtaattttttgggcttccactatgttaatattaaaaaagaaattcgaatttgatattatccaaatcaaactagacttgttcaaatatgatgacctccaatttgagtggagattgtttatttttaaacctatgaatccaatgatgcaagctgttgacatgacattntttaattattatatatatatatatatattaaaaatatttctaggaaagtttaaacaatatttaatntattagaccctatagatctaacttgacccatca

SEQ ID NO: 179663 - DNA, 277 bp, Glycine max
  unsure (1)..(277): unsure at all n locations
tcaagtcaaccaaggcacatgtaatggattaccaatacatgtaattgattaccaatggtttgaaagtgtgtaatcgattaccagagactntgaacgttgggaattcaaattttaaatgaagagttacaactattcaagaaaaataactatgtaatcgattacactaatgctgtaatcgattaccagagagggatttcaacgaatatcgccaacaatcacatcttatcatttggattttgaatgaccatcaaaggcctatatatatgtgtgacttggg

SEQ ID NO: 179664 - DNA, 432 bp, Glycine max
  unsure (1)..(432): unsure at all n locations
gagaacttatcccctttcaaatcatggaagctcatctatgaatgctattggaaaatgggagtttcgggagttgaagaaattagaggatgtgtcgaccccaaagagattcattttgggggcattacgcaaggctggtatggttgaatacgatggtaatgagggggatcagtgcctgctacatccaggggagtttcatgatgtagaaatatgccaagtgtccaaggatttgttgtaggggttgataaatgggggtgggttgaattaaaattggccacataaggaaggaggaangtgaggtgtttatgcaatcgagtgacgctaacctaaataagcctagacctttggtaattcattttactagagatgttaccactcacatgcctcaagaattccagcccattgtggtgaggacaccaacacattcccttatga

SEQ ID NO: 179665 - DNA, 480 bp, Glycine max
  unsure (1)..(480): unsure at all n locations
tntatgtgaaaggatgtgactctgcacattggaatcngttattcattttttaaaggcatnnggaatcgattaccaaaacattgtaatcaattacagccttttgaaatcaattggaacattgtaaattcatttgaaaactttttcaaaaacattttgctactggtaatcgattacaacaatctggtaatcaattaccagagagtaaaaaactctttggtaaacatgtnttgagaaaaaattcatgtgctactcagtttttgaaaaaaacttttcatacttatcttgattatgctttntcttgattcttgaatagccttttcttgattcttgaatcttgagtcttgaatcttgatctcttgaatcttgaagtgttcttgattctatcttgaacatctcgaactcattctttgagtgacctttgagctctttgtcatcacctttgtcatcatctattgtatcatctttgtatcatcacacatc

SEQ ID NO: 179666 - DNA, 437 bp, Glycine max
tggttgggtgaatgcaatggctatgaagtggatctgaatttattctacagaaggaaccactaaatccatcttttggatgtattaaatagaaagccaaatggactgaagtgttccctataacatatgtcaacttgacttattgttcccctcaaaatcaaaaatagaaaaaaagtgacgtctgtggaaagagttacacaagaatttatgaatttccaaatgacaaccaaccataatatagaaataaagttgtatattaataatcaattcattcagtttattgcctcatgcacacacaaacctgtattaggagtgaattaatgaaatatttggaaaaagttggagttgcacttaatgaatagaaaacaagataaactagtctaaggtggtttgatcatgtgagcaaaagaacagcaaaggtccaatgtgaaaagtaaata

SEQ ID NO: 179667 - DNA, 465 bp, Glycine max
  unsure (1)..(465): unsure at all n locations
nttcctcttcattggtcaattgatgatgganggttgtaattttttattgcttncttaagggatttcaatctctgcatgctcttcctctttcgtggccacatcgttagtcatgtcatccaccaacttgcttagctgagttttagttcttcgaaaggcctgttgtattgattctatagtatctttgaattgcattaacagatcatccatattaagaactccttctactttattgtgataatcagattgtcggtatgactcccattgataacctgcagaagaccggttcctttcaaattgagttccctgctgttgcataaaataatagtaacctttagagctagcttgctatgtcatgaagtctgccaaaatactntcaagatcagaggctctttcttcctcatggtaatcatacatgaaccggtncttgttccggtcaaagttatttatagaataaaaataacaact

SEQ ID NO: 179668 - DNA, 435 bp, Glycine max
  unsure (1)..(435): unsure at all n locations
tcagctgttctatgattattggtcnagctggttaccgttattttttataagngaaatccataacttactaagtaaaggttcaaattgcgagatacctttatctaaaaccatgtgattttcagagtaatgggatttggatatattttgaaaatggtggggattgggagaggttttcaaaattaaaggttgtgacttttcattaaaatcatgtgatgtaactactcacaaagggttgtgagatgtgactcctcaccaagggtagttagatgtgactctccactaaatcaacagatgtgtctctttgaaaggttaaatcacttcacgaaacacacatgagatggtctataaatagaaccaatctacatacagaaaaaatgactagagtacacaaggaacaacaaaaggagaaatcattacattcttttgtatccaaat

SEQ ID NO: 179669 - DNA, 474 bp, Glycine max
  unsure (1)..(474): unsure at all n locations
tatgcttcaaacatttataatagacctctttatcagcaatactctcaacaacagaataattatgacctttcaagcaacagatacaatcctggatggagaaatcatccaaatctgagatgggcaagtcctccacaacaacaacagtctatccatccttttcagaatgctgctggtccaagcaagccatatgttcctcctccaatacagcagctgtcacaacaaagaaaacaagcaactgacgctcctcctcaaccttctttagaagaattagtgaggcaaatgaccatccagaatatgcaatttcaacaagagacaagtgttngatcaagtggactcggaataattaagaaggggggtgaattaattattaatgaacctttactaattaaaaatccatccttcttaatgttactagattcaattaggcttttactataatgttaagaaagtaaagaacagaaatagaaacttaac

SEQ ID NO: 179670 - DNA, 478 bp, Glycine max
  unsure (1)..(478): unsure at all n locations
ggcatgcctttagaaactaaattggcgagatatgtttcttattcggngattggaaaaacgggggaaactgtcatttggaaacactaccggagcttggatcttcattggtgcctaatgacaactggtcacaattaaaaatagccaatgctatcttatctgctgcacacacaaatatttctgaaacaaacaagttcatggtgttaaatgtaacccagatgaccgctcagagaaaagatgggcattcatctatctattatctcggtcgtagtgcgggccatgtgcatcatcatcgccaagattgcagccattggtgtctacctggtgtacctgatacgtggaatgagctgctttatgcactgttgcttaaacatgaaactgctcacagagggaacttgtaacacgcatcagtatgatttgctgagaaattggttaattctgcgcaagaatatgccaaatctttcctgganaagtgtcacac

SEQ ID NO: 179671 - DNA, 345 bp, Glycine max
  unsure (1)..(345): unsure at all n locations
tatgcagagatgcgagttcgaagcgaaaggcgttctgagagcttgagatcagtttgtgagtgattgtgggatcctagaggtgaaggagacatcctcaccacttatgtttttgcagtctttcatcttgttcttctctttgttgtaaaagaggttttcggactatggaaagctaaatcctctgttggatcttccctgtaggtacctgatgtaaatatatttttatctacgtaatgatgttttgtgtgttctctgtgctatctgcttttcattccagtgtgtttttaccttgatcacatagatgcatgctntgttagggtcattcaacagtgggaactggtctaattc

SEQ ID NO: 179672 - DNA, 379 bp, Glycine max
  unsure (1)..(379): unsure at all n locations
tcatctaataaaaaattatctcttgatttgataattgataatatatatatatatatatatatataagaaaatgtcttctgttacaaaaattgcaatttcctagttattcgttatagcagtgaatgccatgcttctcggactatatagcagtgtatacgatttcaacagcagaccaacagaatcaaattcttatttattaacattttcatatactgcatgtttaattagttagattattngagcattcaaatagcttaaagagatatccaaatcaaacaaaataataaagaccgtccttgttgaaaaaatcttggcatgggattcccttcctatattaattaagatgaatgattaattcgctccatgaaacaactagtat

SEQ ID NO: 179673 - DNA, 480 bp, Glycine max
cttttcgcaagcttacggtaaaaatctgagacctagccatgttaatgtctctcttaggccattgcctccctcgcccagtattatgatcagccattgaggtgcttcacctttggggacttccagctatcacccatggtagaagaatttgaagagatcctaggatgttctctagggggaaggagaccatacctcttctcagggttctacccctcattggccagaatttctaaaatagtccaaatctcggcgcaggaattagaccgccaaaagcaagtcgaaaatggggtggttaggaataccgagaaaatgtttggaggtaaaagcaagaatcttgacaggtagaggcgaatgggccccattcatagacattctcgcgttgttgatcttcggaggagtcctctctccgaatgtggatgggttggtggacctggcagcgatcgaacgttttctcgcctatcataaccacaaggaaagccccgg

SEQ ID NO: 179674 - DNA, 427 bp, Glycine max
  unsure (1)..(427): unsure at all n locations
aaaaaaaagagatgaaaatgaattaaaacacaaaatggcttaagttagagtaggattctcttatgtgaagatacctatggtctctaaaaaaattaaaaagaattaattgaactttgtcttttttgtacatgtcaaacaatttggaatgtcatgtgcactggaaactcaatgtgggtaagcatatggagcagagaaatatcgaaaatttagtgttcaaatatacactactattgtctctcttactttagcatgtcttcctctgactctnttgtgggtctacttggagaagatactcatttttcttggccaagaacccttgatttcacaacaaccttgaaattttgctttgtgcacgatccctgctntctttgttatgcaacacttcaagccttggtcaattctttttatgcaaagttgatcaatcctt

SEQ ID NO: 179675 - DNA, 498 bp, Glycine max
taaaactaagctaccatcttaattgaagcctatcagacctcagattgttttgttttatagatgcactttagatcacaacttatccatcatagggaagctgaaaaaattaagaattctcagcttttctggatctcgaattgaaaatttgccagctgagttaaaggacttggataaactacaattactagacatcagcaattgttcagtagtcaaaagaattccgcctaagtttatgtcaaggttgacttcgttggaagagttgtatgtaagaaagagcttcatcgaagtgtcggtggaaggagagagaaaccattgtcaaatttcgtttctttctgaactaaagcatttgcatcaattgcatgtggtggacttaagcattccatgtgcccaattttttcccaaggaattgttctttgacaagttaaatgattacaagattgagaatgggaacttcaaaacgctttcatgtggagatttcaggatgcctaataagtatga

SEQ ID NO: 179676 - DNA, 458 bp, Glycine max
  unsure (1)..(458): unsure at all n locations
agaaactaagcttttatttttataccgttgttgtgagaattttttttatctttgagcnccaagacgaagaggactattagctctgcctttcatttacaagttcaactaaatgcagtgtctggatttagttctgatgagaaaactatcaaggcaatttatgaacaaatgaagttgtggtataacaaagcttgtatactgttatgtatggattaatagaaaagaaattaattgaataatattaattattattggaaaagcctcaagttgatcattcaaagttagacgtaccaccatattagttctttggcttgttatagaaaattcgttattgttgttcatcaaggtaattgtattctacaatattttcttcgttgttaataatatcgaacgctntgtatttccaatgtcttcatctaagaatttgtangtaatgtaatattgtaattaaaataatattt

SEQ ID NO: 179677 - DNA, 482 bp, Glycine max
  unsure (1)..(482): unsure at all n locations
gaaactaagcttttcccgtntacttgaacctgggggtatgcatttcaattctgcnaaacaacnnagcaaaatatcttgtatgaaatggctataaacaggggtaatgatgaaataaaaagatatcataattattccctgcaatttagcttttcttttattccaattagctatcaactggtccgaccttaacttctcttttattccaggtagctatcaacagactaataggaaagaacaaaatactaaacatttatttaattaaatctaataaaaaatttgcttcaatcacattattgaacaaaatacttgcaaggtaggggtgtcttctaagagctggagtgtttggcagcctattacaagcaagtttgaagccaagcttgcaaaatggaaacaaagaagtctacctatggtgggcagaatcactctcattaattcagtttcatcaacaaagtgtaccataattctatgtatcaacaacattt

SEQ ID NO: 179678 - DNA, 322 bp, Glycine max
accaactcacccatagcagccccttcaatacgactccatgtatctcctcacatccctagagctaaaagatcataacaagattcttaagagtttccaccgacgaaacttgctatagaagctagactagacgctctatggaacacaatgctggaacttgttcatgaaccacgaaatgcgaagagactaggcaccatagacctctgacaagataattattgcggctgaaacccaaaccatacaaatcttacaagaatatcaaagcagaagacaacctcataaatgcagagagactcattcacccatacgactcacgcatacaagc

SEQ ID NO: 179679 - DNA, 480 bp, Glycine max
  unsure (1)..(480): unsure at all n locations
cttgaatctaaataagtatgtattttagttaaatgtttctcttttgcacaaaanaatttgttcctcaaaccaagtatattattcttttcactaattttatgtagctttgtgcatcacatactatatttacattcatacaaatccatgaatcttattaattataatgatacaaatggtaaatgttttaaaacaagagaaatttgttttggaaaaataaacttgtaattaatgttatcaatggcggatggcgaaaggccaaaattctgccatataaacacaccattgcaccttatggcaccgccatggcgagcctccattcacaaattgcctatggaggttgggttgttgtggttgtcaacagtttgtttcatagaatatactatagcttaaaatacatagcacatgcatttacctggctaccaaagaaatttatatgcactgtacaatcaagtccaccaaccaaatattgtccaccagtct

SEQ ID NO: 179680 - DNA, 463 bp, Glycine max
  unsure (1)..(463): unsure at all n locations
ctaatgaacttcaatgttttcttgatgtcatatcctccttattcactanggtggtaattgctccacttaaggatcaccatttcctgaaaacccttgtcctgcaaccaccagtccatgaccttgaaaggcttaggaccccaatcaacacttttggatcttagaaggataggacaatgatctgaaaaatctctatctataacaaactgtgttgtgtcaggccactgaatcaaccaattatcagaaatgaagaacctgtccaacttactcatggcactaccattaggtctgaaccaagtatacttcctgcctatagatctaacctcttctaaggccatatgagagatccaggaattaaattcatcaatactggatgagttgaccagattctgagatgaactcattctctcattttgatttcttatggagttgaaatctcctaaaatgcaccacatatcactttggt

SEQ ID NO: 179681 - DNA, 413 bp, Glycine max
  unsure (1)..(413): unsure at all n locations
actcaagctgaagagttatagctctggttaatcgattatatatattcataatcaattacatagttctttattagaccatgtctattntcttggatctctggtataatcgattacgaggatatagtaattgattacattgttattgaaagtgttcccaaaagtgatcaataacactttaatcaattaaattaagattctaatcgattatattgttcttgaatgttttccagattcggggaagaacacattaatcaattagatgggaaatataattgattactttctgagataattgattgagcatttgtagttaaatatttttctattcttctaagctcaatagacatctctgtgacccttattttctcaccttaactcagttttggtttaaggcaaatgattgagcttaattt

SEQ ID NO: 179682 - DNA, 503 bp, Glycine max
  unsure (1)..(503): unsure at all n locations
agacaactcaagctggagaaaacctaattaagcctgctgattcctttatggtctccgttttttactgttgnngctaccntcttccacttgtattatatgcatttggcaaaagatcacctttacttcctttacccaacagattaatcagaaagtgattgtggatcagaaaatcaaatcacttgtattgtgtactgatataaatagcttcctcatcaaaatccggtgcccttcactttggccaaaaggtttcatctgttcaacatctaggctaggcagaattcccttttcagaacaagcattaatagaatggcctcctagaagattaatatcgttctctatgggatatgggctgcctaaacttataactattgttaacctcaatactttgttgttgaaaaagcttctttacttcttctaagttactatcaaaatcaagaanatcttcctgaacttttttgtgatcaaaagttcaggaagagtgtcatcactttgatcaatctgga

SEQ ID NO: 179683 - DNA, 476 bp, Glycine max
  unsure (1)..(476): unsure at all n locations
taagcttntacttatgtggcagggcgggcttccttcactttcttgtctccaactctagctctgaccactgtccttccttcccgcggtgcttcttttcatgtccgcctgagtgggcttatagcctaaaccatacttcccacgatttccttgggtttttatcaggctagttatgccgccattgtctttgcctaaacccatcccgggttcataaccgttccccaacataactcgggccatcattaccgccgcatcggacagacaaggttgcccaaagagggagtccacggaggaaatgctgaccacctcaaaagactggaaagcggtttctaacgattcttctgcggcttccacataaggcatggaggatgggcagcttaccaagatatcttcctcgcctgatacgatgaccaagtgcccctccactacaaatttcagcttttggtggagtgtagaaggcacaactcccactgagtgga

SEQ ID NO: 179684 - DNA, 406 bp, Glycine max
  unsure (1)..(406): unsure at all n locations
atagaattatcacataatgcacaatttcttctatttctatattggntttaactttcaactaaattgaactttgttttccatgttgcangttgttttgttacgatggcactaagcacatacttcaactntgacactctacaaagtcccaacttagaaacaaacactttcgatgaatccatgctagaagaagtagcagcaccaaacctccaacacctttttccctattcagatgaaagcttgttcctttcaaacancgttttttagaactacattgaaccaatggtggttttctctatcctncagagatcaaccctcattatgattcattcactcatcgtgatgacattgttccaattaatgaagaaaacaaactacttccatgtccagaacaccaaaagtcctacta

SEQ ID NO: 179685 - DNA, 424 bp, Glycine max
aggcttgtctacacacacccctcttatgtctattctcatctccgtgaaaagacttcttgagaagctatcttgacaaacttccttgataagcttcctttagaagattcctatagaagtctaagcttatctacgcacctcctataatagctaaggtcaccctccatgccaaaatacatgaaacaactatatatatcctacgacagagactactcgagttgccatgatgtactgcgctccacacctatgctaattgaatggttaaaatacacggcctataagatggaagaacatattctaatatttacaaagaagagtggacccaaccttggcccatgggcttataaatctaccctacggttcatgagaaccctagggtcttctgtagaagatctaactcaatcctcttggagtcttctatcccata

SEQ ID NO: 179686 - DNA, 436 bp, Glycine max
  unsure (1)..(436): unsure at all n locations
atgttaagctccttgatggcatgcaatagaactacagaagaaaaggaatagcaaaattaggaacatgttaatatgactacaataacacttatataggatctttattccaaaattcagtatgaaaaacctgtatgaattgaatatatatatatataaacggtgagaatgacactagatgttatggaaatagaatgaaaaaaaaatgaaaaagtgaaaaaaggatgagtaagaaagatggaaagataaacaaaatgttaaaccaaatgaaataatacaaataatggagtgtatggttacaatattgttatagataagagagaaaatatatgggtaaaatattaaaagaaaaaaaatattaataacataaatagttntaaaaaaattataattttttttgcgtgtcatcttcttgccttttcagaagcccatcaagcat

SEQ ID NO: 179687 - DNA, 480 bp, Glycine max
  unsure (1)..(480): unsure at all n locations
ggtccttcagngnctgaaatgctgctgaacattcttcattaattttttgtnccancnccattcagcaaggggcttaggggtctaacaatctctgaaaaatccttgatgaatctcctgtagaaccctgcatgccctaagaaacttctgacacctttaacattcagtggtggtggcagcttctctataacatctatctttgcccggtcaacttcaatccctctagctgagatcttgtggcctaagactatgccttctcggaccatgaaatgacaattctcccaattcaggactagattagtctctacgcatctctgaagtaccatctctaggttcctcaagcaactatcgaatgaggatcccgaaaccgagaagtcatccatgaacacttcgatgcttttctccaccatgatttgaaanatggccagcatgcacctcttaaatgtggctggtgcattacataacccgaatggcattcttttg

SEQ ID NO: 179688 - DNA, 476 bp, Glycine max
  unsure (1)..(476): unsure at all n locations
tctactcatttcanactataccaacgcatggttcacatttcatgaaaagtctattngcgaaagaatatgcattttccacccgaggtaaaactatacaacattagaatcgtatccaagtcttaagaaaaacaactaaaggctatagttgtgttccctttataatgtcttgctcatttatctgcattgtcttttttctctcatgaataaagtatacaacatgtagcagcatggaccatattattttgtctaatggataataaagttgagggttaacttataaacctgactagcaaaaacacagtatttatctcctaaagtaaggtcattaaatgggtcaaaattcaaatatcaaaacctcatttcctctgccataataggagaaggagatatcatctggttccttnttcaatattttagcaatctgccaagcaaagatgaaatccaccagctcaggaattgatgcttcatcacctata

SEQ ID NO: 179689 - DNA, 482 bp, Glycine max
  unsure (1)..(482): unsure at all n locations
ttggtaataatttttaatcttaaaaatattggttnttttttatttctttaaatnntngaaaaatggattntagtctctttcattatttgtataagtggtgttataatttgtgatgatttgttactatcaattttttaatttagttttttttaaatgatttatgataattcaaaatagtatataaaatatcgtgacaattctacatctatatatatttttttaaaaccaacctaaaaaatgactatcaaaccatatgagctaaatatgttggtgatttaaaataattagaaataattttttaaaagaaaatttttaaataaattttgacatttataaatcatcacaaattgtgaaatcataaataccttgaataaagaagaactaanagtaacttttcaaaanattgagagacntaataaaagcaaataattttttaagtactaaaaaataattatccaaatttaaagaattaanaatatatt

SEQ ID NO: 179690 - DNA, 452 bp, Glycine max
  unsure (1)..(452): unsure at all n locations
cgccttgttgatttggttttcgccagcgaaaggatcattgtttatctattattaggaaaatntaattatcctacttggatgaatatgaagcttggggaaaatggagagaataagaaggagggaagaacccgtgctatgactgttgtccctacatggccaaatttctcgccaacttaacaatgtcaacactcagccaatatcagtccttctcattgcccaccaccctaccagtcaagaacacccaatcatccacaaaggccacccctaaatcagccgcaaagccctcctgtcgcacatccgatatcaaacaccacccttaacacaaaccaaaacactaaccaaggaaggaattttctagataagaagcctgtagaattcaccccaattcccgtgtcgtatgctaatttgctcccatatctacttaataatgcaatggtagtcataatcccaac

SEQ ID NO: 179691 - DNA, 453 bp, Glycine max
  unsure (1)..(453): unsure at all n locations
tacccattcagttttaggggttttatgatgattcttgttatgtttatgngctgaaatggcttatggaaaactgttagagatgaagggtagagttaatctatggttagaaagtgagaatgtggtgttgagtggaaaaagagtgaggccttgagagttggaaggttaaatctggattctgtggtaaatggaggttaaagtgagttaatcctagcttgaaatgtcatttaggacttatgagaaagcttggactgtgctagagagaaaaacaaatgaccaaagtgaaccaagagccatttctagggcaaaattgggtgtggaggagtcaaattttgattcggtggaattttaggtgtaaatccagtttgagcaagtttagatggatgttatggacttgtgtgaggtgagaagttgcttcagatttacctcattctcaatttcacttctcanacctag

SEQ ID NO: 179692 - DNA, 394 bp, Glycine max
  unsure (1)..(394): unsure at all n locations
cacaactaccttgctaatcaatgtagcacctataacctcttatttggtgataaaacaatttacaagatcaaggacccaattacaatttttttagtttaggtctcagggacctaattaaaaaattcccaaattacaacatccctccctcataccttcgcatagcgaagagcctccggacaatggggtacgaagtttttaagtagataagtggatatttatacttgtggcattacatgcaaattagagaattctatatttaccctgacaatcttgtaagatgattcatggagttatatatttcatatcgattctatttcttttttctttttttctttaagtaaaaaaaatctcgtgcctttgttntctttcgcagcattaattcatgtgaagcagt

SEQ ID NO: 179693 - DNA, 358 bp, Glycine max
catgcttctatttatagactaagtagcttccttgagaagctttcttaagaaaacatccttgagaagcttctttgagaaaacttccttgagaagctagagcttagctgcacacacccatctaaaaactaagctcacctccttgagaagtttccttgagaagctagagcttagctacacacacccctctaataactaagctcacctccttgagaagagaagctagagcttagctacacacccctataatagctaagctcacccccatgacaaaatacatgagaatacaaaaaaaaaagtccctactacaaagactactcaaaatgccctctaatacaaggctaaaatcctatactactag

SEQ ID NO: 179694 - DNA, 494 bp, Glycine max
  unsure (1)..(494): unsure at all n locations
atactcagcttacanaaggcatgcgaagtgggtggaattcctagagctattcttttatgttatcaaacataanaagggaaaaggtaatattgtagccgatgctctttctcggcgtcatgcattactttctattgcttgaaacaaaatgattggtcttgaatgtttgaaaagcatgtatgaaaatgatgaaacttttggagaaatttttaaaaattgtgaaaaattttcagaaaatggtttctttagacatgaaggctttcttttcaaagaaaacaaattgtgtgtgcctaaatgttctactangaaattgcttgtttgtgaagcacatgaaggaggtttaatggggcattntggggtccaaaagactctagaaacattacaagaacattnttattggcctcatatgaaaaaggatgtgcagaaattttgtgaacattgcattgtatgtacaaggcaaagtctaaggtaagcctcatggattgatactccattgc

SEQ ID NO: 179695 - DNA, 406 bp, Glycine max
  unsure (1)..(406): unsure at all n locations
gaagaacgggtgaaacctttgcgagattcctcacgggaaacgttacggaaacgtttcggaagcgcctcgggttagaatttcttcacggaaacaatttttccaagcaaattcgaaagagagaaaagtgcctcaggggctggacccctttcttcttcacttcctcccctatntatagcaaaataggggaggtggttgccgcccagctcgcccaggcgagcagggttgcttcctccagaagcaaccgccttctggaggaatcttctggagggcccaaatgggcctgggtgctatttgcacccccatttttactaagtacacccccctctgctggtttttggtgattctcttttcgtanagntacggaaacttacgaatntcgtaacgatacttggtttctttccgtaat

SEQ ID NO: 179696 - DNA, 394 bp, Glycine max
  unsure (1)..(394): unsure at all n locations
attgcttctatctgcacttaattcttgcatgtttttggtctgatcacccnattgtgtgtatagttaggatttttagcattgaaaaatgttttgaatccttaaaactggatagattagggctagataactgtattgtctggacacggagtgcatggactctagcttttaaaatgatgtgatcttaatgttgttcagttaggcttagttcaatgagggattcgagaacgaagtttaattagaattagccctttcatgcgagacatcggtgtttgggataattgtcctcaacatagaacacagaaacaacattagatagagaaaaacctttaatttgcttcagtcactcagtagaaaggccgaacattttaatcatttggttatttctcgcatttag

SEQ ID NO: 179697 - DNA, 432 bp, Glycine max
  unsure (1)..(432): unsure at all n locations
ggggcctaaggcttaagatctatgaggcttggcttgtgagatgcatatcgaagatttagctctatagggattaaggctaaagcttgggatttgtgaggcttggcctaacaggtgaatattggagatttagctctaaggggcttgaggctaaacctgtggtttgtgaggcttggtctgagaggtgtagattggagaattagctctaaggagcttgaggctaagcttgngatttgtaaggcctacactaaggagtacaaatttaaggttttggtttcagaggtgctacgctaagtgtgggacctacataatgggatttgaagctatgtgagaggttgtgtagagcttatgtatgtctactatgttacttatgtatgacatttgaattattgttggaatgtaaattggtacatacttataaggttggactattct

SEQ ID NO: 179698 - DNA, 491 bp, Glycine max
  unsure (1)..(491): unsure at all n locations
ctataaaactaagcttaagttgcccggtattatccctagatatttttgtattatggcgatcagaattgccattccttggattatagggttgaactaagctcatgttntttcgaanaaagttcatcaagtcaagttgaaatatggaagtaaccgtcttgcaaaattggggcaaaagatgaatcgagtcacatcaccgcttcgtctactgccaaacatatttaggaatgttgatgtccttgttacttccagtttcaccttgacaaagatgtcatggatcatgttgaaaatctaaattgattcaaccccatatcctgcgtaaaaatttgcaatacttcaactgtacatcatccgcatacatccatgcttttcattggttgcattgctcattgcattctttccttgaaaaataaaataaaataaaataaaatgaacttaatcattggtattaaaaagaaaaggacacgctttacggcacccttaccgaactcgtg

SEQ ID NO: 179699 - DNA, 488 bp, Glycine max
cttgatgatatggtcttcatcgacgaaaggatcatagtggttctattaagaggcaaatctgatcatcatactttgataaatgccaaaaaaaaaactagggcaaatggagagggtgagaatgagggagaagcccatgctgtgactgccattcctatacaaccaagtttcccaccaacccaaaaatgtcattacttagccaataacaaaccttctccttacccaccgcccagttatccacaaaggcaatccctaaatcaaccacaaagtctgtctaccgcacttccaatgacgaacaccacctttagcacaaaccaaaaacaccaaccaagaaatgatatttgcagcgagaaagcctgtagaattcaccccaattccagtgtcctatgctgacttgctcccatatctacttgataattcaatggtagccataaccctagccaaggttcattaacctccatttctctgagaatacgactcgaacgcaacat

SEQ ID NO: 179700 - DNA, 480 bp, Glycine max
  unsure (1)..(480): unsure at all n locations
ngtatcaattcaccccttcctaaagattntttatcattattatttgaaccagaaaactagcttaatgcttcactaaaccattacacttgagtttacagctacaaatagaacaacaattccacagaattagcactttaccattacaatatctttaatcgcaacagcagaaaaaggttgcaaggagcaagtacattttactcctgtataaactaaattacaaggtatgtagacataaaacagaacaagctctacattctacaccatagaccttaattccaagcatgaaacaacctgaattcttgtgctgatagctgtgtatggtgattccttttcctaagaaaacttgaaaatctaattgaataacttgaaggtaatngatcccgatgctatccttctaaccatatgtgactaaaatatcaataagttttntttatgaaaattgtactactgattatctaattcttatattcttttgtatat

SEQ ID NO: 179701 - DNA, 477 bp, Glycine max
  unsure (1)..(477): unsure at all n locations
tagaacaataaactnggccttctcttaatggtctttgggtttgtgttactcacgancaacaaaatactttcggcacctactatatgttgacttgaccaacgctgttattggaatgctgcgacaatctttcaacaccttattcacacattctgataggttgattgtcatgtgaccatatcgtcgtccagatgtatcgtaagccatgctccatttttcctttgaaatgcgatcaatccatcttgctatggctggactcagttgacgaaatttttctaagttttgatcaaacacatgcttgcaaggagtgtacgctgcatcaaatatgttatcatcaaaagttgtacgtagacatcaaactcaaattaaattaatgtataaaatcaaccttacccaatttcttgaacatctctttttgtttcgcgttcgtgaatttgcgatngaaattgctggctatgtgtcggacgcagtacacatgat

SEQ ID NO: 179702 - DNA, 467 bp, Glycine max
  unsure (1)..(467): unsure at all n locations
gacctatgaaactcagcttttgaatccttatgagcagatgctgcatggttttttattnnggaactggacgactattttacattctgtctttgacagcaatcatgatgatttttaacattttattgcatcagctccactaagtttgaataagggaagcatttgtacttatttctggtataatatttgtattttctgctcaagattattgtttataatttaataggtggagttgatgtttagtggtctcgtaaacttcaattaatgttttcgtatcatatcgccatagattgcctatttattcatcttttaatttaggggttatgatgaagtaaaaaagcaatagaaagtactcagtggagccattattttaacagcttttctacattccatgcagtgaaacatgactgcgtattcggngatgactntgatttaaatgaaataagctatgtgtctgaggtattctgcag

SEQ ID NO: 179703 - DNA, 464 bp, Glycine max
  unsure (1)..(464): unsure at all n locations
tgagatgaggaagtgtngaagggtgaaactttctgtattatagtgaccatagagcggcacctggagatatgtcgcgggggtcaggagaccttgaggacgtcaggtggggtgctattgcccaaaaccaagcttgaccaatcccgacctaccccgggcatagtcggtcagtgagaacctgtgatgtacctaaacaggcgagctcctggcaatcaaccgataaaaggaacaaagaccacaaagcaaggaggcttgtggtggctggccagctgtgaactttgattgatatgtgggttatggcctctggtaattgattaccaagggtgggtaatcgattacaaggcttaagaatgaagacaggaggctaagatggtctctggtaatcgattaccacggtgtgtaatcgattaccaggcttgataacgaggtcaggaagctaatgaagcctctggtaatcgaataccaag

SEQ ID NO: 179704 - DNA, 454 bp, Glycine max
  unsure (1)..(454): unsure at all n locations
ntgagcaaattcaaacgacannaaactttgactctggattcctattgngcccgcagtatatcgagatgctcgtaattgaaaacagaagctctaagcaaattcaaacgacaataacttttgactcgggtgtccgattgtgtcctgtagtatatcgagacgctcgaaattgaaaactgaagctctgagaaaaatcaaacgacgataactttttactcggatgtccgattgaatcccgtaatatatcgagacactcgtaattgaaaatagaagctctgagcaaattcaaacgacaataacttttgactcggatgtccgattgtgtcctgtaatatatcgagacactcgtaattggaaacagaagctctgagcaaattcaaacgacaataactntatactcggatgtccgattgagtcccgctatatatcgacacgctcgtaattgaaaatagaagct

SEQ ID NO: 179705 - DNA, 413 bp, Glycine max
cagtgctcatctaacatttaagaacaagtgaggggcacaatttctttaacatatacttattcctacataaatagaattagaaaatcataagggatcaccatttattatttaacgtcaaaacttgaactaacacttatgtaattaacgaaatactcaaattcataaatccaaaagaaaatagattattatgttaaattaaaaataaatataaaagacaacccagtgtatacaaaaaatatattggttatgatgattaaaaaatatgctgctatattctttttaacagacaaaataagattcgtaataatcacaagaaattatgataaaagcgggacagtagagagtacagcataaagtggtgtatttggtacaatcaccaatgtagattttcacctttctatattggtatactc

SEQ ID NO: 179706 - DNA, 503 bp, Glycine max
  unsure (1)..(503): unsure at all n locations
ttgaaactaagcctggggatgagatgattatgagtggtgctctttgacacatctttttntgttaacaagctctacgtagctcttgacgccatctagaactgatcctgcaataacaattacaattagtgactattttcaatgataatttagaaaaaaatcaacaacccaatttgcattatctgacaagagtaggtacatagtttgctaatgggtgcacagactgcggctgtaatgggatgggcgataaatgtacaggaccacgtggtgtgtaacacccttaattaaaataacccccatactaaaaagaatatacaatctcaaaattatattagtctgaaaatacatcatgtataataaataaagtcaaataagtaagtttttacataaattaaaatattattctcaaatatgggcatctaaaaataactaacgctaaaagtacaacgtaatcaaccacattcaacatattattctgagtactaacaaagctaanaacgtatcta

SEQ ID NO: 179707 - DNA, 404 bp, Glycine max
  unsure (1)..(404): unsure at all n locations
ttagaatctcccttcacctcgcatctcaaagcatctggtgtgatttcatccaacaaatcctctgcatccaagacagcatcttcaattcttaagccattccttcactacaggatcagtgatctgcttctcttcagcatcattaagaacagcattaagtgccaacaacttcatcttcaactcatccaacacataaacattcagctntctgctggagaagaaatctcgaaactctcttgaagctatcttntttattaagatctcaacagaagcagagataagtgcctctcccaccatagctaaggccatntcttctcttggtttgcaaattggatcagagcactgaaactcttgctaaatgctaaacgagattcagaagtcaaatgtgtgaaattcaggtatcatat

SEQ ID NO: 179708 - DNA, 482 bp, Glycine max
  unsure (1)..(482): unsure at all n locations
tggtgttgtcggctagagaggcaggggactgcnnnntttttcttanctcttncccatngtcgaggcgcttgaaggttattgaaggagtctatgtgagtttgctagctttttttacatgctcatctccattcttacatcttcagctcactagaatccttacatctctcttttgctccattttcatgaccaaggtctaggaggagctcaagattccaactcaacccacactcatctctttgcttccttgtgtcaaaaaagaggtaagggaggagcaattgatctcttaggacccatgctatgttgttatgaagttaaacttcatttatgttgtggttntggtatgaaacttgtaatatgtaattgcgctagtatgaattctgggagttgaatctttgaattctgggttcaaaaaagagtttctcgatcctaaagaaatcatacatgatatgtctcatttggagttgatagcccttgaaataaat

SEQ ID NO: 179709 - DNA, 465 bp, Glycine max
  unsure (1)..(465): unsure at all n locations
ctgggaatcttggttccttatagaaacctttattctnnctttttttgnnnccnaacgnnncatccctagattgctttgatatctcgtgagcattcagaccacataggcattgttagatgccttggaaaaatctaaacatacataaggcttgcccacaacggaagaatacacaatgtttcttatttgtttcaagctctttttcaggacattgattcaaattaaatctatcaccgttcataataggtgtcacacttagtgaacaagttttcatccaaaacctttctagaactntattaatgtaagcattntgagataagctgagaattccttaagatttatttttgtggatctaaatgccaatgacatatatgatgctgatgtgttgcattctcattcttatatagcatactcattcatgtatggtttaatttatttagtgtcaagtaggactaggactattcttat

SEQ ID NO: 179710 - DNA, 497 bp, Glycine max
  unsure (1)..(497): unsure at all n locations
gacactataaaactaagcttcgctctggctgctcctgacaatccaacattaccacttattggtccatgtataaccaataagtgacaaatcaactagacctcctccaaatggaggtccaaggatcttataacagttggccttaactctctctttgcctctgtcattggttgttgtcgtcgtcgctcgtcatcacaacacgcacgcgctgatgcagtcaccctataatgcctttgtacaacatcttccctttcatgtgagaggtcttcatggtggggtggcgagggttgcctcctgcaatgtatggtgtctatttcatgagagccatcacaaattagaaataaaattaaaaacattacattagtctaaatacactacagattcatgttttcttcatgcatntgttcaaaatacacaataganaccacaattttcatgaactntgtccaaacacacaacgacattgtgatntcattatgtggttngatgaaacacacaac

SEQ ID NO: 179711 - DNA, 390 bp, Glycine max
atatataaatgtataacaataaactaccgacatgcatgtgccattggaaatgaattaatatttgcttcgctctcaagtacttgagtctactatgttgtcagagtatccgtattatacgttatatctttgaatttgagtatcatgattttatttaaaaaagtgactgaatgaatgagttaaataaacgagtaactctttgtcctatcacatgtatttcgcactgcgttagacaataatttagtcacaataatgagattgctacttgtccaaatttttgttcacatgacaacattaaatctataatatttgttaatatatcattctggtaaatgagagctataatgcctatcattactcaatctatgggtaaagacagagtattataactat

SEQ ID NO: 179712 - DNA, 422 bp, Glycine max
  unsure (1)..(422): unsure at all n locations
ggacacttaaaactaagctgaatgagaaggtaaaggtgactcctgtnttttctttacnacagagggacctgagaatgtccggggtaggagacttgggacgcaggtgggggctattgccaaaacaagcttgccaatcccgacccacccgggcatagtcagtcagtgagaacctgngattacctaacaggcgagctctggcagcacagataaaagaacaaagaccacaaagcaggagcttgtggggctggccagctgtgaactttgatgatatggagattggctctggaatcgattaccaaagggtgtatcgattaccaggcttaaaacaggtcggaagctggaagctttggaatcataccaagggggtatcataccagctaaaatggatggacatgggagccttgtatcataccgatggtatc

SEQ ID NO: 179713 - DNA, 458 bp, Glycine max
  unsure (1)..(458): unsure at all n locations
ntaggatcaaactcatttctctcttgtctctaactattctttattcttcttcctccngacacttatattcttccttttcttgtacaaatttcgtggctcttccactgatgatgatcatggaaggctaaacactcaatcaatccaaggatccactccaagcaaggctggattttgttggatcaagtggcctcggaataattaagaaagggggttgaattaattatgaacgtgtcttgactaattaaaaatttatccttcttaatgttactagattcaattaggcttgactactaagttatgagaaagtaaagaacagaaataataacctatacaaaagtaaagcggaaataaaaagtacacagctgataagtaaagagtgtaggagaaaagaaagcaaacacaagatttatactggttcggccacaacccatgcctacgtccagtccccaagcaaccac

SEQ ID NO: 179714 - DNA, 396 bp, Glycine max
gaactatgaaactaagctgcctaccttgactaagctacttgtaggtttagttctcgggggagcccaggtggagtgttttcgactcttaggaagaagaagagaacgtgaaaaataataataaaagaaagaagaagagagaacgtgtaaaaataataataaaggagaaaagcactctgtacctatgaactctaaagagaactcattaagtaagagagagcatggataaagcaaaaaataaaaaaaggagcatgcggagcaacaaagagacctggaaccattcctccctctactcgttcccctctctccatcaactatagctgcaatcaaaggtctccctttccacctatataaaaaaatacccttttgcttgaccccatcttctgcaaagacttctat

SEQ ID NO: 179715 - DNA, 407 bp, Glycine max
  unsure (1)..(407): unsure at all n locations
ntagtcttcatgttatacatgtggctcccnctatctcnaatantgttctngcataaanncttcccagtggcaaagtctgagcagctgataagagaaattggggatttttctcaatatgagcaagaatccttatctgaaacttaggagcaattcaagagactgcagaggagttctccacaccatggatactcaccacaaaggctggtccacatgttctgtggaggactatgaaatcacaacaggtctgatgtgccatcattttcttctattttctaaaccctttntgcaccattttaattactgattggtcttaattgtcaattaatcaggcagttttattatttgggctcatttagctaatttngatgttttaatctaatttcaggaattaatgaaacattgggctt

SEQ ID NO: 179716 - DNA, 445 bp, Glycine max
  unsure (1)..(445): unsure at all n locations
agaaactacgcttctttagtgcgtcacgttaaactcatctctttgtgttcgagccttngatggtactcggcgggaagtgatgggggaaattgacattcccattcagataggcccccacacttgcaatgtggtgtttcaagtaatggatataaatcccgcctataactgcctcttaggaagaccttgggttcatgccctgngagtggtcccttcaacgcttcaccagaaattgaagtttgcagtgggtggacttttagtgatagtgtcgggtgaagaggatatgttagtgagctgcccctccttcgcaccatacgtagaagcggcggaagaatcattggaaacggctttccaatccttcgaggtggtgagctgcgcctctgtggaaccaagtctgttgctaccttctctctccaatgcggccataatggtggcacgtgttatgctc

SEQ ID NO: 179717 - DNA, 352 bp, Glycine max
  unsure (1)..(352): unsure at all n locations
attgaaagaatctacagcgcatttgcgtacctagcgattaaggctcttccttaatgaattgaatgtgttgtgatacattccctaattagcacaatttttattctgtaattagtacaaatttgatttgtaaagattctgctccattgcatttatttccttaattangctgctgacagcttataaataagtcttgtattcactctgtgtaaatagagaattacaataatattcaaattattatctttcaaggtggtatcagagcttccgatctagggcgctctgcttctgcattttttcacgcagacttcattgctgaattcgatctgctttagtgcccgtcactgatatacca

SEQ ID NO: 179718 - DNA, 328 bp, Glycine max
tggagagggttgccactactggaaaacccaattgcaaacggtcattgtggcaatagacataactcattgggaatccgtagaaatagggccttatatacccaccacagtagaaagaactacaatcaatgggagcacattgagtgaatgcatggcattcgtaaaacctatagatagatggtctgaagaggatagaagacgagtacagtgcaatctatgagccacaaacattataacatctgccctgagaatggatgaatattacacggattcaaatggaagagtgctactggaatgagggacactcttcaattaacacacgaacgaacta

SEQ ID NO: 179719 - DNA, 354 bp, Glycine max
  unsure (1)..(354): unsure at all n locations
aaagcccaaagaatgatttcgagattaaatcaagaacaaattccagaatcaagagaagtttgatttcaagattcaagaaaagatgaattcaagttccaagagaagaaatcaagaagacttcacaagggaagtattgaaaagatttttcaaaaaacaaacatagcaccatttttttttcaaaagaattntcacaaaattttctaagttaccaaagtttttactctctggtaatcgattaccagtggcaaagtttgatttcaaaagcttttaattgaatntgcaacgttccaattgatttcaaaatggtgtaatcgattacaagatattggtaatcgattaccagtgcatctgaac

SEQ ID NO: 179720 - DNA, 361 bp, Glycine max
  unsure (1)..(361): unsure at all n locations
tcttcttcgnaacggagccctttgattcttgattatcattgtcagcggaatggagaaagacgaaagatgattgtatatgccactttacgacaagatgagtcaaaacaagctcaccaccatatgaagccatggataagagccttaaggtaagagaaaatgagtggagggagaatgagagaatgagcacaaaattctatgccttacacattgcctctatttatagcctaagtgtcacacaaaatgaggtatgaactttgaagtgtaattctcaaatgatcaaagttgaaaaaatgcacacacatggcctctatttatagcctaagtgtcacacaccattggagggaaattcgaatttctattc

SEQ ID NO: 179721 - DNA, 471 bp, Glycine max
  unsure (1)..(471): unsure at all n locations
gcttcatanaagtttatatggcttgatacaaggaccgagacaggtgataatatgtttaatgagnnnatgagcaactcgggattcaacagatgtgacatggaccattgctgctacgttaagaaatatactaatagttatgttatacttgccatgtatgttgatgacatgttgattgcaggatctagtatggcaaaaatcaataggttgaaacaacagttggtagaaaactttgaaatgaaggatcttggtccagctaaacaaatccttggtatgagaattcttagaaatagatcagaaggaattttgaagctatcccgggagaaatatatacacaagctacttgacaggttttaccttgaagattctaagaccagggagttgataaatgatggagacttatctttgctgaagatcttangatcagaggatccaacagatatgttgactaaagctggtacaactgacaagctg

SEQ ID NO: 179722 - DNA, 327 bp, Glycine max
  unsure (1)..(327): unsure at all n locations
gtccgagcgtctcgatatactacgagactcaatcagacattcgagtaaaaagntatttgccgttgaatttgctcagagcttccgtattcaatttcgagcctctcgatatattacaggactccatcagacactcgagtaaaaaaggtattgtccgttgaatttgctcagagcttcaacattcaatttcaaagcgtccgatattttacaggactcaatcggatagccgagccaaaagtattggcgtgtgaatctgctcagagcttcgggatttaatttcaagcgtctcgatatattaccggacctgatcagaccatctgagtaaaagta

SEQ ID NO: 179723 - DNA, 431 bp, Glycine max
  unsure (1)..(431): unsure at all n locations
taaacacacacactntntcctagtcgatcactcttataaatactccccctttgtttttgaatttatgcttatcttaaaaatcagttgattactcatgtgaattcttgatttaatcccatttctctccctctttggcatcaacaaaaagccaaaatgcgtattaaataaatttaatttaaaactccatacaatgttcataaaaaatatcaaccaaatcatgaagcaagaaacaagaaccatgaaaccatgaagcanacaaccatgcatagataaattataaactccacatagtcaaataacatacttaataattgttcanacataccatgcaaatagggaagatagtaaatgttcanatagtataataatatagccaaaatacaaggctgagaatcaaagtactaatattaaaatataagtctaagatgatg

SEQ ID NO: 179724 - DNA, 438 bp, Glycine max
gggtattaattcttagtaattatgtgggattggaatgatttgtagtcttattctaatagaaagcttaagaatggaaacataactagcatggaaatatttttcatatgaaaatattactaattaaaatgtagaaaggaattaagtccagctatatggggcctactagatatcataaattattgaataaaattgtaaatttctagccaaacaaggttaatttatagataataatacatatctttccatgtatttaaaatttagtttaattcttctattgttttgaaaattgggctagacccatccatccaactagtcaaattgggaaccaatttatcaacaggtctattaatagaacaaaaataaatcaatatcaataagttaatggtttgaatggaattgaactcggtcctttatataaatactctcatgttttttagc

SEQ ID NO: 179725 - DNA, 426 bp, Glycine max
  unsure (1)..(426): unsure at all n locations
gcacttcgccgacggcaagattaccatcggtacccgaagcgccacgctacatgaagccaccgcaggcggcagactgacagcggaagagagcattgaattcggaacactgagcaaagagtaccagcagtcgacctttgccgggcattttgtggaggtcggcgtgcatagcgcgacgggagaagttcgggtccggcgtatgctcgctgtgtgtgctgcaggacgcatcctgaatccgaaaactgcgcgcagccaggtcattggcgcaatgactatgggcatgggcgcggcactgatggatgagctggcggtggatgaccgtttgggctacttcgttaatcacgatatggcggtgtatgaggtgccggntcatgcggatatcccacaacaggaggtgattttcctggatgataccgaccccatatcctc

SEQ ID NO: 179726 - DNA, 317 bp, Glycine max
  unsure (1)..(317): unsure at all n locations
ataanactaatttaatacaactaatgggtccacaggtccagatattaaaatctgtgacccaacttaaaaatcagggttattcttcctatacccaacaaatttcttctacacccatcatatttaaaaaaaatcaactttacccttttttcactacaaaaaaagtagattcggtcgctaaatcccttaattcggtcgctaaaactcttagccaccgaaatagagacctaatcatgtacgtcgcaaaaatcctagtcgctaaaccctcagcgaccaaatttttattcggatgctatttcgccaccgaactactgagtcac

SEQ ID NO: 179727 - DNA, 217 bp, Glycine max
cggcctttagctaaccagctcttgtacttaaagcacatttactagatggccgagctggttacagagtgcacttttattgaacctgctagggctaccgtcctaaccagctggtgaaaaaaaacgattgaattgaacatggtacgcgcggtcgtaggagcctgtgaaacaacttcttgctgtacgacaccctacagaggcaaactgtaggattacagca

SEQ ID NO: 179728 - DNA, 378 bp, Glycine max
  unsure (1)..(378): unsure at all n locations
ataagcatagtcaccaagcgtcctccttggtcatctatttccttctcctcctcttccaactatactatcaattacaagtggcttttttggtgaaggagaatcaatagaagattcactttgtggcttagtggtcactggtttcttttccttcctgttcttcctttcagtcttggtaatttctggatcaaataacaatttatctacaagaaacttacctcgcataaaggaaaaaaaaacacactacaacaacctgtaagcaccaaggttagtgaaaatataacaagagagaatntatacaaaatcaaagtataagaaataattaccaaaagtaggaaaatagcctatctaactgaatatttaaattcgaaagaactgagt

SEQ ID NO: 179729 - DNA, 288 bp, Glycine max
tggactacatgaataaagtctttcacccttactttgatagttttgtggtagtattcatagatgatattttggtatattcaaagactagagaggaacatgaagagcacttgaggattatgctgcttacccttaggaatcgacaactttatgctaagttgtccaagtgtgagttcttggttagagatagttagtttcctagggcatgtgatatctcaagggggtatagttgtagacccctctaagatagaagttgttcttgagtgggagagtcctacatctatttttgag

SEQ ID NO: 179730 - DNA, 507 bp, Glycine max
  unsure (1)..(507): unsure at all n locations
ngctcaatgttgaatggttgggataagatcatgagtgnttggttgtatctttttgtgtcctatatggatgttaattcaaggtggtgaattgttgggctgtgactaaattccatatggaagtttattctgttatttttttctgtttttgtcctctgcctatataaggcaaggatgccctgtattttcgatagaggaaaagcttccacttgtatactgcaaccataataaaaagctttntgttttcccctcccgtggatgtagccttactcaaggtgaaccacgtaattctgtgtgtgttctttctaattcttctctttttcacctttgctgcacaattttgtgtgtatgacatttctggtctgctgcattnntctgctgtgttcttgcttgttcttcatcacttccataacagntattatttangaaggtgaaacttgaatagtaaagatttgatgaanagtgtatatgtatatagtcgtaaaaatcttgaataaatgtggaatgaca

SEQ ID NO: 179731 - DNA, 448 bp, Glycine max
  unsure (1)..(448): unsure at all n locations
ntggcacggcacgccaacagcactggccatagggagaattattttattatcttntgncntcctcagcaggacatggacctttcttcaccccaagcttgtcacagcagggttgccttcccataacactaacacaaaactgcaaaagtcttaccaacactaacttgtaatgagtaatgacccaaaaaaccccacaccccacccacctttatataaagccctctccttttcttgcctaaattattaattacatatatatgcaatataatcatgcatcaagagaatttttttaacagagggggtatcaggaggcatggataaacagaagaaaggtggaggctccaccatgggttgcgaaaggtacgcgggaactaatatgggctcttctggtgttattagctacacaaaatgtgtgacgctgaaagatgggtgacccacatgcagaactata

SEQ ID NO: 179732 - DNA, 494 bp, Glycine max
  unsure (1)..(494): unsure at all n locations
acactaagcttataacgtccctaaagttntttcatccaatgttttcattctttccgtccattttgactgntaagngatgatgtgatgtttgttttattattaatttattaccattcattttttggtggctaaaaaccaccaaaaattgaagaacccatatgaaaaaatcaaccaaaatgaagaacacacaaaccaaacaaaatcaaacctagatttagaagctccttgacagctaaggatgcgaaagagaagaaggcgaaaacccttctcgtgtcaccatgcggaggaggtacaataccagatctggaactctcatcttcctcgtccaaaaaacagtgaatcaagtcgcgttcgataacaagaagatatgttntgttcatgcaacttangcagcgaaatcaagcatatgagtatgcgttntgcttgtctactcatgggaaacaaaaccccacaattaattntgaagatcgttgaacgatgaaggagaaatgtga

SEQ ID NO: 179733 - DNA, 465 bp, Glycine max
  unsure (1)..(465): unsure at all n locations
ttaaaataaatcattccaatttatttgtttatcctatcaataagttntcatttagtaaaaccttattaacctttaggtgagcttttttaaacttatgttaataagcttcacgtagaaacttgattttttaaaaaattatttcaataaattttgtagagcctaagttttcatttaaaaaaagtagtctaactgcccccgagtaaaactgggttaaataattccatcctaaatcattcaataaaattacatcaaattttatgcataaaaaaatctaaacaaatgggtgtaattntattggaccactagattgtttaacttatttttagttgggattagttagaanaacctttaaaaaagggtcaggtggttttggagtaaaatagtgaggcaaatactttggacaccgagcaacacaggtgaaagaactaanatgatnttttctttaaatacggatcgggatataat

SEQ ID NO: 179734 - DNA, 474 bp, Glycine max
  unsure (1)..(474): unsure at all n locations
tgtaaatactntcatactaatgctattatgatatattattttttatgaccagctctgntaatcatctctagcttatgccatagaaattaattagtttcaccaaacgagtacgaggagaggtggggggaaaataaaacaactctcttgcgttcctgacctacctttctttngctctctctttctctctctctatgngnttatatattcatgggtacaactgcgacctgatcatgagctgctagtttgtgctagcttcctttaacaacaccatgcaagtatatttagatatttcatagttttttattccacatccatcttggattttttttttcctcttcctccttttctacttgtgtttcgttcattctgtcttcaatctttctcaacaaaatcagaatcactcgctagatatacgtctctatgcgattagattagttcacatcgtatatcanaaccacagntctttctttatat

SEQ ID NO: 179735 - DNA, 406 bp, Glycine max
ggcgaaggagacacccaagttagaatttctagagtcccacatggtggaaccccactcattaatgaggacgaggttgtctatagggaggaactggagggatacaatggagtcgatgacaacactatttatgatggactatatggccattcctggcggctagggttcatggtggtggcgctacttggtggaaggattcctctttccactcatatatagatatggatctggaggacgaggataatggtgagaggcacaagtttatgaaatgaaattggcatgagttcatataagtttagggcgagaggttcgtacctttgtcataaatggagatgaaggttcactaatgcgggcaatgaacaagcttcacaaacaacgccaatgacgaagcttcatagagtaagaagag

SEQ ID NO: 179736 - DNA, 433 bp, Glycine max
  unsure (1)..(433): unsure at all n locations
ctaagcttaagaaaggcccnattcctgtccaaatcggagnctttttttattttggctntgctcgngcttgtgcgcttagcgcaactttggaccgcccagcgcgcattagtggattntgtcttagcacgtacttttctcgctcagtggatggactgaagcggtgcgttttgctggatgacccttcgcttagcacaaatgcacaactcatccttcttccagattcttcctcacgctcatccgaggagtgttgcgctcagcggatgactcgctaagccagaagaatggcttagcgagaaggtgaaaatcaacacttcacaaacttgcctaattaacctaaaattgagagaaaatgattattaaacacacaaaatgggcatactaagtatttattacctatctttaacaaaaagtaattacaatactaccaaaccac

SEQ ID NO: 179737 - DNA, 513 bp, Glycine max
  unsure (1)..(513): unsure at all n locations
tactcagctnttccaaatgacattcgctgtataagcaaaatcctaacccagtcatctttaaagtcctgttgaatcagtataaagcaacgtgcaacaatttggtaagtgattcatgactttttgaaatttagaaacaatcttggattgaatactgtaaatttaatatatctcacatcaacttaatcttaatttcaagtcgtgtcaagttctatgtattcattcatgaaaaaatgcaaattttacacaagtcaatttggaagggaatacagaatacaacattgtctacaatcattagaggaagactgcaaaaatagactctggatggaggtattttgcagctgannnaaaattggaaactggccaagaaattatttttgagtttccaaatctagaagacaactttgctctatcttggattagtatttaaaaaactttngtacgaatctatgttagctattatgtataactcttgatgatatgatacccanatgatgcttagatataattctatac

SEQ ID NO: 179738 - DNA, 378 bp, Glycine max
ccaaatgcaaattttaattgaggcaatagacttaaacatttgggaagccatagaagttggaccttatgtacccaccatggtggctgcgaatacaacaatagagaaacctagagaagagtgggctgaagaagaaaaaagattagtgcagtacaatttaaaggctaaaaatatcattacttctgccctaagaatggatgaatattttagggtgtcaaattgaaagagtgctaaggatatgtgggacactctacaagttacacatgaaggaacaactgatgtcaaaggatctaggatcaatactctaactcatgagcatgaattatttacgatgaagacaaatgaaagcatacaagatatgcataaaagattcacacatat

SEQ ID NO: 179739 - DNA, 330 bp, Glycine max
  unsure (1)..(330): unsure at all n locations
tataccccctcttgacgtgcttaagccattttacttaagtcatttctcgcttaacttaaaagaaaagaaaatttccaccgaacgtttgaattgtattatccgttaacttcggataaaataaattccgaccggtcggtcgtgccgtaaccacgctggaaatcaaaaaaagaggtnggaaaggaatatagtaatcaacaatcatcttttagcataatggagcggagcatcaatcggacgttgtctgtttgggatttctcattcttaatcgaattgattaagaactagagtgaaactaaggctaanatcaactcgcctagtcaagctctgtca

SEQ ID NO: 179740 - DNA, 500 bp, Glycine max
  unsure (1)..(500): unsure at all n locations
tctccttcaactctatgcatgatggacaatagtactgatgcatagcttattcaagcagaacaagcttcttccactcaagagtcttctagttctcattctactgcagatgaagagacactgtttgacctaccagatcttttccctgatggaaactctggacttttctcctattcttcttgttggcatttatgtgcagctgatagtggattcaggctagaagagcagtttttgtgggagaatttctagtagtagagactgtttcatttttaaaataaaaaatatatataataagagaaaacagactataaaattgatgaggttntatcttcatgtttacggcaatagtgtaatctaatggcagcataccacttcaagaaaagtttaccctttgaatctgtaaatggatgttctccagtggctatttttttggttctgcagtgaacggattanaatatanagganaaataataattatgccaaatgtgacaaatgcttatgtc

SEQ ID NO: 179741 - DNA, 471 bp, Glycine max
tgaaactcactcaaagaggatctcatacttcttgttgtatgataaccggcccacaagcaaaatatgagcaaacataaggatcattgcttgctgctatgagacaaaaagattatgaaagcaggcttgattttggcaacttaagatcgcccaaaccacagagataaaactagcaagaacaacatctttagcttgcgggcaaacaactaatttgccaacaaccaggataagatccataggagaagcaagattaaaaccatgaccagttaagttatagatgataaccaagaccaaatctaatctccaacccaacttcttctaaaagagagcatactttgtgcaaagcaagaatggccaaaattctttgtaacatttcgtagaaatggaaagacattaaaaaaatatatggaaaattctgggtgatactttgaggaggttatccatctttagcataagatatgaagatgagagaga

SEQ ID NO: 179742 - DNA, 481 bp, Glycine max
  unsure (1)..(481): unsure at all n locations
tgtctttcaagtattncaagtaattgtatattaagaatgaatttttattatcctgaccaaancataatgccagtggatttaagcactggacgctcttttttttccttttattaaataactntaaagagcttgttttggatgtagtaaactagatagggtgaaattagtgaagaaacaaatgaagaaatatgatattttcattgatagattttaaaaagagaaaagaatgaaatttgtattaatggctaaattatgtattcgatactttatcttattttttagacttactttaacttcttatatttaataaaaaaaattaatctagtcttttatgttttaaattaaggccaaattgatcttttaaatttaacagccacaaaaaaaatacttactaacttggatatgtctctgaacggggtttaactactgcaatttcgactaaattggtcgaaatatctaacaaaactcctccatcaatttt

SEQ ID NO: 179743 - DNA, 483 bp, Glycine max
  unsure (1)..(483): unsure at all n locations
ntntggttntaaataaagggttttctctgtctctactatattatttaagctattccacatgnctccgntggagtggagcaagaagggcccactttccctttttactgtgacccacactcagccacaaaagtgagaaaaatctgacctttgaaacgctaaaatcctgtctcggtttgcgtgtcgtttctctggttccagttcctcgcgtttctctgcgtccgtcggggccagttntcgaaagcaagcaatatatatatcaaaacgctcagaataaaaccccgagcgtggttcagaggttggttnttttaaattctaagtcgcacgcaaaacgatttttaactaattaattaagaattaacccatnaacctccagttatggatttctcttccttaattagcctaacccgtgtatcttgcccccactattcctacttctaccaagaacatataggcatatacactgaataatacctatatatatat

SEQ ID NO: 179744 - DNA, 454 bp, Glycine max
  unsure (1)..(454): unsure at all n locations
acgccatcatctagctatgctgaacattataagacctctagcagcaaaccataacttcttattaattatgacctttcaagcaatagatacaatccaggttggagtaatcatccaaatctgagatggacaagtcctccacatcaacaatagcctgtccctcattttcagaatgttgctggtccaagcaaaccatatgttcctcctccaatatagcagcaatcacaacaaagacaaccaacaactaaggctccctctcaaccttccttagaagagttagtgaggcaaatgaccatccagaatatgcaatttcagcaagagacaagagcctccattcagagtctgtcaaatcagatgggacagatggctactcagttgaaccaagctcagtcccaaaattctgaccaaatgccttcacaaattgtgtagaatccgaanaatgtgagtgtcatcacct

SEQ ID NO: 179745 - DNA, 263 bp, Glycine max
  unsure (1)..(263): unsure at all n locations
aaagctcaaagatctatctaagaaccactcaagcgaatccagaacaattcaagagttcaagataagaatcaagaagaattcaagactcgagaagaaagtttagagtcaagaatcaagatttaaggttcaagaatcaagatccatattcaagactcaagaatcaagagaaggcttaatccagataagtatgaaaagcttttctcagaaattgagtagcacatgatttttctcaaaacatgtttaccccagaggttntactctct

SEQ ID NO: 179746 - DNA, 368 bp, Glycine max
ctaatccctctgactgagaacgaactcatataatctgcttatgcacacgcgtacgtgtggaatatcctaccatttatatcaacatagaggccatccaacacattctaattgtcacacacatatatgcatttgaaaagaacatacattcttacgctcaaggcattgcgtcaaaattcacacctaatttatatcctaaacatttgctattacaaactacctacatatattcgaaatatatatcatacaaactttattgtttcactcacatttattcatattggcaagctatgtacattatgcacacacttgcattcaaaagggaattacgtgctatcatacattcatttacgagaataatcattcacact

SEQ ID NO: 179747 - DNA, 483 bp, Glycine max
  unsure (1)..(483): unsure at all n locations
ctaagctcactatccttcacgccctcaagccttccttgcctgtatttgtttatatcagtcagngatcaatagaaaacaatgaccaagaatagagtaagttgactttggttntttcttccacttactaatttctattactattagtacttgctctctctctctctctctttttgggccaattttcgttatttcttttactctctttgagttgaatttttgaaatcactaaatgctgtaagaaatcttttaatttctaacaaatttcagcttatacttggttcacatttagtgtgtctgccattgaagtcatgtttagataaaattatgtatgagcacttataggaaaagagatgaatttccataaattaaaatcatttgatacacttgattntgagaagctctctcatcctaacttccaaaaatgagatcatgcattggttttgctcatggagaagtaaattattatatctttttttactctat

SEQ ID NO: 179748 - DNA, 401 bp, Glycine max
  unsure (1)..(401): unsure at all n locations
aacagtgcatagaaataaaactctctcatcacactatgataaaacacactttgaagttaaatgtttctttcttcttttgggtgatatctcaggtaggaaaaatcatacaatatgcggcatgttatgttggaggtacagacatagcattcatcaagggttggctgctaagccttgctcttctatcttctcttccacttcttggcctatctggttccgtaatgagctttgctcttgccaagatggcatcccgaggacaaacagcttattctgaagcagctactgtagtggagcggacaactgtgtcaattcgaactgtatgccaaccttcagaatgtactntccatgtgtatatctgtcatgtcgcacgagagtagcatataaaagatccacattgctctaat

SEQ ID NO: 179749 - DNA, 470 bp, Glycine max
  unsure (1)..(470): unsure at all n locations
atctactatgtgagcaattttatttctattttccattnctcttgtcaacactcatgaattgatatccttaggaccccactaattatcccttttcttttgccttgcaaagcaatttgaacgccttttccagtttacccgaaggattgaggacttgatgttcactgttgcacctgaagaggcttgtgtgtataacgctgtatttttaatcttccaaaggttcctgctatacagcatatagtcatgtctagaattctacttatcaaacaatatggttgcaatgtttcttagttactatggatgaaattatgagggtctagatatagatggcgtgagggataaaagagaatgaaacattgaatngatattacttgagatgtattacaacgtattgatatgttcataaaacagagcactgaccccttatgtataataatcataatcctgaccaattatggaaacacaccatgata

SEQ ID NO: 179750 - DNA, 300 bp, Glycine max
  unsure (1)..(300): unsure at all n locations
taacctccaaagagctgctagncctgntatttatgattgttgatagngaacccaccagcagattagcatgcaaatctatggaagacagctctgttggcaatttgatttcagaaatgtcaaacctcaactggttgtttgagagcttgnacctttgcaagctggacatatttgtgaagaaatttgaaataccttcaaccagatagttatctgataggtcaatggagctcacagagtcacgtcttgtgaagtgtggaagatctcccttcaatttgcacccagctagatggacatctttgagtt

SEQ ID NO: 179751 - DNA, 376 bp, Glycine max
  unsure (1)..(376): unsure at all n locations
acctaagcacttatgccataatggtcctgagtctgtattatcaattctacacttagtaccacgcaattccgcattaaaggattcaccataggaagctacagtatcaagtaaatatagattatcataagccaagagtgaaccagttctaacaatatctaaattaaaagacaacctaaatacattatttccaaatgaacacaaataacccaatttgtccaaataagaaactgaaaccaaattccatctaaataacggtacaacaaaaatgtccttcaaatccaaataaaaaacaatacataataatagtctaaaatgccctatangcttcacctncacccgattaccatctncaacatatatctatctttcaaaaatc

SEQ ID NO: 179752 - DNA, 494 bp, Glycine max
  unsure (1)..(494): unsure at all n locations
gaatgaagctctgaaccactnttagacatgngtcattagatatcttaagaaggggggttgaattaagatattgcaaactatttccccagtgtgtccgcgtgacactcttacttaggaaaaactaggcagtaagtgttgaggtcaccttatcatgcacaggaaacccccccccccccaatggtgatcagcctgagtctcgagggagttccaaaccgagtgacatgcccccaagtacaagtattttccctcatgaaaaactacaagtacatactgacaaaatgtatactatttccatgcagtatgaagtatgaaacatgggcaccatcaatgcactaactatggataattaaagattctaagccatcatccactagagatgcttaagactctntagccactgtatttccttcaccagagacatncaacctggtcattggcacccctatgtgcatacacgacatacatcatcacaatgatcnataacatcaacatca

SEQ ID NO: 179753 - DNA, 427 bp, Glycine max
  unsure (1)..(427): unsure at all n locations
actaagcttctctgttagacctcgatcggtcatctatccaggccgaggtcgatcgtcattnttttcgatccatttcggtgaataatatttttttgccgagatgggctaatgttttcctggccgaataaatgggaaaatgccagtttcggccgaaacgaaaagtcggttgagctcgcacaaaaaaacctagccgacctacattttaaatnttttatgcaacaccaaaacaagaaaacttcctgtgccgtaaaaaaaaaaaaaacattacatgacagcgagcgttttgaaaaacaaaattgcgcaacgtcggctgataaatatcagtcggggctttttcacgaccgatgtcggctattgagttttcaattcaatccgtgaacgaaatttgcacgatgtcggttaggaaatgttcgatcggcatcatcct

SEQ ID NO: 179754 - DNA, 444 bp, Glycine max
  unsure (1)..(444): unsure at all n locations
actaagctanacaaatgaatntttaattngagacaacaaacgagaattttattatattattcnccataaataaataactgcttctctttccagttaagaataagaaaagtattgcaagacgcaagtaatttaacgtttaaaaaaacaaacgcatttaattttggagaaagtgaaaaaacagtaccgtgaacgtgaacttagtgtaagtgaaaaataaaaataaaaagcggcgttagtttattgcttgttgcatcatcactgccgttgcatgttttgagaagttgaggaggcggcaaatggaaaattggaataaggcttgtttcgttctctttcctttctcgctctcctcacccacccctctctacgctctcttactcgctttccaatttcaaaccctattctctttctatctcacctttttttttgttcgggtgtacgagaatc

SEQ ID NO: 179755 - DNA, 483 bp, Glycine max
  unsure (1)..(483): unsure at all n locations
tgtgcattcaatatcctgatgagggtgttccatatgttctttagactggacttatacattngctgcccaagtttcatggtcttgcaggtgaagatcctcataagcatcttaaagagttccatattgtttgttccaccatgaagccccctgatgtccaagaagataatctctttctaaaggcttttcctcattctctagagggagtggcaaaagattggctctactaccttgctcccaggttcattnttagctgggatgaccttaagagggtgttcttggagaaattcttccctacatctaggaccacttccatcagaaaagacattntaggcatcgggtaacttagtggagaaagcttgtatgagtaatgggaaagattcaagaaattgtgtggaagttgtcctcaccactagaattatgagcaactcccttcatatttctatgangtacttagcaacatggaaaggagtatgattgatgctg

SEQ ID NO: 179756 - DNA, 472 bp, Glycine max
  unsure (1)..(472): unsure at all n locations
acactatgaaactcaagcttcacagagtcttacaaataactatcatgtttcatatttcttcaaaactacccatcatatctcccagaaccccatacccacaaatttggagcttcaatggagaatgaagaagaagagaatggcaacgtgagggagagagagagctgtctgaaataatgtggggctgagtgaacagagagagagttgctttttgattttaaaaaggctttttcctcatttcttattattttattataaactatgccacatgtctccatttgagtggagcaaaaagggcccactttcccttttgactgtgacccatactcagccacaaaagtgaggaaaatctgacctttgaaatgctaaaatcctgccttggttggcgtgccgtttctctggttccagttcctcgcgtttctctgcgtccatcggngcccagtttcgaaagtacgcaatatatatatcacaacgc

SEQ ID NO: 179757 - DNA, 273 bp, Glycine max
gatgccccacattatgttcatgacacaaatgccaaaatgatgattaggaaactttatgcaaaactggtcctgcatgcacctatggggacactcaagtggcaaattcttatggtcatgtgatgctagggctcaagattcatttcctctatttttagtcaacccaatgtttacaagatatgctcttttatcaatttgcgcattcatccgatccactttgggccgtcgggagaatctcacagcattcaccttttaggtgccagcacattttttaaa

SEQ ID NO: 179758 - DNA, 401 bp, Glycine max
  unsure (1)..(401): unsure at all n locations
tttttaccccgcccngcgaagctcagacaaaatttcgagaccatcccacgcgcaccgacagctatgcaacatttttaccaacgtagcttcatgtagcttcctccagaagcttcattaagaggcttcctcaagaagcttccccgtggcttctttgagaagctatctcaagaggctcctttgagaagctagatgcttatttacccacacccttctattaattaaattaacctccttgacaataattacggataaaaataacacagcacataatcacacatcaaacataattactaatatatatatatatatcagggtgctacagtttcaaatgccacacttctactacatctaataaggtaatgtttctcttaaccaacctctgctgtggaaagaacctatat

SEQ ID NO: 179759 - DNA, 175 bp, Glycine max
  unsure (1)..(175): unsure at all n locations
attaggaaaaaacaaaataaagttaatatactttgtataaataataatgagtttagtttattaatttaattntcatttttttacagctaattcaatttgcttataacatgaagaataatacgagagaataatataaaaaaaaggtaaatgtatgacaatatattatatttttata

SEQ ID NO: 179760 - DNA, 434 bp, Glycine max
  unsure (1)..(434): unsure at all n locations
ngaggganaactngatgccttgcgcaacctagtttctcagtttgtcatgaatcagaaatctatacctgttgcaagagtttgtggtctacgttcttctgcagatcaccatacagatctctgtccttctttgtagcaatctggagtcaatgagaaacctgaagcttatgctgtaaacatttataatagacctcctcagcaacaaaactaacaacagcagaataattatgacctttcaagcaatagatgcaatctaggttggaggaatcatccaaatctgagatggacaagtcctccgcaacaacaacagcctgtccctccttctcagaatactgctggtccatgcaagccatatgttccccctccaatacagcaatagcaataacaacagtcacaacagagacaacaagcaactgaggctcctcctcaaccttcct

SEQ ID NO: 179761 - DNA, 406 bp, Glycine max
  unsure (1)..(406): unsure at all n locations
tagatgaagactaattcgtggccacctcatcgtctcctctaagaacaataacatcattgcttgcactgaattggtgggagttggaagccatcttctcaatcaaattcctagcttcagcaggggccatatcaccaagagctccaccactggcagcatcaatcatactcctctccatgttgctaagtccctcatagaaatattgaagaaggagttgctcggaaatctggtggtgaaggcagcttgcacacaanttcttgaatctttcccagtactcatacaagctttctccactaagttgcctgattcctgaaatgtcttttctgatggcaatggtcctagatgcagggaagaatttctccaagaacaccctcttaaggtcatcccaatcgaaaatagacctgtgagc

SEQ ID NO: 179762 - DNA, 461 bp, Glycine max
  unsure (1)..(461): unsure at all n locations
tctacttatgaggcagggcgggctaccagcactttcatgtttcttttctgagaggagtcgcccactgttcgcaccgtaagctttgactaccggccttccttcccgcgatgcttgactttatatctgcctgagagggctcatagcctaaaccatactctccacgatcttcttcggcattgatcacgctagtcatgccgacgttgtctttgcctaaacccattccgggttcgtaaccgtnccccaacataactcgagccatcattactggngcatcggacaggcaaggctgcccagagaaggagttcactgaggaaatgcttaccacctcanaagactggaaagccggttctaacgactcctctgcggcttccacataaggcatagagcatgggcaggtgcacaagatgtctgtctcgcctgatacgatgaccacatgcctcttcactacgaatttaactttt

SEQ ID NO: 179763 - DNA, 460 bp, Glycine max
tcttagtctcacccgatgaagatgaatatgtggctacttcatgctcttcctattgacaatagcatcatttctggcactaaattgcagggactaggaatccatcttctcaattaaatttctggcttcagcaggggtcatgtcttcaagggctccaccactggcagcatctatcatacttctctccatgttgctgagtccttcataaaaatattggaggaaaagctgctctgaaatctggtggtgagggcaactagcacataactttttaaatctctcccagtattcatataggctctctccactgagttttctaatgcctgaaatatcttttctgatggtcgcggtcctggaagcagggaaaattatttctaagaatactctctcgaggtcatcccagctcgtgatggaccttggagcacggtaatatagccagtcctttgacactctctctaaagaatga

SEQ ID NO: 179764 - DNA, 382 bp, Glycine max
  unsure (1)..(382): unsure at all n locations
gacgctcttaattgataatggaagctctcaccccaatcaaatgacaatcacttctaactcgaatgttcgattgaggcctgcactatatcgagacgctcgaaattgaaaacgaaagctctaacaaaagtcaaacgacaataacttctgactcgaatgtccgattgtgtctcgtaatatatcgagacgctcgtaactgaaaacagaagctctgagcaaattcacacgacaataacttttgaattcgatcttctattgtgtcccataagatatcgagacgctcgtaattgaacacggaagctctaataaaagtcaaangacaataacttttaacttggatgtccaattgacgcccgtatatatccagacactcgtaattggaaac

SEQ ID NO: 179765 - DNA, 437 bp, Glycine max
  unsure (1)..(437): unsure at all n locations
ttgcaaaacataaactttcactctttcaatcagaagattacccccgtaggaaattaatataatttcgaaacggacgttgaggaaatgtgaattgcatcaatcaaataaaattaaaattagtaaatatcatagaaggatgagaagaataatccaccttcccttttaaaaaaagcaacattaattcattgttcaataacagaaaccagtgacctttctttgtttccacggatgtcattcgctacaaaatatatttccaaatttataggaattgaattgttttaggatgtcaaccgctacacgtttntaaaactgtattaagaaaacgttggtaagggataatccatgctcattgatggtgtctgaaatcaaataagttcattccattaatctcgcacaccaatcagcaaaaacttttgtcatcaangtacacatgatca

SEQ ID NO: 179766 - DNA, 383 bp, Glycine max
aaagattttgaaacacaaccagcctccttgtatttccctatgttttacaagcatatacttcccactagtacacaaataacatcttccacggttaattctaaacaactaatgtagaaaaaaattatagtagtattttttatgatttttgaacttttttacatcagtttattagtaactgatgtaaaatagcacattttacatcagctacacatataacaatgttatatctacaatcaatgtaagactcattagatactttctttactctaaacccttcaactactctatattcaatgtattcaatcgaccttacattaatcggaacctctcatctctaagaacctagccttaaagatactctccaagttctgaatcactaccac

SEQ ID NO: 179767 - DNA, 287 bp, Glycine max
  unsure (1)..(287): unsure at all n locations
ctttgcaaagaagggtntgcccttctcagaaaaaaactcaaatgacccccacaagcatttggtgtcaataaaattgccttcatttttgccatgataactcaagccatttggggtccatctccaccaacagagtcatattctaaaaaggagataactagaaagtcacctactcctaaatcacaaatggagaggaggactggagagtcaaaaataatgttcatttatttgccattgctttgtttctatatgacttgtggtcatatggtcttagctatttgcatgcgtat

SEQ ID NO: 179768 - DNA, 434 bp, Glycine max
  unsure (1)..(434): unsure at all n locations
tcaattcctcgagcagggtcatcatccacactgttttactttcaccaagngacgctgccacatactcagctctagaggtagacaaggccaccacatcctgcttccttgaactccaagccactggtgcatcatagtacatgaacaaataccctccagtactcttcttctgttctggatctcttttccaatcagaatttgtgtaaccaaacagatctgattcatatgattcaacttcaaaagggaacaacacaccattgtcaattgtccctttaacaaacctaagtattcttttggctgcttgcatgtgtgaaagtctaggcttttgcatgaacctgctaatcaaacttactgcatagcagatatcangtatgctgttgcataagtacctcaaggatccaaccaattgtctgaactcagttgcatcaacaagctcc

SEQ ID NO: 179769 - DNA, 334 bp, Glycine max
  unsure (1)..(334): unsure at all n locations
aaaatgcgaaaaaggatgaccctatggctgcaaactcgtcaatcccgtgggtatggcttttgaaagggggaaaagaagttttttgaatgcaaaaacgtccccccctttcgtcattcttataatttggtgcaggggtggctcgcccaggcgagctaacctgcacatttttttttttttttgaggggaacattaaccatgtcccctcccttcacatggattagcatcttgcctaacttgaacttacttaagttagaattaggtgttgattacttatttttactttntaaaacaaacaaatagtaaaagaaagctgcaaaatacaaaggatacgggg

SEQ ID NO: 179770 - DNA, 421 bp, Glycine max
  unsure (1)..(421): unsure at all n locations
gcttctacttatgtggcagggcaggctaccgccaccaacaggtctccaattcgatttttgaccactgcncttgcaacccgcgatgcttctgttcacgtccacctgactgggcgtaatacctaaaccatacttcccacgatttcctaggtattaatcaggctagttatgccgccgttgtctctgcctaaacccatcctggggtcataaccgttccccaacataactagggccatcattaccgctgcatctgacagacaatgctgcccacagagggagcccacggtggaaatgctgaccacttcaaacgactggaaagcacggtctaacgactcttctgctgcgtccacataacgcatggaggatgggcaccactccaagatatcttactcgcctgacacgatgaccaagtgctccttcacta

SEQ ID NO: 179771 - DNA, 386 bp, Glycine max
  unsure (1)..(386): unsure at all n locations
ctatagagagaaggtccagctcttttagttttatatgacnnngccgngagaagatatgcagagatgcgagctctaagcgaaaggcgttctgagagcttgagatcagtttgtgagtgattgtgggatcctagaggtgaaggagacatcctcaccacttatgttcttgcagtctttcatcatgatcttctctttgttgtaaaagaggatttcggactatggaaagctaaatcctctgtaggatcttccctgtaggtacctgatgtaaatatatttttatctacgtaatgatgtattgngtgtgctctgtgctatctgcttttcattgcagcgtgtttgtacctttatcacatatatgcatgctttgttagggtcattcgacagtggga

SEQ ID NO: 179772 - DNA, 287 bp, Glycine max
cttttcatgacatttttcttgctttaaactaaacaaaaggttcaacaccttcttaggtggagccctggtgagaattataacccatccatgacacgcgaggtgactgccttgatgagcactagagtttggcaacgtgttgtcatccttgagtgagcatctctaggtcgaacgacttcacacggcgtatacagttacttcaactatagagactatgattttctaccatgtatatacgaaaaagtatataggatacttatcgactctgaaatgcgacgcaaccatattac

SEQ ID NO: 179773 - DNA, 331 bp, Glycine max
  unsure (1)..(331): unsure at all n locations
catctgtaaatacatgagcnttcatgatttctgatatatatatttgtgcatgtagccacgcaagtacagttggaactgaagggaacgggaaattcaagttctaagaagacatccggtggttgaggttaaggtgtttctgtatctgggaagaaggttgctcaagctccaaagactactgcaaagagaataaggtgaagaaaaattaaacaatgtgcctttctctggatccactactcggaggaattgtatagaaccctgctgtttatgtaaacgattcttcagccttcacaaaatagagggttgactttagtaaattcttcaaggacatgga

SEQ ID NO: 179774 - DNA, 338 bp, Glycine max
  unsure (1)..(338): unsure at all n locations
agcttcttaatttcagaagatgcagctgaggagggagctacatttttcactcttttattactanagcancatgccnggcgctcaactgctgcgagtaggaagccatcctctcaattaaatttcgggcttcagcatgtagtatgtttccaagggctacaccaatggcagcatttatcatacttatctcgatattactgagcncttcataaaaatattggacaaccacctgctttgaaatctgatggtgacggcaactggcacataacttnttaaatttctcctagtattcatacagactctctccactgagttgtctgatacctgagatatccttcctg

SEQ ID NO: 179775 - DNA, 312 bp, Glycine max
ctctgaggaccaactatgtatactggactcaagagcctcacccattggcattaataagaaggtgtctggaaatctcactcagcaccatctgataaacgagatacaaaaaatatttctttgttgtaacatcttttgttgaacatctctccaaatgcgataaaaataatcgatgctgaaaagtgccagtgagttattataaacgcctgataccaactcctttgaatatctacaaaatcgatctaatccatatctttgaatatctaagcatgagtggcctacctacaaggtcaacatgatcacatttcttatgct

SEQ ID NO: 179776 - DNA, 445 bp, Glycine max
  unsure (1)..(445): unsure at all n locations
actaagctngagaggatgcttcaaggggaaagaagagagaagtttagatgttgggagcacnacaatgaaggaagaacaagatagagaagtcgaactctgagttgcgtctcataagactctcattcatcaaagctacgataagggttacacatacatctatttatagactaggtagcttccttgagaagctctcttaagaaaactctcttgagaagcttctttgagaaaacttccttgagaagctagagcttagctacacacacccatctaaaaactaagctcacctccttgagaagcttccttgagaagctagagcttagctacacacgcccatctaaaaactaagctcacctccttgacaaaatacatgaaaatatcaaaaaaagtccctactacaaagactactcataatgccctgaaatacaaggcgtaaaccctatactac

SEQ ID NO: 179777 - DNA, 496 bp, Glycine max
  unsure (1)..(496): unsure at all n locations
actagctgatgtgacatgtgggcaaactttaactatagaaagttgtcnatttattgtaccaaacgtttcattntttgaacaaggccagtttagaacaaacaaaactattaaatatttctgaagagaacatgccaaataagtactaactctcgcaagatatctaagaaatgaaacattntatatggtaaaacaaatagtagaatgtgtaaataaacaatttaatataaaaaatgtgtagaaggaatgagtaaaaaaaacaaataataaaatctgttttatttaaaaatgataataacaaaatttaataaatattttaagagaaaagaaaataaaatataaaaaaattataaattagcttaaattacttgtcaaatataatctatattntatttcatttcatttctttcgaatttagcttcagtgaatntaanatcaattaatgtaccattntaactntatacattggtattnttctatggagaatacattntttcta

SEQ ID NO: 179778 - DNA, 478 bp, Glycine max
  unsure (1)..(478): unsure at all n locations
acacataaaactcaagctggccttgatcttgttctgaatgcgctgtctattttttcttgaagngcncntcaactnttcctcttgagtcttgaatagctcttgattccttcttgaacatcttgaattcatcctttgattgacctttgagctttttgtcatcacttttgtcatcatcttttgttatcatctttgttatcatcaaaacatctttgaatcattcttgattcaccatgaagctttgcttctacagtgctcgcccaggtgagctaaccctgtgcatttttattttttttaaaaaaaacttctttcgaagaaaatacgtgttctctccgggtcggtgctcatttactcgaagccccctaagataagttaggcatatccgatcatcaccctagagaaaaacaatgataatacgtacaaatttaaaggatacttggccggctccagtagtgcatcttgatcatccggagctggacgc

SEQ ID NO: 179779 - DNA, 343 bp, Glycine max
  unsure (1)..(343): unsure at all n locations
aactcagctgtgtgagaagcgcggaaagcaagcgtctacttatagttgctccagagnggacctggagatatgtcgcggaggtcaagagacattgcggacgtcatgtggggtgctatttaccaaaaccaagcttgaccaatcccgacccaacccggacatagtcagtcagtgagaacctgtgatgtacctaaataggcgagctcctggcagtcaaccaataaaagaacaaagtccacaaagcaaggaggcttgtgtggcggctggccagctatgaatcttgagtggtatctggaaaatggcctctggtaatcgattaccaagggtgtgtaatcgattacagggc

SEQ ID NO: 179780 - DNA, 297 bp, Glycine max
aactctcccacatccacaaatcacacatgaacccaccatccccagttgcccaccttcaactgagctcgcgtacccccacgtagcccttatcctcgttcctctcagcaccaggtccgcatcaacccctccaagcttccacaatatccaaacatcatgaactaccctaaaccaagaaaacagggcagaggcaaaaaaactctatccaaaacacattccaataccacagctttccctgctcaaataccccaagaacattctctttgctcttattcgctaaccgttggatcgactcgcaaa

SEQ ID NO: 179781 - DNA, 400 bp, Glycine max
  unsure (1)..(400): unsure at all n locations
acacataaaactaagctgacacgngctngacagagctcattgcacttttgcttattttacatacgnggaaaaacgaagataaactgtgttaagcaagaccaacaaacatacaagaagatactgtctgtttgtttcactaattaaatcaaataacaggttcttgtagcttatatatatcattaagaaaccactacggcagtacctgaaggaagtgaattgtcttttaatcgagtcacaaaccagtatatatcatttaagatatgtaagtgagtgtggtcttttcagacaaatgaagcattagcgaagggaagacacatcatcatgttgtgcatgtggaggtggcaggagctgaactgcatattcaattctatgtgggcacgttaaggtggaaaatgacact

SEQ ID NO: 179782 - DNA, 410 bp, Glycine max
  unsure (1)..(410): unsure at all n locations
gctcaaattgatgagtctcaagaggccacatggcaaggcttttgcatggtctcaatagggagatccaagacattgtagagttacaccattgtgcctccttggaggatctcattcatcaagctatcaaggtggagcaacaattaaagatgaagcaaatatataagaagtcctgatatggctcttcaacttggaaggataaggagacatttaagaaggagggaagatcttcattcaatctcatgaaaaaagtgttgcccttggtaaaaataattctaatcctacttccacttcttcaaaaataagttctattaaatgttttaagtgtttgggaaagggtcatatttgtctccaatgttctaacaaaagaactatggttgtgttgngaatggngatatcactaatgcatcttc

SEQ ID NO: 179783 - DNA, 363 bp, Glycine max
aggggattgaacccatagacaacctcaaaaggggactgcttagtggttctatgaatcccctattgtaggaaaattctacatgaagaagatactcatcccaagaattatggttgcctttcagaagagcccttaaaagggtggataaaggcctattcactacctctgtttgcccatcagtttatggatgacaagtggtagacaaaagaagtttagttcctagcttagcccataaggttttccaaaaatggctaaggaacttagcatctctatctgacacaatggtcctagacaaaccatggagtctcacaactttcctaaaaaagattcttgagatgtgggaagcatcatctaccttgtggcatg

SEQ ID NO: 179784 - DNA, 385 bp, Glycine max
ccttatatatcaccgataataaacaacatggcacactttacaatgggtatatataattaacactaatttcaaagaacataatatttgttttccacaattttcttagattctttttaaaatacttttatctttcttataaataagactcttttatctaatttatatttatagaaaattaagaaaaaaatattctaatgaataatattaaatttattaatgaatcatactatttttagaaaaatattctaaaattattgagactcatcatctcactatcttcacatgttaattaatatagagagactaatagttatgcaatctacgatattaattctgacctagtaattctcttcaattcttacaagagaacaaagttatcttatta

SEQ ID NO: 179785 - DNA, 424 bp, Glycine max
  unsure (1)..(424): unsure at all n locations
tcttatccaaggcaaggctcgagggtgttgctctttcnttcntggcccanaccctagtggatggggcctcccctctcctcttctcctttgccttccgctgcatctccatggtgtaaaaccaccattgaaggacctcattgaagctcaaagatccatcctccatagaagccccacaagcaagcttccatcaagtggtaatcagagcataagagcttcaaggaggtgctccttaaacctccattaatgctttgctttaccttctcttccattgttgtttcttcatttctctccatgtatctcctcacatgtcttgtgctaaatgttgttaacatgattctttagagtttccaccgattaaacttgctatacaggctagattctattttctatggttcaaatatcttggtcttggtcttgaaccatg

SEQ ID NO: 179786 - DNA, 384 bp, Glycine max
  unsure (1)..(384): unsure at all n locations
ngagatgaggaagtgttgaagggtgaaacttactgtttttattgtttaccacagagtggtacctggagatatgtcgcggaggtcaagagaccttgtggacgtcaggtggggtgctattgcccaaaaccaagcttgtacaatcccgacccaacccgggcatagtcggtcagtgagaacctgtgatgtacctaagcaggcgagctcctggctgtcaacagataataggaaaacaagaccactaagcaaggatgcttgtggtggctggccagctgtgaaactagattgatatgtggattgtggcctctggtaatcgattaccaagggtgagtaatcgattacaaggcttaaaattgaggacaggaggctaagatggtctctggtaat

SEQ ID NO: 179787 - DNA, 444 bp, Glycine max
  unsure (1)..(444): unsure at all n locations
agctagcactcgggcatgctnagtctgactagcaaaacngaatagacattgatgtatttgagccnaccgcagcanggcgcttagctcaacacacaacaagggcttagcgcacaaacgcgcttagccttattacaaaggaaaacttacacaagcaaagtggcacttagccgtacaggtccggcttatagctaaacaaaaattctcaaaaccctaaatgttagaacactggtcccgcttagtgcacagatacgcttagcaggcttatcacttaagttcatcaacagggatgaacgtgcttagcgctacatggtctgctcagtgcgttcatctggaaatccaaaattctaacaagtgcaatgaacaggctatgcgcacaggcatgcttagcgcgttcatcgtgatntccagactgaaccacaggtgtcttcacctctttcagccaca

SEQ ID NO: 179788 - DNA, 502 bp, Glycine max
  unsure (1)..(502): unsure at all n locations
ntaagctctcttgaattgggtattcaagataattgagcatattcttttctttngtaactatcttaaccttaagcaacataaacactactcttgatttctaggttgaaatcgctggtgctggcagcttgaacatacgaaattgtataaattactgggaattggtcactacgtgttttgagctgaaatttttactcaattttctagacatctggaacaaaattatgaaaaaataaccaagtgatttgaattaaaggaaaaaataagaaaaatcacacaagttggcagaaaaatcagtgtccaggaaaaaaagttaaagggaagtgtgcttgttgttttggctcacaatttgttctataattggtgcctattttataccaatcctagttctgaaatttcaattgaaaattagtgtgaaaaanaaagtccaaaactagaggtttcttgagcctatttattttgggtttttactctactctagagtcattctaagnttctctttgag

SEQ ID NO: 179789 - DNA, 469 bp, Glycine max
  unsure (1)..(469): unsure at all n locations
actaagcttattgagaagcttccttgggaagctaaagcttaactacattctcccttttaagaactaagctcacctccttgagaagattcctagagaagctagagcttagctacacacacctttctaataactaggctcacctncttgagatgagaagctagagcttagctacacatcccctataatagctaagctcacccccatgctaaaatacatgaaaatacaaaaaaagtccctactgcaaggactactcaaaatgccttgaaatacaaggctaaaatcctatattactagaatggccaaaatacaagcccaaaaagaaggaaaaacctattctaacatttacaaagaagagtggacccaaccttggtccatgggctcaaaaaatctacccttatgttcatgagaaccccagggccttctttagcagctctagcccaatcctcttggagtcttctatccagtaccc

SEQ ID NO: 179790 - DNA, 482 bp, Glycine max
  unsure (1)..(482): unsure at all n locations
tgctggctcttgctttaaccctcttagggtacattattgtttcttcaaattgcatgcattaaattattgcattttcccaaagttccaattaatggtagattggtttggttggcaagtgtgcagtctcaattgctatttctgaagaatcaaggttgcaggggcgttagaattattcgcaaggtacacggttgtgcaagcagctgaagggttattcatgcatagtaaataattatatcataaacgctttgaatgctacacaacaacatgatcaaacaatgcagactgaggtttgtcacttggtttctaatttaatgaacttgggctaatactgagaatttgttttaaagaaatggagaacagaggataacaacattctaaattnttgcatgggcagaaatataatgtgaagtgacctcatccatcatncgtggatcaaaatcatatgatatgggaagtaatggtttttataaacgaatttgaaa

SEQ ID NO: 179791 - DNA, 219 bp, Glycine max
accagcgcaaaaaatagagaccctagaaactgcacaccggaagccctcgagaaagcaaaagggacaactatcaaacgaaagaaagactcacgtgcagaatacatcgagaagctcgaaattaaacaacggaagccctccagaaaatcaaatggccataacatgccaaacggaagacagatcgaggagcataagatatcgagaagcccgaaaatgaacaac

SEQ ID NO: 179792 - DNA, 449 bp, Glycine max
ctaagcttttcctagatccctcttgtggactaggccgcgattagactgtcttcttatgtttagactaacttaaactgagtttcgtccgtagatccctcatttaagactagactcagttcaagtagcttacgaaagtttagcctaatttagcctaagcttcatccgcagatccctcatttaagactaggcctaaactaaacaacattattgtaacaacataattaaaaccaaaacttaatccgcagatccctcatttaagactatgttttgatcctgcttcaatcaagttctaaggcagcagtacatttcccaatgctaaagtcacctaactatgcacacaattgggtgatcaaaccataagcatacaaacattaagcattgatcacaaagaacacaatcaattagatattacgtatttacatcagctgttcattagaaatccccaacta

SEQ ID NO: 179793 - DNA, 352 bp, Glycine max
  unsure (1)..(352): unsure at all n locations
aactaagcttgcacttgtgcccggcacaatgtaggatcaattttgcttatctggacganccaacaaccaatccaaacaggtcatattccatccctttttggcattaaggcatcatagagtgttgcatttgaaacccattggcaaatcgatgaacatggctatatggaagatcaaaacgacattgtagttgcaattggacaatatgcgctaataacatatttcattgcatttgcattgcgaggggagataacagatgggagcactttttttgcaaacttgatacacattgacacccacatggatatgctaatcttgaatgccgatcaatcaaagtgcatactatgactgacag

SEQ ID NO: 179794 - DNA, 482 bp, Glycine max
  unsure (1)..(482): unsure at all n locations
tcaacattcaatttcgagcatctcgatatgtgacgggactgtttctttcatctgagnaaaaagttattgtcgtttgaatttgctcagagcatcaacattcaattttgagcgtctcgatatgtgacaggactcaatcagacatccgagtaaaaagttattgtcgtttgaattggctcanagcttcaacattcaatttcgagcatctagatatgtgacaggactcaatcagacatccgagtaaaaagttattgtcgttcgaatttgctcagagcatcaacattcaatttcgagcgtctcaatatatgacgggactcaatcagacatccaagtaaaaagatattgtcgtttgaattggctcagagcttcaacatttacattcgagcatctcgatatgttacgggactgaatcacacatccgagtaaaaagttattgacgtttgaatctgctcagagcatcaacattcaattctgagcgtctcgat

SEQ ID NO: 179795 - DNA, 513 bp, Glycine max
  unsure (1)..(513): unsure at all n locations
tcttagtctcagatgatgcagctgagtttgtagctacctcatgcattcctctaatgactatggcatcatttctggcgctaaactgctgagagttggaagccatcttctcaattaaatttctagcttcagcaggagtcatgtctccaagggctccaccactggcagcatctatcatacttctctccatattactgagtccttcataaaaatattggagaagaagctgctctgaaatctgatggtgagggcaactggcgcatagttttttaaatcgctcccagtactcatacaggctctctccactgagttgtctaatacctgagatatccttcatgatggctgtgcgcctggaagcagggaaaatcttttctaagaatactctcttaaggtcatcccagctngtgatggaccttggagcaaggtaatacagccagtcctttgccactccctctaatgaatgaggaaaagccttagaaatatgtgatcctcttggacatnctgnnggttcatggg

SEQ ID NO: 179796 - DNA, 420 bp, Glycine max
  unsure (1)..(420): unsure at all n locations
tacacggagagnccgcatgtgcatatatatagtgtctcttgattcacaaattgatgatcatgtctcatctcattaatatatatggacttctatatttctccagcatgaaatctgctattgagcgctataactacgctaacaaggaccatcatcagttaatgaatcctatttcacaagtcaagataattgcctatgtctcaatagtactcctccattgatgttctaccttgatctcttgcatttagttatatataccaactagacattcatgactcccatatatagtttacatgtaggagattctaaaactatatcaacttgaatctaacctctaggtccaacccattttgtttcatgtactatgacaaattatacagtactcagttcaataagttacatagtccaatgatgctacacact

SEQ ID NO: 179797 - DNA, 408 bp, Glycine max
cttccatggcctcttggattcccaccaccattttgatatattaacacaccctagctccttttatggaagccccaaatattggtggctgattcaatttgaattagaagttggaattttaaaacccaaaattttgaaatccaactttgttaaacaactcttcataggcccagagctcataatcgaaacaaacccgaaaccctacttcttgttcaatcctccaaagccaaactttcacgtttgtggtaaaaagtaggtatcccgctttcaacatttgaaaccatgagaatctctatatcaaaaacctatgtgtcatccaaaaggaatgaaaagaatagaaaaataaaggaacaaagagattacgaagaaggacatgagcttaccaatccaataatagataatcaaaatcta

SEQ ID NO: 179798 - DNA, 314 bp, Glycine max
  unsure (1)..(314): unsure at all n locations
actcttctttgtattgccctgttatagctagcatgctctgctccatggcttctaagagttgggccaaactcctcttggatctcgagcaagcagcttactccttctttaagaccatgccatgtactcgtgactgatctctttcctctctccggagcttgagctcattgttgctgccccacaaagctcctcggaatttatctcggccatgctcttccttgcgagccctcttggnttctcgtttgagggctcttgcggcagccacatattcctctcgtaattcggcacacttttctcggatgtctatagcgactgac

SEQ ID NO: 179799 - DNA, 456 bp, Glycine max
acacaaaatactcagctgtacccatgtgaatttgctacaatagatttgtttattcccactacacggtctccttatgaaggtgtttatggttttaacccactaactcctcttgatcttttgcctatgcctaatgtttctgtttttaagcataaagaaggtcaagcaaaggcggactatgtgaagaagcttcatgagagagtcaaagatcaaattgagaggaaaaataaaagctatgctaaacaagccaacaaatggagaaagaaagttgtcttctaacccggagattgggtttgggtgcacatgagaaaagataggtttctggaacaaaggaaatcaaagcttcaaccaaggggagatggaccatttcaagtgcttgaaagaatcaatgacaatgctgacaaagttgagcttgccggtgagtataactgtagttccaccttcaatgtctctgattta

SEQ ID NO: 179800 - DNA, 295 bp, Glycine max
ttatgcataaccatatatagagcttctataagggattaccatgtcttacttgacctactggttcccaattccatgttgtgtccttattatttaataatttgcccaatgtcataccctaatttcatccaggaactatcatttattgatctttttaatccttgctagttgacttatggtgttgaacgccagctacagtgtgaaacagatgatcattcaatgttttgatcacgaatgcgaaagataccaaaaggggggggggggggcaaaaaggtcatttcacgggatgttatggacc

SEQ ID NO: 179801 - DNA, 427 bp, Glycine max
  unsure (1)..(427): unsure at all n locations
tcgctattagactaaaatgacctccgagtcagtgagncaattctttatgtngncnaacaaaactatagaangaacctattataacaagaccactccatttagtcaatttatgttatttaaaagccttgctattcagaataaattcgccagtcactcccaaattttgtttaataaaagctttagttagaataagactaccagttccaaattttgtttaaaagcttcactatatcaccaagttactcgtaaatcttaagatatgttttcatttgaaacattatatatagtcattgaatcacaatatattttaaatgagatcacatcttacaattagaaatggaaactactaataatagccaataaattataatacaataattaacagctgagattaagactngcatgatattttaactaacttttaata

SEQ ID NO: 179802 - DNA, 503 bp, Glycine max
  unsure (1)..(503): unsure at all n locations
ctaagcttccatgtgctangctataaatagaaacatgtgtaacactngnataatcttgatgaatgagaaactngngagacacacttcanaggtcaacttctctccctaatctccttcaattcccacgcccccctctatctctcattctcttcgtccattgaagcttcctctctaagcttcttatccaaggcactctcttggtggagaagcttctcatttcatggcttattctctagtggatggcgcctcctttatcctcttttcctttatcttccactgtaactccatggctgaaaatcaccattgaaagaccttattgaagctcanagatccagcctccatagaagcttctcaagcaagcttccatcanagagttggtggaattgatattntaatatggcggaagtttgatggtgtcaagtatccaacacttcaagcaatngctaaggatatattagttantttgatatctacccgagcttcaaaatcttcatntaagcatc

SEQ ID NO: 179803 - DNA, 269 bp, Glycine max
  unsure (1)..(269): unsure at all n locations
aacgacatagcaacatattacttaatattgccgtcaccacacgganatatacacttatagtgagaatcacctcactcgctgcggaaagctacgaaataagcgcggattccttgctttatcgcaagagtgcgaacccggaacatatctgcccatcctagctttcgatccgtaaatgccacaaacaactgtccaaaaacttcattgcatctgcggtttgcaaaattgctcttctttccattgaagattaaaaccctgaacgctccttccat

SEQ ID NO: 179804 - DNA, 328 bp, Glycine max
  unsure (1)..(328): unsure at all n locations
ctttangcacttctctctctttcgaatttgcttagaaaaattgcttccatgaagaagatccaagcagaggcgcttccgtaacgtttccatgagtgatttcgcgaaggttttcgactgttcttcggtgttcttcattcgttctacatcattcttcagtcctcaacaggtaagtacctcaaaccaagctttcaattcattctatgtacccgtagtgggccacacttggntntatgtatttttattctcgntttcatttactttttatacccccttttgacgtgcttaagccattntatttaagtcatttctcgcttaacctacaaataaa

SEQ ID NO: 179805 - DNA, 257 bp, Glycine max
  unsure (1)..(257): unsure at all n locations
acgggggatacttggatcatcactacataccctgcacggcagaggctaaagaatcaccatatactacaaatacgaactatcactcttaacgggagcagtcccacgactcctccgaacatgacgaaggcaaagtcccggtcacaaacaacgataccaaagagagacgggagattatcttcacaacctcttcatcgatggacacggttcacgctatggagggactagaactccaagaggggggaaatncggactattac

SEQ ID NO: 179806 - DNA, 410 bp, Glycine max
  unsure (1)..(410): unsure at all n locations
catccgaagaaagttcttaaaaccaatattattctaccctagctagtcattcaatattcatggacaaaatagcctaaaaagcatgtaatagagcttaataaggtgtaggtgaccctaaatccttccaatactagccatcatgatttccttagccgatgcctatcatgtagtggcgtccaccgtcccattatatgtgaccatgatactggcctacatttctgtgaaatggtggaaaatcttcacaccagatcaatgttcnaggcataaacaaattgtggcaaagttctctatcccactttngtcttttcaagtcatttcctctaacaacatctacaaaatgagcctcanactcatatatgccgactntcttcagaaatngctngcatttctcgtcttgatagcaatcacta

SEQ ID NO: 179807 - DNA, 406 bp, Glycine max
  unsure (1)..(406): unsure at all n locations
gctgggcagattcagactcattgaatgcctgtgccgtgacaatgtgctgtggtgccacgcataatcactacttagcttgccagggcacctgacacttggccccgcgcttctcaatataatctttttgtttaacattacaactactacataacataactaaacgccccccacaaaatgcaattacgtggtttgctcaccacaaacaagatgcgacgtttcctggttcccacccacctttcctttcataatttgtcatcttgcatataggaatgggtattatgggttattcaagtttaagtcaaaatttaacttaattngcttattggtaatcaattngaaatgtggtgcaatttaaatataaatatatgtaataattctaatcgaatcagagtgatcattacaatac

SEQ ID NO: 179808 - DNA, 415 bp, Glycine max
  unsure (1)..(415): unsure at all n locations
ctaagcttgcggaagttcttaacagttcttccttaacaagttaaatttttatatgacctcaattgaacattcactcagtcaagagacgagccataatgcaaggcttgngagaaatttaacagcttattaagctaatgtctagcacatggcctgatgatgaagcaaaaatcaacactttgctagctggattcaaacctaagaccaaacacatgtttgacgctttagttgaaatcaagatcatgcacacaactctcgaggaggccaaggaaattattgaaaacatggcttccaatgactatgaagtaagtcgagacaaaacacccgtggcagtgtaaaagaaaggagtccttcggttgaactctcaagacacacttttagctcanaattagttgatcacttaaagccttgatgcacc

SEQ ID NO: 179809 - DNA, 289 bp, Glycine max
  unsure (1)..(289): unsure at all n locations
ataactantcactcggaggtccgattcatgcgcataatatatcgagatgctcgatattgaacaacgaaagctctcgagaaatttaaatggtcataactttcaacttcgaggtccgattcaggtgcatactatatcgagattcacgacacggaacaacggaacctctcgagaaattcaaatgatcataacttttctcacggaggtcagatttatgcgcataatatatcgagacgctcgaaattgaacaacggacgctctcgaaaaattcatatggtcattacttttcact

SEQ ID NO: 179810 - DNA, 491 bp, Glycine max
  unsure (1)..(491): unsure at all n locations
aactatgaaactaagctgaaggaaacacatgccttggtaacatggaacccatttgtctttattaaaaaatctgcacttggcgctagactctatggtttatgctcctctgccgaccaccacacagacctttgcccttatgtgcaacaatctgaagcaattgaacagcctgaagcttatgctgcagacatctacaacagacctcctcaacctcagcagcaaaatcagccacaacagaataattatgacctctccagcaactagtacaatcccgggtggaggaatcatcccaaccttagatggtcgaatccttcataacagcagcaacaacaacaacaaccttattttcagaatgctgctgacccaagcagaccatacgttcctccaccaatccagcaacaacaacagcaacagcccagaaacaacacacagttgaggctcctccgcgaaccttccttgaagaacttgtgaggcanatgactatgcaaaacatg

SEQ ID NO: 179811 - DNA, 344 bp, Glycine max
gcccaagaatgatttccgattggtcacaagttcaagatcaagattattcaagttcatgaaagaaatcagagattcagatcagagaagttgattcagattccgagagatgaattcagattcagagagaattagaaacttccagggaagattgaaatattttcaaaaacaaatatagcacaattttgttttcaaagagtttttctaaaatttctagttccagagttttactctctagaatcgataccatacctgtatcgataccagggcaagttgatttaaagctttactgattgcatgtccattattttaatgggaatcatacattatggaatcataccatgatt

SEQ ID NO: 179812 - DNA, 494 bp, Glycine max
  unsure (1)..(494): unsure at all n locations
gaggaagtcgtcctgagagctngagatgagtttgngagttattgtgattttctataggnggaggagacatcctcaccgcttgtatttcttcaatccttcattnttttctcttcctttggttntatgtccttataaaaatatataatgaaagatgcaataatttataattccttgtgaaagagcaagagttaaaatctttaactaccatataaaataatgatttaagtcgttgtgagcagganaaattggaagttgttaaataattactgaattgccaaactaagcttgtatttcttgtttgacttgtaaaaatatgttttcttatttctttaatatgagaatttcttaaattgatatattgcatggattctcattatatatatgtttgattagattggccttgcattgcttgttagtgtgtgactacgatgatcgcggcgttcacaggagcaaatggcaagacttgaccttttctttctgagctatgcacttta

SEQ ID NO: 179813 - DNA, 132 bp, Glycine max
gcaagtattacaccagttctcgtgggaacaatatatcttacttatcaaatactacttgatgacttcggatgcttgccaatgacgcaacatagtgtcatcgtcattatagatgtattatattgcatctgatgc

SEQ ID NO: 179814 - DNA, 422 bp, Glycine max
  unsure (1)..(422): unsure at all n locations
ggtaatcgattacacatatactgtaatcgattatcagagtagatttttatatattattctcaatagtcacatctttntatgtggttcttgaatggctatcaaaggcctatatatatgtgacttgagacacgaatttgacaagagtttttcagaacaaataggtcttatcctcttataaagcaaaatcgttttattctcttacaaattccttggccaaattaattgtgattcaataaggaattatttgagtgctcaaattgttcaatctatctctttatagagagatttcttcttcttttcttctttattctgaaaagggattaagagaccaagggtctcttgttgtgaaagaattctaaacacaaagggatggccttgtgtgtttagaacttgcaaaaggaatttacaagatagtggaactc

SEQ ID NO: 179815 - DNA, 444 bp, Glycine max
  unsure (1)..(444): unsure at all n locations
catcttcttcgaccttgggattctggtcctttctcattgaagcgcatgtccacttgtaactccaaagtatcaaacctttcaccaacaaaggtttgaagaccatcaaacctatccaaaatattttgaagaagagaggaatcttctccaccatgtccttcttcatcaacaagtcgagcaccctttttcacccaagagccatcatgctcttttttataaccaaaggatgcaatgacagcagcgcctattagaaaggatcgcttgattggaacataaggttcagaatcaagagggatgttaaagtgttgaaggaagagggtgactaggtgtggatatggcaatgaagcatttaatcgcaatgccttatgcatgcgatatcggactaagtgtgcccaatcaatntgtcggcctttatgannagcccacataacaataagatcttcttca

SEQ ID NO: 179816 - DNA, 457 bp, Glycine max
  unsure (1)..(457): unsure at all n locations
gacactaaaaactaagcttaccctaagggatggacctttcaggcnttgattttatcttaacaangcctataggggggacctcccagaagagtatggagttagtaccacttttaatatttctgatttaattccttttgcaggtggagctgatattgaggaggaggaaccgacagatttgaggtcaaatcctcttcaagagggaggggatgatgcaatcctccctaggaagggaccagctactagagccatgagcaaaaggctccaagaggattgggctagagttgttgaagaatgcccgagggttctcatgaacctcagggtagatttttgagcccatgggccaaggctgggtccacttatctttgtatatattagattacgatttcattatttctcttgtctttgtatttagggctccataatataggtagggcaccctacacatataggattcttt

SEQ ID NO: 179817 - DNA, 493 bp, Glycine max
  unsure (1)..(493): unsure at all n locations
tactcagcttcgccccactaatggtgtcattctgtcgcatagcaacttttatttgttngcctatggnttcaagtacaactccgcattatcgcaaccttagatgagccaaagtgtaagtataagaatgatctcacggtgttttcttaacttgtttatgttttcttatttcacaattgactaaatgtttgtttgttgttgtggatgttgatattttcatgaaccgtcatcatcgatggaggttggagttgtgtcaaataggaacacattgtcgaaaatattgaacggtaactacatcaaggtggcaaggtggtgtcggtgatggcgcagctctcggtggcagatagggtggcaaaagtgatgacgtataggagaagaggaagaatcaaaagttcagaaagacgattcattacacattgagagtttcatggttttcgacaatttagaggaaagatggatggaaaatgntttgtgtaggttaaatgttgagtcaatg

SEQ ID NO: 179818 - DNA, 373 bp, Glycine max
  unsure (1)..(373): unsure at all n locations
tgaatcggacatccggagacaaggaggacgatantagattcttatgagcgcccgcngngcaatttcgatcctctcgacatactatgcaccccgaatcggacatctgtgtgaaaagtcatgatcattagaatttctcgagagtttccgacgtataatttcgagcgtatcgatatattataaccttgaatcggacctcagtctgataagctatgagcatttgaatttgacgagagctctcgttgttcaatttcgaatatgactgtatgtgatgcgcctaaattggacattcgagntaactgttatgaccatatgaatatctcaagagcttccgttgtcaattctgagcgtctcgatatgtgattcgcctgaatcg

SEQ ID NO: 179819 - DNA, 358 bp, Glycine max
  unsure (1)..(358): unsure at all n locations
ctcgcccagnattatgaccagccggtgaggtgcttcacctttggggacttccaactatcacccatggtggaagaatttgaagagatcctatgatgccctctaggggggaggaaaccatacctcttcacagggttctatccctcattagctagaatttccaagatagtccaaatctcggcgcaggaattagaccacaggaagcaagttgaatatggggtggtcggaataccaagaaaatatttgtgaggtaaagcaagaatctcggcagataaaggcgagtggatcccgttcatagatattctcacacctgtgattttcggcggggttctctttctaacgtggatgggttggaggacct

SEQ ID NO: 179820 - DNA, 479 bp, Glycine max
  unsure (1)..(479): unsure at all n locations
ngtaggattatggggtacccatcatatgtggttttatgtttttatcangcganggngcaagtcgactctccacatccacaaatcacacataaatccaccatccccagttgtccaccttcaactgagctcacgtgctcccacgtagcccttatcctcgttcctctcaacaccgggtccccatcaatccctccaagcttccacaacatccaagaaattcagcatccaaacatcatgaactatccaaaaccaagaaaacagggcataggcagaaaactcttcccaaaacacattccaataccacagttttcctcactcaaataccccagtaacattctctttgtttcgattcgttaaccgttggatcaactcacaattcttactggaggtccctaatacatatatctacagtttgaccgttgggatcttctagaaaacttccataactcaatatgtacaaccttttccacaaccagcaatgc

SEQ ID NO: 179821 - DNA, 439 bp, Glycine max
  unsure (1)..(439): unsure at all n locations
tgccacccagctcgcccaggcgagcaggggtgcttcctctgatgcttcatccttcnggaggaatcttttggagggcccaagtgggcctggttgctatttgcacccccatttttactaaatacaccccctgccttttttggtgattctttttttcgtaaaggtacggaaacttacgaatttcgtaacaatacttgttttctttccgtaatgttacggaaccttgcggatcacataatcatcccctttntgacttacggaatgttacggaacctcactaattgtgcaacaatgcttccatttgatttccggtgtgtcacggaaccttacggatggtgcatcaatattttcttttgaattctggcatgtcccggaactttacaaaaatgcctaatgatgggtgccaagcacctcacaaggaccaaacaaaaagtacatgtca

SEQ ID NO: 179822 - DNA, 449 bp, Glycine max
  unsure (1)..(449): unsure at all n locations
ctcaattcngataagncagcgactataatgctgcttgcattcatgcataacacannccaaagntaaatagcacacaagcatgcaatcaacccacccttccaagaaattcagctggctcctcattggtagtgtcatcctcattgtcattgccagatttgtctgcaccttcatcttttccttgcattacatttcttatcatatcaagcacgtttttcccaggttttagagctaccaatttggctaagaagtccacctgcactgccaacagttataaagatgccaagacagtatttctgacaatgaaagacaatatctatgtagttctgatttccaagcccttgtagcaacaaagggtaaaatcagatgaaaatgaaatactgttaggtaaccatgttaagatccaagatggaaactacagatcaacatacctcacgctgaggaagagtata

SEQ ID NO: 179823 - DNA, 521 bp, Glycine max
  unsure (1)..(521): unsure at all n locations
ctaagctggantggggacactctnctctntctttctataacactaagattttttaatttctcaancnacgacaacgacatcgcttatatatgaatcgactacttaagattaatctaccatctaacgtattactaatatttcaattactactgccgtacatctattcaaaaaatgcaattctacaaaaatatgtttaaatatattatattgttactatctacgtaaaaaatcaatgatccgctgtagtgtacttggttaggctatttggctatcacctgaaacaccattgttcaagttccggcaatggaataatgttgcgccttgctctctacgctctcgtttatacctcatatatatacctaaactgttacaaaccattaaatggaaaaaggaaattcgcgagaatagataacagaatcacatctgacataaatatatattgcataatacccaacaacagacttagaggccataaatgttatcagcggacagataatagaaactttgttcacaccactcac

SEQ ID NO: 179824 - DNA, 433 bp, Glycine max
  unsure (1)..(433): unsure at all n locations
gaaactcagctttgtcctgaaaacgggtcccaatataaacttggattattattgccgnaaccctagccttgaacaagtcctagggaagtagacacggagatggacaagaaaatccgcagtattgtgagtagcattttgaaagacgcctctgttcctgatgctgagaaagatgttccaacatcttccaacccagatgttgctgtccctgaagctgatgaagatgtcccaacatcttccaccccaaatgtttctgtgactgatgtcaataaagatgttccaacatctaccggcccaaatgctgaagtactctctttccccagcaaagagagatcatcagaggaagatgatctagccccagaagagacttctacaccacgggcaccagaacctgctcaggtgacctcattgaccctgaagaagttgaatctgatga

SEQ ID NO: 179825 - DNA, 492 bp, Glycine max
  unsure (1)..(492): unsure at all n locations
gtgttgaagggtgaaacttcctgcttttanttttgaccacagagtggtacctggagatatgtncgcggggtcaggagaccttgnggacgtcaggtggngtgctattgcccanaaccaagcttgaccaatctcgacccaacccgggcatagtcggtcagtgagaacctgtgatgtacctaagcaggcgagctcctggcagtcaacagataaaaggaacaaagaccacaatgcaaggaggcttgtggtggctggccagctgtgaaacttgattgatatgtgagatatggtctcaggtaatcgattaccaagggtgggtaatcgcttacaaggattaaaaatgaagacaggaggctaagatggtctctggtaatcgattaccacggngtgtaatcgattaccaggcttgaaaacgaggtcaggaagtcatgaaggcttctggtaatcgattaccaacggagtgtaatcgantaccaggcttagaaaggggactgg

SEQ ID NO: 179826 - DNA, 431 bp, Glycine max
  unsure (1)..(431): unsure at all n locations
tggtcttttccagtgaaaggatcgatgtgggtctttaaaaggctaatttagtcatcctgcttggacgaatgagaaaacaggggcaaatgaagggggtgagagtaagggagaagcccatgctgtgactgccattcctatacaaccaagttgcccaccaacccaacaatgtcattactcagccaataacaaaccttctccttaaccaccgcccagttatccacaaaggccatccctaaaatcaaccacaaagcctacctaccgcacttccaatgacaaacaccacctttagcgtaaaccanaacaccaaccaagaaaatgaatttgcagcgagaaagccttagaattcaccccaattccagtgtcctatgctgtctttgctccatatctactngataattcaatggtagccataaccctaaccaagggtcatc

SEQ ID NO: 179827 - DNA, 325 bp, Glycine max
  unsure (1)..(325): unsure at all n locations
aaacacgggccaatgaagggggtgagagtaaaggagaaacccatgctgtgactgacattcctatacaaccaagttgcccaccaacccaacaatgtcattactcagcccataacaaaccttcttcttaaccaccgcccagttatccacaaaggccattcctaaaatcaaccacaaagcctacctaccgcacttncaatgacaaacaccacctttatgcgtaaccanaacaccaaccaagaaatgaattttgcagcgagaaagccttataattcaccccaattccagtgggctatgctgtcttgctcccatatctacttgataattc

SEQ ID NO: 179828 - DNA, 271 bp, Glycine max
  unsure (1)..(271): unsure at all n locations
actaagcatgccaccagctcgcccaggcgagcatggctgctcgatgtttctggatgaatcttctggagggcccaagcgggcctgggtgctatatgcacncccattnctactaagtacaccgccttgcctttattatggngatactattccgcaaagttacggacacttactaattacagtaacgatacctgctttcttctcttaacgttcacgaactcttcgggttcacataatcatcccccctttagacctacaaaatgttacgcgaacc

SEQ ID NO: 179829 - DNA, 464 bp, Glycine max
  unsure (1)..(464): unsure at all n locations
ctcaagccatatgactntcaanttttcatgagtgggcgaaagagtatacaatattaattaacaaatcatcgaatcgggcgattcatattgatgatacaaaactgcacagacattcatgtatcatatgaatctgtaggctgccgatttgtatcaaatcgtaaatcatgagattctaataactatggcctataatattaccttttcatgcttcactttcaagtcttgttatattgcaccttnggtgatcagttacaacacttgtcattctttatgatgagactattttcttaaccaggttccttcataatatcttgactaaattgcatgatgtctttacacatacgttatgtgctcttaagacattntgttcatacttctgtgacacggggaggcttaattatggtcggcgaaggatcaatgatgccccgcactactgctgaactgttggatagtcttgtcaccga

SEQ ID NO: 179830 - DNA, 499 bp, Glycine max
  unsure (1)..(499): unsure at all n locations
gcagttaagtgaacaaatgaagtgtccacagtcttttatgttttcttggtagaggtacatgctaataactaataagatttcctgtgcagggtatcattgtttttgcatgactgatggctaccttgnggctggagattttggttgaatctgcctcaagtgttattttgaaggtagttgagataatcttttgttgttgtttgtttattatatacctaaatttgggttcaagactagttattcaacatgtggattatgtaccataagattgttctaataagtgattntaaggtaggcagatgattctatcattgaagaggtgtgtttcctccttggttgaggattcatgacctataagttaatacatgaaactgaaaaatgttctagctctaaaatttgattagctaggcttacatgaatcgtcgaatngatcagctaggcatacattatatcaactggtagtgtcattttctcagtctaataatattttggatgatattat

SEQ ID NO: 179831 - DNA, 277 bp, Glycine max
gaacaacaagaacgcacgaatatagacgtaaaactatccctcacataacatcaaccatacaatatcttcgatgttcgcacatttatcgttaccttaccttaaagcgagacgagagatatacccttagcctctaatgcgagaacgaagtgatgctaatttgcgacgagggcatatcatgaaacatttcgtagacatgcttactatcaacaagtaaagtgtgtacacggcctatttatgtccagtggctataacgcactagcacgtgcaactgtcgtcg

SEQ ID NO: 179832 - DNA, 393 bp, Glycine max
  unsure (1)..(393): unsure at all n locations
ttccgccccggagtacgacagtcaccgctttatgagcgttgtacaccagcagcgcttcgaagccattaagggatggtcgtttctccgggagcgacgcgtccagctcaaggacgacgagtatactgatttccaggaagaaataaggcgccggcggtgggcaccactggttactcccatggccaagtttgatccagaaatagtccttgagttttatgccaatgcttggccaacagaggagggcgtgcgtgacatgagatcctgngttaggggtcagtggatcccgttcgatgccgacgctatcagccagctcctgggatatccgatggtattggaagagggccaggaatgcgagtatggccagaggaggaaccggtctgatgggttcgatgagga

SEQ ID NO: 179833 - DNA, 464 bp, Glycine max
  unsure (1)..(464): unsure at all n locations
gcttaacatcagaccacttccagggtgctggaactacttctcatgttcttgatggggcctatgcaagttgaaagccttggaggaaagaggtatgcctatgttgttgtggatgatttctccagatttacctgngtcaactttatcagagagaaatcagacacctttgaagtattcaaggagttgagtctaaaacttcaaagagaaaaagactgtgtcatcaagagaatcangagtgaccatggcagagagtttgaaaacaacaagtttactgaattctgcacatctgaaggcatcactcatgagttctctgcagccattacaccacaacagaatggcatagttgaaaggaanaacaggactntgcangaggctgctagggtcatgcttcatgccaaagaacttccctataatctctgggctgaagccatgaacacagcatgctacatccacaacagagtcacact

SEQ ID NO: 179834 - DNA, 483 bp, Glycine max
  unsure (1)..(483): unsure at all n locations
gaccttgaaactcagcttagacaagtgnaagtcatcttcagagatttgcatcattcatttatcnatcctttttctttcgaatacatagaaatagaaatgtgtatgacatttgctcatgaatgtaagatacccaattctctcactctctctttgtgttttccttatttttatcaagtttgtgtttctacaaccgatgttttgtgtccaacattcattttttttctaattcattttttcttatatgtaacatgatgtgggtcagtgggtgtaatgtgacactatttgtttgtgtacttaggagtagcaaataggatattaggaaaactagttttggttctaagttttttttctcttgtattctttttttaatattcgtttcattctgtgttttgatatgttcatgacatgttgcttattcaggacctcaatgtctaggagttctactttgatttctagcttgtntatttatgaagtaataataaa

SEQ ID NO: 179835 - DNA, 389 bp, Glycine max
ggattgagcaaactgaggcaagaatggccgattgagcaatggtgagtgagaggttcagcaacggcgagcaatggtgagtcagacgaaaggcgatatcgaggttcaccgagggagcagctgaggtgcgcgcaatagccaactacgctaatatatttttggaaatttagggaaaaatgtaaacaacggtcctttagacgagacgtcgttgtctactttaatgttaattacaaaaatgccacattcctacattctaagacgggtgaacaagatcatctaagaatttgcgtcgttaaaaatgcatatttttagttttaaagtcgttgtttaggaaaccgcctttaaaaagctatcattatttacaaaaatgccaccgcatcgcaatctacatt

SEQ ID NO: 179836 - DNA, 469 bp, Glycine max
  unsure (1)..(469): unsure at all n locations
tgtgatatcttaattcaaccccccttcttaatatatctgatgctactngtcttacacaagnagggcatgatatgcttccagaggaaaacatgttgcctaaaagttactatcaggccaagaagatactgtgtccaatgggtatggagtatcagaagattcaggcttgtccaaatgattgcatgttgtacagacatgaatttgaagaaatgtccaaatgccctaggtgtggggtatcacggtacaaagtcaaggatgatgaggagtgtagtagtgatgaaaactcaaagaagggccacccaacgaaggtgttgtggtatttgccgatcgttccagaattaagtgtctttttgctaatggagacaatgctaaaaaacttacatggcacgcaaatggcagaaactgtgatggaatggtccgtcatctggcttgatgctcctagtggaagaagatagatcgtctggttttggat

SEQ ID NO: 179837 - DNA, 435 bp, Glycine max
  unsure (1)..(435): unsure at all n locations
ntatataatagnactaaatatgcacattaaatgtatntgttttttcttatagnggatgaaccacaataatntttgcatttgaatgtgttacgcacccattatatcaacatattaattgatgctaattgatttctttcatctccacatctttgccacaggattcattggcacttgaagtcaaccatttaacaccgtttttaggttcatgtgaaacatctgtctcccccttataactccaattatgatttaccgaagtacaatattaaggctctatctgtcccactaataccccattatgatttatatgttaataagaaagtcaatactttacctttagtttctaattcataaaattaactaagtcaatgtgtatcttgatttgccctgaaatattattagagttagagtataaatatgaggtgaaatctcatattc

SEQ ID NO: 179838 - DNA, 393 bp, Glycine max
  unsure (1)..(393): unsure at all n locations
aaagacatgaacatgtttttattgaggtcaacctctcattcatagatcttcaaacattagatntgaaagatgtaagcatttctattgagatcaacctttaaggctgaacggttcatcatccctcaacctttaagcatgaaagacatggatacttctttttgaggtctgctttccaagaaacaattcatagtctctcaagcattcaacttgaaaagtgtgagcacttcttatttatgttgattggcaattccaagcaggatggtgtagtaattgttttcatttgatattaatttttgtcgccacacctaataggcaaacatatatggaaagatgttntcatgtctatagaccatannaaatagtacgcttcatgatcttatatngatcgatgat

SEQ ID NO: 179839 - DNA, 473 bp, Glycine max
  unsure (1)..(473): unsure at all n locations
gacacatagaaactcagctttcaggaagctaccagctataatttaagcatgtgtatactngccgaactcngatgaatgagagtcttgtgagacaaacctcacagttcaacttctcttcctcttttcttccttcaatttcgtgctcccccctctctctttcttttcctccattgaagcatcctctccaagcttcttatccaaggcacattcttggtggtgaagctccttcttccatggcttattccctagtggatggcgcctcctctcacctcttctnctttgtcttccgctgcatctccatggtgaaaaatcaccattgaaggacctcattgaagctcanagatccagcctccatagaagctccacaagcaagcttccatcaattagatctcattattttttttcttttccagattctaaaccttgacaaaccacaanaatgtaagcaaacgataatcgctggagttggattt

SEQ ID NO: 179840 - DNA, 446 bp, Glycine max
  unsure (1)..(446): unsure at all n locations
tggacatcatgtggtgacgttactctccaagacttcttataaatgattatgttaaaactaattatcttacaattatatgttataattaanaaaaaacacaattagataagatatttgacatcatcattagaatcaactcctccatatttttgcaaaagtttatctctcaagtctatatattgttttggtcaattaataccaataaaaaaaagaaaatgaaatgaagactaatgattagacaataaaaaacaataaataaactacaatagaagataaaacatctctaattgaataagtaaaatactacaatgttcattatcttgttgcttatnttttgtgactccttggcaagcataccaagttgcacaagtagtataaaacagtaagaccaagtattgaattccagagggactatacttgtactcagaagtatatgtatatctaac

SEQ ID NO: 179841 - DNA, 466 bp, Glycine max
  unsure (1)..(466): unsure at all n locations
gacacatagaatactaagcctttaatnncatccatcaatgatctcattgnctcctttgttgntgctaggancgnngcttngctnntctaaaccatccaaattaaagttcacatcatatatatatatatatatatatatatatgacatttttttttgtaagaaaataatgacaacacgtatcaaaaagctatgagcacagcattgctaaattacaagagaagtgttgaattgaagtttgatatataccttagttcctggaggaagaagtgttctaagtgcctgaaaattctcattgagtttttcacgccttcttcgctctgatatggtatgctgctggtactggtgctgggtactaatgggacgtggtgcaggttgagtaacgcgttctctcattctcgctaaattatttaagtttctaaagaattcaaatgatcttttctgtaggctttggctgcgataattggat

SEQ ID NO: 179842 - DNA, 236 bp, Glycine max
aacccaaagaaggaacgcgcaccccccaaagcaaaaaagggaagggaaagagacaacgaacaaagagccaagagagagccagaaaagccagcgcacaggcagcgcgcagagaacacaaccaaaactcccaaggactcaaaacgcgacgacaaacacaaaatgcgccgacaaaacacacacaacgccccgccccaagcaaaccgacccaccgcaaagaaaaaaccagggaaccaaaa

SEQ ID NO: 179843 - DNA, 437 bp, Glycine max
  unsure (1)..(437): unsure at all n locations
tatgccacggaaagggaattatgaaattgagatgtccattattcaccatttcctagntaaccatgcattaggtaccatgttcaattattctgttttgttgttgcgtgtttttttttttagaaatgggtttatgatcccaacatggttggctcatggtgcctaacacatgcaactaagaatgtagtgtgaagtttcacgcttccccttttttgtttttgttttgtagaggaaaacgcatggatgagcaacatgaaaacaaatggtatgcaattttgcagatcaaaaagtttgttgaacgcatatgcatgatgatgccatgactcatgcataatatgaggctggaatatgataacggacaaatgcaagaatgatatgtttattatgatgttatgaagagatgcttatgcgatgcatgatatgaatgcattntacggaca

SEQ ID NO: 179844 - DNA, 373 bp, Glycine max
  unsure (1)..(373): unsure at all n locations
aacttccatctctgaaccaacttccatttttgatggaaccacaaggtgtggcatctatcaatcaactctgtttttgtcagtaattatagtcttccattaatccaattaccctattgtccattattttgcttcttattataaatataataatctaattatgagtgtgttaactcggattgtcttttcaggttatacatttgctatctgtgccctcttgcacaacgcgcatggataactaggaactgtaaggttgctttcttcaccatgcatcttttagacaagtgctctcatttaacctctgtataatttgaagtatgtaagttgattntagtactcaatctagtttagaattaatatataagtaagtttttga

SEQ ID NO: 179845 - DNA, 493 bp, Glycine max
  unsure (1)..(493): unsure at all n locations
ggatcttaagtcacctgcggcatgcaagcttccatcaagtggtaatcagagcacaatagcttctagtaggtgctccttaaacctccattaattntgtgctttaccttctattccattgttgtttctccattttttctccatgtatctcctcacatgtcttgtgctaaatgttgttaacatgattctttatagtttccaccgattaaacttgctatataagctacatttgattctctatggttcaaatttcttgttcttgctcttgaaccatgaattgtgttgagtttaggttcctttgagtcttgtcttgttattttttgtggctgaaacctaaaccataaaattcttacgaaaatattaaagtagaagaaaacctcaaaaatctagagtgacttgttcacctattgtagttttgtcatagaagtcatgcctagtcatgaaacttgtcacataagatttcttatgttgtgctgaatattatttttcttggttc

SEQ ID NO: 179846 - DNA, 211 bp, Glycine max
tgataactgccttcatcacgcaatatcaatacaatactgacatggctcctgacataacctatttgcttaatatgagcacgagggagaatgagtcctttaatgagtaccccctatgttggaaggacttggtagcataactggcacccctcatggcggaaagagaaatgataactatgatagcggatacactgccagtgatctactatgaaaa

SEQ ID NO: 179847 - DNA, 460 bp, Glycine max
agcttaatgaggtcttctatatagtcctttatttcattgcattcctctatcgagtgaccattattacgatggtatcaacaacattttgagtaattggctttaggtggagtattagccttctttggcatagccaaaatgtctacaaacaatgcccaatccatgatatgagatctaatggcagtgaggggtgtgtaatgagcgtaacgaagttctcgggtggctgatccctccttctgtcatcttgcgctttgttgaagctgggtttatcattatctttcttggccaaaatgacatatgtttgtatttggttcctatacttgaccaatttctccatttgcatgtacttggccgctctccttctaagctcatcctgattagatgtaggttttttgcatatgttgttcacaaaagctcccagctctaacgctattatcaagtggtgcatggctactgtgggatc

SEQ ID NO: 179848 - DNA, 344 bp, Glycine max
  unsure (1)..(344): unsure at all n locations
agcttcatcacaatgtttatttgaggaagatgttataaaaacctatagcgggcctactaatttgaagaaataaaggttcgggagttgtttacgcacggggaaggtattatcaccacacgcatctatcacaagggacgacagactntaatcaaatgtgcaaaatcatgacttcaaatttattttatnttcccctttttacgtttttttatcttttctgggttgaagagagcggggctcttgctcatacgtatcctcaattgcgatgaggaactcaaacctacgtagttctttgaaaagcaagatagttatactgagtgttgatcttagacttcaattggtccgtt

SEQ ID NO: 179849 - DNA, 385 bp, Glycine max
  unsure (1)..(385): unsure at all n locations
tactcaagcttcggaagaaagtgatgaggtacaagcccttaggtagagctcgaaagagcctgtgttgtctaagagaagttcaagtccatagccatcaaagtctgaaaagagtatgatgaactaagggatgtcaatatggccaccgatgaagccttggaatgagaaaccaagaaggcccgaaaggaagaacacgaccaaagcaaagtnttgaggggctttatatggcagcaatagtgagctcaagctccgaagaggtgaaaggaatcatcacgggtcaaaggcatgatcttgaaggatgagctaaagggttgccttatgtcgaaaagaaatttgtcccaacagttaagcgagactgaatggaatatgtgggccatcatcgattagt

SEQ ID NO: 179850 - DNA, 470 bp, Glycine max
agcttaacagccttgaccataagattgatgttcttgctaagccaaagctagtagatacaagttacagtcccagaacagaatcatcacaaatttataacacaattttatattaattttagcattttaatcacatgccattttcttgaaaggaaaattcagttcttttacatatgcattgtgtagtgcaaagtaagcatgccgacctttataaatgggacaagaggaagttgaacagaagttggataacaaccaagattagcaagtagacatgcattctttatttgctcccttaaaacctctgtcaatccgtatatagcttcttgattgtattcaaaattacttcttaagtttgtcacttacaaattttgcgatgtattggttataggtaatactttttgagaggcattggaagataacccgtgtttatcttcttgttgtttagtgaagaactttctacaattttaacctac

SEQ ID NO: 179851 - DNA, 463 bp, Glycine max
  unsure (1)..(463): unsure at all n locations
tgagaagctggttggacaaatngatcggaactaggagttattatcgatgagcacaaagaggcgaacgtcaaagccaaagaaggctacggcaaagcagaggaagatctgttagctgttctccttaaatacgaggagggtaatgctagtaaccagggatttagcttaactattaacaatatcaaggcagttacctcggtaaggataacaaccacatttgttaatccattcttttatgaacatagctcatttctatgacactttggtcttgtttgaataaatatctttataccacaaaaaaaaggtacataagttgattntagcttatagagaagntaaatatattttatcttattttcttctcttaaaaatgtttaagagatctatgtcttgactcttgatgtattggtccttcagttggaggcctttgctattatctggtttagcatggtatattctttgcatc

SEQ ID NO: 179852 - DNA, 482 bp, Glycine max
  unsure (1)..(482): unsure at all n locations
cgggatccttnagtcacctgcggcatgcaagcttgaaggcatgtaacccaccatcttcttatttagaacaccgataatatgtctactatcattgttatcatctccctctccatcattgngggtgctacttgagctgccagatccctccacctttgggcgtattctttgaaagattcatgctccttcttacacatgttctgtagttgcattctctccgaagccatatcagaattgtattgatactgcctaatgaaggaaaccattaggtccttacaagaacagactcgggaaggttccaaattagtatatcaggtgatgattgccctagtaagagtttcctagaagaaatgcatcaataattnttcatctttcgagtatgcccccattttccttctgtacatcttcaggtgattcttggggcaagtagtccccttgtacttatcataatccggtaccttgaactttggagggataatgatgtc

SEQ ID NO: 179853 - DNA, 466 bp, Glycine max
agcttccttgagaagattcctaaagattgcttttgcttagctacacacacctctctaatagctaagctcacctccttgagatgagaagctagagcttagctacacaccccctataatagctaagctcacccccatgacaaaatacatgaaaatacaaaaaattccctactacaaagactactcaaaatgcctcgaaatacaaggctaaaaccctatactactagaatggccaaaatacaaggcccaaacgaaggaaaaacctattctaatatttacaaagataagcgggctcatacttagtccatgggttcgaaatctatcctagggcctttccttggatctctggcccaatcaaacattacagtcacaaaacttcttctccaagcagctagttctatgagtaagataatttaatatgggcagaatatattttattatggcagactcagaaaaccaaagaataaac

SEQ ID NO: 179854 - DNA, 420 bp, Glycine max
  unsure (1)..(420): unsure at all n locations
tggcagattaaggggagtggactnctgtcattgacatatcactattggtggttgggaccatactctttccaaatgtagacgggctagtggatgtggtaatgatcgatgcttttcttgcttatcatcacagcaaggaaagcccaatcattgatgttttcaccgatgcatatgacacattcaacccgagatgtgaaaagatcggtgcaagaattgtctgttgtacgcccgctctttatgtgttgatggtgtcccatgttttatgtcataaaagtagacttgtcttccctctacaaggtcatcgcatgtgcgccgaaaaaggaaaagcaaactatgaggaactcttttcacgtatggtaagagcgttcattaaatggttcccctgatggaaagaaagaagggctggaagtgtgtgctcatgtg

SEQ ID NO: 179855 - DNA, 463 bp, Glycine max
  unsure (1)..(463): unsure at all n locations
agctntttcctctgtacacctacgtttgtatatctaaaaatnnttntttctctatatacacatgcattgaagaactctttctctctataccgacatggtctatataaaatctctattccttttcaaagatttcttttccccttttcaatatacactcgttgtttatataaaaatttcctttatattcactcattgctcatatacaagaatttcttttcaaacattgtttatatacaaaaatttcttttcttttctttatatacagatatgacattttgttcacaacgtctctttctttctctattcttggcgttattacgacgtttgttcattttattttaggatgacgctcctaaacgaaaaatctacacggttctggaattcaacaaatattatcaacaataacgaaataagcactaacgccacaatctaaacgaaatgtatgcacaacacanatgacaat

SEQ ID NO: 179856 - DNA, 357 bp, Glycine max
tcaagctgctcaatagctccaggttgctgcatggaaggtctaaggtctgtatggtggtcagcagaggagtacaaaccacaaacccttgcgacaggtacagatttcggattcaaggctagctgggttaccaagttaaccaatgcatccagtttgccttcaagcttcttagtctcagatgatgcagttgagtttgtagctacctcatgcactcctctaatgactatagcatcatttctggcgctaaactgctgggagttggaagccatcttcttaattaaattcctggcttcagtaagaggcatgtctccaaaggctccaccactggcagcatctatcatacttctctccatattactg

SEQ ID NO: 179857 - DNA, 460 bp, Glycine max
  unsure (1)..(460): unsure at all n locations
agcttganatgaggaagggtggaatgtgatacttcctacttttaatcgccgaccacagagtgatacctggagatatgtctcggcggccaccagaccttggggacgtcaggtggggtgctattgcccaaaaccaagcttgaccaatcccgacccaacccgggcatagtcagtcagggagaacctgtgatgtacctaaacaggcgagctcctggtagtcaaacgataaaagaacaaacaccacaaagcacggaggcttgtgtggtggctggccacctatgaatcttgagtgatatctgtgatatggcctctggcaatcgattaccacgggtgggtaatcgattacaaggcttataaagtgaaggcaggaagctaatatggcctctggtattcgataccaagggagcttattcgattactacgcttgataacgagatcacgaagctaggacggcttctggaat

SEQ ID NO: 179858 - DNA, 424 bp, Glycine max
  unsure (1)..(424): unsure at all n locations
tatagagaacgccattntnctctgtttcttgagcgcttgtataagnaatcaacgtatgcatgtttctactatatgcttttcaacacggctttttgattgctacatatccttgtagtcttctaatataatattttttgcgcgtaatattgatgcttatagctctatttctccaaagcatgtgagaaaattatgaagatgtccgctgacaccagaagaagcaacacttgttctagcacgtcttggttttaaacgggagacttacacttacttggctggttctcatatatatggnggacactcaagaatggaaccctttaccaccctctatcccaatgtgatcacaaaggaaaccctgcttacatacaatgaactggaacctttcacgaattattcttctcacgtaattcggattatatctattatc

SEQ ID NO: 179859 - DNA, 452 bp, Glycine max
  unsure (1)..(452): unsure at all n locations
agcttggggaaattactaaattatacactatgctctctagctaaaatctctacataatccaatctccatttttgttgtgaaaaacttcataatagttgtgattccttttgattgcttcaaacccatgaaaacaaacagatattcttatccacataagccatccatttacatttagatactgataccaaaaaaattcattcgtaaatgccaatgtttcatgttcttcctacatatttttaagaatgaataatctatatacacactttccttgcatgaattaatgtttttgggtgaggaatgcatattantatctaagtgtgggctatggtccgcataacgcttaccaaatctccaacggcttgaaggccaatattataaagtgggtattatatatgcataagcaccttttatatatataatacatttccaacatggagggcatgaaaatttct

SEQ ID NO: 179860 - DNA, 447 bp, Glycine max
  unsure (1)..(447): unsure at all n locations
gctngagctggatggtcactntccgaaacatatattntctcttatatccaaatctctctcctgcagtgttcaaaaaaaggtcacatgtttagatgaaaaataacacattttgcaaggctattaaatggactaacaagaattagatctaacaaaaaaaagtgcaaaattagatctaataagaattagttcaaaagtgatttgtaaagacttctcatcaccatgaaatatatatgatgtaaaggagctgctcactccacataccttgcccaaaaagcatattccttgngaatcctttctatccttatttggtagatcaaattttgtggcattgcggacttcatcctgcagatgatgtggtaggagataaaaaatagattaaatatttctctaaaaatagtggtaaaaaaatcttcattaagaaaaagttaacatgttagcattcataaa

SEQ ID NO: 179861 - DNA, 468 bp, Glycine max
  unsure (1)..(468): unsure at all n locations
agcttgcctcanagaggtccaggaaggattttgtctgttcttggaactanttccgctcctgagtatgacagtcaccactttaggagcgctgtacaccagcagcgcttcgaggccatcaagggatggtcatttctccgggagcgacgcgtccagctcagggacgatgagtataccgatttccaggaagaaataggtcgccggcggtgggcatcactggttacccccatggccaagttcgatccagaaatagtcctcgaattttatgccaatgcttggccaatagaggagggcgtgcgtgacatgaggtcctgggtgaggggtcagtggatcccatttgatgcagatgctatcggccaactccagggatatccgttagtgttggaagagggccacgagtgcgagtatggccagaggaggaaccggtctgatgggtttgatgaggaggccatcgcccacttgctatgtata

SEQ ID NO: 179862 - DNA, 389 bp, Glycine max
  unsure (1)..(389): unsure at all n locations
actcagcttttatccagggcattcttggtggtggaagctcttctttcttggcttattccctagnggatggggcctcctctctccttttctcctttgccttccgctgcatctccatggtgtaaaatcaccattgaagaacctcattgaagctcaaagatccagcctccatagaagctccacaagcaagcttccatcacaccctttgtgcatgtccttcatgttttacatgcctcatgacacctaaacacacttagtagagaatcttgaatttgatcttggattagtgggctgaaccatagctgaaattcactaatcataattagtgaaatgttggctccacaaattcaagttcaaattcaagtgaaatttgaatagaaattcaaaattcc

SEQ ID NO: 179863 - DNA, 440 bp, Glycine max
  unsure (1)..(440): unsure at all n locations
agcttgactaggcgagttgattctagccttagtttctccttagttattagtcaattcgggtaagaatgagaaatcctaaagagaaaatgtccggttgattttccgctttattttactaaaaggtatatttttgttattatattattattttatctcttttttatttccaacgtggttacggcacgaccgaacggtcggaattcattntaaccgaagttaacggataatacaattcaaatgttcggtggaaatttattttatttttaagttaagcgagaaatgacttaagtaaaatggcttaagcacgtcaaaagggggtgtaaaaagtaaatgaaacgagaatagaaattcaccaaacacaatgtggaccaccatgggtacatataatgaatcgaacagcttggttcgaggtacttacccgttgaagatcgaagaacgat

SEQ ID NO: 179864 - DNA, 436 bp, Glycine max
  unsure (1)..(436): unsure at all n locations
attacggacctatgatactaagcttagaccaccgtgaaagaaagagatactgatctaacanatttttatggcaacttcctaaccgagatgatgatttttcttttttattgaaatgatatccttcaatcgttcatttttccataattatcaaattattgattattatattaatttgtcagaacaattgatcgactatctttaataaaaatttctgtttaattatattgttctcaagcatatgtataagactcaaattcgatacattatttaaagaaatcaaatataatattatttagaccaataactaattgatccttcaattttatttgaattgaataaaattattaacagggtaaactttgttccttcaatattaaaatttaattaatcttgtaaaatttgaatttaaaatacattttatctttatataacggcg

SEQ ID NO: 179865 - DNA, 454 bp, Glycine max
  unsure (1)..(454): unsure at all n locations
agcttaagggaaaaagatgtacatatatattatttcgtggatcgaaaaacttaatttaataacactgctgttgtactgctgatcttcaactcattttatttcacgatttataggctggaaaatacacccatgccatttntttatgagtggtaatcactgattttgtccagttatgttattcttgaatacacgagaatgtaatggacaaggatacttgtactccaccatataaaaaaatttgtcttataaaaaaatggctatatatgtaaagatagataacattttccctttgattttggtgcactcttttataataatatgctattctttaataaaagggttctttcaatcattattctcaaggagatttagctgtaatcattgcttctgcatctacagagaaattattattcttaagcattataatgacttacctagacacctctttaacatt

SEQ ID NO: 179866 - DNA, 439 bp, Glycine max
  unsure (1)..(439): unsure at all n locations
tactaagcttaaagaatagggtggttgtcagcagggttgcggttttataattttgtttcacatgccttgtttaagctttcgtatgtaattaagggcatttgtgggctaatttgcttgtgaaaaccttattaaaccaatcaatctgtgtaggagaaacaaaggctgtgaagtgtgaacagttattttgaattcaattaaaggcttcaaccctttttataatttttacaattcacaagagccattacctcatattgggcttatggacttcctccagatactcgaggtgcaatccattgatcatatacttcaaccgaaccaaagccttccacaacaatatctttatcctgtgttccaacttcacttccattttgggtggaaatagtctttgtctctggataagagttcccattcttcaatactggntcaacttttgaattat

SEQ ID NO: 179867 - DNA, 480 bp, Glycine max
  unsure (1)..(480): unsure at all n locations
ctaagtcacctgcngctgcagcttcatggtaaataggtgcgccttttttttagagtcctctcacgaggtggaggttgtgccatgttctcagaatgtgcaaaatcagaatgctcagaatcagaatgctcaaaattataatgctcaagatcaggatgttcaaaatcaccaataacagaatgcacagattcaccagttatggaatgctcagaatgatcaaaaggtataaaatgatgcctaactaatctatgaaatgtcctatctatctcaggatcaaagggttgtaagtcagatggattgcctctagtcatacactacattcagcatgcacacaactagttgccttgtcatgtaaataaaggtgtaggtttgaactacagctaccctcaaatgatatccaaatgacttgaaattttgtgagcaaccttataaaatgatgagaagatagcacaaaataattcagacaanaattcaaagtctaac

SEQ ID NO: 179868 - DNA, 311 bp, Glycine max
  unsure (1)..(311): unsure at all n locations
tgataataataccatttcagagntgctatgtgtccactaatttatttatcttganatagagctcgaattacacaaaaatattacttcaatcagtacaacatccattaaccaaggccctaatttgtaggtgtataacaatgccaattatgtacagaagtcaagtaattaaattccctgtacgtaagggcattcatgagtgacatgaagctcgtctgagttgttattgtctttgaaaattattatatcttttgttcgcttgtttccattatttatgaatgctccatttttggctgcctaactggctaggcttt

SEQ ID NO: 179869 - DNA, 431 bp, Glycine max
agcttctaaactttgtacaagaatgaagctctgttctttttgttggacaagtggcctcagatatcttaagaagggggagttgaattaagatattacaaactacttccctaattaaaattctattttaatttcaatgcaagttccaagttcccttaaaaatgaactcttaaataatgattcaaattaaacaatctgaatataaaagtaaagcaataataaataaaagagtttaagggaagaaaaagtgcaaactcatatttatactggttcggctacacccttgtgcctacgtccagtccccaagcaacccgcttgagagtttcactatcttgtaaaatccctttacaagttctgaacacataaggacaatccttcctttgtttcagatttctttacaacaagaggccctcggtctctcaatcccttttgag

SEQ ID NO: 179870 - DNA, 392 bp, Glycine max
  unsure (1)..(392): unsure at all n locations
cggttcaccccttagcacttctctctctctcgaaatatatgaggaaaattagttccgtgaagaaaatccaagccgaggcgcttccgtaacgtttccgtgagtaattacgcgaagattctcgatggttcttcaagattcatcgttcgttcttcgttttcttcagtcttcaacgggtaagtacctcaaaccgagcttttcaattcattctatgtacccgtggtggtccacattttgtttcatgtattggtattcttgttttcatctgttttttatgcccccttttgacgtgcttaagccatttatttaagtcatttctcgcttaatctaaaaataaaataaatttccaccgatcgttngaattgtatcatccgttcatttttgttaaaatgaat

SEQ ID NO: 179871 - DNA, 461 bp, Glycine max
  unsure (1)..(461): unsure at all n locations
gtcacctgcggcatcaagctaaactcgctttgctcccttagtctttntggaattgttccggcctgctcttccctggagccctcttggtttcttgttccaaggctntggtggtagctatattcatatctctcagttcggcattctcctttcggattttaagagctgctgatttgaacctttctttgactgtttgagcttgcttgagttctgtcctaagggcctgcacctcttcgtcttcctccggtgcctcaacttcctcccttttgcggttctcaaactcgggagccaatccaaaccttgcacgtgggctttcaaccccttacgatagccaccgaagggcccattgttactgcccctgatccttcttttgcaacacnctcccatgccttgcggacctttgaagtgtctccatgttggtcttattgaagcctcgtgaaatgataggcgcgagctcatcctct

SEQ ID NO: 179872 - DNA, 469 bp, Glycine max
tccacaacatccaagcaaaacaacattcatacagcatatgctatcacagccaagcaaaagcagagcaaaggcagaaaactctgctcaaacaccaaccaaaatcacagcttttctcacttaaagaccacagtaacaattccttcgatccaattcgttaaccgttggatcgactccaaaattttactggaagtctatagtgcataagcctacattgtgaccgttgggatctactagcaaagatcaagaactcattctgtactactctttccacagccaaccacacacaagcattttctgcaccaagctaaaatcctgctgcacctattttgacagcaaaattctgcataagtgcagatttcgaaaatcacacttcccctcatccaatcttgctcaaatcaaatcctacaagtgccaaatcatgtatcaaacatgtctaaaccaaagccaagcttaaaccacagcaacacaa

SEQ ID NO: 179873 - DNA, 470 bp, Glycine max
  unsure (1)..(470): unsure at all n locations
agcttcaatgcaaggaaacatgcttattgttttgaatcaaaaanttggtttttaggaaagcatgaaaatagggacttgtttgtaagaatttgggctgccccatgattggcactttgcacctaagtaacgtgggagatgcttttcaatggtgtgtagatatatgtgtaaatatatatggcatagaaatgtgttgcaaagtgtgtgaatatatggcataaaaataccttgcaaggtgaatgaatagtaaataatgcatttcaaaatatgtatatttgtggataggtagcataagaagcctttcaaaaaaaatatacccatgccaaaatggcacaaaaatgcttcccaaatgaatatatgatgtggaattgcccctcaagtgtagatagatggcatgaaagttccttttcaaatgcaagtgtgtgcgtgacgtgagattggctctccaatgtgcatatatgtataaataaata

SEQ ID NO: 179874 - DNA, 322 bp, Glycine max
  unsure (1)..(322): unsure at all n locations
ntgatggtgtcgagaagaatcacatgtttgtcatcatcttaaatggggagaatgtgaatgtatgtatacaagattntgatgatgtcaaagaagaatctaacaaggctgcttcaaatgataaacatttgcatcaagaataattcaagaatgctgtcacaaacaaaacctttgtttcaagattcactaaagaccaagtcttgccttaaaacaaagtgcttttcagacatgcaaggctctggtaatcgattaccaggaagtgtaatcgattaccagagacagggttgagaaatacttgtggaaaatgttttgaattgaattttca

SEQ ID NO: 179875 - DNA, 462 bp, Glycine max
agcttcttgtcttcaatgatccccaataatttgtttgagattgccgaccagtcggaaacaaaattcttcattaaatccatctttgggagtacattacacatccattcaagatcagataccctcttcattatcctatcatacacaccctcaagctcaagggtagtgcccaaaagcaaggaagacaaatccatttcaaatgaatgaatgatgttataaaaacccattcttactactgattgtacttcatcatcagacatgatgatagtagtatctccatcttctcctagcatgtagtcaatttgctcttgagcagagattcgcagctcatctccaaatggaaaacatggtccctcaatagacacggcaaaacgaacagctgaaacaaatatatcttttgtagtactcacgcctcctgctctgatgttaggtatttttgacatggccaccgaactgtttcatacc

SEQ ID NO: 179876 - DNA, 340 bp, Glycine max
  unsure (1)..(340): unsure at all n locations
tattagagtatattcataggcatatcttttgtacaccttctatatccatcaaagntaaagattctatataccaaatctatgatcgatgagggaacattttgcggaaccaaattgaaataaactcaaacccagcttcagaaatcatcttctgattggctagacaatgtagattctgacacatttgacagaaaatacaaatcaaagttagggaatctgagtggcgtcctctctgatggtgacaaaagtggtgttgttgacacaacctcttctcccaccaaaatcctcttttctaccttttttttagttctatgccagcctgatctaccatgtcgacaaaact

SEQ ID NO: 179877 - DNA, 475 bp, Glycine max
  unsure (1)..(475): unsure at all n locations
gtcacctgcggcatgcaagctgaaccattggcatagngaattttgnttgtgataaccaatgtctaactataaatcatgataggtcgcaggttcaaagcccgctcatcaccttgggatgagataaatgtaaatatttctgtaagtacttttggagctcgaaggttttccctgccttggactagggtgccatctcctccccatcaattttattcattaaaaaaaaactatgaagcatgatagcagttaagctgataataggttgattctattaagttctagttgtattttctgaactgtgtttagtaatgaaaattatagtttattcccgtcattcatcactagtgatacttctctctcgtttctctttagttattatggactaccttaggctaaccatcttaagacacctagaaacacaagcactacacaagtggcatgatatatgtaaaagattggttctaacaaatcaagacat

SEQ ID NO: 179878 - DNA, 461 bp, Glycine max
  unsure (1)..(461): unsure at all n locations
tatacaaattgaactattactgtgcttatccaatatgattatatntatatacttgctagatgcatagtctattaaaaagtaatattacacgaagttttggattattgaatttagtctcgtagcagtttattatttattataaattgaaaatcctttttgaacactttgtttaatcgggttgtactagttattgaactaaccattacttgacctattaatgttagtatacatctcatatcatctcactgataatatttctctctgcaccataatttcaacatggaatcaaagaagtatatcagtcaacgcatgatgcctcattttgctgtgtattctctccagcagtgtgtggaatagcttttacattcagtggtttatgaggccaatactaaagtaagaaaagtgtcggttggaaatcagaattaatattctgattctattaataattacacgttataggg

SEQ ID NO: 179879 - DNA, 269 bp, Glycine max
  unsure (1)..(269): unsure at all n locations
tgaaaacttgatgaaactgagtagagagctccatgtgatttgtttaagacgntgacaagtcacaacttgaagtgaattctctgttggattgtctcctcttgcggcacgcactcatcatgtccttgaatcttggtttattgaggaagaatttggccttcctatgacaaaaggtacagcaagtagtgaagggttgcaccataattaagggagatcgagagtaagaactttgttgagcatgtgtgagctttaatctatgacatctcctttac

SEQ ID NO: 179880 - DNA, 448 bp, Glycine max
  unsure (1)..(448): unsure at all n locations
agctttcactatcaatattggaatattngtgatccagtttaattagattagaatcatcaaacttttgtcaacatatcttactttaagtgagaagggtttaaaacttttaaatctggtttgattctaaaatttgtgtatacaggaaaaaaaaaactatcaaaagcagattctattttgcttagttaataatacccgtgaaaaacaaattaagaatattgcatcaaaactttgaataatattttgttttatttgccaattagccagcgcttatatatatatatatatatgtctttattcttcgcccactttttctttgggcttagtccctgtatttcaataaaattaaaaatattntttaaaaaagtattcagcgctatacgtaggtcactatcacaaaagttcctctgaccaagataaaatattcatatcactcttccatgttaaccca

SEQ ID NO: 179881 - DNA, 471 bp, Glycine max
  unsure (1)..(471): unsure at all n locations
gcttgcatagtataacctttcagttntaattcagagtctccataaatgaagaatttgtctttagttcttcttaagtacttaagtatggtcttaaccactttccaatgttcctcaccagggtttgcttgatatcgactaattacacctagtgcataaacgacatcaggacgtgtacaagtcatggtgtacatgatagctcccactgcactagcatatggtactctagtcatgcgttctctttcttcaggagttgttggacaattctccctactaagagtaattccaacacctacaggcaaatagcctcgtttggaattatccaaggagaattgttctgatagccaaatctttgtgccttgcaaagatggtatgtcatttccaattagtaatatgtcatctatatataacactaagaaaataattgcactcccactgacctttttgtaaacacatggctctttctcacattta

SEQ ID NO: 179882 - DNA, 468 bp, Glycine max
gcttgcaagtctccacccatcatcatgtttgaattgaacagaaactacccacaaacatgcactaaatttcctataaactcaaaacatgtttaattgaatttattttaagctctgtcatatgtgtttcattacaattatgaggcatctcactgctgaatttggttcagcttggtccttctgtccttgttgccaatggcctgcataatggtagtttagtgcagtgtcgattctcttctagggtcaatctctagtaggactctaaggtttttattttttatttatgacataaaggttgattggattaagatatttgaaaactggaacttcaaaagagtcaaattacttttcatgccttattctggaataggacagtttccttttccctgaatttttatataacctacaaaataaatctagatggatttggcttcatttagtcatatggtttggactctaatcttagttaat

SEQ ID NO: 179883 - DNA, 474 bp, Glycine max
  unsure (1)..(474): unsure at all n locations
tgtcanagggttattcttctcttctttaatagtacactataatactatatatttgaaatttcccttgaatattattcttcttcataattaatacactacttttgagtttcttggcgacaaatagtcatggtatggacatggggtgaatctatctagcaaccaaatgataacattgcagtagcaattgatgttaacccactatgtttgaattgttggagtaaaagtaggataagttatcagaaagtcatgcaataggcagtgaaactagaatttttgatgctttcagtttggtatttgtacatgcgtactagtataatactgtttttgatttgactgttgtttattaatcttacttntgatttgttttaacttgctttcctgtagacagtgttgaccacccacgactttaacatgtaccatctgtacaactagaatctcattntgataaagttcctcagtataagtgcttatatt

SEQ ID NO: 179884 - DNA, 438 bp, Glycine max
  unsure (1)..(438): unsure at all n locations
gacactatgaaactcagctgactgtanataagctaacaatgctttaggaaggtcattgtcactttcattggtctaaattaaatcaaacttatttgatgtttactcttatattttcaatcatgtactgctgactaatgttnttttgtctgcactctgcagatttctgttgacctcactgtctagtgtggacgtacctgtcttatgctctcctgtgctatntcaaaattctgctctgtcttctcttgacgtatgtccttggcttcattttctttccatttaatttctcatgttctttgattctgtaatttgtcaatttaagttgattattgaaccttttattctttttttggagaatcntgcctttatgaaaactcgaactaaatggttaatctagctatgtgttaatgaaagctactcctatatgtgatttccatgttg

SEQ ID NO: 179885 - DNA, 465 bp, Glycine max
  unsure (1)..(465): unsure at all n locations
agctttatgagaaaagatgtgactcttcacttttgattttgaattncaacgntcaaaggcactggtaatcgattaccaaaacattgtaatcgattacaactttttgaaattaattggaacgttgtaaattcaatttaaaaactttttcaaaacaattttgctactggtaatcgattaccagagagtaaaaactctttggtaaacatgttttgagaaaaatcactggtaaacatgttttgagaaaatatcatgtgctacttaattttggagaaaaacttttcatacttatcttgattaagccttctcttgattcttgaatcttgaatcttgatcttgattcttgaagcttgatccgcgaatcttgattcctggaattcaaattcctcttgaatcttaaagtgttcttcaactcttcctcttgagtcttgaattgttctcgattccatcttgaacattttgaactca

SEQ ID NO: 179886 - DNA, 391 bp, Glycine max
caagaatccttagccaggtaatatattctttttgaagagagtttctctctcctgaggagtatgctaaatgtaatattattgggaaactgatcaaacattattctttctgtccttcttccctgagtaaaaataataattattattgttactactatgccggatgaatttatatctaattatgtgagacgaatgaccaaatccacataattctttgattaggctagaagagaaaattactaacttataatcatagaatcaagttctgcgtcaacaagccctgtccatggcacctaataagttcctctcaggacgctctagatcaatcattcgggtactccttagcttggaatgaatcttataaacatattcataatatgaatacacagatggt

SEQ ID NO: 179887 - DNA, 485 bp, Glycine max
  unsure (1)..(485): unsure at all n locations
gtcacctgcggcatgcaagctggggggttacacaatcaatgctatccnttcaatattactgnagggcgctattctaggaacgttaattattactccagctcttctgtaatcctactcctttattttaacacgaatattatatatcattattttgaactcgaactatatcaactcgtcaaaaaaatgtttcttattattaaacttatgtctgaacaaatctgcatggatgcagggaaagaaaagaaacatagagagagtgctaattaattaatttgtatgttattgtgtaaaagaaaagaaaaaccttcctgtaagtaactattagctagctaagatacacgataataaaacaacaaanagaaaacacattaccagagactagcaacctgcgtctcactttacaagtgcaagtgaaagtgcagtgctaccatgaaccatcgatgtatttgcaggtttctcttgaaacacacacaacgagagacccg

SEQ ID NO: 179888 - DNA, 299 bp, Glycine max
tgatgataccaaaggacaatgatgaaatatcgttgaaatttgttgtggggttgaatggttttccttattcgattaaagcatcactatgttgtgaatataaacccgggctattatctgatataaaacaagcactagatgcccttcatcttatgataacaagggcagatattgcaacattggaaggcaggatgaagaatgtctttgtgataattagtagtaaagaacaaaactttgaagatgctgcataccgtcaggttctcgctggttctgttcaccaagctctcaaggcagtgctcaat

SEQ ID NO: 179889 - DNA, 492 bp, Glycine max
  unsure (1)..(492): unsure at all n locations
accttgagncacctgcggcatgcaagctatatnttctatgattgttaagtcttttatttagaagcttnggaatcgactactattaactaatttttccattgtttttatttcatgttgcagatctcagatttttagagtagatggtgtcttgatgccagcctattttggttttttgaagcttccaagattatggattctagtttaacagtcagattatagaggaagcattctgaaggcccgcaggtgatcctactgatgcagcatgggatttttccttcccatttgtttgaactgcaatgctaatggtggccttgttgcatttcttgacacgaattcttgtataatatttgttagaatttgatgatagttaggtagctagatttccgtagcatgtgtacattgctaactgctgctgcgcatttgagtncattgacaacatgtnnttttgatattgtgctagcagattcaaaatcttagtaccatacgaagata

SEQ ID NO: 179890 - DNA, 447 bp, Glycine max
  unsure (1)..(447): unsure at all n locations
ctatagatactcagcctgatctttagttnttatcnttaatctttaatccctgatctatctatncaagtgtgtaattcgaactttaattatcttttaattcgttcctaaagatagatcgccaaatctgttgctaactgcacattaatctgttaaagatataacagatttatgtgtccagtattttcgggcaagatgtcctggacatcgtatccgacatcgtggatcctgcagcttcaattcttcatttgacattttatcttgccttgtgcattgtgcagcccaatctgattccttgacataacgttggacatcatgtgcagcaactccagctntccttcattgtctaagtgcttatgttttaacanaattttagccaatcttttatagctcagtaaagctaagcactaacaattctcccctttggcanattttgtctaaaacatactt

SEQ ID NO: 179891 - DNA, 492 bp, Glycine max
  unsure (1)..(492): unsure at all n locations
atcttaagtcacctgcggcatgcagctttcttactaagtgtcctgatgtttgttatgtcttttctgatggaagtgcgcctagatgtatggaataatttctccaacaacaccctcttaaggtcattccacctaaaaatggacctgtgagcaaggtagtatagccaatcttttgccactccctccatagaatgaggaaaagtctttagaaagatatgatcttcttggacatcagggggcttcatggcggaacaaacaatatggaacctgtcgcaacctaccctttggcgggagggcgacacgtgactcgcgggatgcgtgttccactaaaggaatacccgcggagtctccaccaacgtttatttgaggaaaacgtccgataaaccggcaaagacgccatctacgaacttttaatcaanaggttccggagttgtatctacgcatggggaaggtattagcactccacacacccctgccaagggaccgcagctctta

SEQ ID NO: 179892 - DNA, 453 bp, Glycine max
tcaacctttggtgctcatttctgcctcttatcgtgaaatgagagcattttcggggtcgtgaagtgcgtggctacgagtgggacttcgaaaattcaggtttgggtggacttctttctcctttgattatcgtgggtatggggttttgggagatatgatgggtagtcttgctagggttctgctgtgtgatgattatttgtgaagactttcgttgaaagcttgttgaaattgccatgttggatgagttaaacatacccattatgttttagggtttttgtgatgatgtttgtgatgtttatatgctgaaattgctgatggaaaactattagagatgaagggtagaactaacctacggttagaaagtgagaatgtgatgttatgagtggaacaagagtgaggctttgagaagtggaagggtatgtctgaattcttgtggtaatggagggtaaagtgagt

SEQ ID NO: 179893 - DNA, 439 bp, Glycine max
gatcttaagtcacctgagctgcagcttatattaaaaaagaaattcttatattaatattccttaaacaaaattggcaaccattcataacaaatgaaatctttagtctatgtttattcaacaccaagaaagtaaaaatatacaaggaaaccagggataagagcatgaaaaggaggacacaataattttaatatggcaaagataaagcaaaagaacaaattatgaaactgaatttctctcagggtaaaggttatggcttcaaaagtagaatccttttgtagcatgtggctggaaatttagttattgactatgaaataagataaaatcaatcatctggattcaatgattttaccaacagaattattaactatacctccatgtccttctgttgaaacacatttccttttagcatgaactcgtgatccaataaatcactctttgg

SEQ ID NO: 179894 - DNA, 422 bp, Glycine max
  unsure (1)..(422): unsure at all n locations
ntntggagtagaaacatgggaccaactcattttatttcttaaaaagaaatcatatctagtcaagtctgagagaccatacaagtttcctaacgatttctaattatgtgggccattaagtctatcatatgctgacaatagccgagaagcccatgaatctcttcgggggcagagtaggtgtctgccatcgccttggccttggctaacaatcggggaagttcttgactcccgttcaaggtaagagcaaaccgatccatccacatggttgcctcttggtgtaaagagtcgatcacccttcctctagcctctttttccgcatatacttgggcatactcatccgcgattctatgctcgtgggccgtggctagacccaactcttcttgtacttggcgatgatagctaacatgttggtntctgtctcgtat

SEQ ID NO: 179895 - DNA, 462 bp, Glycine max
agcttcctcggggccatttcttgttgtttatgaacaaaagcgcaaaacggaatcaaaaaatgcgaaaaatgatgaccctagggctgcaaactcgtaaatcccgtgggtatggcttttgaaaggggggaaaagaagtttttgaatgcaaaaacgtcccccctttcgtcacttttatattttggtgcaggggtgactcgcccaggcgagctaacctgcattttttttttttgagaggaacattaaccatgtcccctccttccttatgggttagcgttttgcctaacttgaacttacttaagttagaattaggcgttgattacttatttttaaaacaaacaaatagtaaaagaaaactgcgaatacaaaggatacggggctgccttgcagcgacgttctctgcttgtctagcgcagagaaagggcaacgatcagtcgggcgtgaccccatccccacttgcatccg

SEQ ID NO: 179896 - DNA, 397 bp, Glycine max
  unsure (1)..(397): unsure at all n locations
ttgaactggttatttatcaagggagtggtagggtggntttgcttacttcactgcttaaagatactttactttcattaaggcagggggaaacacctctattggacattatagcgtacgccgggtacacttttcctggcttgtgtttggctggttctggaagaataatatggagttactcctactactttctgatgctgtggacctgcttatgtatggcagtgtacttggttaaaacaatgaagagagtcctttttgcagaagttaggagttatgattcaagcaaacaccactatctcttgctcctcattgctgtggctcagttcccattgttcacatggcttggaaacattactgtcaattggctaatatagagtgatagcatttacactgtacttgg

SEQ ID NO: 179897 - DNA, 463 bp, Glycine max
agcttcaacatcagaccacttccagtgtgctggttttacttcacatggacttgatggggcctatgcaagttgaaagccttggaggaaagaggtatgcctatgttgttgtggatgatttctccagatttacctgggtcaactttaacagagagaaatcagacacctttgaagtattcaaggagttgagtctaagacttcaaagagaaaaagactgtgtcatcaagagaatcaggagtgaccatggcagagagtttgaaaacagcaaatttactgaattctgcacatccgaaggcatcactcatgagttctctgcagccattacaccacagcaaaatggaatagttgaaaggaaaaacaggactttgcaagaagctgctagggtcatgctccatgccaaagaactttcctataatctctgggctgaagccatgaacacagcatgctacatccacaacagagtcgc

SEQ ID NO: 179898 - DNA, 378 bp, Glycine max
  unsure (1)..(378): unsure at all n locations
tctcccctatgttcctataaatatgtggagaagtgtatgtaaaaatgctcagccctcctagtaattagagatcacttgatattagcgaaaaaaactgctttcgtaaagaaaatacaaagccgggcgctctcgtaatgtttccgtaacatttccgtgggtgatttcgcaaagattntggaccgttcttcgacgttcttcgttcgtttttcgtcgctcttcggtcttcaaccgcgaagttcccgagatcgaactcttcaattcattctatgtacccttagtggtcctcatttgattctgggacttttattttcatattattttctattcgtaccctctttagacgcgcttctgacaattacttaacttattctctcctct

SEQ ID NO: 179899 - DNA, 345 bp, Glycine max
atttataaatctataatgtatgttgacccttgggagctttttgaccaaaataatattaaaaaaaactattgttttaaatgatattaataaaacaagtatttacagaagtagaggtgttttttacatgctggaaatttgtcttaataagaagcgtcaacttattttgtgcctcatcaatatatatataacaaccgtctagctctcgatttgcttaccacgtgttcgcataagttttttcataaagtgttattggtttggacttttctctattgcacggattcacactctattattttgatgtgttttctctccaatagcctttcagaacacatgaattactctagt

SEQ ID NO: 179900 - DNA, 362 bp, Glycine max
aactcagactggattttataaagatactaagtccaaatatatatatatatataggctcattttttagtataattttagatatggaatcatattgataatattaattatttattaatcgtaattctatctacagatttgctatctgtcatatgcatgctttttcttttcttcattttatagaacggaagatatctattaaatattaagttaataaactaaaaaaatatacttctaaacagatttggaaaaaaaatctaaagtgtcgcataagttagataaaaggaacttcaactttatattctcgaatacgtcaggtgccaaggctagatctcactcttttaataacagaatcaagattgagt

SEQ ID NO: 179901 - DNA, 444 bp, Glycine max
cactcaagctgacttaaaaaacatggtagtatcaattgaattataataaccggatttatatctgaaagcaatgttaaaataattaaaatctattattatagtaaaattggtatttagatgtatattttataaagacgttattaatgaaatgtaacttgacaagaaatgatactaacatttaaatttaaaagttgaaaaaattaacataacttgtataataagatattattttcaaagaagaaaaaaaacagagaacttctgattctgagttgattaaattagttttcattttattttacttggtatacaaatatatatatatatatacatacaaaaaaaaaatatatatatatatatatatatatatatataatgcactatttataagatgaatgagataatatacaaatgtctgcggtgtaaagtagttttatagaacttttt

SEQ ID NO: 179902 - DNA, 478 bp, Glycine max
acctgaggcatgcaagcttgaatagggtttgagcaaaatatttatcttttttttgatctcccacccgcctttgaaggcaccctcaagggaccttatttatcttcatttacaaaatgcgaatatgatttacaacccaaatgtttattttacttttgaattttttttccaaaacctgtggtttgtaagcctgcaaaggtgtgcccttgatatctgccttaaaaaacaatggaagtcatttatggttaggcaggtacttggaggaaaataacatcttcttaagacccaatgagtgtgggttgttattgatattcagtacttggtttaatattcacaaaattgataaggtcctttcgtgtttttcttaaaagagtctgggatcatcatattttatattttccttaaatgaagtaacttacagcgtccacttgagaagtgtcttctatccatctaaatagatcttttcctctctttccttatt

SEQ ID NO: 179903 - DNA, 290 bp, Glycine max
  unsure (1)..(290): unsure at all n locations
ctcaagcttgagatgaggaagtgttgaanggggaaacttnctgcttttattgttgaccatcatagtggtacctcgcgagatatgtggcggcggtcatgagaccttgtgaacgtcaggtggtgcatctccatggtggaaaatcaccatgtaaagacctccttgaagcgtcaagattcagccttcatagaacctctatcgacatgccttactcatactcgcggtatggcagcctatgtgaagctacatccttcgggaaatatatcaccaatggctattgcctacacgacatg

SEQ ID NO: 179904 - DNA, 450 bp, Glycine max
  unsure (1)..(450): unsure at all n locations
agcttctagtatgtatataccttcttancttttgttcattgnctctaaacagatggattttttcacttgagctcacctttgaagattgtgatcgttgaagaatttaatgcttgcatcaaatgcaagtactccttcatgctagaaaacaaccccatgagctttaatgttgatcatttcagcagaaaaccacttgctttgagtgaaattgggtttgtcagaagcagtgcacatcttttaatggtgtttggcaattttcatatcttgaacttttttgttctctcttttggctctatttctcaacttttttagcttatgtgctcaattgttcacacttaactaatacccacgagctttgcgaacaaaataagatcaaaacaagataaaataggacaaaaattatggctcaaagatagtcaaataacagtttatgaactaccccacacttgatca

SEQ ID NO: 179905 - DNA, 453 bp, Glycine max
ctcacttctaaattaacctacgagtttttttatatcagaacgtcggttaagtggttttgatatttttccgcaagatcgattgtaaccgaacaaaagtcgtttaaggtgttgggcctttaaacgatctttttgatttttgaaaggaggggagcactgttaaggcgctggacctttaacgatatcttgtttttgagaggagagaaatgttaaggcgttggatctttaacgatctcatggggtcgacaaaagcggggcttttgctcctacatatcctcaattgtgatgaggaaattagacctacgaagttcttcgaaaagtggtaaagtttatacggcgtgttgattttatacttttgaaaggtccattttaactgataaaagcaaagacgaccgtttaaggcattggaccttaaaacgatttcaagtgaccctctttgcggacaaagcttgattc

SEQ ID NO: 179906 - DNA, 449 bp, Glycine max
  unsure (1)..(449): unsure at all n locations
tcanagttctaacaacacgatgcaatgatgcaaatntcatgattcatatgccttataactagtcaaacacgatttggaatactactatttatcaactgtactgtacacttaaatttctataaatagcacacacattgtttccctatctgcacagacaaactaaatctaacatagttttactcggaggaacaagagaatttcaaagagtgagagatggagaacttccctgtgatcaacttggagaatatcaatggtgaggagagaaagactatgttggaccaaattcaacatgcttgtcagaattggggattttttgaggtaacccacaaccacaaacttctttacaaaacctttgtcatactcactcaagtttatttatatctatacatttgcacctaaaaatttcttaatcttgttcattttaattatgttaactatgttggtttcct

SEQ ID NO: 179907 - DNA, 461 bp, Glycine max
agctttttggcaaaggaagccaagaagatgtttgatttaaggaattcttagaagttctaaaaaattgttaaagagttgtaaaagttctattgaatgcaagtcaaggtcttacataaactcttcatgtcgggtcaagaaaagcattggaagagttataaccttgagaaaatcaagtcaagagttacaacttttgactttttattcaaaagttatcactggtaatcgattaccataatcatgtaatcgattacacaatgcattttatgaaaagttgtgactcttcacaatcagatttgaattccaacgttcagatacactggtatggtaatcgattacattatttgaaaaatattttggaacgttgcaaatcagttaaaaacactttgaaatcaaatatggtcacaggtaatcgattacatgaaactggtaatcgattaccagagagtaaatactctggtaac

SEQ ID NO: 179908 - DNA, 465 bp, Glycine max
  unsure (1)..(465): unsure at all n locations
ggaagaaaatttggcttttacatgcctaactcccttgagtgggcattgtattgggtgttatcttggntggtgcatcttagtacatttgatatctgtattgcaccatgcatcatcatggttagtgagaagagaagtttctaagtttagaaaaatttatttagaggaaaaaactctcttgtttaatcgatttcagagttgtagtaatcgattacaacaagttgtctaaagcttaaagagttaagtctcatataggtttaatcgattacagtagtctcataatcgattacactggtgtttgagacaatgactgatttgtttatgagtatatgctttaatcgattaccaagtggattaatccattacttctatcttgtttagttgttaagaagtgaacaagaacactttaatcgattacttaaagcatctaatcgattacattggtattaagttatttccatatgttgg

SEQ ID NO: 179909 - DNA, 474 bp, Glycine max
  unsure (1)..(474): unsure at all n locations
atctctgagtcacctgcggcatgcaagcttaacaaaaggcatgcaaagnggggggaatttctttatcaattcccttatgttatcaaacataaaaagggaaaaggtaatattgtagccgatgctctttctcagcgtcatgcattactttctatgcttgaaacaaaattgattggtcttgaatgtttgaaaagcatgtatgaaaatgatgaaacttttggagaaatttttaaaaattgtgaaaatttttcagaaaatggtttctttagacatgaaggctttcttttcaaagaaaacaaattgtgtgtgcctaaatgttctactagaaatttgcttgtttgtgaagcacatgaaggaggtttaatggggctatttggggtccaaaagactctataaacattacaagaacatttttattggcctcatatganaaaggatgtgcaaaaattttgtcaacattgcattgtatgtaaaaag

SEQ ID NO: 179910 - DNA, 448 bp, Glycine max
  unsure (1)..(448): unsure at all n locations
ttacagcagatgctgctctatgctatatttctganagattgctaactnggaagaacaagtacatccatagtgacaccatagttgtggagggaagctgcagtgccgtaattcaacgcatcctttcgccaaaacataaggacccaggcagcgtcactataccttgttctataggtgaagtttttgttggcaaggctcttattgatttgggagccaatattaatttgatgccactttccatgtgccaaaggcttggagagttggagataatgtcgactaggatgactttacagttagcagatcgctccattaccagaccctatggagtaatagaggatgttttggttcgggtcaaacaccttatctttcctgctgacttggtggtaatggacatagaggaagatatagatattcccttaattttgggatgtccatttatggctactgcaag

SEQ ID NO: 179911 - DNA, 452 bp, Glycine max
  unsure (1)..(452): unsure at all n locations
agcttaaggataagcgcacacgccccttcttattttgatttcaggcttaaataggtggtcttgttggcgctctcgcgcttagaacgactctggctcgcttagcgcacataagtgaatatttgcttacggcgggtcttctcgcttagcacatggatgcaagcggtgcgcttatcgggatgagctctcgcttagcgcgcatgtacagatcatccttcttccagattcttcctcgtgcttatccgccagagcggtgtgctcaaccgcaagagtggtgcgcttagcggatggctcgctaagccggcggatcggcttatcgagaagctaaaaatcagcacttcacaaacttgcctaattaaactgatattgaaaggaaatgattattaaatacacanaatgggagtactaagtacatattacctatatttaacaaaaagctattacaacactacaaa

SEQ ID NO: 179912 - DNA, 398 bp, Glycine max
tcttatccaaggctcatcttggtggtgaagctccttcttccatggcttcttccctagtgaatggcgcctcctctcacctcttctcctttgtcttccgctgcatctccatggtggaaaatcaccattaaaggacctcattgaagctcaaagatccagcctccatagaagccctacaagcaagcttccatcatgaggggtatcggggcttttgtgaagctacatccttggtgaaatatatcaccaatggtttaggccttccaaaacttctctcatccgcggactgcatacatatatgctgctcttgcctcccctcatcgtcgacttccattcggccttgatctatcattcgttgcaacaattccttcactgctaaacatgattccatgttatgtagctca

SEQ ID NO: 179913 - DNA, 399 bp, Glycine max
agcttagcttgtccccaagccttatgttactcgtccaaaatcgtgaagtaaacctcggatccctgtctgacacaatactagaaggaattccatgcaaccttactacttccttgatgtacaactacactagcttctccattctatacttcatattcaccagaataaaatgagcagatttggtgagtcgatctactatgacccacacaacatcatgtccacgactagtcttgggtaaactagatacaaaatccatagatatgctctcccatttccattgtgggatttccaatggcttcaattctcccgatggtcgcaggtgctcaaccttagccttttgacatgtcaaacatcttgctacatattcagctacatctttcttcatgacatgccaccaaaaac

SEQ ID NO: 179914 - DNA, 453 bp, Glycine max
  unsure (1)..(453): unsure at all n locations
ccttaaaactcaccttttatggaagtaggagaatgaaattgctatcgatccctttacttatcaacaagttnttgagtgggttgaggacatcaatactatatttggaaagacccaaaagaagctgacaagtaaaacttgcatatggaagaaaaggtcgatattctttgatctttcatactagttcgatctagatgttagacattgcattgatgttatgcatgtagagaaaaatgtgtgtgatagtgtaattgacacgcttctgaacattaaaggcaagccaaatgatggtgaatacttgtcaagatctagctgagatgggtatacgtgactaattacatacaaagtctgatgtaagaaaatatatttgcctatcgcatgtcatactttggcaagaaatgagaagacaagattttgttagtgtctatggcatgtgaaagtgccacatggatactc

SEQ ID NO: 179915 - DNA, 467 bp, Glycine max
  unsure (1)..(467): unsure at all n locations
acctgcggcatcaagctttacctaaaggaatgggttgnttttatatagagtnngatgagttcaaggaggaactctagagacgccattgggatgagaagctggctgatttttctgacagcagcatagacatcgccattgtaaaggagttttatgagaacctctatgaccccgatgataaatcacctaagcaggtgagggtgagaggtcatttaatgaagtttgatgaggataccttcatcacattttttaagacccctatagtgctggaagagggggaaaacttgtgtacatattctagatttgcactcctgaggcctgatcctcaagagttggctactaagctttgtatcccagggaggggatttgagcttattgctgatgggcagcctttgaagattctgaggaagaacatgactactctagcttagacatggagcgttctttctttttccaactttattcccacc

SEQ ID NO: 179916 - DNA, 317 bp, Glycine max
tcctttctttgtttgaagctcagtacaagccttaagtgaaaaaccatgatatcaccttacccttaaggaattttggagctttggaaattgttttgggaataagctggaaaaaatggtaggggggtttgttcaatggagagaatagactcttgggcacgccttatggtttaatttgggccagcctggaggataatatattggccagattcttcttttaatcttcaatttcggacggtgcattaaaaaaatggagattgaaaaaatctaagaaaaaatacccggggtggcaatttttgcatttcgcctattaaaaaaaa

SEQ ID NO: 179917 - DNA, 322 bp, Glycine max
ctatgaaactcaagcgtctcgatatattatgcgcctgaatcggactgtcgtgtgatatgttatgaccatttgaatttctcgagagggttcggagttcaatttacagcgtctcgatatgtgacgcgctagaaatggacttccgtgtgacaagttatgaccattttgaattctcgagagcattcgttgttcaatttggagggtcttgatatattatgcgcccgaatcagacctctgtgtgataagatatgaccatttgaatttctcgagagcattcgttgttcaatattgagcgtcttgatatattatgcaccagaatcggact

SEQ ID NO: 179918 - DNA, 454 bp, Glycine max
agcttgaaattgaacaagggaagctctctttattctcaaatgatcataacttatcacacagaggttcgattcaggcgcataatatttcgagacgctcgaaattgaacaacgaatgctctcgagaaattcaaatgttcataacttgtcacacggaggtccaattcaggcgcataatatatcgagacgctcgaaattgaacaacgaatgctctcgagaaattcaaatggtcataacttgtcacacggatgtccgattctggcgcataatatatgaagacgctcgaaattgaacaacgattgctctcgagaaatttaaatggtcataacttgtcacacagatgtccgattcaggcgcataatatatcgagacgctcgaaattgaacaacgaatgctctcgagaaattcaaatggccataacttgtcacacggatgtctgattcacgcgcataatata

SEQ ID NO: 179919 - DNA, 458 bp, Glycine max
  unsure (1)..(458): unsure at all n locations
tctttgattcaatggagcatcttccagttcatttaccttatgaggcaagacttggtggtccagtccaatatcattggatgtatccttttcgagaggtataaaatgagtaatcatttatacaccattatattatatacatatagtcatttttttaaaatgctttttcatattaactttaggtttttacactccctcaaaaataaagtcaagaataaagctagagttgagggattgatttgtgaagcgtacttagtggaggagacatctacatttgccttgttttactatcctgatcaaattgcaacaagaaggactaagatgcctcgaaatgttgatgcggatgaaggttcttcatcttctcctcctatatcaattttcaattacctangaagagcgagtggtanatccaaaacatatnttttgganncaagtgatagtcatgtntctcacttgtacat

SEQ ID NO: 179920 - DNA, 462 bp, Glycine max
  unsure (1)..(462): unsure at all n locations
agcttgaaaggtaaccagataaagatgaattcanagttatttagctcttttaagaaaaaaagttacgcttattttatgtttttcttggttttttcttttttaataaaaccaacataatacagatgaaagacacgttggtgcaaaacaagttaacaagattagtagcttgaccattgattttgaagttagttgtgtcttgtaaactctgtattccttaatcagtaagcttgaccattgattttgatggtagttgtgtcatgtgcactctgtgttccttaaatcaatagcttgaccattgattttgcttgataaattttgtttaaagtcttatatatgtatgattggttgaggtttgacaacctggatgtatgtggttcgtctggcacaggatcatatagattatattntgaaatctgaatctatgaggtttggcatccaagaatattgacacagaattgagat

SEQ ID NO: 179921 - DNA, 398 bp, Glycine max
  unsure (1)..(398): unsure at all n locations
ttcanaaacttcttttgtgacaatcgactaatgctctttttttggtttctagntcttttgggaagatgtataagacctttcttttgagtcatgctccatgntttttcactacatcctccttattttttttattcgtgctccatatcaattggtgcgagtacaatgaaaaataacttaagagttgtttcctaccaatgctcatctttagccactacaggttgcctcaaaagggggaattgttggtattataatggtaaagatgtcttaaagtatcaaagggtgcactcatagagatnttgatgccaaagacaatgttcgtcaaattaacgactaatttgaatgaaaggaacatacttgatgacaattattacatcggtatttataacagtttaacaatg

SEQ ID NO: 179922 - DNA, 459 bp, Glycine max
  unsure (1)..(459): unsure at all n locations
agcttgcacaactagtggaatatatttttttgtcttttgaaattcgtaaagaactcacccaacaagtatgtcttgcccaatgagtcgatcacactttgaagtgacaagacaaaagttttgggcccgatataaaatgacattttcttaggattgacataaacttaaggttgtgtgcgatgactaaagctcccatctacctccatctttcattttcctccattttccttcaatttctctcttgcattttgtaattttaaggtctctcgtgacaatgagaagttagttcatccattgttggggaatttgtacactaagtttacttttatgtagttaatctttatatttattcaatgtttattcccgtgctattgtttctttntattntgattgtttgttttatgggttgaatgactttaattctttgtttttattatcattagaatatgcttgacaactgag

SEQ ID NO: 179923 - DNA, 421 bp, Glycine max
  unsure (1)..(421): unsure at all n locations
actcaagcttcanaaactatagaagataatgctactgcggccgctttttatatatgtatggaatcggaaccggtgctacagcccgtaataaacttatgccgagacagaaacacgacgggtttcaaccggaggtataatcctcaagcctacccttatggtttgcctccagacttcactccccgtaccgctccagacgatttgaaccaagcccctacctttgaggggcagctccctcctcatgccgactatcctctgcaagaagatgatgaaggagatgcccatttaggccctttacttcccctcaaggaaccagccccccatgagttgccccaaccaaacatagtccgccacgtcccgtcttcatccaaacccgttaaggaacacgttccctttgctaaagacaagggaaagattgatctac

SEQ ID NO: 179924 - DNA, 442 bp, Glycine max
agcttgagctcattgttgttgccccacaattcttcacgaaatttgtctcggccatgctcttccttgcgagccctcttggtttcttgttcacaggctcttgcggtagctgcattttcttcccgtaactcggcacactcttttcggacgtctgtagcgactaacttgaatttttctttggcaagtcttgcctttcctagttatgtttttagagctcggacttcttcatcctcttctggagcttcgaagttctcctcgttgataattttcaacttggagagccaatctaaccctcgtgtatgaactttcagccattcatgataaccaccgatgatgccattacggatgcccctaagttctttatcttttcctaacgggctttcccacgccttgtggactctctgtacaatcttgaaactttgcgcgccgaaatctctcacaagga

SEQ ID NO: 179925 - DNA, 464 bp, Glycine max
  unsure (1)..(464): unsure at all n locations
gcttcttctatggtcttgggctctatttcagacacaagagatctcgatgcaatatctttgaagattatctgatcttaactcctttagtctgatctccaatgatttgatcttgtggatgatggtggacaaagttttagtccttcgtctgtggtttatgatctgacgattcttcaatccgaggaagggtttctttaggctgtttaatctctttttctttatgagatatagatgatcctatctacatatttgcaaaatcatcctcaagatttgataactntgtactagacatttgtccatcattgaatttaacatggatggattcttctacaattaaagttctagtattaaaaactctatatgctgtggatgtatcagaaaagccaagaaaaatccctttaccactttataaacaaacttatcacagtgatctttattgttaatgataaaacactttaattccaatg

SEQ ID NO: 179926 - DNA, 464 bp, Glycine max
  unsure (1)..(464): unsure at all n locations
gcttatctggcctcccattaacaagacatttattgataaatattgcatgtcgaggtaggtacaacagtcggggcaagaccaccagcagcaatcggctgcagacacaccaccactgtctccacatcagccaccatctctagagtccatctcagctcatatgcagaggatggagctccagatgcatgcatacatgtagtatttggctgactagcaggcaacaaaccataggggccaaatgcaattgaacgacagcttctatcaatatacacttcatcagcatcgtcaagaccctaacccttactcgtggcctactccctagcagtttagagccactgtcgcatggcctgnggataggcctacatttcaggaggaggcaggtcctacagatgctcaaggagctacccaaggggatgaaggtgaagctcatgatgatggagacgtgggagaattgctcgatttcttaa

SEQ ID NO: 179927 - DNA, 444 bp, Glycine max
  unsure (1)..(444): unsure at all n locations
gcttgtactccccaatctggcttcagtgaccaatctaacacttctcattggtgtaaactaatgcaccccccgataccaaggggttttaatatcaacttgtaattgctcatacaaaagtgcatgtgctttccaaaactcctcttgtccaaggtcatgcatcatttcttctatatgatcttcgatgtcttcatcaaccaggttagtatgagaagctattgtcatatctgccaattcaccataccaaattcattttgtgtaatttggaattatcccctcacatataagatgtgatcttatttcatttagagaatgtcgtctcctagtcccacatttgacatatggacgaaaatattntccatggataaccggtgcatatcattcaacanattgcaagaattgctcaactccattctcatactcatcacttatgtgacatgctttcat

SEQ ID NO: 179928 - DNA, 456 bp, Glycine max
  unsure (1)..(456): unsure at all n locations
ctgcagctgtgcaatanatactccacatttatttctacttgcattnnnctttacccactcctcacgttttggtgttttagggaaaaacaccataactaaacgcgccacaaggcatccctatcgcaccagatccaaatctagaacgatgggtgatcaagaggagacacaggaacagatgaaagccgacatgtcggctctgaaagaacaaatggcctccatgatggaggccatgttaggtatgaggcagctcatggagaagaacgcggccaccgctgccgctgtcagttcggctgccgaagcaaacccgactctcttggcaactgcgcaccatcctccctcaaacatagtaggatggggaagggacacactgtggcacgatggcagccctcacctgtgatacaaccgagcggcttacccttatggattgccgcccaactactcaccacccgtcttgca

SEQ ID NO: 179929 - DNA, 467 bp, Glycine max
  unsure (1)..(467): unsure at all n locations
agcttcgaagaattggtgcaagtntctggttcctcacattttagncatctgtgtcaacttaattgataggccattatgaatgcgaccatattctagggcaaataaattaaagacttggacagaaaaattcactttggatcaagtttcaaaacaaggacacggaagtcactgtgtgtgtatatggcgaactataatgatcataagggtatctaattatttggaatatacaattggcatatatagactttattttcactaacagccatggaaattgccaatggaacaggattctactggtttaacatcgcttggccccattacagtactgacgtggtgattaacattgaagccaatcaaacaacagtaaaatagtgttttggccattctccaatctaattattacctccctcaatcattcgacctcatatatattattctttatatcttccagagagcgagagagaatg

SEQ ID NO: 179930 - DNA, 440 bp, Glycine max
aaatcactcctacataatatctctagcatgcatgtattctttacccactcctcacgtggggatctttagggaaaaacaccataactaaactcgccacaatgcatccctatcgcaccacatccacatctaaaacgatgggtgatcaaaaggagacacatgaacagatgaaagccgacatgtcggctcagaaagaacagatggccttcatgatggaagccatgttaagtatgaagcatctcatacagaagaacgcggccaccgctggcgctgtcagttcggctgtcgaagcagacccgactctcttggcaactgcgcaccatcctcctttaaacataatatgacggggaagggacacactggggcacgatggcagccctcacctgcgatacaaccgaacgggttacccctttggattaccgcccaactactcaccacccgtc

SEQ ID NO: 179931 - DNA, 488 bp, Glycine max
  unsure (1)..(488): unsure at all n locations
ttaagtcacctgcggcatgaagctnggcaacagcctcgtcactatccacattctgatgctgacaaaagccttctgtaacatattcaacttgacttaaatcaggatcatattgagttacaatactaggcgaataatggtgggaaagtgtgtaatcatctaggagatgaagaccccagcaaacaacatcgggatccagttcatatattgccatgtgcctgcaaaacacatgtaactctaactactctagaaaccaacttgctttacgtgtattatgcccctaaagagtacaatttctgaaaatggacaaaaatattaatatgattaaatgatgctctttttatctaactaatgaaacacaattcatcatggaaatattgaaaactaaaagtataaatccatcatttatcaaattcaccctataaatatcttattagatcagaggcttcacatcaacccagttgtccacttactccataaaacactcaatc

SEQ ID NO: 179932 - DNA, 447 bp, Glycine max
tgcttaaaaagcttctatggaggctggatctttgagcttcttaaggtccttcaatgatgattttcaaccatggagttgcagcagaagataaaggggaagaggtgagaggaggcgccatccattacagaataagccatggaaggagaactttcaccaccaagagagtgtcttggataagaagcttatagaggaagtgaatcacaaagagagatgggcgtgggaattgaaggaaattagggagaaattgaattttgaagtgtgtctcacaagtttcactttcatcaaagttatgacaagtgttacacatgtttctatttatagcataacacatgggaagcttgcttgagaagcaaggaagggagcttccttgggaagctagaggaagaaagcttccttgatgaagtagaggggggatactcacacccctcaaatagctaagctcacccc

SEQ ID NO: 179933 - DNA, 456 bp, Glycine max
  unsure (1)..(456): unsure at all n locations
agcttancgagcaggcttgctaagctttattccacaaatatgcaaaaatagagacaaaattgcgcttagcctancagccatgcttaacgttgaacaaattttntgaagaatcctaagtgtctgaaacactagtctcgcttagcgcacaaatgcgcttagcgagctcatcattgaaatcaataaagaagatgaacgcgcttagtgcgacagggtcgggcttagcgcgatcatctggaaatctaaaactttgtcagttgcgatgaaccggctaagcgctgctggcgcgcttagcacgttcatcacaatttccagtagatatgaggggtcttcacccctcttacaggcattgcccctattcagctctaagacctaactaaaccctacattgtaccctataactgangacactaaagctaaatagaaatgcaaactagaaagcaataaatcatctaccct

SEQ ID NO: 179934 - DNA, 348 bp, Glycine max
  unsure (1)..(348): unsure at all n locations
acaatacgataatggcgtgtaccgcacgttgttngatttacaataaatacgctaagagtcatacttacggtgatttttaaggtccgtttgtttaaaattattataaaaagaaaacactattttgaaaaaaataaatagttttctgctcttttgatatgttgttctaactgttttttcttcttacaaaagtagttactagatttctgttctctgtttaaaaaggtattctttacaaatgcttcttaaacaaagtgtctttttaaaatcgcttttacacagtgcatagatattaaacccctcttagtatatgttgtttatgacatcaagttgcaactgaggactttttat

SEQ ID NO: 179935 - DNA, 339 bp, Glycine max
  unsure (1)..(339): unsure at all n locations
aattcacanggactttaaccccacccccacagccgacctttttacgagatctctacttaaccctttggttaaatgatcggccaaattatgctgagttctcacaaactccactgatatcacaccatgcatgattaactcccgaaccatgttgtgtctaacacccaagtgtctagacttcccattatacacttgactatatgccttagccaaagttgcctgactatcacacctgatagacatgggaggtataggtttgggccacaatggaatctcatagattagaattcttagccactcagtttctttaccagctgctgctaaagctactaattacaaatt

SEQ ID NO: 179936 - DNA, 256 bp, Glycine max
tttttgaccctttgactcatcttctgcctgatctcacagttgttcattgcatcaacgattatcacggccttatcggtgattcaatggatgacactgccatcaccacaggacttcagtccgaaaaaaaagtttttttttgaagagaaaaacaactgaggggtaaaactaccaaatattgtttggacacacacttttttacacacagacgattctatgtccggtattgtcaacccccctattattatattataggata

SEQ ID NO: 179937 - DNA, 368 bp, Glycine max
accacagagtggtacctggagatatgtcgcgggggtcaggagaccttggggacgccaggtggggtgctattgcccaaaaccaagcttggtcaatcccgacccaacccgggcatagtcggtcagtgagaacctgtgatgtacctaaacaggcgagcttctggcagtcaacagataaaaggaacaaagaccacaaagcacggaggcttgtggtggctggccagctgtgaattttgtgtgacatgtggtttgtggcctctggtaatcgattaccaagggtgggtaatcgattaccaggcttaaaaatgaagacaggaggctaagatggtctctggtaatcgattaccaaggggtgtaatccattaccacgc

SEQ ID NO: 179938 - DNA, 399 bp, Glycine max
  unsure (1)..(399): unsure at all n locations
tttttcctgctattgtggccacttttttttatctcagtggtttctcggaagagacttggaaaatcttggctttggttcaatggcaagtaataattcaagaaggagacttatccttcagaattaaatccccattttatgtacaatggttttgctaaaggtatgataaaaaaggactgcatcaacaaagtggacttagcacctccaacaagaattaggattccatacatacaaaaattaccaccatatgcatcttgagtatatgtggccatgcgaatttgaggtttaattntaaaatgttatatttctgtccacatattgtagatgtatatggtgataattgcattgcgcatctaggacataaggaaaaacatcatatnttcaatattgacatcaaattca

SEQ ID NO: 179939 - DNA, 462 bp, Glycine max
agcttctcaaggaagttgtctaaagattatttcttatggaagctacctagtctataaatagaagcatgtgtaacacttgttgtaactttgatgaatgagagtcttgtgagacacaactcaaagttcaacttctctccctttttcttccttcaatttcgtgctcccccctctctcttcctctccctctttcttttcctccattgaagcatcctctccaagcttcttatccaaggctcatcttggtggtgaagctccttcttccaaggcttattccctagtggatggcgcctcctctctcctcttctcctttgtcttccgcttcatctccatggtgaaaaatcaccatcaaaggacctccttgaagctcaaagatccagcctccatagaagccccacaagcaagcttccatcacaaattccgcaccaccatgattggagtaccgaccttaagtgttaatttgtg

SEQ ID NO: 179940 - DNA, 366 bp, Glycine max
tcaacattcaattttgagcgtctcgttatattacgggactcattctgacatccgagtaaaaatttattgtcgtttggattggctcagagattcaacattcaatttcgagcgtctcaatatattacgggactcattcagacatccgagtaaaaagttattgtcgtttgaattagctcaaagcttcaacaatcaatttcgagcgtctcgttatattacgggactcaatcagacatccgagtaaaaagttattgtcgtttgaattggctcagagcttcaacattcaatttcgagcgtctcgatatatgacaggactcaatcagacatccgagtaaaaagtattgtcgtttgaattgctcaaagttcaca

SEQ ID NO: 179941 - DNA, 463 bp, Glycine max
  unsure (1)..(463): unsure at all n locations
agctttgagccaattcaaacgacatanttttnttactcggatgtctganngagtcctggaatataacgagacgctcgaaattgaatattgaacctctgagcaaattcaaacgacaataacttttttctcggatgtttgattgagactcgtattatatcgagacgctcaaaattgaatgttgaagctctgagccaattcaaacgacaataactttttactcggatgtctgattgaggcccgtaatatatcgagacgctcgaaattgaatgtggaagctctgagcaaattcaaacgacaataactttttactcggatgtctgattgaatcctgtcatatatcgagacgctcgaaattgaatgttgaatctctgagccaatccaaacgaacaataacttttactcggatgtctgattgaggcccgtaatatatcgagacgctcacaattgaatgttgaagctctga

SEQ ID NO: 179942 - DNA, 463 bp, Glycine max
  unsure (1)..(463): unsure at all n locations
gacctatagaaactcaagctttgaccgccaaatgcacgttgatatataatgccatcctttgttcgggaaaatggnaatccgtaattctctagctcaatgactgcttttggtgcttccctacacatatattggatggcatcctggtctcctgtaggccatagagcttgaattaattaataaacaagagaaaaaaaaaactagcacaggcatctaaagaggacttagattatcagcaaaagccctaaagcttctttagaaagaaaagtaccaaatttcatttttcaatttcaggtaaacaaacccagggcatatcttctccattagaagtagacatattttaagaccctaaagccctaaagaggccttatatattgtaccaactaacaacaaactcttagaatatatcaaattttgggatatatgagatgtaaaattcaaaaattgggagtttatacctaccatc

SEQ ID NO: 179943 - DNA, 439 bp, Glycine max
  unsure (1)..(439): unsure at all n locations
agcttgttgggcctccatggactattatgtttgttttttccttanaagtaaattgaatagtgccacaatcaaagcatagccacatatgaaacgacgatagaatcccgtcaaaccgagaaaaccacaaagctcgatggtggatgtccaagatggccactccctcatggcactaatcttggcaaggtatggggccacgcctgaagctgacacaatgtgtctgaggtattgaagagtgttcctggcaaacaagcacttcaaactcgctgatggaattgttcccaggataaggtagcaaaatcaactccatcctcaaatgttggctgctctatccacggtgccattggctccgaaatcccctctgccctcgtccctaccttcaccttcatccagctagcctcatgaagctagatgttccacgttttgatgggtgggatccatt

SEQ ID NO: 179944 - DNA, 440 bp, Glycine max
  unsure (1)..(440): unsure at all n locations
taatatggtatcaagaaagaacacggaaacacaagaacattatcttccccaaattttatctttgttgtggtgatggcaaagttcaactccctcttttgaaagatccacctcctatgctccagcatcttctatttgataacaatgctaatgatagcagaaattatcaacaacatattaggatctataatatgatgtttgcatttacatcaccgggggctaagcttgacagatctattaacaatggtgcaggaccaccaaccataaggatacaaggtcaatcatgtcattgaataagggagttgctacctcttcttggtcatgcgcctaagtttgcacaactntacatttatgatacaaaanattaaatacataattggattcaatcaattgggtatatataaaccttctgataacagtagttaaaaatataatgtagttta

SEQ ID NO: 179945 - DNA, 442 bp, Glycine max
  unsure (1)..(442): unsure at all n locations
agcttccatcatatgtcatctaaatttttttatattccacgttnttaatctggagaaaatatcctgcccatttgttgcgaagtgttgtcatggcctctttgtctaacggtgttccatcacaaaaccactgcaaaattgtaactatgaaattagtgacgtacataaaacattgaattagactttgatacaaaagtagcaattagaacctgttatagtaagcataccctattccattcattcttcaaaccgctactcattatgcaccacatccaatgcatgacataatatccacactcatggactttgaacatgactctaaatgcaatatgaaatatatttactaaagctacaactatganagtaacacatggcagtaacttgagcacttttgatgaaataatgacatacctttggttcaatccaccgaggtacagcttgatct

SEQ ID NO: 179946 - DNA, 420 bp, Glycine max
  unsure (1)..(420): unsure at all n locations
tgcagatcaattntttgaagccagtgaaatctagattcctttacttgagattgcttcaccccaaagtccaaaaagttcattgcttcatccaaatgaagaaagaaaaaaataaaataaaataggggtgattccggatgggaagaaagaaaggtgtagcactcactattgacaagtaaaatttagagggcagaagatgctttgctttatgcttttatgtgagtgaaagagagagaaagaagaatcaagttgtgtgaacaatataaccccacgcacaaggaatttgataataatattaaaaagagcatatgtttttttgggtttgttggctgatcagggttacttaacagaggaagagaaatatgacagacaaaaacaatatacgcttntgttttcaatattcacataactattaatttctac

SEQ ID NO: 179947 - DNA, 479 bp, Glycine max
  unsure (1)..(479): unsure at all n locations
atccttaagtcacctgcngcatgcaagctngaattggtttgtaacttacaatctatattattttctcanaacatctatctgtagtgtacactcaaagacaacaataggaacaaaatattcataatatgacatgcttaaacattttagtttgattaccttaatagctattggctgacttccaggattttcttgtggctgactacctgaattcattatcagatgcaaaaatttcagaatgacctcaaaaatggattggatatcatgatgaaacataagatgagtatatatgtttctagggattattttagtaagaatcatatagtatatatgttttaaaggatatccattagttttggctttggattctgtgtagtttatttgccacctaattatcaaactaagatcaagctcagttttcaaggtccaagcctcaaaggataacaaatatatagaacaactngttcactaacaagtacttg

SEQ ID NO: 179948 - DNA, 457 bp, Glycine max
  unsure (1)..(457): unsure at all n locations
ntggctgcgcacgagctccgatttcgtgagtatntatagaagatgacgcattgtaatcgattacaggtattggtaatcgattacaggcccaataagccttctggtaatcgattacaggatgttgtaatcgattacaggcggcctgttcatgtgtaatcgattacactgattggtaatcgattaccaaagcctatcctaggctagtttctctaaaataacctatgtttatgctaaatacatctaacactatcaatcatcatcactaatatgtatttaattcattcaaccaagtattaatcaaacaattaacacacaccaatcaaatataatcaaatatttacaattaaacacagtcaaacaaaagcaatcatcataacataatctaagacaacaatccacataactatcaatcaaaaacattaatgacaatcaaatacttaaggagtanacaagcatc

SEQ ID NO: 179949 - DNA, 472 bp, Glycine max
  unsure (1)..(472): unsure at all n locations
gctttgcttctacaatctcccnncttttttgttgacaacttctgaaancaagaaacagacacacactttntcctagatcactcacataaattctccccctttgtttttgtatttatgcttctcttaaaattaagttgattactcatgtgaattcttgatttaatccctatttctctcccactttggcatcaacaaaaagccaaagtgtgtatcaaatttgaagtattcaaatataactcaacatccatacaacattcatggaaaaaactatcaaccaaatcatgaagcaagaaccatgaagcaacaatcataaatagattaactataaaatccacatagtcaaataacatacttaatatttgttcaaacataccatgcaaataaggaaatagcaaattgttcaaataccataataatatcaatttaatttgataagtcactaacatttattaatcctaattctcttctaatg

SEQ ID NO: 179950 - DNA, 350 bp, Glycine max
  unsure (1)..(350): unsure at all n locations
tcacatggagctacatcaaaaaataattaataatttataacttatttgtagctaattattttatatatattttttgtagtaagaactaaaaggtaattaaactacaaattatagagactaaaaatatcactttcaaactatagggactaaaagaaaattaaaatacaaactataaggactaaaaagaacacttttaaactacactaaaagagaatgataatgtaaactatagggactaaaaaaaccacttttaaactaaaaggactaaaaaagtaagaatcatgaaactatagagaccaaatgagtaatttaacctttttaaaaaaatgcattcctaanaaccttttcca

SEQ ID NO: 179951 - DNA, 393 bp, Glycine max
  unsure (1)..(393): unsure at all n locations
agcttgtaagaactagttcagcagaggccttttatgagtgtagagcagttcattgagaaggtggcctggcctgtancccgaccttcttttgtgggagataatgaaagttttacagtccagacacctcaacagcatgagccagaaccacaaaacgatcactcatctaaagccaccatccctggagttattgatttttcaaaaagaagattatagacgagatccaatgaggctggtcatcctggaccagtgtcggcatcagctgatgcatcatttccaggagtggatccatctttacctcagcacacaacaaactctttcactcctgtcatagagatacatgagggccagaccatgccagtcctgcctttggacactttcttcactactccatac

SEQ ID NO: 179952 - DNA, 377 bp, Glycine max
  unsure (1)..(377): unsure at all n locations
ntctatatgttagttatatgtaaaatgctgcagtttatattcgtctaanatgaaatcctgtaaaaaatctgtctttaattttgaaaattatattcaatgatatttacggctatatatttggaagatgttaaaagaaatcaaatcttcagatataattgatgactaagttcaaatttaatatattgcaaaaaacgctacttcaagtagcgtttcaaaaaacgttagaagctactaaaaaaagcatgcttaccaaacaaccacatgagcttctcagctagtaaaaaaagctagaagctagctgaaatgcctcgcccaacatagtctagatagaaaccattcattatctattaaattaatagaacaaggaaacaccagtg

SEQ ID NO: 179953 - DNA, 441 bp, Glycine max
agcttgttccattatagctaattgagctcttcattctcaagtgttacatcacttccttgccgaattacctgaatacacatttcaatattcatcagagtaaattttttaatgcatcaacaatgttatgcagaacttcaattccttattttatttagtgtgacatgtggtgtacctcggcctcagataaaggcagcatgtagtcatcctctggtacttcttcaacagccaaacgataaagccactaaaaccaagaatcacatgattaaaattgtgaaagccatactgtgcacataattcattaaggttattttagtagaatacaaccttcggttcaaaaaatactacaggatttggatctcgtatgcaagatagcaataacccttttgcttgtcgtggacttcgagggatgaccacctatagaaggaactattgaggcatttg

SEQ ID NO: 179954 - DNA, 319 bp, Glycine max
  unsure (1)..(319): unsure at all n locations
ctgcgtctaatacagagtgagcaatcagtattacaaatgctttacaaactnctcaatgcggagtggcattggattacggataatgcactatgaattgccaaattggaactgtattatggtggtgtgacatggtgttgtgtctggagcaatgctgtggctcacagtaatgcatgtggtggtggtggtacgtgtttgggtggaggtgggatggtatgattagtaggctacgtgcgtggctacgagaaggctacagatcgaagtcgcgaccgtccatgcacgtatacggagtgcagaggcacaacaggggtaagaggagcca

SEQ ID NO: 179955 - DNA, 470 bp, Glycine max
  unsure (1)..(470): unsure at all n locations
agcttggagaggatgcttcaatggatttattatatagaaggagagaaagagagagggcggnggggcacgaaattgaaggaagaanaagggagagaagttgaactttgagttgtgtctcacaagactctcattcatcaaagttacaacaagtgttacacatgcttctatttatagactaggtagcttccttgagaagctttcttaagaaaacttccttgagaagcttctttgagaaaacttccttgagaagctagagcttagctacacacacccctctcataactaagctcacctccttgagaagcttccttaagaagattcctaaagaagctagagcttatctacacatacctctttaatagctaagctcaccttcttaagatgagaagctagagcttagctacacaccccctataataactcacgctcaccccatggcagaatacatgataatacaaaataaatcccta

SEQ ID NO: 179956 - DNA, 446 bp, Glycine max
  unsure (1)..(446): unsure at all n locations
ntgccaaaatagcttacatcagctttgaaaaatcaatttttgaagaggataagtcataagtgactggctaatcagcttcacagatatacatgtatatataacaagtagtaacaatgtgctttacctggactttatataatgaaacaacttccacaacaacaccaatggacaaaccaagttcaactacaacaaactaattcagcttcacctggagttgatataatgagtaatggctttagaagaactcaaagccaaaccaagttcaagtacaacaaattaattaatctttttctcaaccaaagtatgtcaaactacttgttggatattaaaagtgttagttattcatgtgacaggcaaagagagttgtaagacaataattcttgttaaaactgcaatgaagtattggggattaattgatacaactgatcagacaatgatacatagac

SEQ ID NO: 179957 - DNA, 465 bp, Glycine max
  unsure (1)..(465): unsure at all n locations
agcttccttgagaagattcctaaagttttatatcttagctacacacacctctctaatagctaagctcacctccttgagatgagaagctagtgaggttgctgtaggaaaagctctcatagacttgggagctagtatcaacttaatgcatctctccatgtgttggcgacttagagagcttgagataatgcctacacacatgacccttcagttagttgatcactccatcacaagaccatatggagtgattgaagatgttttggtgaaggtgaaacaccttatatttccagctgattttgtggtgatagacatagaagaggatgttgatattcctctcattcttagcctcccattcatgtctattgcaagttgtgtagtagatatgggaaaaaaaatgttgcaaatgggcatagaagatcagaanatcagctttgatctatttcatgaagataaagagccacctgaccg

SEQ ID NO: 179958 - DNA, 358 bp, Glycine max
cctttatatccttcgcaacctgagttcattattgctaccccatagaagctcccgaaatttggtccggccatactcttccttgcgagccctcctggtctctcgttcaagggcccttacggtaattgcattctcttcccgtaacccggcacactccttccgaacgtgtgtagcagccaacttgaacttctccttggcgagtgttgcctttcctaactcgctatagaaagcttggacttcctcgtccttgtacggagcttcaaaattctctgtgctgacgacttttaacttggctagccaatctaaacctcgtatgcgaaccttcagccattcgtggtacccaccaatgatgccattacga

SEQ ID NO: 179959 - DNA, 452 bp, Glycine max
  unsure (1)..(452): unsure at all n locations
agcttcttctttagacctcagggatctgtcatctttcctggccgacgtcgactgtcatttttttcgatcaatatcgatgaataatatttttctgccgtggtgggctaatgttttcctggccgaataaatgggaacatgccagtttcggtcgaaacaaaacgccgactgaggtcgcacgaaaaaacctagccggcctacattgttaatttcttatgcaacacaaaaacaagaaaacatcctctgccacaaaaaaaaaaaaccgtcaccggccagcgagcgttttaaaaaaaaaaatcagtcggggctatttcaccaccgatgtcggctattgacttttctattcaatccctgaatgatatttgcatgatgttgattaggaaatgttcgatcggcgtcatccggtgatgcttccatnttagacctcgatcggtcatctctccacgccgacgtca

SEQ ID NO: 179960 - DNA, 444 bp, Glycine max
  unsure (1)..(444): unsure at all n locations
tctagcacactccagatatcttctcaattatcccaatgtttatatcatggaaanatggcttgtgaagttgcagaccaaatttggagaagatccaatggttaacgaaggctgggcagcgtttttaccgaggcagcttcatgtagctttctctataagcttcattaagaggcttcctccagaagcttcattaagaggcttatagcacactccagacatcttctcaaagatcccaacggtcagatcatggaaaagtgtcttgcgaagttgcagaccaaattttgagaagatccaacggttaacgaacgctgggcatcgtttttaccgaggaagcttcatgtagctttctctagaagcttcattaagaggcttcctccagaagcttcctcgtgacttctttgagaagctntctcaagaggcttctctgagaagatagatccttatcta

SEQ ID NO: 179961 - DNA, 464 bp, Glycine max
  unsure (1)..(464): unsure at all n locations
agcttgaattggagttntgtaggtcttagtatctatttgcagacatactaactaagccattgaagtctatcaagttcaaggaattgagagacaagttaggagtgacatccttgacaaatctgaattaaggagggatgttgatgtatgttgtaattcagttagttagttaggagttaggagttagttagtttgacagatatgaatgttattatagctatatgtgtagtgtgtataaaaatattagtgatcatgaatgagaagtatgagagtgcagaagttttaattcagaattctaagttctctctattttctcaatcaattctttcatcttctcttattctctaacatagagggagtgagtgcataatgtgagtgtgagtgaagagctttactttgctcaacagggagggccagcttttctgtcactaagtatttgatttttatttcccccattagcaatttta

SEQ ID NO: 179962 - DNA, 105 bp, Glycine max
taactactctctatagaacctgtgatcttttttatcgaattatccagaaatgaaacacctcaggcatgttagtttaaggcgaaaatactatttgatactaagaga

SEQ ID NO: 179963 - DNA, 407 bp, Glycine max
  unsure (1)..(407): unsure at all n locations
ggagctctatacgatctttttttttatatatcncgaactcgatgttgacattcgaatgtctgatccatacatcttactaatatcttgctttctttcaacgcgtctcacctttcagtatgttaatgccctaccattattatgacatgaaaaatactctaatgatttttaatactttttgctcaaattggtccacatcccgttccctttttgtaagacaagatatattaatggaaacaattggatgtatgctcgtgtgcttatcttgtggaaacatgcaacgtncaaatatgtgagttggattgcaatagattctgttattaattaacatcaacaatatcattatgaccgagaaaatggatggtnttgtagttgattaggttttcggtcttctacctttcaacacggaa

SEQ ID NO: 179964 - DNA, 460 bp, Glycine max
agcttgcttgggaagcttctatggaggctggctctttgagcttcaatgaggtccttcaatggtgatttttcaccatggatatgcagcggaagataaaggagaaaagctgaaaggaggcaccatccactagggaataagccatggaaaaaagagcttcaccaccaagagagtgtcttggataagaagattagagaggaagcttcaatggaggaaaagaaagaaagagaaaggggggggtgatgcaatcctaccccccaagggcattggatagaagactccaagaagattgggacaaagatgcaagagaatgccctagggttctcatgagccttagggcagatttcgggcccatgggctaagtatgagcccacttatctttgtatatattagactaggatgtcattatatttgatccttgtatttagggctccatattgtagatagggtaccctagaaatat

SEQ ID NO: 179965 - DNA, 400 bp, Glycine max
attcggacctataaaactcagctttaatggaagtcaagagcatgatattgcgccgataccgttcactggtgagcaggtatatcagcggtttcaacacctgaacactgtatttgggaagacccaaaagaaggataaaagtcagagttgcatatggaagaagaggtccattttctttgatcttctgtactggtgtgatcttgacgttagacattgtattgatgttatgcatgtggagaaaaatgtttgtgacagtgtgattgggacgctccttaacattcaaggcaagacgaaggatggcttgaatacccgtcaagatctagctgatatgggtataagagcatagttgcatccaaggtctgatgggaagaaaatttacttgccccgagcctgccatactttg

SEQ ID NO: 179966 - DNA, 457 bp, Glycine max
  unsure (1)..(457): unsure at all n locations
agctnggattaattcggcctaacgagggtttattggtttactaatttaggctacaacatagaacacaagagcactaccgattaaagaaatatatttctatgcatcagcttatttgttagaaagacccaacatttctacctactgctgtcacttttatttaccttgaattttatagtttttagcataaaagtttagtttacattttgtttgaaattatcagtcatacatgttcactcaacaatgcttcatttctgaacttaattcaggctaacattagttccctatgttcgatactcagattcatccattttaatttttaaatacttgacgatccggtgcgctttccggcaaaccggatttcccttgaatatattcaaacgaagaaaaagtggaacaaaaagtaactgtaggggaaatataacatacaccccccctaaatggatcagttcacccccca

SEQ ID NO: 179967 - DNA, 357 bp, Glycine max
  unsure (1)..(357): unsure at all n locations
nttacatattataattgtggtctatgtattttcatacatgtgaaatgttctatgagtttttcattgggaatacttatttagtatgtgaaatgtcacactcttcattaaaataaccaacgctagaacaccattaatctgaatgtctttatatcaagaacacaattaaagaaaaatgctcatagaagattataccatagaagtttttaaaaagtatgtgtgttactcacccccttaaagcaagtaactcgagttccttatttttgcctcagcaaaaattattcgctttccttcctctcaatcattgagcaacccactaatgtcaagaaagatttatttgtgtgattttaagaaaatgaa

SEQ ID NO: 179968 - DNA, 464 bp, Glycine max
  unsure (1)..(464): unsure at all n locations
agcttanaatgatattattagataagtcttattttttaacttgattcattgggatataatataacttttttgtactatgggatacttgatgcaatctatttaaaaatgactaaactagtggcttgttatcatgaactgaaaaaattaaattatatattacaatgacgtgtattgtttgccacattatattaatgtgtcattttataatttaatgataagggaaaatttttacattgacattaacgtgtaaaactatgcaataaattgaatttagatatggaatcaaccattgatcaatttatcataacgggatattgatattcatatgtccaacacaccatactaacagtacttgttggtagagactacaaatatcctttattcaagataatccagttccatactaatagtaaagtacaacatcactaatggattgttatgcaaaactaaacatgatccatata

SEQ ID NO: 179969 - DNA, 424 bp, Glycine max
  unsure (1)..(424): unsure at all n locations
tgtggatatgggcctcaatctcaaccagatggtgnataacacactaatcactgtattatgcagaattaggatgactaaaaaagcaaatgtggtgcttacggaaatggtgataaaagggaattcagctgacattgntacttataatgctcttattcgtggttattgtacangcagtcatgtggagaaggcttttaatacttattcacagatgttggtgagtggaatctctccaaatattactacttacaatgcccttttagaaggtctttcaactaatggtttgatgagagatgcagataaattanttagtgagatgagggaaagaggacttgtcccanatgccactacttataacatattggtttctggccatggtagggtcggaaataaacgagattctataaaactctattgtgaaatgata

SEQ ID NO: 179970 - DNA, 438 bp, Glycine max
  unsure (1)..(438): unsure at all n locations
agcttgngttaataatcttgcgtatttgttaattttaaatatttttctcaaagaaaattctggtcttcatagattggttgctggccaaacaccaatgaccaatcacatttggatttgatgattgtatcatgattcaagttttcgacttgagtttttggtatggttgtattttactatggtaaatctccatgactggtgatacattatgtactgacatcaaatccttcatattttgaagttttcagttttcacctatgaaattgtattctattttcttgaagttgccttactttcttgttcaaaatattacatatgatatatggcattatcttttttgtgtggtaagctatttatattaataatccattccttcattacagctgatcaggttgggcaagttaagtgtggcagttgtgcggtattgctgatgtacccata

SEQ ID NO: 179971 - DNA, 451 bp, Glycine max
  unsure (1)..(451): unsure at all n locations
tgaccaatanagacagtatcatcagcatactgaaggatttatatatgctctttcttgtttcccaccaagtagcttttatacagatttttcgaaatggcctctctcatcaatccagtgagaccttcacccacaatattaaagagcaaaggggctagagggtccccttgtctcagacctcgagtaggggcaaattcattagtagggctaccattcactaaaatggaaatagttgctgattgaaggcatgcagcaatccattgcctctatttagtgcagaagcctaatcttgacagcatatagtccaagaaagaccaagatacagaatcatagcagatntacctgngttagtttactaaagggtaaatttcaagtgctatccttagtacagaatttcatagcttttgttgaaagacagtatagtgcagtggtaaaagttgtgagaacagataat

SEQ ID NO: 179972 - DNA, 462 bp, Glycine max
  unsure (1)..(462): unsure at all n locations
ataaatncatcacttttaatattctctgttcttaaacttaaataatgttaatttaacaattatttgctcaaaaagaaaaaaattagaagagaaaaattacaaattcctatataatttaataccaaaatatactcataattagctgttatcaggtttagggcccatttctataagcattattgggaaaccattccgcatgatgtttttgcagctacccttcagttctttgaaactggttggattctccccaatctcaattctaatgttgttgggatgatccctaagttccctaacgctaacaaaatcgtgcactatcacctaatttacccttccaacttccaattcaaaatcatcactaaggttcttacctcacggctntctgtcgtcactcctagaattagttcctctcatgaaaaaggccttgtcaaaggtagacagatctcttagattggatagctatta

SEQ ID NO: 179973 - DNA, 443 bp, Glycine max
tgcaactttagcacggccagaagtaaaaaaccaaaaaactttctttcgggtgtggtctgaaaagagaattgaaggcaacacaaaccttggggttgatgttttgagcggtgacagggaaaggggaatcaaaagccatggagaaaggagtagaggacaagaaacgagagcgagaaaatggggagagggatgaaacagaagaagaataatgaaagggatggtgattatgatggtgacggtgacgcagaagaaggagtgaacggttgaaaaggtgcctgaatctgtctgcagcatatttccgcattgtgagggttatatataaagagagatttgatgatcgtgtgagatgcgatgtcgaaaacagacacacagggcgcgtgcgtgtatctataaagaaacaatatatgacttatactatgtgtcgtgtgcttggagaactttccaca

SEQ ID NO: 179974 - DNA, 424 bp, Glycine max
agcttctcttgataagtacggataactggtttttggtttatactaatcattaataggaacatcaagggctgatttcagtaaattcgttatttatagtacacataatataccttattacaatctcaatagttgaatagttagcattcaaatttggaatcatgttttgaaacttgaaagagtaaattccaaattctatctttgaaaaaatcatcccacctaatttaattctaaagaaaagaaaatcaccaaaccgtctttttttttccattaccaaactgtcttttaagattataaatgtgggtgtgaaaaaaataagattataaatgcgggacatcttaatatttatgtatttcagttaatattttcagggacaaatttgagtcattactgttctttcatgaactaaatttgaacacatttactt

SEQ ID NO: 179975 - DNA, 368 bp, Glycine max
  unsure (1)..(368): unsure at all n locations
ctcagcttacaaatnttgtccttatcatatttgatgtttggtaagttcctcacaatgttgtgtttagaaagtttggaaaggtttttcgtgttgagatgacctactcttttatgccatattcatttatcactttcgaaggcttttatatgggattgggtaggtaaaggctctatacagatcctatagaggtttctctatcttacaccaaataataggatttttccaattaatgtttnttaatcaaacgagcattaggttcaaacttcatagtcattgtcgcatagtagactaatgctcagaagattatgtttcaacccttttacataataaacattttcaatttaagcagagtttggtttataaattta

SEQ ID NO: 179976 - DNA, 466 bp, Glycine max
  unsure (1)..(466): unsure at all n locations
agcttgcgggagtgataactcttctttttttatgttggcgtcgggcaatccgcctttctttgtttatgtaccgatgtctatttgaggtcttgggtctcatcttccccttgaccgccttctagtatgctcttcttgagcacttgaacgtggccacttcccaactccacccaaacagttgtgctatggtgacgacctttaagattttgtgccctttcttcaacatttgacctagtgtgcttgttttcttgaaaaacaaatgttaacgaaactttgttaacatcggtttttatggaaaccgatgttaacaaaacatgttaacatcatttaaagcttactctcactctttctatccgtgacgcttcagtctcgctttcactcttactctctctanttttgacctcgttgtcgttcctcactcactnttgctttcactctaaccgtcattttcctcagttgtttaactctg

SEQ ID NO: 179977 - DNA, 452 bp, Glycine max
  unsure (1)..(452): unsure at all n locations
agctttggagtaaaactgggactanctattntatttcaaaaaaagaagtcgtatctagtcaaggtctgagagaccatacaagtttcctaacgatttctaattatgtgggccattaagtctatcatatgctgacaatagccgagaagcccatgaatctcttcgggggcggagtaggtgtctgccatcgccttggccttggctaacaatcggggaagttcttgactcccgttcaaggtaagagcaaaccgatccatccacatggttgcctcttggtgtaatgaatcaattaccctctcccttgcttcgctttctgctgatatcttggcgtactcatcctctagcctttgctcgtgagtcgccgctagatttagcttctctttgcactcatcgatgacggcccacatattcccttcagtctcgcttaactgttgggacaaatttcttttcgacct

SEQ ID NO: 179978 - DNA, 366 bp, Glycine max
  unsure (1)..(366): unsure at all n locations
actagctgaccgattttgtgcatcgggaaacaatttcactttatatgttttcccaattggattcctaattttcaacttacctatttggaagtgacatcatggcagntaggtcccagcttttcattgtggattcagtcacaaaacaaacttaaatatgttggactatctaacacggggattttcgattctattcccacttggttctgggaagcacattctcacggtttgtatttaaacctctctcataatcatatccgtggtgagcttgtgactacaataaaaaatncaatatctatccaaactgttgatctaagcacaaatcacttatgtggtgaattaccctatctttcanatgatgtgtatgac

SEQ ID NO: 179979 - DNA, 459 bp, Glycine max
agcttgtaagatttgcaagatcatctttcttgtttactccttgaaaattattgccatcaatcgaaagagatgacaatttaaagagtgatccaagactttcaaatggatttccactgaatttattaatagagagatcgagaaatgttaaatctatctcccttgagttgcggagatttcccaaaaaagtcggaattgttccttcaagttgattatatgacaaataaagtgcaacaagagaagtcaaatttcccaaagaagttggaatggttccttcaagttgattgtatgacaaatcaagttcaacaagagaagtcaaatttcccagggcatcagaaatagtcccatgcaagttgctggatcttacgtccaaagacttgagacgatgaagaccgtataagcaatcaggtatagaagatgagaatgaatttccagacaagtcaagattttgaataagtgtga

SEQ ID NO: 179980 - DNA, 458 bp, Glycine max
agcttgcagctgatagtatcactgctgggatgttattggcacctggcaccttcttgtcaaaacgtgttcctggccccaagtttgagacaccatgaagagcctctgaccaccattcataagcaggaacaccaagccgcgaaatacctgcagaagggtttactagttgttgtgtcttttcttgaagtgttaagcgtgacaccaagtcctttgccctgtcctcataagatagtgaagtgtcacaaaatggaaagttgctagtcttggcagagccacatgcatgtttttggctagcggttggaagaatcagaaacgaaaggaacatggataagaacataagttggtttttcatgatatggtttgccttgactatatgtagctgtgtatatatgttatgttggagttcgagagttgtaacctctcttcttgattatataccacacgcttgagcccaagtttgt

SEQ ID NO: 179981 - DNA, 356 bp, Glycine max
tctcgctgtgtgccatcgccgacgcatttatttcctgtttgtgtccccataatctacagctcgagatgaggaagtgttgaatggtgaaacttcctgcttttattgttgaccacagagtggtacctggagatatgtcgcgggggtcaagagacccttgggacgtcaagtggggtgctattgctcaaaaccaagcttgaccaatcccgacccaaccacggcatagtcggtcagtgagaacctgtgatgttcctaagcaggcgagctcctgtcagtcaacagataataggaaaacaagaccactaagcaaggatgcttgtggtggctggccaactgtgaattttgtgtaatatgtggat

SEQ ID NO: 179982 - DNA, 443 bp, Glycine max
agcttccacaacatccaggagaaacttctttcatttagcacaagctatcacagccaagcaaaacagagcagaggcagaaaactctgctcaacacatcaaccaaaatcacagcttttctcacttaaagaccacagtaacaattcctttgatccaattcggtaaccggtggagcgactccaaaattctactggaagtctatagtgcataagcctacattttgaccgttgggatctactagcaaacatccagaactcattctgtactactctttccacagccaaccacacacaagcattttctgcaccaagctaaaatcctgctgcacctattttgacagcaaaattctgcataagtgcagaattcgaaaatcacactttccctcaccaatcttgtcaaatcaaatctacaagtcccaatcatgtttaaacatgttaaaccaagcc

SEQ ID NO: 179983 - DNA, 350 bp, Glycine max
  unsure (1)..(350): unsure at all n locations
taggctaaattaggctaaactttcgtaagctatttaagttttctctagtccaacaagaggcatctgaggatgaagcttagtttaagttagtctaaacgtaggagggttgtctaaattgagcctagtccaacaagagggatctgaggatgaagcttggattgatccagtctaactatggatcgaggtttagtaatttatgctacaacatagaacacaaaagcatgattgattagagaaacatccttatatgcatcaactggtttgttggaaagacccaacacttctacctactgctgtcaattntacttacttgcattnttattggttntatcctaaacttagtttaattc

SEQ ID NO: 179984 - DNA, 453 bp, Glycine max
  unsure (1)..(453): unsure at all n locations
agcttatacaagnggattcaaactttctatcttgttnttctttntttaaaaatcaaacaggtcccttaagaacaaagtttaaccaagttttcaagttatacttctattgtatctattaagcacataaaatgaatgaccaagaaagtcaaattacttgtttttgcatctgcaaccatcgcggtccataataatcatattgttgtccatagcccgtatgtgctcaaggcaattacagaacacaacattgataattcaaccaacatttctgtacaaaagcaatttgaattggtacaaaagcaaggcaatatctaaacctacctctctgggcacaatattaacaaaatcaattcaccactataatattcatcaacatcaacataaaggtaacaaaataaaaaagaataagcacatgcacaattataatgacttgaaatttacccgcggagcttgaaa

SEQ ID NO: 179985 - DNA, 387 bp, Glycine max
tgttggcatcttcatgaaattatggatcaacttgcaccatctcactgtcaataagaacaaattataaataaaattacaaattgggagcacaaaggatttatacaataaattactccctccgtccctttttataacaccatttcaactaatttgaaccctttaagaaaattggttaatttagttaatgacattaaattttcaataatttgtaatgttcttccaaaatcaccctcttaagttatttgaaattaatcatttccctctttccacttaattgcttctcacctagttgccactcatttttcccaatcctgattagagagaaagatttatctcattaaatttcaacaattattatgttgttactaaaaaaattgtaataactac

SEQ ID NO: 179986 - DNA, 462 bp, Glycine max
  unsure (1)..(462): unsure at all n locations
agcttgtaaatcactccacaagccattatttgatgcaaacctacaggccacagggtatgacttcccaatagttctatacaatctttaaaagaactttctgtgaccacactttcagccgcaacgtcaaggtttttggggtttttgtgaccacaatcatggctgaaccagccgcaatttcccataatataaaggattgctagtttgctacgaaatctcaactatgtcgttctgcaatttaaaaccttggttctatgcaaaatatagcaaacaaaacgtgtatttaacaataaggcacgctcaaaaactcattaagaagatgaaaaaatatataggtgggaaaaaaaaactaccgtatagcttggctgcctataaggctataagtataacaaaagccaatttttatggtacacataacaggagccaattgaactatanatgattcttttttcaatttgtaatgat

SEQ ID NO: 179987 - DNA, 374 bp, Glycine max
  unsure (1)..(374): unsure at all n locations
ntagcanaaagatctttcaaacatttaaacgggagcatatcnctctcagacatataattaatttcatagacaatcatgttattacttaaactttagacatggtccacctaaaatttccatccttcctaacaagctaaaccaaagtacctagctagatgccttttttctttttcccatatttggttgttggtgttgagatggaatgtgaaatcggccgcacattaatttgagctagacttgcgtgaatagttaaagaccccaccttcaccattaacatgtcatgcaaagccagatcgtgcggctttggatggatcagtgttcttttgtcgatcgtcctttcttttttcatgtgttacagcaagatctggttgact

SEQ ID NO: 179988 - DNA, 308 bp, Glycine max
atctctctcttcacccccaagacctcccccaagaacctcagatcacagcacctgcacatctcacactacttatgcttcagagtactaatcattctctcgcagcataaattttcatcacttataaaccaacacattacacatgttcgggcgtatagttgcctcgcctcctatattatacattataacgttcgcagactttcaattagtcgaaacggtcactgctcgataattaagcgtattgtccccccacaatttgtatagctcgatatgcatagatgatgaacaaatgtcactccgcacactccatt

SEQ ID NO: 179989 - DNA, 266 bp, Glycine max
tcggccttaatctcgctacaactagaatcagtgatcatgtttccgaaatatttgggagtaactgatgcacttttatcttatacaattggttgtgcttgcttgaatctttatttcacgattgtattggcctcttcaaaaaggggagattgttgatgcaattggcttttatgttttgatgatgatcatgatgatgtgctgccaatgggcttttctagaataaaattcaagaaaatactttcagattacaagtcccacatccagatgat

SEQ ID NO: 179990 - DNA, 469 bp, Glycine max
  unsure (1)..(469): unsure at all n locations
agctntgaaaaacactctntattttaaatcactttgtcttacctttgctaattcaattaggaattcccttcctaatattctagtgatcatcttgatgttgtgacttgtaatcttgaagtattgtcttgaattttaatcttgaaaagcccatttgcatcaattgcaacacatcatcatgatcatcatcaaaacatcaaagccaattgcatctacaatctccccctttttgatgatgacaatacaatacctgaaatcaagattcaagcaagcaacaaacaattgtatatagataaaatgtgcatccgttttctccccctatatttcggaatacatgatcacttgatttctaagtttgttaagctttttcttaagcttttgctacaacctttttctccccctttggcaacatcaaaaagccaaagaactcggaaatcaacacagttataacaatggagtagcaagatataag

SEQ ID NO: 179991 - DNA, 357 bp, Glycine max
ttttcagaattccaggaccagcttcaggattccattccaggattcagaatcagaagaggaattcaggaagccaccaggttcgagactttcatattaggataagtttaaaaagattttttcaaaaacccaaatagcacaaattttgttttacaaaaagaaggttcttaaaattttctgagttaccagagtgattactctctggtgatcgattaccagttggcaataatcgattaccagtgaccagaatggttttcaaaatgttttcaaatgatttgtaacgttcccaaatgaatttcaaatagtggtaatcgatacactatattagtaattgattacaagtgaatctgaacgttggaa

SEQ ID NO: 179992 - DNA, 454 bp, Glycine max
  unsure (1)..(454): unsure at all n locations
tccttagagtcacctgcggctgcagctggattcctttagtagggaatctattttcctaagatggagccaaacccagtcaccatcattaagaactatctcttttcttcctctattgcctttagttgaatacacctttgtttggttctctatttggttcttaaccctttcatgcaacttctttacaaactctaacctagattccccttctttatgtataaaagaagtgtccagtgggaggggaatgaggtctaacggtgttaggggattgaactcatagacaacctcaaaaggggactgcttggtggttctatgaaccccccctgttgtaggaaaattctacatgaggaagatactcatcccaagacttatggttgcctttcagaagagcccttatnagtgtggataaagacctattcactacctctngtttgcaatcagnttatggatgacatgt

SEQ ID NO: 179993 - DNA, 359 bp, Glycine max
atatatttcaatcagattggattctctcatgttattgtatgagagtattatatacaaaagaaactatagttatacaccattatttgtgttgggtccattaaacactctatagcgtcttttccactcaataaccttgacgggaacaatcgaatatagaacattaaaggatccaaattttttctattcacacgcaattactaactgctttcagctcacagtgcaaaactacaccaagcaaactacaaatctacctatagtatagggagattcagaattatgcgaatctgttggaaagttacctcaatcttctctattctagcactgaatccaatccttggctgcatttccatttttcaatc

SEQ ID NO: 179994 - DNA, 465 bp, Glycine max
  unsure (1)..(465): unsure at all n locations
agcttgacaaaagagagaggaggaaaaaattattttttgtcacacaattaaacgatactcatattgcttaaaaactcgtaaattntgaaaacagattgccagtataatttaaaatactatttagagcattacctaagtaatccgatgttacatcaagagatggagtgaatctttttttttaaaaaaaaagggagggacccacacattcaaacttctgctctaaaatgagaaaaatatgaggaaatgttcactcaaaataactccccaaaatactcgtttttttcatgaaatttctaatcgtgctggtgattttagctcgtcacccacttcagcttactactccttcaatctacttttttttttatctactacacagcttttaaaataataaatgtgtacataaaattagttatatgggtggcgatgctgaaaaaataatcctttatgaaaggataaattaatctt

SEQ ID NO: 179995 - DNA, 215 bp, Glycine max
aaaaatttggaaagctttctgtaaacaaaatggcatttggtttgaaaatatttcatactccttggaatatctctttgatctgatcttttgagcattcttgatcttgaattatttgataattcgatcttgacttgtgctcatcttgaatcatttttggcttttgctatcaaactactggtactgatatatagaactgcttccctgaggtgtctcgc

SEQ ID NO: 179996 - DNA, 459 bp, Glycine max
  unsure (1)..(459): unsure at all n locations
agctngtgatatctatttgtttgttcaagttttttttgtctgtaagngtnggtgtttatttactagagtgttatttcattgtagataatttgtggttgtttataagtatgaatatattgtttttaatttaattttgcaaataccatgattgaatttgtcggttactacgaatataaacaacattgtgtacaaactcttttataacttattttattcaatgaggttattatctcattaaaagtgttattttcaaagttcaagaaagaaacttttgagacgatagaattaaaaacttaacttatgagtagttaaactttatggatgtccaaatttgagaataaaatttatttatttatgtaaggactcatttatttataatatttgaagtattttgaatcattgaaattnttaatttcttattttatggatgttttaaaatatattcttattataagttgt

SEQ ID NO: 179997 - DNA, 419 bp, Glycine max
  unsure (1)..(419): unsure at all n locations
tctacagtatacaggcattcacctaagatattccatttatcaaatgtcagcaccgcggtaagtatgccttggccttcaggctacacatcaacgtcaatccagctgaaggatccttaaaaattataaactaaggatgcattaaaataaaaaatttcattaagcacttatttaataaactcttaccaaataaaaatctgttcataaaattaacagaattactgagaagttaaaaaaaaaacttattttaacaagtttatctgtaaatcttattaaaataaattgaaaacaaaaacttataaaattgtgaactactctctcacaagtctantttttttttcaagcaccccacagataacaatataattctgaagaatgcttgtgctatatataagatgcttgtaagtgcttgcttcaacaaa

SEQ ID NO: 179998 - DNA, 466 bp, Glycine max
  unsure (1)..(466): unsure at all n locations
agctngatagcaacctttgctctgattatttttatctttgcaaatgtctgtaaccctcaatactagctagctagtgaacattatttctgctaatacagtgtcagttagctgtttatattttataatgcttaattatttatttagtctttataatttttaattttttttagtctttataggtaataaatataattttttaattcttaaagtttatattttaactaacggagttaattataaatttcaaagattaaaaaatttatttattaaattttaagaactaaaaaaatttatttattaactataggaattaaaaaagataattttagaatctataagaattaaatgaataattaaatcattttataataatgggtgtgaagaggacatgctgatgctagtggctntacaaattgagcatgaaagattataatctncaagcttgtcttgaaatgatttaccatat

SEQ ID NO: 179999 - DNA, 462 bp, Glycine max
  unsure (1)..(462): unsure at all n locations
agcttattgactnttacaagattaccttattttatacacactctgatttattattggttgacgtcaacaacgtaatacaattttacattattaatgcatcaccattaaatttgatattaaattaatctaatttatttttttttctctaattctcttaatttttaaactaaatcctataaatatttaacttcaacaaaatatcatatttaatctctctttagatatttgtttttattattcatgatctattcagcccttttattttaaaattgtctaataatttttttattaatatttattttttaacatttcttattatcctatatgaattttggaaggttgtgagaaaaaaaagggatagatgaaaggtgggttaggcgtgtgtatatagatgctagaaattgtaatgaaatggtatactactggtctaggaatagtgatagtcattccattntcggcatg

SEQ ID NO: 180000 - DNA, 390 bp, Glycine max
  unsure (1)..(390): unsure at all n locations
actcagctttgacatttaattcaatttaaagcttgtaattgatttcacatactactgaaacgattaccagagcagattntcagaagatattcttaacagtcacatctttttatgtggttcttgaatggctatcaaaggcctatatatatgtgacttgagacacgaatttgctaagagtttttcagaacaaaaaggtcttatcctcttataaagcaaaatcgttttatcctcttacaaattccttggccaaattacttgtgattcaataaggaattatttgagtgctcaaattgttcaatctatctctttcaagagagatgtcttcttttcttcttcttcattctgaaaagggattaagagaccgacggtctcttggtgtgaaagaattct

SEQ ID NO: 180001 - DNA, 461 bp, Glycine max
  unsure (1)..(461): unsure at all n locations
agcttaagctccttaactgcacaggcttttttatttgaagagtatccttatggaaccttcacccgatgaagacactgacaaaaacttatcttctcctttttggacaaagtatgacaagctgggggcaagtaaattttcttcccatcagatcttggatgcaactgtgatcatatccccatctcagctagatcttgacgggtattcaagccatccttcatcttgccttgaatattaaggagcatcccaatcacactgtcacatacatttctctccacatgcataacatcaatacaatgtctaatgtctagatcagaccagtacagaagataaaagaaaatggacctcttcttccatatgcaagncttacttttatccttcttttgggtctttcgaaatatagtatttaggtgttgaacccactggtatactttctcaccagtcaacggtatccacacaatatc

SEQ ID NO: 180002 - DNA, 438 bp, Glycine max
tatgctaccaagcacgcaagtgttggatgttcgtttctgaaggcaaacattccatttcattgttggtcatatattttctttatctcgctggaacttaagttggctgatacatggctatggccttctgtatcctgctgtttacgctgctgaattataagtgaatggaaattatactcgcagaagctttgcttctcgtagctcagaaggattaagttgaattttgatgggagagaaaaatgacgagaaagtggaaaaaaaataagaaaatgaatgatagacacaatatctatgaatgtgaatatctcgtgtatttagtatataatgacatcttaatatttcaatatttataatttctttatgtaaaaagttataaatattattttttgctctatttatgtttgagtgatgtagatgaaagtttcttttcaaaatttacta

SEQ ID NO: 180003 - DNA, 490 bp, Glycine max
  unsure (1)..(490): unsure at all n locations
gatcttaagtcacctgcggctgcagctattacaaaaaacacaattcttgtttcttatganactnggtaaaaatatcagctagttcgctagaactagtataacaagtagaaatacaacgagagaactttctctaatgaaatgataatcaactaaaatattttcttgttctgataccatgcaaaggtcactgaaaagtaattattaatctggaaagttaagtaattattaatctggaaagttaaaggtacatgacagattatataactaatgacctgaactaatgggcctatgggcccaatgatattctaactaccatatagtattatttgatttgattatactttccatctacaaggtggttctctgaccttgatcgtttatgcttgtaaaaaaattgtttaaccaggttattataaactctgaagtctgggatctgcgcaagttcagactggtacgcagtgtaccttcactagatcaaacatcaataaca

SEQ ID NO: 180004 - DNA, 406 bp, Glycine max
  unsure (1)..(406): unsure at all n locations
tcaacaatcaatgtcgagcgccccattttttacnggattctttatacanccgagngaaaagntatgggcgnttgaatttgctgagtgcttctacattcaatttcgagggtctcgatatattacgggtctcaatcagacatccgagtaagaagttatcgtcgtttgaatttggtcagaacttcaacattcaatttagagcgtctcgatatattacaagactcaatcagacatccgagtaaaaagttattgtcgtttgaatatgctcagtgcttcaacattcaatatcgagcgtctcgatatattacgggactcaatcagacatccgagtaaaaaggtattgtgcgttgaatttgctcagagcattcacattcaatatcgagcgtctcgatatattactgggctcaat

SEQ ID NO: 180005 - DNA, 450 bp, Glycine max
  unsure (1)..(450): unsure at all n locations
agctntgagctaattgaaacgacaatatttttttgtctcaatgtctgatngagtcccggaatctattgagacgctcgaaattgaattctgaagctttgagctaattcaaacgacaataatgttttgcatggatgtctgattgagtcccgtaatacatcgagacgctcgagaatgaattctgaagctctgagctaattcaaacgacaataactttttgctcggatgtctgattgagtcccgctatctattgagatgctccaaattgaattttgaacctcatagctaattcaaacgacaataactttttactccgatgtctgattgagaccccgaatatatccaaacaccgaaattgaagtttgaagctctgagctaattcaaacgaccataatgatttgctccgatgtctgattgagtcctctaatacatcgagacgctccgaaatgaatg

SEQ ID NO: 180006 - DNA, 426 bp, Glycine max
tgtccacaaaaagtcgctaaaatattgattgaaaagttctatatctcagtttttattaccaagtaaatggatcatttttaaggtccaacgctctaaaatgatcaccttccaagtaaaaagaatcgcttgattcacccttaagaaagaactacgtacgtctgatttcctcttcgatggagggtacgaaggagcaagagcctcgcttttgtcgacctcaaaaataaaaaaggaaacaaaagttaagataacacaatttcacaattctaaaaaatatgctgttgtcctttgagacaaacgtgaggggtgctaataccttcctcaaacgtaaatacaactcccgaacttagaaatttcgttttgactaatttcctttggtttttccgacgttttccacaaataaacattggtggcgactccgcgcatctt

SEQ ID NO: 180007 - DNA, 469 bp, Glycine max
  unsure (1)..(469): unsure at all n locations
agctngcttgtggggcttctattttgttgtatctttgagcttcaatgaggtcctttaatggtgattttccaccatggagatgcagcggaatacaaaggagaagaggtgagaggaggcgccatccactatgaaataagccatggaagaaggagcttcaccaccaagatgagccttagataagaagcttggaaggatgcttcaatggaggaaaagaaagagggagagaaagagagaggggggagcacgaaattgaaggaagaaaaaaagggagagaagttgaactttgagttgtgtctcacaagactctcattcatcaaagttacaacaagtgttacacatgcttctatttatagactaggtagcttccttgagaagctttcttgagaaaactctcttgagaagcttctttgagaaaaattccttgagaagctagagcttagctacacacacccctctcataacttagctc

SEQ ID NO: 180008 - DNA, 385 bp, Glycine max
  unsure (1)..(385): unsure at all n locations
ggacactataaaactcaagctgtagaccgaggcgaacttatcagacatgggggtgcgcttattacacttcatctataacactcgaaagtggtggtgaacttatcaattacggggtgcactcaataaactatttcaggaagactctaacacggggtgcacttacaaatcttcctcacgaaacctctgggcagcaaccaccttcccttttctcctataaatacggggaggaggctgagccttcaaggcctctgacctctatgctgagtattgcagttgttcttaccaaacagaagtgaaaaaaggattgaaatccaagccgaggtgctttcgtactgcttttgagacattcccgtgagcgattatgngaaaatatctgacattcttc

SEQ ID NO: 180009 - DNA, 434 bp, Glycine max
  unsure (1)..(434): unsure at all n locations
agctnngggtagagcttgcggtgttagtttcataactgacaatgaataatacttgcaagaaatggacgtagtctcaggtttgagacgaacaagtagaattctttgtgtgctttcttgtttcttgaactaggaaagggttttcaatttttttagatcttatatctcattttgttttacaaagaaatttttttctcattatatgataaagtttgaatcaaaacctttctaagtggtttcgggtttatctggatcagatgataaacatgttttcagtctgtagaaaagttttatttttctaaaaacacaattcaacccccattcttatgttatttgcttctacaatatttctacctattntttccaaagcaaattgacaactcgctaaagcgaanatggtatgaaatccatttggccaattgtatcacatttgattc

SEQ ID NO: 180010 - DNA, 430 bp, Glycine max
  unsure (1)..(430): unsure at all n locations
agcttctcccccagttntctatatttatgtttagaagtgaagngaaaaagggttcaaccccttaggcacttctctctctttcgattttgcttggaaaaattgtttccgtgaagaaaatctaagccgaggcgcttccgaaacgtttccgtaaggaatttcgcgaaggtttcgaccgttcttcgacgttcttcattcgttcttcatcgttcttcgatcttcaacgggtaagtacctcgaaccaagctcttcgattcattctatgtacccgtggtggtccacattgtgtttcgcgtatttttattctcgttttatttactttttatacccccttttgacgtgcttaagccattttatttaagtcatttctcgcttaaactaaaaataaaataaatttccaccgatcgtttgaattgtattatccgttaacttc

SEQ ID NO: 180011 - DNA, 323 bp, Glycine max
agagcgcagctactatattctctataacagctaaactcaccctcatgccaaaagacatgaaaatacataaaagtccctactacgactactcaaaatgtcctgagatacaaggctaaaaccctatactactagaatgaccaaaatacaaggcccaaaagaaggaaaaacctattctaatatttacaaagaagagtggacccaaccttggccatgggctcaaaaatctaccatgaggttcatgagaaccctagggccttctttagtagctctagctcaatccttttggattcttcaatccaataccctagggggggggggggggt

SEQ ID NO: 180012 - DNA, 387 bp, Glycine max
aatctacaacactatatcaaagcattacaaatacatctcatagccaaatattgcaacgcctatttccgctaaacatttaattataattgatttctacattgcatcgattcaaaacatttgatcaatgaacaatgtataaacatatatgcaacaattgttgaaaccataagacctgacctgaaccctaatgaagccccgagactaattgcgaatataggacccaatgagaacactctatttagaaataaacataacacataataatgaaatagtgaattcaaacacgagatataatctaaaattttacgataaacacttatgattttattaaaacaagaatgcgtctatatatctttacaagaaaacatgtcaagggattcaaacaaa

SEQ ID NO: 180013 - DNA, 446 bp, Glycine max
cggagaatggctagacatgatacatgtcagggcttgttttgtttctttggtaaaagggatgccccacattatttccatgacacaaatgcaaaaatgatgatttggaaattttatgcaaaactggtcatgcatgcacctatgcggacactcaagtgtcaaatttttatggtcatgtgatgctagggcttaggatttatttcctctattttaaatcaacccaatgtttccaaaatatgttcttttatcaatttgcgcattcattcgagtccatttcgggcgtccggggaaatttcacagcattcacccttcaggtgtagacacgttttttttctcttcaaaaatcggtcatgatcaatgaatttttttttcgaagaagagttggaaatcatctcttttcaaaagcatgtcggtttttagctagacaacattatttctctttttccacc

SEQ ID NO: 180014 - DNA, 452 bp, Glycine max
catcaacctctcaaaaggggaggacccattatcagagtacctttgttgaacctcttccgatgaagaatcttcgatgggaaccacttcccgctctaccatgggttgtcgaacagaacccctagagtcacttcctctcatgcctaacgcagaataaaaaaaagacatagtagggaaaagggggggtacctggagtgaagtagcaatcgaaaaaggaagaggaaaaattgaagaaaactcataaatcacaaagtgtcacacctggaaatatccagaaatggaaaagtcacagcagtcggaagtcatcaaaaggcgagattaaagtgatgactcgagataaattgcgaaatgtggtgctcaagattgaaaacggtgaaaacctaatttggtaacatgaatttcttttaaataaggagagaaaccacaacctttcaaatactgacgggggcggaaac

SEQ ID NO: 180015 - DNA, 458 bp, Glycine max
cttgaaactaagctcatcagcttatctaacatctctctagtaatgttgtcttttacacccccttcaatgctgcaattaaggcagcgggcagcccaaagaagccacaactaaggcaggccaagggtggctgcaattataacgactttccaacataagcagaattatgcaatgtcaatatgcaaaatatgatattatttaggtttaaatacttttctagtccttgcaatttggcacttttttgtttttcgtcctagcaaaattatttttttgtttttaatccttacaaattatgtttgttttgtttttagttcttaaagcactttagatagcgctttgaactgtgaaaaaacgttatctaaagcgccatcagaatgaagaacaaaacaaacatgatttgcaaggactacaaacaaaataataattttgcaaggacaacaagcataaaaagtgctaaattg

SEQ ID NO: 180016 - DNA, 436 bp, Glycine max
tagcattttccaattgccatgatgtaatctccttcttttttgtctctcatcaagttggagtggtatcacagcattgaactaagttgatcgttccaatggttttgattgctgcagataaagtgtgtgattgtgagtttctggtcccatgagtaacagaggtgaggtagtttgtgccttcatggttgggatgatgttgcaggtgccggtttgttgttgagagaaaagatgatcatccacgtctcgtgtgtgcataggagagtgtctttgccctctccacaacattagtttcaacaactgacgttagtcgaaactggatggtgagaatcaaaagagtaaaaaataaattcaactgagactaaagtagaatgatttaaactataaagactaaaaaaaatatagtagtaactttaagggtcaaaaggataattaaaccttt

SEQ ID NO: 180017 - DNA, 443 bp, Glycine max
  unsure (1)..(443): unsure at all n locations
tgtcgaaattgccatgtttgggtgagttagacataccctttctgttttagggtttttgtgatgatgtttgtgatgtttatatgctgaaattgctgatggaaatctgttagagatgaagggtagaactaacccaaggttagaaagtgagaatgtgatgttatgagtggaaaaagagtgagactntgagagttggaaggctaagtctgaattctgtggtaaatggaggttagagtgagttaatactagcttgaaatgtcatttagaacatgtgagaaaggttaggctgagctagagagaaaaacaaatgaccaaagtgaaccaagagccatttctagggcaaaatttgggtgttgaagagtcaaattttgattcggtgaggttttaggtgtaaatccagcttgaacaagtctaaatagatgttatggactggtgtgaggtgagag

SEQ ID NO: 180018 - DNA, 443 bp, Glycine max
  unsure (1)..(443): unsure at all n locations
tgcatgctcttcttcacggttagttaattaatctctctttttaattactctcttaggtaccttttgacagaggaaaaagaaatggaattgagaacaaatatttaaattaaaatggtatatgaaagtatgaaactctaccgaattttagaaattttctactcatttctctttctttcctcacaaatcanacggacccttagtccgtgtttagattcatgttaaatgatttaaaattattatgttaaactaccaacttacgttaaacgtttatttggatatgtatgttgaaacaaacattctgcattctgtgttttgaaacaaaaattgtgcatttggacacaagaataaataagtgacttttgcattgaatagaaaaacaaacattggattntgcttaccttttttttttattattaatcgaactaacaatatatttaaaggat

SEQ ID NO: 180019 - DNA, 436 bp, Glycine max
tctccaagatcttgtcccatgttgcaacaaggtgcatttgctgttaagctaaatcagaattcaaacaaattaagtctttttttttaatgtgtccctttactaatttggttatgaattgtttgttccttttaggtcacgggtaaagcactaatgcttgatgaaattataaactatgttcagtcattgcagcgccaagttgaggtaaagccagtcttagccaataagcatatcaaatgatggtcataataatgttttagatttcttgctcattaagaatgccttttttttgctgttgcagattctgtctatgaaagtggcttctgttaacaccaagctggattttagtattgagagtctaatctcaaaagatgtaagtttcaggctctagacaatggtttagctttttcaactaaaatataataaaaatattgctttc

SEQ ID NO: 180020 - DNA, 450 bp, Glycine max
gcgtctcatatattatgggcctgaatcagacatccgaatcaaaagttatggctgtttgaatttgccatgagcttcgatgtttaattctgagcatctcgatatattatgcccctgaatcgggcatctgagtgaaaagttatgccatatgagttagccgagagcttcgttgttcaatttctagcctctcgacatattattggcctgaatcagacatccgagtcaaaagttatggcgggttaaactttgcatgtgcttccaggattaattttgagcatctcgatatattatgcacctgaatcggacatctgagtgaaatgttatgccctatgagatacccgagagcttccgttgttcattttggagcgactcgatatattattggcctgaatcggacatccgagtcaaaagttatggccgtttgaattaggcttgcactctgatgttaaatcc

SEQ ID NO: 180021 - DNA, 446 bp, Glycine max
  unsure (1)..(446): unsure at all n locations
ctaagcttctgcagcagcgatttcacctagaaatttatattttgntatgnngcttaagggttggaaaggtacaatttgtgttttcttatgatcaattatcttgaataacacaattcaagagagcatacgacttattttgattcacaaatcccgccactactcaacaccacaattcaacttcttcataggcatcatgtaggaaacttagaaaacaaaaaatgttcaacaacaagactacttctaggaattgatttagaacatgttatgaactaaataacatgcatgaattagactcaaaattcaaaagataggctaagaatgacaagaatacatgaacaaatgtatctagaattcaatcaacaaaataaaaattcaacacaaacttagaacataatgtgacaattattatgactaaacatgactctaggacaacttggattaagtga

SEQ ID NO: 180022 - DNA, 457 bp, Glycine max
atactcaagcttctgttcccgagagcatttcttatttaagcacttcagtctttgtctttcgtgtagcttaggaaaaacgtcatttcttcttctttctttcttccaaagccatttctaaagtcccaagcactttctccatcacccacagccaccattagccaccacaaaccatcgttgttctccattgaaaccccacactgagaggaacccttcaaccgaagcagaatcttccaacttggcttgcggtttcggtagagaatgaaaccctaatctgacctttcattttctttcgaggtaaccatggttctacgcttgtttcttgttagtttcatcttgtctttgcatcttttctgactttggaaccgccattgcatgtcttatgcttcctttgaaaaaccttagagaaagagactttgtaaacgttatcctttcatgaaatgcatgttattttcgtaac

SEQ ID NO: 180023 - DNA, 449 bp, Glycine max
  unsure (1)..(449): unsure at all n locations
ttgactttagtcatcaagagattataaatatgtgacaatgtgttttagtttcaataataatcaataatctatcttttacataatcttctttcaacacccttcaatcaatctttcaatatcttctttaatctctttcaacattttcaacagatctttctgatttatttcccttcatctttctaaaagtttttgttcaatagtttctcttccaagaaaagttctttgttcaaaaacttcagctattcatctttttcattctcttctccctttgccaaaagaaggaaggactaaccgcctgaatttttttgtgtctctcttctcccttacaaaagattcaaaggactaaccgcctgatatatcttttgtttccccatacaaagatntaaaggactaactgcctgagaattctntgtcccaacacattggagggtacattctttgtggtacaa

SEQ ID NO: 180024 - DNA, 407 bp, Glycine max
  unsure (1)..(407): unsure at all n locations
ntgtttctggattcatcaaacaaccataaaaaacctatgtattatggttgaatctttcatatttaagcaacaatattagtaactatacaatatatataaacatctagattcaagggtagtttggaagaaaactattacaatcaaaggataagtgctaacaatttaatcctaaaaacaactcanattnggcacttatcaactccctacaatctagaatcttgcttgtcctcaagcaatggtaaataaaaatagtataagtatgattcttaaattgtgaacatgttttgtaagaatcaatctctaaactgatcagaacattatttttcacaatgcaacaatgagaaaggacagcacatagatggaattcacagaaccacanatgagattaagaatattttgcattttgt

SEQ ID NO: 180025 - DNA, 449 bp, Glycine max
  unsure (1)..(449): unsure at all n locations
tctctggaagtnttctcaagagagtttgtcagggatgttctttattctataaatagaatcatgtgtaacacttgtggtaactttgatgaatgagagtcttgtgagacacaactcaaagttcaacttctctcccttttttcttccttcaatttcgagctcccccctctctctttctctccctctttcttttcctccattgaagcatcctctccaagcttcttatccaaggctcatcttggaggtgaagctccttcttccatggcttattccctagtggatggcgcctcctctcacctctatttctttgtcttccgctgcatctccatggtggaaaatcaccattaaaggacctcattgaaactcaaagatccaaccttcaaagaagccccacaagcaagcttccatcaagtggtaatcaaagcacacaagagcttcaagtatgtgctcct

SEQ ID NO: 180026 - DNA, 456 bp, Glycine max
ctcaagctcggctgtggcgctcttatggaggctggatcatagagctttatgggttcttataatggcgattttccaccatggagatgcagcggaagacaaaggaaaggaggtgaaaggaggcgccatccattaaagaataagccatggaagaaggagcttcaccaccaagatgagccttggataataagcttggagaggatgctccaatggaggaaaagaaagagggagagaaagagggagggggagcaccaaattgaacgaagaaaaagggagagaagttgaactttgagttgtgtctcacaagactctcattcatcaaagttacaacaagtgttacacatgcttctatttatagactaggtagcttccttgagaagctttcttgagacaacttgcttgagaagcttctttgagataacttccttgagaagctagagcttagctacacacacccct

SEQ ID NO: 180027 - DNA, 390 bp, Glycine max
  unsure (1)..(390): unsure at all n locations
actatcaaggaatatttgaaccaccatgccattaattgtaccactaaacttcatagatcctacgccaaaggaacctttaagggcattataagatagatgatggtctaaattcaaatttcccatggtttcctcaattctaggaggtggttctagttgcacttcaacattttcatcctcatccatttgcaatagtaggtattgccgattaggacacctatgagaagaagtgaaattctcatcacatgtataacatagccctttctcccttcaaatctgcatttccgctggtgacattcttctaacatttcctggttntggaaacatggagttgtaattcattttgaggctaggaagtagaggtggtacgcttgtggatttgatcgactgata

SEQ ID NO: 180028 - DNA, 447 bp, Glycine max
  unsure (1)..(447): unsure at all n locations
ctttcttgtcctcaagcaaattaagctaactatgctaattttttgttttggcatgttcagtaagtaccaaccacagtaactgagataactgcacatctatcaatcaatatctcccccaaattagtatttgtcacatttcaagatagaagcatgtgcaattgagctaaagagatgaaatcagttagcaagcatgacaaacatcaagcaagattgactaagcttctttcctcacaagccaatgtttctctcaagcacacaagtgtttcaggcaagtgtcaattcatccaaacaactaacaatcagttcccaattttgcacttcatctcattccatgcaatcatatatacacaatgtgggtcgtaaggactttattaagcttgtaacgtggccaagttagcaaagaattcatggttnttcgcagatgcaaagcttaggttttaagagagc

SEQ ID NO: 180029 - DNA, 442 bp, Glycine max
  unsure (1)..(442): unsure at all n locations
ntgagccttctagcaacagaagatctccctcccttatttatgaagaggtaatgcccatttctttagaatctattatccagattttcctttaatctacactctgaaagatatggacttttcggtctagtttgacaggtgtctatagattgaagtggctcgtatctgtcaatttctgtggaccatctggtttacaagaaaccaatgactgttttcaacaaatgaaagtccccatgcgactactgttagaaaaatatcagaatttatttgtgcctgcaactgaagtggtatcaaatgataatgtccaaattcataaatggaagcagccaactgtatgttttatgaaagccaatttggatgcctctgtgaagaacaatatagggacttcggtgaagtcgttgctgcagcatctttggttattcctcgctgctagatatctcatgta

SEQ ID NO: 180030 - DNA, 447 bp, Glycine max
tgtcagaaagggaagcaagttaaaaactcctttttattctttcattgtttctacttcaaaaccccttgaactacttcacattgatttatttggtccctcaagaactatgagtttaggtggaaattactatgttttagtaatagtagaggattactcaagattcacttggactttgtttttgaaaaccaaaaatgaagcttttgatgcttttcacaaacttgccaaggtgattcaaaatgaaaaaaggtctcaacattgtttcaattggaagtgatcatggaggtgaatttcaaaatgagttttttgaaaacttttgtgaagaaaatggaattcaccacaatttttattccccaagaacacctcaacagaatggtgttgtggaaaggaaaaatagatccctagaagaaggtgcaagaacccttctaaatgaaacaaggttaccgaagt

SEQ ID NO: 180031 - DNA, 429 bp, Glycine max
  unsure (1)..(429): unsure at all n locations
ctagtttaccccctgcagaagcatctaagagctgcttttattgtggcctcaaccagtcaatgaaaatattcagctgtatgggctcagagaatccatgagtaggagttttccgcagcaagctacaaaatctttctagggctttactcaaagatttatctgggaactggtgaaaggaagagatgacagcctttccctctgcagtcttggactctgagaaatatttcttcagaaacttttccacaacttcatcccaagtcctcaagctattacctttgaatgaatgtagccacctcttggcttctccagatagtgaaaatgaaaataagttgatcctaacaacatcttctggcactccagcaattttgactgtgttacaaatttcaatgtnaagtgctagatgtgcataaggatcttcattgggcaaaccat

SEQ ID NO: 180032 - DNA, 433 bp, Glycine max
  unsure (1)..(433): unsure at all n locations
tataatgaaaggattaactacaacggnatttcttagataatctcaaaaacaaaatatcggtaaatcataagatatagaacataagtaagactctcactcaactaaggtattatcaggaattacacccatatgaacattgtgctcatgaaaaactttaagtgtcatacatctagtaagtggatcagctagcatgaaatgagtccttatatgttctatacaaatctatattttctggattctttatttaacagccaaatactttatgtcaacaaacttttactcagttgaattcttaataagaccgctaagatattgtctcaataaacacccgatgactacttaatgttggcaacaacaggcaagccagttataataatttagaaatcataaattctagtataatgtctcatagaaaaatataactccctaacat

SEQ ID NO: 180033 - DNA, 441 bp, Glycine max
  unsure (1)..(441): unsure at all n locations
tataaatatgtttacatatggcaacatatttcatctatattcatcatcggngaaaaggggaaaatgttacgaacatcataacaaaaaatttgtcacaaaataaaattaaacttatttggaatttttcaactcgttcaaatcaagggaaaattattcaatagaaggaatagagagctcactccccttattattattattattattattattttaattaaaacaagcaacacaaaatatttaataacaaataatatatatttaaaattaaattgggatgttacatgccatccttaagaaactaaccattgtctccttgtcaacagatttcggacgtggtctttcataaagcattatatccactgtttcttaggttatgtcctcccggtctttatcgaactccaataccttctccaaacaattcacttcagcagtaatggtttt

SEQ ID NO: 180034 - DNA, 272 bp, Glycine max
aactaagctttgcgcctggagtaatgccacagcacgagtgtgttgctttttttaagcacgaaacagtagcatcctactatatgctacacacaaccatctaaatgaagcccctgtctgattgcagcgcaccatgggtcactcaggagtgaaggtcacaacacatgccatctctccttcatgctggacatgtctcatgatcgaaccacattatgcctgctcaggactgctgactgtgaagaccgattttcatagcacctacgatactcatgaca

SEQ ID NO: 180035 - DNA, 357 bp, Glycine max
ccttaaactaactgcttgaatgcaaacccactctcgattttttcctgcatcgaacaacaactacggacagacatatcgtgtggtgaacctcacccactcaaggatacacaatatggctctcttaagaacactctgcctttaccactctatcccctgatcttagcattaagaatatggcacacaaaacatcaccaatatgtgaaagaaggtagacaagaaagtaaccaaaaaaggctacaatgtttttagcacaagaagaaataaatcagaattagaatcagtacaatcttcatgcaccatatataccttaaagttttttttaatcttaacatgaccatccccaatttttaaaaattt

SEQ ID NO: 180036 - DNA, 448 bp, Glycine max
  unsure (1)..(448): unsure at all n locations
tgatgataaactntgttgtgagagctaaaagaaacttttgttaaattattgaaacttgatggctaaccaaatactgaacttagtctgaatggtagacacaaaccaatataaatatgtgtcttactttctttttagatatcttttgtcttaaactgacatagtgtttgaatttgatcttgtttgaaaaacatattctattttttaaaatatgtttccatcagttaaacttgcttttgcgcaaatttgttatctctttttattaagttatacttcaaatgataactttagttttcacgaaaaaagacttaagaaaattctaaaattacaatttaaccccttacgatatttctatatgtagttactctttttaagactatacttttgatcacttaatcacattgaaattcatagtctattaaatttattattaaataacctaattattgca

SEQ ID NO: 180037 - DNA, 446 bp, Glycine max
  unsure (1)..(446): unsure at all n locations
actaagctcgctctcgagctanggtttaccctcaagattctttgtctgggaaggcagatcccatgaagtgaggctgagttgctacccaaaagtgtggctgctaatgagtcgcattcaggggaagctgctgcttgtgcaacatcttctgtgccatccgaggatacaacttccacaaaaaagcctaagctgggtttgggctagggacttgcaaagtatgagaagaagaaagtcgaggtgcctgatgcaagtgcaaacaaggaaggtcctgtcttgtctactatcaacacggaaccttgtcatcttctcattacgatcggagttgataaaagcccaaaactttgaggattctcagaatgtgcatctcctgcaactccatcttgtgctgactgcaggtgctcaccatgaatgttgcgacactgttctttaaataatctgtggtgaaagag

SEQ ID NO: 180038 - DNA, 225 bp, Glycine max
acagcacgaacaaaacaacaggaaacgacacacatgggcaaaatgcgcacgaataccacactgcacataacccaacaaaaaatcggagaggaggtgcggggcacacaccaaaggatatcgccgggaaaggcacacccggccccagagatgacacacctatactagagagtccggcaattccaagcaaaacctacatactacaaagtacagacggaacaccccaac

SEQ ID NO: 180039 - DNA, 463 bp, Glycine max
gacctataaaactcagcttttatccaagcaattcttgtgggtgaagcttcttcttccttggcttattccctccctagatgatggagcctcccctctcctcttctcctttgccttctgctgcatctccatggtgtaaaatcaccattgaaggacctcattgaagctcaaagatccagcctccatagaagcccccacaagcaagcttccatcagtaacctttgttgttcttttcggaacccatctatatctcccatttggaattccatatctcctaatcacacgagttttagaggaatggcccttatgcatgcaatagtgacatgttgtgaaagggttgctagatgttttgacaaagttgaagatatttttaaaagacttttgtttcttgttaaatataaagccaattccctctttgataaacatgcacttttgttgtgcaaaaaatgcatctagattatctctt

SEQ ID NO: 180040 - DNA, 441 bp, Glycine max
  unsure (1)..(441): unsure at all n locations
taacaaacttagaaatcaagtgatcatgtattccgaatatattgggagaaaacggatgcacattttatctatatacagttgtttgttgtttgcttgaatcttgatttcaggtattgtattgtcatcatcaaaaagggggagattgtagatgcaattggctttgatgttttgatgatgatcatgatgatgtgttgcaattgatgcanatgggcctttcaagattaaaattcaagacaatacttcaagattacaagtcacaacatcaagatgatcactagaatattaggaagggaattcctaattgaattaccaaaggtttggccaagtgatttaaaataaaaagtgtttttcaaaggttttactctctggtaatcgattaccagaggatgtaatcgattaccagtggccaaatactttttataacagctataaaaatttgaa

SEQ ID NO: 180041 - DNA, 425 bp, Glycine max
  unsure (1)..(425): unsure at all n locations
taacgcccatcaccattgaatccgaaagttctgcgttgtttataaagaaatcgacaganaaacacaaaaggagtgtattaggtaaaaaacgggggagtaaatagcaatttttaaatctagacccttccagaacatttttgaagttgggttgcttatggtggaagcaaccaaactcgcctgggtgagctaagcttgcctaggcgagctaggcggcaacctcctcccccgttttgttgaaaaatggcttctggggcttccgtaatgcttccgtaaaatttttgaaaactctgggtaagcatatttcacttaggattggtaaaagggaagagaaaaaagaggaaaataaagttcaaaatgcttccataacttttccgtaaagtacgaaaggggggtgaacttagntaattgggggtgcatccggaaac

SEQ ID NO: 180042 - DNA, 439 bp, Glycine max
tctcccccaattttctataaatagggggagaagtgatttataaaagggttcagcccctttggcacttctctttctttcgaatttgcttaggaaaattgttttcgtgaagaaaatccaagcggaggcgcttccgtaacgtttccgtaacgtttccgtgagtgatttcgcgaaggttttcgaccgttcttcgacgttcttcatcgttcttcagtcttcaacgggtaagtacctcaaaccaagcttttcgattcattctatgtacccgtggtggtccacatttggtttcatgcatttttatttaagccattttatttaagtcatttctcgcttaacctaaaaataaaataaatttccaccgatcgtttgaattgtattatccgttaactttggttgaaatgaattccgactgatcggtcgtgccgcaaccacgttggaaacc

SEQ ID NO: 180043 - DNA, 441 bp, Glycine max
  unsure (1)..(441): unsure at all n locations
tcttttggaccttgaacaggcaactaactcctctttcttaaccctgctatgngctcgcgactggtccctttcttcctttcgcaacttgagttcactattgctaccccatagagctccgcgaaatttgttccggccatactcttccttgcgagccctcttggtctcttgttcaagggctcttgcggtaattgcattctcttcccgtaacccggcacactccttccgaacgtgtgtagcggccaacttgaacttctccttggcaagttttgcctttcctaactcgcttttgagagcttggacttcttcgtcctcttccggtgcttcaaaactctctttgctgacgacttttaacttggcgagccaatctaaacctcgtatatgaactttcagccattcgtggtacccaccaatgatgccattacgaatgcctctaagctcttg

SEQ ID NO: 180044 - DNA, 453 bp, Glycine max
  unsure (1)..(453): unsure at all n locations
atactcaagcttgccgccacggagtnttccaactatgctcttgggnggtggatcagtctttanaggagagagcaagaaatgaagagccattggtcgatacatggacggagatgaaaaagatcgtgaggaagcggtatgtgccggctagttactcaagggacttgaaattcaagctccaaaaactaacccaaggcaacaagggggttgaggagtatttcaaggaaatggatgtgctcatgattcaagcaaatattgaagaagatgaggaggtaactatggctcgatttcttaatggtttgactaatgatatccgtgatattgctgagctgcaggagtttgttgaaatggatgatttgcttcacaaagcaatccaagtggagcatcaattaaaaaggaagggagtggctaagatgagttttgccaactcttgattcttctggttggaaagacaaa

SEQ ID NO: 180045 - DNA, 362 bp, Glycine max
atgtgcttgaaaaccttgtcgctatccttaacgcgcaatcttcagaagatccacaaagtgatcaagccttagaagctataaatcaggaggcacgaatccataattcaacttatctgacgatgcaactatgataggatactttataaagaaaaaaaaaacatactctcagtgtaggaacctacaaaaggacctactaataaaaatcattaaactagaaacaatctcaactagaggcgatccgaaaactaataattaatatgtggacaataccattcctgtcaacatatgggatagcttgcagggatctatactatcaatgtatgaactaagccgacactcagcatataatacgcagacattat

SEQ ID NO: 180046 - DNA, 451 bp, Glycine max
  unsure (1)..(451): unsure at all n locations
aaactaagcttagtcaacaaatattcaaaatgtaaagaattgtgtgttgtttagcataacaagactttctgtgattggtttaaagatacaatctttgcagatgagaatgcttcanaaacattaagaaagcaagcagatgggcctaaaagaaatgttataacctggcaaggatacgacataaataggtattcattttacacaaaagcacaagatgacaaaagtacaatgcagaacagcggggtcaccctaagggctgaatctcaacactttgcaagtgtcaatgatgccaatccctgtgtagcttccatcccttactttgggttcattgatgaaatttgggagcttaattatgtgaaatttacagtatgcgttttcaaatgtaaatgggttgacagcaacaccagtgtgcgcaccgatgatataggatntaccctggtagatctaaagaaac

SEQ ID NO: 180047 - DNA, 428 bp, Glycine max
  unsure (1)..(428): unsure at all n locations
nttaatntcatttagtccctatctcatggaggaggtggtctttcttttatttgtctattggaatggaagtgttgttctgggtaacattcatttttcttgttttcccttgtgatcttttggggccactaagaccttcttcttcctcacacatatcccactgacactgcaggtgcaaaagaagcgcatgcagttaccccacattttgcacagatgctttattttagtctggtttctgtattggctcaggctcctatgcacttcactatcactcaagctgtggacctgtttcagatgtttcggaagagtatgccccttcttactttcagatgtttctggccctcgttgttgcctgctatcagtacactttttcaggtgatgtcagactcagatgactacgtaaactagctaccacaatctgtattttgatt

SEQ ID NO: 180048 - DNA, 453 bp, Glycine max
  unsure (1)..(453): unsure at all n locations
cgcatttggaattgcgaaagccccactccatcattatgttttattccatccatctcaaacaaacaaatcaaacgtaacaagacaattatagttgttgtttgaatacctcacccactcaagtgtatcacacaattatggcttttctctaatgaaacactcttgccttttaccactctaattccccttgagttcttaggcaattcaagagattatggccacaacaaagaacaattcaccaatatgtctaaggtaaggctagagatacaaggaaaaggttaaacaagaaaaaggctaaccaagaaaaaggctaacaatgtttttaggcacaaatgaaggaaataaaattcagaatttaggaattcaagtaacaatccttcatgcaaccaatatattaccttaaagagattnttttttaagttcttcaagcatgaaccattcaaccctttttttttg

SEQ ID NO: 180049 - DNA, 444 bp, Glycine max
  unsure (1)..(444): unsure at all n locations
ctaagcttaacttaattaggggataaaatgaatgggtcaaattattccaacttgacattngacaaagttagtaggttaaaattctttatccatcccaaccccattaggtgggttacatgggacgatctcccgggtcaatcatgttttaacatctagacaagtatagacataaatattttagtactttaccaatttttatccttatgttatttatcttattttattttagtgatgagagtagataacataaatatatggaactatatatatttgaatcctattcaaatttccattggttcactcaccaagagaagtgtaaggaaaaacttaaatacactgcttggaccgcagctttggactagatcgatattaaccattatgcatttcagcaccttggcctttccatgagatatatatntgaatcctattcaatcccgtggcaca

SEQ ID NO: 180050 - DNA, 442 bp, Glycine max
  unsure (1)..(442): unsure at all n locations
tctatataagctgaaccattttatcaataaacacttgttgagttttattaaaaaaaattagagtttatctcttttatcttagtgagagtgattctcctaagttcttgagtgattcaagaacaccctggctatatcaaaggtctttcacattctttgtatgttgccctcgtcggaaagagtgattttttccttccaccattttatcttcaaccttgttccttcaaaccacaatttccagaaaatccaattctgcccagaattatctcgtgaccataactttcgttttactcgttcaaattaagtgactctcgagccaaaattaaaactcataacgagaccgttcacctcgtnttggaatcacctcatttggagccctatagcttgagttataatcatntctatatttctgttcatccaccacttaacctacattgttaccatc

SEQ ID NO: 180051 - DNA, 394 bp, Glycine max
  unsure (1)..(394): unsure at all n locations
ttgtctatctgcacatgtgtccccggaacaagatctttttttatacctaggtgattaaggaaagctatatcctgcagtcctcagaattagaaaacaagttataatgcatagtactgcataaccatagctaagtaatgtactatcaaagataataatcggaagcaatcatgcaaattgtgaagttaaaatatgaaagacgtgcgtgccttgagaatgggatccaagaaaggaccagaaacaatttcaccggaaataatgataacaaaggtgctaccacgataggcccacaagtaaggccaggcctcgcgaaacgaacgcacgaattgcttatcctccatcgtcccgtggtagctctctccatcttggctcaacgcatnaagcttctttcggtaac

SEQ ID NO: 180052 - DNA, 444 bp, Glycine max
  unsure (1)..(444): unsure at all n locations
tctaaccattntattggtgaaggagaaatgttatcttatgattacatgtccaacaaaaagcttggactaccttnnttatttttggaccccttcctatttattctaaacattttttagaatcttcttatttcttatttttttgtttgcagaagtaatggagactgcaactactatgctaaatatgtgtgtgtttgactagctgaaataaaaaggaactcactagattggcaaaagtgtttcaacattgttagtggtattgctcgaggacttctatatcttcatcaagactctaggctaaggattattcatagagatctaaaaactagcaacattttactagatgcaaatttggatcccaaaatattagaccttggcttgactagatcgattttgggagatcaagttgaggcatatacaaatagggtggctggaacatagtaagct

SEQ ID NO: 180053 - DNA, 400 bp, Glycine max
  unsure (1)..(400): unsure at all n locations
actaagctgacaatcttccggagtgagatgaaagtgangtangtattccaaactgcccggcgattgacaaccaacaatgcgaggaagaatttcaccagaaaaatggattacaacccacaagaagagctgattctattcgtaccaaacacgatactcactgggactttattgaatgcgatcttaaccgaagcatattaggagaaattgaggataatgatgtaccttaagatgatgactatgaataacagatcccacctgtgaatccaaagaaggagttctttgcattcacttctgaaaattgttgcgtgaacattttgaagaactgccatgacgatggcacggtaggaggaagggagtcatgcggaaccacaaaaagctggttgactagcttgatacattt

SEQ ID NO: 180054 - DNA, 300 bp, Glycine max
caacaaaacaatctagtctacaatacagtgaaagtcactcattgaaaataaatcaaattaaaagacacacgtaataacccttaataaaggtgaaaaaaaactccctcaactaaattaaggacgctagaatcgaataatagaaatgtggaaggaaaatcaggctctcctcaataacctcagatatataacatggcccaagagtaccaatacaagattaatgacattagccccgacgtggatttttcatattatgacttacacgttaattattaagtaaaacgaaacattgtgatccctcac

SEQ ID NO: 180055 - DNA, 445 bp, Glycine max
tataagaaacaaaatgccttaatcatttccaaatatgtatgtgaattaggacgcatcaacaagaatcaagccaaggctattgtgcaagcaatcaatggggcaaaacacaccaaatgattataatgatggatggctcaaattctcacaaaggtaaaatcattactttcaaattgagctttcaaaactatcatgacatgtagagaagaatcaaggatttcaagtcacaaaatgtcaagaacttttattttcaaaacaattacccatttcttgaacatatcctataattcaaagaaaaacatgcaaagttgtacgtgcacacaaaattgacccaaaatattaaactaaaaatccgacgaaactaacaacattaacaaattaacacaactaacaaattaacaaaaccaacaaaactagcaaaaccaaagaacactccccccccccccat

SEQ ID NO: 180056 - DNA, 395 bp, Glycine max
cccgctccaaagaatgggtatctataactaaaacatatatatctatcttaactcaaccaatgttggagctgggcctctacagcagaggcacctagaagaattaagttcttctcaatctttggcgactcttgctcactcagtatatgctgatcagcactaactaaattctgtgccatagagaatctattatcaaactccttgtatacttctgcgtcaagttcacgatacgctagtataacggttcgtatacgtgcatcagcatactcatgcacatgctccatggatttctgttcaaactccctcccattcttggcaagactatcaaacatgatgctgcgtgaaagcatcactcactacggtgaaacacacaatcaatgttgaaatcaaaaccattt

SEQ ID NO: 180057 - DNA, 451 bp, Glycine max
  unsure (1)..(451): unsure at all n locations
tataagaacaaaattgcttcaatcatttacaaatatgcttgttatttangaagcatcaacaagaatcaagccaaggctattgtgcaagcaatcaatggggcaaaacacaccaaatgattatgatgatggatggctcaaattctcacaaaggtaaactcatcacttccaaattgagctttcaaaactatcatgacatgtagaggagaatcaatgatttcaagtcacaaaatgtcaaaaacttttattttcaaaacaattacccatttcttgaacatatcctataattcaaagaaaaacatgcaaagtcgtacatgcacacaaaattgacccaaaatattaaactaaaaattcgacgaaactaacaacattaacaaattaacacaactaacaacttaacaaaaccaacaaaactagcaaaaccaaagaacactccccctctatacttaaacaa

SEQ ID NO: 180058 - DNA, 450 bp, Glycine max
  unsure (1)..(450): unsure at all n locations
tgcaaatcgaagatacagaccatggcaatatgcatgagttatgtgaggtacatactgagcaatctcagcggggtgatataattaatgatgaaagcgatattgttaatgatatagatttgattgagtttaagtcatatatattagtggatatgcacattgctataccagggttaacaaatagttgtagtatatatatatatggctctattttgttacacgagtaaaatgatagaccttnttacaaattattaggtgacaattaataaaaacaaatgggtctgaatgattgtaatataagtgacaacaaaaacaaatgtcatttaaaaaaaacaacacattctaagacaattctatcgaaaaccgtcttagaatgtaacacattcaaaaacggttacaaaactgtcttcgaatgtgttatattttaagatgattctaaggaaatgtcgtgga

SEQ ID NO: 180059 - DNA, 399 bp, Glycine max
caatgccaggaacatctcagggtttgaaaggttactacttagtggttaaagggagccctatttctaaggagcacttacctgacaaattaagctacattccaaggttggatgttctatttgctatttatttcagccctacaatacaaattagtacgctttaatttttccaacttttgtaagcaaagtgtatccatccaccaatttaaagattcaaaagtatctatctttctatgcatataatggtttatacccttattattttaatagaattggatgaagctatagagttgtttgaagaactcgacagccacaacaatggtccatgtgtatagccttataataccatgatatgggatatgtttcagtggggaattttaatgatgcatgcaacttacttga

SEQ ID NO: 180060 - DNA, 440 bp, Glycine max
  unsure (1)..(440): unsure at all n locations
taccccatgttgaatatgcttacaatagtatctgtttatttctccaacaanngctctccttttgaagtggtttatggttttaacccactaactcctcttatcttttgcctatgcctaatgtttatgtttttaagcataaagaaggtcaagcaaaaggcggactatgtgaagaagcttcatgagagagtcaaagatcaaattgtgagaaaaaataaaagctatgctaaacaagccaacaaagggagaaagaaggttgtcttcgaacccagagattgggtttgggtgcacatgagaaaagaaaggtttcgaaacaaaggaaatcaaagcttcaaccaaggggagatggaccatttcaagtgcttgaaagaatcaatgacaatgcttacaaagttgagctgcccggtgagtataatgttagttcaaccttcaatgtctttgac

SEQ ID NO: 180061 - DNA, 447 bp, Glycine max
  unsure (1)..(447): unsure at all n locations
tgtagaatggctagacatgatacatgtcaaggtttgttttggttcacggataaaagggatgccccacattatttccatgacacaaatgcaaaaatgatgatttggaaactttatgcaaaactggtcatgcatgcacctatgtggacactcaagtgtcaaatttttatggtcatgtgatgctagggctcaagattcatntcctctattttagtcaacccaacgtttccaaaatatgttcttttatcaatttgtgcattcatccgagtccattttgggcgtctgggaaaatcttcacagcattcacccttcaggtgtatacacattttttcaaaaactagttatgatcagtgaattttctcaaagaanagttggaagtcatctcttttcaaaagcatgttgtgttctcagcttgacaactcaatttcctttattctcctttatttttca

SEQ ID NO: 180062 - DNA, 440 bp, Glycine max
ccacagcaacacataatctatgtgtccaatattcttcttttcaatggcttttctaggtatgaaaggtggaatttataatgaggtaaatttggagcaaattctcacctcacacaagtctataacatcaatctaaacttgctcaaactggatttacacctaaatttccaccgaatcaaaatttgactcctcaacacccaattttgccctagaaatggctcttggttcactttggtcatttgtttatctctctagctcaacctaacctttctcacatgtcctaaatgacatttcaagctagtattaactcactttaacctccatttaccacagaattcagacttagtcttccaactctcaaggtctcactctttttccactcataacatcacattctcactatctaaccctacgttagatctacccttcatctctaacagttt

SEQ ID NO: 180063 - DNA, 442 bp, Glycine max
caaactacgcttatccgagatccctcttgaagagaggcctagattatcatcattattataacaacataattgaaaccaaaacttaatctgcagatccctcttgtaagactaagttttgatcctgcttcaatcaagttctaaggcaacagtacatttcccaatgctacctaactatgcacacaaattgatgatcagaccaaaagtatacaaacattaagcattgaaggaagcattgaacacagaaaacataatcaattagatattaggtatttacattagctattcattagaaatccccaactagggtgtttagccagccattacagaagaaaccctaacaataataaacttacaaaacctaggtatctctacaaaagttgctcctcttgctgcctctagagctcttttcccgaaataggcattgtggtgtgctctggaatct

SEQ ID NO: 180064 - DNA, 435 bp, Glycine max
tagtattataggtcttcttcttcaagtgttctttgtctctaaatgaatataattcttctcttgagctaatgtctaatgtttatggtcgttggagcatttaatgcttacattaaatgcatgtattttttcatgttgaaacaccattctggttggcttttgtgttgagcactatagtagaaaccacttcctttgactaaaggaaaatatcacaagaaggggtattgaattgcgattttatatttttttttttttaaatccttttcacaatcaaaccaagttttcctccgaaagaaaaactttgtaaaatagataacaaattttcaaaaacacaatcaaatgatgaaagatgattctgccaagccaaagatattttcaaatgtataaatgagaattcaaaccctaggtcaattaatgcaaataaaaaaaaaaaagatc

SEQ ID NO: 180065 - DNA, 435 bp, Glycine max
  unsure (1)..(435): unsure at all n locations
gaagcaagaaatctatctatggagggttgaatatcttttattaattcagncttaacagccttacccatctatttgctctccttcttcaagattcctaaacatgtggtgcaaaagaatacatctattcaaaggaattttttatggggaagtcaccaagactccatcaagattccttgggtgaggtgggacacatattgcctacctaagagtaaaggggggttagggatcaaagatttgactaaatttaatgaggctttgcttgccaaatgggagtgggagttggcaaataatcagaatcaattctggaccagaattctattgtccaaatatggtggatggaaggaattgatttctggtaagaactgcagtgtagcttctccttggtggaaagatctcaatgttgtcttcaagcatcagccaagcaacacaatctgc

SEQ ID NO: 180066 - DNA, 449 bp, Glycine max
  unsure (1)..(449): unsure at all n locations
tctatataagctgaaccattttatcaataaacacaagttgttttttattcagaaaattagagtttatctcttttatcttagtgagagtgattctcctaaattcttgagtgattcaagaacaccttggctgtatcaaaggactttcacaacctttgtgcgttgccctcgctggaaagagtgattctttccttcctttcatcatcacccttgttctttcaaaccacaattccagaaaatccacctctgcccagaattatctcgtggccataactcccattntatgcactcaaattaagtgattctttaaattgaaattcaaaacgagacctttcacctcgttttggaatcacctcatttggagccctgtagcttcagttattgccatttctatatttctgtccagccaccacttaacctacgttttaccatcccattcatccattntatgc

SEQ ID NO: 180067 - DNA, 383 bp, Glycine max
  unsure (1)..(383): unsure at all n locations
tagnaattgaaaaaatgaaattgtagtnantntaatatttgggaaanttttgtattattaanantgggatattttgnaataatggatnattagacttaagtgtttntnngaagaanaatttaatttttcatanttggatgaagtattnattggatgttggataagatgtacataaaaaaaattgaaataagataattaaattataaatataaatgtgaaagtatttattataattatgaagtttgaaaaaatataantgaagataaattagtgatnttataaaatggnttaaaaaatttaaaaaatttttaagttgttttgnattnnttattagatggataanatttgtattttgtattatgaatagtgaaannttgaaaagt

SEQ ID NO: 180068 - DNA, 392 bp, Glycine max
aatgtacaagctgaagtcgtctataagctttcatgagttttatttggaaaactccttcacgtttgcttcctgattaaacatgtaagacatgttttctgtggatgctccaatgttggtaaaccaaccaccatttccttgcaagacagcgtgttcaaagccttataattaaggtgtccacaacggaagtgccatatgtatgcttctttggctgagatagttatctttttgcaaacaaaaggactgttttggatgcataaaggctgcctcatagaacattctattcccgctcatatcagtttgtataattaatcctttcctgggatggaatactttgcacgagccatttgaaaccagaatggctaaacctttctcttgcagttgtcttatactta

SEQ ID NO: 180069 - DNA, 426 bp, Glycine max
  unsure (1)..(426): unsure at all n locations
ttgggatgattttagagaaggattctctttgctgcctcggacnngaaaggaacccttgggactctgtgtgagcgactgatgtaggatttaccctactgtgacaactgcctttgcgcatctttcacgagcttctagtcgaatgagatttctttataaatgtgcaattgcgaacctcataattctttattttacaatcacacgcgagtgcgcattgcattgctgtttaagcaagaaattggtataataacgttctttaagcctatgtatagaaaacattaaaagctatgaatatatgatgcttagcgagtaaaatatggccaaataaagcgggatcattgatgaagtttggattattaaggaaaacatatattttatggaaggcatactacttaaggagtgtaaatgcgggtttaaagaagctcgctt

SEQ ID NO: 180070 - DNA, 448 bp, Glycine max
tgaaggtaaactagatgcttagttaacctggtaaccctgctttcgttgaatcagaaatctatacctgtcgcaaaagtctatggtttatgctcctctgccgaccaccacacagatcttttcccttccatgcagcaacctggagcaattgagcagcttgaagcttatgctgcaaacatttacaacagacctcctcaacctcagcagcaaaatcaaccacagcagaacaattatgacctctccagcaacagatacaatcccggatggaggaatcaccctaatctcagatggtctagccctcaacaacaacaacagcagcctgctccttcctttcaaaatgatgctggcctaagcaagccatacattcctccaccaatccaacaacagcaacagccccagaaacaacaaacagttgaggctcctccgcaaccttccctcgaagaacttgtga

SEQ ID NO: 180071 - DNA, 445 bp, Glycine max
tcacaccacagcaacacaaaatctaggtgtccttttctcctcaattcaatgggttttctaggtttgaaaagtgaaatctagaatgaggtaaatttgaggcaaactctcacctcacaccattccataacatccatttagactagttcaaactggatttacacgtaaaatctcaccgaatcaaaatttgactcttcaacacccaaatttgccctagcaatggctctttgttcactttggtcatttgtttttctctctagctcagcctaacctttctcacatgttctaaatgacatttcaagctagtattaactcactctaacctccatttaccacagaattcagacttagccttccaactctcaaagtctcactctttttccactcataacatcacattctcactttctaaccttgggttagttctacccttcatctctaacagatt

SEQ ID NO: 180072 - DNA, 447 bp, Glycine max
  unsure (1)..(447): unsure at all n locations
ntgcgctggcccaaatcccacactttgcttgaggggtgttgatangaaagaaaatatttgattgaataattaatttagtctttatatcattcatttattcattccttgattatagcctctagattgatttagtcattccttaatcgtaggttctagattttctgtaatctctatttattatatgcttgctattctctaatgctatcagaagaataattataccaatccttacagtaataaattatttataaatttctttgaaattatttttttaggaattggaatagtttttatatttttaaaaataattattttaaatttatattttttatattttatctattcttttattattaaagcacttttatattgattaaatttattttacatttatttataataatatatatgtgattttcttaccaaataatggttatttggaaagag

SEQ ID NO: 180073 - DNA, 447 bp, Glycine max
  unsure (1)..(447): unsure at all n locations
tganatcagatntgcaaagggagtgtggcacttttcttgttatgctctgcatgcatgaaggttctagagagagaaaggtccaagttccaaagagttttgagagattttgttgtgtgaagatctgcggagacgggagttcaaagaggaagctattttgagagcttgagatgagtttgtgagtgaatgtgagatcctagaggtgaaggagacatcctcaccacttgtgttttgcagtctttcatcttgttcttctctttgttgtaaaggaggtttctggactatggaaagctaaatcctctgttggatcttccctataggtatctgatgtaaatatatttctatctatgtaatgatgttttgtgtgttctctgtgctatctgtttttcattccagtgtgcttttaccttgatcacatagatgcatgctttgttagggtcattcaacagt

SEQ ID NO: 180074 - DNA, 440 bp, Glycine max
  unsure (1)..(440): unsure at all n locations
taacagtatcatgtgctccattgacgtgagatgtgcttttcttctcatcaaattntgactgggccccaagttcacaaccaaaatacttggtcgtgtaagacgcaggccttgccaatgccttggcaatatcaaccatattgacaacattagttttgatgccgttacctctgccctcaattttggtaatcatcctaggcatcttatacctgtagaaggcatcatcactgtttgcagcaccaatgttctgtaaagccatgttgacttacaaagtttcagagatattcagatgcagcaaatgccagaattcaaattatacgcagccgcaatttcagcctctaaggtagcttgtgcccttgaagaatctccctcaagtataatggaaggtggccaaccgcaaccagaaaactgaatgaatttctgatatgtctcgcaatgcatac

SEQ ID NO: 180075 - DNA, 444 bp, Glycine max
  unsure (1)..(444): unsure at all n locations
tagaanagatgaaacggacaaagtaccattctcttntattgcttacaaagtaaagaaacgtatgatataaatcttacggagttgccattgatatatatcttttctcaaaaaaggtgatcaagtaatacacttagagcaaatactgaatgacactcgcatagaagagaatgttgtatttataggacataattaaatttgtactgttaagcttgaagtcgcaagcagtgacgatatttctacacaagtgggggcggcaccaagcattaggtacgtttgagatttgagagtctggcggctaatagctattcaaagattctcatgaatgcgtagccgtatctgaaggaagaggtgcaaaattattntatgttaattgcaaataattctcattaagcaacaaatcttgcttaaagcggtgttgctcatattgcaatttgagaagtctat

SEQ ID NO: 180076 - DNA, 444 bp, Glycine max
  unsure (1)..(444): unsure at all n locations
ngaagcagtaatggntgccatggacggagaagctcttgttgtgttttatgatgggaatcttgaaacccaaaccattcttgggaagggttcaagattgcaatctcccaaaggtttcaagtgtctaacctaaggaatccttttcaggcattgcagccgctgaaacaggaagaaacaatgcaagaattcacaggccaattccagaagtacgtccgaaaggtgaaggggtaggaggaatcgtttctggtggaggtgtttctcaaggggctaaaagaagaaatcggcactgaggtaacgcttcatgaaccaaaaaatttgatggaatctatggtcaaggctcgtacggtggaagataagaatcgagtcttatggaagttacccatgagtaatagtaaggggtataattttcagaaacccagttattcggatcaaagatttgtaagggat

SEQ ID NO: 180077 - DNA, 438 bp, Glycine max
aagtctcacgattgtcacgtgctcatgctcttattgttagccgggctatacgagacatcttgccaaacaaagtcaggttcacgataactcacctgtgctttttcttccatgctatatgtagcaaagtgattgatcaagtaatgtttaatgagttggaaaatgaggccgcaattatactctgccagttggagatgtattttccccctgctttctttgacatcatgattcacttgattgtgcatctggtcagagaaatcaaatgttgtggtcctgtttatctacggtggatgtacccggttgagcgatacatgaagatcttaaaagggtatacaaagaatctatatcgtccggaagcatctattgttgagaggtacattgcagaagaagccattgaattttgttcagaatacttagagaaggctaaagttgttgggcttc

SEQ ID NO: 180078 - DNA, 469 bp, Glycine max
  unsure (1)..(469): unsure at all n locations
acctataaaactcagcttcttataagctgaaccattttatcaataaacacatgttgatttntattcagaaaattagagtttatctcttttatcttagtgagagtgattctcctaaattcttgagtgattcaagaacaccttggctgtatcaaaggactttcacaacctttgtgtgttgccctcgctggaaagagtgattctttccttcctttcatcatcacccttgttctttcaaaccacaattccagaaaatccacctctgcccagaattatctcgtggccataacttccattttacgcactcaaattaagtgattcttgagcctaaattgaatttcaaaacgagacctttcacctcgttttggaatcacctcatttggagccctgtagcttcagttattgccatttctatatttctgtccagccaccacttaacctacgttntaccatcccattcatccattttatg

SEQ ID NO: 180079 - DNA, 451 bp, Glycine max
  unsure (1)..(451): unsure at all n locations
tcatgatgatgaatcaagtagatcaagaagcttgatttattcattgatattgacaaaaagcccaaagaatgatttcaagattaaatcaagaacaaattcaagaatcaagagaagtttgatttcaagattcgagaaaagatgaagacttcacaagggaagtattgaaaagatttttcaaaaaacaaacatagcacagttttgtttttcaaaagagntttcacaaaattttctaagttaccagagtttttactctatggtaatcgattaccagtttcgtgtaatcgattaccagtggcaaagtttgatttccaaagtttctaactgaatttacaacgttccaattgatttcaaaatggtgtaatcgattacaagatattggtaatcgattactagtgtatctgaacgttggaattcanattcaattgtgaagagtcacatactttcataaaaa

SEQ ID NO: 180080 - DNA, 448 bp, Glycine max
tgcttgtggagcttctatggaggctggatctttgagtttctatgaggtcctttaatggtggttttccaccatggagatgcagcagaagacaaaggagaagaggtgagaggaggcgccattcactagggaataagccatggaagaaggagcttcaccaccaagatgagccttggataagaaagcttggagaggatgcttcaatggaggaaaagaaagagagaaggggggagcacgaaattgaaggaataaaagaggaagagaagtggaactttgaagtgtgtctcataagactttcattcatcaaagttacaacaagtgttacacatgcttctatttataaactaggtagcttccttgagaagctttcttaagaaaacttccttgagaagcttctttgagaaaacttccttgagaagctagagcttagctacacacacccctctcataa

SEQ ID NO: 180081 - DNA, 433 bp, Glycine max
tagtgaatcatccatgtgacttgacattcttgctaagtgatctatctcgatgtgcatcatccttttcatgaacttatgacaactgtgaacttgagaattggccaattattcttttttggaatgtatgcaattatcttatgtattgagatgtaattagctacttttccttgaggacaaacaaagctttaaatttgagggaatttgataacgactataggtatatttttggattaaatcatataggaattgttaattattctctcatatttcttcatttttatgtaaataatggaaatttaacatcaattaagattttatgtagaaagtagtcgaatttgtgaattcacaagtgcttggcgaataattgtcatagaaaaacaaaagaatgtccgagaaagcaaattgaagatatgaatctccatgctcagtgcgt

SEQ ID NO: 180082 - DNA, 379 bp, Glycine max
tatatcacaatttatgagctagttcgcttaagcctattttttaaaataattattatctctaaataaaataaacaatcttatgattttcttatatgtttgcctaaattattttacttaacatacatcatttttgttccttttcaataagcaaatcttatctgcttattaaaaataatttattttaaagttattttttaaaatttaaaaaaaactcatcctatatataagatgatgtgtttataaatctaaataaattaataaatctatcatctgaaaaatttaaatacttaatgcaataattatttatcactattattcaactaggtggtggtggtaacgttataaagccctttacataacataatgtctagccttttga

SEQ ID NO: 180083 - DNA, 439 bp, Glycine max
  unsure (1)..(439): unsure at all n locations
tccttttagtgcgtcacgtttaaaaccgagctctatgttgttgcgagcctttgatggtactcggcgggaagtgatgggggaaatcgacattcccattcagataggcccccacacttgcaatgtggtgtttcaagtaatggatataaatcctgcctatagctgcctcttgggaagaccttggattcatgccctgngagtggtcccttcaacgcttcaccagaaattgaagctcgcagtgggtggagttttagtgatagtgtcgggtgaagaggatatgttagtgagctgcccctcctctgccccatacgtagaagcggcggaagaatcattggaaacggctttccaatccttcgaggtggtgagctgcgcctctgtggaaccaagtccgttgctaccttctctctccaacgcggccataatggtggcgcgtgttatgctc

SEQ ID NO: 180084 - DNA, 391 bp, Glycine max
  unsure (1)..(391): unsure at all n locations
ttattcnctagataacaattggaaacaactttcattcgaagtgattgctacattgcaacctctatcgtgacaaacttatgagtttcatgagttatatgtctaaatatacactaaaagtgtttattactcaccagtaatccttacaagaacattctccattttcaaaatggtggaatctattgcgatctctaaccacaatttttcgcctagtaatctttgctatgagcttgatcattgcgtggcaatcatcgcatatccttaaatttttcccaactctaagtgttgtgtaagcttcagttgagactagtccgtagcatattgcaagtctctcactatgcacagccaaagccaattccttttgttcatcatcaatatcatgtaaagccacctc

SEQ ID NO: 180085 - DNA, 438 bp, Glycine max
cgcgtatcgttagtcaagaatgatgcatctaaatacataattttttgatacatcttgagtagaaagatttatgggtagacaggttatgcactgcgaaaactaatatgaatggtatgataccaagagtagttgataatatattatgtaatcttttttacactctaacgtgtatagaagctatatcgaagactattacactatcaaataataaaataacaccttatttataacttttaaaattattatcataaaagtaaatgattttcagtaatggaagaatgattttcatccatgcacgattggttgataggataaattatgctgcgagtatatgctaactgaattatataaaatgcttggtctcaaaatatagccattgctttcattttattataccttcgattgtggtgtgattcgcttgtgctaacagaggtataa

SEQ ID NO: 180086 - DNA, 444 bp, Glycine max
  unsure (1)..(444): unsure at all n locations
tagcgccagcaggcacttagcccaacttgacnattggttcataatcgcattagggagattggcttgctaagccttattctgaaacagagaagaaattacgcttagcgagcatgactcgcttagcgcatgaacagaatttaagaaaacaaaattgccttgggcttagcgagactgactcgcttagcccaggcttattcaagctaaagaagcatggtggcttaacgagactgactcgcttagccgccaatagaataccaaaagcctcaaacattctgacctaactaaactaactcgtttagcgcggcatgccgacttagcgagttcatacaaactcagaaattaaaactggaaatttaaacactcgccaagcctaagtgcagtggcttagcaagttcatatagaaaagcataaattcaaacagaaatgatgaacatgcttagcggg

SEQ ID NO: 180087 - DNA, 445 bp, Glycine max
  unsure (1)..(445): unsure at all n locations
taacgaatgaagacnataccaagtggatatgggagatgtgttctattgaaccctctcttgacgtgattataaatagttttctctatctaatattattctaatgtcacctgtacccataaatttactctaaccgtaattcctcgcatgaaagaatctaaccctcttagtctcattctcgattcctcaaagaaatcaaactaagtgagcagcatgatgactgagatgcaaaccatactaagttacttcacactattcttagaaatgatgaattttagctgctctaccatgttctaaggattaattgcattttccaacacttaaatcctaacaaagcatataaatggatgaccaaaccatatacatgaaaataaacatacgtagaagcaaagacattagcaataatattaaatagatagttagagtattttacatcaagagtgctcag

SEQ ID NO: 180088 - DNA, 287 bp, Glycine max
  unsure (1)..(287): unsure at all n locations
acaacnaggagagagaccgcgagcactatttttatacacacgcgagcctgctcaaatataacggatgagttcatcgcaatcggagctagaacgaacatatcgacggatccttaaaggataaaattgagaatattctgggaagttcatcgaatcatcaacctcctatacgaacacaaatacgatatagacgagtgtagcgaacaaaaagacgttcagatgtgaattggttgacaaactagagagctcctggtgttaccgagcctctgacatatgatctcgactcgtcg

SEQ ID NO: 180089 - DNA, 273 bp, Glycine max
caagccatgggagtagaagcgcgcggccttaggaacacactagagaagttggaatatccacctgaaggacgccgccattagggacaccgtctgctgtacgaactacttctcacacacacgtgaggacccgagtcacgtcaacgccgattcaaaaggatgccaccatcgggcccgaccaattaggcccagatcaaatcatatctccggatatcacagggcacaggacctctaagataagtgcctaaacctcaacaggctgtgacataagcagct

SEQ ID NO: 180090 - DNA, 311 bp, Glycine max
ttagacccataagaaatacagggaacctctaaaacgctaagggcgatcgcaacgtatgcaaaaagaacacgtggaggggtaatcaaaaacttaatagttaactaaacaacttggaagacagcaataagaactactctaaggcagagcgaatattcccatatttaacaataacattgacctacagcatgctgagaccagccagcttgcttattgataacaaaacccctattggcagcttccacagcttcgcccatcacgccaagctccacaaaggagaagcaagcatgccatatatataatactctccttca

SEQ ID NO: 180091 - DNA, 445 bp, Glycine max
  unsure (1)..(445): unsure at all n locations
tctctagaattaactntgggaatgggactaagcgcatagactcatagcacaaaaacctctctggaatttaattcttttgaattgcactaagcgagcctattcgcgctaagcgtgaccattactgcaattaaggagcattctattcgctaagcgtgactcgacccactaagcgagagttgctggaccaatcagagctgcagaatgcgctaagcgcatatcttcgcgctatgcccaaaaacttattgggattgtttttattttgaattgggcttagcgagtagacgcgctaagcgtatgggcctttaaaactcaaacgtcatatggactcgttaagcgcggttgtgcgctaagcgagccatacgaaactactaaaaataataaggcacaattgccttaggcagttaccatttcactcttacagagcatctttctcactctttgcatt

SEQ ID NO: 180092 - DNA, 441 bp, Glycine max
  unsure (1)..(441): unsure at all n locations
tnctgaaagtaacctccagtatgtgacatctataacattctttcttacaacctatncaaagnatatgtcagctacaaagcacacatttaactgcggcaatgtcttggtaactacaaacaccttaaggagcattgctaaaagacaggttagtcgcattacttgtaccattgtaagttcaatattcactacttctctattgtctattccatggttgaccaaaaaaatattgtaaaatctcaggttgattacatattaggtgcaaacccattaagaatgtcttacatggtaggctatggtccttactctcccaagagagttcaccacagaggatcttccttgccttcaatagaagctcatccacaaaccataggctgtgatggaggtttcaacccgtttttccattcaatgaatcctaatcctaacatattggttggagccata

SEQ ID NO: 180093 - DNA, 448 bp, Glycine max
  unsure (1)..(448): unsure at all n locations
cgctttaggagacatagnncattccttacaanattttatttttattttatnncncactagcaatataattgacattgtattttactaatatttactctaaatattagataattttgattttattatacaacagtattttaatacaaaatcattcctaattttaaactttattatatttaaagttttgatagtttctatctgattttatatggtccgaattccttcaagaaatcagtgggaagcaaaatatagattagtgtattttactgagtgcttatagtgtatttatttttcatagcaactacattaaaaaaaatatataatcattagaaattttgtgattggtgaatattataaaacaaggataatatttagaatatatgtatttgttgagaatcggacagaatgcgatgttctgcattcttgtcataattgtagtttataggca

SEQ ID NO: 180094 - DNA, 417 bp, Glycine max
ttgagatgaggaagtgttgaaaggtgaaacttcctgcttttattgttgaccacagagtggtacctggagatatgtcgcgggggtcaggataccttggggacgccaggtggggtgctattgcccaaaaccaagcttgaccaatcccgacccaacccgggcatagtcggtcagtgagaacctgtgatgtacctaaacaggcgagctcctggcagtcaacagataaaaggaacaaagaccacaaagcaaggaggcttgtggtggctggccagctgtgaaacttgattgatatgtgagatatgggctctggtaatcgattaccaaggtgggtaatcgattacaaggcttaaaaatgaagacaggaggctaagatggtctctggtaatcgattaccacggggtgtaatcgattaccaggctt

SEQ ID NO: 180095 - DNA, 426 bp, Glycine max
gaagatctctcaagaaagcttgtcttttaatctaccgagcccatgcacagaagcatgtgggacactcgttggcactatgatgaatgaaagtcttatgagacacacttcagagagctacttctacccctctattgttctttcaatggcaagctgcctcctctctgttgatgctcctctctctttaacttcattgaagcatgcttccaagcttcttatacaaggctcatcttggtggtgaagcttcctcttacatggcttattccctagaggatggcgcctgccttctcctcttctcctgtgccttccggtgcatctccatggtgaaaaatcacgattgaaggacctcattgaagctcaaagatccagcctccatagaagctgcacaagcaagctttcatcagaacggtcggaatttattttaaccga

SEQ ID NO: 180096 - DNA, 442 bp, Glycine max
  unsure (1)..(442): unsure at all n locations
ttataatntaactataatattgtagatatgaatcattttttttagaattngattngatatgattntagtcaaaatattgttttagttaaaatttgagacgcttggtttgattaaggttatttttctagtatggtagaattgttcttattttttaaaaatctcctttgaatccttttgctacttgaaaaaaaacacgatagattagaaaaaaggcaaatcatataatcttaacttagaaaaaaaaggaaaatcaaatgaaaaataatgaaaggataaagtattcgaaaaagaaaagaaaataaagaaatattactattaaagaaaaattaaatatataaattaaaaaaagaagaaaataaaatataaagttaatcatacggtagagaaagaataaataagtcaatgcatttgctccattgaaactgtataaaataaaataaaa

SEQ ID NO: 180097 - DNA, 381 bp, Glycine max
  unsure (1)..(381): unsure at all n locations
ctggcaagnctcaaattgaagactaaaacatggttgacgatcaatttgtcaaattgagttttatctatgcctgaaaacctaaattgtatatcctatggttctgcaaataacttaatggaataaaaatgccaagtaacagtgactttnaacgaagtgaaatataactcggtatatctaaattagaaacattgaattttcgcctcaaacgtaaagcctttcggtgactcattttcgatatgcatgtgacgggtacaataaatagctaaaggctaaatccaattctcgtcctcatctttttatatccgtgattttattctttttattgctaaaacttgaatcctagtctttctatttctaaattatgacaatatatcctttatt

SEQ ID NO: 180098 - DNA, 348 bp, Glycine max
tccttgacaagattcctaaagaagctagagcttagctacacacaattcctataatagctaaactcactctcatgccagagtacatgaaaattcacaaaagtccctactacgactactcaaaatagtcctgagatacaaagctaaaaccctatactactagaatgaccaaaatacaatgcccaaatgaatgaaaaacctatgctaatatttacaaataagagaggagccaaccttggccgtgggctcaaaaatctaccatgatgttcatgagaaccctaaggccctgactaatacctatagctcaatccttttggattcttcaatccaataccctacgggggggggggg

SEQ ID NO: 180099 - DNA, 207 bp, Glycine max
  unsure (1)..(207): unsure at all n locations
agcttgttagattcagatgacgcaggtgagtttgagctacctcatgcactcctctaatgactatagcatcatttctggcgctaaactgctgggagccggaagccatcttctcaattagaatntcggcttcagcaggagccatgtttccaagggctccgatcctgacgacatctatcatacttctctccatattatggagaccttcat

SEQ ID NO: 180100 - DNA, 460 bp, Glycine max
  unsure (1)..(460): unsure at all n locations
tcttgagatgcctttcggntatctcattagaggctgtggtaaagtctactatcttgttagaaacacgatattgaagtaatcaatgaacctagaggctaagatagcatatggcaattcataatccactagtcgatggctctttaacataatatattcaatcaatagtgcccaattcatttgaacacctgattttagcccatatacgatctgcaagttgtcgttagtaacttgagcatgattgctggaccttggtgccagaatgtatgtaatgatatatactaacattttgtcctcagctgttagaccactaacacctagtcggtttctcaaaatccttgctgggtcaaggatcatacctcaatttgtctcatcttgttgtagccatccattgattcctcaaatttgcagactcctnccatgtctatccctgcaactactttccaaacttcagcatcaatga

SEQ ID NO: 180101 - DNA, 390 bp, Glycine max
  unsure (1)..(390): unsure at all n locations
agcttgggcagatgaaaggaactctctacctggagctattatagncttctatacttgcgcacgtgctgatctggaaggtaatctatcttctactattaatggtgtagaaatgattattgatgctgcagtctggaaggtagtacccagactatacatgggtggagcccgcaagtttaaagaatctcctgatggttacagcaagatgcagacttatagaggtatgctccttgacccaacaaggaatctgacgaatcgccttggtgtaagcggtttaactgctcaagatagaatgatcgtgtacctcataacctacattgtcacactgagggctagcaaccatgcacaggtgactaacgatgatatacaaattgtgtatggcctacaattacg

SEQ ID NO: 180102 - DNA, 466 bp, Glycine max
  unsure (1)..(466): unsure at all n locations
cctatgatactaagcttgagaattatttattntttagaagaaggtacgcatttattacttactattagggagtacntatatttaacaagttttaaatagtaataataattgttgaacttttttatttttgttgtaataacttctccaaagagtgtgaagggcaagaactttatcattttccaagacatccgcatattaatcttagcatagcctagaaataattgaaacctatattgtaatttttcctttttgttgccttttgttttatccgtttttttccttgcatggacagcatcattaatttttattctttcaccattttatgaaacaaatattttgtgaatattaatcctgattcttaanaaaatgtttttatttattgtatgaatttactcacttanataatcacaaactattaattattatgtctatgtaagtgagaagagagagaatacattgagatgag

SEQ ID NO: 180103 - DNA, 467 bp, Glycine max
agcttctatataagctgagccatgtgatcaatatacacaagttgagtgttattcacaaaattagagcttatctcttttatcttagtgagagtgattctcctaaattcttgagtgattcaagaacaccctggctgtatcaaaggactttcacaacctttgtgcgttgccctcgctggaaagagtgattctttccttcctttcatcttcacccttgttctttcaaaccacaattccagaaaatccacctctgcccagaattatctagtggccataacttccattttacgcactcaaattaagtgattcttgaggctaaattgaatatcaaaacgagacctttcaccctcgtttggaatcacctcatttggatccctgtagctctagttattgccatttctatatttctgtccagccccacttaacctacgtttaccatcccattattcattctattcaagaccacctta

SEQ ID NO: 180104 - DNA, 446 bp, Glycine max
  unsure (1)..(446): unsure at all n locations
tanggccaggtggaagaaacctggtagcttcctccaagcctctcctaaacttggaaagggaatcaacatcattgaaaatattntgtgccaagagtttggcagtggaagaatccaaatttgagaggccatgattaacagtaactgaaggtggttgagaaagggacttgggattaaactgaaaagccaaaatagaaaaaaaaaattggacagtcaattaactcacgagaattttcatctaaaaagttgtggttgttgttgttgctggtggtgggagtggtttcagcttggggactgagaacaacgggatgttgattggggaaaagaggtatgtttccagtgagagtgttgtagaaggatttctctgtaacttgcaagttgagtgagtcatagaatggcatctgctcaatgttgtcttccatgagtatntggtttatgaactttgtagt

SEQ ID NO: 180105 - DNA, 447 bp, Glycine max
  unsure (1)..(447): unsure at all n locations
agcttgtgtggnggctagccagctgtgaactctgattgatatatgggttatggcctctggtaatcgattaccaagggtgggtaattgattacaaggcttaaaaatgaagacaagagactaagatggtctctggtaatcgattaccaaggggtgtaatcgattaccaggcttgaaaacgaggtctggaagctaggaaggcttctggtaatcgattaccaagggagtgtaatcgattaccacgcttacaaatgggactggaagattggaggcctatggtaatcgattaccactctgtgtaatcgattacacagaggaatgggtcactggtaatcgattaccaggtatgtgtaatcgattacacagtgcttcttttaggtttcatgtcctcaagctgtgtgattacagcttggcctctggtaatcgattaccaaggctgtgtaatcgatt

SEQ ID NO: 180106 - DNA, 460 bp, Glycine max
taactcttacaatatactgcatgaaaaagaaatagaaaacatattatttaatgattaattatatttgtactaatataaatttaataattttatttaaaatatatttattatattttaattaaaaaatttaattttatataaaaatattaatcaaattttttaatatatgaagtcatgaaagataaaatcaaaatatgattttgtagtaaatatacattaaaaaaatagatttaaactgttttttcatataaaatattcaatgtcataatttaaatattaatagaagaaattttatttatgaaattatcaaaaatgattttatacaaattcacagaaaaattttatttaaagaaggaatctaatttaaacactgaattgaaaggagaaatataagacatttaagaaggataaaaaaattaccttctttcaagcacataggccaaataaattgattcataaa

SEQ ID NO: 180107 - DNA, 454 bp, Glycine max
agcttatatgtgcaacaagactagtaaaggttattttggtaggtgaagtctctaagggaaaataaagaggggaaattgttagactgagttttttcttatgacttaattaacataacatgtaaggttaatcgttctgggtttacaaaaactgtctgtttcattgactccatacttgaagagttttcaaagtacagttttagattcaaaatgttatgccggctacactttttttttaatagaatagtttatactagtctctttcaatgcaacaaaggacggggaagaaacaacctccatggcgggtgttttctttgaaggaattacactccgctacaaataatttcaactatgataacaagctcagcgaatggggatttggcagtgtgtactggttcacaagtagtactatactttgataacaagctctgggatggatcacaagtagtactatact

SEQ ID NO: 180108 - DNA, 434 bp, Glycine max
  unsure (1)..(434): unsure at all n locations
ntntcgctgcagaattcatttcatggttggtgtttggtttgtgctaaaggtggtgtttgtcattggaagtgcggtaggtaggctttgtggttgattttatggatggcctttgtggatgactaggtggtgggtaatgagaaggttcgatattggctgagtaatgacattgttgggttggtgggaaacttggctgtatagaaatggcagtcacagcatgggcttctccctcattctcaccctcttcatttgccccagttatttttgcatttatcaaagcatgatgatcagatttgcctttcagacccacttcgatccttttgccggcgaagaccaaatccgcaaagcttgaaggtgtgtaacctaccatcttttcatagtagaatactgacaatgtgtccaccatcacgatttatcatctccctttccatcattgg

SEQ ID NO: 180109 - DNA, 465 bp, Glycine max
  unsure (1)..(465): unsure at all n locations
agctntatacacgggaggaaaagatacaagtatcattcaaggtaagctatttggttagtgagcttgtgtatgtacaatcatggccttcatcatgtcctcatttatacatttcattctaaaattcagagattcatgcaaagattattactcaaagccagttgttcactcacagtttaaggtcacactctcaccggtttttggttcaagcttttctttcacaatcaatctgtctactgactaacaattctaaatgcaagttcacattcttgttctttctttgttcagcatgcacatttgctaaaattcatgaaaggaaacacaaattccatcaaatcatgcattcagttcaaaatgaaagcagacaaccattctcacaaaaagataaaagtgtntcagtgccatgtcatacnaaattaagttaaactgttccagatgcttcaggataagcattctaactattcatat

SEQ ID NO: 180110 - DNA, 431 bp, Glycine max
tcttcttcgtcttctcagctaggagcttctactctaaatattcataacccccacgagacaaaacgtggggggcagtgttctgtttctggatggcctgtgcctttttgcgcacatcctgcaaaaataaaacaacaatctttcaaattggtagaatgaagtataacaagttaatgttttttgaaaaacaacttaaatggcaaggaacatacctcccaagaagggtctctgcgagtctggcaaaactgggcaaatttttcctttcttatgccatatttctcatagacagtgtcgtccacactatctgtatcaggtgcaagggcccatttcctcgtgaggtctgatttaaactgcctctatctctcgcccatagtctgaagtaacttcctttttgtcctactgtcagaagcaacttccttttcgtcctactgtca

SEQ ID NO: 180111 - DNA, 472 bp, Glycine max
agctcggagaggatgcttcaatggaggacattatttagggagagaaagagagaggggggagcacgacattgaaggaataaaagaggtaaagaagtggaactttgaagtatgtctcacaagactctcattcatcaaagttacaacaagtgttacacatgcttctatttatagactaggtagcttccttgagaagctttcttaagaaaactctcttgagaagctttcttaacaaaacttccttgagaagcttctttgagaaagcttccttgagaagctagagtttagctacacacacccatctaaaaactaagctcacctccttgagaaaccttcttgagaagctagagcttagctacacacccctataatagctaagctcaccctcatgacaaaaaaacatgaaaatacaaacaaaatcctactacaaagactactcacaatgccctgaaatacaaggctaaaaccctatact

SEQ ID NO: 180112 - DNA, 446 bp, Glycine max
  unsure (1)..(446): unsure at all n locations
ctntggagtagaaacctgggaccaactcattgtatttcataaaaggaagtcatatctagtcaaggtctgagagaccatacaagtttcctaacgatttctaattatgtgggccattaagtctatcatatgctgacaatagccgagaagcccatgaatctcttcgggggcggagtaggtgtctgccattgccttggccttggctaacaatcggggaagttcttgactcccgttcaaggtaagagcaaaccgatccatccacatggttgcctcttggtgtaaagagtcgatcacccttcctctagcctctttttccgcatatacttgggcatactcatccgcgattctatgctcgtgggccgtggctagacccaactcttcttggtacttggcgatgatagctaacatgttggtctctgtctcgcatagacgctgagacaagcttcttt

SEQ ID NO: 180113 - DNA, 397 bp, Glycine max
  unsure (1)..(397): unsure at all n locations
agctnggaattgcatttgggcacctattttgaatctcctatgttgtacctatatataagaaacagtcccactctccccattttacaaaatcacattcgtacatcattggggcatttcaccgagcacttggtgggtgcacgtttggacgcaaattgcaagagaatggggacaatgtggcatgccccattgcttcagaatacaacatagccctaaggccttctcattcaaatnctgaactcaagaaaacaagcataaaaacaaaccaaaactgccccacaaatataagcacattctcacaatttggagcaccaaaagatgaagaaaatataccactggaaagctaaaaacatcaaggattgaatacttacttgttggagtgaattataacaccaaaaat

SEQ ID NO: 180114 - DNA, 434 bp, Glycine max
  unsure (1)..(434): unsure at all n locations
ntggatcntatatttgagcgtctcgatagattacgagactcaatttgatgtccgagtaacaagttattgtcgcttgaatttgatacgagcttccgttttcaatttggagcatccctcgataaattacgacactctgtcgggcattcgagtaaaaagctattgtggtttgaattttcaaagagtttccattttcaattgggagcgtgttgatataatacgggactcaaccggacatccgtgtataaagttattgtcattaaaatgtgctcagagctgctagtctcaattatgagcgtctcgatatattacccgaatcaatcgaacatccgagtaaaaagttattgttgtttgaattcctatgagcttccgttttcaatttgcagcgtcttcatatattataggactcaaccggacatccgcgtattaagatattg

SEQ ID NO: 180115 - DNA, 243 bp, Glycine max
  unsure (1)..(243): unsure at all n locations
agcttcctctacaagctccctcgcggctcctttgagaagctctctcaagaggcttctttgagaagctacatccttatctatccacccccttattaaccaaatcaacttccttaaaaataattaccgatgaaaataacccaccaaataatcaaacatcaaacatacctactagtaatatatagacatatatatcagggtgttacatggagcatctccatatgntaccggactcaactggacatc

SEQ ID NO: 180116 - DNA, 455 bp, Glycine max
  unsure (1)..(455): unsure at all n locations
tggtatttaaaatgttntaaaaatactgttaattaatatttgaattcttattcctttattaatatatatgtgaggggtagagggtgtcacagtaaagatcttctattttttgacattctcttgccaagatcattgttggcagaaattgaagaggatagttcttttatttgatgttgctccatttttttatgcaaagtagttatttagaataaaatttataattttttaactatatcaatcaaagaattagaataaactaataattttgtttgttgaatgttataaaatgtgtataataagataaaataaaagaatgaagttattttaccctatcttgaactatgcaaaatcacgattgtctaggttgatataaatctttgtacttgaagttaagttgattgaatactcatatgaaaaacaattattacaatataattggtagtaaataaaatata

SEQ ID NO: 180117 - DNA, 453 bp, Glycine max
agctggcgtattaattgttctatcttcgggtcatacatacatacactacatcacccaaaaacaagaacagagtggaataagattaatttctaatattatattatgttgaagtgtatctctcctcaataaataaatagtagtaaaaaagtggtacttataattataataaaaataattattaaaaattcatatttctaacacaaatttactcaataatctctgggaagtttcagttacagttacgtttgttgactcgacgttgagaaaaactagataattgactgcacatttttcctagtattgctgtgtccatctcagatggtcccctacaatacaagtattaggtgggtccttctttacagctctacgatttggttttccgtcttcagttttccttcttttttataagtcgaattaactttgattctagaacgcttctgatatttcttatac

SEQ ID NO: 180118 - DNA, 447 bp, Glycine max
  unsure (1)..(447): unsure at all n locations
tgttcgcacatcgttcgcgtgtatgatatccactctacattgtttgaagtagaggagaccttcaatcctataacgcaacgtggcagacaaaaatgggcagttaacttgaatggccattattgtcaatgcagaaggtattctgcgcttcactatccatgttcacacattattgcagcttgtggttacgtgagcataaactactaccaatatgtagatgttgtttacaccaatgagcacatcttaaaagcatactccgcacagtggtggcctcttgggaatgaagcgacaattcctccttctgatgaggcatggacactaatccctgacccaactacaattcgtgcgaaaggtcggccaaaatcaacaaggataaggaatgagatggattgngtcgaaccatctgaccaccgacaaaaatgtagtagatgtggagccgaagggcacaat

SEQ ID NO: 180119 - DNA, 266 bp, Glycine max
caagaactacctgctatgtcccgtgcgacggagtgacctgcaacccatctgaggttctatagtggctcacctactgtggaaccagccgttggataatttctcctactcaagggcttgggtcgcgaatagataacactcccggttttggcactttaggttggtccgaggctgccttgaggagcgcaagaaattcgttctcatttgactacattgaataggggttggatcacccttccgctatgataaccttcgcgtggccacccttc

SEQ ID NO: 180120 - DNA, 422 bp, Glycine max
tgagatgaggaagtgttgaagggtgaaacttcctgcttttattgttgaccacagagtggtacctggagatatgtcgcgggggtcaggagaccttggggacgtcaggtggggtgctattgcccaaaaccaagcttgaccaatcccgacccaacccgggcatagtcggtcagtgagaacctgtgatgtacctaaacaggcgagctcctagcagtcaacagataaaaggaacaaagaccacaaagcaaggaggcttgtggtggctggctagctgtgaaacttgattgatatgtgagatatggtctctggtaatcgattaccaagggtgggtaatcgattacaaggcttaaaaatgaagacaggaggctaagatggtctctggtaatcgattaccacggggtgtaatcgattaccaggcttgaaaa

SEQ ID NO: 180121 - DNA, 465 bp, Glycine max
  unsure (1)..(465): unsure at all n locations
agcttgtcttgatgctgaataagtaattatcctttgcattgcaactgaaagctcttaaaacttgtattctgcatcacaccatatttttgtttatttttggttatggtggtcgagtcatactggagaatttcacttgatgcaacctaatacacatggtatgtagagtcagtttttccacaaaagaacggaactgggttgcaaccttgtatgcgtgattgcattagatatggaagggaaaccaatttgaataaaattaggtcttgcgatcaaatagcataaaaaaaaagtatcacgtatctgtaaagatttatgacaaagtttagtcagaatttcattagcgcaaataaattcaagtatatacttatccaacattttggaatactgaaccatgaaaaataaggggaaaatacgcaacaaacaacaaatgatgagtgcataattntatgtcatgtcaatgaacatatg

SEQ ID NO: 180122 - DNA, 460 bp, Glycine max
  unsure (1)..(460): unsure at all n locations
tcttggttggaaagaaaaaggagtctatcaacattntgcagtacgctgatgatactgtctttgtaggagaggctgtgtgggagaatattcatgttataaaggccttattaagaggatatgaattagcttctggtttaaagattaactttgctaaaagttagtttgggataatagggggtggagtcaattggtctttggaagcagccaatattttgcactgtcgacagctggaatatcctttcctctatttaggcttacctattggggctaatccttctagccagctggtgtgggagcctctcatttctaaattcaagtctaaattagccaaatgggctcaaagagatatatccatggctgggaagatcacccttatcaattntgtccttaattccctcccaatttatctcctttcctttnttaaaattcctcagagggtagtcaaaaagctgatatccct

SEQ ID NO: 180123 - DNA, 475 bp, Glycine max
  unsure (1)..(475): unsure at all n locations
agcttctcaagcaagcttccatcgagagtgctaaaaataaagtgactntnttaattattatcttcctttgagaacatgaattatgtttgttatatttgtttatttagggaaaaaaagaaaaaaaaattaaataaaaaggagaaattttaggtttttttttagttttataggtcgacaagggatttgtccttgttcttatgtattcctaggtgcaatgaaaaaatcaaacttacgtagttctttgtagaaaaagagtttgtgtgttgggttgattttattttattttattttattttttaaaatattttggttttgtggtaaactttgtgaagtcaagcaagtcagggacctagcatggcattcacaaaatttactcacactntattgaaacaccgccaagcaagtgagagacacggcatggagtgcgcacaacattaaaaaggagaattgagtgattattttatttgagaatttt

SEQ ID NO: 180124 - DNA, 457 bp, Glycine max
  unsure (1)..(457): unsure at all n locations
tgtgatngaacttagttgattgggtgtattatgtacatgttgtctttattatttgattataatttatttaaaatttatttgatgcttttattgttaagaaaatatataattgacttcactaaacgaggcataatctgatcaaggttaacataaaaataaaattaatctttgtcccattataattgacttcttagattattttacacaaataaagaaaaaataataaataaataaaagagagtaatatttttataaaattaatcttatatatgtcctcattaatttatttataaattctttattaatattatatgaaatataagtaaaaataaataaatcaatattacattaaaaaattaaaatgataactattttaagtattttttctctcatacgattattataataagagagaagtatatgtngacataaatgcttttgtcacaagtgcggttat

SEQ ID NO: 180125 - DNA, 373 bp, Glycine max
  unsure (1)..(373): unsure at all n locations
agcttgcttgtggagcttctatggaggctggatcttttatcttcaatgaggtccttcaatggtaattnttcaccatggagatgcagcgaaaggcaaaggagaagaggagaggggaggcaccatccactagggaataagccaaggaagaaggagcttcaccaccaagaattgccttggataagaagcttgaagaggatgctttaatggaggaaaagaaagagagaaagggggagcacgaaattgaaggaataaaagagggaaagaagtggaactttgaagtgtatctcataagactttcattcatcaaagttacaacaagtgttacacatgcttctatttatagactaggtagcttccttgagaagctttctta

SEQ ID NO: 180126 - DNA, 451 bp, Glycine max
  unsure (1)..(451): unsure at all n locations
ntgtttctggattcatcaaacaaccataagaaacctacagaatcatggatgaatcttccatatttaagcaacaatattagtaactatacaatatatataaacatctagattcaagggtagtttggaagaaaactattacaatcaaaggataagtgctaacaatttaatcctaaaaacaactcaaatttggcacttatcaactccctacaatctagaatcttgcttgtcctcaagcaatggtaaataaaaatagtataagtatgattcttaaattgtgaacatgttttgtaaagaatcaatctctaaactgatcagaacaatattnttcaaaatgcaacaatgagaaaggaaagcacaaagatggaattcacagaaccacaaatgagattaagataattntgcattttgtttctaaagaacatcaaaggaaacactagattcattcaaacag

SEQ ID NO: 180127 - DNA, 341 bp, Glycine max
agcttggaatcgattacacacatatgggattttattaccagagcatatcctcagacaatattctccacagacacatctttttatttggttcttgaatggctatcaaaggcctatatatatgtgacttgagacacgaatttgccaagagtttttcagaacaaaaaggttttatcctgttaaaaagcaaaatcgttttatcctcttacaaattccttggccaaaacacttgtgattcaataaggaatgattcgagtgctcaaattgttcaatctatctcttttaagagagatttcttcttctcttcttctttattctgaaaaaggattaagagaccgagggtc

SEQ ID NO: 180128 - DNA, 455 bp, Glycine max
  unsure (1)..(455): unsure at all n locations
tgtggactataccttcgaccgaacaccgtcgtgtggctatctcggtttaagtttattgcgggctgtagcaccggttccacttccctagctgtattggaggcggtcgccgtggcattatcctctatagttttttgaagttttagcatggcctctgtgatagaagccatttgatcttttaaagccgataggtcggccttcatctgttcttgcacgccctcttcattatccatttttctggatcgagtgttataggggtgcctttgcgctttcttagttatggtgagttccctaaagaaacaaacaacggtgagtatgccaccaaaacatgaatatgcaaatgaatgatcggagcctttggatccacctcaaggttttttagataacgtgatgggttcagaacttctcattttataaaaagaacanagctcttatctagccaagaatatacaaaagtg

SEQ ID NO: 180129 - DNA, 415 bp, Glycine max
  unsure (1)..(415): unsure at all n locations
agctntgttgggcaacagtggtggatgagttattagaatattaaggctgcgtgagagagagagagagcttctgaatttttctcttggctgagtgaggagagagaatatagctttttggttttaaataaaagggttttctctttttctattattttatttaagcaatgccacatgtctccatttgagtggagcaaaaagggcccactttctcttttgattgtgacccatactcagccacaaaaagtgagaaaaatctgacctttgaaacgctaaaatccttcctcggtttgcgtgctgtttctttgattccagctcctcgcgtttctctgcgtccgtcggggccacttttcgaaagtaagcaatatatatatcacaacgctcagaataaaacccccagcgtggttcagaggttggt

SEQ ID NO: 180130 - DNA, 447 bp, Glycine max
  unsure (1)..(447): unsure at all n locations
tcatggtgaatcaaaggtgattcaaaggtgttgtgatgataacaatgatgataacaaaagatgatgacaaaggtgatgacaaaaagctcaaaaatcaatcaaagaacaactcaagtgaatcaaagatcaatcaagaaaaattcaagagttcaagataagaatcaagaagaattcaagactcaagaagaaagtttagagtcaagaatcaagattcaaggttcaagacctcaagaatcaagatcaagattcaagactcaagattcaagaatcaagagaaggcttaatcaagataagtatgaaaaggtttttctcaaaaattgaatagcacatggtttntctcaaaacatgtttaccaaagagtttttactctctggtaattgattaccagattgttgtaatcaattaccagtagcaaaatggatttgaaaaaattttcaaattgaatct

SEQ ID NO: 180131 - DNA, 352 bp, Glycine max
  unsure (1)..(352): unsure at all n locations
agcttttatgtgaaaggatgtgaatcttcatatttgaantttaatnccaacgttcaaagcgcactggtaatcgattaccaaaacattgtaatccattacaactttttgaaatcaattggaacgttgtaaattcatttgaaaaccttttcagatccattttgctactggtaatcgactacaacaatctgtgaatcgattaccacagagtaaaaactctttggtaaacatggtttgagaaaaatccatgtgctacttaatttttgagaagaaccttcttatacttatctggattaagccttccttcgagtctggaatcttgagtcttgaatctttatctactgaatcttaattc

SEQ ID NO: 180132 - DNA, 398 bp, Glycine max
  unsure (1)..(398): unsure at all n locations
actcagctttatgaccttttgctgcttacactagcattnccttcttgtacaaccaactctctaatttttgtcgacctcttgttttacggttttgagctcacactgctcttaagtctcttagcctatccaataatatgaaacagtgcataagaaatctcttcaagaaaagaaatgcaactcccgaatgactaggaaacgtataatttacaactgaagattataaactcggaatgaaggaatgttgcccccaaagctaaaatgtgacaacagtataccaatggaactaaaaaataatacaattgtaaaatggaaaaaataagatggaaaaaaaaacatgtgagtggccgaaggcattaaacataataatattgaagtgaccaaagcgacttttgtaatat

SEQ ID NO: 180133 - DNA, 451 bp, Glycine max
  unsure (1)..(451): unsure at all n locations
agctnctttcataaacgaagatgttcttatgttcaagccaccaccacctcttggggaacctcatataacaggatttacaaattaacttatacataagctaattttagcttatgagaaaaacttatttcttggttccttctcttataagtattcatggacccagcaaaaataccctgcatggctcttagattgttccttgtgctgctatatataaactgctgaaccgtatttacgtttgtacaactcacatttgcttttgtgaacagccaagaggttaccaagggctcagccagatcacaacccagcaggaatggttcttgttgacagacccgccgaaggaactagggctgcatcatgttgttcataagtatttgagctgtatttgcaccccccaatcgtttataattaatcatgttttctttgggctgtatgtactacacactctgatgtc

SEQ ID NO: 180134 - DNA, 454 bp, Glycine max
  unsure (1)..(454): unsure at all n locations
cggttggaggtacttacccgttgaagaccgaagataacttttaacgaacgatgaatcttgaagaacggtcgagaatcttcgcgtaattactcacggaaacgttacggaagtgcctcggcttggattttcttcacggaactaattttcctcagctatttcgagagagagagagaagtgtccttttcttcttcacttctccccctacttatagcaaaataggggagaagcttgccgcccagctcgcccaggcgagcaaggttgcttcctccagaaacaacagccttctggaggatcttctggagggcccaagtgggcctggttgctatttgcacccccatttttactaaatacacccctttctatttttttggtgattctttttccgtaatgttacgaaactttacgaatctcgtaatgatacttatnttttcttccgcaaggttacgaaccctta

SEQ ID NO: 180135 - DNA, 439 bp, Glycine max
  unsure (1)..(439): unsure at all n locations
agcttcttatccaaggcactgtcttggtggttaatcttctccttncatggcttattctctagtggatggcacctcctatcacctcttctcctttatctttcgctacaactccatggctgaaaatcaccattgaaggaccttattgaagctcaaagatccaccctccatagaagcttctcaagcaagcttccatcaagtggtatcagagtacaagagcttcaagtaggtgctccttaaaattccattaattttcagctttaccttctcctccattgttgtttcttcattcttttctccatgcatctcagatcaaggccgtacccgaatcaaataaacattaaaatgtagtaactaggaagtgatcctaggtcgtttcccaacgagcaatgataaaccaaatgttcataatagatagtacgaaatactcacacattgggga

SEQ ID NO: 180136 - DNA, 459 bp, Glycine max
  unsure (1)..(459): unsure at all n locations
ctcaagctgaagcttanaatcacaggacaaaccttcacaacttgttagtttggatcggcaaaaccagcctatatgaataaataacatgattagtatggcaaagttgaattaaatgaaggcattagtatcagtatttggtccaaggttgaataaaataataaatacctcagctgcccggtcaaagaaaaatgaggcaacaaaaaggtttttctgttcatcacccccaccaccattccatatccccccaaaagtgcacttcgtatgtgtacatttgacccattaaccttgagagccttgagagctatgcttttgcattcattcaagcttgcaccagaaggggtggatgaagccttatatgactttcctccataaatgtaagaacctgaaaatgttttaaaataaaacttattattggcttgaaaatagaaccaagcatgcagaaagccaaagtaatattta

SEQ ID NO: 180137 - DNA, 432 bp, Glycine max
  unsure (1)..(432): unsure at all n locations
agcttccatgtcctaaagagctatgtatatgttaagggggcatttcctgcggtgttacactatatatgcatcccaataatgaactaaaaaaatgaccttcctgactaataaaaagtatattgtaaaataatgatacctttcgtactcaagaaagcacgagcaacatattaaagggtgatgacgaaaatgtttgatgaatattaagagagatagcacaagtttacgtagatgatatcattgtgaaagtgaccatgcggggaatatatagaaggtttttaatcaactgactagacaatataacatgcatatctgataggtttatggatctataatatattacatatagctgtgacaatcaacataataagacatttatttatgttgacatcatccttatgttagaatgataatatgatccactatnacactatt

SEQ ID NO: 180138 - DNA, 450 bp, Glycine max
  unsure (1)..(450): unsure at all n locations
tgttgttgaacttcttacatattngacgggaaacgcgagtttctttacacttttcatttaccaaaaggatgtaaaccaaattcaatgcgtgaattttgtaagattttccgtgaccaaatttcactccttgtttatagtacatacatgaagtacgaatgaacttattaatttttaataacgcctaagttcaccaattttctatatgacctagtctccaccaattttcgcacttctacttcgtgtttgtcatgtgtgaagagacatacctatatgcacatgaactgatagactttacaaattnttttctttctttttctctttttatcaaaaccatatatttttccacgtaagaaacatggagtatatagcactactacaaaatatagatntaacatagttaggttaacatagggttttataaaaccgatgtaaaanaacactgtgacatag

SEQ ID NO: 180139 - DNA, 260 bp, Glycine max
ccataaacacgggagggggtctgtttcaaaaatattcatcaccccttggctatgcatttcggctgtattgggtgaaaaaatgcattctcctgaataaaatccatgcctacgtgcttccataacgcttccgaaacccaccctgggagatctttattgttcttcatcgctctctaccgttcttcgttcattcttcacgtctgaacccgtaagttcccaaatcaaatctttcattattcttcgtctgcgactccactttaatt

SEQ ID NO: 180140 - DNA, 438 bp, Glycine max
  unsure (1)..(438): unsure at all n locations
ngctcntaaattacattgatgtttgtatttatggtgggaggttgtatgccatttttgttttaagagtagtgtcccgctggtaaaactaactttccaaatgtttgccttcgcaggaaatggccccgaggaagcttgcctcaaagaggtccaggaaggacaaggcagccgaagaaactagttccgctccggagtatgacagtcaccgctttatgagcgctgtacaccagcagcgcttcgaggccatcaagggatggtcgtttctccgggagcgacgcgtccagctcagggacgacgagtatactgatttccaggaggaaatagggcgccggcggtgggcatcactggttactcccatggccaagtttgatccacaaatagtccttgagttttatgccaatgcttggccaacagaggagggcgtgcgtgacatgagatcct

SEQ ID NO: 180141 - DNA, 445 bp, Glycine max
  unsure (1)..(445): unsure at all n locations
agcttctagtgatggtgcagggctaatgttgtttgttgaaagtggtagaatagtatgtgaggcaaaactggttgatgacatttttcaagtactaagaccttataaagttgttccagcaattgcattggataaaacaggattagcagctgttggagttagatttcagtccttgtcaaatctaggatcacggctaccatcacctagtaagacctcagtgatgtcctcttgtagttcaagaggtgttagtccatcgcagtcaaggccttcaattcctcctagaagggctagtccatctcgaatgaggccatccaattcatccaaccaatctaacaatgcattntcagtactcaacaagatgttggccctacatattgagaagttatgtttaattgtttacgctactctatcatgacatgttattcataactcatattaatgatggata

SEQ ID NO: 180142 - DNA, 450 bp, Glycine max
  unsure (1)..(450): unsure at all n locations
nntggctacaaccttttctgcgcctgtggcaacatcaaaaagccaaagaacccggaaatcaacacagttataacaatggagtagcaagatataagcatcagagtattaaatacaataagccaaactcacaaacaagaaataatcaaaccagaatccaaataactgaaaatgtcaacaaccacaaaacatccaagactgaaatttaaaatccacaagataaataagcaaagtacttagcataataatgtaaattctaagaaactaaaagccaaaatacacggcttataaaagataaataatcagaatctaaaagctaagaagacggaggaggtggtggaagatcgaaactctgacgaatgtatccgacatcctcttcaagctgtgtaagacgaatgtccataccggcaaagcgtgaatctaacgagtcanagcggtcaccaacatacaaac

SEQ ID NO: 180143 - DNA, 450 bp, Glycine max
agcttcgaatgctctattaatggagttgattagaatatcttcagactgatcaacacatgcacagtggccaaagatgcatgggagatcctgaaaaccactcatgaaggaacctccaaagtgaagatgtccagattgcaactcttggctacaaaattcgaaaatctgaagatgaaggaggaagaatgtattcatgacttccacatgaacattcttgaaattgccaatgcttgcactgccttgggagagagaatgacagatgaaaagctggtgagaaagatcctcacatccttgcctaagagatttgacatgaaagtcactgcaatagaggaggcccaagacatttgcaacatgagagtagatgaactcattggttcccttcaaacctttgagctacgactctcggatagggctgacaagaagagcaagaatctggctttcgtgtccaatgat

SEQ ID NO: 180144 - DNA, 439 bp, Glycine max
  unsure (1)..(439): unsure at all n locations
tcggggcattgacattgtccnctgttctctggttgttagttacaggggatacaatggctttgaattgctcattccccaagtccccactcttctggatagtattattagtgtggagaatgcgccgtggatcacggggtttcatgcgaatctttcctgaatcatcttgtagggtttgtgcctgattgtgccaaccaaatgcaaaaatgtaaactacagttagcttgacgggactttcataacactaaattgtgactttcaaattccacaactaaattcattcataatcaaggatcgtgatgttaacattttcaattcaatttttagaagaaatagataattggatattaagaccatagccacaagtgaatattcaaaaatttacttcagtaggtatatttaagacaaacaagcattntaccgtggaagttgattgtgatga

SEQ ID NO: 180145 - DNA, 443 bp, Glycine max
  unsure (1)..(443): unsure at all n locations
agcttctctgcaatagagttagggaacaactgagaaatgagatttgacatagcagaagccatgaaagcacataacaggaccttgaagaaacacagaattacaaaaaaatggctctagataccattttagaatgttaagaatgtgagttggctttatttttagtcgatgtgagacttgagtttttcccaacacatcccctcacgcccagcacttcttgggcttggtgcatgaacaacaatagtgaatggccctttggattaatcttgaatatgctctgataccatttttgataaattgagaggaaagtagagacataacagagaaaaaggaaaagaacaaagctatatttattgatctgaanaacaagttagagatagttacaatctatgtatttataaaccctctatacaacataactaactattactaactctaacagaaag

SEQ ID NO: 180146 - DNA, 475 bp, Glycine max
  unsure (1)..(475): unsure at all n locations
tattaggaccttaaatctaagcttagttacatgaatgggaaataattgatggaggtttgctgccttcacacccaatcgataacttgacggnggtacagatgttactggcacaaactagtaaagctaagttcatctataagctgagaacctgngaataataaataaaaggtaatggtcgataattttacctgacaacttgttctcaagaaaatctgtaactgtctggacaggcactataaaatttcctcctcccatcatagcagctctttgttcgaacactctctaaataacataagtattagataaaaccgagatgcagtctatttataacatcaaaacactgacaaactagttgaacattttgcatctgatgcaacatattggttcatttcttatggcacctatgccgaaaggccagggaaacaggaaatagatttacatattctattacttaataattcaaggattgaaatat

SEQ ID NO: 180147 - DNA, 466 bp, Glycine max
agcttctagccaaatggacttacctataattaattcctttgatagcccttttgagccttgtttccctttccttgttttgaagctcactacaagccttaagtgaaaaaccatgatatcaccatatccttaaggaattttggagctttggaattgttttgggaataagtgtgggggggtttttgtttcattggataacttgttttgttggctatacttcatgatgtattttgggccatacttgatgtacattgtatattggttaaatgttggacatgctgaatgaaatgttgtttctcaaaggatatagagtaaaaaaaaacgaacaagaaaaaaaaagcaataaagttgagtgaataagatcttaaatggcacaagaatgatgagactctcggttctactctttatgttaaaatttatctttacttctttttattttcttaatttttcttatatgcacttattccca

SEQ ID NO: 180148 - DNA, 465 bp, Glycine max
ctagagggcatgtctactggggaagcctcgacgagggatacctaacttactttattccgcaataccatgccgagagaggaactcagtcaaagtgactcaagagtccgagtaccacttcgccatgtaggacacttgaaggagagcataaatgaggaaatatggggcatcgcgaagatagatatacctctatgatcactgcgcacattaacgactctcatatcaagtaactacgtcagtgtgcctagaaatccactatttatcccaccaaaaggcatattggtaatctaatttgatgctaacacccttacctgccttttatcattatgtttttagttcgagcgtcagagtgtctttacatatatttctaccgtcatggaaggaggaaataaaagacgagcaattagtacgaagggttccaccaatttaggtcacaacataagttaaatatgataaacataattcgcg

SEQ ID NO: 180149 - DNA, 269 bp, Glycine max
  unsure (1)..(269): unsure at all n locations
ttgttctatttctcaatgataacaaaaaatacaccatctccttataatatcatcccatcacaaatcaatattattgtaatttttaaaataatttattatacaaaattaacaacacttatcactataataanattaacattattactataatgattgatgcaactattacctttacactgataatataaggtgtatatttttcttttgtctaaaacattgtacaaaattgagtataactaacaattcgctttaattaaccttcgtggcat

SEQ ID NO: 180150 - DNA, 453 bp, Glycine max
  unsure (1)..(453): unsure at all n locations
ntaacctcatcatctctcatagtctatagatgtgggagccaatccaatccttgtgtccggtctcttagccgcttatgatagccgccgatgatcccattactacttcccctaagctctctgtcctttcttcacgccgcatcccatgccttgcgaactccttggagtaccctcgcgttgtggtcactgaaatcccgtgcgatgaaaggcgtgatgctttcgtctgatggcactcctctcatggggtagccaagctgtcttatggcgaggaagggattataattaatacaaccccttgttccatcaagggaacatttggacatccttcgcatgaagatagaatcctgattcttccttccttctagcgagggaaccaattaacagacgcccctctatgctagccaagagttggtcccaattcgtctttctttttttcgacgcatgagcggtgacctt

SEQ ID NO: 180151 - DNA, 450 bp, Glycine max
  unsure (1)..(450): unsure at all n locations
agctctcgaaaatgatttctaaacaaaagttagtcgtataaaacgactaacacagacctctccttaccatagcttgcagctaacccttccactcctttacttgacataccagaggaccaaaccacaccagtactggcactaaacacctttcctccagctactccaatacttcatctgataaatgaggaggatgctcagacacaggatacccaggacctgtctcagggattntaaattcctgatgatttttctttctggataatgattataactatattagtttcagtatattgtttttagtaattatatactcatactctttgtgaatagttagtatgcatgttntgaagcttacaaaacagttttacttgatcatgatgattatgcagcgacacacgcttatctctttgtgaaatgggtgtatagactgcttttgatgaatgctgatat

SEQ ID NO: 180152 - DNA, 465 bp, Glycine max
tactaagctcgtctacagatccctatttaagacttcacccaatttagacagttttcttaggtttagactaacttaaactgagtttcgtccgcagatccctcatgtaagactagactcagctcaagtagcttactaaagtttagcctaatttagcctaagctttgtccgcggatcccttatgtaagactaggcttaaactaaacaacattatagtaacacagaaaacataatcaattagatattacgtatttacatcagatgttcattagaaatccccaactagggtgtttagccagccattaaaaagaaactccaacaataaatgagattaaaagcagagaatgatagttccttaaacaagaagggggatttctcatcctcttctcagcatctcacactcactctctactcaataatctctcaaatgacaaaacctaggcttcaatgcacaagatgctcttcttt

SEQ ID NO: 180153 - DNA, 450 bp, Glycine max
agcttctttgagaaaacttccttgagaagctaatgcttatctacacacacccctctcataactaagctcacctccttgagaagcttccttaagaagattcctaaagaagatagagcttagctacacacacatctctaatagctaagctcacctccttgagatgagaagctagagcttagctacacaccccctataatagctaagctcacccacataacaaaatacatgaaaatacaaaaaattccctactacaaagactactcaaaatacctcgaaatacaaggcaaaaaccctataatactagaatggccaaaattcaaggcccaaacaaaggaaaaacctattctaatatttacaaagataagcgggctcatacttagcccatgggctcgaaatctaccctaaggatcatgagaaccctaggggccttccttagatctctggcccaat

SEQ ID NO: 180154 - DNA, 457 bp, Glycine max
  unsure (1)..(457): unsure at all n locations
taaatatcaatcataataaatntaaaattcatggtgtgtatttgcaaaagttaagttaaagattaattgagacaaagttaaaattcaggatgtctatttgtaaaaaagggaagtttaaggaaacttaacgctttttatccaaacattgattatagtttaagtttttaacatagataattaaagcttctgtcatgctctacaaactttgttaacatccttgaaattagggttgtctatgagattgatttaatctggtttaagagaaaaatgctttttaaaaaaagcaatttaatcaaaataattagatccagtttgtcacctctttttatttgaatctaaaccaaactaaaagaatgagtagattcaaacaataatatcaaaacaaaaaagagattcaaacaacaattacaataatttattgcattaacaccaaaattttaataaaaacaataaaatg

SEQ ID NO: 180155 - DNA, 436 bp, Glycine max
agcttagattattcccaggaaagctgaaatctaagtgtgtctggccatttgtgattaaagaagtgagacctcatggagcagtataattgatggaccctacaggagacaaccgtgagaggagatggatcgtcaatggacaacgtttgaagatctataatggcggacaattggataggttgacaagcgttgactacctgaaggacccctgaagaaaggcacaacgtctagctaaagacgataaactaagcgctgactgggagacaacccagcacatttatataaagttagattttattttccaaaaaaaaaaaaaacacaggattttttaggatattcgtggactctcagtccacttgggatgtatctataattgatgactcagaggcctttatccagcaggttgcttggctaggagtacaatcctctactgatgggg

SEQ ID NO: 180156 - DNA, 460 bp, Glycine max
  unsure (1)..(460): unsure at all n locations
tggagaggatgcttcaatggagganaagaaagagggagatttttagagaggggggagcacaaaattgaaggaataaaaaagagggagagaagtggaactttgaagtatgtctcacaagactctcattcatcaaagttacaacaagtgttacacatgcttctatttatagagtaggtatcttccttgagaagctttcttgagaaaacttccttgagaagcttctttgagaaaacttccttgagaagctagagcttagctacacacacccctctaataactaagctcacctccttgagaagattcctaaagaagctagagcttagctacacaccccccctataatagctaagctcacccccacgccaaaatacatgaaaatataaaaaaaaaagtccctgttacaaagactactcaaaatgccctgaaatacaaggctaanatcctatactactagaatggg

SEQ ID NO: 180157 - DNA, 459 bp, Glycine max
agcttctcgaggaagttgtcccattaaagcttctccaggaagctacctagtctataaatagaagcatgtgaaacacttgttgtaactttgatgaatgagagtcttgtgagacaaacttcaaagttcaacttctctccctcttttcttccttcaatttcctgatcccctctctctctttctctctctatttcttttcctccattgaagcaccctctccaagctttttatccaaggcactctcttggtggcgaagctccttcttccatggcttattcccttgtggatggtgcctcccctcacctcttctcctttatcttccgctgcatctccatggtgggaaatcaccattgaaggacctcattgaagctcaaagatccagcctccattgaagctccagaagcaagcttccatcatgaagtgtgacacttagttcctaaaccaacctctcacaagtcaatc

SEQ ID NO: 180158 - DNA, 455 bp, Glycine max
tagggttcaactcaatcaatcagatgtaagctcaaaatggttgctaaggattcatcattcatgaacagggtaagctatttggctaagtggctaattcaatcaatcacaaccttcatcatttccaaatcatgcattcattaagtattcagagattcatgcaaaaattggtactcaatgctagtcgttctctcacaattaaagttcacacaactcactgggttatggctaatgattacattcactatttatctgtcaaacaaactaacaatttcactcacgcccctaattcatgttctttctcttctaattacctcatacttattcaaagcacgtgatctaacattgcaattcactcaagtcatgcaatcaatcaaattcaaaaccaataacaaacaccagaaattaaaccaaaacaaaccactgcatataaattaaaaaactgtaaactgttcaaa

SEQ ID NO: 180159 - DNA, 454 bp, Glycine max
gtgcaagcttagctgtcttccacaagattgctgctcatgcctctggactaaatcatgtaataaataaaggtcaaaccagcagaacaaacaacaagacttttcaattagtaaaattatcaataataatgcaagtagtcaaccatatcactcactcactttctctctctctctctctcacatacacacacatatataatatatatgagaaagtatcaaataagagctcattgtgagaaatgaagaaaactaaaaatatacaccattagatcgtatttttaattggtgtcaaagtttgtgttgcttttttaattggtcctgttgtgcacaacacactgaccaatattgtcactcatagcctctatttctcacactgcccaacattgtccgtcacactctcagactcagcaacatacctttataaggctttaggtgtggcaggaaaaacaatttcatg

SEQ ID NO: 180160 - DNA, 456 bp, Glycine max
  unsure (1)..(456): unsure at all n locations
tgtaaaatagatatcaagggcacaccggagaccggtttttttatcccaggttttcataaacaaagaaaccgaagaggcggcagagctgcacaggatcggtaaagagagagaagagggatgaaaaatatatatttattgaaacttgaaagaagcgcttacaaaaatcttgtttcagagcacctctcttcagaaacctcaaaaatggccaaatgaaagggtgccttacaacatacttgaggactccttatatagccaaaaatctaagactggtagttgccggtagttttgaccgggactatttgactatntgttacaagacgagtagttttgaccgggactttaatggctacaggacaggtagtattgtccagcattaattacacattaattacaaacagatggttttgtgatcgaaattaaatttaatctaaacagataccaaaacaatcatcttcg

SEQ ID NO: 180161 - DNA, 366 bp, Glycine max
caagcttgggttccaattgctggattacatatttgccactctcctcaagaaaaggatgtagaatctacaaccaaagactcagaaaaagggggtcattcccaaacatctcctgtggttcttcaagaaggtgaaaaattataagatttcagtgcaaatgagtctcatttggctgctaaacctgatcctccatagctcaattctggaatcaatcagagaccaacaagggtcactacacctcttgaaagatatggttttgaagacatggctgcctatgcattacatgcagctgaagaaatagattcaaatgaaccacccacttaccaagaagctatcaatcatcctgaagctgaaaattggttgtaacta

SEQ ID NO: 180162 - DNA, 467 bp, Glycine max
  unsure (1)..(467): unsure at all n locations
cctataaaactaagcttaaaattanattcaaatntctaaaggctggtataaaactttttttacttccgggaatcgattacaagccttgtgtaatcgattataggctttaaattttaaattcaaaatttgcaaatttgtttctgaaatgaatctggccactggtaattgattataacctctggtaatcgattaacagagagtaaatatcatatttatgaaatctcanaaacttttgaaaaatatcctttggccaaacctgtacatcatcaattaagaaactctttcttagattctaggaactaagttcatcaattatcttgaatttctggattattgacttggatcaaacgagaaaagcgtttatctttggcatcatcaaaacttcataaaacttcatatcatatttgcttctacaatgtataaatattaaatatttatataattattggtttgaagttaaaaagtat

SEQ ID NO: 180163 - DNA, 358 bp, Glycine max
  unsure (1)..(358): unsure at all n locations
agctggggaggaatgcctactccatgctgttttnttttataataggatagtaaactctactacttattctcctttggagacagtttatggttctagtccattgtctcctcttaattcgttacctttgcctaacacttttgctatgatgaataaggatgagtttcataaaaccaattttgttaagagtttgcttgagaagaggacacctcacattgagaaaaagattgaacaatatggcagatatctccataaggggagaaagacaatggttatgaacatcggtgattacgtttgaatccacttgaggaataataggtttacttccaaaaagaaatctaaactctaagaaaagggagat

SEQ ID NO: 180164 - DNA, 451 bp, Glycine max
  unsure (1)..(451): unsure at all n locations
tctccacactnttcattccaagcaaagttttgtttcttttgaggaggttcataatgggtttggccttctcagcaattctttgcagaaatcttaacaaggtggctattttgccggctagtctttgagcctattttacatttcgaggactcctcatctccaggatggcttggcatttgttcgggttggcatgtattcctcggtgggtgagcatgaaacccaaaaacttcccccctctaccctaaagacacactttttagggttcaacctcatgttatactttttgagtggccaaaaacttcttctaaatccgccaagtaggttgtcagatttaaccactttgtcaagtcgtcttaaaaaacgtagtggcatttttgtaaataattgcaacttttcaaanatagatcttgcaaaaccatctntgaaactacatactcaaagtcaattttacaag

SEQ ID NO: 180165 - DNA, 447 bp, Glycine max
  unsure (1)..(447): unsure at all n locations
agcttataagaacaaaatggcctctatcatttctaaatatgcatgtgaatnaggaagcatcaacaagaatcaagccaagactattgtgcaagcaatcaatggggcaaaacacaccaaatgattatgatgatggatggctcaaattctcacaaaggtaaactcatcactttcaaattgagctttcaaaactatcatgacatgtagaggagaatcaaggatttcaagtcacaaaatgtcaagaacttttattntcaaaacaattacccatttcttgaacatattctataattcaaagaaaaacatgcaaagtcgtacatgcacacaaaattgacccacaatattaaactataaatncgacgaaactaacaacattaacaaattaacacaactaacacaataacaaaaccaacaaaactagtcaaaccaaagaacacctcccccatactt

SEQ ID NO: 180166 - DNA, 402 bp, Glycine max
cgaatcttggattaagagagagctgtcaatgactatcattcttgatcaagacttagtttgagatcgataactatgtgattaagaagatagtacccttatcaaacaaaacaaaaagttatattgttaaatgtgtgacataaaaaccattcattatgttttcatttataatttttttgagatattgttgatttattatagtaaagcatatatacaatttagaattttatttttgtacctccttttgctctaagaaaaagttaagttcacatcaactaatcacattagatatttaatgtgattaatgttttttttttcttgcttcatgggaaaggaaaaacaaagaggatcagaccatccctgtacaagagaggcaaaagggaggggaggatcaagaatgcataa

SEQ ID NO: 180167 - DNA, 470 bp, Glycine max
  unsure (1)..(470): unsure at all n locations
ttaagtcaccgcggctgcagcttggaattcttaaaaataatttttatgttcatatatatactattcaacttttcttctggccagtgtgtctctttcgtgtcacccttaagttgttagtgataatcattctgaattcctttttttattattgtgactaccatgtataacattaaataaaatatttttacaaaaataaaaaaaatatttagtggtagtaatttcgaatccacttcttgtgtgattattacaaaaccttatgctattggtgataactattttgaatatacttattttntattattattgcgaagacctatttctaaaagtgattccaaaaaataataataaatgataaaatgttgggtgatatgatatccattcgaatccacctcctatttgattattgcaaagatcttgtcccaccctctcacaaaaaaaaacaatcttgaatcggccttttatatttcata

SEQ ID NO: 180168 - DNA, 448 bp, Glycine max
tgccccacgtgtgtggcctgtgatgaacaaaggctctattatattgttcaacaactctatacatgacttcgatttgtccatcactctgaggatggtaagtcgaactcatcctcagttgcgtcccactcaattgaaacaattcgcgccaaaagagactgaggaacagatggtctctgtccgaaaccaagctcctttgtagcccatgaattttgcccacgatttcaatgaatagggaagctacgacatgagctgtgtgtgctgccggtaacatgcccaaatgtattcctttcgagaagcggtccactacgacgagtataacagaattgccatggaatgagggcagtcccaagataaagtcaagggaaaggtcctcccaaggcctctgtggaacaggaagggggcaaagcaaccctgcgatcttctttgtttcgtatatggtctgttgaca

SEQ ID NO: 180169 - DNA, 435 bp, Glycine max
agcttgagaaatacaatattgactaactgtgcatgaggacaaacatcccatgctaaacgataaagcatgagcagtattaaattatgttaagataagacaccaccacattgggttgcatgaaacctaatgtagtgtgtaaagaccatgttaaaacagaactaacccatttggcatgatgggcattagcaactctgttgaatttatgcaagtgtaggataagcactactactaccatgaaagtaaccgttatttaatctctgtcactgtaagctacatggtcagagtgccaaagccataagaaaaaaaacctataaaagcttatctctacacttgttcatcttcaacaaaattaaagtattatcaatccgttaccttcaggcatcaatcaagaagaaaagaacaatcaaaatgcccagcaataagaaaggacttgac

SEQ ID NO: 180170 - DNA, 428 bp, Glycine max
  unsure (1)..(428): unsure at all n locations
tgccgccacggagtgttccaactatgctcttgcgtggtggtacaagctacangaggagagagcatgatatgaatagccaatggttgatacatggacggagatgaaaaagatcgtgaggaagcagtatgtgccggctagttactcaagggacttgaaattcaagctgcaaatactaacccacggcaacaagggggttgaggagtattgtaatgaaatggatgtgctcatgattcaagcaaatattgaataatatgaagaggtaactatggctcgagttcttaatggcttgactaatgatatccgtgatattgatgagctgccggagttcgaatgaatggatgatttgcttcacagagcaatccatgtggagcaacaatttaaaaggaatggagtggctaagaagagtattgcctactctgattcttctg

SEQ ID NO: 180171 - DNA, 476 bp, Glycine max
  unsure (1)..(476): unsure at all n locations
agctntacatgaagactcattaggagctatattctgtcggtatcttaatggtaggacctctgcacactgacaattgcctcaagtgaaactctgttgttgtgcttgatttatgtaatctgagagtcgaattcttaataatagatcgttgatgaagtccatttcttcccccatagaacccccattaattaattaattggtggctactttaccagtcggctcatagagtattaaaaaccttagattttatgtctgcatcacgaaatcgtaaatatggacaaaccaatatttgaacaaagtgatattgtctttgttaattcaaagggacagtgggaaacccacccatctttctatgatttattgaaggtgacaatctttgtgcaagctctccataccatatgttggcatgtacgaacaatggcgaggtttcacaatatttctcttatcatacagggttagaacgtgtacgtccatacttg

SEQ ID NO: 180172 - DNA, 461 bp, Glycine max
  unsure (1)..(461): unsure at all n locations
ntaagctccttctcctctctattagtgagacaatcaagggcattgtctagagctctctcaagaagggagtgcatagcgaattgttgcacaacattttcaacttcatgttcaatagcctacaccctagagtaagcattgtaataacttggatgcttcattgcctcaaaaatattaaaggtcatcttttggtcctccatgcttagctcaaggttttcattccccgtgtcaatggcacatctagctgtgagcataaatggttgccccaagatcaaagacacctcaagatcctcttttatatccattacaacaaaatccattgaaaatgtaaaatattgaacttttacgaggacatcttcaacaatgtcacacggtcttttgatggagcgatatgcgagtagaagagccatccgagtttacatgagttccaagttgccaattctttagagcatcgaaagaaacat

SEQ ID NO: 180173 - DNA, 468 bp, Glycine max
  unsure (1)..(468): unsure at all n locations
agctggtaatatgtgnatttttatgataattaataatatgtattaaataatttattacattttgtttgctttataaccaagatgaatattttactattatatgttaaaaaagaatgtaccaatattgtttaaaagtagtgttaaatatcaagtgatgcataaattacagatatgttacaagttacaaaaagattgaataatattattttataataatattaaatagaagtgaaaatatttttcaactaagatatgctaaacaagatttaacaaaaaatgaaaattcatttataaaataatatagcataatactactaattatttaagtttagttgatgaatttgttaaattataacaataaattaaacccacaaaattttgtgttatatttaaatcgaatcaaatcaaattctatattattaagagaaatgatagacatgaaccctaattcgggatgaatgtgagagg

SEQ ID NO: 180174 - DNA, 462 bp, Glycine max
  unsure (1)..(462): unsure at all n locations
actaagcttgatctaccaccaccatcgccaccatcatcggagnggtctattatgttatattatnagnactttgatttccagccttgtattttggctatattattatgatatttgaacaatttactatttccttatttgcatggtatgtttgaacaaatattaagtatgttatttgactatgtggatttgatagttaatctattcatgattgttgcttcatggttcttgcttcatgatttggttaatatttttccatgaatgttgtatggatgcttagttatatatgtatgcctcaaatttgttacgcactatggctttttgttgatgccaaagggggagagaaatagggattaaatcaagaactcacatgagtaatcaacttatatttaagagaaacataaattcaaaaacaaagggggagaatggaaatttatgtgagtaatcgactatgaaaaaatgtgt

SEQ ID NO: 180175 - DNA, 395 bp, Glycine max
  unsure (1)..(395): unsure at all n locations
agctgggctaattcctttgtctgcattgctgtgtatgaaagatgtggctacctaactcccctttctttttcaaaactttgttgcaagtctaccactccaagactttgtagcctctgaagccaggataatatcaaacattaacatcaggttccacaagtgcaataggtggaggggatggaggtagaattcttgaaggaagaggccatggagtgcctcggtctggatcttgcttcatcaaacgacgatcatttctttgaaagagaataatcagtctaatgggttcttcaatcatgagttgcaccttccttctttccagacgcattnttatatttgtcatattgacaaacgctggagctccataaatactctaagagtgcgtttgaatagaaaatttt

SEQ ID NO: 180176 - DNA, 459 bp, Glycine max
  unsure (1)..(459): unsure at all n locations
tatccaaattagctaccaagttaaatgaaactataggctccaactcaatgcaccaccaaatagtagaataagttacacattgccattgtcataaaaatggaatcttcaacaatatcaaaattatggatagcatagttatgtaaggaactaagaacctctatgcttctcatttcaaatgagcaaatcaacgtaatctataacaagagcattaaagtgcacaggatctggattaagtacaaaatgatagcacggtatgccatcatttaatttattacaaaagtcataatctttttccctttagcccacttcttcatttttttagctgttgccatggtgaagaacgaagacgacgagaatccaacaacactaacaacaaacaaaacaaaagtatatctacagaacacatgaagtccatcatacctaanaatctttcaaaatatacccaactccactaaccac

SEQ ID NO: 180177 - DNA, 473 bp, Glycine max
  unsure (1)..(473): unsure at all n locations
agcttcatcatttcctcttctaggtggaatgttttgctctcattaaaataatataatgaaacctagagtgtctaatggaataattaaggtgtctagtaggtgaaagtctaaaatataattataagaactgctggggacttctacacgttacaatgaatgcctagccgcctatttattgaattgtagttggatttaattaagaagataatcacaagaagttacaaaccaataatatctttaattaactcaaataattatcttcttctttagctgatttatccttgaaaaacattttcctcttgattttcctagtttgcatattcaattttcgcaatttctcattccagaactttctgttgattatgggcctttggagatcttgccagaatgacttgtttttactgaataactatcaaaaattcattacaataactaanacatataanattctacctgagacacaagtaaaaatg

SEQ ID NO: 180178 - DNA, 454 bp, Glycine max
  unsure (1)..(454): unsure at all n locations
tgggaaataaaatgtgaaaagcaattagcctacataggaatctttgaggcgtggaagagcctcgaccagcaagagattttcaacggcgcatatctgtataatttaatttgaactttgggtacttcacattgttttaaaaaaatcatgtttttttcatttcttgaaagaattaatccttccaagttgaatcgtgaggatatatgtcttgctgtgttgttagaatttgatgacttgatcaataattttttttggaaaatattgcaattaagccgcggttgaagagtgtgctctctttcttgtgcacatgataaaatctcatctttgatgctatacagaattaaagaactagtgtttgaaaaaccaaaattagactaaattatgtaactctcattattacttccctangttttgatgtaatcccctgtgcaattaaaagttgatataaatcaaacac

SEQ ID NO: 180179 - DNA, 458 bp, Glycine max
  unsure (1)..(458): unsure at all n locations
agcttgtaaaaatgaactcataacttcaatattattntttattattaaatttatgatatcaattttcatataataaaaacttaataaataaacatttaatttaattatttactcaatcacactctatattatatatcaattggaataaccaaattgcaataaccatatgttaccaaacaaactgagggctgaaagtgttttaaaaaatgttaaaataaggtcgcgtggaattatggtaaaataaatactaaaaattttagagttcggaagaagaaaggggagaataaaattaatacacaatattcttgatttgcatcacttaattgtttgagttgttacgttatcaatgggttccagacatccctaatgatcttcatacaatgatgatgagaaatatggttgacttttgaacctgaaattagtgtatcaaatcgtgtagccacctgcaatgccaacat

SEQ ID NO: 180180 - DNA, 480 bp, Glycine max
  unsure (1)..(480): unsure at all n locations
tattacggacactatgaatactaagcttaacaacactgaaacacacatattataatgaaatctagtataaaataatagttaaaattacaacattgaaactcatgccaagtccaaaacacaaatattataatgaaatcaatggaaaaagacctagtcatatatcaagtgcaatgaaaaaccaagcacataaattattattccaaagttttcatataacttatgctaaaccgagacacaagccataacacataaaaaattaatagcacaaacaacataacaaaatattaattgaaaacctagaaaacatatatgaaacaatgttaacaataacatctgacaaggaatagccatcacatgtatggtgctttacattcaaccaagagctactacaacacactactactttaatacaattaatctgctatagtcataacaaactnttccttttctttcttnnttttttgatgaaaaggaaaaaca

SEQ ID NO: 180181 - DNA, 466 bp, Glycine max
  unsure (1)..(466): unsure at all n locations
agctnttacataatgcttgtgattgatcttttcagaagctaatgaaagctaacgcattcccactttctcttctctattcgatctctatcaatcttaaacgcattaagagttttgttcttgagtgttggataactgaaaactttgtagggtgtgtgtgtatatatatatatatatatataataacattttctatcttaagatacatcctgtatgcataaaagaatgtacctaatcaatcatagtagtactaattaaggaactaatttaaaaattctaggtatcacatggtcattatgtgagctttttttgtgctgaaaaaatatgaaaaaaggagttaactaggttctaccataaggttaattcataagcttaattactacattagtctctaaattattatccctaaatttctaaacactccaatcaagttcttcacactttaaataaaaatgtgttaataatgtca

SEQ ID NO: 180182 - DNA, 451 bp, Glycine max
  unsure (1)..(451): unsure at all n locations
tgaaggtgtgtaacccactaccttctcatagtataacactggtattgtgcctactatcattgttatcatctccctttccatcattgggggcgccacttgggctaccaggtccctccacctttgggcatatcctttgaaagattcgtgctcctttttgcacatgttctatagctgcattctatttggagccatatcagaattgtactgatactgcctaatgaaggcaaccattaggtccttccaagaatggacttgggaaggttccaaattagtgtaccaggtgacggctgccccagtaagactttcttggaagaaatgcatcaataatttttcatccttttcatatgctcccattttcctgtagtacaccttcaggtgattcttgnggcaagttttcccctcgtatttatcgatgtccgttaccttgaactttagaggaatgaccacgtca

SEQ ID NO: 180183 - DNA, 467 bp, Glycine max
agcttcttatccaaggctcatcttggtggttaatctccttcttccatggcttattccttaatggatggcgcctcctctcacctcttttcctttgtcttccgctgcatctccatggtggaaaatcaccattaaaggaccccattgaagctcaaagatccagcctccatagaagccccacaagcaagcttccatcatcgtacgtgtgatctttgattcgataggaaatcgtgtgcaaaataaagtcatggtgcagttatggtttggggtttagggtaaaacacttgcctgcgtgagtttttatacactatgagtgatttattcccagtttcagcttaacccgatgttttccctgaatgttcatttaaaagctaaatgttcacgtcctgcccttcattttcggttacaaggaagattaaccttggcatgggtatattgcttctctaagatatggtgctctcgcgaatgat

SEQ ID NO: 180184 - DNA, 481 bp, Glycine max
  unsure (1)..(481): unsure at all n locations
tattacggacctataaatactcaagctaaaggagcactcaaatcgggtgtatttacccccatggtttatactccgaagagtccgtcagggcctctccctcctgattcaggtccaacccaaaaaacattttagcacacagactttatctatgaactgtacaaaatacacgactcctcaattgttctcaaaataattttatctaatcgcgcttgtgattaaactcgtcaggtcccaacagtggttcccatcataatactcgccacgcattaactcgtcgcccttagattcatagttcacaaatcagtgcacacaacatctcaatgcacatatatattacaagtcaatacatactcaatttatcacatacatttggtctcaatcacagtggtataatctcaatttaacatgttatcacacctcatgaatcatatacacacaactactcaattnttttcaaaatcantttaactcgtcgcgcctc

SEQ ID NO: 180185 - DNA, 300 bp, Glycine max
agcttaaactaacaaggaacaatcttatattcttggttaccccgaaggaaaacaaaaggtaagattagggcttcgttctctatcgaaaccgcgaagcaagttagaagatttcgcttcgattgaagggttcctctcggtgtgggatttcaaaggagaaaaatggcggtttgtggtggctactactggttgcgggtgatggagaaaaagcttggcacattgcaaatggttttggaagaaaggaggagaaggaaatggcacttttccaaggctacacaaaaagaaaaggctgaaacactcaag

SEQ ID NO: 180186 - DNA, 450 bp, Glycine max
  unsure (1)..(450): unsure at all n locations
tagacganatgtatcatcagaggttacacgaagaggaagacaacgttagtaaaanaagggtatgtcacacgcgaggttacacagagaagaagaaagcacgagcaaactaggtcgcgtatgacataatttaaaatataagtccaacatcgattttcaatacaaaatcgatgttaacgttaacatcagttttttttacaagaaaccgatgttaactggtcataacttaacatcggttttcataaaaccgatgttaacgtacatatgttaacatcagtttttttcaaacccgatgttaacgaataaacattaacatcggtttttccaaaaccgatgttaacaaattaaagttaacatcgattctacaagaatcgatattaacgtcacttcgttaacattgggatttaagaaaaccgatgttaacggatgcacattattcataattatgccacc

SEQ ID NO: 180187 - DNA, 417 bp, Glycine max
  unsure (1)..(417): unsure at all n locations
agcttacccncatgacaaaatacataaaaatttaataaaagtccctactacaaagactactcaaaatttcttgaaatacaaggctaaaatcctatactactagaatggccaaaatacaaggcctaaacgaaggaaaaacctattctaatatttacaaagataagcgggctcatacttagcccatgggctcaaagtctatcctaaggctcatgagaaccctagggccttcccttggatctctggcccaatctacttggagtcttctatccaatgcccttgcggggtaggattgcatcattccctccaccttggaaaggatttgacctcaaatcctgaggttcttcatactctgggcctctttcctcaacacctgtaaaaagaataaaaacatatgtattagtggtggttggtatgttg

SEQ ID NO: 180188 - DNA, 440 bp, Glycine max
  unsure (1)..(440): unsure at all n locations
nganatgaggaagtgtggaagggtgagacttccttcttttattgttgaccacagagtggtacctggagatatgtcgcgggggtcaggagaccttggggacgtcaggtggggtgctattgcccaaaaccaagcttgaccaatcccgacccaacccgggcatagtcagtcagtgagaacctgtgatgtacctaaacaggcgagctcctggcagtcaacagataaaagaacaaagaccacaaagcaaggaggcttgtgtggtggctggccagctgtgaactttgagtgttatatgggatatggtctctggtaatcgattaccaagggtgggtaatcgattacaaggcttaaaaacgagatccgaaagctaagagggctcttggtaatcgattaccaaggggtgtaatcgattaccaggcttagaaatgaaggcagcatgttgt

SEQ ID NO: 180189 - DNA, 341 bp, Glycine max
  unsure (1)..(341): unsure at all n locations
agctntctagcttttcattggtgtattttgttctttctttggngctctaaattgngggaatgtgctcaaatatatggggcaattttggtttgttttcttgcttgattaggttgaattaggggtttgtatgggatggccctaggcctataatgcattttggaacgatgggacatgccacattgtccccgttctcttgctattgacgcctaaacgcgcgcccaccaagtgttcgatgaaatgcctcaatggcattagcgcgtgacttttgtaaggaaacaacccatggggcattttggtttgtacatattttctatttttggaatatgtattcattcccgaaa

SEQ ID NO: 180190 - DNA, 447 bp, Glycine max
  unsure (1)..(447): unsure at all n locations
tataaagaaaaaatatgacatgattgtaacccaatcacattatgttgaaaagttattgaagaagtttaattattttgatgtgaaacttgtttctacttcttataactcattcattaagttaaagaaaaatttgagtaaaggaatttcttcacataaatattctcaaattattggttgtttgttgcatttgacaaacttctctagggctgacattgcatatgcagttgatagattagaaagtaattgagggatttagtgatgcaaattggatttctaattctaactaaacaaaatcgacaagtggttatgtttttactttaactggtggtgcattatcatgcaaatctgttaaacaaattattatntcatgttctaccaaggatgcaaaaattatcgctttagataatgctactagtgagactgagtttcttaaaaatatgtatgtga

SEQ ID NO: 180191 - DNA, 370 bp, Glycine max
  unsure (1)..(370): unsure at all n locations
agcttccagagctggagaaggaactagtcctccgcctcctctcccaaaacctcccgccagaattccctcccctaaaccctaactcccccgaattccgcaactccctccgctacgccctccgcatcctctccagccgcctcaccccctccgtcgcccccgacgccgccgccatcgccgactccatcaagcgccgcctcgctacccacgggcactcctccgaagccctctccttagccgacctcttctccaaattctcctccgaagcccaaagcgtcaacaacaaatgcgccgtcatctacctcctcaaaatcgtctccgaagatcgccacaccaccaccgcaaccaccacccctctccntcccaacctcag

SEQ ID NO: 180192 - DNA, 427 bp, Glycine max
  unsure (1)..(427): unsure at all n locations
cgcttgtatgttagactgagatcattcttgttgntctttttttgttnnntaagcttaaattgaggattctgaatttaaagttcaaaagctgtggtctattgttctatttcaggtttggagattcttgattacttttgctgatgtacttgatttatggccttttactcttgacgagtttgtacaggcatttcatgactatgtgagtaaatctggcctctgcttttgattttgtgctgcagctgaactggatttctgtgcaccctttgctcattatgcatgttcaattcaaaccatttgattgcaggattctagattgttgggtgagattcatgttgttcttctcaaagtgataataaaagacattgaagatgttgcaaggacgccttctacaagattagggatgaaccacaatggtgctgctaatcct

SEQ ID NO: 180193 - DNA, 312 bp, Glycine max
  unsure (1)..(312): unsure at all n locations
taccagcaagaaatacattaaaattcttatatttcccnncacaacnccttagaatctacatttaaaagtttaaattcattgtacataactagattcttaactactcaatcaatcatgaatatatgacaaaacttttaacaccacactctaagcgtcttggtagttggtataactggaaatggataataagttcagcaaacaaatgcaaacacttgcctagaactagtgcttattaagtaaatggttgaaatcacatgccnctgacgttaatcttctgccctctcttagtcttatcagagcattaagcagttg

SEQ ID NO: 180194 - DNA, 454 bp, Glycine max
  unsure (1)..(454): unsure at all n locations
tgccctgtcacgctaagcgcaattatctctctgtttttctatttgttggaattgggcttagcgagcttgctcgctaagctagtgttgtccagtagagtagtcgcacttggcgccccttgccgcactaagcgcaaatccttatctgtttgaaaatttatggaattgggcttagcgagcctgctcactaagccaattctacagaaaaaaaattggatttgtgttcactcgctaagtgtgtggctatcgcgcttagcgcatgagtcgattttcctaaggcgcgctaagcgagtcacttgcactaagcagaaaaataaatgaactcctgtcttcactcctcctgagttgttgttgggtcgtcctgaggtgatgtgggggcatcctgngctggcaaaggtgtggtgtcctgtgctggagtgggccaaggatcccaggtgccttgtgcggctgtgatgtc

SEQ ID NO: 180195 - DNA, 477 bp, Glycine max
  unsure (1)..(477): unsure at all n locations
agcttgtaggattatggggtacccatcacatgtggtactaggtggcggncgggcgatggtgcacaacaagttttccacatccacaaatcgcgcataaacccaccatcccctgttgcccacctccaactgagctcacgtactcccacgtagcccatatcctcgtttctctcaacaccgggtccccatcaatcctcccaagcttccccaacatccaagtaaaacaacattcaaacagcaaaaactatcacagccaagcaaaacagggcaaaggcagaaaactctgcccaaaacaccaaccaaaatcacaacttttctcacttaaagaccccagtaacaattccttcgttccaattcgttaaccgttggatcgactccaaaattttactggaagtctctagtacataagcctacattntgaccgttgggatctactagcaaacatccagaactcattctacactgctctttccacaacca

SEQ ID NO: 180196 - DNA, 450 bp, Glycine max
  unsure (1)..(450): unsure at all n locations
ntaaacggaaaagcaagtaccttgatggatggcgaaaaacatcgagtcatgttctatccaaggttatttcaaacacacccttagaaaaagcagcgataagaagtagaggtttaagaagtgagacaagaacaaaaaaaaaagtgaaaattttataggaaagaaaaactctgtaaactaaaaaaatttcaactaagttgaatttaaattaaaagggaatcatgaatagagtttgtagaaagaaaggattattttaacttgggggctggggcaaaactatagcggttattgcggagtttggcaggtcaatgcaatgtagaaaaaatgcaaaccttaactaaattcgcaagaatcatatccaaaactatagctggacccncttttttttttgtttccctagtatctagtcaagatatttattggttgttgcattagaattggtcttgtgtggag

SEQ ID NO: 180197 - DNA, 348 bp, Glycine max
caagctgacatgatgagacaccttgattatctgttccgatattttccagacaatttctatggaggttatgaagatacatgctcctcttgctcatgctgtgggaactacctacttgtcactggaattggaagatctctcgtttcagcacttgtttccttattcatatctttatgtggattttttgcggttcgaaagtcacaacactgggggtgtctctctaattgacatctacaaggaggaattgctccacaatctaaaggctgatcccttgcttgctgaacttgtggatgatgtcttgatcaaaggtcgctataagagttcttataccacaatgaacacactgctgaa

SEQ ID NO: 180198 - DNA, 458 bp, Glycine max
  unsure (1)..(458): unsure at all n locations
ntgaaggtgcgtagcccaccattntccatagtagaatactggtaatgtgtctaccatcattgtcatcgttttttcatcattgaggtgccacttgagctgccaggttctccacctttgggcatattctttgaaagatctgtgcccccttttttgcacatgttttgaagttgcatcctatccgaagccattataccgacactgcctaacgaaggcaaccattaggtcctcccaggaatggacttgggaaggttccaagttagtgtaccaggtaacagctaccccagtaagactttcttcgaaggaatgtatcaacaattcctcatctttttcgtatgcccccatcttccgataatacatctttagatggttcttggggcaagtagcccccttgtacttatcanagtccagcatcttgaacttgggaggggtgatgatattgggtactacgaacaactctt

SEQ ID NO: 180199 - DNA, 442 bp, Glycine max
  unsure (1)..(442): unsure at all n locations
agcttagntgttatcaatgattatatcattttcacccttctttgagctaaactgtaattgtattgaaccgtgagccttgagttgtaattctgatgtgccatcattttcttctattttctaaacccttnttgcaccattttaatttttgattggccttaattgtcaattaatcaggcagttttattattcgggctcatttagctaatttgatgtttttaatctaatttcaggaattaatgaaacattgggcttaatccggattttggttgtggacttgaagagggcaaataaagcagtgcttaccttagttaatttctaattaggaaattctccaatttctaattatgttgttcagtgtttttttcgtcttggaccagagtattgtaatagggcccagtgactttgagtgactctcttaaatagctgccttgggatccgtgta

SEQ ID NO: 180200 - DNA, 457 bp, Glycine max
tcatttaactggtcatacatgtgaaccagtgcggcaactccccattcttagcccctagactgaccaaggtctcgaaacacctctagatgcaccacatgaacatggattgcactcttattagcaaaaagagtacaacccaccagatggaggaggtaagcacgcgttgctacaatccaatggcaggcttggcatctactatcatacacctcacggagccatgacagtcgcacgtaagccccatgagcacgtacggtctcagctcgagcctcctcggcggatacctctagaagctcaatcaacagcaagacagccttgtccacgcccagaggctcaaacctatgtaatgcccctgtgataggaagatggaggagacatgccacattgtccaatatgatcgtcaactcccccactagaatgtagaaggtgttggtctccctatgccacctcttcgcaaata

SEQ ID NO: 180201 - DNA, 427 bp, Glycine max
agctttgtgggaaaccagtggttggtgggctctgttttatgttaaagtttatgtgtgggagttataatcatgaattggcgaagtcattacttggacatccatatgttggacaattgactaaggatgaaaagataattattgttgatatgacaaagtcaatggtcaatctaagaaacattttgctaacgttgaaggagtataatgccaatagttgtacaacaatcaaacaaatatacaatgcaagaagtacataatgttctttcattagaggaagtgatactgaaatgcaacatctaatgaagttttttgaacgggatcaatatattcattgacatatattaaaggatgaagatatggtatgtgatatcttctggtgtcaccctgatgcacgggaagtatgtaatgcatgtaatttggtggttttgat

SEQ ID NO: 180202 - DNA, 454 bp, Glycine max
tcctcactaagcggatgagcctcgcttagccaatctggctcgctgagcgagcccttcagtagcatttcaaaatcttcttttctttagcctacaaacccaattaaatccaacattaatcaacaaaatcgagtttccactgtataaattcacataagactaaattatttacaaaaagaaaccataaattagaggtacattgctactctttctcctatttttaatgcaattaaagttcatgaatagcaattaacaagcttcaaccacacaacccttgttctttgcctcgcaccgaaacgtgtggctggtggaggagaagtgcctccagcaccaaatcaatgccacgatggaggagattacatgcctacatggctgcttggtggagctcgatgactgaggagtaagcattttatgaacaataatggcttgaattcaaagtttatggcctccgcttcta

SEQ ID NO: 180203 - DNA, 451 bp, Glycine max
  unsure (1)..(451): unsure at all n locations
tatcaatactacatgtaagtctttcagccattgaatgtnttgactaatctctcttttntacctttcttaacactaccttgtccaacatttgtggcagcttgggtttcaggaataacattatgtcaacttggtcttcaatgtctntagcaaattgagtatcaacttctttatcaatttcttccacagcaataaaagggtcttcaacattttctcctgtggctgcatgcccaagaacatagaagtaaggaaaattaaggcttgttgtagagtcctttatcatcacgatgggactataagaaaaattataaacataatattaaaataaataaaattatataaaaaataccaaaaatgtaataaaaaaaattaagttcattgtctcatttccaagcaatgccatgttcaaccaaacattcaactgggactctatcattattagtagtccattgat

SEQ ID NO: 180204 - DNA, 460 bp, Glycine max
  unsure (1)..(460): unsure at all n locations
taagtcacctgaggcatgcaagcttgtagggtagaagcaactactgttcttgtttttgagaatatatgtattagatacaaagcatttcagctgctctaagaatgaacatcacattttcacttcttctcttttgagtgtatttttattatttctaattttgcgaatctcttgtgccaacagtatccttctacaaacttaagttgaatctttagccaatgaattttcaaaagctaagtcttatttgtaagtttcatgtattctgcaaatggaatggaattgtatatgaagctccaaattgtatgtttcaattatattaataacctcttaaaacaaagatgatattggtgttattaggttaggcacattattctatttggtttttcgttgtatgactgctcgccttatattattagcttcttttcttcttttgctaatgcgactgtnttgagtgggcgactga

SEQ ID NO: 180205 - DNA, 452 bp, Glycine max
  unsure (1)..(452): unsure at all n locations
nngaccaggaattattggatgggttggatgttgagttcatgttgttcctggggtggagatgatgggacagatggtgaaccagaagctgcagtttcttttgatgaggtagccatggaaaagcagagcgtttggaatgatttcgtaaatctcagaaaactattgggaaatgctgatgaaaacacgaatgtcaagcagatatatatttgaatgaggaatgtagagggccgtgtgaagcaacggtcgaattttccttggttcagtagtgaacgtgctattaatgctaagtgattcgtttgggcacgttcagattgctgtagttgctataattcctctagcacacaaatgcccagcttgcccctcagttnttcaaactgatttgcatccaaagcctttgtgaaaatatctgctatatgttcctcagtgtcaacatgcttcagtgtgatcactttatc

SEQ ID NO: 180206 - DNA, 400 bp, Glycine max
agcttcttatccaaggctcatcttgttggtttagctccttcttccatggcttattccctagtggatggcgcctcctctcacctcttctcctttgtcttccactgcatctccatggtggaaaattaccattaaaggacctcattgaagctcaaagatccagcctccatagaagccccacaagcaagcttccatcaagtggtaatcagagcacaagagcctcaagtaggtgctccttaaacctccattaattttttgctttaccttctcttccattgtggtttcttcacttttctccatgtatctcctcacgtgtcttgtgataaatagtgttaacatgattctctatagtttccaccgattaaacttgccatagaagctagatttgatttctatggttcaa

SEQ ID NO: 180207 - DNA, 409 bp, Glycine max
tgttggtcttctcataaagatctagccgttggttggaattctgtgccgaatgacttctctgctccttattgaattggtttcttggatgattcctccagcttgagcctcgtgtgaaattccttccttgattgaatcccgatggtcctccttggttgtaaccttggaattcatggcgattctgaactcccatgtagttgacctccctggaagaatcttcttgggctatgcattgccttggctcgtgtgtttctccacaaatgtgtcatccctgtatttgcatggctgaagagtgagaacgacttatcgcttgtagttgttgtagaagctttctgagggtctctgttagggcccttatttgtcaggccaatagcttattttgcgccaatgttgcatcttgggctatgagttc

SEQ ID NO: 180208 - DNA, 407 bp, Glycine max
  unsure (1)..(407): unsure at all n locations
accttaagngacctgaggcatgcaagcttaaccgagactcgcgctccttgttaatgtgccactannttccttntaacggttcctgcgccaccccctgatattggaggagggccaactgtgcgagcacaaccagagagggaggctatcacacagctactatgcataccggggcaagatttcacccgggccgctgcaaagagacgagtgtggatcatgcacaccaacatgaccactcttacacacatataaatgacgttgttacttatcaacattctgcccactgatcgtaatgccaactctcccctgcaaatgtatcggttggtctgtcgtcccatgacataggtaacgatgcacatggttcaattgatttctgatgtcatctattgttcgcagggatcccgcccaca

SEQ ID NO: 180209 - DNA, 451 bp, Glycine max
taaccatcaagagcagaagctaaacatggtgcttatccgttctttatagaagcaaaacacaatttttgaatgcttaaccaccataaaggcaaaaacaacacaccaatgtttgaccatccatggtagaagcttcacatcaatgcttaatcaccatggatagaagcttaatgattttttttaatatatagttggggttcttgaccagatcaaaccccggggacaacaattgcttcaaggacaaagacaaggaagaagttgctggacaacaggatcaacaaatgactcttttttttttataatataaacacttgagaccctcttgatgaatgaaggggacaacgatattaaacagcagaccacacaacagatgaatagaaggataggagacaatgaagctacacaacaagggttaagagagacatatgaggagggaataatctcacacatcttg

SEQ ID NO: 180210 - DNA, 304 bp, Glycine max
  unsure (1)..(304): unsure at all n locations
agcttngaacatatactgggcctttattttttttctttgggctgggcggccacgctcaacaaattactttcgacacctactgtacgttgatttcaccaatgccgctatgggaatgttgcgacaatcctttaagaccttattgatacattctgagaggttcgttgtcatgtggccatatcgacgtccttctctatcagaagccatcgcccatttttcttttgagatgcgatcaactcatgttgctatggctggacttacttcacgaaattttcttaaattttgatcaaaaatgtgcttgcaagga

SEQ ID NO: 180211 - DNA, 446 bp, Glycine max
  unsure (1)..(446): unsure at all n locations
ntcttgagaaaacttccttgagaagcttctttgagaaaacttccttgagaagctagagcttagctacacatacccctctaataactaagctcacctccttgagaagcttccttgaaaagattcctaaagaagctagagcttagctacacacacctctctaatagctaagctcacctccttgagatgagaagctagaacttagctacacaccccctataatagctaagctcacccccatgacaaaatacatgaaaatacaaaaaaagtccatactacaaagactactcaaaatgcctcgaaatacaaggctaaaaccctatactactagaatagccaaaatacaagacctaaacgaaggaaaaaacctattctaatatttacaaagataagcgggctcatacttagcccatgggctcaaaatctaccctaaggctcataataaccct

SEQ ID NO: 180212 - DNA, 434 bp, Glycine max
  unsure (1)..(434): unsure at all n locations
agctngtctttggtttatatgtgatttatttatgatttaggacttgtaggatccaatttgggaaaatttggatgagggtaagagggatttctaaatctgcccaatttgtgcagcaaaaagctgtcaaattttgtgcagcagaaaattgtgcttgtgcacaaaatgttgtgtattgttggttgtggaaagggtaatacatattgggttctgtacattttctagcacatcccaatggtcaaaatgtagaactatgtactagggacctccagtaaaatgttcgagtcgatccaacggtgaacgaattggaacaaagagaatgttactggggtatttgagtaaggaaagttgtggtattggaatgcgttctgggcagacgtttatgcctctgccctgtttttctggttctggatagctcatgatgtntggatattcaa

SEQ ID NO: 180213 - DNA, 408 bp, Glycine max
  unsure (1)..(408): unsure at all n locations
gtcaacaggtntcttcacgaataactatcatgaagcagataactagcacgaccacccatcatatgtggcggaaccccatacccacgaagtttaagagagaaagaagtccacccaaacctgagatttcgaagtcccactcgtggccacgcactgtacgactgcaaaaaggccctcctttcgcgatttggagcagaaatgatggccaaaggttggagctttgtgtggagcttcaatggagaatgagggagaaagaaaggcaacgtgagggagagagagagagctgtctgaaaaagtgtgggggctgagtgaagagagagaaaagctatttggttttaaataaaagggttttctctttctttttcttttatatatataagctctgccacatgtccctatttgagtggagca

SEQ ID NO: 180214 - DNA, 402 bp, Glycine max
agcttataaagttaatcttatattttatgttctaaaaaaaagatgaacattttcaaagaagaaagatattccaactatactgcataattattaacataaacattggaaaatacttcatattgtatgtaacaccaatcactactacaaaatttccttttaaagacgtttttgtaccctttccatgatggtttagaaccatcttttaattcgtcgtcgtggaaagtgaacacttattatcggcttctacattagttcttgtgaaaccgtcttagaatgatgtttttttttaaacaaaaaatgttaaaaacaaacagatttaaagaaggtttttcaaaaatcatcttagaaggtgtactttctaatatgactttttgagaactatcttagaaagtatatctaagt

SEQ ID NO: 180215 - DNA, 450 bp, Glycine max
tctcgaggaagcctcttaatgaagcttctcaaggaagctacatggagctacctcagtaaaaacgcttcccagccttctttaaccgttggatcttctcaaaatttggtctacagattcacagaacacttttccacgatctgaccgttgggatctttgagaagatgtctcgagtatgtgcgacgtttctgtttccgagagccttagtcacttgtgcgttttgagccttgtagttcaagtagcttcggaaaaatgccatttcttctcctttctttcttccaaaaccatttccaatgttccaagctctttctgcatcacccacagccaccattagccaccacaaaccgccattgttctccgttgaaacccaataccgagaggaatccttcaaccgaagcggaatcttccaacttgcctcgcggtttcggtagagaatgaaaccctaatctaacc

SEQ ID NO: 180216 - DNA, 470 bp, Glycine max
  unsure (1)..(470): unsure at all n locations
agcttcacagttntattttttcaaacttgagttttggaagaccaattactaagtctttcctaactagatgatataaatgatggatgttaatgtgttcaaccctacaatgccacaaccatgaatcatcatctatcttactcaccaagcaacttagctcatgaaaagatgcatgctcaacattcagcatataaatattacctattctcttaccaatgtggacaactttaccagatatggcttcacttataagatagcaatttctgtcaaactcaatcttgaaacctttatcgcaaagttgactaatgtttagaaggttatgctttagtgcatccatatgtagcacattctttatctgagttttgtgttaattccctatatttccttccccagttatttttcctttgttattgtctccaaacatgacatatcatccatcttttgacacanagttagagagtttggacttgtca

SEQ ID NO: 180217 - DNA, 430 bp, Glycine max
tgtaggttcttgttttcttcactggttttaggctcttcatcatggtggtggatttataattgaattggtggtgctacgtatataattaaattttcttctctcccaagctagcaaccttttgcaactcagattcagtggtgtagaacaaatggcaacaccttgtggagaatatatattaattggggctgccaaaagtaaatttcactattcatgtctttggaaattaaacacctagctaggttgttgaaattaagaagatgccatgcatcaaagcatcttgcatggaagtactatttgcctcttggggcattttgttaatttatgatgcttcgtgcttaattgtgccacctcgtgctaccctgtaacatgtcctctcccttctgtctatggacccgtccaaatatacttatctattaaaatattatgtctg

SEQ ID NO: 180218 - DNA, 464 bp, Glycine max
  unsure (1)..(464): unsure at all n locations
agctttgaaccgncttagaaaggtatcattctatgatgttntaatacaaccatcttagaatgtcacatgtaaattctatttatctatttctatttttatttttggccacatgaaatgaccaacctcaaaagtgctttagcaagatcaaacattttggatacaatatgaatattttataacacacataaatgctcaaaaatgaaaatatgctcataattaataattgcaattcacaaatatatacaatatgcatatcattgggctcaatatgcatatccaatattatggaaggaaatatatataggattgaggatgtgaaattttaataaatcaacatggaaacaacaaaaaaggtagtaatatatatatatatatatagattctcatcctaatagtaatatattaaatcagcaaaactacagttgcagacactacaatgcacatttggaagcttctgtaatagc

SEQ ID NO: 180219 - DNA, 456 bp, Glycine max
  unsure (1)..(456): unsure at all n locations
tgaatgttgaaatgggcccttgttcttctggccaacatatatagtctcggaagtactaagtacaaaaatccactttgcatcttctgttgtttcaacaggtttcccactaatcttgtacaagagcctcccattctcaataactacttcataaaattttctttccacctgcaaaagaaacatcttttaaaattacttttacttgttgctngacggtcaagctatataatagctctgagtttttctctaaaataaaacattgtggcctgttcataacctattttaacatgagattgatccttcttgtttatataagaagaaaaaaagtgaaatcaaagggaacaagaaactcactggacccagatacttgatgcattgttgctgaagttttgtcctagtacatctgtcagactgtacctccttgccatccccaatatcaagcctacacttgtagattga

SEQ ID NO: 180220 - DNA, 275 bp, Glycine max
acacccaaggctgagggtgccactactcgccacaacgcctacagctctaactaagacactagtcacatcaggggtctcctactcaagctccaatcattaagctagctctaacggttgaaaccaaactcataacaagattcttaagaatcccacccatctcttctacctcagaatcaactcctacggctctcataacacattacactagccgcaatgcctccacaacgtgaaagtgaacaccgtgactaccaactctagatcatgcacataacaaa

SEQ ID NO: 180221 - DNA, 460 bp, Glycine max
  unsure (1)..(460): unsure at all n locations
tatgttgcanatatttataatagactccctcagcagcataacaaactacagcataataattatgacctttcaagcaatagatacaatccatgtttgaggaatcatccaaatctgagatggacaagtcctccacaacaacaacagcatgtccttccttttcagaatgttgctggtctaagcaagccatatgttcctcctccaatgcaacaacagcagcagcagtcacaacaaagacaacaagcaactgaggctcctcctcaaccttccttagaagagttagtgaggcaaatgaccatccagaatatgcaatttcagcaagagacaagagcctccattcagagtctgacaaaccagatggggcagatggctactctgatgaatcaagctcagtcccaaaattttgacaaattgccttcacaaattgtgtagaatccgaaaaatgtgagtgccatcaccttga

SEQ ID NO: 180222 - DNA, 374 bp, Glycine max
  unsure (1)..(374): unsure at all n locations
agcttcctctanccgaaaaaanatattatcggtcagtgtttttaaaaagaattgcgcaatgtcggcagaaaaatatcagtcgtggctatataacgaccgatgtcaggtatttttgtttcaattcaatccctgaataatttttggatattgtccaataggaaatgttcgatcggcgtcatcaggtgatgcttgctttttattttagacctgctggaccggtcatctttcctggccgacatngactatcattntttttatcagtgtcggagaataatgttttttggccgaggtgggctgatgttttcttggccgagtggatgggaacatgccaatgtcggncgaacacaacctcgttgagctcgacgaaaaaccct

SEQ ID NO: 180223 - DNA, 462 bp, Glycine max
  unsure (1)..(462): unsure at all n locations
nggtgatatgtgtatccatccctgcaaattgtgcatccatggcaacaatacggctatccagcaagtcaaagcgctctccgacaaaggtgtggagtccatccagtctgtcaagaatgttgtgcataagagatgaagagtcatctctctgagaatgtggtgatggagaatggtcttcatcagcctgtaccagagcatccttcttcacccaagagccatccctctctttgtggtatccgaaggaagagactacatttgcaccgatagagaaggatctcttgactttgacaaagggctaagagtcaagagggacattaaaatgttgtagaaacaaggtaatcagatggagatataggagtggagcatttgattgcaatgccttatgcatgcgatatctcacaagatgggcccaatcgatttgatgaccggttaagaaaacccacatgattctcanatcttcctcag

SEQ ID NO: 180224 - DNA, 443 bp, Glycine max
agctttgacatagctccacaggcttgacaaattcccatgcaaacatgtccttggtccaaggctcgacaaacccaaggttcacccttggtgagccttttctgctaataagtttcatctccataggaactcaaggtacgcaaggtttgcccttgacaatctttttaatccctaacttatacctgtgccagaatacaagcctataaaaaaccgaaggtccacccttggtacgcactccttccaaacccaaggtcaacccttggtacgcactccttcaaaactcaaggtctgcccttggtatacacttttacaaaacccaaagtacccccttttgtttgctcacttacaacaactacgatgaccaccgtcaaaggtccaaattcaaaaaaacgaactaccaccatactatttggcaataccttcaatcgggtggaagtcattcttac

SEQ ID NO: 180225 - DNA, 427 bp, Glycine max
  unsure (1)..(427): unsure at all n locations
tctaaactntatacaagaatgaagctgtgatactatttgttagacaagtggccttaaaaatgaactcttaaataattattcaaatagaacaatctgaatataaatgtaaagcaataataaataaacgagtttaagggaagagaaagtgcaaactcagatttatactggttcggccacacccttgtgcctacgtccagtccccaagcaacctgcttgagagtttcactatcttgtaaaatccttttacaagttctgaacacacaaggacaatccttcctttgtgttcagatttctttacaacaagagaccctcggtctctcaatcccctttgagaatttagaaagaagagaagaataattctctcttgaaagagatagattgtacaatctgagcactcaattaattccttattgaattgcaagtgtat

SEQ ID NO: 180226 - DNA, 464 bp, Glycine max
  unsure (1)..(464): unsure at all n locations
agcttatgacatcttcatgtgtatatgttgtcgcatatgccaaatggtaattttaccatgtccctgcctatatctatactacatgtgcataagaaagcaaggagtggtcaaggagttgctaaattcattgctgctattttcaatgtggtttggttcatttggacaagcagaaaccattccagattccaatgtgggccctttacaaaacatgttatctttagcaaagttgtggttgtagtttctcttatagggaaccttacattagcgaccatatatcactctattgaagatattgaagtcctcaagaggtttaaggtgttagttcatgcagtgaatgccccttctatcaagcaaattacctagtatccctgttgtttgggttcagcaaagagtaatttatacggggatataagaggtgctcctggtcttgctacgngtggtggcctctgtaacaccctgaaata

SEQ ID NO: 180227 - DNA, 452 bp, Glycine max
  unsure (1)..(452): unsure at all n locations
cgatccttgaatntaactttcctctgtattcttgaagtgttcttcaactttcctcttgagtcttgaagttttcttgattctatcttgaacatcttgaactcattctttgattgacctttgagctatttgtcatcacctttgtcatcatctttgtattcatcaaaacatctttgaatcaatcttgattcatcatgaagctttgcttctacagatttcaatggattgattaaacgtcaaacgactccattgtcgtcactccaaaatggtcaagtgtttaaatcaaacagaacatacactctgagggagttcctagagagatttgcaaaagatagaatgaggttgcatgaattatcacctctttcaaaaggacattcaatctgtgttttccgaacaanatcaaatcaaaatcaaaatcacaaaatatggaanaaatgtcatgaacattgtacaac

SEQ ID NO: 180228 - DNA, 462 bp, Glycine max
  unsure (1)..(462): unsure at all n locations
agcttgccgaactcaactttcttaattaaatggctattgtaagnttttcttttctttaacctgttgctttaattttattttttgtagaagtcattgctcatctttatatacggccctctcgtaaaatttaagctacctccggccctgaatgttatcatttgttaagtcgttcaacattgtaattttttttgttaaattataattttaatctatctttaattcctaatccatatcttggttccctattttagaatatccacactattagtcttatctaaatattagatacagtttttcctttttatatatttttgagttaattatttttttgatacttaaaaaatttataaattttatatttggtccttaataattgtattctaaacttttaatctctaaaaatatttttattttatatctgacctctatctntatattgactatgttaacttgagatgtcat

SEQ ID NO: 180229 - DNA, 480 bp, Glycine max
  unsure (1)..(480): unsure at all n locations
cattacggacctatgatactcagcttcacccttgccanaactcggaggggacgcgtaatgttattcccactcaaatccaacaaagtcgaagatttcaaactagtccaattactcggtatcgcaccactaatatcattacactcccaaccttatctcaacaagagaatctaacttggcaacagaaggactcaaagtcccactaagattaaacttttccaaaataatcatgtgcacctttccgtccccattgcaccttatccccaaccatggcccgtgacaagggtcatttgcactccaagaatcaaccaaaatccaaggataccccaaccctccaagaaactacaacaacaccatcacttcaaaagcacacataaccccggcctttgcctcacaaaatacatagttctcataactcactctactcgctgcaaattccgggatcggacccatgaagtggttgttattcagatccaacttatc

SEQ ID NO: 180230 - DNA, 269 bp, Glycine max
  unsure (1)..(269): unsure at all n locations
agctntaaacgagataaggagattatattatttttatatatatatatatatacagtgggctagaaatccaagctgaaattgcttgcatcaatgccaaatggaatcaatagcaaaggaggccacatcccaattgttgcggcttaaataaaagagagttgcaacagagaatattaaaaaactcacaaaacagccacaaatttaccaactttgaacacggaacatctccaattatattagcattctcccttctctgacagtagttaacaact

SEQ ID NO: 180231 - DNA, 439 bp, Glycine max
  unsure (1)..(439): unsure at all n locations
gacctatgaatctcaagctttctgttcattcgnacagtcgacactgcatccccatttgtgtttaacgcatatatcatgattctatttgggtgcgtgatatgtctctatttgattgcgggctctttctggatatacgcagaagattatatttcttgtatgatacacatgggtttagatgatggtattgataggggatttgtgaaggtcggacatagagggttgtaacgaagatgatgatgcagntnttcttttggatatggtagcttttattgactatcagggtgtggtactcactacaggtatcatcatcctctttctgcactcacttttatcttgacttaatgaattagcagctagaaaaatgtaacattttcctattaagataattaattgtgattcattaaagttattcttatctaaatattagattgtgtcttaa

SEQ ID NO: 180232 - DNA, 244 bp, Glycine max
  unsure (1)..(244): unsure at all n locations
agctcnatagatgccacagagacacacgcttttgtattctgccaagccacccatttncgtgtagcctccttcattcgtgtcaccaataccctcacgagcatggcggagctctgcggtctctatggaatcgaaaccattgttgaacatgaatggcgcctcctcagaggaggatgagctagcgctttctcctccattctgctccttgcttcctttacctatttgggcagactctctttgaaccctt

SEQ ID NO: 180233 - DNA, 473 bp, Glycine max
tacggaacatgaaactaagctcaactctccgataagggaaaccacatcaactgttctcttacacgtcaatttattgcacgaatcaaaatcaattacacatttacacacccatacatatctaaataaaaaaaaaaaaaatcaatattcaaacggttaaaatgccaagtcaggcactcaccaccatccaataattacatctgtaaaattctccagtactgtgaaaagtgctacaatgaccctgcaaattgacgatacacaaatacatgaataagaggcactacggcttaatccaacaatgatatataataatttaacataaattttgacaaggtatcgctcgaaaatatttctccccccaactttcctatgaattttgcaagctcaacataaatcagcagcaatatatcattctcattctgtaagaaaaatgacactcatcattaaacttctgataggatgattacatatatcat

SEQ ID NO: 180234 - DNA, 449 bp, Glycine max
  unsure (1)..(449): unsure at all n locations
tanaaggacaagaatgcaaactcagttacgacaacaaattctcatcaaacccatctggctagaacagatgcgactgacacgacgtggcatgaaggaacccccttcatcacacaaccaatccaaggaccatcaaactctgacactcaaccacatccctttgttgatgggattatggaggaaaaaactctcacctagatggaagatgttgaccatcgattgttacgatggactcttggacctggatgaacacgtggactgattcttcacatagatgaacctgttcacgaatgacgatgcaatcatgtgccaagtgtttcctacaatgttgaagggtacatcgttccattggtatactcgattaccaaaaaactccatagactcattcgtgatgcttatcatgcattntggagctaagtgcgcgacgagaaaaccatactatcaatcttact

SEQ ID NO: 180235 - DNA, 420 bp, Glycine max
agcctggttggacactacttctctgtttttatggatgagtgttcggagttaatcttgtggttttgaagtgattggcatgtaggggacacagtaatatccatgaggacgaagtggtgacttttgaactatataattgtcgcgggtagtgggttacaaagtgtttgattttggtacacaggaatgaggtgagatgatagggtgataattctcatttgtgagtttcataaataaccaaatgttgtgaacctttttgtcacatatcccaatgttgagtaacggtggtatgagaggtagagagcacttgctggatcaatttcattggtggtagaagaatgtagatagcatgtattcttgttgccttctcctgcgtaataacgattccactctttcttgatctaatactcactaaccgatgagatg

SEQ ID NO: 180236 - DNA, 452 bp, Glycine max
tgcctaattaacctgaaattgagagaaaatgattattaatcacacaaaatggaagtactaagtatttattacctatacttaacagaaaatacttataacactataaaataaccataacttggaagagtttgatacaatttacacaagttttatacacaaaagttagtcattttcaccgactaacaactcccccaaaattcagttttgcttgtcctcaagcaaaaagagaacagctcacttgtccacaagtgacaatgacatgcaatgactatgtacaaaggtgtatgcaacaaaagttactgattgaatgataagagaatggagtaaaatgccctcatcacttgtctttcacaaggtatgcatttatccaaagagaagaataaaatgtaacctgaacaattagatggagttaggcataagacagatatcaaggaaagtagcttaaaccacag

SEQ ID NO: 180237 - DNA, 372 bp, Glycine max
  unsure (1)..(372): unsure at all n locations
agctnttcaattcattctatgtactcgtggtgtgccacattntgtttcatgtatttttattctcgttttcatttgctttttatacccccttttgacgtgcttaagccatttatttaagtcacttctcgcgtaatctaaaaataaaataaatttccaccgatcgtttgaattgcatcatccgttaattttggttaaaatgaattccgaccgttcggtcgtgccgtaaccacgttggaaataaaaaaagaggtaaaataataatataataatcaaaaaataccttttagtaaaataaaagcgaaagatcaatcggacgttctctctttgggatttctcattcttaatcgaattgactaataactaaagtgaaac

SEQ ID NO: 180238 - DNA, 450 bp, Glycine max
  unsure (1)..(450): unsure at all n locations
tgtcgggttcagtgtcaattaagcacttgaggcatcccacggactgagcgaaaaggctcaagttatcaaaatactgcacgtcttttaaagcataaagcgaggatcagaacctcgaccctacgttcttttaaaaagatcgcgatgagagatattacaaaggacatgaacccctgcggaaaccaagaagaacatacaaaaataaaacatgcagcgacttcctcaattgccccaaatattaagcgtagtatcgcttgacaacgtcggagttcacgggtgaaggtagctcctcgtctcttgacaatcctcgttccagcggacggattggtttttgtgtaagagtttgaacaacgactcacagatagcgatgagctgtgatatgaatttggcaatgtagttcanaagcccaggaaacctcggacttccctctcagtatgcggntctggcatctca

SEQ ID NO: 180239 - DNA, 477 bp, Glycine max
  unsure (1)..(477): unsure at all n locations
agcttcagaccaaagcaattcanaatctatgtatccaaaacccctcaatttagtggatttttaaggtttgagaagtgaaaatgagaatggggtaattttggagcaaactctcatctcacacaagtctataacattaatctagacttgctcaaactgattttacgactaaaactccaccgaatcaaaatttgacccctcaacacccaatttaccctagaaatggctcttgctttcaccttagtcactcatctttctcctttgctcaacccaagctttcccacaagtcctaaatgacattttaaactaggattaactcactttaacctctaattaccactaaatccagatttagctttccaaaccctcaaagcctcacactnttccactcgtatcactaccattctcactntntaaccttaggttaactctaccctccatctctatcagttttctaccaacgatttcagcacacaagca

SEQ ID NO: 180240 - DNA, 451 bp, Glycine max
  unsure (1)..(451): unsure at all n locations
tgtattttaattgattgctntaagcctgactgctaggcttaaacatantttaagattggtgctgtattgccccccttatttaagattttntgttattgccatgttaattattgcctttttaagattttttggtgattatgtgttgagattatgacttttgattattaattataaaaatatctttaatgtgtataaaaccataatatgatttttctttcctgttttgcatcagtctcgaggttgtgctctgttgggtatttatgatacaccaactttacatgaaaaggaaaagttatttctggaccaaggatggcaggtatatttgtaactttttctaganaatatatctttggtgtttcttttttgtggatntgtgattgatatctgacatctgacatatgaattgatttccatttccggaaactttccaaatgatgataaagggagttat

SEQ ID NO: 180241 - DNA, 468 bp, Glycine max
  unsure (1)..(468): unsure at all n locations
agcttatataaagatgtaaacattctatcaatctggttgtttttancataaaaagagtgattctttaagaaataacttaaacaaacacattctaattcacagtataatatgtctttctccaatttttcagctttcaggagattgtccctttaaatgctggaaatgtgctggtattagaggataatgagcctgctgcaaaatggcttgctttaatcaaccaatcactcaatggttcttcagatttggcttctaaaggactaaaaccgaccgcgtcttttggaggcccattgttctcacaaaagccttctttgaagaagattaagaaaactttcaagaaactaaatggaaagaggctaagaagttgtaactgtgttcttgaaatggaaaggaaggctggtaaggatttctgttttcgctgcccagaatcaaacttcaattcagatgattcttccaccgaagaggaggatg

SEQ ID NO: 180242 - DNA, 454 bp, Glycine max
  unsure (1)..(454): unsure at all n locations
tctatataagctgaaccattntatcaataaacacaagttgagttttattcagaaaattagagtttatctcttttatcttagtgagagtgattctcctaaattcttgagtgattcaagaacaccttggctgtatcaaaggactttcacaacctttgtgtgttgccctcgctggaaagagtgattctttccttcctttcatcatcacccttgttctttcaaaccacaattccagaaaatccacctctgcccagaattatctcgtggccataacttccattttacgcactcaaattaagtgattcttgagcctaaattgaatttcaaaacgagacctttcacctcgttttggaatcacctcatttggagccctgtagcttcagttattgccatttctatatttctgtccagccaccacttaacctacgttttaccatcccattcatccattttatgc

SEQ ID NO: 180243 - DNA, 413 bp, Glycine max
  unsure (1)..(413): unsure at all n locations
agcttgtataaggaataacaacataaatacatggtcgtgcaccaacaaggaataatggactcacacggttactgtgtatctataccagcagcacaaatacagtttaaccatgaaacccaaccatcatctgctgttgacccttcgtgcgcatatttctaagtgtaaagcaaataagcaagctatacaaaaaggccaacccttaccaactccttcaacattcacgtaagtcctgtatcatcatatcaattgatctcctttccttcacaaagagatcgaaacaatcataacgttaaacaattcaaacaagccctgtgattcatctcccattcacaataagagaantttcttcctcttcctttcagattaatccatgcccaagctctatgttttgccaaatcccatgcggccacaca

SEQ ID NO: 180244 - DNA, 458 bp, Glycine max
  unsure (1)..(458): unsure at all n locations
nntggagttggacactgttntgaaaatccctatctaacgattctaaccacttcgtactttattttttgtcaacattgccctgagacttctctgaaatctcaaggttttggcactccatatgttaatttccaacacagctaaaaccccatatggcaagtcaatctaccgtaactaaaagagtagtctaacacgcctacgcatcctatcaattgggctaattatcagagagagagagagagagaaaaaaagggtgttaagttaagcaattcacatgtgaacatgcccaaattttcatctcatccacaagcaaactcaaccaataatgcctcgtaagattcttctatctcctatacgtcaacacttgccaaacctataggctacaagcatagaccaagaagtctagtcacacaagtgagaaaaacccctttntcattagttaacatattatttttctttca

SEQ ID NO: 180245 - DNA, 422 bp, Glycine max
  unsure (1)..(422): unsure at all n locations
agctnggaaaatatcttctcataacagagaatattggtcttgttcaatatgtaagtcactgaagtttcccaaaatatgagttcattttagctctaaaccgactctaatgtcactatgatatagagcagatgatcctgaagacagtttatgcattgttagcatttatattggaattggctggtgtttatggcgatggggaattcaagtggtactacgggtatgtttttcatacaaaggtggaatccaaaatttggtatatcattgtctcacatcataaactaatatatccctcgaatgttttgaccatgcatcttttcttttctgtgaaatgtacacactgattaatattaagcaaaggcatctcaacttagttcaataataaacatggtcttncacatttgcaggtatccatatatagcagt

SEQ ID NO: 180246 - DNA, 455 bp, Glycine max
tgaggaatctttgaaactgctagataccagactacacactttgatctctacttagaggtaagggatgagtttatcgcaattggggatagaatgaatatgtgtagggatccttaaaggatcaaattggggtttattttgggatgtttactgtattgtaattcttcttttacaactataattacaagattattgtgtttgacgggccaattgatgccttgatgcgaattggttgataaaattgactgctcttgatgtttttgacctatgattttgatatgattatgtgaaattatttgagtacatgttgaattgtaagatacatgtgcattgagatgttatgtgcattgagttgtgagttatgaaccgtacaattatacaactgtaagaccctttaagggcgacgaattaatgtgcgatgagtattgtgatgggatccaccgtgggaatccaacgag

SEQ ID NO: 180247 - DNA, 422 bp, Glycine max
  unsure (1)..(422): unsure at all n locations
gcaagctgagtgagccaccatagagtgagtcatttntgtttcacatcctcggaaccctactatcactttgtatagtggaagaatctncatattggagaattataatcgtttgcccccattactacctttaattactaagtgtctatcttaaacttcacgaagcgggaaagtatgagttttcccaacacaaataaaggcgtttgtcatactcatgtccaccatcacaaattcacaatgtcacataccaagattccagtagcccttcccatcaataattactttcttctctattaaaatccaataaacttgagaaagcatagttctaagaattcccctccatccaagagtagtgccagaacaaaaacctgctcactctatcttactcttctagaaatgacatttaaaaaccacataagacacac

SEQ ID NO: 180248 - DNA, 474 bp, Glycine max
  unsure (1)..(474): unsure at all n locations
tacggacctatgaatctcagcttcactactgtccganattcatcctgtttttcatatttctcatctcaagaaggttgttggcaactaccaagaaactgttgatggaagggctagaagtggaagtgtctgatgacatcatcgctgagcagattctagcaattcaacaaaggaagaaaaatggtattgttccttattggttggtcaaatggtgtgggaaacttgtttaggaggcaacctgngaagacacatttactattatggtttcaaataaatcagtttcttgatgcaagccttgaggacaaggctattgctgaaggagacagcaatgtcaggcctcccaaattatctagcccagttcagctcaattattggccgtgggtctggaagacatataatatgaaaagggtaattgggagcgagtgttagctacacttttgtctaagcctttntagggagagaatgagtgagtgtttc

SEQ ID NO: 180249 - DNA, 436 bp, Glycine max
agctcgactaaaacctagtatattttgtcttaccaagccactattggctctaaacaaatcaacaagatttgttggaagattacgcattgactaaaaagaataattgccttatacatggatatttcactcaacacttttagtcgtttctctcaaggtattcaagatgttttgagaacttttgtttttttcacaataatttacaaaaagtttttacaagaaagaataaaagaataaatctcttaggttatttttatcttatttcttcaaagcttctactatatataacttttatctcaaagtatctgttgtctcccaacgattggattcttcactctattctttgtctgaagtcttgagttcgttggagcatttaaagctctgattaaatgcatgtcccttcatgtaaagtccatgtcgataggtcagtgtgtcttgt

SEQ ID NO: 180250 - DNA, 447 bp, Glycine max
tcggaagaaagtgatgaggtacgagccctaaaggcagagcttgaaagagcctgggtagtcgaagagaagttcaagtccatagccatcaaagtctgaaaagagtatgatgaactaagggatgtcaatatggccaccgatgaagccttggaatgagaaaccaagaaggcccgaaaggaagaacacgaccaaagcaaagttttgaggggctttatagggcagcaatagtgagctcaaactccgaagaggtgaaaagaatcatcacgggtcaaaggcatgatctggaaggacgagctaaaagcttgccttatgtcgaaaagaaatttgtcccaacagttaaagtgagactgaagggaatatgtgggccatcatcgatgagtgcaaagagaagctaaatctagcggcaactcacgagcaaaggctagaggatgagtacgccaagatatcaga

SEQ ID NO: 180251 - DNA, 412 bp, Glycine max
agcttgcttgtgaggcttctatggagactgtttctttaagcttcaatgaggtcctttaatggtgattttccaccatggagatgcagcggaagacaaaggaggagaggtgagaggaggcgccatccactagggaataagccatggaagaaggagcttcaccaccaagatgagccttggataagaagcttgaaaggatgcttcaatggaggaaaagaaagagggagagaaagagagaggggggagcacaaaattgaaggaataaaagagggagagaagtggaactttgaagtatgtctcacaagactcttattcatcaaagttacaacaagtgttacacatgcttctatttatagactatgtagcttccttgagaaacttcttgagaaaactctcttgagaagcctctttgaga

SEQ ID NO: 180252 - DNA, 440 bp, Glycine max
tcttatccaaggctcatcttggtggtgaagctccttctttcatggcttattccttaatggatggcgcctcctctcacctcctttcctttgtcttccgctgcatctccatggtggaaaatcaccattaaaggactccattgaagctcaaagatccagcctccatggaagccccacaagcaagtttccatcagtagtggctatcggagattttatgtgggcaccatcatcagggatattgccaagtagtacacttggtggtgatgttaacgatgtgtatcgcctgtgtcttgatggtataaacataaatatggaagaaggatcacgagacagtgatgatgttagtgtacgagcaacaaatgaatttggagacattgcaaatggatattgccaagcaaatcgatcgtattgagaagaatggtaaaagaaataaatgcctcatc

SEQ ID NO: 180253 - DNA, 373 bp, Glycine max
agcttcttatccaaggctcatcttggtggttaatctccttcatccatggcttattccttaatggatggtgcctcctctcacctcttttcctttgtcttccgctgcatctccatggtggaaaatcaccattaaaggaccccattgaagctcaaagatccagcctccatagaagccccacaagcaagcttccatcacgaatggctttgattattgattggagcattgccttaagataaatcttttggaggtgcaagtccacggcacgtcgggatgggttgtggcgatgcgtcgattttcgtggtgtgtgccattcccttgcgtatcatcatggctgttgtctttcttaagctcggcttcatgttgagctaccttt

SEQ ID NO: 180254 - DNA, 470 bp, Glycine max
  unsure (1)..(470): unsure at all n locations
ttacggacctatgatactcagcttaacaaccttgatggaggtgcagacacaatctatataatntggagtgtctgtcacttatattttcaccatactggctactagttgatgtcaccccctcaagttgagagttcgatacacagcatgtggtctgataatggcctgacagcatgtggccctataggccaacaacaaccattattttgaagccatattagaattactgtttaggtcttactaaactcctaaaagctagtttaagagctgaaattaccccatatatcactagtttatgtgtgatttcctacacaacggtataattaattttcagtgttacgtaaattaatcatcttagatgatcagaaatatctctagccataagcctcatgccaactccaatacacaccagcataagaagatactataaaaaagaaatccataagttgagtatcatatcagactcatacaat

SEQ ID NO: 180255 - DNA, 392 bp, Glycine max
gcttgtaaagaacttagataaaattttttcatgcttgttcgaacatcgttcgcgtgtatgatatccactcaacaaggtttgaagtagaagagaccttcaatcctataacgcaacgtggcagacaaaagtgggcagttaacttgaatgaccattattgtcaatgcggaaagtattctgtgcctcactatccatgttcacacattattgcatcttgtggttacgtgagcatgaactactaccaatatatagatgttgtttacacaaatgatcacatcttaaaagcttactccgcacaatggtggcctcttgggaatgaagcggcaattcctccttccgatgacacatggacacttatccctgaccaactacaattcatgtgaaaggtcacccca

SEQ ID NO: 180256 - DNA, 448 bp, Glycine max
  unsure (1)..(448): unsure at all n locations
atatggtcaagtagtttaaaaatagaacaatggccttcattactttcaaacttatgcatttcattctagaattcagagactgatacaaagactattgctccatgctagtcgttcacttctaatctaagatcacactctcaccgggttatggttcaagcttttttgtctaatcaatctgtctattgactaacatttctagttgcaagcttacattcttgttctttctttgtctagcatacacacttgctcaaactcatgataaaacacaagcttcatttcactcatgcattcaatccacaatcaccatttcaaaactatactaaaactgcattttcaaggagtcaagttaaactgttctatctacatcaggactttcaaaatctttccaaaacaaaaaagtatactggtaaccattttaatataccacanaaccataacaattcatatg

SEQ ID NO: 180257 - DNA, 456 bp, Glycine max
cgggatcctctgagtcacctgcggcagcaagcttggaaagatttctaaacaaatttattttataaagcgactaacaactcccctaaatttacagttttgcttgtcctcaagcaaagaaagaacaattcacttgtccttaagtgataaagacagtggccaatcaaaacaaaatggtgtttgattcatcaaggacatcaaccatatgaactgaatatcatggaatgcttaaatcaatcacttctcacaagcatgcagtttttcaaagataggagcacaagtattagagtcacagctgaaataagctagtaagcatgacagaaatcaaggaaggatcatcaaccaaaacctcacagtcattatttcactcaaactcaagtgtttaggcttattccatcataaacaaccaacacaagttccagcctttgcatttcatctcctatcatacaacaatgaaca

SEQ ID NO: 180258 - DNA, 449 bp, Glycine max
  unsure (1)..(449): unsure at all n locations
ntaaaagaatggctaagaatttgttaaaacataagcacttatacaatgaaggaaagctggagttgctgcacaaagaataagatcgggctgcacaatgcacaaggcaagataaagtgtcaaatgaagaattgaagctgcaggattcacgatgtcggatacaatgtccaggacatcctgcctgaaaatactggaattgctaaaagcattgaagctgcaggatccacgatgtcggatacaatgtccaggacatcctgcccgaaaatactggagttgctaaaagcattgaagttgcaggatccacgatgtcggatacgatgtccaggacatcttgcccgaaaatactggacatataaatctgttatatctntaacagattattgtgcagttagcaagagattagatgatctatctttaggaacgaattaaaagataattaaagttcgaattac

SEQ ID NO: 180259 - DNA, 390 bp, Glycine max
  unsure (1)..(390): unsure at all n locations
agcttaggattaggtgacatggtaatattttggtggtactttattgcaaaccaatgatgaaggtaagtttcatacgaaggtatagagttcccttcttggtcaactagttccgcatcaaaactcttaattccaacatgaccttttggaaactttatattctcaaatgtttttgttgcaattgatcctggtcccatttcaaaactcccagttacaaaaatagctgtcttgatatgattntcaggcttttgatatagtgaatatgatgtactcggtagcaacaatagtattgagaatgaaagtatcattgcattagagataaactccatgttaacctgaacataaacaagtagtgtcccaaaattagtaatgaattgcctatgatgttatttt

SEQ ID NO: 180260 - DNA, 448 bp, Glycine max
  unsure (1)..(448): unsure at all n locations
nganacccaatcatttaaatntaaatgatgcaattatatatatatatatatatatatatatatatatatataggaattgtctgcattaacatcctttttttttttaaaatataacatactatactcatacattgatattgcttttgtttctgaatttgaaccgaaatccaaagtcgcgactgctttaccacttgttagctcaagagctaactcttttgcaattgttaaagattacaaccaaccctccaaatgtttatggaccaacgaaaaaaaactccctaattttttattcctagctcatataaaatcaactctcgtgattttttaagaattattcaacaaatatattttgttgtgtttcgtggagtatttgaaaagttccaaagtctcacattgcctagtatatctttggctcattggtttattatcattttgtgacacgcacaaa

SEQ ID NO: 180261 - DNA, 417 bp, Glycine max
agcttccacatatgttcgtgagttatgcgcgattacgactactgtcaaaaaatggagatagtacttgccgggaggttccttctctatactcactggtcatgggagtcttaaggagttaatggctcaaataatttagagcctagagcaacaaaagtatctaactagattgatgggctatgattttaccattcaatataggtctggccattcaaatgttgtgcagacgccctatctcacagtttttagcttcacaaaggcatggttttctatctgtcaatgccttatttcacatttcttgtcgaactcaaaagtgaactagctgctaactaggagttcatagctctccagcgagacatgcaggaacatccagccaaccaccttgatcttatttacatcgacgacttaatcttacagaat

SEQ ID NO: 180262 - DNA, 453 bp, Glycine max
  unsure (1)..(453): unsure at all n locations
gacaacgcacatgtcctctnttttcaggtcctttgacttttgaatatgtatcatttgtccaattaatagaatcttgtatgctttgtaaattttgtgaactctctgcttcaaccattttcttttttaattcatcctacataaaatacaccttataaattattaccatgcatcaatatccttaatacttcaatgtcactaaacaaaactcatctcctcattagttattcctcctcacaccataaccctctattagaaaattgagcaaaacaaaacataaacaaagagaaagtattgaaataaaagttaaaattcttataattacagtagcagccttttcagtaacaatgcttccatctttttgagttcgagtgtcaatataaatttcttcccgagaaggttgcactcccttagcctttgttgtctaacaatagttaanaaaatcaatcattctat

SEQ ID NO: 180263 - DNA, 452 bp, Glycine max
agcttgtatcttttatgatgaagcagccatcatgtatttttcactaggtgaggctagctacataaatcaaaagacaccattggtttctatcttgaactaaaccttttgctagtccatttagataaaatataaatataaaaaaaatccaggttttcatgcctactctagtcatgatgatcaagttttaggtaatgaaacacaaataactgttaaatttttagagagaactaaataagaaaaatcctaacaataaggggaaaaaaataattaggaaaatcaagagatgtacacattacagatgtacaagaaagcaggatagtgagacccttagatcaacaaaaaaaaggatatttagatttccaaatgtttttattataggggttaggagattcagatttccaaatgggtgtgcccctgatgttattcctattgagtaccatgggtcaagttac

SEQ ID NO: 180264 - DNA, 458 bp, Glycine max
  unsure (1)..(458): unsure at all n locations
nggctgttacaaaatcagagacatgagtcatactccaaatctaaaagaacattctagcttgatatatctcgatgaacaattgcaagtgaacagtcgtgatgcataaaaaaaaattaaacaacaataaaagtttataacacaataaaaaaatacatatttcaattttttcaatgtcatccatgagctcttcaatatcagttgtccatggagaggatcaacaccaattgtgtataaaccaatgcttcaattgtcttttgaggagagagctttcataacaattaagcactttacctcatgtcctaaaaggaaactctgacagacccacaatcacaacatataatgatgatcgaaacagagaggaacatgatgcagtttcgcggcacagagaaaaggctcgagacggcgagacttgctgagagaggtgtgagcctgaggtaggggttcacgacacagagaag

SEQ ID NO: 180265 - DNA, 452 bp, Glycine max
caagctttgttggcaaactaagcttaattgtgtgttattgattgtggaagcggggtacatcttatattgatggggtcataggagtttatggtactacaaccatggtaaaagtagaacacggatcaaattgcacgcggtcattttgccttctttatatcccaagcgagaatctcatcaactaactaattcttggtttgtctatctgagtggctacaaacaagtctcggagtttttgtcttaaagactatcttgtgtaatgcaccaaaagtcataaactaaaaaaaatggtttatgtatatacaatttaaagaattttatattgtcatctctcatgataaataaatatcaaaataatttgagagattagtcctcattctcaataagaagcatcacgtttacactaaaaatattaagttatgacaataagacaccaatccaagtgttatataact

SEQ ID NO: 180266 - DNA, 446 bp, Glycine max
  unsure (1)..(446): unsure at all n locations
tatcctanatgaccctccttgtaccaccaagttttcaactcaatcacttttaaagtcctcttgactgagtacaaagtgacttgcagcagtttggtgagtaattaagcactcctctacatgtcaaattttaaaatcatatacatatctaatatgaatttcatattaatttcaggatgtgtcgagtaccatgtactcatttatgaaagctataagattcatacatctgaaattggaaaggactacaaagtgtaagatagtttataattatcataggaagactgcaaaaattagaaatggatgaaataattttgcacaatcacagaattttcttcttggaactcanattatagttgagtttccatatgcaacttctaactntggtttatttcggcttttattgtaattaaagtacattactactctaatattatgaatntgtaaaattt

SEQ ID NO: 180267 - DNA, 309 bp, Glycine max
  unsure (1)..(309): unsure at all n locations
atactgatagcaagcgcacatgggtcgcgacacctgatgaattattnttcttcaacctctctttgatgattaaggtgtagctggccacacaaaagaaggggacttacacgctcaaatggaagcactaaaatgcaccacggaggaaggaggtgtctactctagaaaagggcagagttttccatttaacgtattgtaagtctgcgcattttaaaagaaactactaatcttactgattactattatgatcatgctaagtctcttctcttatttcttattttttatcttgaaagagcgtactaaatatgacat

SEQ ID NO: 180268 - DNA, 448 bp, Glycine max
gtacatcagaatttagtaatgatccattaacctagaatttaaagaacttaattccaataacctagggaattaaaataacttaatggctgagtgtaactgaaattgtggcaaccaaaagtcacccccaacaaccatcaagtcagccaccatttggtctcccaaaaggctgatgcctacgttgccaattggacccttattacaacttgaactaaaccaaactaaagcccatttagttgtttaacccaaaacatatttttggtcagccaactttacaaagattgggccattatttagacaaactaaacactctaaaattgagacaaagtggtgccatttagtcctcttccatttgggccatgatacaactcacaaccttggacttttctccttgaaacttgggcttgtattcaaatagtatggaaaacacttgttgaagagcttccttggc

SEQ ID NO: 180269 - DNA, 463 bp, Glycine max
agcttccaccagcatctgactttgagaagaatacagagctctgaacatagctccatctaagttaggtctaggcaaacaaggttctgcaaatctgtctttaaagtgcttgagaactgcttccttaatgactgagggtttatcaacccaacctccattgagatgcatcccccttagggtattccttcttctacttgagttgatgattttatggaagtaagcagagttactgtctccctgtttaagccatttacatctggatttctgacgcagcatagattcttgaataaaagattgctcccataggtctgattggagtttcttaagctctagaacctgctgatcagtaggttgagctattagggagtcctccaattcattcaacttgtgctgaataatcttcaccttactgctgtgatccccacactgatccttactccagaatttaagcctatatttaagtttc

SEQ ID NO: 180270 - DNA, 454 bp, Glycine max
tgtaaggtataaatgaatagcaggttatcattctaaattcagtgcaacagcagagagcaattctttggaacaatagatataaacatctcctgcagtgagctcacgttaataagtcaggctgagtcattcttcaaattgtcatttatgtacaattttcccaatccacagactactggcggtttttctctgttggcatattatagcacaaattaatactgtttgatcaacaaagaaaatttatacgaatgaagactttttttgaaaaaaaattacagaataattgaaaaaataaatttaccagggcttataactgttatgttttttgtgacagatttcattgcagtcatacaatcagggcctgcaaaaatgaaagcttctcagtatattatggtttagcctacaaaactaagatacaaaataggtttcattacctagtattttcatgtctttctca

SEQ ID NO: 180271 - DNA, 457 bp, Glycine max
  unsure (1)..(457): unsure at all n locations
agcttgaagggacactcacatttcctagtcccagtgtctcttctaacaaattctttcttcctacacctatactcgtcactcatttcacaaccaattaacacaaacgaagcccttcctctactacctgtgtttgtgttagaccttacaattaccgccacaaatccagtttcataagcaacggatcaagcccacctcaaagcatcctctcggctgtcaaacacctacaaaccgctccagataatttcagtttcctacaacatattcattntattaaatcactcacaatcatgaacattattacctgagaagtattgaacggattcgaacaatcaacatgtggttcattcacaccacattcttcttcattttcataatccatatccacttcttcaggcattataccttcatacatccactgatcttcgtccatcttaacaataaatcaaaaattttaaca

SEQ ID NO: 180272 - DNA, 452 bp, Glycine max
tgtcaagttctacctctggcatgtctgtcatcctcaaactttgaatccatgatacagtcttacgttgatgtcaggatcaacaaacatagttggtgaaggctgaattgatgaccttgaaggaagaatccattttgttgctcgttattgatatggcctcattaaacatcttttaagtctgatgaagaagtttgtaagtctgatgggccccttagtatgctgaaatatcttcctttgctccagacttgcaatcatagcctcatagataaacactttagtactccatatgcttcctccattcttctaagtttgaattcatgcatgacattaggctgtgcaacatcgatcatttgttcatcaactttaaacactagctttggataagaacattttgcactaggatctgtttcaacaatatcatcttcttggtctctaaggtatgcttcaataacata

SEQ ID NO: 180273 - DNA, 447 bp, Glycine max
agcttcaagaataatggcctcatcaaacttcttgttcccaaaaggaaattcaataaataggcctcctatttttaatggagagggttaccactacaggaaaacccgaatgcaaattttcattgaggcaatagacttaaacatttgggaagccatagaagttggaccttatgtacccaccatggtggctggaaatacaacaatagagaaacctagagaagagtggtctaaagaagaaagaagattagtgtagtacaatttaaaggctaaaaacatcattacctctgccctaggaatggatgaatattttagggtgtcaaattgtaagagtgctaaggatatgtgggacactctacaagttacacatgagggaacaactgatgtcaaaagatctaggataaatactctaactcatgagtatgaattatttaggatgaagacacatgaaag

SEQ ID NO: 180274 - DNA, 421 bp, Glycine max
  unsure (1)..(421): unsure at all n locations
tctgttatgaatntcgagcgtctcgacatactacggngttctatctaacatccgagtaaaaggttattatcatttgaatttgctacgagcatctgttttcaattacgagcatctcgatatattacacgacacaatcggacatccgagtaaaaagttattgtcgtttgaatttgcttagagcttctgttttaaatttcgagagtctcgatattctacagggcacaatcggacatccgagtaaaaagttattgtcgtttgaatttgttcagagcatttgttttcgatttcgagcgtcacgatatattgcgagacttaattggacatccgagtaaaaagttattgtcgtttgaatttgttcagagattctgttttcgattttgagtgtcacgatatattacgagacttatatggacatcagagt

SEQ ID NO: 180275 - DNA, 359 bp, Glycine max
  unsure (1)..(359): unsure at all n locations
agctngtagaatggctagacatgatacatgtcatggtttggtttggctcaaggataaaagggatgccccacattatttccatgacacaaatgcaaaaatgatgatttggaaattttatgcaaaactggtcatgcatgcacctatgtggacactcaagtgtcaaatttttatggtcatgtgatgctagggctcaggattcatttcctctattttaaatcaacccaatgtttccaaaatatgttcttttatcaatttgtgcattcatccgagtccatttcgggcgtccggggaaaacttcacagcattcacccttcaggtgtatacacatttttttcaaaaactagttatgatcaatgaat

SEQ ID NO: 180276 - DNA, 443 bp, Glycine max
tgtaagacaaccacaaagaagattgaattttttatgatggataaagtgcagaaggaagtacttaaattgctagaagcaggcctcatttatcccatttcagatagtgcttgggttagtctcgtgcaggtggttcccaagaaaggaggcatgacggtaatcaggaatgagaaaaatgatttaattcccacaagaaccgtcactagctagaggatgtgtattgattatagaaaattgaatgatgccaccagaaaagatcactacccacttcccttcatggatcaaatggttgaaaggctggcagaacaatcattctattgctttttagatggatactctggctacaatcagattgttgtggatccaaatgaccaagaaaagacaacattcacttgtccctttggtgtgtttgcctataggcgaatgccattcggtctttgcaatgc

SEQ ID NO: 180277 - DNA, 449 bp, Glycine max
  unsure (1)..(449): unsure at all n locations
agcttctagccaaatggacttaccttgaattaattcctttgatagcccttttgagccttgtttccctttccttgttttgaagctcactacaagccttaaatgaaaaaccatgatatcaccatatccttaagaaattntggagctttggaattgttttgggaataagtgtgggggctttttgtttcattggataacatgttttgttggctatgcttcatgatgtatgttgggccatacttgatgtacattgtatattggttaaatgttggacatgctgaatgagatgttgtttctcaaaggctacgtacgtaaaaaaaaaaaacacccaaacaaaaaaaatagaaaaagaaaaagacaagcactaaagttgagtgaataagatcttatatgacaaaagaatgatgagactctcggctctactctttatgcttaaaatttatctttacttc

SEQ ID NO: 180278 - DNA, 447 bp, Glycine max
tgtaatggtagcttagaattctgtttacacatcccttaatgaaggtggattgggaattagatctttaaagcttattcacagatgtgttttttctgaaattcagttaggatgctattactacaaattcccagcttgctacaatgattcaagatagattttaaaaggaggttttcccatttcttactacattttcttttctatttaccctaggatcaaggattgtcttcatattattcaataaaactcttcatggtagtcaaggatgggagataatataaatttatgggtggacaaatgtttatcagatttcaatgtgaatcttcacaatattccatatcatttacatagcttgttgaaagctaaggtaacatattttatctcaggtaattcttcgtctcttctggcctctataggaagttggtttccttatatggctttggagattca

SEQ ID NO: 180279 - DNA, 409 bp, Glycine max
  unsure (1)..(409): unsure at all n locations
agcttgacaagccggcctgtttaactaacattattaataataataataataataataataataataataataataataataataacaataactttattttatcaaatcttatcttatcctgattttatttcatctagattttattttatccagattttattccatgtagattttattttgtccatattttatttcatccaatcttatcttatcttgttcagattttattttatttcgtttatgggcttggacttaaaatagatttgtaagctntggggctgaggacctatataacagcaccaaggttntagtttagggagtttttttcggagaggagaataattctaggactttagaattccagttttattactgttcatgcacactgttcacgtaaaataaaattcat

SEQ ID NO: 180280 - DNA, 445 bp, Glycine max
  unsure (1)..(445): unsure at all n locations
tagtgcttgatcactacgcgtggctccagactcattggtttacgatgcatgaacgacaatcaatccatggggctccgaataaaagtggagaatggggaattgcactatgcaatcactacgcgtggctccagactcattggtggaggatgcatgaacgacaatcaattcatggggctccgaataaaagtggagaatggagaattgcactaggcaatcacttcgcgtggctcgagactcattggtggaggatgcatgaacgacaatcaattcatggggctccgaataaaagtggagaatggagaattgcactaggcaatcactacgcgtggctccagactcattggtggaagatgcataaccgacaatcaattcatggggctccgaataaaagtggagaatggagaatngcactaggcaatcacatcgcgtggctccagactcattg

SEQ ID NO: 180281 - DNA, 415 bp, Glycine max
  unsure (1)..(415): unsure at all n locations
agctntgcggatntggacttcaccggcagaatgatcaaagcgggtctgaatagaggcaaatttaatcatcccacttggacgaatgagaaaactggggcaaatgaagagggtgaaaatgaaggagaaacccatactgcgactatcattcctacatggccaaacttcccaccaacccaacaatgtcattactcagccaataacaaacgttctccttacccaccaccccgttatccataaaggccatccctaaatcaaccacaaagcctgtctaccgcacttccaatgacgaacaccacctttagcaaaaccaaaaacaccaaccaagaaatgaattttgcagcgagaaagcctgtagaattcaccccaattccagtgtcctatgctgacttgctcccatatctacttgataattcaa

SEQ ID NO: 180282 - DNA, 141 bp, Glycine max
atgctaaaatggaggaaatatattatggagaggaagagagagggggagcacgacattgaaggaagagaaagggagagaacgtgaactttgagtcggggctcacaagacactcattcatcaaagttacaacaagagaaacac

SEQ ID NO: 180283 - DNA, 372 bp, Glycine max
gcaagaaaaacctaggaacaacagcgaaagggcccggcaacacgaaaaggaccgaagggacacatgccggcaaagacaaaaatcctaaaaaaagaaatggaccccaggaaccaacaaagaaggcgttataacaaggactccccggaaaagactcataaccaacaaaaagaaactgccactacgccaatcagagaggcgatgaacggtgaacccatctacaagcattaacaggcagggaaaatacagggatggcagctctcataagcataatcatcacataaccgagtaggatgtgacaaaaatgaccaagctaaccatccctccaccccaaatgaaacactgaataccatcaaagcatacctcgacaaacag

SEQ ID NO: 180284 - DNA, 361 bp, Glycine max
ataatagtgttaattgagtggaaattacatccccagttaaaattttaatattgttttaatgcattatgattttaacttttaattttttaaataaggtgtataattatatacattttactctctgaaatgcacattatacatgaaagatcattaagaaatgcctacctgtgaattacgtgtacgtgttattgtctagatagaatctcgcaggaattcctattaggttgacaaatactaaattttcaattccttcaactatgggtttatccccatagtcagtcattagtttattaattatgagtcttttagtataatacgtgtcctcaaagttgctttttgtttaatctttttatttgagaga

SEQ ID NO: 180285 - DNA, 426 bp, Glycine max
agcttctcttacaaagatgaaaaatagttattgaaagattaggaagtacaagtggtgaggatgtctctgtcacctctagaaacctcacaatcactctcatccaatactctgcaagataacttcctcttcaatctctgttgtccctcaggatcttcacactagaagttctctccgccactcagccactcagatgaatgcttccaagaacagagaaaatgccaaaaattgagaactcccttccattttttatttctggctttaaatagtgttgttgattttcgatcgttagctcaaccacattctggttcgctcagccgaattaagtgacatttggcttagcgcgcctcttcttcgctcaacctggaggtgcaagcggtgcgcttagcgagtttgactctcgctcagcgcacctgtataggtcatctt

SEQ ID NO: 180286 - DNA, 322 bp, Glycine max
gactacaggggaaggctgatccgctaaactataaagaaaacacacaacgaccaaatgagggtgggagcaggaggtacgggactcaattttttggaaccaccgagagcaagaccaggcgggaaccttgcccctcttaccaccagcatgaaggccctttggactcaacccaaagatggaaatataaaccttggtcgggggaaaactctccaaaaatgagacacctagaccaaaacctgaacgcctcactctttgataagggcacatggatctgatgcgagacaacccaaatcaagccggatgagggaggccacaccacatgcca

SEQ ID NO: 180287 - DNA, 418 bp, Glycine max
  unsure (1)..(418): unsure at all n locations
agctttacgatacgtgctcttttttatttttaacatatccactcctttntctatggtaaaaaggggctggggacccaaagaaagcaacacataactacaaaaaggagttaaataatactagcatggagcaccgtacagcatcttcaaaaatcaaggatttgggaccctcaaaagcaactgatagcctttgcctgggggttgaggcagtaatatgccaactatcaaccaatctctctccaaccgtgtattaacttaaccatccaatcgtggtgttttatattcgagagaggaggttagtatatagggacaggattgggatcttacagttgtgtgatgaatgatgatggccatccatccttaaaaaatggaaaagtggaaaaatgtcaaaaatcaattctggaactctcataaaaaaact

SEQ ID NO: 180288 - DNA, 380 bp, Glycine max
atgcctctacctataatcacgccaagtagggtataaaactaacacttaatagttaacactgacttgagtttcagaggaagtactaagcaaagtttaagtttcacctcacactatggcagggaaggtttcagaaccaaaagatatgaactatgggccagtatgaaagcagttattggttcatagaaatgaagcatttaaggctgagcctctgaccaccatatatactcattcaacaagacatcaattaacttatcactcttctaaatagatcaaaagtccagttagaaagaaaatctgttagttttgattcttaatatcccaaatgtagatatattacttggcacagaccacacgagaacttttgccccatagtaacatca

SEQ ID NO: 180289 - DNA, 426 bp, Glycine max
tgcaagcttcacattgaaacaaccgggtttttttttttactaggagaacaaacgaagaacgacgtagaacattcacaaaattggggtctgcatgtcatcgaacttgattgtctcaagatgacgagggggagaccaaagttgtcatggtcgacaaacattgagtcttccacaaagggtgcaaacgaccattttcgtctctgcgtatcgacagacttgattgtctttggatgacaaggtggagactaaagtagtttccgtcgatagacattgagtcttcaacaaagggtgcagacgaccatgttggtctctgcatgtcattggacctgattgtctttggatgacaagggggagactaaattagtctcagacgatagacattgagtccttcataaaggctatagacgaccatgttggtctttgcgtgtt

SEQ ID NO: 180290 - DNA, 420 bp, Glycine max
  unsure (1)..(420): unsure at all n locations
gatcttccaccaccgtcgccatctttatcttatatctctatttttatattattactactttgattttcagccttgtattttggctatattattatgctatttgaacaatntactatttccctatttgcatggtatgtttgaacaaatattaagtatgttatttgactatatgggtgatgtaagctccattggagcttgtaggcctaagatcttcttcatcaatggagtcctttgcttcttggaagataaatggcaccataatggagaaggaagagagagaggagacgccacttcaaggagaagatgagtctagaagaagctcaccaccataggaggccatggataatagcttggaggaagaaagagatgaatgaagggagaggaagagaagagcacgaaattttgtgctctaaatgagct

SEQ ID NO: 180291 - DNA, 381 bp, Glycine max
  unsure (1)..(381): unsure at all n locations
agctnngagcaaattcaaacgacaataacgttttactcggatgtccgattgagtcccgcaatatatcgagacgctcgtaaatgaaaacagaagctctgagcaaattcaaacgacaataacctttcactcggatgcccgattgagtcccgaaatatatcgagacgctcgtaattgaaaacagaagctctgagcaaaatgaaacgacaataaccttttaactcggatgctcgagtgagaccagagaatatccagacgctcgtaattggaagggaatctttaaaaaaaataagacgaaaataactttcaactcggaggcccgattgaccccgcaaaatatccagaaccccaaaattgaaacagaaccttaaaaaattcaaacac

SEQ ID NO: 180292 - DNA, 356 bp, Glycine max
cttcaaatgattttttgacttttttcaaatatggttttacagtttttctaaagagtcatacactcttctaaatggtttctcttgcaccccacatgaaaaagtctataaaaagcaaggctttgttttgcattttaaatcaatctttctaacaatccaatcaatctattacaatcctttacaaaccttgaatctctttgaacttcttcttcttctttgtgccactagatggtacatctacttgggttgtcgactgacaacaagagagggtacatctcttgtggatcaattctagtggagagtacatccactaggttcaaagagaacaagggagggtacctcccttgtggatctttgct

SEQ ID NO: 180293 - DNA, 421 bp, Glycine max
  unsure (1)..(421): unsure at all n locations
agcttagcccaattcaattcaatctgatttgtnttagcaagagtacattcgcttagcgcatcaatgtttagtggctaagcatggtgcacttatgctaagccctattctttgcagccaaatcaatggtttaattgagctaagcgcaacgcatacgcactaagtgaacttccttgcggcctggatagcgctaagctagcaaccactcgctaagttcatgcccccttgtacacagggtgcagtatattcgctaagtcgactaagagtgcagcttaatgagagttgcaggttttcttatctgcacacgtcgcttagcgtgctgcttttcgctaagcgcagttttatgtgtaaaaaaaaaattgggctagcgaaacgacccgctaagcgagcgtgttgagaaaccaaacgtctctcactactgctt

SEQ ID NO: 180294 - DNA, 243 bp, Glycine max
tattccagaagggtattctatcaatagaccttcaatctttaatggagagggttaccactactggaaaacccgaatgcaaatttttattgaggcaatagatctaaatttttgggaagccataaaaatatggccttttatacccaccacagtgaaaagattttctttagattcgcattcactacatttaatgcttacctttctaataacctatttatttttgttctttgcaatttataattaata

SEQ ID NO: 180295 - DNA, 429 bp, Glycine max
tgaggctgcagcttataggcttacttgttttaactctaagccaaaggtgaatgttcctttgatatagtaaataattcgttttgtggccttgagatgagtagtggttggagtctccatgtattgactgatgagtcgagtaccatatagaatgtctggtcttggggacgtcaaaatatcacaaactacccaccaaactcttgaaatttgtagcacccatctttgttgcttcgtcaaactttgataacttcattttgcactccaccggtattccaattggcttgcatagttttgctatgaaatgaagattcaatcttccttttgctttacctcaataccaagatagtatgacattagtccaatatcggtcatcttgaactccttgaccattgctttcttgaacttttcaaacatacttggattacttcccat

SEQ ID NO: 180296 - DNA, 389 bp, Glycine max
  unsure (1)..(389): unsure at all n locations
acctgcggcatgcaagcttgaaggtgtgtagcccaccatcttttcttagtatattactgcgaatgtgtttactatcattgtcatcattnttattcgtcattgaggtgccacttgagctgccaggtctctccacctttgggcgtattctttggaaagatctgtgccctctttttgcacatgtactgtaattgcatcctatccaaagccattatttggacacaacctaacgaaggcaaccattaggttctctcaagaatggacttcggaaagtttctatttagtgaaccagcaacagcttccccaataatactgttttgtaaggaaggtatcagcaattccctttttttatgtttgcccccatttcccaacaataattctttaaatggttc

SEQ ID NO: 180297 - DNA, 369 bp, Glycine max
ccgtccatcaacacgaggaacatcccctgaattgattacaaaagctgtatccttagccactggaacaaagtctgtcatgctctaagtaaactttttagagcaagcaactcaactagatcaggaaagcattgagaaatcttagctctctgggctacaaatcccactctgaccaacctaatggaacattttaattagatcaaggaaaaattctatgcattttaaattatgtcataccaggaaagtctgatacaaaaccacctttattttttatatccacatgttcagaggctggctcatgaaccactgatatatgtttggccccacccttcttacataagacagcccgagaatccccaatgtgggctacta

SEQ ID NO: 180298 - DNA, 384 bp, Glycine max
  unsure (1)..(384): unsure at all n locations
ctctagnaagctatgggtacaacctacgaccgctgaccaggntcttttattattattattattattattattattattattattattattattattattattattattaattgttttgcctctgttgaatagaatgaacaattaccctttaggaccttgattcaatgtagcatttggaaattggcctccttccttatgtgtatatcttggtctctctacttttgtttggaatttctattaattgttctgtgaacttagtataatttttgttgagcactgtactgcatttccactgtaaaaaatataatcattatatatttctaaatcaggttatacatacatctgataaacaattgtttagaattgattatttctattgatggc

SEQ ID NO: 180299 - DNA, 430 bp, Glycine max
  unsure (1)..(430): unsure at all n locations
agctnggtttgaggtacttacccgctgatgtctgtataaaacgaagaacgaacgatgaatcttgaagaacggtcgaaaatcttcgcataattactcacggaaacgttacggaagcgcctcagcttggattttcttcacggaaataattttcctcagcaatttcgagagaaagagaagtgcctaaggggctgaacccttttcttcttcacttcttcccctatttatagcaaaataggggagaagcttgccgctcagctcgcccaggcaagcaaggttgcttcctctagaagcaacagccttctggaggaatcttctggagggcccaagtgggcctggttgctatttgcaccccccctttttactaaatgcaacccccttctatttttttggtatattcttttccgtaacgttacgaaactttacgaatttc

SEQ ID NO: 180300 - DNA, 416 bp, Glycine max
  unsure (1)..(416): unsure at all n locations
accctaagncacctgggctgcagcttaacctattgctctcacatcattatatttggaccaatccaaccttggtccggactctcaccacttatgatagccgccgatgatcccattactgcttcccctaagctctctgtcctttcttcacgccgcatcccatgccttgcgaactccttggagtaccctcgcgttgtggtcactgaaaccccatgcgatgaaaggcgtgatgctttcgtctgatggcactcctctcatggggtagccaagctgtcttatggcgaggccaggattataattaatacaaccccttgttccatcaagggaacatttggacatccttcgcatgaagatagaatcctgattctttcttccttctagcgagggagcaaattaacacacgccccntcatgctagtc

SEQ ID NO: 180301 - DNA, 361 bp, Glycine max
  unsure (1)..(361): unsure at all n locations
cggaccnnaagcaccgcagcagcaaacnncgaaaagaaaaagatgatttgggacacccccaaaaaacgaaaaggggtggcggcagcaacaatgaccgtggcgacagcgggagagacaacaacgcgaaagggggcggcaaaggagaaaacggtgacgaaagggggagacaaaagaagggagagaaaaagaaggacaatcccaggcgaacggctggaactgaacacccaccccaggaaaagaaaaacacaacagacacaggaaagacaccaaacaactgagcacagcaggagaacatagttaaccgggccactaaacgagccacgaacgtagaagactacataagacaacgacacgacaacga

SEQ ID NO: 180302 - DNA, 377 bp, Glycine max
  unsure (1)..(377): unsure at all n locations
tttcactcaagtcactacctatcaacaaacttgaactcaaagaattggagtttgcagttccaatagcaaggaggagtgttggagatatactttcgtaactgcataatattttatttttcagtttgtaaaataggacttagtaaataagttgatttcctatattttaggagtaagtcagttttaatggattagcctagtcaatgagtggttcctcttatctttaaggaacaagttagttttaatattctgttttgctaatatcttgttatctaattagtttatcttttgctacttattgtatcgctgctgagaacaatttgattacaatagaataattctatttcctccgcatacgtattgnctttcttctctcctct

SEQ ID NO: 180303 - DNA, 365 bp, Glycine max
ggaacactatatcttaggaaagcagaaaaaggttagcttctcaaggacatggaaaactcctaaagttgaaaagctagaattggtgcacacagatgtttaggggccaaccctagtgaaatatgttgaaaactcacgctattatgtgacctttatcgacgactctaccagaaagatatggatttattttcctaaaaataaatatgatgtgttttctatgtttaaaaggtggaaaacagaagttaaaaatcaaacaggtctaaaggttaaaagtctaaaatctgacaatggcggtgagtatgatagtcaggagtttaaagacttctgtttagaacatgagatcagaatgattaagacaataccagaaa

SEQ ID NO: 180304 - DNA, 422 bp, Glycine max
  unsure (1)..(422): unsure at all n locations
agctnntcttgagttgcctaatctccttcttgtnggcacttgctatgaggatgtcatccacatacaagagaaggtaaagaacacacactttcccctttttcaggatatatacacaactgtcatatctgtttctaatgaagccatatctgatcaagaactcatcaaatttcaggtaccacataggaggactttgcttcaatctatacaaagattttttcagcaaacacaccttgtgttccccttcttcaaaaccttcaagctagttcatgtaaatggtttccttcagatttccatggagaaaagctattttaacatccagttgttcaagttccaaatcatattgtattaccagatcaagtatgattcttattgagaaatgcttccaactagtgaaaaaacctcattgaatcaattccttcaac

SEQ ID NO: 180305 - DNA, 421 bp, Glycine max
agctttatgttccttgacctaaagtcaattgatggagtaatagttgcctttggaggaatgggtaaggaaaatattactagtataggtaaaatcggtattccttctttagcctccataaacaacatcttatatgttgaagtataacttactgagcataagtcaatttttcaatagtggttatattgtgcccttaaataaagaccaatgtatagtcaagatagaagatggaaaggttttctttaatgccaaacgacacaacaatttgtatgagattgatttgataggtctaagtaaacagaatgtaatgtgtctgctttctaaagaagacgagagatggatttgtcataaaatacttgagcatgtgaatttaacacatatttaaaaaatttctaataaggatttagtgaaaggaatacctaat

SEQ ID NO: 180306 - DNA, 433 bp, Glycine max
agctttttcttaagcttttgctacaacctttttcattccccttggcaacatcaaaaagccaaagaactcggaaatcaacacagttataacaatggagtagcaagatataagtatcagagtattaaatacaataagccaaactcataatcaataaaataatcaaaccagaagtcaaataacataaaatgtcaacaaccacaaaatatccaagactgaaacacaagaaaaataagcaaagtacttagcataataatgtagattctaagaaactaaaagccaaaatacacggcttataaagataaataagcagaatctaaaatctaagaagacggaggaggtggtggaagatcaaaactctgacgaatgtatccgacatcctcttcaagctgtgtaagacgaatgtccataccggcaaagcgtgaatctaacgagt

SEQ ID NO: 180307 - DNA, 281 bp, Glycine max
ctgcagctaaaaacatataggggaaaactttctctgcacagggaccttaagttacacagaggaatttcttaatatggatttgacgaatacccatggattaaggcatactccacaagggcagcgaaaggaaaatatgtcctcttgttttataagtaaatgatattatacttgcagctaacgatcaaggtttactacatgaggtccagcaatttctttataaatattcaaacaaaaggaaaggggaactgtcccacactctcgacaatataatctaaaaaaaa

SEQ ID NO: 180308 - DNA, 307 bp, Glycine max
gcgccacgattcatgagagatacaagaacacgggcgacgcggaattagttaaaagatccctacctgccttactgaaagaatatgaatattggaatacaggcattgcactacaactatgggcctcaaccactttattaaccggggggggaagaaatatgcatactgatcttccagaaggcctagaaggccaagcccaacggtaagccctatactacatcatgaagatatacatcaacagacccatgcggaagctacaggggcacaccatacctacaaacgaattaggaaagtgggacaaacccaggcc

SEQ ID NO: 180309 - DNA, 419 bp, Glycine max
  unsure (1)..(419): unsure at all n locations
agctngctaaattttctttaaaatattactttatttaaatatagattaacctatttttaaagaggaggaatcaacttacttcaagaataactctaaaagaattatttctcatccttactattcatttttttagaaatctaatggttgtaataagtagttaatcctaaccattaaatttcaagaaaatgaatggttaagatgaagaataaatgtttcaaaaaatgatagtcaatagttatctagtttaagttataaatcatattttttttctctacctaacactcaaggccatttttcttgctccttgagtgttagactgagttgtctctctaatctcttaggtcatttgaggttgtgtcttactttaaaacaaattatccctaaatcaatttattaatgattaattatttgactntcaa

SEQ ID NO: 180310 - DNA, 384 bp, Glycine max
catcatggggctgatgatgtacaaaataaaggatcctttgcctccctgcaatgaaacacacactgatacacatactcacactcatagagacaatcacacacggacacaaacacaaacacactcacacacattaagtaacacacacactgagagttacactctctttaagagactgacaaacacacagacacactgaagccacagacacacacagagacccacacacaaagacacacactttgagtcacagacacacacatacacaatcacactctcacacattgacagacactcacgcacacacacttagatagactctcacactctcacgctttaaagacatacatacacgcacactctgataaagagacatacactcactca

SEQ ID NO: 180311 - DNA, 221 bp, Glycine max
tccatggctaattccctagtggatggcgccccctctcccctcttctcctttgtcttccgctgcatctccatggtggaaaacccaccataaaggacctcattgaagctcaaagaaccagcctccatagaatctccacaaacaagcttccatacatgcgacctcaaccctacaatgatctggagtacggcacggaacaagagcaaaaccctgtctctgcaaac

SEQ ID NO: 180312 - DNA, 347 bp, Glycine max
tattcacattcaccttatcctaagactaacacacgtatatatgcatggtctgcaaccgcacactaactagtaacttttccgaagaaaagatttaagtccctaggaaaatttattgcatgatcagataacatatatcacaaaacctccatcactaccctcatggtagatgtatgctctaacaaaccaccactaataagtaatctaatcttcaatttatttattattaacagagccacttaaatattggcaactcgggatcatcagcaacgagggccttcatgggtaacccaaatccaaaccaattttgcatcacttttacgacacaggggaaacgttatataacaaaa

SEQ ID NO: 180313 - DNA, 293 bp, Glycine max
catcgcgcaataacccaccaaccccctgggcccacctccaactgaacacacggacgcccacgaagccaaaaacgagattatctcaacaccgggcccccaaaaaacctcccaagcttccccaacatccagggaaaacaacattcaaacagcacaagctaccacagccaacaaaacaggacaaaggcagagaaccccgcccaaacaccaacaaaaaccatagctgtttctcactgaaagaccctagtaacattacctgcgagccaaaaacgcaaccgggggacgacacgaaactt

SEQ ID NO: 180314 - DNA, 423 bp, Glycine max
  unsure (1)..(423): unsure at all n locations
agcnnccttgacaagcgcattgtgattattcttagagaaggtagagcttagctacacacacccctctaatatctaagctcacttccttgagatgagaagctagagcttatctacacacacctcctataatagctaagctcacccccatgccaaattacatgacaatacaataaattccctactataaagactactcaaaatgccctgaaatacaaggctaaaaccctatactacaagaatggccaaaatacaatgcccaaaagaaggaaaaacctattctaatatttacaaagaagagtggatccaaccttggcccatgggctcagcaatctaccctgaggttcatgagaaccctagggtcttttttagcagctctagcccaatcctcttggagtcttctatccaatattggaacactgcgat

SEQ ID NO: 180315 - DNA, 280 bp, Glycine max
agcttgcccaggcgagcgtgggacttaattgtttaagatatttcatggcccaagcgagccaaatgctatcctgggcgagcttgggcccacaaaattccataaaatgactatttttcccatttccttgtggtttttattcctggatctaacaatcaatttgagcgatccctcgaccttgcactgaaatcggtgtcgaatgataaaagcattccccacatgaaattagggtttgacaatatgcaatgtggggttgcgttttaaatgacccccatgtttatcc

SEQ ID NO: 180316 - DNA, 417 bp, Glycine max
  unsure (1)..(417): unsure at all n locations
agctttatgactgcagctcaatgtttgttgttatcagnactgatgtaatctttgatgaaaattgaagcctgaattgggaaaacataactgtagaaactaatcatatgcagcaggatctcaattttgattgggatgagcctgcctcagaaccagctgaagggcatgaggatatgaatcatgacatattggatcaggatagtcagaacctataagaggcaatccataggagggtcaaaagaactagggtccatccgtcaagactccaataatatgaggtatactcagatgatagggtgactgatgaaggagaactcttacccagtgaagaagtgcacattgcactatttgctgatatagagcccatatcctttgctcaagctgtcaaagaaagataacggatagaagcaatgaaagaag

SEQ ID NO: 180317 - DNA, 414 bp, Glycine max
  unsure (1)..(414): unsure at all n locations
gctttgattttgagatctataatgttattgcctttngaggctacaaagaccatatgcttgttgcttctatttttttgtgcttttctttttctacccattcgtttcgaatagggagggtgtgcttctgctggagtaactcggttatatctcgaaccagtacggtatgtaggcctttatactcctttctgatgctgtatggaatatgtcaatgtaacatatacgcttcatcttgtgttatttatatgttaaatgaagcatatattcttcatcttgtgtaatttatatgttaaatgtagcatatattctttcatcttgtgtaatttatatgttgacttttagtgatgtatgttttacttgtctatttgtttgtgtatctgttgcctgtatgtactgtcatcttgggtgagttcactt

SEQ ID NO: 180318 - DNA, 431 bp, Glycine max
agcttgattttgaaggctccacaagagtttatattatttttcctatgcgcaaacccaaattgaatattatcattaatcaaaataaaaacaatagtgataaattgcaatgtgtaagcacaagcaagaggaacattcttacataaaacatactaaatactcacatcttggtccatttgtaaattagcattgtcgagagttttgtccatgtcattcatcaaagcatgctttcgacggacatagtaatcccaaatgcacacctacaacagagatagctatttttcaccacatgctgaataaaaaagaataagaaaagctttcaaaaaaattagaatttcaagaaggaaccatgaagtttttacttggtctggctgaagattaaatatttcacaagcttttatgtgaagctgtccaatagtttcctacccaaaata

SEQ ID NO: 180319 - DNA, 423 bp, Glycine max
ttcccagagagaaatgatgctctgacggccacccaagcaccgcagcatgcacttcgaaacaaagagaagggattgtttgaggccatccttacaactatcacacttcacccgccaatttaacctatacgtgacgcgcgtcaacctaggcgcttgacggataccacgagaccggggtgacccaggacttggacaagggctttattaccgctaggcttacacgagaaccactctcatgtaaccacaccaacccgaccacgaggcaagctaaggccgaggccatggattcatcaccaaccgatcccggttgcctgcaggacaggacctcctgatcgaaaagagacggagaaagggaacgcgaccatcacacaaaggcctggaggggaagagaaacgcctaaaaaataatctatcgaaacattacggg

SEQ ID NO: 180320 - DNA, 156 bp, Glycine max
  unsure (1)..(156): unsure at all n locations
aaaaccagcagcagcngcggcaagggagaaaggttgtcaaaccggccgggccaaagccccaggaaaccgggaggaggccgaaaaaacagaagagactgcccaaaacagagaaccaccacagcgggaaaagagaaacaacaacagccgccaaaaccg

SEQ ID NO: 180321 - DNA, 369 bp, Glycine max
ttacccatcccctaatctttttttatatgaaaaacattatccgttgaaaataaaatattaactaacacttttaattttatgaattttcttgattcagagtcaacctttggagctgtgctggacatggtaacagacaggtgattctctgctctctctttatgcatgcagaccaaaaaaaatgtgaagaatgatgctggtatagcccccttaagttcaattcttgggggcattgaattgatgtggctaccttaataccagaattaccactgcttgtctacttgtagtccttccccaactgcacaagtaagatattttccctttaaagttgtattcaatccctggaattacaagcatgtacacctgactttt

SEQ ID NO: 180322 - DNA, 425 bp, Glycine max
  unsure (1)..(425): unsure at all n locations
agctntacaacagattttagtaatgtctcttttttctataattaaaataacttaatgccattaacctagggaattaaaaaaacttaatggctgagtgtaactgaaattgtggcaaccaaaagtcacccccaacagccaacaagtcagccaccatttggtctcccaaaaggctgatgcctaggttgccaattgggcccttattacaacttgaactaaacctaactaaagcccttttagttgattaacccaaaacatatttttggtcagccaactttacaaggattgggcaattatttagacaaactaaacactctaaaattgaaactaagtggtgtcatttagtcctcctccatttgggccatgatacaactcacaaccttggatttttctccttgaaacttgggcttgtattcaaatagtatgga

SEQ ID NO: 180323 - DNA, 325 bp, Glycine max
acctatgctgtagtaggactttttttttttggaccggaaaagggaaaaaagtcaaatctaaactaattgaaattgcaagctctatggtagaagaatcaaacttgcttgcaagattattgatcttatttgagttctaggttgagtacataggattaggatttgactggactcatgatataatgctaagaatagattaccctatagtggatctggtgcttgatacgaattgtaggaagggttgataaaatccatggatttttaacatattgactgtaattcatttaccttaaaatggtttgaaaaacaatcgttgtttgcatacaat

SEQ ID NO: 180324 - DNA, 382 bp, Glycine max
  unsure (1)..(382): unsure at all n locations
tgatgaatcaagattgattccaggtgctttgatgataaaaaaagatgatgacaaaacgcccatgaaaatgatttcaagattgagtcaagaacaattcaagaagtatgagaaagattcctgaaaagtttcaagttttcaagaatcaagaatcatgaataatcaagaaccagattctagaatcaagaaaagactcaatcaagataagtactaaaaagtttttcaaaacattgagtagcacatgaatttttcacaaaaccttttaccaaagagtttttactctctggtatttgattaccagtttattgtaattgattaccagtagcaaagactgttttcaaaaagctttcaactgagtntacaatgttccatttgatttcaaaat

SEQ ID NO: 180325 - DNA, 415 bp, Glycine max
  unsure (1)..(415): unsure at all n locations
agctnggaggggttgatggggacccggngttgattgaacgaggataagggctacgtagtattacatgagctcagttgaaggtgggcaactggggatggtgggttcatgtttgatttgtggaagtgggagagttgatttgcgccatcacccgatcgccacctagtaccacatatgacgggtaccccataatccaacaagcttgatgtgagaaaacgtggaagagtcagtcttcctacttttgtttgttgaccacacagtggtacctggagatatgtcgcaggggtcaggagaccttggggatgtcaggtggggtgctattgcccaaaaccaagcttgaccattcccgacccaactcgggcatattcatgtcgtgagaacctgtgacgtacctaaaaggcgagctcctacagttaac

SEQ ID NO: 180326 - DNA, 371 bp, Glycine max
agagaattataacttaatacaattatagagagtaagcttgaatatgagagctttacaacttaagataattacaaagagtaagaagtgccctaagtgcaattctaacctgagagaaattgcggtaagcgtgaaaagttgtgcttaatgccaaaagtggactccatcttaacgagacacgctcgtcaagcgagatctgcagattataaatatgtttttcagcctgaaaaatacaatttcacgcctctctctctcaaaactctgtccaaccaccctagaaactcctcctccaccacccacgaccaccggtggccaccacgagctgccattgtttgccgctaaaccaccacactgagaggaacattgtaatcgga

SEQ ID NO: 180327 - DNA, 428 bp, Glycine max
acctgcggctgcagcttgctgaaaactttttttattttgtatcttaagcttcaatgaggtccttcaatggtgattttccaccatggagatgcagtggaagataaaggagaagtggtgagaggaggcaccatctactagggaataagccatggaaggagaagcttcaccaccaagagagtgtcttggataagaagcttagagagggagcttcaatggaggaagagaatgagagagagaaagagagaaagtggcatggataattgaaggaagaaagggagagaagtttaactttgaagtatgtctcacaagactctcataaagttaccacaagtgatacacatgtttctatttatagcctaggtagcttccttgagaagctagagcttagctacacatacccctctaatagctaagctcacctccttgag

SEQ ID NO: 180328 - DNA, 365 bp, Glycine max
aggtttccatagcagcaggccaaagcagctcaccatcaagaggcactctcagtgagtcttcaggtggggttgggagtgggagcccactaaaccaaagcacaggagcctgcaacaacaccatgaacaactgtaccaccccaacacaaagctttcaaggcatgccctggaagtagaacttgactcacctcacatgtttgtgtaataggtttggtgtggtgaaagacacatcaggctctacttgttatgctattactttgtgtcttttatcctttaagcattgaggatgcacacctgttatattagctttatgtaatattagttggaggaacaacatttcagggataaagtacttggtctcgaagctt

SEQ ID NO: 180329 - DNA, 425 bp, Glycine max
  unsure (1)..(425): unsure at all n locations
agcttgaanaattctcaaagctaggtttgctttacctttcagaagaaggaagcaaggctctttgtgagtcatcgcctgaaatatcaacttcttctgagactgagagtgacatgtcattttcaaggtttgtatctgaattaattaatgtggatgtaaatatgtaatctacttatggtatgtaggaagagacaacttctacacacagtataaatacaccaaatgttgctcccataaggtgaagtccaagattcgaatatcaactcattgttgacccaactggatagtctagctttgattatgtatgctttaaaaatatagatttgttttactaatccgttttactaagaagagatagtcttgatagttggtttaataatttggcttgttagcagttattagccagcatataaagattcttgaatatt

SEQ ID NO: 180330 - DNA, 423 bp, Glycine max
  unsure (1)..(423): unsure at all n locations
agctttctccactaagttgtccttattctgaaatgtcttttctgatggcagnggtcctagatgcagggaagaatttctccaaaaacaccctcttaaggtcatcccacctgaaaatggacctgggagcaaggtaggatagccaatcttttgccactccctccagagaatgaggaaaagcctttagaaagatatgatcttcttggacattagggggcttcatggtggaacaaacaatatggaaatccttaagattcttatgaggatcttcacctgtaagaccatgaaacttgggcagcaaatgtattagtccagtcttgagatcatatggaacaccctcatcaggatattgaatgtacaagctttcataagtgaaatcaggtgcagccatctccctaagagtcctctcgcgaggtggaggttgag

SEQ ID NO: 180331 - DNA, 386 bp, Glycine max
  unsure (1)..(386): unsure at all n locations
actcgatngagaagcactctcagacccataatcacaatcaaattagattagggtttgaatttcgaggcccttttgaggtgatgcaatgtgaataagatgatgtaatattaaggatgggtgggatcgacagacacatggagaagaaaccatttaagagaaagagagagagagagagagagaaagagagagagagaggtcacgatggattaagggtgggggagaaggttttggttaaagatgatgcgacgcatcagctgtggtgcggcagtgctatttggtggtgcacgaaggttggtcacggtggggagttggtggttatggtggtgcggtggctttcccttaacctctcctaagcaaatggaagtgcacaccaaaaagtaaacaac

SEQ ID NO: 180332 - DNA, 404 bp, Glycine max
taaacgcagcacaatgctgcttttcttgtggaaacaaataaacatattaacaaagaggacttaattcaccctatttgaagcatgaataaattgaagtcaggcggatggggcaggacactcatgcatttactgccaaagataatatttatgttacgcattaaccaaggtgaatctcttccacttttttctattgaaaaaatctcaaattgcatgtcggctaaggggaatacaggtaattggattccgatatctatgggcagaaatggaccaaagatctcttttttatttttttgctgatgctaaaatataggcgccagaggctttgaccatcatgtgaatgtgattaaggatacgctttcaacatccggacaaaaagtaataatattaaatccaaactttatttc

SEQ ID NO: 180333 - DNA, 426 bp, Glycine max
  unsure (1)..(426): unsure at all n locations
agtcgaccgaggctgcagcttggcatggaatagattttttttatgagaaaggcncatgttccaaagagttctgagagcttttgctgtgcgaagactggcaaaaaattgagtgtgaagaggaagccatactgagagcatgagatgagccttgagtgattgtgagattctagaggtggaggagacatccccactacttgtatttcttcaatccttcatttttctcttctctttgttggaaaggaagcttcccagatatggagagataaatcctttgttggctcttccttgtaggtacttgatgtaaatacatgtatatctatatagtgaagttatatgtgttctctgtgctatcagaacattatattagtgtgcttttgcttgatcacgtagatgcatgctttgttaggatcattcaaccatggaaac

SEQ ID NO: 180334 - DNA, 339 bp, Glycine max
ccagaaaactgcccatggaagaccaaaggcccatatcttaggctttgtccccaatatgcattggaaacaaacttccaagcaccggaagacaacctccgtatgcccgtcagctcggggatgacatgttgaactaaacctaagcggcgtacctactgctttaaaaagggcttaccaaaagtcgcttaaaaacaaagggtcacaacctgaaacaatggaagacagaaatccatgtaacctaacaacttcctgtaaaaaaaccgcggccacttcggtagcagagaaaggaagccctaatggatcgacaggagcatacttagagagtcggtcaaccaccaccaa

SEQ ID NO: 180335 - DNA, 459 bp, Glycine max
  unsure (1)..(459): unsure at all n locations
ctgcactttcatcattttgacccgagtgtgtttctttgtgtttcgngcattctgattctcgttctgtttactctttataccccctgttgacgtgcttaagccattntacttaagtcgtttctcgcttaacctacaaataaaataaatttccaccgaacgtttgaattgtattatccattagcttccgttaaaataaattccgaccgttcggtcatgccgtaaccacgttggacatcaaaaagaggtacaaaataatataataatcaaaaagacatcttttagtaaaataaagcgganaatcaatcggacgttttctctttgggatttctcattcttaaccgaattgattaataactaaagtgaaactaaggctaatatcaactcgcctagtcaagctcgtccacaaaaataggcttttgaagtttgtcatttcaatntctcactaagtaaaatggatca

SEQ ID NO: 180336 - DNA, 394 bp, Glycine max
  unsure (1)..(394): unsure at all n locations
taattataatcttcaccaccctatatagccctttatttaaaaggcaaaaacatcatcaataatgaaacatatacattcatgaatattaactttaaccaaccatcatcaaggaaatgattctctttgagagcaccataaccttacaatccaatatctcaggaacaaaaaaanaaaatcttttaacaaactaacaaactcccaagatttttgtacatccttttgtctatatgccaattattntgtcactaattgatttattacttgcatgtgatattttctacgtagaataagcacctggtatattcttgcatattactacaagtgtatgtaaaacgtgttcaggaaatttatggtatctgtcattacgcactttgattattcaaacacaattgat

SEQ ID NO: 180337 - DNA, 433 bp, Glycine max
agcaaatcaaccacagcagaacaattatgaccttttcagcaacagatacaaccctggatggaggaatcaccctaacctcagatggtctagccctcagcaacaacagcagcctgctccttccttccaaaatgctgctggcccaagcagaccatacattcatccaccaatccaacaacagcaaatacccagaaacagccaacagttgaggccgctccacaaccttccctcgaagaacttgtgaggcaaatgactatgcagaacatgcagtttcagcaagagaccacagcctccattcagagcttaaccaatcatatgggacaattggctacccaattgaatcaacaacaatcccagaattctgacaagctgccttctcaagctgtccaaaatcccaacaatgtcagtgccatttcattgaggtcgggaaagcaat

SEQ ID NO: 180338 - DNA, 481 bp, Glycine max
  unsure (1)..(481): unsure at all n locations
aatatgtgtatatattgcgaaagatatgtttgtttgtcttatatcctaatttttgagagttcttttctattaagtgtgagttccttcttctgctgttgttgcagctntatctagaactgaaatgccatcttcaagaacctgaggattcaaagctctagtcttggcacagtgttacaagttcataatggatttgaagattcaacatattaaatgggtggggaatatttaccagaagtttgaagcagcgtgtcaggaggtggatgatattgtacgccacgtactatttcatttttgctctgctattcttcttttcttttcctttnntttttcttgcttccctcctttcctttgtcttacttttcatatacataattcttgtatgaaccttctttggaaatggtaacaatattattaagaattcaatcctttgcaatattgtggtatatttaggatctgtaaagtgaatcatctatcaatctat

SEQ ID NO: 180339 - DNA, 393 bp, Glycine max
  unsure (1)..(393): unsure at all n locations
aatcatgaaaactctcactttctccttgtaatcttggangtctcatacacttttaagaggatctcctcaagttcttgcaaatggagctntctttccatacccgcttcatcaaatgtcatgttacaactcttcacttcccaataagcatagtgctcaatctccaccggatggtggcatgccttacaaaaaaccaccctatatggagacatcttccaaggtgttcggtaagtggtcctgtaagcccatagagcatcatcaagtagcctgctccagtcactcctattgggttgcattaccttctgcaacacttgcttgatctctctattgaaaacctctacttgcccattagtttagggatgataagctgtagcaactctatgcacaaccccttac

SEQ ID NO: 180340 - DNA, 313 bp, Glycine max
ccgcatctatccactgaatagatatataggacagctgatcataacctacactcttttctaagcctcttttggcaactattgcaaaacaaatttttgcatgaaacagatctcttggcatctaataatcacaaatatgtaactactacggatctggatcaaacaacttatgaattagcatcgataacatattaaaaacatgaatttcaattaaagttcatcatactgaatatatattgaccgtataaagcttaactgctaacatgtaaacagacgaaataggagtaggaaatctaaaactatatccatactgatt

SEQ ID NO: 180341 - DNA, 378 bp, Glycine max
tagttcaccatgtagctcattgatcatgtgtcggcatgtgtaccggatcgcacaagtggtataaaacagtaagaaccgagtatcgaactctcggtgaacttgtgttatctggcaagctattttggtaaataggtgtatggtatgaaaatatgattatggctatgaacagttatgtaaactatctatgccaaaagaatgaaaatcacgcatgagaaatgttgtgtaaaaacaagtagagaatgcgttggtcttcctaataggttcctaatgctaaaatggatgttctctatctaacaatgcccatgtattcctatgttgtctcctgaactgctagaccacgattcctcatgatagactagcctaattctgatcaagcat

SEQ ID NO: 180342 - DNA, 187 bp, Glycine max
atcttaatcgactgagcatgcactttaccaagacaacgtaaatattctttatatctttgacctgatccttccttgtttgaactcactacaaccttcatgacaacatgatataccatttctctagaatttgagcttgaaagtttggaaaatgtgggggtttgttattgaaactgtttgcggctatcta

SEQ ID NO: 180343 - DNA, 342 bp, Glycine max
  unsure (1)..(342): unsure at all n locations
tatctcttcaaactcttccaccgtgggtgttaactggaagtccccaaaggtgaatcaccaaaaggctggtcataatattgggcgacggaggcaatggcttccgtggagacctctgccatggttangtcccagatcttaccatatgctttgcgaaaggcttgttgctatagttgacccatcaactgtcctaactctcttagactggcgactcctatgctcttcatcttgacctgatagaacctctttctaagccaatgcacctgactcgatcccatgtnttactaaagtggaataataaaacctgtgtgaatcaagactctgacatctatcacgggtcaaatg

SEQ ID NO: 180344 - DNA, 394 bp, Glycine max
  unsure (1)..(394): unsure at all n locations
catgggcatctccttccttcctttttgcccctgttgccccgattcttttggcagccgcatttgtggaggaagacgaatcaaactttcccctcttcaatcctacctcaattctttccccggcaaacactagatccgcacagctggacggagtgtaacctactaactctttatattagaacactggcagagngcctaccatcatggcgatcatctctctctcaaccatgggaggagctacttgtgccgccaaatcccatcaccgctgcgcatattctttagagggttcacactctttcttgaacatattctgcagaggagtgccgtccggagccatatcacaattgtactgatactgtcttaggaaggcagtaatcatatccttccagtacggatc

SEQ ID NO: 180345 - DNA, 452 bp, Glycine max
gactatggtcttgtgtggtgttacaagctacaaaaggagagagcaagaaatgatgagccaatggttgatacatggaccgagatgaacaagatcatgaggaagcggtatgtgccggctagttactcaattgacttgaaaatcaagctccaaaaactaacccaaggcgactagggggttgaggagtatttcaaggaaatggatgtgctcatgattcaagcacatattgaagaagatgaagaggtaactatggctcgatttcttaatggtttgactaatgatatccgtgatattgttagctgcatgagtttgtgaaatggtgatttgttcacaagcaatcaagtggacaacattaaaaagaaggagggctagaagagtttacacctttggttttagtggaaacaacgaataagatgggctgtcttctatatatccactatccataaaactcgtca

SEQ ID NO: 180346 - DNA, 355 bp, Glycine max
  unsure (1)..(355): unsure at all n locations
tgccatgttttcaaagcccgtactaaggcatacaactccctatcataagttgaatacccaagggtacgaccacttaactcttcactaacacaagcaaccggatggccttcttgcatcaacacaagccccatcccaacaattgaagcatcacactcacattcaaagacttttgaaagcttggcaccccaagatggggcattagttaccttttgctcaagaacattgaaagcttcttcttgtttctctccccatttgaaaccaacatttntcttgagcacttcattgagaggagctgcacatgcgctacaacccctcacaaatcgccataaaaacctgctaaccataaaactctcac

SEQ ID NO: 180347 - DNA, 464 bp, Glycine max
  unsure (1)..(464): unsure at all n locations
ngcttgtggggcttctatggaggctggatctttgatcttcaatggagtcctttaatggtgattttccaccatggagatgcagcggaagacaaaggaaaggaggtgagaggaggcgccatccattaatgaataagccatggaagaaggagcttcaccaccaagataatccttggataagaagcttggagaggatgcttcaatggaggaaaggaaagagggagagaaagagggaggggggagcacaaaattgaaggaagaaaaagggagaaaagttgaactttgagttgtgtctcacaagactctcattcatcaaagttacaacaagtgttagacatgcttctatttatagactatgtagcttccttgagaagctttcttgagaaaacttccttgagaagcttctttgagaaaacttccttgagaagctagagcttagctacacacacgctctcataactaagctc

SEQ ID NO: 180348 - DNA, 531 bp, Glycine max
  unsure (1)..(531): unsure at all n locations
atccttaagtcacctgcggcatgcaagcttcaatccatggtgttcatcttataatctttaatgcatgaccttgacaagatgactntctctaaagaaatattgtggaaatcctccaagacactctttttgattgtaatgtgtaattntatcttgataaagagtcatactagggaaataacaagatgggtatctataataaaaacaattataacctccataatcgattatcaaaatcggataatcagttatttcacctatataccatttgttattccttttcagatcgtggtaatcgattacaacaataaggtaatcaattatttcaatcccaaagaacaatcttccaattgcaataagatataatcgattacaagaacttggtcatcgattatcctacttgcaatttgtcatatttgccttcaatatgctgctataatcgattatttcgcacatagagagaannattaagttttaagaacacttgtaattaattatagagccatggtaatcaattatacggctcacaatgac

SEQ ID NO: 180349 - DNA, 457 bp, Glycine max
  unsure (1)..(457): unsure at all n locations
nntatgctgagtgtccacatagatgtgtgctatgatcagttntgcatgaatttctaatcatcaccatcatatgcgtgtcatggaaatgatttggggcattcccttattcctgagccacctactaaacagacatcccgacatacatcatgtcccaccatttgtgggccttttgagccaaacgtcaactttnttggctagaaccttaacctaggatggaaatttcctaccttacccttggaagatagaatagaaggatcttccaagagaagcttcctttaccttgggttataaatgtgcgtcaagagaaaagaaagaaaataaaagagaaaaatcaatcaatcaaagatcgaagtaaagcaaaagataatagaatagataaaaaagagtctctttggaccaaacaatgtctaaacaatgtgcagaattgtcaaaagctaaacaagacagaaatagtaat

SEQ ID NO: 180350 - DNA, 491 bp, Glycine max
  unsure (1)..(491): unsure at all n locations
agcttatgcgcatatttccttacagacgttctcttgcacaagacattntatntaaccgacaaacaatgcgcccatatacaatcaaggcagcttcgttacctatattatatacacgtacttccaaggcgtatttgttacttacatcacacacatctccttggctaaattcacatacatgcatactcaaagcattttcgggtaccaaagattgcacatgtgcacatcttggtattcctaatacctatacatacacacacttcatgatgaatcttgactatttacacaataaggtgctacatttcatgctctctataagttttttctacctaaagccccatgcaaaattcagaataattctcctttgctgactaatatngtattcacattaaaaggtatacactttttggtaatgtatcttctttacataacatgcaacatatttatgtatattttgaacacattttactacacacatatatgtactacatcca

SEQ ID NO: 180351 - DNA, 351 bp, Glycine max
  unsure (1)..(351): unsure at all n locations
cgcttntggagtananacatgggaccaactcattttatntcataaagtcgnatctagtcaaggtctgagagaccatacaagttttctagcgatttctaattatgtgggccattaagtctatcatatgctgacagtagccgagaagcccatgaatttcttcgggggcggagtaggtgtccaccatttccttggccttggctaacaatcgggaaagttcttgactcccgttcaaggtaagagcaaaccgatccatccacatggttgcctcttggtgtaaagagtcgatcacccttcctctagcctttttttccgcgtatacttgggcatactcgtctgcgaccctatgctcgt

SEQ ID NO: 180352 - DNA, 233 bp, Glycine max
  unsure (1)..(233): unsure at all n locations
atctctaagtcacctgcggcatgcagctatntcaaggacagtgtattatatgtttttcctgcaagagttggctcacaataggccaatcttatctatggaacattctcttgagcaagtagcctggcctgaagctcaccttccattggtgagacccaacgaagttgctccgtctgagcccacacctgtgcaggtcaattcagagccagctaacccgacaatctccagcggtgaat

SEQ ID NO: 180353 - DNA, 277 bp, Glycine max
  unsure (1)..(277): unsure at all n locations
accacatatgaccaaattacacacactaggcctaacccattctctgatgataatgactctggagccggtagtgaacagactgttctacgcggtgcgggccaccttccaatggtgatggtcctatggaccatgaatggattcgcctccggcctctatgttaactggaacttaatactattgcccaagatgggttccaagtactatactaacgaacctctcattcttcaccctataccaatggaactacattntcttatgtctctggtgatatccttac

SEQ ID NO: 180354 - DNA, 390 bp, Glycine max
  unsure (1)..(390): unsure at all n locations
caataaatctacatatatgntttttctagaataccactggagaaatgttctagcaggcaatttttgcaaagacaattnttaaaaaaggcggtttccatgtaaatcagagatactacaaaatcaaaatatactactaggccatatatactattatttatgactgtacagtatttattttaaattttgaaacagtaagaaaatgaataagcaattgtaggaagaattaaaaagagtgaaattgagcatgtntacacttgcaaacaagcatggnggaaaatcaaagacacatacccttacatcaaccatataagttcgagtgcgcttgtttggaacaacatttttggtacgttcatcagactcttgctgctcaagttcaaaaccacctgtgac

SEQ ID NO: 180355 - DNA, 417 bp, Glycine max
  unsure (1)..(417): unsure at all n locations
tacgcaacaaatacatacgctcaaaactttcatngcattccgatccggtgcaantcacttttacaattttggtaaatattaatttctgtccatgagtagagaaattccaatctactatattctttttcattattccttttatcatgaatcttatatcattaactctcaatctgatataattatattcattgaactaaatgaagcacgtaatacaaagagtttatgatgaatcacatcaaatctcaaatttatatataagtccccacaaccgctaatataattgataaatgcaattcttcttattagacaaacattaattataaatgtttattagagaaaaatttgaccttctgattttctttttctttccttctccttactactagttaactcactcggatacctactatattatta

SEQ ID NO: 180356 - DNA, 413 bp, Glycine max
tacaagaatgaagctctgataccacttgttggacatgttgcctcagatatcttaagaaggaggggggggggtgaattaaaatattacaacttatttccccaattaaaaattctatttcactctcttattcaagttataaattcccttaataatgaatttcttgaatattgattcaaatagaacaatttgaatacaaatataaaacaataataaataaaggagtttaatggaagagaaaatgccaactcagatttatactggttcggccacacccttgtgcctacgtccagttcccaagcaacccgcttgagagttccactatcttgtaaattccttttacaagttctaaacacacaaggacaacccttcctttgttttagaattctttacaacaagagacctctgtctttaat

SEQ ID NO: 180357 - DNA, 216 bp, Glycine max
  unsure (1)..(216): unsure at all n locations
gagatgacaaatgtgatgacaaaaagctcaaagatcaatcaagaacaattcaagagttcgagataagaatcaagaagaattcaagactaaagaagaaagtctagagacaagaatgaagagaagactccatcaagataagtattaaaaagttgttcacaactttgaatatcacatgagttttcgagaaaaccttttcacacagaggtgntactctct

SEQ ID NO: 180358 - DNA, 501 bp, Glycine max
  unsure (1)..(501): unsure at all n locations
tacgtgaccttagatactcagcttgtatgtaatcctgtaaccgcttatacatttcattgagtgatgctatctgcagaagttcacagatgaagacantttatttttaacataattcacgaaagattganaaaatatgaggagaagtggaaagaatcaaagaaattcattgaattggaattgtagtgcttatttcaccttctgatttgcactttgcatctctcgttgtgctcttccaaggtcctctgacagagtactatgtgacctctcaatgtcaagcctagcttctctctctctaacaagagactccactgcagccttgtatttacaaagataataaatagtttagagttcatcatatgacatttcctttcaccattnttgttttcttccaattgactaanaattctttcttaccgactattccatttcttccttgatcaattnttcttgtaaagaagtgcaattccttctcatttctgtgataattgaatctaattcttc

SEQ ID NO: 180359 - DNA, 314 bp, Glycine max
  unsure (1)..(314): unsure at all n locations
aggatgagaaagcatatatggcagagctttgagagatccacgcatgtctaatatgaaaaaagacccacctacaatattaattataaagaagcttgctagcaatgtcattactacagctattataaaaggaggtgtttngtttctttttttccactttgtattcaggaggtgagcaccaattgtgcactctanactaatcaaaattcactaataataanaaattacaagcttaataatacaactctaaactttttaaaataattagtgcccttagtactaagaaattacaggattaccaaaacctagtactgtga

SEQ ID NO: 180360 - DNA, 476 bp, Glycine max
  unsure (1)..(476): unsure at all n locations
nttacatgcatgtgcacaccatatntactatactgtgatcaactgatacaatctanttgattgaaaagataatttatactactcttctaatgtagtggacaactaaaattaaaataatataatagaaaatactgcttaagccattcaaatcaagtcattttgaatctcaccattagtatcatgcatgtcaaagataaggagaatcangcatcgtaatgcataacacaaccaaacattaaaagaaaacatgcttcctaaagccaaccaaggtaaaaatgtattcatatttcatgaactttntcanaattataagacacatataaccatatataaaaacatggcagaacagtctcaccacatgaacaacatagaccacacatttcagaanatgagtgtgtaggaagaataataaagcactgttaataaaaccgtagatacactaacataacaagggtgtcatgacaaaagaacacatt

SEQ ID NO: 180361 - DNA, 421 bp, Glycine max
  unsure (1)..(421): unsure at all n locations
ctgcagctatttactacaaatcgagtgtaattcttgattaaagtataaagaccacctctctgatattaccaatttgataattgagaacaaaggctcaagattcttcaatgtactctaagatttttttgctacgtaaacaaaaattagactaactgctaaagctaactagtaatgtgttaaaaaaaaaacctcttctcaaccttgcatttngtaatggaagaaaacaaattaaaatatgcaatgataaacaaaaagttgccgaccatattatataagaagacaggagatcatcaatgttattgtggttaattctctggtgtttctgcttttatctcttagcatacgaagcccatccattatattcaaaataaatcgtttaattgttattcaagaactctctaattattgaagagtatgtatg

SEQ ID NO: 180362 - DNA, 396 bp, Glycine max
  unsure (1)..(396): unsure at all n locations
cgtatcagagaaactgattccatcttattgagtataccctttggcaaccaatcgagctctgtatctatccacaaagccatccattntatatttaaccttatacacccatctacaacccatacaatgcttatcaggtggtaagggaacaagtgtctatggggaattttcctcaagatctttgatttcctcattcattacctgacgccatttatgatagggggaaactcaatgatgaaattgaggttaatacacagctaaaatcangttaatgagagctctgtaaggggagcaaagagccaacaangaacaatgatgctggatcagatatgaagtctttgattntgatgtaacataatcagacaagtataagggagggctaatatggcgcgtactcct

SEQ ID NO: 180363 - DNA, 513 bp, Glycine max
ttaagcgactgcagcatgcaccttatcttgaactaacaagcgtgtgggtggttattgatacaacgaatactaatcaagtctcccacgctaaaacatagttttctctataaaaacttactattgtgtactcataaaacctacacactcattgatactattatcaacaccaattaaagatccaaaatagacattgaaaaacaagcatcataaaccttttaactactatcatccgccgaatcacaaatacacaaacaatcttcaaaacacagaccaagacgatcaaggactatcattaatcttcatacaacaattaacatgactattaaacacactcaaagacaatctttaagcccacattataataaccatcagaaacaaactcacatataaagagagaaaataatcagccgatttaactatttatctaagtcattgctatctaaaagtcctaattctcttctatacccaagaaggtctcttggggaagagtttgaaaatactactaactaatct

SEQ ID NO: 180364 - DNA, 390 bp, Glycine max
  unsure (1)..(390): unsure at all n locations
cttgagagttntccatctacgtctatgcaatttttagtaagnggacnaacacaatatttgatagacagttctgatacttgtgttcaaaggagtcctgctcggatgaataatacaagtcattagtcttttcgttaaataagcttattcttataatgtttgttgtcatttaaactctaatggttatagatcgcctttaattgatctaacacttttaagtctattcttataatgtttgagtaagtggacaaacacaatacttaagggttataaatagcctctaatagatcaccacactcttgtgaagtcttcctccaagctctgcaagaatgcctncaatttcagtaacgtacacaattattaactaccatatctatactcaacatcataagt

SEQ ID NO: 180365 - DNA, 361 bp, Glycine max
cttgagacagttaattagtacctagtattagcatactactaaccggatcacatgtaacagtacaaccggttaacatttacgttgattcttaattgatttatcatctacatccaacaagccttattctttgtaagaagcttctacagtttggaaagaagttttgattctttaaaaaagaagaatctacttcaaccgatatgccctaggcacggcattaacaagttagccacattttgggttggtggggtggcatggattggattttaatatagacaatagcattctattggttatttattcgtgtttgatacagctcagcttggttgataagccttctcttgaaactggatctgtacaaaca

SEQ ID NO: 180366 - DNA, 442 bp, Glycine max
  unsure (1)..(442): unsure at all n locations
tcagagtgacatgtgtctgcttccaagtctatgcttgtccncaagtcccataattgtttggcctcttccaacacctgattgttacaaacaattttgctgtttaatctcccttcttcttccaattgcttgtgactttgactntggttctggatatcagttgtggtaaccatgtctttgtctccttctaacccgtgagggtcttctaccacaagttcaagctggggggctttagagtgagaaaatctatgtctntaccaggactagtaataataggttggggtgaatccactcgacaagcactgctattgatttctgatgaaagtgaaccactttcaatgtgttgatctaaggctcgcttgattnttgatttgtagtagacggtagagctttcaactcataacagagtgggatacaatgatgcagcaatgtagatgtagatgta

SEQ ID NO: 180367 - DNA, 415 bp, Glycine max
  unsure (1)..(415): unsure at all n locations
tatatnctttcatcatccatacctcaaccctttcattatcaacgaagttatgacacatgcatacctcatccttattaaattctgaccatgcataccttcttgtttcttactaaaactatttcaatcatgtctcagcatggactttggtgattaattaatgtatcagcgaaagctcagttcaataatattataaaaaaaggtttgtagttgtattctttttcattagataccttaacaacatgttcaatttcccattcacttgaaaaaatgcattgcatcatcaaaggccaatatcaagcttataaaaaanatacatcgcatcatcaaaggccagttttaattaaaaatggtgttttagttgacaagtaattgcagctacttttactttctggtttgttatgcactatgcctagat

SEQ ID NO: 180368 - DNA, 391 bp, Glycine max
  unsure (1)..(391): unsure at all n locations
tgtatttcanatattatggtgtgcgcttgtttgtaacatgttatgttgctactganttttaattctttgaccctttgaatgaccaaattggctttcgatgtcttcatgagacttgtagagaattttatcctttacattcaagcactggtatcatgttatttggaccattacaacataatcaatccttaaagcattgcagttttgttatattgtgaggacaaactgacatctctatcttcatggtcagtttcttccaagatccaagccttatttgcccatgacttctccataaaagatatatatatctttctcttagctttctacaaccactgagatcatcccaaattcacttttgtagctcaagtagttttcaaattattgcacacatatg

SEQ ID NO: 180369 - DNA, 408 bp, Glycine max
ggatcttaagtcacctgcggcatgcaagcttgttaagtcatagaagccctaatttctcttatacttggtggagtaggccactcaggaatgacctttattctcttagggttcatgggaagcccttgatcactatttaaaaagttaaggaaagtaatggaataaaacataccttcttctttattttcatgttgattattcctacaaaaaattaagacaaacctaaggtatcccatatgagcacctacgtttgtataaaacaaaaaataagaacaaacctacctaatgagtccctatgtacacaaatcatgaagatgatgggtgcatgagtgattttacaaaagagggtggcaccactcaacacattcatcataccacctatcatagggagttggtgtctcataataccta

SEQ ID NO: 180370 - DNA, 454 bp, Glycine max
  unsure (1)..(454): unsure at all n locations
tggttcgaggtacttacccgttgaagatcgaagaacgatgaagaacgaatgaagaacgtcgaagaacggtcgaaaccttcgcgaaattccttacggaaacgtttcggaagcgcctcggcttagaatttcttcacggaaacaatttttccaagcaaattcgaaagagagagaagtgcctaaggggctgaacccttttcttcttcacttcctcccctatttatagcaaaataggggagatggttgccgcccagctcgcccaggcgagcagggttgcttcctccagaagcaacagccttctggaggaatcttctggagggcccaagtgggcctggttgctattngcacccccatttttactaagtacaccccctgccttttntttttggtgattcttttttcgtaaaggtacgaaaacttacgaatttcgtaacgatacttggnttcttttcgtaat

SEQ ID NO: 180371 - DNA, 450 bp, Glycine max
agcttctcaaggaagctttctcaagagagcttctcatggaagctacctactctataaatagaagcatgtgtaacacttgttgtaactctgatgaattagagtcttgtgagacacaacacacagttcaacttctctccctttttcttccttcaatttcgcgctcccccctctctctttctctccctctttcttttcctccattgaagcatcctctccaagaatcctgcctagggtagctttgctattcttagccagtcccaagcccggataaaaggagagggttgtgttaggctttcgacagccaacgttaaactttgtcgaatctctatgacatggatcaattacgtaataatgtgaatgctaggtcgttgcccggaagcaacgcgctgtatggctcgagtacagtgtcaaaagagcaagggccgctgcatcgcccgccggatgtagtga

SEQ ID NO: 180372 - DNA, 479 bp, Glycine max
  unsure (1)..(479): unsure at all n locations
cccttggcagaaaacacagggaaccactatgtgatagacgctttttggttagggagcaccaaacaccttagctntcaagaggattctaagttttagagtgatttttaagtttctagaggtggaggagacatccctaccactgtgtaatctcaattctgcttccaaaacctcctattgtaactgaaaggtgataacttgccatgaaatgctaaagctcttgtttgggatttctgctgagtctcgatgtaagtattctttactatgtatttaatgttgttttgatgagttcattgcttctatctgcatttaattcttgcatgtttatggtctgatcacccatttgtgtgtatagctaggaattttagcattggaatatgttataaatccttataatacggctagataactgtatttgtctgacacggagtggatggactctagtnttcaatatgctgtgaacctaatgttgtcgcgtagct

SEQ ID NO: 180373 - DNA, 416 bp, Glycine max
  unsure (1)..(416): unsure at all n locations
gccttgatgtcgtatggcaggctatatcacatatagaaacagcttatgctttcgttggagagagctctgcaaccaaatcctttatagagaacatggaaaaacaatatcttataagcaaaggggaggcacttgtgaagggagttacgatagggatataccaaacagagagtctctattctttggctctcattgcatagggtggagctgttgtggttagagccgaaagagcaaccccataagacataatgactcgtcggacgagtattctctttggcgccatgcaaggaagaaatcaccttcangattgtttacaatggagaaaatggttaataattaataactaagtaacactagtctccttgtgaattgcatatctctcacttacgcatcaccagacatgtaaatacttaattgat

SEQ ID NO: 180374 - DNA, 453 bp, Glycine max
acccagctcgcccaggctagctaagttgcttccttctgaagcaaccgccttctggaggaatattctataaagcccaaatgggtctggttgctatttgcacccccatttttactaaatactcccctagctcttttttggtgattctttttccgtaacgttatgaaactttacgaatttcgtaacgatgattgtttctttccgtaatgtagcaaaaccttacggattacgtaatcatcccctttttaccttccggagcgttacagaactttacggattgcgcactaacacttccttttaatttctggcatgtcacagaactttacgaattgtgctacaatactttcttttgacgtttggcatgtcacagaacttcacgaactgtctagcgatgggtgccaagtacctcgaagttggcaaacgagggtcgcatcccatcaactgatggtcccggac

SEQ ID NO: 180375 - DNA, 405 bp, Glycine max
  unsure (1)..(405): unsure at all n locations
gggatccttaagtcacctgcggcatgccagctntaacctcatcgtctcttatgtctntagatttgggagccaatccaatccttgtgttcggactctcagccacttatgatagccgncgatgatcccattactgcttcccctaagctctctgtcctttcttcacgccgcatcccatgccttgcgaactccttggagtaccctcaggttgtggtcactgaaaccccgtgcgatgaaaggcgtgatgctttcgtctgatggcactcctctcatggggtagccaacctgtcttatggcgaggacgggattataattaatacaaccccttgttcccatcaagagaacatttggacatccttcgcatgaagatagaatcctgattctttcttccttctagcgagggaacca

SEQ ID NO: 180376 - DNA, 469 bp, Glycine max
  unsure (1)..(469): unsure at all n locations
cctctttntctattattttattcaagctctgccacatgtccctatttgattggagcaaaaagggcccactttctctttttgactgtgacccatactcagtcacaaaagtgagaaaaatctgacctttgaaacgctaaaatcctgcctcggtttgcgtgccgtttctctgattccagtttctcgcgtttctctgcgtccgccggggccagttttcgaaagcaagcaatatatatatcaaaacgctcagaataaaaccccgagcgtggttcagaggttggtttcgttagattntaagtcgcacgcaaaacgatgatttttaactaattaattaggaattaacccataacctcccagttatggatttctctcccttaattagtccaacccgcatatcttgcccncactattcctatttctaccaagaacatatctatacatatacaccgaacaatacttatatatatatata

SEQ ID NO: 180377 - DNA, 371 bp, Glycine max
acattatctgtcagtgagcgtctttaaaaagtaattgcgcaatgtcaactgaaaaatatcagtcgggctacttcacgaccgatgtcggctattgagttttctattcaatcctttaatgaaatatttatgatgtcggcaaggaaatgttcgatcggcgtcatgcggtgatgcttcttttttagacctcgatcggtcatctttcctagcggacgtcgactgacatttttttcaatcaatatcggtgaaaaatattcttttgccgagatgggctaatgttttcgtggccgaataaatggaaacatgccagtttcggccgaaagaaaacgtcggttgagctcgctcacaaaaacctacccgacctacattgtaca

SEQ ID NO: 180378 - DNA, 391 bp, Glycine max
  unsure (1)..(391): unsure at all n locations
ctcatgcactcctctaatgactatggcatcatttctggcgctaaactgctgggagttggaggccatcttctcaattaaatttctggcttcagtaggagtcatgtctccaagggctccaccactggcagcatctatcatacttctctccatattactgagtccttcataaaaatattggacaagacactgttctgaaatctgatggtgggggcaactggcacatagtttcttaaatctctcccagtactcatacaggctctctccactgagttgtctaatacctgagatatccttcctgatggctgtggtcctggaagcagggaaaatnttttctaagaatactctcttaaggtcatcccacctcgtgatggaccttggagcaaggtaatac

SEQ ID NO: 180379 - DNA, 435 bp, Glycine max
  unsure (1)..(435): unsure at all n locations
atatacaatcaaggcaccttcgttacctagattaattatatgtacttccaaggtgtatttgttacctacatcacacgccatttctttgctaaatttacatacatgcatactcaaagcactttggctatcaaaaattgcatatgtgcacattctggtatttctaatacctatacatacacaaacttcatgatgaatcttgactatctacacaataaggcgctacatttcatgctctnttcaagtggtttttactacctaaagccgcatgcaaattcaagtatattttcttttgccgattaaaattgtattcaaattaaaaggtatttttgtaaggtatgttctttacataacatgcaacatatatnatatttttnttgtgagacattttgactatcaaaaattacatatacatacctcctagtatcttgctccaca

SEQ ID NO: 180380 - DNA, 286 bp, Glycine max
tttcccctggcaccagtagagcttaggtatatacactatgctgtgcagttcatattcaaccttatacatccacctactagccatacaatgcttatcaggtggtaaaggaacaagggcttagagcgaattctcctgaagagcatagatttccaactcattacctgacgccatttatgaaaagcggacacccactgatgaaattgatgtactacaccgcttaaatcaggttaatgacagctctgtaggcgagcaagtatcaacaagagcaagatgctagacataatga

SEQ ID NO: 180381 - DNA, 324 bp, Glycine max
ctaaaagctagagttttctataaaaacttactattgtccactcctgaaacctacacgctcattgaaagtattatgatcaacatttaaagagcctggagctacattgaaaaacaggcatcataaacttgttaactacaatgatcattcgcaatgaaaaatgcaataacttgcgtctgagcagaaactatgactatcaacgacactcattgatcttcgtacaacatttaacagtgactgtacagcacaatcaaagacgatcattaagccgcatttagtaatcaccctcagaacacgactcaaatgggaagaaagaaataatcaacc

SEQ ID NO: 180382 - DNA, 480 bp, Glycine max
  unsure (1)..(480): unsure at all n locations
ttgaagatgtgcgaagaanaacaatgtatgaggagaaactaagcgcaaaggagagcataataatgttgtaggacaaaggcagagtatctatcagtaaaccaaatctgaagcaaagctggaattgaagcttattagattgcgaanagtgtgatccacgaatggaatgaaagtagcgaacctgtctctggaacataggggaatcatcgagcttgacgaacgccgatgccattgttgcgttggtcggtgcgggtgttggtgttggtgttggtgaaggtgcctcaactcaagctctgttatgttacagtttaagatcgcatgtcactgttatgttcttcagatggagatccacctttgtaatgtgactattttgtcccgccgtaacccacccacgtacaagttttactattttaccagactcccaaatagggtatgtattaattaatctttttntttctctgagtattaaattatctataacta

SEQ ID NO: 180383 - DNA, 318 bp, Glycine max
  unsure (1)..(318): unsure at all n locations
gataactaagcctagctccttgagaaggctcccttagaaactttcttgagaagctcccctgagaagattcctagagaagctagagcttatctgtacacacctatctcataactaagctcacctcctttagatgagaagcataagcttagctacatgttagtcgatgaataccactaactctcgcgtatcaaacctatggtaattggatccaactcctcccatttatgggtgttttgtagtggtgtaactactttttgatanagataggaaataaatacttagtacttccattttgtgagttaatcaccatctcctctc

SEQ ID NO: 180384 - DNA, 281 bp, Glycine max
tttcccaaaaggtctggtaccaaaaataatcataacctctcaaggatccacatattaatatgcgtgcatatgtgtgtatatgtgttgtttacaggatctctaaccaaccttacagctttacaattaccttatcagaccttttacaatctacacgaaagttattggacctccaattgaaaaaataaaaaatatatcttcataaaatgtttctaattaaaaaacctattttaaaatataaattaaaccacaaactattttgggctgccaccacaaaccatttt

SEQ ID NO: 180385 - DNA, 392 bp, Glycine max
  unsure (1)..(392): unsure at all n locations
atgtaagacctgagtaccttctggagttggntaccttacagctgattcgagcattcactggccattctctcaaattgaactgcgactcatctcttcttcttgagctataacgaagtggttcacctgctgaggccatgaatattagttagaaaataattcaacagagtggaatgttgttgtaaatgttggttcaagtcactctcactcctactcaaactagcacaagtttgaaagtgggtgttgcangttcagacatgacaaaaaaagagtgttctgaagttgaagctttttgtctagaataatataatgtatatttatactttcacgaggtaggtgtaattaacacggggtacaaatattcccttggtttatctcaattttgtgtaaagaat

SEQ ID NO: 180386 - DNA, 387 bp, Glycine max
taaacgtatacggttatatttcacgtgcatgcataaagcacacactaaaacaccacttcgacattattatgtgtatggaggaggttgcattggacacatccacatacctatatatgatatatcattgctaatatttgttaggaagactttatttcctctagaattgactttacccacaattgggattttggagtttaaggggctatgccaagccataacataaaattcaaagattcgctgctttatgaatgattgtagcttcagtggaagtcatcttccaagtattcaatttgttgggtcttgtactctattgtctgtgcacctcgttttgctttatagcattcccaactactcaaatgaaattggcattgattctggacgcaatat

SEQ ID NO: 180387 - DNA, 432 bp, Glycine max
catatatataatctatcttaacttaaagaatacttataaataaacttatatttaccttactttatgtttgatttgatttaatttttaaataaaaggtcattcaaattaaacataataatttgtaattcaatttagttcaattggaatgtaatgttaaatctaaatcaaattaaactgatattttatagtttagtttgacatctttaaaattaagttactcctatatcacttttaattactttttaatttcacaactaacaaactaatgactagttgccaagtcataatcaattattagaaatgacatttacataagtaatattaaagaccactcgtgctacaaagtgcactacatcctcttatataataaagtgcattattgaccatttctaaacataattaccacacttaaatatcttatgtcacacatta

SEQ ID NO: 180388 - DNA, 363 bp, Glycine max
  unsure (1)..(363): unsure at all n locations
tgttgggntttattgttntagtaaggggtggggaaccccgngttgttnttttttggagattntgtttgtgattatgtntagancttngaagaattggattttgtgggnngttatgatttntgatggaaaacatgttgctagggcaattgaaagccttgacttccctgctccggnggttcccattacncacactactttcttttctaatttgctcacgatcagtttttccactgcaggaacatcattatgggttgtgtactctgcacataacagtggatggcataatgacctaaaaacaccaaactggaagattgtatctaggggggcggggaatttatttttttctttgcaccaagtggagct

SEQ ID NO: 180389 - DNA, 409 bp, Glycine max
  unsure (1)..(409): unsure at all n locations
ctttcaaataatttaaaagtttaaaagataaatccattaaaatccaaactaagatatcttaatcctaanagtcttgtaaaaaatctaataagtcaaaatatttctacataatcttntaatatctaaaagactctctctatactaaaatagtcttttaaaatcctataccccttttatattccttcaaagttctttaaaattcataaaattttaataaaacattaaaataatattttaaaatcatattgaatacattatgataaaataaataaccatgatacacgaaccattacacagtaacatccacccatgagccacctacctatgtgacantttttaatcattcaattagtntttgtttaaaagaaattatgtgttattgttataaacattagaaataccatttctc

SEQ ID NO: 180390 - DNA, 434 bp, Glycine max
  unsure (1)..(434): unsure at all n locations
gctttacttatgtggcagggcggggctttcttctctantctttgtctcaacgcgagctttgaccactgttcttccttcccgcgatgcttcttttcatgtccgcctgagtgggctcatagcctaaaccatactctccacgatttacttgggtatatatcaggctagttatgccgccgttgtctttgcctaaacccatcccgggttcataaccgttccccaacataactcgggctattattactgctgcatcagacagacaaggttgcccacagagggagtccacggaagaaatgttgaccacctcataagactggacagcggtttctaacgattcttctgcggtttccacataaggcatagaggatgggcagcttaccaagatgtcttcctctcctgacacaatgaccaagtgcccctccactacgaatttcaac

SEQ ID NO: 180391 - DNA, 270 bp, Glycine max
  unsure (1)..(270): unsure at all n locations
ttgtctttatccaatgngcacgtatggttaattgactatgttgagatcctgacattccattcaaggtgacactgctaatctgtcatctttagaatattgatatattctactgtgagattctatatcaacacaacaagttgaatgttgaacctatttcccactacacctatattaatattatatttcgcgccacattntcaaatggtcatgtgatgtattgataaaacaatgtgtcattcactcccaagatcatgggnttagtgtctcctc

SEQ ID NO: 180392 - DNA, 371 bp, Glycine max
aataccactaaatccagatatgggcttccaactctcaaaactcactctatttccactcataacaccatattctcactttctaaccctaagttaactctacccttcatccctagcatgtttccataagcgagttcagcacaccaacatcaaaagcatcatcataaaaaccctaatactgaatgggtaagcttaactcactcaaacataacaagtttagcatgttgtcgtcaaatcttctcacaaataactatcacaaagcattaaccaagcgaaactgcccatcataatctcccaagccccatgcccacgaaatcaagtgagatagaagtctaccctaaccttgaaatttgatggcccacacgtagagatgc

SEQ ID NO: 180393 - DNA, 276 bp, Glycine max
  unsure (1)..(276): unsure at all n locations
cttgcttagcgagcatctgctaagcgcaacactcatgggctaagcgcgaggaagactttggaagaagatgagttgtacaggttcgctaagcgcaccgcttcaattcatcccctaagcgagaaaggcacgcgctaagcaaaaattcactaatgtgcgttaagcggtccataattgccctaancacaccatcacgaacaaggccacctatttaagccacaaatcagattttgtgaagagacgttgggttgggattcacagctatgcatgtctacagat

SEQ ID NO: 180394 - DNA, 469 bp, Glycine max
  unsure (1)..(469): unsure at all n locations
tcttatccaaagctcatcttggtggtgaatcttcctcctccatggcttattccctagtggatggcgcctcctctcacctcttctcctttgtcttccgctgcatctacatggtgaaaaatcaccattaaaggacatcattgaagctcatagatccatcctccatagaagccccacatgcaagcttccatcaagtggttatcagagcataagagcttctagcatgtgctccttaaacctccattaatcagagcataagagcttcaagtagcttccctctgtttctcttgcgttcttgtatataactctatgacgtctttagtgtatttctgctttaatgtatgcatgagataaatatttattcatttgatgcacacaaacacctacactgntttgcacacatggtgagtatttaagggccctgtaccccggtccgtgggaacataagaagcggaggtgaatctgtggtcat

SEQ ID NO: 180395 - DNA, 435 bp, Glycine max
  unsure (1)..(435): unsure at all n locations
gctttgacaaaggaagaagaagaataaatnctttattatntctaaagagattcaaaggttgtgaaggattgtaataattgttctcaaaatgcaagttaaggtcttgcttttatagactcttcatgtctggccaagaaaaccattagaagagttataacctttagaaaaacttgaaaaccattgaaagagttacatcttttgatttttattcaaaacttatcactggtaatcgattaccaaatcattgtaatcgattacacaaagcatttttgtgaaaggatgtgactcttcacaattgaatttgaattcaacattcagatgcactggtaatcgattaccaaaatcttgtaatcgattacaccatcttgaaattaattggaacgttgtaaattcagtttgaaagcttttgaaacacatttgctactggtatcgata

SEQ ID NO: 180396 - DNA, 376 bp, Glycine max
  unsure (1)..(376): unsure at all n locations
tctacaacttgcaaactaaaaaactcgtcatcagtcgagatgttgaagttgatgagtacgcttcttagaattgggatgaagaaaaaatggagaagaacattcttatacccgctcaactacctcaagaagaagctgaggaagaagacccaggtgaaccaccttcacctccaccacaacaacaagatcaagaactatcatcaccagagtatactccaagaggagtaagatctttggtggacatatatgaaacctgtaacttggccatacttaaacttggaagctntgaagaagcgtcaaagcaggaagtatgggtcaaggcaatggaagaagagatacagataatcgagaaaaacaacacatgggagttagtaaatcg

SEQ ID NO: 180397 - DNA, 376 bp, Glycine max
  unsure (1)..(376): unsure at all n locations
ctcagncaaagaatcattattatctctttaccattggcaaaggtgcttccttggttccttgaaatattttctgggtctgggaattgcaaaatccagcaagggcattgtcccgactccgccaaaatatgctctttctctgttagaagatactggctttcttggctgccaaccatcttctctccaatggatccaaatttaaagcttaccatgctcaatggtgaattactacttgatcccttaatgtacaggcgcttacttggtagcccaatgtatctaactatttcaaggcccgatattacattagatgttaacaagctaatccactacatgcagcatccaacgaaacctcatctatatgttatgcatcatcttcctc

SEQ ID NO: 180398 - DNA, 486 bp, Glycine max
gtgcatatatcttttttcgttcttaactctcttggatgttggtatgcgtgcaaactggttattattttactaattctaaaaaaaaattatatttagtaatttttaaacaatgttaaatatttttttgaagaaaaaaaatggtgaaataattactaaatttaaaaaaaatcatatataaatacgtctatgtcatatagttatataccaaattaacttttaaaattagttatttatatttttgtaaccttgtagtttattcataatttcgatgcttattttgtgaggcaatagtttggattcaaataattattttcagtcgttgcatgtttcctttattgtgttatgtttggtaactcttgcagcataggtttcattgtttaattgcgctttagtatataaaactactagaatttatataggcaaaaatatcgaaattatagttaagtatttgtcaatgacattcaattgtcaaaagaatcttaaaca

SEQ ID NO: 180399 - DNA, 484 bp, Glycine max
  unsure (1)..(484): unsure at all n locations
agctntntaatttaacgctttctgtcttatttttatctcaaaaattatgaaattatcactttggttttactttattttctcactagtgcgtgtgatgccttttntgttttttgttcttttggaatacgggctaattttntgattcatatgtcacaatatataaataaatttatattatccactttaaaaatatttaatatatgaatcatattttaagaaacttttttattaataataagatcttataattactaattcaaattcaactatttttcttcaaaaatacttgtaataactttaaagcttaaaatgttagaactcaattataaaatatctaagataattaagatttataaatataagtncaattatttaattactaatttatttcattgagtattcttcattctttaatattatacatattgaacataaataagagagaaacatccagtcattcacatatacaacttcctattttcta

SEQ ID NO: 180400 - DNA, 429 bp, Glycine max
  unsure (1)..(429): unsure at all n locations
ctatgaganacaactntaataatgccattatatgtatgtctggatggctgcaaaccaagattnttcatctgaacagagaagtgtccttcaagatgttaaaatacattgatataaatgaagtagtcagttgatataattaanaattcccatattttttcatagctacaagaaatttattcatgctaaaaaattgagaaaggaagatgtataaggacacagtaaaattgatattcatatgttattgagaatcaactagcagaagctttcgaaaattgaaaccttgggggtttaaagtctggaaaaataaaatttgacatactatgactatgtagagaacctttcaccaatgaagcacanactgacatagacaaggaatacaactaatgtctcaagtgtaaggaagggtttggtgcccaagtcataaacatg

SEQ ID NO: 180401 - DNA, 419 bp, Glycine max
  unsure (1)..(419): unsure at all n locations
actatattaaacaagtaagttaaactcacacttgaattaatttgagaaaaatgtcaggatcaaacttggtaaaattaacctaattcatctaagcaatcgaagaagaaaaatcccctcatcaaatttaatattcatgctataaacaactgaataactcttccaaaaaaagcaactgaataactctgagattcacttaaacgctcaataatcgaagtactctctcttcatagtgaaatttcatgacctacagtctcaagtatcttctaaaaagttctagcatgtgaaatattggacatataatcaaaatattatcatatatcaactgctgaataaaagccgcacacctcatgctcanaaacccattcttcataagatgtattatttggtttctgacgtacaaatacaagtaaatgtaatct

SEQ ID NO: 180402 - DNA, 474 bp, Glycine max
ttcgatctatgtgcatgcattgtgtgccatcacaactgcttttaagaagtggagacattaccttcttggccatcaattcatgatcttgactgatcacagaagtcttaaggagctcatgactcagattgttcaaactccagagcagcaaatgtattttgccaggcttatggggtatgactactccattcaatatcggtccgggagcactaatttggtagctgatgccttatcgcgcttgaaggagggatcagatggaaccatgttattactatctgtaccttgcctgacacttttagatgaattgaagaagcaattataacaagaaccagcctttatcgaattcatgaagaatatattggcccgacccacagcctctcctgaatattctattactcgtggattggattttgacgtgattagtatttggttactagaggatattctcttcttcaaactctgttatggagtatattc

SEQ ID NO: 180403 - DNA, 374 bp, Glycine max
  unsure (1)..(374): unsure at all n locations
tttcttcttccttttcttggaagaaatatttgtaaaaacttaatcaagtgcttatttttgaaactaacagtatacattatataatattaattaatatactatctctagcagcaatttatttatgaaatgatgtaaaatctctcacgggactagaaaatctactggaaccaaatagcttacaattggcttggataatattaatagattgggacttcgttatggcggatatttaagttattagttaaagaactaaataacaaaatatttattatcataatcataaaaacacgtacaaaatcatgaatcatataattgtatgaatcttaagacagagnaatatttttaattctttaaccaatatcttaaaaatactc

SEQ ID NO: 180404 - DNA, 312 bp, Glycine max
atcttctcaaaatttggtctgccacttcacaaaacacttttccatgatctgaccgttgagatctttgagaagttgtctggagtgtgcaataagcctcttaatgaagcttctggaggaagcctcttaatgaagcttacagagaaaactacctgatgctgcctcggtagaaacgctgtctagccttcttttaccgttggatcctctcgaaatgtggttagcatattgacgagacactttaccatgatttaacgcgtggtatctttgagaaaatatctggagtgtgctataacttgcgttcccgagagcatatct

SEQ ID NO: 180405 - DNA, 397 bp, Glycine max
  unsure (1)..(397): unsure at all n locations
atcactggctgacatattctcaattagctcagttgctctttccagggtcttcagctttatttttctccctgcagaagcatctagcagttgcttggttggtggtctcagcccatctatgaacgtattcaattggattggctctgacaacccatgggtgggagttcttctcaataaacctctgaacctctccaatgcttcactcagagattcatcagggaactggtgagaagaagagattgctgcttctcctttcgcagtcttggactctgggaagtatttctttacaaactnttcaacaacttcttgccaggtctttagactgttacccttaaatgagtgaagccacctcttggcctctatgccaatgagaataaaataggctgntcttatagctcat

SEQ ID NO: 180406 - DNA, 449 bp, Glycine max
  unsure (1)..(449): unsure at all n locations
atatggggacccatcacatgttgtctatgtgtgcggnctgtcgaaggngcacaacacgtgtttcacatccacaaagcgcgcataaacccaccatcccctgttgcccacctccaactgagctcacgtactcccacgtagcccatatactcgtttctctcaacaccgggtccccatcaatcctcccaagctttcacaacatccaagcaaaacaacattcaaacagcacaagctatcacagccaagcaaaacagagcaaaggcagaaaactctgctcaacacatcaaccaatatcacagctgttctcacttaaagaccacagtaacaattccttcgttccaattcggtaaccgttggatcgactccaaatatttactggaagtctctagtacataagcctacatgttgaccgttgggatctactagcaaacatccagaactcattctgcact

SEQ ID NO: 180407 - DNA, 447 bp, Glycine max
  unsure (1)..(447): unsure at all n locations
ttgagggacttttgcattgattgttgcatcttaatcctaattcatccatatgtacatcatgcatcatcatgtagaagtatgaatatcttttctaaacttataaacttcttacgtgcatgaaactctctattttaatcgattaccaagctattcgtaatcaattacacaagttgtttggagcttatacacaaatccctcattagtttaatcgattaccagttaactataatcttacacagttcaattngagaccatgtctagtttttcatgagtctctgctttaatcaataaccacgcgaccgtaatcaattacttcattcttgaaggggtgccacgagtgatcaacaccactttattcgattaaatcaagaatctaattgctacattgttcttgaaagctctccatgtctgggaagaacactctgatcgataaaatgataatctaat

SEQ ID NO: 180408 - DNA, 352 bp, Glycine max
gttcagccccttaggcacttctctctctatcgaatctgcttagaaacattgtttccgtgaagaaaatccaagccgaggcgctttcgtaacgtttccgtgagtgatttcgcgaaggttttcgaccgttcttcgacgaccttcattcgtttgtcatcgctcttcggtcttcaacgggtaagtacctcgaaccaagcttttcgattcattctatgtacccgtggtgagccacattgtgtttcgcgtattttccttctcgttttcatttactttccgtaccgcttttgacgtgcttacgccattgtttttaagcaatttcttgctaacctataaataatattacattccaccgatc

SEQ ID NO: 180409 - DNA, 298 bp, Glycine max
  unsure (1)..(298): unsure at all n locations
cttcttctggctacaattcatcagtgggctttccttctgtgtccagcatcttgggatgttcccagcctttgatgacagctntccaggttctgctatccagtgatttgaggaaggccaccatccttgctttccagtattcatagttggttccatccaggattggtggtctgttcactggtcctccttctttctccatgttcattagaatttatctccctagatctcactcagtgattcggagtgccggctctgataccaattgaaattctgatactggggacagatgtcgtacaggatg

SEQ ID NO: 180410 - DNA, 316 bp, Glycine max
  unsure (1)..(316): unsure at all n locations
ctatgtttcttcncgcgaacagaaccgaaattgtgtttcgggcgactggcctgttctcattttgtcggccaggaaaacattaacccacctctgcataaaaaacatgattcaccgatattgacaggaaaagaaaaatgctagccgacgtcggccaggaaagatgaccgaccgaggtctggaaaagaagcatgaccggatgactcccgtcgaacatttcctaacagatatcatcccaggattattcagggattgaatagaaataacactatccgacctctgtaggtaaatagccgtgactgatatttttcggcccaca

SEQ ID NO: 180411 - DNA, 429 bp, Glycine max
  unsure (1)..(429): unsure at all n locations
tgcaagcttcctctgccgtaaaagagatattatctgtctgtgtttgtaatanaatcgcgcaatgtcggctgaaaaatatccgtcggggctatttaactaccgatgtcggctattggtttttctattccacccctgaattatatttggatgatgcctattaggaaatgttcggtcggggtcatccggtcatgcttctttttgaggcctcgatctgtcgtctttcctagccggccgacgtcggctagcatttttttcgatcaatatctgtgtgaatcatgttttcttttgccaaggagggctactgttttcgtggccgacanaatgagaacatgccattgtcggccgaaacacaatcccgcacgaagaaccctagcccacctacattgtatattttgtaagcaataccgagcgacgaaaatcttgctacca

SEQ ID NO: 180412 - DNA, 354 bp, Glycine max
  unsure (1)..(354): unsure at all n locations
atttcatgttatatctaaacccgacttttatntttatatataagaaataaatatctaagaatacaatntggtgacttaaactgtcccagacgcaacataaattgagaagtttccaacgcaaataatgaattctatgcaactctgtttgacttctgtaatggcgttggggatttcctttggatcagaaaggcggatacaaagcagagataatagcaatagcaatgcccaaatagagaaagaaaagagctttcttacgttaagcaaagaatggaagcgtatcagcccgcaatatcattccattcttcgggacaatatgagatagctgttgcagcaatggcaactggagaagtgaac

SEQ ID NO: 180413 - DNA, 333 bp, Glycine max
atacgatgagcccttgagttgagataatctgacagagtatgaggaagctcgatgtacatgacctcataaggagtgaacttggtgccggaatgttgacacgctttatacgaccattctgctgaagccattgacttataccactcatctggagtgtgatgaaagaaagaacgcaaatcttgctcattcaagtgggtgatcactctggctcggccatccgctttaagatgataagccgcgctgctgcgcatcagccgtccacttagctcgatgagctcttcgcataaagagctgtcgataatggagactttgtcggaaataatgcttcagggaaac

SEQ ID NO: 180414 - DNA, 419 bp, Glycine max
  unsure (1)..(419): unsure at all n locations
agcttatcagctgataatctatataatatctggagctgcacatacaacataatgtggtgaaggaagggtgtgctaaagggtttctactcggggctgggattcagtcattctaaatccaaaaattaaatttgttagagaccactacgaagaaaaataaaatataattcgaaaaaagacaagtatttggctgggtaattgggttccaaaatgatggcatcctctcagtcacgctcgtgtttagcacttgcaccggatgtttggggaatttggcatggatctacctcggaatcaggattgctgtgtattctgattctgattctaccaatgctattaattnttgctacctgatgactgttgcaatattcatccttgctataatttggcgaagtccatagggaccacatcaattgaactaacat

SEQ ID NO: 180415 - DNA, 366 bp, Glycine max
ctgaagtatgtcagctattggtcacactaaatatgtatatttatctactatatctcatttaccaccctatgggaaaagattcttagtatgaagtttatttgcaataatagtatttattcctaatcatctctggtattttctcttatctgatgattggttgcaatttgcacaattattcatactgcttctgtatcaaattaatttggcaggaaatagcacaactcagatagttttcatgaaatttctccacacgattaaattgtaacttgttttcaccattctgattaataattatgctactgcagttgatgttggttatttcatttctttatggggaagtttctctatctaaattctaaattaatc

SEQ ID NO: 180416 - DNA, 406 bp, Glycine max
  unsure (1)..(406): unsure at all n locations
agctntatatggacgaaagtgcataactcctattttgtggtatgatganggagaagcagtacttcttggacctgaaatgctacaacagattaacgaacaagtgaggttgattcgagagaatatatatgcatctcaggataggcagaagagctattatgatagaaggaggaagccactatattttcaggaaggagaacatgtcgttttgaaggtttctcccttaaccggagtcggaagggctcttanagctaggaagttgacacccaagtatctaggtccatatcagattttgaagaagattgggcctgtagcttatcatatcgccttacctccgagttatcgaacttgcatcctgtgttccatgtctctcaactgagacggtacaacccagatccatcacatatac

SEQ ID NO: 180417 - DNA, 477 bp, Glycine max
  unsure (1)..(477): unsure at all n locations
ttttcatgacatcttgataatatgtatatacttacctcatttcagncatcaatatatgtccaatacacacaagtatgcattttaattagtagattgagttaatgtcattggcataactatccaatgtgaatgactntatgtctaattgattgtagataagtttgattcgttagtgctaggtatttcattgacataaatagtcctaaggagtagtatgtatgtatgtttttcttttcttaaaattaaaatataggtggatgctgacttacttctcatagtattaatcaaatacggngctgctcatcacgacccgttccattgcacagaggctaagaaagatacagaacatggcccttgcaaaagaacttattcggttttcctcatttgtttctgcttcctacanagtgtttctgcaccacaagcatggcaccttcttggtcaatactatctttgcttctttgataacacaagagttgt

SEQ ID NO: 180418 - DNA, 469 bp, Glycine max
  unsure (1)..(469): unsure at all n locations
agcttccgttcccgagaccatgtcttatttaagcactttagcctttggctttcgctagctctggagaaagggccattcttcttctntctttcttccaaagtcatttctaaagttccaagcactctttccatcacccacacccaccattagccaccacaaaccatcgttgttcttcattgaaacctcacaccgagaggaacccttcaaccgaagcggaatcttccaacttggcttgcggtttcggtagagaacgaaaccctaatcggacctttcattttctttcgaggtaaccatggttctacgctnggttcttgttatttcatcttgcctctgcatcttttatgactctggatcgccattgcatgtcttatgcttcctttgataaaccatagagaaagtgacttctgtaacattatcctctcatgaaatgcatgttagtttcgtaacctacactgaaccccggtcacat

SEQ ID NO: 180419 - DNA, 455 bp, Glycine max
gcattatgtgtatcttgtctctgttctggaacaacactatctccatcttccttcgatgcattcatgttgttgatgcttgagccttgaggcttatagagcttatgtccaagaaggtataccatgtttctataacattcgtcaacgatgtgattagcaaaaccacaatgtgtatagagtttacctcattttccactagaattgcctctaccaaaaccttgatttcttcttcctcctctagttgcataattttgagggaagccattcttcttgtcacatctatcaatggtatgatgtgttgcttgtttcctataattcaatgtatcgagtatcggagaaactagcaatgttgcatgattttctcgtgggtgaagataatacgggttatgaaatagttaatgatgatcttgttgtatttgttcaccgttcatgatgaagaataatgagaggaagatagc

SEQ ID NO: 180420 - DNA, 419 bp, Glycine max
gtgatgacgtacaagccctataggcagattttgttagagcccgggttgtctaagagaagttcaagtccatagccatcaaagtctgaaaagagtatgatgaactaagggacgtcaatatggccacagctgaagctttggaacgagaaaccaagaaggcccgaaaggataaacacgaccaaagcatagttttgaggggctttataaagcagcaatagtgagctcaagctccgaagaggtgaaaggaatcatcacgggtcaaaggcatgatcttgaaggacgagctaaaggtttgccttatgtcgaaaagaaatttgtcccaacagtttagcgagactaaagggaatatgtgggccatcatcgataagtgcaaagagaagctatatctatcggcgactcatgagcaaaggctagaggatgag

SEQ ID NO: 180421 - DNA, 289 bp, Glycine max
ggcgctagcgcgtgacactacagcttagcgcatgaacagacatgcgcttagcgcaaggcttgcgcttagcgaaatgactaattttttttagaaaatcattttctaagctatcttctactcctttttgcttgaaattgaaaccctcatgttaagcattcaaagataggctgatatactcctatgcacaaactatatagaaagttccaaatgatctacatgcttataataaaaacaaagataacagaagttaaaactacgttgcctcccaggaagcgctctcttaccgtca

SEQ ID NO: 180422 - DNA, 262 bp, Glycine max
cgatacctgagagtgagcccacattacacgagccataatagcccaccaaccccaaatagaatcccaacaatatttcaacatagagaagagtatatcttaactcccctccactcacaaaataacccgagccctaaatgcatgaatatatattccaccaatcccctctaacgagggaagcataaaacgaatccccgtcaagaacggtgtaggcacagcaatattcatataccaatccgataaggaggaaatgtttggggacttt

SEQ ID NO: 180423 - DNA, 375 bp, Glycine max
  unsure (1)..(375): unsure at all n locations
cttatcatgcggaagttccggggcattccatagagcacttgatgacccttatacctaaggtgcatactctgattgatgcaagctggctgatattctaagaggaaaatcactcgggagttctaatgtcgtcaagcactactttgtatgatgcttggatcaatctgaaagctgttgttagatgtctccaatgattcattaagattttcaggtttatgccattattggaaacaatagtcacaatgctaataatatgaataaattcgacgtccttgtctatcattctctcacaattacatctttgcttatttaactttanctggaatgtgaaagtaagtcgttggctttttgctcaatgatctgcgctctgattgatct

SEQ ID NO: 180424 - DNA, 324 bp, Glycine max
  unsure (1)..(324): unsure at all n locations
tctccanatagacgccatgtatctttgccatcagctttatgtattccattgcactccctagtgagtcaaataatcccacacaaccaaatcacatttatcatctgccttactatgtgacatgaatgtatgaccacatactgaatctcatgacaattgacaattgctgtctcatggactgaaggggaaccaattacctatgtatatgaacaaagcgttagccatacttcctggttccatagtgtcacagatactaaaacttggttctaccacgttatacctgctacaatgctaatccaatagtcatcatattgatgcaagttatct

SEQ ID NO: 180425 - DNA, 210 bp, Glycine max
cgcgcgcagctaagacaggagccgaatttctttacctaccaccccgagagaacaaccaaagcccatgcgatccctgccggacccacccacttccatgagaaagcccaaaaagaagttgggaacatcaccccctcaccagagcaaaaagccacggtttccacaacccgactgttgtggtcgatccaagcaatcaccccctctcaacaaacg

SEQ ID NO: 180426 - DNA, 444 bp, Glycine max
  unsure (1)..(444): unsure at all n locations
gatttagcgttaatgatgagatgggaattgaaagtaatattcatancaaacaaacaaacaaatctttaattatataagagtaaaaaatcaagaatattttttagttgcttaagagggacaaatacagcacactagaagcaacaagttacacatcacatacctttttctgacttgatcccggaggagtgcaaagcaatgtcagtgatgccggtgtctgaagagtggaggtggcatccatagttgatggttggagttagaatgttggaattaaaattggatagaacccaagtgcaagtagaagaagagtctcataagtcaaaactcattaataaataaagcatcatcatttgatgatcattgcattcgatggcctatatattgtgataactcatactcattaattactagatcatgttcattttggatctgatagtagagatagct

SEQ ID NO: 180427 - DNA, 442 bp, Glycine max
  unsure (1)..(442): unsure at all n locations
aacccagctggccttgaatcanaaaattgtatctgtcgcaagggtttgtggtttgtgctcctctgctgaccaccatacagacctttgcccttccatgcagcaacctggagcaattgagcagcctgaagcttatgctgcaaatatttacaatagacctcctcaacctcagcagcaaaatcaacctcagcagaacaattatgacctctccagcaacacatacaaccctggatggaggaatcaccctaacctcagatggtccagccctcatcaacaacaacagcagcctgctccttccttccaaaatgctgctggcccaagcagaccatacattcctccaccaatccaacaacagcaacaaccccagaaacatncaacagtggaggcccctccacaaccttccctngaagaacttgtgaggcaaatgactatgcagaacatgcag

SEQ ID NO: 180428 - DNA, 449 bp, Glycine max
ttgcttctacatatttcaattggaatttccttagggtattataactatgggaagcataaataagttctagtgttagggtaaaagaatccacttttactaagtatctctgaattgagagttgaattgatttaagtatgaatttcttgcaccatagttgatattattgaattgttattgactgaattccgtgcatatggtgtgctgaacaccttgattggtgtgtgcttgtatgatgactttgaaaaaaattatcgatgtgactaaggattatgaaatccttgaggaggggaacaaatggactcaatgcctgagtgtatttgagaaactagaattcaactctagtattgatatagattcattgtgatgaatagtgaataaagacttaacaagagtgtgaatataataaatgattggacttaatgatatctagatcctttgcacatggagta

SEQ ID NO: 180429 - DNA, 381 bp, Glycine max
  unsure (1)..(381): unsure at all n locations
atctctaagtcacctgcggcatgcaagctnctggaaggcccaagtgtttctgantgctatttacacccccctctttactaaatgcacgccctgtctatattntttgtaattctttttccgcaacgtcacgaaactttacgaatttcgtaacgatacttattttccttccgcaaggttacgaatacttacgaattatgtatttactccttgtttaccttgcgaagaagccacggaaacttacggattgcgcaaaaacacctcttttccacttccgccacattacagaatttcacggaacacgcaagcctgcttccttttgatttctgagacatctcgggacttcatttattgcatgtcatcaagtaataatccctggacgaa

SEQ ID NO: 180430 - DNA, 511 bp, Glycine max
  unsure (1)..(511): unsure at all n locations
gcttatcatactgagttgacgagttcaaggtggagttggataggcataatcataatcttcacaaacgcctcgctaacctccaggatggaagcacaaacgtggctctggttaaggaattctatgctaatttatacaccatagaggaccaagctccaaagcaagccagagtaaggggacacctgatcaaaatagatgcagataggctgaaatgaatttcttcatactccagtggtgttagaggagggggaatctttacccatctactgtagattttgtaggttgaggactaaccatcangagattgaagctaggctctgtattccctacaaagagtntgttttgaatgctgaaggccagccatggaaacttctcagaaaagatctgatgacactggcccaaacatggagtgtcttctcttactctaacctagctcccacatcccacacctcagatntgaatatggatagagctanggtggtctatggcttggtgactaacatggacatgaaca

SEQ ID NO: 180431 - DNA, 494 bp, Glycine max
agtgtgtgctggcgagaggatcatagtgggctttagaaagacaaatttgattatgctgcttcgatgaataggaatcctgcggcaaatggagagaataagaaggaaggagaaacccatgttgtgactaccattcctacatggtctaatttcccattagctctacaatatcaacactcagccaatatcagtccttctcattacccaccaccctaccagccaagaacatccaatcatccacaaaggccacccttaaatcagccacaaaacctacctgttgcgcatccgaggccaaacaccaccattaatacgaaccataataccaaccagggaaggaattttccaaaaaagaagcctgtagaattcaccccaattccaatggtagccataatcccaacacagattcctcaacctccattttcccgacgatacaactcgaatggaacatgtgcttatcatggaggagctttggggcattccattaagcattgtatgac

SEQ ID NO: 180432 - DNA, 306 bp, Glycine max
cgagaaccctagcatgagggtcttcatagtcatacacctattcatgtgctcccccgaacacaagctcaatatcactcacggatccatactcgaccacacacagggagtgagagatcacattcctagctaatagagacacaagacgctgaacagtacatattatgtaaatgagataccactatgctaaacataggtcacgggacttcaccactccggcactcaaaattcacttttcaactatcaatgccagtacgcttgaatcccacacttcgattaagagtaataacacatcaatgagcaagcata

SEQ ID NO: 180433 - DNA, 387 bp, Glycine max
gcaccctaactagctatattaggattactatgtttttcacccctatgtcattctgctagtggacagataaccatcatgtattcttatgcattcatcgcctatctcaagatagctattgtttggctaaccactaacatactatgtactaggtcgaaactatttttgctagcgaaatcaaaattgattgtgttcatctttctccctaaattgtcacttcacaaatagtaaataagtaaaattgctcttgttggatcgattctagatgatgtcaaacattcgacagagcttgctggatctcagaactatgccaaaaggcatgagtcatcattataccatacaacaacctttgtaattgctgcaagagagcttcaaagttgggctcaacct

SEQ ID NO: 180434 - DNA, 489 bp, Glycine max
gcttctctctcctctttgtatatatatatatatatgttatttgaatgaaagatacaagtgacagtttttcctcactaccttaaaagctaagtgagtgaaataagagtcaagaattttgactaagttagaagaggagggaaaaagatcaaaataagggaatctcaattcattaaacagcacatctttggatatgtatattcttccaaaaggagacagacatttgtaacctttatgagatgaagaataccctataagtaaacattcgtgagatctaaaatcaagtttatgtgcatgataaggtcttaacaagggtaaaaaagcccaaccaaatgttttaaggaattgaaaatcacgatccttgttaaagagagtgacacaaggtatggaaaaatttatggaagtagtacgaagtctgttgattatatagacagcagtggtaaaagcataatcccaacattgtacgggtaatgatgcatgatctaacaatgt

SEQ ID NO: 180435 - DNA, 362 bp, Glycine max
  unsure (1)..(362): unsure at all n locations
tctatctctgtacatgtactatncaataggcaatagctactcaatctagtagtctcggtgaatctatcattctaaatttacaataagcccttatgcatctatcaatggttttgagctccaatgtcacttccacctacccaaccttaaccactagtaagtgttccacccactcttccaacccctacccaaacccaaacacttagccttgaccctccatcacaaatagccattccctaaacacttcacgcaccacttacccactctgatattccaccaccaccaaaccacccatcgccatcttaaccaccaataccacccactcaggatcaacaatgatgccgttcatcaattctttcaccttc

SEQ ID NO: 180436 - DNA, 488 bp, Glycine max
  unsure (1)..(488): unsure at all n locations
agtttcactccatatatagatcggtgcaacttgcagacttcattacattcaaccaatgatgggaatcctttacgttgtgtcatgtacacatccatntgccatatccattaaggaaagatgttttcacatccatttgccatatctcataatcatagtatgctgctatggcaagtagaatccaaattgatttgagcattgccacaggagaaaatgtttcgtcataatctattccttcctgttgacgatatcctttagcaacaaggcgagctttataggtctcgacctttccatctgctccaatatttttctttaccatggtttccttctacaagaaaatctctttccaaaaaggttgctcctcttgccacaaacactctatggttagaaggttggtagaaataatatcccattttttctttacgataaccactgaatctacacttatcagaccttgcctcaaagttatctggttgcaatcttttacataa

SEQ ID NO: 180437 - DNA, 356 bp, Glycine max
  unsure (1)..(356): unsure at all n locations
agcttcacagagggctcaattggttggcctgagattgtttgttactcangctcgntctttgagccgcgaggcctacaacgtggattcttggtaggtggggccatgagaggctgattggcaatggcgagtgttggtggtggaaagggttgggaggacgaatccattaggtgatcctcaagtgacaaagggtacaaaactaataaaatgcaaaaggcatgattgcgatttgtaaaactatgcttgcggcggatttatagtgtgacaccggggtgacatctctaatgacgttggggtgtgagaaatctacgggcgttgtgaggaaggtttcatgtatggaggggaattatgtgtgtgtt

SEQ ID NO: 180438 - DNA, 381 bp, Glycine max
  unsure (1)..(381): unsure at all n locations
tgcacttcggncagaaattttgctgaccattgaccgattatcctcacgtcaaaagttattgattggggacctaagccgtntacggttctggactcttggcttctgtacagatccttcatcaaagttgtacaagattgctggtcatctacccaacaaagtgggtggggggactatgtgctcatagaataattaaaacgcctcaagaatagatcgaagatatggaataaggagcaatatggggacacatactataaggtaagcatatacaagatgagcttagcaaccttgtagagatgacaatggataggcaattatcactccatgatgcaattttcangaaggcaacttaagataaactgtggtggactgcccactcacatg

SEQ ID NO: 180439 - DNA, 462 bp, Glycine max
  unsure (1)..(462): unsure at all n locations
cgaggtacttacccgtttgaagatctaagaacgttgatgaacgaatgaagaacgtcgaagaacggttcatacctttgcgagattcctcacggaaaacgttacggaaacgtttcggaagcgcctcggcttagattttcttcacggaaataatttgtccaagcaaattcgaaagagagagaagtgcctaaggggctggccctttttcttcttgcattcctcccctatttatagcaaaataggggaggtggttgccgcccagctcgcccaggcgagctcagctcgcccaggcgagcagggttgcttcctccagaagcaaccgccttctggaggaatattccagagggcccaagtgggcctgtgtgctatttgcacccccatttttactaagtacacccccctctgctggtntntggtgattctttgttcgtaaagttactgaaacttacgaagttcgtaacgata

SEQ ID NO: 180440 - DNA, 450 bp, Glycine max
  unsure (1)..(450): unsure at all n locations
gatctctaagtcacctgaggcatgcangctctcattgatgtgacataaggaaattcctttacttgcggtccttgctgctagaccatgcttctacccatcctttctagggcacttctcctcacatcggcatataggcttatatcctagcttgaaccttccatggctcttcttgaactctaccaagcttgccacgccatcgccattccaatccaaacccattccgggctcatacccatgccctaacatcacaggggctaccatcaatgcggngtcgaatgagcatgattgtaccgggggagactcaacataagcgctgcttaccacttccaaagtttgaaatgatgtntccaaggaatcctccacggcttccacatatggcgtagaggaaggacaactcatcaaaatgtcttcctcccccgagactatgattaactgccatttcaccataaa

SEQ ID NO: 180441 - DNA, 483 bp, Glycine max
  unsure (1)..(483): unsure at all n locations
gacccaactccatgaatgatagagtacccnctgcggcttattttgtaaatggaattcatagctgttcaaaatgatatcatttctagttttccagatcatccatatataccaccgcacaccacaggaacttccatctaatttgcttaatctgattggctcccacaagattatgttgacaaaagtggtcactgattgatcgagggagcaccacagaaaattaatattcgggagcaccttcagtttccatacagccttcatgatggcaatctttgggttatcactaaaaaattcagtgattccaatatatgaagattntacagaataacgaccatttggttcaccgcgccagatccaggagtcccctttggattgtctcanattgtaattgttcacctcattatagtaattgatttaatggtcctattcctataagaaatgtagtctacgccactctaagttccaagaccacactcccatctcaca

SEQ ID NO: 180442 - DNA, 488 bp, Glycine max
  unsure (1)..(488): unsure at all n locations
agctngcttgctncatttacaaccatacattgtctttgaacaccatgaggaaattcacacacaaaactaaattggtgagacacggagttacaagatttgctaacactttcttagctttgcaaagattgcataagcaaaaggccaatcttataaagatgtttgcttcggatgaatggttgaagtctaaggcagcaaagagcccaaggggaagaaagcaacatatgttgttcttatgtcatcattttggaatgatgttgtctacactttaaaggctatggggcctcttgtaagtgtgttgaggttggtggataatgaaaaaaaacctgcaatgggcttcatttatgaagcaatggatagggccaacgaggcaattcanagagctttcaataacaatgaagggaagtataaggatatccttgcaatcattgataaaagatgggattgccaacttcaccaccctttgcatgcaacgggttattatctaaatc

SEQ ID NO: 180443 - DNA, 306 bp, Glycine max
  unsure (1)..(306): unsure at all n locations
acacaatgaaanacagagtggaggcaaaatcttcgcacatgattcattcacattccacagagattctcctaccctcatacctcagcaaaatcctcttcgttccaactcgttaaccattggattgccatgaaattttattggaggttcctaatacaaaaagctaaactttgaccgctgggatctgctagggaatgcctataacaccagatgtactacctttcccatgactagcactgcacaaccatatttctgcataattgacaaaatctgctgcacaaatgacggctcttatgataatttggagat

SEQ ID NO: 180444 - DNA, 382 bp, Glycine max
ttttggaagctacctactctataaatagaagcatgtgtaacacttgttgtaactctgatgaatgagagtcttgtgagacacaactcacagttcaacttctctccgtttttcttccttcaatttcgtgctcccccctctctctttctctccctctttcttttcctccattgaagcatcctctccaagcttcttatccaaggctcatcttggtggtgaagctccttcttccatggcttattccctagaggatggcgcctcctctcacctcttctcctttgtcttccgctgcatctccatggtggaaaatcaccattaaaggacctcattgaagcttatagatccacccttcatagaagctccacatgcaagcttccatcaagtg

SEQ ID NO: 180445 - DNA, 302 bp, Glycine max
gcggggcccatccacgggaattgagaccaatttgggtgcactagttaatgtatgaacaaagtgcgtgtaagacaattcgtaaccaaatggatacaccactgggccattgtaaaatcggtaggttctttcagggtaccctttgcttcagctagctctcattgccatatttgtcattggcaacgttttaatgtacccttgtgggtaccatgtcatacgcaacttgcctcctggaattaaaacataacatgatgttgtgatgtaagtatgtatttaaaaatataactcggtttggacctacaatg

SEQ ID NO: 180446 - DNA, 459 bp, Glycine max
  unsure (1)..(459): unsure at all n locations
agcttngtttgcaatggctaacaagcatctgttctctttaatatacttagtgtnatgtagttgacctataaagtgcatgtttggttgcggcggatgaagcttgaaaaattatgcttgtaaaagtcaccccttcattacctctttatctcatcgngcttttaagaggtctggatccgcactgacgcccacatattctcaaacacattctctttcttgattagtatatcaaccttgtccattatttgatgaacctctatctctttataggaaaatagaagtagtacataaatacattaattgatatttctttcataatcttatttaactatggaaaattgaaggagaacaaagagacacttttctgatgataccaccaatgtgccaacaacgttctgaattaggaatacatctttcagttattattggcatacaggatgttggagcatacataaatctaat

SEQ ID NO: 180447 - DNA, 323 bp, Glycine max
  unsure (1)..(323): unsure at all n locations
gactcgattaaagtttgcgttgaatggtgaactcacattcattcagtgttcgattatttgggactaatcgacttcagtaaaagtatgtgttgaatttgtcaagcttcgattaatttgacgtgcattattaccgactcatcaacatcgagtaaaagtttgtcgttgattgtcagacttaccatcaattcaggcttgatatacgactcatcaacatagagaaaaatattgcgttgaattcacgaccatacttaatttcagcttcattatacgcgatcataactcaataaaagtttgcgttgatngcacacctaaattcattcacg

SEQ ID NO: 180448 - DNA, 460 bp, Glycine max
  unsure (1)..(460): unsure at all n locations
agcttcaccttgttgtcctcctcatttgttgcattacaatacatgctctattntcatctcccactccaagtacgcctccggatcattctttcctttaaatggaggaatgttgagtctaataccatcaattctgctctgcctaggaacaccatcattccctcttctcctcctttcttcttcattatgacctctatcctccatttgatccaacctctcatggagcgcatcatctcgttgtttcattaacctctccaaatgttgcatcatagcttgcatttggaattgccaaagccccactccatcattaggattatcatctgacatctcaaacaaacacatctaacgtaacaagacaattatcgttgctgtttgaatacctcacccactcaagtgtatgacacaattgtggctttctttaatgaaacactcttgcctttacactctaattcccctgagtctt

SEQ ID NO: 180449 - DNA, 397 bp, Glycine max
gggtcgacaaataagcataaaccacagagtcttgcgacaggtacagacttctaattcaaggccagctgggttaccaggttaaccatggcatctagtttaccctcaagcttcttagattcagctgatgaagatggattcgtgactacttcatgcactcttctaatgacaatagcatcatttctgacactaaactattgtgagttggaagccatcttctcaattaaatttctggcttcagcaggggttatgtctccaaaggctccaccactagcaacatctatcatacttctctccatgttactgagtccttataaaaatattggagaaaagcctgtcaatatctggtgggatggcatcgcacatagtttttgaatcttccatattatatagctcttca

SEQ ID NO: 180450 - DNA, 383 bp, Glycine max
  unsure (1)..(383): unsure at all n locations
gcaaccattttttaattcgtatttttaggaatcatgtttgatncgtctttttttaatttgtaaccctcctttaacttatcgacttttttgtgtgaaacttgattgttataaaactattcgttgcataagtagtcattaaaaaaataggcattgtataattngctatttaattgttcaattctcattcattcttgtacgtcttcttcaaacaatcttattcttctttcacttgtntatgcaatcaatcattcatagaatggatccaataatgacttcgacagagttgggaaacaatttttttatgaaacacttgacgatgatagctatgaacaaatcatgacctacttatgtgcgatgcaccaccaggaggaaaccacacgtca

SEQ ID NO: 180451 - DNA, 491 bp, Glycine max
  unsure (1)..(491): unsure at all n locations
cccccgccccacaactttgcaacaaagacacttcctctccctaagtttctggganaaccccgaatccactttccatttatatccctcagaagccaaacacaacaatacctccttgccctttgaaagctccatccttgttgagacaataccgaccctcctcaggaggaattcactttatgtccatttgatggttagctntagctactattccctgcgtgttctagctcaaagaaataaactattttcacctatcaacaataaaggcccaaggtctgaatggtctaataaattcctcttcatggatgtgcttatttctccaactccaaagatagaacacttttctatcaggaaccttatttcacattaatgagtattaatccttttgtaacaactactcccatcaaatagtagttattttaaaaactactccaatttaattaaatntacaattagtctntaattattaaatatntatntattagtccctatat

SEQ ID NO: 180452 - DNA, 482 bp, Glycine max
  unsure (1)..(482): unsure at all n locations
tgcaagcttctttacatgataataataccattccagagttgctatgtgcccactaatttaattacattgaattagagcttgaattacacaaaaatattacttcaatcagtacaacatccattaaccaaggcccaattntgtaggtgtataacaatgtcaattatgtacagaagtcaagtaattaaattccctgtacgtaagggcattcatgagtgacatgaggctcatttgtgttgttattgtctttgaaaattattatatctcttgttcatttgttttccattatttatgactgctccatttttggctgcctagctggctagcttttagatcaagggaaacaatgggttgattctaaagggtagaggcctagttgactaaagacaagagaaattagaacatagcatttctttttttggcgctgaanatagaggcttgaagagttgatgttttgccctataaagtatgtcaatatcaagaat

SEQ ID NO: 180453 - DNA, 375 bp, Glycine max
gcgtctcgagatattctatccccggatctcacagacgagagacatgttatgaccattctaatgtctcgagagctaccgttgtacactgagtagcctgtagatatgtaatgtgcccgaatatatcattcgagtgatatggtaccaccattctgaattcatgagagcttgcgatgaacaagaataagcgtggcaataaattctgtccgcacttcgaacaggcgagagatacgtaactaccatgctaatggctcaagaccttccgatgagcaaaaaagaacgccttgacgtgcgacttccccgattccgacatccacctgagaagctctgaccgtgctatattctgaacagcttgctatgtataatgctggacgtcta

SEQ ID NO: 180454 - DNA, 324 bp, Glycine max
taaaaacagaaacattacgcagaagatcaacaggagttagtggattaaaaccatcaacaactcctaaaggagaacaattagtggtgccatgaacagctctattggaagcaaattcaacatggggtaaacaagctctccaaggttttaagatacttctcaaaactgtcctaagcaaagatcccaaagtcctattaacaacttccgttggcccatacggttgtgggtgacaagtgcgtgacaataacaatttagtgcgcaacttgctccacaaagtcctccaagaatgccaatcatcaagcctaggtatacgatgcctcatattaa

SEQ ID NO: 180455 - DNA, 434 bp, Glycine max
  unsure (1)..(434): unsure at all n locations
taatgtagcttanactcanacttgcattccatgganctattcacatttccatcactcacccacgaatttagctcctcactcaagctctaccttcaaagctcacaccccatccagcatgaatacattttatcaaacatgacaactacaccaaacacattcactggcaattcagagtcaaaagtgatattcaactcatagttaccaagtacgcggaattagtactatttcgcgatggtccgtcacttattacaagacttccttcaaataaaacatggcatatggtactacggtgaattcgatacacagggttattgagagaattctgtaaccatgattcaactcaatcaccacatccataatctaaactttgggtgagatcaatccaacatccaacccatttgacanaatccataatctaaacagggggtgatatc

SEQ ID NO: 180456 - DNA, 432 bp, Glycine max
  unsure (1)..(432): unsure at all n locations
agcttcgttcacgtgtgccataggcaatcaatggctccatatctatttcctttcacatggntctntccttacaacaaagattcctttcagaacaaacatgtttgcttcacaaggtatttgttcacggctattagtgtatgcaatttaaacaatatgcttacaaataacatttgtggcacttgcagtatcaaggaattgggtaaccccataattctactcttttccttgttattgatcctttctcctcgacatccacattaaatgaactcaatgcagcctttgagtggaaatatactatataaaggtgtcataaggcgtggattaaatgaatctaaaattgaattattataaaggttatatatatatatatatatataatcggcaaaattcctgactgtttaagatttaattttcacattttctattcttgat

SEQ ID NO: 180457 - DNA, 475 bp, Glycine max
  unsure (1)..(475): unsure at all n locations
cttctcccccaatttctatanatagggggagatgtgaagtatanaagggttctgccccttaagcatttctctctctttcgaatatgcttaagaaaattgtttccgtgaagaaaatccaagccgaggcgcttccgtaacgtttccgtgagtgatttcgtgaaggttntcgaccgctcttcattcgttcttcatcgttctttagtcttcaacgggtaagtacctcaaacctagcttttcaattcattctatgtacccgtggtggtccacaattggtttcatgtatttttattctcgtttcatttactttttatacccccttctgacgtgcttaagccattttatttaagtcatttctcgcttaacctanaaataaaataaatttccaccgatcgcttgaatggtattatnccgtaactttggttgaaatgaattccgaccgatcggtcgtgccgcacacactttgaaaccaaaaaag

SEQ ID NO: 180458 - DNA, 366 bp, Glycine max
  unsure (1)..(366): unsure at all n locations
ctaaaagcaattgatatatgcttgataagcaaaaaaaaaaaaaaaactggggcaaatgaatagggtgagaatgagggagaaacccatgttgtgactgccattcctatacgaccaagtttcccaccaccccaacaatgtcattactcagccaataacaacccttcttcttacccaccacctagttatccacaaaggccatccctatatcaaccacaaaacccacctaccacacaaccaatgctaaacaccacctttagcacgaaccanaacaccaaccaaggaaggaagttagcagcaaaaagcctatataattcaccccaattctggtggcctatgctaacttgctcccttacctacttgataatg

SEQ ID NO: 180459 - DNA, 327 bp, Glycine max
  unsure (1)..(327): unsure at all n locations
acttgcctagcgaatcgtccttatagggctattatgncaccttattaaatggaacaagtgcttccgacattgtatgagccgattgttgggagactatactgttcccagtatgacccattactcattataggtcctaatatgaggatgctgatattggtaaacgtgtgagttggaaggaccttcagccaccttgttctatgatgcatgtttgtttagaagatggtggaacactctctcataacccactcaacgaagtcctctgacggtgtgaatagagtggtaggtcgatatcgaaggttatgacaacaccttataactcatttattg

SEQ ID NO: 180460 - DNA, 457 bp, Glycine max
tctcaatcatgcaacttaagatcaaaggtttctcttattgtactcatgcatgtggcagagtcacttacctttaatatattgaagacatgcttttgcaagaccttatattaagggatacatagtattaaataaaaaaatctgctgaacaatctcataattaagcatgcatgttttatcaagagaatcattctcctgtcctgctttaaatcttcttcagtcttcacttaaaattaaaattcctcttataactgtttaacttaatcaagtcataagaaacatgaagttgtgagttcttcaaggaaatcaaagttgtcctaaaaacaaaatcaaaggtagagttcagaattttctttacctatgacatgcatggtgtagatagagggtctcgctcgttgccatagaaaattaaaaatgcacctgccaaatggatcacagaccaatagcatctcaatatatg

SEQ ID NO: 180461 - DNA, 372 bp, Glycine max
  unsure (1)..(372): unsure at all n locations
actacttattcatttcagtctagacaaaaaaattaactattctttcctgttcaaagcataatatcgtattttctttcttacgttatactgagttcctaaattatgtctatatgtaacgcccttgaagaagtactttctcaaaattcttcacagcagtatgactcatactttgctaatacacgtgaatctgtttcccaggtaataatgtaatatacttaaaagaaccatgtcatcctcttcaattttaggaaagtccaaatgttgtgtgcatcacactgatttctacatgcaacttgtaatagtgtgtacgtgctcgacaatatattgacacgtaatcttgagtcctaccccaacctngtgtactttaagtga

SEQ ID NO: 180462 - DNA, 503 bp, Glycine max
  unsure (1)..(503): unsure at all n locations
tagtggattatggggtacccgtcatatgtgtgtactaagtggcgatctgtcaatggcgcacatcaactatcccacttccacaaatcatacatgaacacaccatccccagttgcccaccttcaactgagctcacgcactcctacgtagcccttatcgtcgttcctctcagcaccgagtccccatcaacccctccaagcttccataatatccaagcaattcaattccaaatatcatgaaactacactaaaccaagaaaacagagtagaggccgaaaactcagcccaaaacacattcaaataccacagctttccttactcatataccccagtaacattctcttcgttccgattcgttaaccgttggatcgccttgtactggaggtccctagtacataaatctacattntgaccgttgggatctgctacaaaatgcctggaacacgaaatgtactactcnttccatgactagtaatggcacaagcattttctgcacacttggtcaag

SEQ ID NO: 180463 - DNA, 518 bp, Glycine max
  unsure (1)..(518): unsure at all n locations
gaccggatcttaagtcactgcggctgcagcttggactcntggaatggtctttaataactattcacttataagtcgngactcttgaanaaatcttcagaaacaagtctcttgaagaattgtgattnttggaaatgtattttttgaaatcagtcactagtaatcgattaccattaagttgtaaccaattacgcatcaatagatgtgactcttcattataaattttgaaaatcaaaatgtttagaagctctggtaatcgattacaagtgttgtgtaatcgattacacaagtttaaaatgatttaaaattntaaaacacaagttgtaactcttgaaatttgaaatcttaacgttctanaacactggtaatcgattactaccttctgataatcgattaccagagagtaaaactctctggtaatgattttgtgaaaacttcttgtgctactcaatattntgaaaacttctttagaacttatctntattgagtcttctcttggttcttgaatcttgagtcttgaa

SEQ ID NO: 180464 - DNA, 337 bp, Glycine max
  unsure (1)..(337): unsure at all n locations
cactggcgatacgtgatgacatggatggagccgtcattgccactggcgatacacgctagagttccgcttcttcctttggcgagataagcgacccacgccacgtacgcacgtgaagaacgtctcgccttctctattggtgagatacgtgaagaaagcctcaccttctctattggcgagatacgtggtcacgtgaagaagctcacgtcacagctctgcagtggttanggcagcaacatgcacagtatggattgaatacgcagagcatccttctgtaccgtgctggtatacgttttcttctataaaaaaacctccatcatccttctatgacacttctctt

SEQ ID NO: 180465 - DNA, 413 bp, Glycine max
  unsure (1)..(413): unsure at all n locations
tagacacaaactaattaattagaagcaatatcaatatctatgtnttatcacaggacaggaatgtaaggaagcaattaaatctcagttcagatacacggctatatctaacttccacggctatatctaacttccaaggcaaacaaaccttaaaataaacaaaaaaaaattacaaaactaagaatgaagctntgtgcaggcatatcatcaaacacatggtgtgcaagcaacagaaatttcgatttttcctacacaaagcacaccaatctaaatttctcaattcagaaacatatcttaggcaaatattgagcacttaaaagaatcgaaacattaaatgatcataaatattagccacacgcaagaaatatgaacaagtcctactatgaaccanaagaagagaacganagaagtgggtt

SEQ ID NO: 180466 - DNA, 525 bp, Glycine max
  unsure (1)..(525): unsure at all n locations
atctcagagtcacctgcggcatgcaagctcgcttggggggcttcaatggaggttggatcttttagcttcaatgggggcctttaatggtgatcttccaccatggagatgcagcggaagacaaaggaaaataggtgagaggaggcgtcatccattaaggaataagccatggaagaaggagtttcaccactaagatgagccttggataagaagcttggagaggatgcttcaatggaggaaaagaaagagggagagaaagagaggggggagcacgaaattgaaggaagaaaaagggagagaagttgaactttgagttgtgtctcacaagactctcattcatcatagttacaactagtgttacacatgcttctatttatagactaggtagcttccttgagaagctntcttgagacaacttccttgagaagctcttttgagaaaacttccttgagaagctagagcttatctacacacaccgctctcataactaagctcacctgcttgagaagcttccttaagaagattcct

SEQ ID NO: 180467 - DNA, 402 bp, Glycine max
  unsure (1)..(402): unsure at all n locations
ntgcataccccaaggaaccatcaggaaattatatgagggtgggttcatgggccactctgggatagacaagaccctngtcttactcaaagaaaagttctattggccctgtcgcaacctacccttttgcgggcaagcgatatgaggctcacgggtgcgtcatccatatgaggaaaatgcgcggagtcaccaccaacgtttattgaaaggaaaacgttagaaaaaccaaaggacaacatccttagattagaattgtgtgaaattatgtatctaaacttttatttctttttattttttgaggttgacaaaagcggggctcttgctcctacgtaccctccatcgaagaggaaatcagacctacgtagttctttcataaaggggcgaatcaagtgaattctttttact

SEQ ID NO: 180468 - DNA, 376 bp, Glycine max
  unsure (1)..(376): unsure at all n locations
cagctgctagagaagcttctatgcagactggatcttngagtntcaataaggggcttcaatggtgactttcatccatggagttgcaacggaagataaaggagaacatgtgagaagaagcgtcatccactaaagaataagccatggaaggaaaagcttcaccaccaaaaggatgctttggataagaagcttatataggaagcttcactgtgggaagagaatgatagagagagagagagagagaaagaggaggggggcgtgggatttgaatgagaatanggagagaagttgaactcttcccattcatcanagttatgacaagcgttacacatgtttttatttatagcctaggtcactatcacatgggaagcttccttga

SEQ ID NO: 180469 - DNA, 312 bp, Glycine max
  unsure (1)..(312): unsure at all n locations
agtctcgcaatatatcgagaagctcgaaatggaataccaaagctctgagcaaattcaaacgacaataactgtntactcggatgtcttattgagttccataatttatctgaacgctcgaaatagaataccgaagctttgagcaaattctaacgacaataaccttttttctcggaagtcggattgagtcccgttatatatccagacgctcgaaatcgaatgctgaagctctgagcaaattcaaacgacaataatcctttagctcagatgtctaatagagtcccgttatatattgacacgctcgaaatggaatac

SEQ ID NO: 180470 - DNA, 469 bp, Glycine max
  unsure (1)..(469): unsure at all n locations
actcacgcttgtatgccctctccactcggcggagatttcttcttcttttaaagcgagatagttgttggcagtgatattattgaccagccctccgaaaccttctaccgagatgtcttgggccacatgggcctcgttcaaaaccttcactagcagtgcccgatgaggctcggagctcatgagtaactccaacagcgagaccctggccggggttttgttgagctgttcgataaccttgaattcgctctgctgaattatacggaggaactcattggcttcctctagtgacacctcctttttaccatcctttttctccggaagacctttcaccggaatatctttattcgaagtgaggggtgcttcgtcatcttgttcctccaccactnttgctntcacctcgacgttcgcgggttggactggtaggttcgcgggtgcanacacacgaccgctactggtcacaccactcagtccc

SEQ ID NO: 180471 - DNA, 408 bp, Glycine max
  unsure (1)..(408): unsure at all n locations
agctnttcgattcattctatgtacccgtagtggttcacattgcgtttcgggcacttttattctcattttgtttactttttatacccnctcttgacgtgcttaagccattntacttaagtcatttctcgcttaacttaaaaataaaataaatttccaccgaacgtttgaattgtattatccgttaacttcggttaaaataaattccgaccgttcggtcgtgccgtaaccacgttggaaatcaaaaagaggtaaaaaataatataataatcaaaaaaacatcttttagcataataaagcggaaaatcaatcggacgttttctctgtgggatttctcattcttaatcgaattgattaaaaactaaagtgaaactaaggctaatatcaactcgcctagtcaagctcgtctat

SEQ ID NO: 180472 - DNA, 309 bp, Glycine max
tgaagatctgcgaagactagattttaaatatgaacccatcctatgatcttgagatgagtttgcgagtgatatctgacgtcttataggtggaggagacatacccactacttgaattatcgcaccccttacttttcacttctctctcgttgagaggaagagttatggaaagctaaatcctctgttggagcttccttgtaggtacttgatgtaaatatctttctatctatctaatgatgtactgagtattctctgggctattaagatctcattctagtatgcacttaccttgatcacgcagatgcatgctct

SEQ ID NO: 180473 - DNA, 455 bp, Glycine max
  unsure (1)..(455): unsure at all n locations
ggatgctatctttatattatcttctttctttttcataagaatggttctaacaagaataaaatgtatgtctcctgtntactaacactaggtgttaagcttaagaacatgacaccaaaagtaaattcattaacttcaaaagattgaaagaagtgactgcagaatccaacatttaaaaataaataaataactgattgtgagataacacattttgatcttttcaaaggtagatgctaccagcacgctataaagaggcatattgaagcccgtcatctagatttcatttcctaaattataaaantttcaattatttaaaaaaaaaggaaagacagaccaaagactgcntaagaaagaatcataaagacataaagaagtacattntcaaaaggactggcaccttgtagacatcctccaaccctttgtcatttccttcaatgataaatggtcgaacaggaatt

SEQ ID NO: 180474 - DNA, 483 bp, Glycine max
  unsure (1)..(483): unsure at all n locations
tcatgatgaatcaagattgattcanagatgtgttgatgataacaaagtttatgacaaaggtgatgacaaaaagcttaaaggtcaatcaaagaatgagttcaagatgttcaagatagaatcaagaacacttcaagattcaagaggaaagttgatttcaagaatcaagatcaagatccaagactcaagattcaagaatcaagagaaggcttaatcaagataagtatgaaaaggttntttcaaaaattgagtagcacatggatttttctcaaaacatgtttaccaaagagtttttactctctggtaatcgattaccagattattgtaatcgattaccagtagcaaaatggatttgaaaatgttttcaaatgaatntacaacgttccaattgatttaaaaagctgaatcgatacaatgtttggaatcgattatcaggcctttgacgtgaaatcaattcaatgtgagagtccatctttacataagctt

SEQ ID NO: 180475 - DNA, 353 bp, Glycine max
  unsure (1)..(353): unsure at all n locations
ggatcttaagtcacctgcggcatgcaagcttcttcttncgcgctntgagatatggttctcttctccttcacaggtattggcatcctccattgactagctttgntcgtttcttctgccatctaggttagtgttctaacctcgtgtcttcatttggaagtgttaatggccgtacgatacacaacatgagtgatgtgtggtggctgaggttgaagacaaaggttcttccgcgagaagaaccttcttccgcgcatgtgggaggggcagttggatattgaagcggaagaaggagttcttctgcgggaatctgcggaagaaaggggagaaggttcttccgcgcgttctggcggaagata

SEQ ID NO: 180476 - DNA, 466 bp, Glycine max
  unsure (1)..(466): unsure at all n locations
tgtatggcanaacttcagttactttgttcaagacatacaagtgagcttgtaacaaatcttctacacttggagtgatcacatgcagtcctcttgaacccttaccacccactctgtcatcatgccgagactcaggaagcccaacaggtttagccttctctaagtattctgaacaaaattcaatggctttttctgcaatgtacctctcaacaatagatgcttctgatannnnatctttgtatacccttttgagatcttcatgtattgctcaaccgggtacatccaccgtagataaacaggaccacaacatttgatttctctgaccaaatgcacaatcaagtgaatcatgatgtcaaagaaagcagggggaanatacatctccaactggcacagtataattgcggcctcattttccaactcatcaaacatgattggatcaatgactntgctacatatagcatggaagaaa

SEQ ID NO: 180477 - DNA, 369 bp, Glycine max
tgaatggaataagattggagtcttcaaatgcttgaaagcattcaaaattctcatgtgagaagaactccatatctatgaattttgggtctataatggaatgagaggaaaagaggtttgtgtaccgtatacgctgttcctctgatgagaacaatgatccacagggaatggaggaaggcattgaggtttcctgtgcctcggaatgtcgttgactccgactcgaagtgcctttccgctttttctgatggtccgccatttgaggagatttttcgggatttcaatcgattcatatgagagagtgaaaaaagatgaagttgtgctttgtggggagtgatctgacaacaattgattgagatatggctggaagaaaaa

SEQ ID NO: 180478 - DNA, 376 bp, Glycine max
tgtttttatatgttatgtcagctcaaaatatacacaatctcgcgcttagcacgaccgttgcgcttagcgagtgagttggtgatcacacgtttttcgcgcgactcgcactaaacacgccttcacgtattatctgcttctacatgtgacctctatgcgctaagtgagtgttgcacgtcgagtgagagacttcagatctttaacttctctatcaagctttcttgtgtgtctatgtaacaaatacaccatggctactttccacctccccgccaacaacaagcccaacgcgattttctctgacctctacttctcccaccacctgagctctgacaacataactccggtacctatcaaactcacgatgactcctccaatcatg

SEQ ID NO: 180479 - DNA, 400 bp, Glycine max
  unsure (1)..(400): unsure at all n locations
tctagccaaatggacttaccttgaattaattcctttgatatctcttntgagccttgtttccctttccttgttttgaagctcactacaagccttaaatgaataaccatgatatcaccatatccttaaggaatattggagctttggaattgttttgggaataagtgtggggtttttgtttcattggataacatgttttgttggctatgcttcatgatgtattttgggccatacttgatgtacattgtatatgggttaaatgttggacatgctgaatgagatgtttgttctcatatgctacgtacataaaaaaatcgaaaaagaaaaagaaaagcaataaagctgagtgaataagatcttaaatgacaaaaagagtgatgagactccttggtctactccttat

SEQ ID NO: 180480 - DNA, 396 bp, Glycine max
agcttcatgattgcctaagtgtggaccctcaattgctatcctccattctccacgttttacggagcccatgaatgtcattgcctaacgctgttcatgtgtcctccaccttcgagtttggagctgtgcttcatgattgcctaagtgtggacacttgaagagtaatcctccattctcgactgttctcggagcccttgaatgtcattgcctaccgttgttcatgtgttctccaccttcgagtttggagctatgcttcatgattgcctaagtgtggaccctaagtgaaatcctccattctccacttttttcggagcccttctatgtcattggctagcgttgtcatgtgttctccccttcgaattggagcatgcttcagattgcctaagtggaccctcaatg

SEQ ID NO: 180481 - DNA, 430 bp, Glycine max
  unsure (1)..(430): unsure at all n locations
agctctanattacattggtgtntgtatttatgggaggattttatatgccatctttgctttaagagtaatgtcccactggtaaaactaactttccaaatgtttgccttcgcaggaatggccccgaggaagcttgcctcaaagaggtccaggaagggcaaggcggccgaaggaactagttccgccccggagtacgacagtcaccgctttatgagcattgtgcaccagcagcgcttcgaagccatcaagggatggtcgtttctccgggagcgacgcgtccagctcatggacgacgagtatactgatttccaggaggaaatagggcgccggcggtgggcaccactggttactcccatggccaagtttgatccagaaatagtccttgangtttatgccaatgcttggccaacagaggaaggcgtgcgtgacatga

SEQ ID NO: 180482 - DNA, 442 bp, Glycine max
  unsure (1)..(442): unsure at all n locations
ccctagnccagccttatcaaacacacatntgtgttgtcctagtataatatctggattatttttgccaacagtaaatttggcaagagaatttttcagatctttgatttcttctttaaacttgttacaacatttacataagtcaaatgtttcattactaacttgtattaattttatggtagaagattgatttgtatcaattggttttaaagtcttgacttcaattctaagactctctaattctttatttaatttcaaaacttccttttctaaatttgaaatatctttcttagaanatgaaactagtttggcaagtttgattgattctttatgcaagtcattgaatgcatcttaaatttcatcaaaggagatagataagttattgttagaggatgttacctcttcttcactttcactagttttagccatgagacttagattccca

SEQ ID NO: 180483 - DNA, 407 bp, Glycine max
tctacttatgtggcaaggcgggcttccttcaccttcttgtctccaacgcgaacattgaccattgttcttccttcccgcaatgcttcttttcatgtctgcctgagtgggcttatagcctaaaccatacttcccacgatttccttgagtatttatcaggctagttatgccgccgttgttttttcctaaacccatcccgggttcaaaaccgttccccaacataactcgggccatcattaccgctgcatcggacagacaaggttgcccaaagagggagtccacggaggaaatgctgaccacctcaaaagactggaaagcagtttctaacgattcttctgcggcttccacataaggcatggaggatgggcagcttaccaagatatcttcctcgcctgacacgatgaccaagt

SEQ ID NO: 180484 - DNA, 453 bp, Glycine max
  unsure (1)..(453): unsure at all n locations
agcttanggcctatttccacatttagatcatatcaatgtttcaacaattgttcttttatcaagtccatgaaaaacatctgagtccatttggtattcgggaatgtccttcattattttcatcctcaagatacatttttttttcaaaaacctttattgttgtgttttgatccacaaaattttttaagagtaatggtggttgtttctttcaaaagcacattagttttaataaaaaattttgaatcccagacaaagttatcatccaagactacaccatcaaacatcaaagcacgtgcgaaaataaatcaaaaaataaaccacgcgtaagttttcttttctttttttgaacaatcatcacaacaaatgatataacacagtactaaaagcaataagtaagataaagacaagttcacaaatttagaagatcatggtcggagagctcagcctcctccaatg

SEQ ID NO: 180485 - DNA, 323 bp, Glycine max
  unsure (1)..(323): unsure at all n locations
agtgctgttacgttgtgatggtcactccaatccagtgatttggttgtgtcaaattctggtaccttagtttatattntttgtgttctgtttattctattgttgatatttaaattatttgttgtaggttaatattgtgttaattatttgtgtcaaatagcttaagttaaatatttatgttaatattcttgtaccttagattaattatttgtgttaatattcgggtaccttaggttaattatttgtgtcaaaatagcttctaagttattattcaaatatatatattgtgttaatattgtgttaattctgtacatatattgnttaaa

SEQ ID NO: 180486 - DNA, 458 bp, Glycine max
  unsure (1)..(458): unsure at all n locations
agctnngtgctatgctctctctgtgctcaccaatcttgtgaagtagatccaggctgaaaatggatcaaaattcaatcatttggcagtcatatactaacttctgtgtctctgttntcaaaagaactagcctgtggcacgtaactgtgttattgagttgttggccctgagattntaccaaagttaccgtgtccaaaaacatgataattcaactcaatcatgctttcctatatttccctgatggcattatatatacatctgtattaacatgtattatacttcgtggcaagcctttcaactacctataaagtgcaaggtatcccttcagttgcatcataagtaccaaaacacaaaanatatcaagttattcaaaattatattagacaataattgtgaaactgtaaggttcatcacaaatttggaaagtaatcattgacatcatttactataatcactagagc

SEQ ID NO: 180487 - DNA, 414 bp, Glycine max
  unsure (1)..(414): unsure at all n locations
cttacgaacttgtcgcatatggctttgtcaacgttttattttcacttacgccatatgccggggggggttggttttcaaaagataacattcttactctttaaataaaaaaaactattctattatgttttgagtcttctatgcatttttcaaaagatcagtttatttaaattaaaaaggatacctgtgatatctaaaagaaataaatgtgtctaaagaaatgtaatctccggttagagctataactatattcttgtaaaagctgcttattcctctctctctctctnttatctggaacagattctttgcattcttaggctatggtggctagagggagggccaagggcactctgcttggttcactctgataatgacgtgaggcgtgcaattggccggtcattacaagagcattttgta

SEQ ID NO: 180488 - DNA, 313 bp, Glycine max
  unsure (1)..(313): unsure at all n locations
ttctctaaccacatataggacttgcgttcctttaaccttttcatctctttcgcactccttctaatctcgaatatctgctgatattaatctccaattttgctgatacacgttcaacagataccattttttttcagttatggctcacttcgtaatctatatcaacatatcaaatcataatgcttgaatttgaatcancatgttcccacaattatttatactagaaggaatggactaatgtgtgcaaatgcgccttcctcttacaacaccctgactgcctgacgcacttttgcttcttcaatatattctggatttt

SEQ ID NO: 180489 - DNA, 289 bp, Glycine max
tccttgagatgagaagctagagcctatcttcacaccctcatgacaaaaaacatgaaaattcaaaaaaaagtgcttactacaaaaactactcaaaatgcgccaaaatataatgctaaaaccctatactactagaatggccataatacaaggcccagaggaaggaaaaacctattctaatatttacaaaaataagtgggctcatacttagcccatgggatcgaaatctaccctaaggctcataagaaccatatggccttcccttggatctctagcccaatctacttggagt

SEQ ID NO: 180490 - DNA, 414 bp, Glycine max
  unsure (1)..(414): unsure at all n locations
agcttgtacaattcaccccaattccagtgtcctatgctgacttgctcccatatctacttgataattcaatggtagccataaccctagccaaggttcatcaacctccatttctccgagaatacgactcgaaacgcaacgtgtgcttgtcacggagaagccccacggcgttccattgagcattgtagggctctgaagcgtaaggtgcaaggtcaaattgatgcgggctggctgaaatttgaggagaatcgcgtgtaaatcctgacattgacaagagatgccacacatggngcaatnttgaaggctgttgttaggtgtctctaatgactcatcagggtttccaagtttatgccattattgtaaaccacagttacaatgttaaatgaaatgtgggtcaagccattggtctgtttgctc

SEQ ID NO: 180491 - DNA, 464 bp, Glycine max
  unsure (1)..(464): unsure at all n locations
acactatgaaactaacgctgcgctaaactgacagggttgtccttggtatanccttattagtcgngngcagctacatcacatttgctctctattccctagtaatacaggtatacaatgtcaaactaacccatcaaattacttgattaagatattattacccttttcttattactatataaatgttaccttgcagatgggatctcacatgaagaaagcaatctttgatgagcaaactgcaaaggcacttaataagtggcaaaaggctgctaatgacaagaggaagttaatgaaagcanggatagatatgagtggggaaacaacaccaagccaaggcacatcacccttgcatttgcttcaaaagtacgagccaagccacacagacaccgatagtgttctctactcttcacgatcataccaatctgacactgactagtttgagacagagggatcttcacaccaaatga

SEQ ID NO: 180492 - DNA, 318 bp, Glycine max
  unsure (1)..(318): unsure at all n locations
cagctatagagcaactctctcctgttttctgggtcatccacgggtcatggcatacgtcctaagggttctggaatcctatcctcctgaacgagtaactcttttcatgccacagctggtgcaatcgctgcgacatgatgaaggggttagatatctatctgaaactctacttcatggtttatccccctcagtatgtgctttcctcctattgcttgtcaatggtcatataaaacctgattctacctcttttctttcaccatttctacagcatanataacccttgtgttttctaagctatgataacattgggattttacaggg

SEQ ID NO: 180493 - DNA, 407 bp, Glycine max
  unsure (1)..(407): unsure at all n locations
agcttccgttctcaatttcgaccatcttgatatattaccggactcatccggacatccatgtataaagttattgtcaattcaatnttctcagagcttcggatcagaatattgagcgtctcgatatattacgggactcattcagacatccgagtanaaagttattgtcgtttgaatttgatacgagcttccgctctcaattcggagaatctctcgataaattgcaacactctgtctggcctccgactaaacaagtattgttgtatgaatcctctaagagttcccgttttcaatctggagcgcttcgatatattacgggacctcaccggacctccgcgtataaagctattgccatttcaatttgctcagagcttctattctcaactttcagcgtgtcgatatattacccg

SEQ ID NO: 180494 - DNA, 464 bp, Glycine max
  unsure (1)..(464): unsure at all n locations
ctgcagcttcgtcaatttagtgcctctaatttttatttttgttcctgctcatataatgtgttaattctgttgataaatccagtatgttcatccagtgttttaacatgcatcactatcatttaaatttttttataaaatgacttaataggatttatgttcaaccttgtatgccacgtgagcaaattcattaatgaaattaagatactgaatcaacaataacatattgaaattttagatggtatgaaatgagagggactaatttcaaatttcccataggaacctaaaacatacgttatctttacttatattactacttctacacattnttatttattctacacattcaatctttgtattaactttattgaattacttattttactaatgaaaactgaatttttggttcttgaaggaattcaattgtctctctaggatctcttatgatcttctttttctcgtatgca

SEQ ID NO: 180495 - DNA, 450 bp, Glycine max
tgccgcatgcaagcttaaaaccccttgttgattactaaacttgctgattttaatcacaatcacaagcaagggatcctaactacatgcaagagataagaatgaaaattagaaaagggaaagaaaagttgtgttgcctcccagtaagcgctcttttaacgtcactagcttgatgcatcatcctgttatccaggatccaatagagttcctacttcaaggaccttcttctcatgtctcctttcctccatcacatgcactttaaaacagacattttggcttggtggatctttgtcctcatggaacaaatcaaagctgatcttctatgcctatctacagtatcttctttcccatgtccaccatgcagcttgcagtagacatgaatgggcggccaagaatgagaggaatgtcaacatcctcttctatgtctatgacaacaaaatcagctggaaatat

SEQ ID NO: 180496 - DNA, 477 bp, Glycine max
  unsure (1)..(477): unsure at all n locations
tgcagcatgcaagctttgagccanaatcctaactcaccatcatctttgttccanggngagaatgtcaatccttaccctcggaagcaaaaaagaagagaacgaaaatttccaatcaaagaaaaaaaagaaggaaaatttccaatcaaagagaaagcaaaacaaagagagaaggaaaatttccaatccaaggaaaaaagagaggaaaggaaattcccaatcaaagagtgggagaaagcgaaaagaaaagaaagaaaattcccaaccaaagagtgggagaaagtaaaaggaaggaaagaaagctcctgatcaaggatcgaaagaaatcaaaacaaatgtgcacaaaggtctttggaccggacaatatctgtacaatacagaattgccaccaaatgaacaaaaaaaaaaaggaaaggaaaccacgacctgaaagtggtcttctctctttgatcaccaaccaaaatcctgtgcgtcggtgac

SEQ ID NO: 180497 - DNA, 344 bp, Glycine max
tagctagtagggcactaattgcaattaaattgaattttaatttacgaatgtcacccacattatgcaccactaaggtgttggttaagtaaactgaacccatggccacaatgggtataatgtccctattaggcagagttacagttttatcaaaaacaccctgataacatcacaaattatgaacatagcctgtcatatgaatgcttgcaccacaatctaaaatccaccacctctgaagaaaattggaagcggaagtataaagactcatacccctggacgaagaaacaccctgaggaatgaaagccttttagcatgactttgtaaaagactcatcattcggctatatt

SEQ ID NO: 180498 - DNA, 381 bp, Glycine max
tactgatatcatgagtgagtcaactctcgctttctctttataaacagcttatctaattctcttgatgtgacccacacggaacttgagaattaatatttacaacttgaaagcattaatctacatgcctcgattcattatcctaatatatatagaaaccactaaccagtcaacatatcaagaactacaatcttaaaaagataatacattcttctttgggtgaagctctaaagtaaataataaaaggaatttaaaacttaattcatgattttaaaatctcgatctaataatataaatgtttttacaggatataaatattcagttatatatttgtgttatgaaattagaataaatcatacattatttcttaatttgaatatatta

SEQ ID NO: 180499 - DNA, 395 bp, Glycine max
tccgagagataaaattactatatcctacaccctattacattacagcttaacacacaataaaaaaatgttaaccaactaactcctacctatccctaaacaaggtctgaattgactcccaccttcaacaagaatcctatgtatgcctctaaatggctttgtaacatgttcttggtaagttcaatggggcggacttcccgctgccaatgaacggcaaaactatgatgtctgtgggtgactcactatggcgcaaccaatggccgccactgattcgcatgatatatcaagtactctcccagacacaaacacaattggtccgacgggaaccattctcaaccttcacattcttggttagtgtgaacacattaatttcttctcagccatcataatgtctattc

SEQ ID NO: 180500 - DNA, 302 bp, Glycine max
tgcccctggagggagacaagctcatcgcatgcacatagtgcaacgaaggctgtaatcccttcgtcttctctctaatgcgcggaaaccctagcaaagccaccacagcgaaaacttttggaatcctatgaaccatctatagatgctactatcacttctgaactacacatgtgcacccacttataggtaaaggatgagtttatcacaattgcggctagaatgaacatgtgcagggaactccttcgaggatcaaattggggatttattttgggatgtatattgtactataattctccgcatctgac

SEQ ID NO: 180501 - DNA, 474 bp, Glycine max
atcttaagtcacctgcggcatgcaagcttctatggtccactgtcttgtgtcatatttgctacgataaatgtctcatagccaagctaggcgaacatatgcccctctgcattgaaatgtctcatcttttgcttcttctgtactcacttcaagcaactcaaataaaaactccacaacttggtctacatcaagagcattgaaggtatggaaggcacctgtaatgggcagatgtaacaacaacgccacatcatcgagggttatagtcacctctcctactgatagatgaaaactactagtttccttgtgccacctctcagcaaaagcagataagattcccttctcaccagtgtctaacgaacttgtaattagagaacttaaccctgtagcagccactatgccttcaatctcaggtgtaggccttccaaatttctctaccttcctcccatgagaggccaacttcaactcagtacatttctg

SEQ ID NO: 180502 - DNA, 399 bp, Glycine max
  unsure (1)..(399): unsure at all n locations
gtaacctagctggccttgaatcagaaatctgtacctgtcgcaaaggtttgtcgtttgtgctcctctgctgaccaccatacaaacctttgcccttccatgcagcaacctggagcaattaagcagcctgaagcttatgctgcaaatatttacaatagacctcctcaacctcagcagcaaaatcaaccacagcagaataattatgacctctccagcaacagatacaaccctggatggaggaatcaccctaatctcagatggtccagccctcagcaataacaacagcagcctgctccttccttccaaaatgctgctggcccaagcagaccatacattcctccaccaatccaacaacagcaacaaccccaaaaataaccaacagttgaggcccctncacaacct

SEQ ID NO: 180503 - DNA, 453 bp, Glycine max
agcttctaagggaagagagagatcaatctctagtacatagcatggtcttaaaggaggagttagcggagttagctgcttgctcaagatccaagaggagtttgacccaacacttagaagccacagagcaaagcatgctagctataatagggcagtacaaagaggagctaaaccaatctttggctcatgagcaaaagctagtagaggacttcgcacaagcatacgccgagaaggaggcaagagggagggtgattgatgcattgcatcaagaagcgaccatgtggatggataggttcgccttgaccttaaatggaagtcaagacctcccgcgactactagccaaagcaagggctatggccgaagtgtgttcaaccacagaggaaattcacgggctaatcaattattgtcaacacatgatagacttaatggcccatataattagaaatcgctagggtc

SEQ ID NO: 180504 - DNA, 460 bp, Glycine max
agcttctgaaatttgctgaaggaagagagtgtttagttgggttttttataaaaaaaaggagtgtcttttctttttccttttcttttctaaaaataattgccacatgtcccattttaagtggagcaaaagggtccacctttttcctttgatttgacatcatactcagccataaggaagaaaaaaaattgaccttttggatgctgaaatcctgcctcggtttgcatgccgcctctctggttccagatcctcgcgtttctctgcacccgtcggggcccgtttttgaaagtaggcaatatatatatcaaaacgctcagaatgagaccctgagcatggttcagaggttggttttgttaaattttgagttgaacgcacaacgactaattttagactaattaattgcgaattaatctataaccgtccggttatgggttactcttcgttaattagtttaacccacgta

SEQ ID NO: 180505 - DNA, 352 bp, Glycine max
  unsure (1)..(352): unsure at all n locations
ataaaaaacaacttttaggttttaggaatataaagggttttttatttatgttatnttttaagcggcgggacaggtttggggtcaaggtcggggcgaatattagtaatcctatagccgtacctgttcccgctttgagctatcagagaaaacctcaacttgaactcatacttgatcaactcaggtattattcgtcaaagttggaacgtattcgaacgggtacccacgcatacgggttttattggcatgtctaatcataacctcgcttcaagctctcataagctgatattgttctagaaatgcctcctagcctcctatcctaacaagctgatattgttctagaaatgattaagta

SEQ ID NO: 180506 - DNA, 481 bp, Glycine max
ggatccttgagtcacctgcggcatgcaagcttgccacccaactcgcccaggcgagctctgtgcttcctcagaacaaccgccttctggaggaatattctggaaggcccaagtgggcctgatttctatttgaacccccatttttactaaatacaccccttgctcttttttggtgattctttttctgtaacgtttcgaaattttacgaatttcgtaacgatgtttgttttatttccgtaatgttacgaaaccttacggattacgtaatcatcccttttctgccttccggaacgtttatggattgcgcactaacacttccttttaatttccggcatgtcacggaacttcacgcattgtgctacaatgctttcttttgacttccggcatgttacggaacttcacgaatcgcctaacgatgggtgccaagtacctcgaagtggcaaacgagggtcgcatcccaacaacggatggtccctggatgaaa

SEQ ID NO: 180507 - DNA, 279 bp, Glycine max
tttcaaaaaggaagccgcatctaggcaaggactgagagaccatacaacgtttctaacgactcctaattatgcgggccagtaagcctatcatatgctgacaatagccgacaagcccatgaaccccttcgggggcggagcaggtgtttgccatcgccttggccttggctaacaatcggcgaagttcttgacctccgcccaaggtaaaagcaaaccgatccatccacacggctgcctctcggcgtaaacagtcgatcacccttcccctagcctctattcccg

SEQ ID NO: 180508 - DNA, 424 bp, Glycine max
  unsure (1)..(424): unsure at all n locations
agcttctcncccaattgtctataaagtgggtggttaagtgaagnannaaaaaggttcaaccccttaggcacttctctctctttcgaatttgcttaggaaaattgctctcttgaagaaaatcccagccgaggcccttccgtggcgtttccgtcccgcttccgtgagtgatttctccaaggttttcgaccgttcttcgacagtctacatcgttcttcagctttcaacgggtcagttcctcacacccggctttccaattcattctatgtccccgcggtggtcccccttctgcgtcatgtacttctcttctcgattgtctttactctttatacccgcttttcgcatgtctaagacatcactttcccatttctcgctaatctcaaactatataaatcccaccgaccgctcgaatcgctcagctgtaatt

SEQ ID NO: 180509 - DNA, 402 bp, Glycine max
ttggaagctcttaaggaagcgttcttttttagtgccataaatagaaacaagcgtaacacttgtcataactttgatgaatgagagtcttgtgagacacacttcaaagttcaacttctgtccctctttttcctcaattgtgtgccccccaaatctctctctctcattcttttcctccattgaagctacctctctaagcttcttatctgttggtggtgaatcttctctttccatggcttattagtagatggtgcctcttctcacctattctcctttatcttccactgcaactccatggctgaaaatcaccattgaaggacctcatcgaagcttaaagatccagccttatagaagcttctcaggcaagcttccatcaagtggcgtgagagcacaagaacttcaagt

SEQ ID NO: 180510 - DNA, 294 bp, Glycine max
ctgcaacaattgttagccgtggctatacgagacatcttgccaaacaaagtcaggttaacgataactcgcctgtgctttttcttccatgctatatgtagcaaagtcattgatccagccatgtttgatgagttggaaaatgaggccgcaattatactgtgccagttggagatgtattttccccctattttctttgacatcatgattcacttgattgtgcatctggtcagagaaatcaaatgttgtggctctgtttatctacggcggatgtaccccgttgagcaatacatgaagatc

SEQ ID NO: 180511 - DNA, 449 bp, Glycine max
agcttgagatgaggaagtgtagaagggttatcttcctgctcttattcgtcgaccacagagtggtacctgtagatatgtcgcgggggtcaggagaccttggggacgtcaggtggggtgctattgcccaaaaccaagcttgaccaatcccgacccaacccgggcatagtcggtcattgagaacctgtgatgtacctaagcaggcgagctcctggcagccaacagataaaaggaacaaagaccaccaagcaaggaggcttgtggtggctggccagctgtgaatcttgcgtgatatatgggttatggcctctggtaatcgattaccaagggtgggtaatcgattacaaggcttataaatgaagacaggaggctacgatggtctctggtaatcgattaccatgggatgtaaccgattaccacgcttgataacgaggtcatgaagccatgaagcc

SEQ ID NO: 180512 - DNA, 474 bp, Glycine max
ccttaagtgaccgccgctgcagctttacgaaaaggttcatcaagtatattttatgtatggaagtaaccatcttgcaaaaattggggcaaaagatggatcgggttacatcgctgcttcatctactgccaaacacatttaggactgttgatgtccttgttacttccagtttcaccttgacgaagatgtcatggactatgttgaaaatctaaattgattcaaccccatatcctgcgtaaaaatttgcaatacttcaactgtgcatcattcgcatacatccatgcttttcattggttgcattgctcattgcattctttccttgaaaaaaaaatgaacttaatcattgttatcaaaaagaaaagaacacactttatgacgcccttattgaactcgtgctagagctacagtaatgagtgaagtagaggaggtgcaagagcagatgaaggccaacatggaggccatgaaagagcaaatggc

SEQ ID NO: 180513 - DNA, 456 bp, Glycine max
  unsure (1)..(456): unsure at all n locations
agctnttacatgcattgatgaacaatttatttcttatatgagatcaaatttcctttgtagagctatacttactaaaatctacagttgtcccttgtcagggtggacgtggccaaggtaggctctaagatctcgcacgtcaaactgagagtagcctttgttaaaaggacaagaggggggacctgcaaaataaaggacttcgacactgaagtaagtacgagagttaggtgagaataaattttgtaaaagggtgagatagaacctgctacttatagagtggagtggaagctgcgggtccttattggttgggattgttacggtgttgtaacaacccttgcagataatgactagcttgtagataattgcagcttacacataatgtcgaccttgtagataattgaatacctgccacgagaaaaaaaggtcacaacatatttcaataatgggtactttaagata

SEQ ID NO: 180514 - DNA, 448 bp, Glycine max
  unsure (1)..(448): unsure at all n locations
agctngantagcatccttttgtttctcttcctgcatcaagatttgaatcaagatctaaaatcttgaacgacaacattcgcatttttattaaattgagtttgcattaagatattaagatttgaattgaaggttgtttggatatgaatttgttttcaaatttggagccaaaattctggccgaacccaaatttggataattaaatttgttaggatctaaatttgttttcagatttggcgccaaaattttgttacaatccagattgggataattaaatctgttaggatctaaatttgttttcagatttggagccaaaattttgttacaatccatatctggataattgaagttgcttggatctgaatttgtttttcaaattcggagccaaaaattttttacaatccaaatctggataattgaagttgttaggatctgaattcgttcttcccac

SEQ ID NO: 180515 - DNA, 452 bp, Glycine max
agcttccatcaaatatggtagtatttgttatgaaataccctaagcatgtttagaaacctaggcagcaagtgtcgaggtcagcttgttgtgcacaggcaacatcatctcatctcaaagtcattttcaacatcaacatcatctcatcttaatgacattatcatcatcaacatcatcttatatcaatgacattgctaacatcaacatcatctcatttcaatattatcatcaataataacatcacatcatataaacattatcatcgataacaacatcatcagtaatcacatcccacaaatacatacatataaatttcatgcccaagatttacacttccgaagccttcaaataacataagtctaaaataacaacaatccataatatcatgagactagtcatttagggaaaattataaattaaagaggagaactatgtgttacagaacaaactcgtat

SEQ ID NO: 180516 - DNA, 466 bp, Glycine max
  unsure (1)..(466): unsure at all n locations
agctntaaataggctctgaatctgcgacgttgtacttaacgccaccctcgcacttatcacgagtaagtggatttgagcttancaccaatcatgcactgagcctgcctgaagacaactgctgcacttagtgcactgatctcacgcttagcgtgcaatcttgatattgatgctctgccagattcttctatcacgctgaagctgcgctcagcgatggatgcgcgcttagcccaactgatgagctgagctcaactgtcatttttagcacttcatgacttagcctctttttaacctgaaattacacaaatttcatcattaaatccaatggaaatattctagagactgctttaacaataaaacaagatttatttacaaaagtactacaaaataaccataaattaggaaaatatacaaattttggaaaatgttttctatacaaaagttagtcgtataagacgactaacactca

SEQ ID NO: 180517 - DNA, 452 bp, Glycine max
  unsure (1)..(452): unsure at all n locations
agctngccatccccctaagtgtggctgctatctttgtgtggaaactgttaatggacagattacccactaggaaaaatctgcaatgtaggaacatcttgttgaaagagcaacactagttttgttcattctgctcaagggaagaggaggattcacatgtctgtttgcttatcaaattcggcaaaactgtgacaaatgcattgggattcaaattgctcaacatagggattccaaagaacatttctttatgcataactgtttttggctcgggaggaatagttattgagtggagagcattttggtgtgcagtggcttggtccatttggtgtcacataaataaaattgtctttgaaggacaacaaatggatnttgacgcaatggcggaataaatatggtttccagcatggtcttcancgaaagtaaagaactttttcctactctttctatgatcggta

SEQ ID NO: 180518 - DNA, 440 bp, Glycine max
caagctataatagggggtgagtggggcacatttgtcaattcatcattcccagccccaaattacggcacgcatttctctagtccgcgaacttcgcaaaatatcttaatctcttcttcaacaaaagaaacggccataaacctcacatcaaaactggcaaaaatcagcccaaaacaaccaaaaaaaaatccagatttgagaaactacaccacgctcatttgcaagatcaaaaaagacaaatttctaacttgataaccacaaacatatttacggggagagaaaactaagaaatctcagtacgggatacacaaatcagctgcaaacgctacacggggtgcacaacatcatatatgtacgcatcaacaaatcaggagatgcctctcatataaaccaaaaaacagactgtatcatcaaaacctctctatatgaagtatccccaacct

SEQ ID NO: 180519 - DNA, 449 bp, Glycine max
  unsure (1)..(449): unsure at all n locations
agcttccatgaaaatcctcatagctatctattantttttttacaccaagacaaatgtgaaagtacaatgtaaatttgaagcaacaactaactaatggaatttataaaacaaattaaagtataattctgattattccaattttacttattttcatactagaaatataaattcacataattcttgtggcatctcctttttgtcaaagcatatgtattttttaatttatgacacgccctcccatttggaatgttgataaatgtaagtctcaaagcttaaaggcaaaacatattatatccataattatgcctcctctcgatcatgccctgaaacatccatatcagactgtgttttcactattttctttctcaaaaggatcatataaccttcataaattagtatatttcaccttgtctagcatgaaaagtgcacagatccaccttccattgcta

SEQ ID NO: 180520 - DNA, 473 bp, Glycine max
  unsure (1)..(473): unsure at all n locations
cggcatgcaagcttgcttgtggagcttctatggaggctttatatttgagcttcaatgaggtccttcaatggtgattttccaccatggagatgcagcggaagacaaaggagaataggtgagaggaggtgccatccactagggaataagccatggaagaaggagcttcaccaccaagatgagccttggataacaagcttggagaggatgcttcaatggaggaaaacaaagagggagagaaggagagagggggggagcacgaaattgaaggaagaaaaagggagagaagttgaactttgagttgtgtatcacaagactctcattcatcaaagttacaacaagtgttacacatgcttctatttatagactaggtagcttccttgagaagctntcttgagaaaacttccttgagaagcttctttgagaaaacttccttgagaagctagaccttagctacacacacccgtctcataact

SEQ ID NO: 180521 - DNA, 462 bp, Glycine max
  unsure (1)..(462): unsure at all n locations
agccttttgataaacaaggtgatcatctattatgctcatgagtctaaaatcaaagttttaacaaacaataatggcatatgaaacactttaatgaaatttaataaacaaatcttataaaaacataatcacaacttgtcaaagtcattaatagataaggcagaaagagcaagactgcaaagattttatactggacaatttctaccattgagactatgtccaattctgcctcttacaaaaagctntcccaagcttacaccttgagtattttttttttccttatcaagccatttctaactctgaaaaatcaaaaaatttgtttaggctaagatgcacatagacaaagctaacaaacatataatctaagctcactatctttttctctcaagatatacaagatattttgagagcttttccagcttagaaagaatctgaatgcaaaaagaatgaaggctcttaatattg

SEQ ID NO: 180522 - DNA, 454 bp, Glycine max
agcttcttatccaaggctcatcttggtggttattctccttcttccatggctcattccataatggatggcgcctcctctcacctcttttccattttcttccgctgcatctccatggcggaaaatcaccattaaaggaccccattgaagctcaaagatccagcctccatagaagccccacaagcaagcttccatcacatgagccaaccatgttgggatcataaacccatttcacttaaaaacaaaatgattgaacagggtacctaatgcatggttaactaagaaaagatgtttcttcaggcatctcaatctcataattacatttgccatgcatagcttaagtatgcttgagtcattcatctctatgaaatgttgttgaagtattggcgatcagaattgccattccttggattaccgggttgaaccaagtctatgcttttacgaaaaggttcatcaa

SEQ ID NO: 180523 - DNA, 478 bp, Glycine max
  unsure (1)..(478): unsure at all n locations
ccttaagtcacctgcggcatgcacagcttgaggagtatggggtacccatcatatgtggtactaggnggcggtcgggcgatggtgcacaacaagttttccacatccacaaatcacgcataaagccaccatcccctgttgcccacctccaactgagctcacgtactcccacgtagccaatatcctcgtttctctcaacaccgggtccccatcaatcctcccaagcttcctaacatcaaagtaattcaacattcaaacaacacaaactatcacagcaaataaaacagggcaaaggcagaaaactctgcccaaaacaccaaccaaaatcacagcttttctcacttaaagaccccagtaacaattccttccttccaatttgttaaccgtgggatcgactcgaaaactttactagaagtctctagtacttaagcctacattgtgaccgttgggatctactagcaaacgtccagaactcattctg

SEQ ID NO: 180524 - DNA, 445 bp, Glycine max
  unsure (1)..(445): unsure at all n locations
agcttgacatggatatagtagagctaaatanatttttgtacactcattacattntaggcataaaataaatatctntgcacaaagcgcctgggtctattttaaattatgaggttgggtctcattgtgaaacaagataaatcttaaaaaaactcactcaattcctatatcggctgcagctacaatcgatgtagaaagtgcctttacaacatcagttttgggcaaaatcgatgttataaaaacacttcctacattggttgtatctacaacctatgtaaagcaatgctatgaacatcggtttttgaaccactcgtcaaagtcttccactttcaaggatgcttgattcaacatccattctaaaccgatgttaaaagtgctccagaaccgatgttgaaggatttttctataataatggccctcctagacaggggacatcatcgaattatcc

SEQ ID NO: 180525 - DNA, 450 bp, Glycine max
  unsure (1)..(450): unsure at all n locations
agctncttaaatatgtcttgttaattgttatcgaccataggccagagcaaccattatatgtcatggtccccgtcccctgtagccaaataccccacaccatttaacctgatttttacaaaacagtttattttgggtatggtaaataaatgcagccaatcgttcttaaatatcttctccttttattttatttttcagacttttgcagttttttttatataaaataaggaaattctctgaagttgatacttgcatgtggataagaaaatgaaatatgttcaaatcaacagatgaatcattcgatttcaacccttttttttaactgtcaacatgttaaatatatattattgtatattaacttttcagttaatcagtgttgcaaattacacactctgaatatttatcataaggtaatgaacacatttaaagaaaatattatctcttatacttata

SEQ ID NO: 180526 - DNA, 485 bp, Glycine max
atccttaagtcacctgcggcatgcaagcttgcatttggaattgcgaaagccccactctatcattaggattagtacctgacatctcaaacaaacaaatcaaacgtaataagacaattatagttgttgtttgaatacctcacccactcaagtgtatcacacaattatggcttttctctaatgaaacactcttgccttttaccactctaattccccttgagttcttaggcaattcaagagattatggccacaacaaagaacaattcaccaatatgtgtaaggtaaggctagagagacaaggaaaaggttaaccaagaaaaaggctaacaatgtttttaggcacaaatgaaggaaataaaattcagaatttaggaattcaagtaacaatccttcatgcaaccaatatattaccttaaagagattttttttaaagttcttcaagcatgaaccattcagcccaatttttttttttttaattttgatataca

SEQ ID NO: 180527 - DNA, 464 bp, Glycine max
  unsure (1)..(464): unsure at all n locations
agcttccacanaatccaagtaattccgcatctcttcatcatgaactaacaaaaccaagcaaaataggcaaaggcataaaactctgcccacaacacaaaccaatatcacagcttttcacatacaaataccccagtaacattctcttcgttccaattcgttaaccgttggatcgactcgaaaattttactggaagtctctagcacataaatctacattatgaccgttgggatctgctagaaaacgtccaaatcccaatctgtactactctttccacaaccagcaaaatacataacattttctgcacaaagccaaaattctgctgcacctatttgatagcaaaattctacataagtgaagattttcgaaatcacactttccctcatccaattttgcccaaattgaatcctacaagtcccaaatcatgtatcaatcatgtctaaaccaagggcaagcttcagaccaaa

SEQ ID NO: 180528 - DNA, 453 bp, Glycine max
agcttaaccatcattcaatactagacccatcttagatacctagttcattcctaatgaagaagaacctatctccagcaagagatttagtgaagacgtcagctagttgatgctcactatcaataaactcaatgcagcaatcaccctttaatttataatctctaagaaaatgatgtcttatttctatatgtctggttctagaatgcatgacaggatttacatagattgatagcacttgtgttttcacatttcaagggaatgtgatcaaggattactccaaagtcttcaagttgtttcatctagagactttgagtacaacaacttccagctgcaatatattctgcttatgcggtgaatagttctacacaatcttgtttcttgcatttcaaatatacaagaaagcttcctaagggatggcatgtcccacttgcacttttcctatctagtttgcaccct

SEQ ID NO: 180529 - DNA, 434 bp, Glycine max
  unsure (1)..(434): unsure at all n locations
catgcaagctnccaagctccaagcgatgaggtgatacatttcataggttcaaccacgagcttttcaacccggcgaccttgtgtggcgagtaacaggcgaaactagaaaaactccccgagcgggaaagctcggtcccaactgggaaggcccatttaggatcatagtaagcttagacaatgaagcatacaaactataggagctggatggcaaagaaattccaagaacatggaatgccatccacttgaagttatacttcagttgacgcaatgcaagaccagaaggagtacttttgttcctacttaagcctttggtcccaaaagagaaaaatcaaggttgtggctcgagagggtttaacaagacacatttgggataacgaagggaatttgtacccaatcaaatacatcgaataaaactctaccatccttaatctttat

SEQ ID NO: 180530 - DNA, 461 bp, Glycine max
  unsure (1)..(461): unsure at all n locations
agctntacagnanaatttagtaatgaccctctatcctataattaaaataacttaatgccattaacctatggaattaaaacaaactaaatgactgagtgtaactgaaattgttggcaaccaaaagtcacccccaacagccaacaagtcagccaccatttggtctcccaaaaggctgatgcctatgttgccaattgggcccttattacaacttgaactaaagcccttttagttgattaacccaaaacatatttttggtcagccaactttacaaggattgggccattatttagacaaactaaacactctaaaattgaaataaagtggtgtcatttagtcctccatttgggccatgatacaactcacaaccttggacttttctccttgaaacttgggcttgtattcaaatagtatggacagcacttgttgaagagcttccttggcttttcttgctctagcccttg

SEQ ID NO: 180531 - DNA, 436 bp, Glycine max
agcttagaagttatcacttatcacatttttaaacatatagcctatggtaatgaaaactatattaagagacattgactctatcaataatgtcagtttcttttttcaccctcaaatattagaatcaggaaaaaaaattaaaatatcatctattttcttaactgtaaacggcatactgtttttgctgatagattatgaaacaaaaggctcagcaacagcagaaaataaatttgagacattatttgggcatgtctgcagttgcagtgtaaatgacttgtttgaaatcatcaaaatgtcatctatttccatgaggaaagtaattattgtcattcaaaagatttgagatttcacagagattacatttttcctacaagagattttgatgataagtgtctcatcttgcattcagaagatcctctaggagataatataatagtat

SEQ ID NO: 180532 - DNA, 456 bp, Glycine max
agcttgctcaaattgtgttacacaactatatgcatacacctagtcattgttttgaattgacaaaataaaattctgcctatcttgaatataatattttatgagtagcttttgaaatagtatacgagagtatttatgtatggttattatagaaaaactaatttatataataaaaacatatacatatattcctttatacaactatcgtttaacaacttttgactaataattttaacaaattacttattaacttgagtttacgtttcttttcttcttcttttttatccatgggagtcgattacaagtactagggaatttataataattcatgcaccctgttcaaccaatgagttagagactcttgttatgtttttctttctttgtttgggtgttatttcctctttactcatatataagcaaaaaaatggttttgtatgttggacataaatataagcaaac

SEQ ID NO: 180533 - DNA, 455 bp, Glycine max
acgctatcttaacaaacatatagagatagtttatgggaaaaatttacatttaaggattcctgaaagtgaagccagatgtactatctgtggaaatgaaccatcttctgaatgaataataggaactgttgaaattccatgttgcaggatcttcacagcaatctctttcaaattatcgtatggccctgcctgcataaatgaaaacaatcaatatagacgacattatataaagattacaatgactttccaaaacagattcacattaagctcagaaagatataaacagagtaattattgggcaaagtttcacatagaactcaagaagcttcatcaaaatcaagttccaacaaaaaaataagttggctaactgcatagttggcgtaaaggagaggtacttacaactaaagcataaaatgatatagccaaatgactggatcatctctcgattgataaaacat

SEQ ID NO: 180534 - DNA, 477 bp, Glycine max
tccttaagtcacctgcggcatgcaagctttgtatctgtcataagagctttcgtttcacctacattgatgactgcagaaagatgacgttacgtttcgttttcgttttttcatgggaaacgacattatagagtttttagataatgtggaattgttagctgtacgtgtacatgatcctgttaaggctaccagtattttgggaatgcaaaggattgtcccttttagagtttttagataatacggcaaagtattactttgaaaacataataactcgttcatgtccaatatttctttaaatttttttcgcaaatcagttgtgtgaaaatacgagaagctttaacctgtccactgatattagtgaattgtctcgtttacatttctccaattcttacaggaataagcaatggtcatgttttacaggattgatcaatcattccgtaagttagtaagtaatgaattcttatttgaacattgaaatga

SEQ ID NO: 180535 - DNA, 485 bp, Glycine max
tacacccggaccttaagtcacctgcggcatgcaagcttagcctcacaagcatgtgtgtggtcttcttgataaggacgagggtactacacaatacacatggatataattctaatccaatacgtattattatgcttcttatgttattatatggattagcgtacatatatacccgtaacgtatgcacatccgtttgtaaattaaaatgcataaagggagcacaaccatgcattaatattattacactaacatatatcacacccacatggccagttaacatctataatcattgccacgggtcttccctgctgaaaaacccatcaaatagcatattgcaccacctattttttggcatagtacaggtacgaaacatccatcataattgatgattcactgtttgctccatcaatgccatagaaccgaacaaaagaattaaggaagggatgaacccatgattttgtgacccctttttttaatgttgaaaactg

SEQ ID NO: 180536 - DNA, 395 bp, Glycine max
  unsure (1)..(395): unsure at all n locations
cggcatgcaagcttaagatgaggactgtagtttatattttgtaaaattccaaatncctgtgatcaggtgcataaactttgccactgggaaaaattcttgcatgaattgcattgaacactaatcctaggtggtaatgctccagtctggtaagtccaaatgccggtcttaagcttttccctaacaaaaaaggacgcaaactgatgtattctccagtcgtagttgggctctttattgtgtttgagcctcaggaatttcttcacatgaacaacaagatcttcatatgacaagccatgcaactgcattctctcaatcatgttgatcaatccatgcctcaactctcagttttggtcccctaagatagggagcacaatattggtagtgatttctaccatggg

SEQ ID NO: 180537 - DNA, 434 bp, Glycine max
  unsure (1)..(434): unsure at all n locations
agcttccncaacattgaagtgattcgacattcaaacaacacanactatcacagccaagagaacagggcaaatgcagaaaactctgcccaaaacaccaaccagaatcacagcttttctcacttaaagaccccagtaacaattccttcgttccaattcgttaaccggtggatcgactccaaaattttaatggaagtctatagcacataaacctacattttgaccgttgggatctactagcaaacatccagaactcattctgcactactctttccacaaccagcaaaacataagcattttctgcacttatgcaaaattctgctgcacaatttaacagcaaaattctgcataaagtgcagatttcgaaaatcacacttcccctcatccaatcttgcccaattcaaatcctacaagtcccaaatcatgtatcaatcatg

SEQ ID NO: 180538 - DNA, 450 bp, Glycine max
agcttctgcaaagttaaattaaaacgcgtgttgtcctctgaggattatgaaatatgaactatgataatattcttttgaactaataaaactgatctaaagaaggtttaccccccctctttttaagattcggattcatcagcactaggcctaaaggcagcaactttggctgtgtaaattgtaattactgctacaaaaacttgattgttttaaacccaaatttaactcatttcgctctcatctttctgttaggagtcagggtgattattcattcatttacacatgaaatttgattataacagagacgcgtccccttcaatcatcagcagctaggatctaagaaaaatcaaagcagaaaacgaaagctgttcgaagtgatgctctgatctgatggaaacgccgcacaccctatagaaggttgggtagaattcgggtcatgggcttggccatcaa

SEQ ID NO: 180539 - DNA, 455 bp, Glycine max
  unsure (1)..(455): unsure at all n locations
agcttttgcatcctagagaaaccaagaattgtttgattcccatccaaattacaagccaagaaagttcttcagattcaatttatgtgtttgtgattgtatgtcatgagatgaaattcaaaagttgagacttgtgttggttgttgaattggataattgccttaaacacttgtgcttgtgagagaaacagtgaccgtgaggcattggcttgatgaaccttccttgatatctgccttgcttgtcggcttatttcacttgtgctacttaataatcatgtccatatctttgaaattctgcatatctttgtaaagagctattggttgaagcattgcttgctacttatgtcatgtgattgaatntttttggaacaaacacatcttttgattagccactgtgaattctgtcacttgaggacaagtaaactgttatttctccgcttgaggacaagcaaaacttta

SEQ ID NO: 180540 - DNA, 455 bp, Glycine max
  unsure (1)..(455): unsure at all n locations
agctngaagctcaaggataagtgtgaagaattttttgaagaacttttggcttttacatgcctaactcccttgagtggcattagtattggttgttgcattttaccacattcgatatctatttcgcattatgcatcatcatggtttgcgtgaacaacagtttatgagtcagaaaattttcttcagaggaaaaaactctttgttttaatcgattacaacctcattataatcgattacaacaagttcgctaaagtttgtagagttgagtctcgtatcagtttaatcaaatagcgatatctcctattcaattacactgttgttcgacagagtgactggtttattcaggagtctctgctttaatcgattactaggtggattaatcgattacttctctcttatttaagtgttcagaggtgaacaagaacactctattcgattacatacgacatctaaccaat

SEQ ID NO: 180541 - DNA, 407 bp, Glycine max
  unsure (1)..(407): unsure at all n locations
tgcacgcatgcaagcttccactccaggtcggatgcgagaacttcattgattgtgaacgccaaangttaaaaaccagaatgcgcaatatctttaagttaaccaacaagcaatttttggatgaaatttactaccggaaacctttcacatatgcaggtaatcactttcggttccaatgtcatgcaactgaaacatgatgtggatgctaacacaatgcgaatgtgtaactaatgacttctcgtttgttgcgccgattgagttatcatctaccattgttagaaccncagatggtgttttaaacctacttcaagctattatgacaccaactcatgatgccctgcgctattacaatgggaggtggaacaagtcacggcaaaatgactccgttggttcctctctccaggaagaaa

SEQ ID NO: 180542 - DNA, 450 bp, Glycine max
ttaacgtgtgtgtgagggttattactttgcttggctatgagcatatttggggctattagtgtgtcttgtgatgtgagctcaaaaagaatattttttgtgggtgtgtaagctcaatcatgaaggatggcatgtcactggctgttatgttttcaatcaactccatagcttcattaggtgtattcaattagatctttccactatcaaagacatcaacaagctacttggaatggggtcccaagccatcaatgaagatatttagttgaacaggctcaatgaacccatgtgtaggagtctttcagagtaaaccatgatagcggtcaagagcttcactcaatgattcatcgggaaattggtggaatgaagagatcttcaccttccctcctcacgggttctggactttggaaaatactttttcaagaacttcttcaccacttcttcttatgttcgcaa

SEQ ID NO: 180543 - DNA, 420 bp, Glycine max
  unsure (1)..(420): unsure at all n locations
agcttattacataggacaagtgagctttctttaactttatgcnatgtnagcacatttcaggctgtatcaattttatgaaagcctactgctggctaaaacggggtaatactaatactctttttttattaaaaaaaaaaaccttcaggttagtagcgaaactggtagactaacactctcgctaaagcagactgcttgtctttcacctgatgcatcatttattccggactactgtctcatggatgacaagggataaacaattatcatgcaactcaaatattatcgacactcagtgttgcatttcattattctacttattaaattgcttattttatgcatgctaacacacgcggatgtctatccttgtgctgttttcaactatgaacttcatatgcccgcagacatgctcgtggtctcactcaa

SEQ ID NO: 180544 - DNA, 467 bp, Glycine max
ccgaccttaagcgaccgagctgcaactcgctgggagggtatgaggctttattttgagctcatgaggtctttaatggtggtctcaccatggagatgcaccggaagacacaggataatagggagaggaggatcatccactacggaataagccgcggaagaaggagcttcaccaccaagacgagcctcggataaaaagcttggagaggatgctcctatggaggaaaacaccgacggacagaaagagagagggggcgagcaccaacttgaaggaataaaaaagagggagagaagtgcaactttgaagtatgtctcacaagactctcattcatcaaagttacaacaaggtgctacacatgctcctatccatagaggaggtagcttcctcgagaagcttctttgacaaaactttcttgagaagcttatttgagaaaacctccttgagaagctagagcttacctacacacaccc

SEQ ID NO: 180545 - DNA, 419 bp, Glycine max
  unsure (1)..(419): unsure at all n locations
agctntgcctagaattgaaccataaatcttctattacaaggttttttttaacgatcttcctgggaatgacttcaacaacatatttaagtcccttgacagcttcaaacagaagttgtgtgaagaaatggaaagtgggattggtccatgctacttctttggtgctccaggttctttctatggcaggattttctcaaaccaaagtgtgcattttatccattcctcttatagccttcaatggctatctaagggcgggatatatatatatatatatatatatatatatatatatctatatatatatatatattacgcccatggacatttgtcttttgtaggagagtttaacctattcatattattcatatcgacattcaattacaacacactgaattcgcataagaaaacctgagtctcatgat

SEQ ID NO: 180546 - DNA, 383 bp, Glycine max
  unsure (1)..(383): unsure at all n locations
tttttacccacaggctgncctaactcctaatttacagagacataatataataagagtttctattcaataaatattttaatcaattatatactaatacatcctaaataagcaacagggactgctagctgcaataacgcgggccgatgaagaatggatattgttggatgcctgctacattagaatcgcctatggcgtcgaacgcttatttaatatgaattttataataagccggggaaaaatattaattcataataatataaagcttttctttaaagattacatgtaccacctacaataatttaatacacatgttgcaattatagagaaatacatatccgtatccatacataggggtgaaaataggccaggccacgctttgaaag

SEQ ID NO: 180547 - DNA, 460 bp, Glycine max
catgcaacttattgacacctcaattttgtatatatataggagccactgcatctgaagcatgaactaaaccacgtaaaccccctggtaaactaactacaaggtctttctcatttacttcagcaacaactccccaaagcttcattccaggagttatattctggaatgcatacaagagtgaaaggtttaagcacagcacacgggcaacaggaatctaaactccaaaggtgtatgatatcaataagctaaataaaaaaaatgcaacaattaaagctaaaagcatatcataaagaattaaaaataatatcataaaaaataaaaaacttttaactgttaattgaactcatcgtgacttcatgacatgaatatacaaactcaaccctaaatcatgaaaccaaaaactacctagttctataagctatgcacattaaccccatatacaattgcagttcactagagctat

SEQ ID NO: 180548 - DNA, 452 bp, Glycine max
  unsure (1)..(452): unsure at all n locations
agctngtcatatgcgactgtgaattggtattgttctctatgcaatccatcattgttaactgcctcacaataaatttgttgacatgaaataaaaatgagtaggcatttcactagaaaaacttatgcataagtttatgtggaagcaaagctaccatgatgattcaccaagatgttttgatgatgccaaagctcaaagagttgtttcaagattaaagaatcaagcattcaagattccactcaaagattcaagaatcaaatgaagaaatcaagaagcatcaagccaagtcaaagtaggtagtaaaaagtatttttaaaaaaaaacatcaaatagcacactttttgttttaaaaaggattttctgaaatcttctaagttaccagagtttttactctctggtaatcgattaccatttggttgtaatcgattaccaatgaccaggatggttttcaaact

SEQ ID NO: 180549 - DNA, 483 bp, Glycine max
  unsure (1)..(483): unsure at all n locations
cgaccttaagcaccgcggctgcagctnttttacaatgaatttatagatttttttacagattattntttacaaattcaacatatattgttaatcaaattacactcatttaaaaagatctaaaattctatcaataatgtatgccacttaaatttgctgtattcttaaaaagcaacgtcagattcagacaatttatagaaagaaaaaaaaaactgcacctactcaagtagttcgttgtactccttgggtcggtacactgaaaataactactgaaacaaaatatttaattggaaaatgctaacaagttattaaagaggaatattctaattaaaaagtataattaatatatatttatcataattttcaagtaactttaattcttaataaaaaaattatatttattaattaatgctcttaacacactcataaacaaaaattatattatttgtaatgtatattggttaagaaaaacattattttcatagt

SEQ ID NO: 180550 - DNA, 446 bp, Glycine max
  unsure (1)..(446): unsure at all n locations
tgcaagcttnacagnacattgtagtaatgacccacttatctatatttaaaacaacttaacgccatcaacctagggaattaaaaaaaacttaatggctgagtgtaactgaaattgtggcaaccaaaagtcacccccaacagccaacaagtcacccaccattcggtctcccaaaaggctgatgcctacgatgccaattgggcccttatcacaacttgaactaaacctaactaaagcccttttagtcgattaacccaaaacatattttgggccagccaactatacaaggattgggccatcatttagacagaccaaacactctaaaattgaaacaaaccggcgtcattcaccnctcctccattcgggccatgatacaacctacaaccttggactcttctccttgaaactcgggcttgtattcaaacacatggacagcacttgttgaagag

SEQ ID NO: 180551 - DNA, 425 bp, Glycine max
  unsure (1)..(425): unsure at all n locations
atttcttaagcacaacctttatgtttattatgtacattgtcntactcatagattacaactttctttgcttgctacttcaagaaaagttattatgtttcattttttcaaatttggctctaattgtaattgtgtgttcctccaataaacatcatgatatgttacaagttgttgaattatataaaatcaattgattgttaaagaaaaaaaatcaaattaacactttaaaacaagtttatgatactcgttggagttcacattttcattatatttgtaccatgataaaattgtataatgtaacttgtttggttctccaaaaaattataattgatgtattaacttattttcatacgaaatgttgacattgcttgctttcatttaaggtcatattgattttacgcatgatgaaagagaggacaggaattact

SEQ ID NO: 180552 - DNA, 453 bp, Glycine max
  unsure (1)..(453): unsure at all n locations
caagctnncaatagnaaagcagagatatgaattatttatttaatcccgaaacacctattatgtattaaccctaggaagaaaggacgaccaatgaagacaaaacaaagaagttttaatttggccccaccgcatcttcgacaggtagtaaaagaatagtattccgttaatttttggcctttatcttttcatcaccaaaccaaaatttctcgaccaagcattcacagttccactcctaaacatcaatatgcggttgtgggacgcaacactacaagcctataacctttccattttttcttctaaacttaaaagccgtattaagtgattggaatttctcccggtttttttctctctctaatatcgactataatgaacaaaaagttgaggtcgcattaagtgatcgcaattatacctttcttatttttcaaccaattggaccataatgaataaaagtta

SEQ ID NO: 180553 - DNA, 463 bp, Glycine max
  unsure (1)..(463): unsure at all n locations
caccgcagctgcagcttgaaagtggaactgaangtaatttaaatttcattcatatcatatcttgatctcagattatctaggactccaggttcatgcaggtatgcaagctttgtcatatcatccactccacttggtgggacttctgtatctttatgataaatactggaagctttaacaacaacctgcaaatttcaagacaaacaagagcaatgcaaaaattcacacatcgtaaacattagaaagtttcaaatttgaagttaacttaaaaatgtatttatagtataccaaatacaccaaataaaagtacagacatcgtgcaaaacaagaacaagtattttcaaactttcaataagacacatatctttattatgatatgcttcagaggttcccaccggtcattcatgttcaagaaatcaatgtactcgaagtaaaaccactatgattgaaagaacatgataatgaa

SEQ ID NO: 180554 - DNA, 239 bp, Glycine max
gaaaccccccgggaagccccccacacaccgacaaaccacccccccccgaaaagagacagcggggcacaaacccccccccaacccggagcacggacgattccaccacgaaaagacgcaccagccaccccccccgcccgaagcaagacacgcaaccacgccaacaccccccacagcaaaacaaaccccgcaggccaatcaaccaccaagaccacaaacgacccccccaagcagccacgcac

SEQ ID NO: 180555 - DNA, 439 bp, Glycine max
  unsure (1)..(439): unsure at all n locations
gcttgagccagaatcctgacttatcataaaccttgacccaaggtgagaatgccaatccttatcctcggaagcaaaaaaagaaggagaaggaaaatttccaatcaaagaacaagagaaagaaaatttccaatcaaagaaaaaaaaggggaagcaaagaaattcccaatcaaagagtgggagaaagaaaaaaaggaaagaaaggaaattcccaaccaaagaatgggagaaagtaaaaagagaagaaagttctagatcaaagaaactataacaaatatgcagagaggtctttggaccggacaatatctgaacaatacagaattgtcaccaaatgaaacaaaaaaaggaaggaaaggaaaccacgacctanaatggtcttctccctttgattaccaaccaaaatcctgtgcgtcggtgacttgttcgcctcgcgctaaacaaa

SEQ ID NO: 180556 - DNA, 433 bp, Glycine max
  unsure (1)..(433): unsure at all n locations
agcttgtagaagtgtgattcaacataatctaacattttctataggctctataagaagacaagccaatggaattgcccataaattaaatagtaaaattatttttttttaatctttatagtttctatcttgttacaattaagcaatgagatgagatgaatatgtttcagtaaaaaaaaaaggttgtaaataatgtttaaaatttgtattccaccaaataagaatgtttgaaatttggacctaattaacttataaacctaattaattttaacaaaaataaataagtctatattttggaggaaagaaaattttatttctctaaacaagcataacacagcaataaatctttaaaaaatacgcatgatatttttctaaaactatatttcatcctctttantttttatgagctaaattatgataattttccaaatttatt

SEQ ID NO: 180557 - DNA, 466 bp, Glycine max
  unsure (1)..(466): unsure at all n locations
ctgcagcttaatatggtccttcaatggtgatnttcatccatggagttgcagngaaagacaaaggagaagaggtgagaggagacaccatccactagagaataagccatggaaggagaagcttcaccaccaagaaagtgtcttggataagaaacttagagaggaagcttcaatggaggaagcgaatgagagagagagagagagaaagagagtggcatggaaattgaaatataatagggagagaagttgaactttgaagtatgtctcacaagtttctcattcatcaaagttatgtcaagtgttacacatgtttctatttatagcatggcacatgggaagcttccttgagaagcaaggaaggttgggaagctagaggaagaaagcttccttgagaagctagaggggggctactcatactcctccaatagttaagctcacccccatgccacaatacatgaaaatacaatgg

SEQ ID NO: 180558 - DNA, 358 bp, Glycine max
aaatacctccccctgatattgatcttctaataaccatattcattccccaataagcatcacaaaaaagcttcaaagtataggttcttcctgaggagcagaatttaaagacaacccatagtctatagtaccctttagatacctcaaaatatgcttgacatccttccaatgttcctccacaggttttgacataaactgacagaccttgtttacactgtagctcagttctagcctagttacagtaatgtactgaagtgccccaacaaccgactgatagagagtagcatcagcagcagggactaaaacaagcttagttgtaccatgtttaatcaacttaagatcagaggacagaggagtgagt

SEQ ID NO: 180559 - DNA, 447 bp, Glycine max
  unsure (1)..(447): unsure at all n locations
tctgagtcacctgcggcctgcaagctnggttgacaatggaaatgcaacatgttgttatcttggaaagagacattgagtttcccagattagctctgcctaatcgtagtgtttgaaacatctagttttggcatctgcaaatgaattcacttttcaaatagaaacatttaaaatatgtgtctgcacaaaagaatgataaaatgttgcaagatagtcaaccaacattcttattgtcaattatctgttgggaaatgatctatactatcatggaaaataagatggtgaatggtatacttgttattttatacgactctacatatatctatgctgctctggtgaaccatatcaggaatttgttcccagggattagaacttcagtatccaacacatttactaagagggtaattgttgtgcagatttactaactacaaaaggttcttcatgtgtaag

SEQ ID NO: 180560 - DNA, 456 bp, Glycine max
agcttatccttatggcctacctccgaacttcactctccgtgccaccccggaagagttaagccaagcccctacttttgaggggcaactcccaccttatgaagactatcccgggcaagacgatggggaaggagatacccatcttggccccctgctccacctcaaagatccgtccccgcatgaactaccccaaccgaacatagtccgtcataccccggcctcacccacacccgtaaaagaatctgttccctatgcagacgataagggaaagattgaggcgcttgaagagaggttgagagcagtcgagggcctcggcaattacccattctcggatttagtggatttatgtctcgtgcccaacatcgtcatccctcccaagttcaaagtactggactctgataagtacaaaggtacaacatgtccgaaggggcatcttcggatgtattgccgaaagatggg

SEQ ID NO: 180561 - DNA, 459 bp, Glycine max
agctggttcttggtttaaatatgatttatacatgatttaggacttgtaggatccaatttgagcaaaattggatgtgggtaagatggatttcgaaatctgccaaattgtgcagcaaaaagctgtcaaatttgtgcagcagaatttttcaacatgtgtagaaaatgcttgtgcattgctagttatgggaaaggtattgcatattgggttctggacattttctagcagatcccaacggtcaaaatgtagatttatgtactaggaacctccagtaaaattttcaagttgatccaacagtttactagggtatttcagtaaggaaagctgcaatatgtgaatgtgttttgggcagagtttttctgcctctgccctgttttcttggtttagggtagttcatgatagttggaattgaattgcttggatattgtggaagcttggaagggttgatggggacccggtgct

SEQ ID NO: 180562 - DNA, 465 bp, Glycine max
  unsure (1)..(465): unsure at all n locations
gatccttaagtcaccgcggctgcagctaagtaaatgtaggtcgcttcttttatttttcttattagttnttatgcttgtctcatgaattgacatcaccattagtttatctacaattgttttgttctttaccagaatatgtgcttatgatatttttgtgattatccaggccaacaatgttgacatgtacataaatgggcatgaccattgcctccaacatataagcagcacagataggtaacgaaaaaacaaaaatacattctcccaatcaaactatatatgtggttttataaagtaatttcttctttattataccaatatcaaaatgcagcccacttctatatttaacgagtggagcacgatcaacggcttggagaggtgatgttaaagaaacccacttcgatgtgaaattcttttatgatggtcaaggtttcatgtctgttcaaatgactgagaatgacacacatt

SEQ ID NO: 180563 - DNA, 415 bp, Glycine max
  unsure (1)..(415): unsure at all n locations
gtcacctgccgcatgcaagcttaacaactaaatcgatcagttgttttttcttctttnngnnncnnncacacggacactcatcattgctttcaatttacccgtcaattttaacttttgtcaattaccgattgactcatctccttaaagatggaacttcttgtggctatgtaacaaagatcacattatgtcctctatccgagattaattctgatggttcagtctcctgacatttatctttccaggtgcttaagacattttgtttttgtctattaaatggttaagccatttttattttgctctttcctttctaggggtgttaagctcttttgcttctgcctttagatgataaagttttgtttttttcttatgccatttaggtggataagtccattctttatgcttttgacttatggcg

SEQ ID NO: 180564 - DNA, 449 bp, Glycine max
  unsure (1)..(449): unsure at all n locations
agctngcctgtccgatgcaacagtaatgatggcccgagttatgttggggaacggttacgaacccggaatgggtttatgcaaagacaacggcggcataactagcctgataaatgccaaaggaaatcgtgggaagtatgggttaggctataagcccactcaggcagatataaagagaagcatcgcgggaaggaagagcggtagtcaaagctcgcggttgagacaagaaggtgaaggaagcccgccctgccacataagtagaagctttataagcgcgggtttgggggacgaagttcaagtggtcgcgatatacgaagatgatgttccgagtacattggatttggtacgaccatgcccttctgatttccagctgggaaattggcgagtggaggaacaccccgacatttacgcaacgagcataatgtaaacctttacgggtttaaaagctctat

SEQ ID NO: 180565 - DNA, 454 bp, Glycine max
agctctggatcaacaattgagatcgatgaatggtcaacctgtaaagacttgtaagcatgctccagtttcttgctgatatcgtaatcttgcaaaatgtcaataatcccacaatatataacaacatcgtaggtttccccgctgcaacaaggggtgtattgatcaaaataactcctccgagccatgcgctctgctctcgcaggcatattggctcctaacctaatcaatgatttcctgaaaaatgaagaaatatgtttaagacagagtatatagaagaaattctgaatcgacaaaaatgtagagatagtatgaaaaacatccaagttgaaaaaccaacatggaccagaggaaataataaccaggctaatattaaattaagaacactaaattcttttaaaagagattaggaccacccctcaaacaacttctactatattcccaactactcaaagataat

SEQ ID NO: 180566 - DNA, 454 bp, Glycine max
agcttgttacccaacttaggaaaaatcattaacaagcttgttcgcacatcgttcgcgtgtatgatatctactcgacaaggtttgaagtagagaagaccttcaatcctataacgcaacgtggcggacaaaagtgggcagttaacttgaatgaccattattgtcaatgcggaaggtattctgcgcttcactatccatgttcacatattattgcagcttgtggttacgtgagcatgaactactaccaatatatagatgttgtttacaccaatgagcacatattaaaagcatactccgcacagtggtggcctcttgggaatgaagcggcaattcctccttctgatgaggcatggagactaatccctgacccaactacaatttgtgcgaaaggtcggccaaaatcaacaaggataaggaatgagatggattgggtcgaaccatctgaccaccgacaaaa

SEQ ID NO: 180567 - DNA, 449 bp, Glycine max
  unsure (1)..(449): unsure at all n locations
agcttggatgaatgagataatatctactgtaagcatattgaaatccattatttccactcgaacaaaacattccagttctcagtgacaacctaacaaaaatcttaaatttctgttatacagttgaagttaatatttattataacaattatatcacatatatattggtactttgctattactaattaggcatcgacctaggataaacttcttgacaaatacttgtaggagaagaaaataaaaaaagaagttaaattaacttatgcaccttaacatttttagaagctttcacatctaacttctccaaaagttgaactgcataacttgattttatgttgtgggagaagctctatttattttancctcccccctatttcttctcctataagggctngtagaatgtacaaagtttatataaatnggactattactttgcttattcaataagttta

SEQ ID NO: 180568 - DNA, 370 bp, Glycine max
agctcggtcaagggtatattcctctgctgtaaacctctaaaccagagaaaatggagacacttacatcacatttttgtgttagagtaggaggattgaaagttaattttgggctccatggcttggtcaccatgcttcaattagttgaaacactattggaactttatgtcagtagctccaagctattcatcattacgacgaaatgaaactttaggggaggagtattgacagatactcattagatgttagattagttagtcaaacaaatacaggaatttatgtaacaaagaatggtattgggcctgcaattgattatttcttattctctttccaaattattcaataaaaactagattcatggcattgcaagcta

SEQ ID NO: 180569 - DNA, 401 bp, Glycine max
  unsure (1)..(401): unsure at all n locations
gatcctctaagtcactgcagcctgcaagcttgatcaaaacagttctctaaccattctaattcattctaatcatacaactgctcattcnaatcattctcacactcatttcataccaaacaatcaattgcatatcattcgcaatcaattcactgttcaaacacactttttgtacaagcaaacaactcaaagtgccatggataaaagcttggaggaagaaggagatgaatgaagggagagggagnnaagagcacggaattttgtgctctaagagagctctgaaatctgaagtctaatttttaaatgatcaaagntgaaaaaatgcacacacatggcttctatgtatagcctangtgtcacacaaaattggagggaaatcagaatttctattcaaatttctcttg

SEQ ID NO: 180570 - DNA, 460 bp, Glycine max
agcttgcagaggtcggtggcagactcaagtatattgtaatgtgtagtgcctttgtctcatagctccattacacttcagttgtacctcagcttgcttccctatttttattaattttgttcatgtttatgtgtgagttgaatcttccccgtgaggaccaaaagttaaaaaaaattgtaaatataggaaccaaaataaatgtcttaaactatagggactaaaagaaaaattatcacaactataagaactaaaaaggtagttaaatcaaaataaaacaaactagtgcaaaataatggtggtgtggttagacacttttattcctaaatgtctcgttgtagacatatatacctctacatatgtgtgcattttgcaaccaccaccattagtggaataaaattttaaatgcaaacccttctatggtatataactatatatcctatataggcatcgttagtagtaaata

SEQ ID NO: 180571 - DNA, 454 bp, Glycine max
  unsure (1)..(454): unsure at all n locations
agcttattaaacattctgccccaatcgatgtatttgccgatgggtgaaagatttcattcaagtaaatttagtcataaatcttgtttggacaaacttctccataagctaaagaagaaaataagaagataaaatgtattgagcttctgcaccgtagtttttggggatattaaataaaaagagcttctataaaagttgattttaactcatgtgagaaactaaattcattttaccttttttttccttctcttatagaagcctacggagaagtttattcaaatggggctatagtgtggaaatttatgaactgtggaatctttgcagctagtgctttgaaatgcctctttgttcataataacattacattccagctgcacaaaagtattttttttttaccatgattcttctgtatgctatgttgngtagntgtttcttatatgaaccataatatgtattc

SEQ ID NO: 180572 - DNA, 463 bp, Glycine max
tgcagcttggcaatacaaagcatgaatctgctgctctctatctcttttatgtaaatgcttccttttttttcttttattgtcaaaagatcaattgatcattcactaaaaatgtataacggcacttacacaagcatagttgatgctaatgagagtgctacaatcaagcacgcatgcacactgaatgctaataagatagcaatcttgaaaatacaaaaccaaagaatagaaacatataaaatacacatttccctaatctaaagaaacctagaaagtgccatgagcttttttcttttctttggaattccttttgaacatgcatgcgctccacaatatcatataaattaagacaacttaaatccaatctctaattgttagaccaacaacaatatggaactcaaacttgttcattgaaaacaataaatgtgtcagatagagataaaacagcgggaacttttttaagtga

SEQ ID NO: 180573 - DNA, 453 bp, Glycine max
  unsure (1)..(453): unsure at all n locations
agctttcctttgtgggttgatgaactctgtcgcgcacggnggcatgatcgttggctgacatattctcaattagctcagttgcctcttcaggggtcttcagctttattttcccccctgctaaagcatctaacaattgcatggtttgtggtctcagtccatctataaacatattcaattgaattggcttagagaacacatgggtgggagtctttctccctaaacctctaaacctatccaacgcttcactcaaggactcgtcagggaattgatgaaataaagagatttcagctttgtcgcaacacgcccttttgtgggcgtgcgaggccaggctcacaggtgcgctttccaaaggaggaaagatgcgcggagtcgccaccaacgtttatttgtggaaaacgtcggaaaaaccgaaggaaaccgcgcaaaatgaaaatttaagttcgggagttgatt

SEQ ID NO: 180574 - DNA, 454 bp, Glycine max
agcttagatagaaacattgaacacatgatattaacctcaaatagataataaaaatatttacatcgagtactcagtagaaattcccaagaaaggattttagccctccgttacaagggagcagctttcataaataggagaaggatttcagagaaaataccagattacaaagcagtggggatgtctcctccacctctaagaacctagaaaataactctaaaacctagaatctacctaaaagttaggacctttgcttcctttctcagcttttcctcttttctctgcacacaattcgcagtcaattcagacctctttcacgtcgtcacactctcccctatttttctgcgcaaatcaggcttaaaaagggttttttgatctcgaaggcgcgcttagcaccattctcacgcatagcgcaagtaagtgatatttggcttagcaccaatcttgtgcttagcat

SEQ ID NO: 180575 - DNA, 453 bp, Glycine max
  unsure (1)..(453): unsure at all n locations
agcttcccttctcttcgcttctgcactctttttgtattgtgttgnaatggntatgttaatgttttcttctaacctccccctctttctctctctcttaattactttctccaccttttggtaaataaatttaagggaatttttctttttatgaattcaacgctccacgactaatttaccagctctaatttattagtattcatcatacaattttgtttcactcatttttttcgcaatctattattacaagagtctatcatgaaattaattgtgtcttttagaatgaatttgactaattttaattctccaagtgactgcaactgatggactcatcaggatgttgtgaagctcaatggaggtggggatatttttagaatttgtcacacttgaattagtaaaagcatgagaacatagtaagataattatgggttacgttggtgagttatgatattgata

SEQ ID NO: 180576 - DNA, 282 bp, Glycine max
atgcagggactatacatccaagcacgcaaacaccggacaactgaacacacaacctgaacatacccgggtgcatggatgcagtggcccgcgatgaccggggcaaagacgttattgacaaacaagcggcggagaaggtcaccccagaggttacgcgaaaacaactctggccgcctccaaatgaatcgccacatgacacgacctacagctccaacaatggccaagggacaatgcatggtaccacgacacgcaccccccaatcgctaggtatacacccactgggca

SEQ ID NO: 180577 - DNA, 454 bp, Glycine max
  unsure (1)..(454): unsure at all n locations
agctnttactaaaatgttaagaaagtaaagaacttaaataaaaacttaaccaaaagtaaaagtgataattaaagtgcacagcggaaattaaagagtgtagggaagaagaaaacaaacacaagagttttatactggttcgacaacaacccgtgcctacatccagtccccaagcgacctgcagtccttgagatttcttttcaaccatgtaaaatcctttacaagcaaagatccacaagggatgtaccctccctttttctctttgaacaaccaagtagatgtaccctccacttgaactaatccacaagagatgtaccctctcttgttctcagtcacaacaacccaagtagatgtaccctctacttgtaccacaaaggatgtaccatccaatgtgttaagacaaagttcttaggcggttagtccttcgaaactctgtgaaggggatacaaaagatatc

SEQ ID NO: 180578 - DNA, 398 bp, Glycine max
agcttgccacccagctcgcccttctatcttggttgcttcctccaaaagcaacaaccttctgaaggaatcttctggagggcccaagtgggcctggttgctatttgcacccccatttttactaagtacaccccctgccttttttttggtgattcttttttcgcaaagttatggaaacttacgaatttcgtaacgatacttgctttctttccgtaatgttacggaaccctgcggattacataatcatcccctttttgacttatggaatgttacagaacctcactaattgtgcaacgatgcctccatttgatttccggtgtgtcacggaaccttacggattgtgcatcaatattttcttttgttttccagcatgtcccggaatttacaaattgcctaatgat

SEQ ID NO: 180579 - DNA, 435 bp, Glycine max
agcttcttagttgcagatgatgcatattgtttgtagctacctcatgcactcctctaatgactatggcatcatttctggcgctaaactgctgggagttagaggccatcttctcaattaaatttctggcttcagcaggagtcatgtctccaagggctccaccactggcagcatctatcatacttctctccatattactgagtccttcataaaaatattggagaagaagctgttctgaaatctgatggtgggggcaactggcacatagtttcttaaatctctccaagtactcatacaggctctctccactgagttgtctaacacctgagatatccttcctgatggttgtggtcctcgaagcagggaaaaatttctctaagaatactctcttaaggtcatcccaactcgtgatggaccttggagcaaggtaatacaacc

SEQ ID NO: 180580 - DNA, 284 bp, Glycine max
tcatcgctcctccccaacagtgtattctatggggatcaaacttaggacgcttaaatatgtttttagtctttcaaactcgatacacttttacttttggtcccttaaatagaaacacgctaaaatatatttttggtccccgataaattaacaaattatatgttttctctctgataaattttttctctacattgagtttctaataaaataataattttatttttggtctttcggatcttttctcagtcttgaataaattaacaaatcgtgtttgattctggataatg

SEQ ID NO: 180581 - DNA, 472 bp, Glycine max
tgcatcatattccccgagtcattcatccgtatttgatgtcgatgcagcatcgaagaacagaattgccattccttggattatagggttgaaccaagctaatgctattataaaaaggttcatcaagacgagtggaattatggaagtaaccgcctggcaaaattggggcaaaagatgaatcgagtcacatcaatgcttagtctacttccaaacatatataggattattgatgtccttgataattccagttcctccttgacaaagatgtaatggaccatgttgaaaatataaagtgattcaaccccatatgctgtgtaaataatcccaatacttatactgcacatcattcgcatgcatccatgcttttcattggttgcaattgttaaatgcactctttccttgaaaaacaaaataaaatgaacttaatcattgttttaacaaaggaatgggacacgctttacgacgcccttaccaa

SEQ ID NO: 180582 - DNA, 417 bp, Glycine max
cctaagattggttgtagaattctctaagcatgaaaatgcggacttggatgaagacttggagctggcccttgattggtactctggcccctttgacacgagggaaaagctttacaatggagtgtatatatgggggcctatattaggggcataaaattcctcccctagtatgattaaattgttttcctaaatgcatgtatgatagcatggaatgcccttatgaatgcaaatgtgggcaagaagtcattaactttccggaatgcatatggataaatatgagtgagacaatcaaaatttgtgccgggtacttcaaatgtgttgaaatagtttgggataaccaaatgtttaagatgtaaattatgtgcccagtttgacgcagccctttgcgcatgaaagtgtggtgctcttttttacaatgtt

SEQ ID NO: 180583 - DNA, 614 bp, Glycine max
agcttgataataacttgaaggtttgtatcataaatgaatactgtggaagttatcactaaacacgcttataaatgagggaaagaaaatttcaactcagcgttttgtataattctgctaccataacttattttagcaacatagtttacgagaagataagaaagaaaaggagaaattcaggataagacgagtgacataattataatttatgtaaaaatattaaaacgagttcaaaatgaattggtaaacaatttattattaataatatatcattcatataattactcttattatataatattttccctttatttttttatatatcacatgaataacaatattattttatattttattctttttcttttttttctttttttttataaaaaatactaacaagtatccttaggatattagttactgaattaaaaaaaaaattcttttacattctctcctcttctataattttcacaacaaatataatattttctttcaattctttaccaattttataagaatactaggcaaagaaacccttttcttatttcatttaaaataattatatatatttattgtgtaataaatacaatttctcttacctttaatttaatgaattt

SEQ ID NO: 180584 - DNA, 532 bp, Glycine max
tgacattctaagacgatcatgatgtcaataccgtctttgaaagttgagattttctaagacggtgtcccttcgaccgtcggtaaaagttagacactttcaacgatgttagattcaaagaccggcaaacaccggcattgtttgtctctttccacccgcgttgaaaccgctttttctaccagtgccatcaagtatcaactaataaagaattgaattattccctttaatccttttcataaaaaataagtaattgtgttaaaaaatactactatgttatgacttctttcgtaatgattggaactaatatgcaaggctttaagccttagtttcttgttttttttcctcctaaaagtgatttttgaaagttatccaaacagggcctgagtatgtttctgtgattgcgaatcaattcatgttttatgtttcagaccattaatggaatgttctgtatgcatgcacagagctaagtttatttagttcagaaaagggtatagtgagtccgtgaaagatgatgcttgccatgtccaactacatt

SEQ ID NO: 180585 - DNA, 312 bp, Glycine max
agcttatgctgcaaatatttacaatagacctcctcaacctcagcagcaaaatcaaccacagcagagcaattatgacctttccaacaacagatacaaccctggatggaggaatcaccctaacctcagatggtccagccctcagcaaacacaacagcaacgctgctccttccttccaaaaagctgctggcccaagcagaccatacattccttcaccaatccaacaacagcaacaaccccagaaacaaccaacagtttaggcccctccacaaccttccctcgaagaacttgtgaggcaaatgactatgcagaaca

SEQ ID NO: 180586 - DNA, 613 bp, Glycine max
aatgggatgggaaaaatcatctccttaatcctgactaaaatggttccatgaagaaagcaaacaatacactctttctaacacacattttactatttgttaaaatttattgaaaacaataaaatcgagggagagactctttaaataagaaatgagacccaaaaaaatttgtgatttctaataaatttcaactaatagtagaatgtgtgttcaaaaaagtgtgttgctagcattcctcatggttccacagatacaataatgttacagtttctctcagcaaaaggaacagtctggtgaagaaatgtaaaagtcaacagctaaattcaagggtattttctcttaacaggacatccaagtaacaatagccaaagtactagaataataataagccaactgcttattataagttacattaattcaaaagtcagttgtaataataagtgaaaacttatgtatcttttttgtttctacatgtttcactaaatatgatcatttgagttttgtttatatcacaacttcatggtactcaaaaccaaatgcaatgttgatgaccctcactcatcctttagttaattacttaatgggaagtcttgtgcaaatgaaattatctacatta

SEQ ID NO: 180587 - DNA, 629 bp, Glycine max
agcttgaaggtaaactagatgccttggttaacctggtaacccaactggccatgaataaaaaatctgcacctgtcgccagactctgtggtttatgctcctctaccgatcaccacacagaccttttcccttctatgcaacaatctaaagccattgaacaacctgaagcttatgctgcaaacatctacaacagacctcctcaacctcagcagcaaaatcagccacaacagaataattatgacctctccagcaacatgtacaatcccggatggaggaatcatcccaaccttagatggtcgaatccttcacaacagcagcaacaacaacaacaaccttattttcaaaatgctgctggcccaagcagaccatacgttcctccaccaatccaacagcaacagccccagaaacaacaaacaattgaggcccctccgcaaccttcccttgaagaacttgtgaggcaaatgactatgcaaaacatgcagtttcaacaagagaccagagcctccattcagagcttaactaatcagatgagacagttggctacacaggtaaatcaacaacagtcccagaattctgatagattaccttcttaatctgtccagaatcccaaaaatgggagtgccattacattg

SEQ ID NO: 180588 - DNA, 707 bp, Glycine max
  unsure (1)..(707): unsure at all n locations
ctctagcttcatgatgaatcaagattgattcaaagagttttgatgatcacaaagatgatgacaaaaggctcaaaagtcaagaacacttcatgataacaaagatgatgatctcaagaatcaaagaatgagttcaagattgaatcaagtacacttcaaggatcaagaggaaagttgaattcaataatcaagaatcaagtttcaagattcaagctccaagaatcaagatcaagattcaagactcaagattcaagaatcaagagaagactcaatcaagataagtattaaaaagttttttcaaaaactaagtagcacatgaatttttctcaaaaaccttttatcaaagagtttttactctctagtaatcgataaccaaattattgtaatcaattaccagtagcaaaatttttttcaaaaagctttcaattgaatttacaatgttccaattgatttcaaaatgttgtaatcgattacaatgatttggtaatcgattaccagtatgtttgaacgttagaattcnatttaattgtgaagagtcacatcctttcacaaaatagctttgtgtaatcgattacactgatttgggaatcgattaccagtgatagtttctgaacaaaatcaaaagatgtactctttccatagttttcaaggttttctaaaagtcataacttttccaaatggtttttaagtttttctaaaggttataactc

SEQ ID NO: 180589 - DNA, 616 bp, Glycine max
agcttgagtgccttctgttattaacttgatggctgatgttgaatcagattcacaaactaagtagcgtaacgattagttaatttgttctgccatttgtccattgaccaatagattagtcaatattaatgaatattggattagtggttttggccattagtcaattgacattaaaattgctttaattttattcaattccaacaaaaatattgataaaaactaaaaagaattcattaatatttgagcaaatgtaaaatacattggtcaattattgttttgttagatgcattcatccatcattttatcattcgtacactgtacccaaaaaaattctatgaatcgtcttgctgtgttattcatttgaattcagaccatcctctttagtttcctgttcataccataccttgataaaattagatgttggacccagaagtattattggtgtaatcatttaatttcattctatacatatcatctaaacttgatttaactttcgagttgttaaacaatatcatgtatattgaaaaacatctatttaaagaaatcaacaccttaaacaatcatggctttgaagcatttctactacttggctcatggtgggtctccgatctttatttac

SEQ ID NO: 180590 - DNA, 640 bp, Glycine max
  unsure (1)..(640): unsure at all n locations
ttcaataacccttcccactcacttacaggaagcaatgaatgatgaagggaacaaagttaacttgtcataaaaagtttgtgttctatttaatgtaactatgctaaattttccttatcataattgtcatgatgtagaattgtagttgattcagaggaattttttatttacattttatgcatacaatgcaatttgtcatccatactcctatctattcactgataataataaaaaaatactcctaagtcctatctattcatttaacataaaatttctaaaacgagaattattaggttgccgtttcggcggtttggttggctttattgtgtcgtgcaacacttttgtatgtcccctccttcaatctaagacgccacgacatagatattcaattcagttttcactttaactttgtattatactctcaagtctcaatcttttaaattatttttatttggtgtataatgccagcaacggaatttgaacttaagacctgaaaactacttgaatcctccaccactagtttgccttttcaattatttgatctttatctttcgctttcctcttatttctaatattntttttctttatatttctttaaaaatattccaaatccatttatgtatgatcaatggaacttaataat

SEQ ID NO: 180591 - DNA, 476 bp, Glycine max
agcttatccttatggcttgcctccggactttaccccccatgccaccccgaaagatttaagccaagcccctactttcgaggggcaactcccaccttatgacgactatcccgggcaagacgatgaggaaggagatacccatcttagccccctgctccacctcaaagatccgtccccacatgaactaacccaaccgaacatagtccgccatatcccggcctcacccacacccgtaaaagaatctgttcccttcacggaagataagggaaagattgaggcacttgaagagaggttaagagcagtcgagggccttgacaattacccattctcggatttggcggatttgtgtctcgtgcccaacatcgtcatcgctcccaagttcaaagtaccagactttgataaatacaaagggacgacatgtccaaaagggcatctccggatgtattgccgaaagatgggggcgtattctgcggacgaaa

SEQ ID NO: 180592 - DNA, 526 bp, Glycine max
  unsure (1)..(526): unsure at all n locations
tgaaccataaccggtgagagtgtgatattaaattgtgagtgaactactaactttgaataataagtcttgcctccattctcttaaaattaaaatgaaatgtatgaatgaggacattatgaaaggcctgaatgtatatccagcccattgaccaaaaatcttaccttggattataattgtatcttttgcaccctttgtgagctaaattacacttttcaaattgaaccctgaacttgaataaatatctccaaataccttgtttagattgtaagagagcagatagttcaaggcaaattaccccaaaatttgggggagttgattgggatgtaaagtaaatggtaaaacatcagcacacacaataaataagttgtgtttaaaaaaagagagagagaanaagaaaagaaatcaaagaaaatgtgtgttgttgtaataaggtcaaatgcacattgaagtgaaaagctggtgagaacgctaattggattaaaaagaacatttggataaatctaggatttgtgctctcttagaatct

SEQ ID NO: 180593 - DNA, 394 bp, Glycine max
agcttgatcaaaactcgaaggtgggtatcagatattttttctgcggaagttatcactcaccacgcttatagatgatggaaagaatatttcaactcaccgttgtgtgtaattctgctaccataacttattttatcaacatagtttacgagaagataataaagaaaaggagaaattcaggattaaaccagtgacataattataattgatgtaaaaataataaaaacagttcaaaatgaattggtaaacaatttattattaataatatatcattcatataattactcttattctataatgggttccctttattttgatatatatcacatgaataacacacttattttaaattcaattctttgtctttgattacttttctttgatagaaaatactaac

SEQ ID NO: 180594 - DNA, 276 bp, Glycine max
gatattcttagacgggtcccttcgaccgtcgttaaaaggtaaacactttcaacgaagttagattcaaagaccggcaaacaccgtcattgtttgtctttttccaccgacgttgaaaccgctttttttaccagtgccatcaagtatcaactaataaagaattgaattattccctttaatccttttcataaaaaaaaaactcattgagttaaaaaaatctactatgatatgaccttccttcctaattgattggaactaattatgctaggcctttaagtc

SEQ ID NO: 180595 - DNA, 632 bp, Glycine max
agcttgaatgtccaaagagcaaagtctccaacaaaaatgtagaaaaaattaacattcaattaaaccaaaaaccctaaaaatgtgaaaacacgtcttagaattctgcatagattttagattaatatgcaattttgaatatgtgatatatgtgaaaggaacttttaatcacaccgtaagttataaaacaatattatttagttgaaagttatagaatggtataataattgtcaatgttacactggtgtaatttgatccttccttatatattaaagttttagaactccccttgagtccaacatcttttatgtatgctcagtaagatatataagatcaaagtggacatgcatacatatgtaaaaagcatagttaagaggcgaaattgaataatccaaccaactcatttataaaagcaacataacatatgttacaacatatatattacaacaaagcatataaagatgaaagataagtctaagctcatgatacatcaaaattccaatttctccctcttatgtaatcaacaaatacaggtttgaaagatggaaaatgataaactatcattatcatttatggctgctgaggtggatcttcatttcgtggtgaatttggatgtggatgttaaagttgatcat

SEQ ID NO: 180596 - DNA, 594 bp, Glycine max
  unsure (1)..(594): unsure at all n locations
cgctacattttacatgccaatgaactagcacgacgtcttaaggtatgctaacattttattattttgtatcctatctccttagtcctgagttagatgttactctggtgaaagagtaaattaatagtttttttttttactattatgtggcatgtagttggttattgatagctacaattgatcaaaaaccaattatggatattttacaataaattaatccttgagcccttcggatagatacgattagttttttattgatcgtatccttatcttttctgttttatttttcctaccttgtctcttgaatctgaagtgtaatcagattggttataaaatctctaaccaactctgcctataaatctcaatctttgaaaatttgaatgaatatgaaacaaaattatctttcttcccctanactacagaataaaacaattttttgtctcggtacctgcattgctattttgcaggcacttctagttaaacaaaaaagaaacatttgaaaatgatgacttgaatcgaacttataaaatacttaatttttctctcatttcactttattttttaattttttgttttttcattttatttctttctttc

SEQ ID NO: 180597 - DNA, 427 bp, Glycine max
agcttgcctaattaacctgaagttgagagagaatgattattaaacacacaaaatagatgtatgaagtagctatagtatattctggacaaagcgtacttatcgtactacacaacaaccataaattgggaaagcttgatataatttacacaggtcttatacgcaaaagatgctgcgtatttattgactaacactaagcatatcatggtattctctatacgcgcgctaggcgagtttgtaccgttaaccgcccagcccatttttgtgaggatgaatctactttcactcttgagagaagaactgtttaattatctctcctgtgattcttttgatgctgatggccacgatgaaaaggaaagcaaatcttatggacctcaggaaccatatgacactacgagattcatctttgaggttgcgtgggaacacttca

SEQ ID NO: 180598 - DNA, 548 bp, Glycine max
tgtaatcgattacacacatactgtaatcgattaccagaggagtttttcagaaaacattctcaacagtctcatctttttatctgattcttaaatggccatcaaaggcttatatatatgtgacttgagacacaaatttgaaaagagttttcaagaacaaaaaggtcttatcctcttaaaaagcaaaatagttttatcctcttacaaattccttggccaatacacttgtgattcaataaggaattatttgagtgctcaaaatgttcaatctatctctttcaagagagattacttcttctcttcttctttattctgaaaagggattaagagaccgagggtctcttgttgtgaaaagaattctaaacacaaaggaaggattgtccttgtgtgtttagaacttgttaaaggaatttacaagatagtggaactcccaagcggattgcttggggactggacgtatgcacaaaggtgtggccgaaccagtataaatctgagtatgcactttctcttcccttaaactcctttatttattattgatttatattcatatt

SEQ ID NO: 180599 - DNA, 544 bp, Glycine max
agctttgatacttacagctgatgcaataaccactgtctgcccaacttcaaggccatttattccagcatgtatattgatggaatttgtgcaaaaaacagccaagagccccatatatagtttatacatccatcctgccccataaaacaaagtcaaaatagtgaatctttacagtaattagtaataactcctcaagtatcatttacataaaggtacaccatcaatatggaagctcagaaatgacattatcttcaacaatcatccttttgtcatatcgaggctgttggacaatacaattttcctctcttggtcttggatgagggggtgggaaaaggattttaatgttccttttcaccaatggtcttcatctatggctttggtttttaagtagtgatagtgttgttgggttgggttgaattgtttctgctgggatgttgcataattttatttacttttctgtcccaggagaacctacctcctgtggcttcttgtaatacctctggtactatgtatcttctattctataaaaaacttcgtaccccattgc

SEQ ID NO: 180600 - DNA, 570 bp, Glycine max
tagcaagagcctacgcatcaatggagtccatttgagtctcttatgattcaaaagatggatgccatgcttcacctccatcaagagcactcaactgatgttcaagtaccttaaaaaacatcacaactcagctggagaaataaaaactaggctaacccttagtcacctccttaaccccgatgaagatgaagcttagctatgtttcagtgtttgtttctcttgtctatattgtttgatggtttgttatgttctgttttgttacgtttgtctttgcttgatgaaagttaagtttttttgtaagctttatgattaaaagttgtaatgttccatgattaatgaaatgctatggttttatttcccttcaatttttttgtgttctgatttttgtgtatagttcaaacattttggccttgttaattctaaaaggcggagatgaactagcatatttgctcgcattgcataagcatttgggaataacttgcactagcattagtaaaattatatagtatgatatatgatgatgatgatgataagaaatgattttttcttaagtgtaagaattttaggatgact

SEQ ID NO: 180601 - DNA, 464 bp, Glycine max
agcttccattgttgagtttttgcttcccttttcacacttcatttcactccccacaagtaagtgcactttcccctggttatttggctctcccttgatgtgttttagtgctttagttgctcattttttgcgaaattcgtgaagcaattcacatgtgaatccatgcttgttttcgctaaattaaagggttgtaagggatggccttaagcctatgttgcattctggagtaatggggcatgccacattgcccccattctcttgcacctaggtagcatggaaaatacctttcaatggtatgtatatatgcgaatatatatagcatgaaaatgccttgcaaagtgtgtgaatatatggcataaaaataccttgcaaagtgtgaatgtttacaaaataaatgcatttcaaaaaaaatttgtttttttgtgtgggtcgcaaaaagaccctttaaaaaaaaatccccttttaaa

SEQ ID NO: 180602 - DNA, 316 bp, Glycine max
tcatgacgaatcaagattgattcagagaagttttgatgataacaaaggtgatgacaaaaagctctaaggtcaagaacacttcctgataacaaaaatgatgatctccacaatcaaagaattagttcaagaagttcaagattgaatcaagaacacctttatgtttaaaaagaaattttatttttagaaaccagaatcaagtttctagattctcgaatcaagatcaagatttaagactctcgactcttgattctcgaatcaagagaagactttctctcgataagtttgaaaaagttttttaaaaactgagtaccccatg

SEQ ID NO: 180603 - DNA, 362 bp, Glycine max
agcttgttaaacgattctatgaaccatactttgttttggaccaaattggcaaggttgcatacaaacttctattgcctgaaagatcccgcatttctcctgctttccattgttccttccttaaacccttccaccaatcatctgaagaagattgtgtcccactagcattgccttccaatgatgttgaaaatcaaccagttatctctcttttaaccattctgggcactcattaggcctctgaatctactgatccaaagctaaggtattaattcaatgggcagggttgtctcttgatgacattacatgggaagattgtgaaaaactcaagactgtctatcaccttgaggacaaagtgtttttttgat

SEQ ID NO: 180604 - DNA, 536 bp, Glycine max
tgcatgatttacagaatttgtcttttatatttaatatcttgttttattttataaagaaaataattatttttatcattgtttgatataatatggtctctatttataaatcaagacatctagtttccttattttccaaaataagcaattttagtcctatcagttgaccatccaaagtctaatgttgacttctatgtgacatattggtgctgatatggaacttatgtatgcaaatgacatgacacttatgtgaaaaaaaattaaatgacgtgaataataaaaaaacatcttaatatgaattaaacttgtgaccctttattcatagacaatggaataaactactaatatactcaatttgtctacctaaatatattactattattctctatgtattcaatagtcaagagttatattttttttgcagattatcaaaatctataaattaaaaatatttaatatataaatctttttaatcctataatatataaatttatatgtttctattttgaataatttaccatctaatttttatttttacc

SEQ ID NO: 180605 - DNA, 369 bp, Glycine max
agcttgccgccacggagttttccgactatgctcttgtgtggtggaacaagctacaaaaggagagagcaagaaatgaagagccaatgtgatgtgaatcttacggggcgcggatcgcttgatacaggctgtatagtttttggatgacgccactttcggtgaaggaagataagtcagggtagacgccactttcggtgaaagaagatgactctgggtttatcctacttcctgtgaaggaagataattcccggtttaccccacatggattaccctgataaggcttgaaattggttctacaaaggaacccataaagaaacttctttccaatattatgaaaacgtcccaagtttttttttttttaaatataaaaac

SEQ ID NO: 180606 - DNA, 496 bp, Glycine max
ttggtcctattcaaatagccataacttttgacatgggggtactattgaggcccatgatatatcgagaggctcgaaattgaaaaatggaagttctcgagaaattcaaatggtcataacttttaacttggatgtccgattcacgcacataatatatccagacacacaaaattgaaaaatggaattctcgataaattcaaatgttcataacttttgcctccaatgtcagatttaggcgcataatatatcgagacgctcgaaattaaacaagaaagctctggtccaattcacacggccataacttttgacatgagtgtatgattgatgcccatgatatatagagacgctcgaaattgaataatggaagttctcgagaaattaaaattgtcataacttttcactcggatgtccgattcagacacataatatatcgagacgcttgaaacctaacaaggaagctctggtcccattcagagggccataacttttgacatgggtg

SEQ ID NO: 180607 - DNA, 543 bp, Glycine max
agcttgtgcttgttttattaaaattcctaggatcatgagcaactaggtgtgtcctacaatgacttgcgaaacaaaaggtgatcaaataacaagcagagatttaaaaggtactaggttgcctcctagtagcgcttctttaacgtcttgagctggacgcctgatgacttgtcgatcacggacctagtactttgcttaccttcggctttggacttggtcacctattggtcgaccatgtgtcgtaggcaatactctaacctttttgtggatgagctgaggggctctataggtggcgacggtgcatttattgcctgttgctggccatccccaggctgctgtggtgtttcgccttgcacctgcctgggggcgcagtacttcttgatgaaagctcgattagtaggggacctgatgaccttgccgggggtgataggcactctgtagaaatgacagaggcccgtaatcagagctggaaaccccaggaccctgttggacttctttgggtccactgggtgtcctatgtcacgatggcatgatcttgctgggggg

SEQ ID NO: 180608 - DNA, 555 bp, Glycine max
  unsure (1)..(555): unsure at all n locations
tgtccgggcagttaagcaagaccgaagataatatttgggccatcatcgaccagtacaaggaaaaactaagcctaatagtgactcatgaaccaaagctagaagatgaatacaccaaggtatcagtcttgcaagcggaaaaagaagcaagggaaaaggtgatcaattcattgcacaaaaaagcaatgatgtggatggacaagttcgcctttactttgaatgggaatcaagagcttccccaactgctaaccaaagccaaggcaatggtagatgtgtactcggctcccgaggaagttcacgggctccttaattattgccaacacatgattgatttgatggcccacataattaagaaccgctaaggcaattgtatggttgctttgattttgattaaataaaccctttttgttccctaataaaatgaggttgatttaatcctatgtgtttaaaactctgtgtgaatccaatacttcgacaacttatctttagcatgcattncatgtttgtttttatcgcattactcaccgcattttgttcctctaggaagtacaccataac

SEQ ID NO: 180609 - DNA, 592 bp, Glycine max
  unsure (1)..(592): unsure at all n locations
agcttttctttctcaatcaacctgtctattgactaacaattctaattgcaagttcacattcttgttctttctttgacaaacatacatacttgctcaaacttatgaaaagaaacacaaactccatcacaatcatgcattccatccaaaatcaattcataacaccaattttcacaaaaagataaaaatgttttactacataatcatccaagtcaagttaaactattccatatgcttcaaaacaagcatactagctatccacaaacaaaaacaacagtgtatataaacattaaccaaaataactaagacactgaactgaaatataataattatataaaaaaatatccaaaaagcaaaatcctcaggaatttaaaatccctgagataggtcctgtgtatcctatgtctgagcatcctcctcatctgtcaagtaaagtactggagtagttggaggagaggtgttcagtgtcaggactggtgtggtctggtcctctagtatgtcaagtacaagagtggaagggtcanctgtaggctgtggtgaggagaagtctgctactggagtaggaggctctgatgtgccctcaagtgaatctttt

SEQ ID NO: 180610 - DNA, 827 bp, Glycine max
  unsure (1)..(827): unsure at all n locations
cattcttgtagttntaattnttttttattaagctagggttgaaaattaagtcataaagccggctcaaccccaacaccacaaagtcagccaaaaagttggaaaaacatatgtgcaacagcaacacccttgacgacacaaacggtggcaccaaccatgggaagggtgggtacaaggcccctaacgcccactggngtgcaagggctttgcaatccgggagaattgccctggtgaagggcttaccctggccaatgaacaaatttgtggaaaggggcccggtgaaacccccttggttttgcaaaacttaccaaaaaaaattgttccagccccaccccaaatagggggaatattatttttatttgaaatatccccccaataattggcctctagaaaacacccccccattccacactgggggaaagagaatctaattatataaaacacaaaaaaggggaggggaaccccctttacaaagggaaaaaaaagagaggggggaatttttgggtttctcataaaaacccccttcttcttttttttttgaaacaaaaagtggcaacaaggtggggcctttttttccctcggagacaagccccctttttttgttattattgaccccaccccccccctctttcgcgcgttttgtggtgcctcttccctccacaatattttttcccaaccaaagggccaaaaaaaaaaaactaaagacgcccggagagaaattctctttttttttcaacccacaataaatccacttctatcaatctgttgtttcctctccactttttctccgttcgcttcttcttttatacacatactaaataaaacaaaaa

SEQ ID NO: 180611 - DNA, 629 bp, Glycine max
agcttacggttcgagtcaatcaataaaaaacaagctcatcatgggtgcaagggattcaacattcataaacagtgtaagctcttttggctaagtgactatttcaatcaatcatggcctacatcatttccaaaattcatgcattcattcagtattcagagatttatgcaaaaatcaatacccaatgctagtcattctctcacaattaaggatcacaccactcaccggattgtggctaatgattaccttcacaatttacctgtcaaaccaactaacatttttagtcatgctcctaattcatgttctttatcttctaattaccgcatactcattcaaagcatatgatctaatcattgcaattcactcaattcatgtaattgatcaatccaatttcattcacaaacacacaatttccaaatcaaacaaaccactgcataaatcagactgtaaagtgttcaacaagcttcaaaatttgctaactaaataaactgaatataaaaatgaaattaaaagcataaaataatcataaaaatgtattaaaatcaggaaaagtgcataaaaatcctgtcaaagctcctcccgtgttgcagtaagctcatcctggagtgaagagggagtatcttgggttggat

SEQ ID NO: 180612 - DNA, 576 bp, Glycine max
  unsure (1)..(576): unsure at all n locations
tgaagganaacttgatgccttggtccacctagtaactcagcttgccatgaataaaaaatctacacctgttgcaagagtctggggtctatgttcttctgcagatcaccatacagatctctgtccttcttttgcagcaatctggagtcaatgagcaacatgaagcttatgctgcaaacatttataatagacctcctcagcagcaaaaccaacaatagcagaataattatgacctttcaagcaatagatacaatccaggttggaggaatcatccaaatttgagatggacaagtcctccacaacaacaacagtctgttcctcctttccaagatgctgctggtccaagcaagccatatgttcctcctccaatacagcagcagtcacaataaagacaacaagagactgaggctcctcctcaaccttacttagaagagttaatgaggcaaatgaccatccagaatatgcaaattcagcaagagacaagagcctccatttagagtctgacatatcatatggggcagatggctactcagatgaaccaagctcagtcccaaaattctgacaaattgtcttcacaaa

SEQ ID NO: 180613 - DNA, 393 bp, Glycine max
agcttagcccaagaggggatggaccttttcaggtcttggagaggatcaataataatgcctataggttggacctcccaagagagtatggagtcagcaccacttttaatatttctgatttaattccttttgcaggtggagctgatatagaggaggaggaaccaacaaatttgaggtcaaatcctcttcaagggggaggggatgatgcaatcctccctaggaaagggccagttaccagagccatgagccaaaggctccaaaagattgggctacagttgataaagaaagccttacggtttttaatgaactttagggaaaatttttgaccccttggcccaaggtgggttcaacttttttttgaaaatatagaataagttggtttctttttttgggccc

SEQ ID NO: 180614 - DNA, 631 bp, Glycine max
ttgcttctacacttatcaatctcccaagattgtgacattgttctttccaccttcttctctaattccgccttttcctttttattttccccaatttgttgatgctaaaaattggatccacaaatcaagatacaaaggcttctttgaatcagtttgcaatgtatcatacataggggcatgtgtttgttgaaaagactcttgtccaagatcacaaatcatatcctctaagcaatctcccatttctacatcaaatggttcagattgggaccgcctctgcatgtttgtcaatttaccattctatatccatgttgtataattcttcttaatcttatcacacaacatgccctcgtatgtcgtcgagtatttgctgtctcccattcaaataatttatacaaggacaaaacaattttttgtccccatccgattgacttctttgagaagcaaattgcaagaactgttccacaccttcctcatacacagggctcatgggacttttattcatccaactttgatccatctaaataataactccgtgatactaacaaagttattcaatgcataaaaaatctacttttttattaaaggtgtgggcctattccattcaaaagacatttttaatggtaaatcatatgtc

SEQ ID NO: 180615 - DNA, 324 bp, Glycine max
agctctagaggctgatttgcgcatacatattttgtctgctacgtgacttcccacaaagagttgcacaacaaactgagaactttgattcttacttaaagagcaacagcgctttgtatcctcatttttcctcgtatttatctaaaagctcagttctcttgatgaattgtgtatcagttactgaaccctctgctaagcttgggcttatgacttggcgaccatactgctaaagatgtgattgttatttgactctaacactatattgttatgacatcatgggctatacatgttgctactgtgcatttagtgcctgatgctggccatacc

SEQ ID NO: 180616 - DNA, 794 bp, Glycine max
  unsure (1)..(794): unsure at all n locations
gcttgctgtgcgacgctatatgcaaccggattttgacggcactatgccttcccggtgactcgctgcgctggacattcactggtgaccaaaggctaaaaggtgagaagccgcgcctttccctctggaattcgtcattggaagcagagctcttgcacgtctataatgccctgggatatacacttacaagaatagccttgctggatgcatcaattgagagaaagagaaaggaggcacaacttattagtggagactcagcaggagacataatgnatattggtctgtgaaaggcatcttgcacctttatttaacgtggaacacatgatagacatgtttgcctacgtagcctgagtcccttactgacgtgtactctgataggagtattccaatgacatgcacaatgcatgttatcatatagcctttagatgcctctacaactgtacgtgtgacttttgcgcgctgtcaatgattacgcccgcttgattattccatgcatatggcgcatgcatctttacatatttctttccgaagtttggagcgcgcaagattcaccaacccctctaataggctcctctcagcgctctgctcgaaaacctgaacatacacaaaattctgggtgaccttgaccgagcgcatggcctcgaggaagcggttcccactccttttaactcagtaagccttaccctgaaggagaggctgcttacttgtaaagcccgttaaaaccacaccggtaggaagtccgtctccaagggggaacacaccacccctattaatacctcgntggcccccccccctcc

SEQ ID NO: 180617 - DNA, 185 bp, Glycine max
tttcaactatgtgtcgctaaacatttactgatcttttctcttacatgtaattaacacgacctaagttgcctggtaagatctctaccttatcgactaggactaaacgcctaatgacttggatatctctaacgcaaccctttatttaccttagatttatgactaggacccctataggacaaccctga

SEQ ID NO: 180618 - DNA, 501 bp, Glycine max
  unsure (1)..(501): unsure at all n locations
tgtccgggcagttaagcaagaccgaaaataatattngggccatcatcgaccagtacatggaaaagctaagcctagtttgaatatgagcagagctagacgatgaatacaccaacgtatcaactcttgcgagcgggaaaggaagaaatggaataggtgatcaattcattgctcacagaaacaatgatgtggatggacaggttcccctttactttgaatgggagtcaataacttccccaactgctagccaaagccaatgcaatggtagatgtgtactcggctcccgaggaagttcacgggctccttaattattgccaacacatgattgatttgatggcccacataattaagaaccgctaatgcaattgtatggttgctttgaatttgattaaataaaccctttttgttccctataaaatgaggttgatttaatcctatgtgtttaaaactctgtgtgaatccaatacttcgacaacttatctttagcatgcattcatgttttgt

SEQ ID NO: 180619 - DNA, 194 bp, Glycine max
agcttccgttgttgtatttcgagcgtctagatgagttaggacagcgagtcggacatcctgtgaaaagttgtgaccattctaagctctcgagcgcttccgatgaacaatggccagcgtcatgatcataaatgatgctgaaacagacatccgagagatatgtgctgaccattctaccctgtgcagagctttcgctg

SEQ ID NO: 180620 - DNA, 389 bp, Glycine max
tgaccaggaattatttgtatgggtcgaatgttgaattccggttgttcctggcgcggagatgatggtacagcgggtgaaccataatcggaagattcttttggtgaagtagccatggaaaagcagagcgtttggaatgatttcgtaaatctcagaaggctattgggaaatgctggtataaacacgaatgccaagcagatataaatttgaatgaggaatgtacagggtcgtgtgaagcaacggtcaaattttcctgggttcattagagaacgcgctataaatgttaagagatccgttggggcactttcacattgctggaggtgctataatccctctagcacacaaatgcccatcttgcccctcagtttttcaaactgatgcgcctccaaagc

SEQ ID NO: 180621 - DNA, 804 bp, Glycine max
  unsure (1)..(804): unsure at all n locations
tacaaccagaagtcactctatgctaaattttttgaaagaatattgcccaccatagaagaaaccaaggtccattcagaattggccatgtgggtctccacaaggaatccaagaagaaggaacaacctttttactttaaccccggtttgggtggtatatttggcctttctcgggtggtattggccctttccggtcctgtgtaatgctttcacctacatttcagaggtgcatgaagggcaatttttttctaatattgggggagaaaatggaattcgaaagtttttcatgggatgatttcctttgtttttgggtcatcttttggatgccttgccaatcaaatttgaaaaaagtattgtagaaaatgtgaaaagtctaatttggtgcttaactgggaganatgtcacttcatggttcaagaaggcatagtgctggggcataaaattcagtgaggggaattgatgtgggacaagggagaagattgatgtttattgagaaaacttccccctccaatgaaatgtcaaggcgagtgagaaagttttttaggacacggtcggttcttacagacgtttaataaagatttcttaaaagtagccaaaccactcagtaatatgttgaacaaaaaatgttgcttttgtggttaatgaaaaaagtgtggaagcatttaatgatcttaaagccaaactagtatctgctccgggggattacaccacaaaattggggggcaaaatttgaattgatgggtgaagccaaccaatattttggaagtggtgcgcctcggtataagaaaaggcaaaattttttatgctc

SEQ ID NO: 180622 - DNA, 610 bp, Glycine max
  unsure (1)..(610): unsure at all n locations
tttcttctggttgctcggctagggtttccaagcattagagagaaggagaagggattggagcctcaatttcattgtctccgtgttgaatgcattgctctctctacagacattatttcccaaatctcaacggtgagaatgtgaggaaatgagttctaaaggtggtatccaaatttcatgatgatccaatggttaaaaggtttgggatcatatttttactgagatagatttgagtgtatgcgggaaagaaaagaaggttttgggagaggaaaaaaggaaaacgaatttgagaggaaaaaagagcatagagacgtatcgtaaatattaaaattgacctaatatgtctctatttatagctggactactctcagcctattatttactttatttttctttattttattattttataaaaagaaactctattttactctctcattgaataaataaccaattaanatatctttatattttctaaaacatcattttactctatttgctttctaatgctatgaaaccattattttaattaaaaaaaacccttttccctcaattatngtaattctaaaaactctataaattttagataaatctctatttattttacgaaaaa

SEQ ID NO: 180623 - DNA, 643 bp, Glycine max
agcttggagaggatgcttcaatggaggaaaagaaagagggagagaaagagagaggggggagcacgaaattgaaggaataaaagaggtagagaagtggaactttgaagtatgtctcacaagagtctcattcatcaatgttaccacaagtgttacacatgcttctatttatagactaggtagcttccttgagaagctttcttgagaaaacttccttgagaagcttctttgagaaaacttcctggagaagctagagcttagctacatacacccctctaataactaagctcacctccttgagaagattcctaaagaagctagagcttagctacacacacctctctaatagctaagctcacctccttgagatgagaagctagagcttagctacacaccccctataatagctaagctcacccccattccaaaaatacatgaaaatacaaaaaaaaaagtccctactacaaagactactcaaaatgccctgaaatacaaggctaaaaccctatactactagaatggccaaaattcaatgcccaaaagaaggaaaaacctattctaatatttacaaagaagagtggatccaaccttgacccatggtctcaaaaatctaccctaagttcatgagaacccctaggcgttcttt

SEQ ID NO: 180624 - DNA, 559 bp, Glycine max
  unsure (1)..(559): unsure at all n locations
tgtagcagggttattattatggttaatagttggactacattgtgagatacattgcaagttgtctataacaatagtttttgtaagtataatataatattaatgtgatgatatgaagaataataataatctataaatgaattgcaaattacaaattacaaatctgtattaagtatcaccattaatagctgaatgttgtcttttttgttcttgcaaaatagttttcctacgcttccttcgttcaacatatatgtccatgagtaattgatttctgcaacaactgccttataattgccaaacaataggaaaatcaaatgttgaaattgagttaaataagttgctgtagtaggctgactttaaaatgataccaacattatagttatttgcatttgcttcaccgagtaaagggatatgtatttgcaatagaaaaagcataatagaataaaacaatagaaaaatttgtattcagacgcattaaatntcatactcaatggtttagtgcagcacgaatgaattgctgctctaaaatgttaggtttgcaatcatctgtcatgtgaatatt

SEQ ID NO: 180625 - DNA, 470 bp, Glycine max
agcttcaaaggcttagacaagggagtataagtgttgaagaatatagaaaacaaatggaactactccttttaagagctggacttagggaggaggaaagaacaagcatagctaggttccttagtgggcttaatatggaagtgagggacaaggttgaactccttccatatatggacctagatgagctagtccaactttgtataagagtggagctacaacttaaaagaaagtcttctttaaaatcttaaggctttcactcttatccaaggaaggaccaagcccaaggaattttggaggctgcaccttgaaaacccaaggaagataagggtaagaccatagagaaatccacccctaagactagttcccaagaaaggactagcaacataaaatgtttcaaatgtcttggcagaggtcacattgcctcttaatgccccacaaagaaaaccttgattatgaggggtgaagacatttat

SEQ ID NO: 180626 - DNA, 423 bp, Glycine max
  unsure (1)..(423): unsure at all n locations
tgtggtgcaaaagattacatctatacaaaggaatttttgatggggcagcctccaagactccattaagattccttgggtgaggtgggacatagtctgcctacctaagagtaaaggtgggttagggatcaaagatttgattaaattcaacgaggctttgcttgctaaatgggggtgggagttggcaaataatcagaatcagttgtgggccacaattctattgtgtaaatatggtggttggagggatttgatttctcataggaactgcagtttagactctccttggtggaaagacctcaaggttatcttcaagcagcagcaaagcaacacaatttgtaaaaatagctttatttaggccatangtaaggacggtccatggaatacaaaccaagtacttattggcttgacaacaaaaaaaacactcat

SEQ ID NO: 180627 - DNA, 113 bp, Glycine max
ccaaatccttcagtaggggctcctaaaacctcctttagttttttttggctttccctcctcttcaatggtggttcctcatttttttccccctgggccctcctcaattgcctggg

SEQ ID NO: 180628 - DNA, 584 bp, Glycine max
  unsure (1)..(584): unsure at all n locations
tagctctctcttagtctctccacagctaacaactctcaaaaaactccattctctcagaaatcgtgatgtcgacttaaataggcaatcctgtcggtggacgcgcgcttagcggaagatgagctcgcttagtgccagtcacactcgctcagcctaaagatgaagacgatgcgcttagcgagttggatttcgctcagtgcctctatacagctcatccttcttccagaattgtgcccgtgcttagccatcatatgatgcgctcaacgggcgacacacttagctagatgatgagtggcttaacaagttcatgaaatctgcacttcaccaatcttgcctattttacctgaaattgaagtggaaagatcattaaatacacagaactgggatacgaagtacctattacctaaattatcaaaaagtgattaccatactaccataaacaactatacatgggaggagttgtatacaatttacaacagtgttntacacaaaagctagtcgtattgactgactaacatgccactatatctaccctatgtcaagataaggtcatcatattctataggatatgggtgattttatcaaca

SEQ ID NO: 180629 - DNA, 581 bp, Glycine max
agcttggaggaagaaggagatgaatgaagggagagggagagaagaacacgaaattttgtgctctaagagagctctgaaatttgaagtttaattttcaaatgatcaaagtttaaaaaatgcacacacatgacctttatttatagcctaagtgtcacacaaaattggagggaaatttgaatttatattcaaatttcacttgaatttgtggagccaaaatttcactaattatgattaatgaatttttgctatgggtcagcccactaatccaagatcaagtccaagattaagtgtgcttaggtgtcatcagacatgtaaagcaagaaggacatgcacaaagtgtgactatatgatgtggcaatggagtgtagcaagcaaatgctcacctccctttctaaaatttaattggattgggcttctcccaattctattaaatttatttctcaacacacacatcaaatattcacttaatgcatgtgaaattacaaaagtacccctaatacaaaaactagtctaggtgtcctaaaatacaacggttgaaaaatcctacttttctagggtacccttccttcattatggatccc

SEQ ID NO: 180630 - DNA, 527 bp, Glycine max
  unsure (1)..(527): unsure at all n locations
ttgcagattctcaaaaatgaaattttcaaggacgagaaacatttgaaggatttttcaattgacatattaagtcaaatgactcctattctcgataactcacttttctctcaaaaggaacaaactttcagaaatgataaaatgaggccacatgaatgtctgtatatattttttatttgaaacatagtcaatcaaatgctttttctttttttgtttcgaactttactcgtcattttacgacaccttgaccaaacatgcataacgagtaatttctgattgaacagtcttggaagtcaaacctcangagcgcaggtcgcttgagcaaacaaaccaacaacttacattcacattccagtggaagtcaaataagcaaagatgtaattatgagaggatgagagaaagggatgtcaaatttatccatattattagcattgtaattgtggtttacaataatggcataaacttaaaaaatctaacaagtcattagagacatctaacaacaaccttcaaattgccccatgtatagtgct

SEQ ID NO: 180631 - DNA, 831 bp, Glycine max
ggagatttgtagcatcgtgtcgccccatgtttcatagaatctgcctgcatgcatgctttcttgtgaagacataccttgcgagaagaatttttttattggagagagagacgcagttacccatgagtgtgaggtataaaagatgacatggaaccaaaagataggctgttttgtttagtgagggagtattctgatgcgttgaggagggttgagacttatacacagattccaatagagagcttgtgatgttcaacctatggtcctgtcctaagctttttagttgattcggacatggtataagttgtgatggatgcaggttagctttttaaacgctttacaaaggtgttcacatagcatcccatcttagcatatgagtattgtttttaatgcgacatggttagctaatatctgttcctattgctatgaagcactattttttgttttcttcctatatagcgataaaaattattttctttttcaaatgtttttttaattattaatgcttcttgatttagggaaccttgtaatttatgggaaaacctgttcgccgtgaaagtctaacttcacagattatcctactagaatgaatgaccgctttttaaactcattttcttgtgttatatttaatgttgtccacctcaaccatatttctaatttgttgattgtttatctatctgctcatacatatttctatgtatcttgcgttcttattttcataacgctctcgctattctttttttggtatcctactcactctatcttcgactatatgccttttgataaaatgtttcctttattatactcacctatttctatacccttatcaccgtactt

SEQ ID NO: 180632 - DNA, 294 bp, Glycine max
tttgatactgacttaggcaactcctcaggcagagaaaattttttatgcgccgaagcatacaaaaccctaggcttgaatgactacgcttgagggatccatctggcactttatccaagcgactacaagctacccacacactcacaatgcgcacaatttaattctccagcggagttccacaaaatcatgcgcaaatgccatagaggcatctcaccgaacacttggtgggggcatgtttaatccggatcatcaagccgaaggtggcaaccagacttgccacatgctcataaatctccc

SEQ ID NO: 180633 - DNA, 146 bp, Glycine max
acatttgctattgatttgctttaacctagccagtggtcaaacatgtttgcttatgttaagcggcttatccttgcgtgttgacttcgtgctaatggttaaatgtagcttccctacacatacatccgaatttttttctaaacatattt

SEQ ID NO: 180634 - DNA, 534 bp, Glycine max
tgtgggtatgtgttcatcactacaagatttccacatttgggtttctttccgaatgaaaaaaatggtcgctttacactaaatttgtttgctttcacttcttaccaatctgatgcattcttggattttttttttttttttgctatttcaagtttgcttctcctaatgtgtatgagtggtttcagaattcacggtaaaggaatgtgtaataggtttttatgaagaaaattttttctttttttgggtaataagtcagagatgcttttcaagcttttgctacattgctcgatcagattttgttctgggtaagttaatcttttcatttttctaagtattattatatatttggatattacaatcttactgactttaacatggggaagtcttccttttctgttggtaagttccaacaacatacgtgttccttccatactgcaatttttatgacttccctatcattacataaatattgattgcgcaagaaatatttgctgccctattttccttttccatttatttgtacattgaaataaaata

SEQ ID NO: 180635 - DNA, 220 bp, Glycine max
atatccccaccccacaccatgtttatcatgtttttaattatatgagcttgaatctagtttaacgatgcttgcctttataccttgaatatgtgtgaaatattactcatattcatgggtgcatacatttgtgcttgcacatcaagtatacggttgtattataatgaatatattaagcttgagatatcattattttttatattgatcaacccaatgagatgca

SEQ ID NO: 180636 - DNA, 506 bp, Glycine max
attcaatggttcagatgcagctgcataagtggagtctcatcctgatgatgctcgtgtatatatgctgacccatcctaaataatttgctgtggtaagtggatgctactcttatgaacttgtgttccccctttaatataaggaaaatgcacttttcatgatcattacatgtgctgatttttcaggttgatcttgatccttatggctcaccttcagggtttctggatacatcagatcactctactgctgatggaggtatgctgatgtgtactgcaacaaacatggctgtgctctgtgggggaaatggggaggtctgctattcaaagtaatgtgcatactcttattcacaatcaactttcattttgtttgattggtggactgaacttttaacaactgctattcatactacatatggatcatacccattgagagggaaatcttgcccttcaaatggctttgaggaacaagccggcctgcattgacgtatggtatataacgcagaaactctt

SEQ ID NO: 180637 - DNA, 572 bp, Glycine max
  unsure (1)..(572): unsure at all n locations
agcttgtaatcgattacacaaatcttgtaatcgattaccagaggagaatttcagaaaataatttccaagagtcacatctgttcaaatgattttttaatggccatcaaatgtctatttatatgtgacttggaacacgaatttgcttagagttttttagaacaaaaaggtcttatcctctcaaaagaaaaatcatcttatccacttaaaaattccttggccaatacacttgcaattcaataaggaattattttagtgctcaattgttcaatctatctctttcaagagagatttctttttctcttcatcttatttctgaaaagggattaagagaccgagggtctcttgttgtatagcaatctaaacacaaaagagggtttgtccttgtgtggtttaaaacttgtaaagggcttttgcaagatagtggaactctcaagcgggttgcttggggactggacctangcacaagggtgtggccaaacttgtataaatctgaatttgcaatttttttcccttgaacccttttattggttaatgcttattgcttctattcagaaagtttaaattcgcataat

SEQ ID NO: 180638 - DNA, 512 bp, Glycine max
tacctgctgccaattcagttcccaaggctaacaacaatctcattactattaagtctgcgacgtcttgtaataacaaagtcattgacatttggcatttccatttgggtcatccttcatatgataggatgcaattgttctaacaaacttatcctatgttgacttgtgataaaacctttgtttgcgatacttgccctagagcgtaacagagaaaactttcatttcccaatagtgactcataagcttctagtcctttcaattttatacatgtagatatttggggtccttgtgccacaactgctttgaatggacataagtattttcttacaattatggatgatcatactaaaatggattggatttttataatgacttcaaaagttgagactcaaactcatttacaagcctttgttgcctatgttgagaggcaatttaatacaaaaatgaaagctattcgatcagataatggtgctaagtttatcatgaaacacgtttatcataatactggtatcata

SEQ ID NO: 180639 - DNA, 521 bp, Glycine max
agcttttatatgtgtgcaagtaataaaagttcttctagtgtagccgtggatgtaggtacatacattgtatgttgaaccacgttaaactttgtgtcttttctctcttccctttatttctttctcttcttttattgctctatactaacactgtaatcttaatgcaattcgtttaggctaagttcgacgaggaatcctagaatgaagtttaaatataattagtccattcaagcgaggaatcggtgtttggggtatttgctctcagcatagaacacagaaacaaccttaaatagagaaaaacacataattacatcaagttgttcagtagaacgacccaacgttttaatcatttgtttatctctcactattagatagcaattttgtagttatttttagaattaaaaaaattatcttttgttatattttctggttccatacaaatggctgcttattgaacgaacacttttcttaatgaaacaaactccctgtgattcgatactcgattcttatcattttatattact

SEQ ID NO: 180640 - DNA, 595 bp, Glycine max
  unsure (1)..(595): unsure at all n locations
tatataattttttatttaagaaaatattagactatttttgttttcattaaaaaagataatttgaatccaccactgagcgggaccctttcaatttgtataattgattaattgtttgtagagaaaaaaaaacaataatgataaaaatatatcgtttaatgtattcgatgcagcttgcttctgtacttcgtggtgatctgtattttgtccagagatgatccattatatcataatctatatttgtttttaagatacttgtttttttatttatttgatatcagtgtaattatcacattaagcttagtacctaaaatagtcctacaagttttaattttttagacctattataaaattaatctttaatcaaaacttaatgacatttaaagtttattactccttctcaataatatattctgtaaagaattaaattcagatttttttttactatatgcattatcaattaaattacattcattaaataacacggtatttgttttaatgcggcccanatagaataagtgatcgagtggaaatagaaaaacaaaagcattgatttttagtcacttttactgagaaaacgttttgaaacagttgtcat

SEQ ID NO: 180641 - DNA, 536 bp, Glycine max
agcttgagaaaagaaaaaaacagagatgaacgatagagagagagagagagagagagagacctatgagtgagaggaagaaaagattgtaatggacagaaagaaaaacatatttttcgatggaggtggtagctcgtcacgtcaaggtgtgttgagagggagagagagatacagagagtgagcattgtgaggtacaatgttttgtacagagtgaggaattttaattcctttgtttttgctaagaatttgaaattctgtcaagttagtatattaaaatgctttacaaaaatgataacatagcatccaaacatagcataagagtattgcttctaatgtgaagttgtcaactaagatctctccataagctaagaaggcaatattacttgtaagctacacatatagtgatagagataaatcactttcaagtagattttttaattctaatgctattgaataggggacgatgaaaaaagggaaaattgttgcaggaaaaaatttaatttcaagaaaattccacaagatagatgacggatttgaaa

SEQ ID NO: 180642 - DNA, 560 bp, Glycine max
  unsure (1)..(560): unsure at all n locations
ttgaattctagtaaaaaaaactcctcaaacatattataatactcatgcatcttttacattcaaaaccagaaacttggattcctaggcatgagtcatccttttggcactttagtctagcttctacaaactacccacacactcacaatgcgcacaatttatttcgcaagctaagttccacaaaatcatgcgcaaatgccattgaggcatttcaccgaacacttggtgggcgcatgtttaagcatgaaaatcaagggaatgggggcaatgtggcatgccccattatctcagaacgcaccctaggcctaaggccatcccctacaacccctcaattcaacaaaaacaagcaataattcaaggataaatccctcacgttttgagcaaatacatgcaacttagagcaccaaaatatatcaatggaaagccaaagagcccaagaatgaggtacttactttntggagatgaataatagagcaaaatggaatcaaaaacgtgaaaaatgatgacctatgggctgcaaaattggtgattcccgtagccttctttttgaatgaagggggggg

SEQ ID NO: 180643 - DNA, 603 bp, Glycine max
agctttgggggcatatgtactttaagtgagagataatatataaaaaaattggaataataattaatattacgagtaaataacatatacaaagatgattaatttttacataatcaatcacatattatcatataatgtaaattgattgatagtaataataaaaatataaaattcatattaattatgatttaagttctaaacattatagatgatatgataaaaaaaatgtgtataaaaatgagaaattaagcaataatgagagaaaataaaattgaataatgaaagagagaaagagtgtgaccgtcacagcttccaatagattggtgttgtcgtgcaagtacttgaggacccatgttagaacacttgctgtggtgtcatgtgcagcaaagatgacaccaatgagattatcaacaacttgagaatctgtgtgctgctgatagtacatcttgttcttctcacctcgagcttgcaatagaactcccaatagccccccaccataatttaacagattatagactcttataattacatttcaacagaaaaacccaagtcagtgtgaccatcaacaaatgttacatattatatataaccagtgctggataaaaa

SEQ ID NO: 180644 - DNA, 624 bp, Glycine max
  unsure (1)..(624): unsure at all n locations
ttccctacactttattgagaaccaaaaggagcataaagaaaacaacacataaaaccaaattaaactgcatgtccaaatccagtaactagctagctagtatatatggaatgcaatattaataattaacttgtattgaagcaactaattaaactccttaccaataatgaagagagcagctttccaagaaccagttgaagctctgagtggaaccctgcctttgtggtccactgaagaatcaagaacccatttcacctcatcaccctcttctggtttcacttcaagactaaccttcttctccatcttgcagtgttgcttcagtattgctactttaattctactgcaagtagagaagactaacccttctagccttgcttcttgctagtgtctatctatttacacgcaccaacctttaacctcangacctctctttatagaggaggatttgctntctttctttatttctttttttgaaaacttattccttttttcttttctgttggtgacataataaagatatcttttaagttttaattatatcattcttgattttcttttcaccataatttcttagactcatatatttataaatcactttctcttttttttccttctaaattttctctt

SEQ ID NO: 180645 - DNA, 493 bp, Glycine max
gcaagcttctatataagctgaaccattttatcaatattcacaagttgagttttattcagaaaattagagtttctctcttttatcttagtgagagtgattctcctaaattcttgagtgattcaagaacaccctggctgtatcaaaggactttcacaacctttgtgtgttgccctcgctggaaagagtgattctttcctgatacgaaatcagagtgcggtaacggaagcaaacaaccaataacgaaggtactaggtaccacccttattagtcgaattcttttaagtatttttggtatttgtgtgtttgggtttttacgaaaatcagcaaggaaaaataagcaatattaaactacaccaatagcttaatacgagattagcactcaccaccaattgagctaatcggactattttcaagacgacgcttgcaaataatcgggcgaaaatgtaaacccaatttctatttggactgaattgttcttgtttattgaataatc

SEQ ID NO: 180646 - DNA, 606 bp, Glycine max
cttctggtgggacatcttgacttgctttccaatctgacattcatcacaaattctgccttcttctattttcagattgggaatgcctctaacagcacttttgtcaaggattttcttcatgcctcttaagtgcagatgtcccaacctttgatgccatattctgacttcatcttctttggaggataaacatgtggaggagtacctggtttcttggggtgtccataggtaacaattgtcctttgatctgctgccctctattagaacttcactcttctcatttgtcaccaagcattctgactttgtgaaagttacattgaatccttcatcaaacagctgactgatgctgatcaagtttgcagtcagtcccttcaccagcaatactttgttcagactaggaagtccatcatgaactacctttcccattccaatgaactttcctttagagccatctccaaatgtcacataactagtggagcccggctcaatgttcaccaggaattctttgactcctgtatgtggtgggaacaaccgctatctaagtacccatcttccttaactgatgctctaatggaggatgaacaacaagaatgaagtcttgtgtttaggaac

SEQ ID NO: 180647 - DNA, 566 bp, Glycine max
cctgcctgcttataagaacaaaattgccggaatcattttcaaatatgcatgtgaattaagacgcatcaacaagaatcaagccgaggctattgtgcaagcaatcaatggggcaaaacacaccaaatgattataatgatggatggctcaaattctcacaaaggtaaaatcatcactttcaaattgagctttcaaaactatcatgacatgtagagaagaattaacgatttcaagtcacaaaatgtcaagaacttttattttcaaaacaattacccatttcttgaacatatcctataattcaaagaaaaacatgcaaagtcgtacgtgcacacaaaattgacccaaaatattaaactgaaaatccgacgaaactaacaacattaacaaattaacacaactaacaaattaacaaagccaacaaaactatcaaaaccacagaacactcccccccatacttaacaacacattgtccttaatgttgcccaattaaaagattaaaacaatttaatcatcaaagagaatccgaccagtgtaataaagccaagagggaaaaggaaaataaaacttcc

SEQ ID NO: 180648 - DNA, 605 bp, Glycine max
  unsure (1)..(605): unsure at all n locations
tattctttatctagagtagttgagcacaacaacttactactgacatatattcgactttagtagtggacaatgtagttgagccttgcatcttgcatattcatgttactaagttagcaccgataaagtaatagcttccactagtgctttttctttcaactttatcaccaacatagtcaacatcataatagcttgtaagtctgaaactttctcttcttttgaacataagaccaagattagaagttccaattaaatatctacaaatatgtttaattttagttaggtgaacttccctttgttctttttgaaatcttgcacatagataaacattgaacataatatcagaaatggatgcagtgagatagaccagtgagttgcatccactttttttgatccttgtccaatccaaggtatgtcatggtgtgcattggagtcttcatttcttttcatcgcccatgttgaatttcttcagcaattctttcacatacttagtttgatgaatgtagatgcatttggctttttggtttatttgtaatccaagaaagaatntcatctctcccatcatgctcatttcaattttgtctgcataagcatagaaaaatcttcat

SEQ ID NO: 180649 - DNA, 529 bp, Glycine max
agcttgacagtgtttgatgcatcagggaacaatttcactttagaagtgggtcctaattggattcctaattttcaacttacctatttggatgtgacatcatggcagataggtcccaactttccgtcgtggattcagtcacaaaacaaacttcaatatgttggactgtctaacacggggattttagattttattcccacttggttctgggaagcacattctcaggttttgtatttaaacctctctcataatcatatccgtggtgagcttgtgactacaataaaaaatccaatatctatccaaactgttgatctaagcacaaatcatttatgtggtaaattaccctatctttcaaatgctgtgtataggttagacctttcaaccaattcattctctggatccatgcaagattttttatgtaacaatcaggacaaaccaatgcaattagaaattctcaatcttgcatcaaataatctatcacgagaaatacctgattgttggatgaattggccatttctagtggaagtgaatt

SEQ ID NO: 180650 - DNA, 439 bp, Glycine max
tcctcatcgaagagattattataattgttatcatagttgtaatcatagtcatactcgaaagcaaaaagtgaagtgtggaagtgaagctgaagaagatgggaagtgacgttgtggcagaggactccataccagtggcaacagttggtatgattatgattccaagaccaaagcctattggaaggatctatgagattattcttaaacttcaaaagtgtctcacgctcacttgggatgcacacactctctctgcatggtaagctcaacaaccaaaggtggagaaagacaagaatataaatggaggaattcatgatcacacaagaatatatagaaaacaagtgtagttgttggttctgcatataaatcatcaaacttctattatttatactgctgccctgcctgtttttttttcttcactttcattattttttaccttttttat

SEQ ID NO: 180651 - DNA, 509 bp, Glycine max
agcttccatcaagtggtaatcagagcacaagagcttcaagtaggtgctccttaaacctccattaattttttgctttaccttctcttccattgatttttcttcatttttctccatgtatctcctcacatgtcttgttctaaatgttgttaacatgattctttagagtttgcaccgattaaacttgctatagaagttagatttgattttctatggttcaaatttcttgttcttgatcttgaaccatgaattgtgttgagtttaggttcctttgagttttgtcttgttattttttgtggctgaaacctaaaccataaaattcttacaaaaatattaaagtagaagaaaacctcaaaaatctacagtgacttgttcacctattgtagttttgtcatagaagtcatgtctagtcatgaaacttgtcacataagatttcttatgttgcgctgaattatattttcctgactctttgactaactcaattggtcatgagtgtatgaaattcttttagc

SEQ ID NO: 180652 - DNA, 474 bp, Glycine max
tgctctaaatttacattgatgtttgtatttattggaggaggttgtatgccatttttgttttaagggtagcatttcttggtaaaactaactttccaaatgtttgccttcataggaatggccccgacgaagcttgcctcaaagaggtccaggaaggacaaggcggccaaagggactagctccgctcctgagtatgagagtcaccgctttaggagcgctgtacaccagctgcgcttcaagccatcaagggatggtcgtttctccgggagcgacgcgtccagctcaaggacgacgagtatactgatttccaggaggaaataaggcgccggcggtggacatcactggttactcccatggccaagttcgatccacaaatagtccttgaattttatgccaatgcttggccaacagaggagggcgtgcgtgacatgagatcctgcgtaaggcgtcagtggatcccgtttgatgccgacgcta

SEQ ID NO: 180653 - DNA, 548 bp, Glycine max
agcttgtagaactccccaaaagaaaatcagctattggagctaagtgggtgttcagaaacaagttggacgaaataggtaaagttgtgaggaacaaggctaggcttgtagccaaaggaaactcacatcaggaaggtataaattatactgagacctttgcttttgttgctcgtttagaggcaatacggattctactatcctttgtttcccattatggtatgatgttgtatcaaatggacgtataaagcgcattcctcaatgctattattaaggaagaattctatgtggaacaaccccctgggttttagagttctatttaccctcatcatgttttcaaacttaataaagctttgtatggtttaaagcaagctcattgagcttggtatgaaaagttaagttccttcttaactgaaaatggttttataaaacggaacgttaacactatttttttttgcaaagattatataaatccattcctaattgtccagatatatgacgatgatatattatttactgcttctaatgactttttgtgtgaggactctttcaaa

SEQ ID NO: 180654 - DNA, 653 bp, Glycine max
ttggggctgaaaaaaactatataacagcaccaaggttctagtttatgggactccctctctccctggcgggagactctctctctctctcctctctctcttctatttttcgtttttaattatagtccctcttctctttctcttttattttccgttttttacaattccagttcagacttttagttttatcaataaaatttcattctctatttgattaatggaaggctaagtccgcaacgttgttttcccttgaggatcaagcacagttctttttgaggttctattattactgttaaattctgtttagttgttcctcttcactaattactttgaatttgttgcttttaattcatgcatgcttaatgcttgattaattgactctgcgcttaatttacgttcatgcttaatgatcgcttatgagtaataggcgtatgtgatgctcaatcacataatgaatgccctatgttgaatttcgcttaataatttaatttacggttggattaaatggttaaactgataaaagataaactctcgtaacctaggataagagacttgcttgtgaatcaggggaagcaacggggttaatcttgatatttctaaatcacatatatttgtgttaacttacaaagcaaacaacccccccccatcgtactgtt

SEQ ID NO: 180655 - DNA, 544 bp, Glycine max
agcttgccacccagctcgcccaggcgagcagggttgcttcctccagaagcaacaaccttttggaggaatcttctggagggcccaagtgggcctggttgctatttgcacccccacctttactaaatacacccccttgcccttttttggagattctttttttgtaaagatacgaaaacttacggatttcgcaatgatactagttttctttccgtaatggtctacggaaccttgcgaattacataatcatccccttttttgacttatggaatgttacggaaccttactaattgtgcaacgatgcttcattttgatttctggtgtttcacggaaccttacggattgtgcatcaataccttcttttgatttccggcatgtcctggaacttcacaaattgcctaatgatgggtgccaagcacctcacaaggatcaaacaaaagttgcttgcccccaagcaaaggtccccggacgaaattatggtatgacaataatgaacattatattcctggatttgtccggtattacattcccatttcgcatgaatcat

SEQ ID NO: 180656 - DNA, 546 bp, Glycine max
tccatcatgtggtcatcagagcacaagagcttcaagtacgtgtttcttaaacctccattaaattgtttgctataccttctcttccattgttgtttcttcatttttctacatgtatctgctcacatgtcttgtgctaaatggtgctaacatgattctttagattttccaccgattaaacttgctatagaagctagatttgattttctatggttcaaatctcttgatcttgttcttgaaccatgaattatgttgagtatacgttcctttgagatttgtcttgttattttttttggctgaaacctaaaccataaaattcttacaacaatattaaattacaagaaaacctcaaaaatctagagtgacttgttcacctattgtagatttgtcatataagtcatgtctagtcatgaaacttgtcacataagatttcttatgtcctgctgaattttattttcttgcttctttggctaactcatttgttcatgagtgtatgacattattctcacctattatttgatttgagtcaaatcttgcatgttaattaac

SEQ ID NO: 180657 - DNA, 580 bp, Glycine max
agcttgtctcagcgtttatgcgagacagagaccaacatgctttctatcatcgccaagtaccaagaagagttaggtctagccggggcccacaagcataagattgcggacgaatatgcccaagtatacgcggaaaaagaggctagaggaagggtgatcgactctttacaccaagaggcaaccatgtggatggaccggtttgctcttaccttgaacgggagtcaagaacttccccgcttattagccaaggccaaggcgatggcagacacctactccacccccgaagagattcatgggcttctcggctattgtcagcatatgatagacttgatggcccacataattagaaatcgttaggaaacttgtatggtctctcagaccttgactagatatgacttctttttttgaaataaaatgagtaggtcccatgtttctactccaaaaagcttgtgcaaataaaatcactcctacatttaatctctagcatgccttatctatcttttacccactcctaacgtttgggtttttagggaaaaacacccatactaaacccgccgcaggggaacccctatcgcaccagatc

SEQ ID NO: 180658 - DNA, 705 bp, Glycine max
  unsure (1)..(705): unsure at all n locations
cctctatttaccgaccttaaatctcagctttttacctaatttttgtcaaatgaaatttaattaaccataatgaattcccctattctaaaaggaagaactgaaatcccctccgtaaaggaagaactgaaatcccctctaaatctgaaaggttggaataatggaacccaacaacccacaattgttcattttaaaaagatggaaaccatgatgtatgactattagaaattttagtttactcatttctttcaggaactttggaaaggtgtactaattagtttgaaggtttaaaatcacaacctcagcttgagttggttgcatgtangaccaacatgttgtggaaatttcatctgcaaaagaaactaatatggtgtcaatactcaatagtaggaagagcaacaaatgatagatcatangaactttgtttttagttattaccatcttcactttgtaagtaaattgtctatactttagagaaagatatgactaaacagttgatatagacaatgttccagcaaggattttgtggggtttggttcaacattccctcaaaaaatatttgacaatatttggaccatcatgccttgctgtttttctctaagcccttcattcaggttattttgggctgtgtcaatcctaagtctttttcttcattcaacttgtccttgggtgcttcaataattgggaaatctcttacattgctctcag

SEQ ID NO: 180659 - DNA, 697 bp, Glycine max
agcttatgcgcctatttccttacaaacgttctcttgcacaagacatttaaccgaaaaatgcacccatatacaatcaaggcagcttcgttacctagattatttacacgtacctccaaggtgtatttgttacttacatcacacacatctccttggctaaactcacatacatgcatactcaagcattttggggcaccaaaaattgcacatgtgcacatcttggcatttctaatacctacatacgcaaacttcatgatgaatcttgactatctacacaataaggtgctacatttcatgctcttttttttttcaagttttcgctacctaaagccgcatgcaaattcaagcatattttcctttgctgactaaaattgcattcaaatttaaaaggtatattttttgtaatatgttttcttcacataacatgcaacatatttatatatatttttttgggagacatttttgactaccaaaaattatatatacatacattcaagtattttgctattcatacccaaagtgccaattgccaaaggtatcttgctacctattctaaacctacacattcatgacgagcacattttctaaacaactaggcgtagggaaaaaaatatattggggcccatacctgattgctgcccaaaaagggttaccttaccaaaatgcccctccttttgtatctttttgcataaaatttaat

SEQ ID NO: 180660 - DNA, 502 bp, Glycine max
  unsure (1)..(502): unsure at all n locations
ttataagtgcgggtctgggagacgaaagtcaagtggtcgcgatatgtgaagatgatgttccaagtaccttggatttggtccgaccatgccctcctgatttccagctgggaaaatggcgggtggaagaacgccccggcatttacgcaacaagcataatgtaaacctttacggttttaaaagctctataattgggcctaggctttagagttttcattttgttaaggctttgtgtcttttgtctttgaatttataatacaaggatctttcttcatttgttcctggtctctacccattctcattcatttgcatgtttacttctttttctgaaacggcagattcgatgacgagtcccccgaaggtactaatacctgngacccgtctatcaacttcgagcaagaaatgaaccaaacggaagatgaaggagatgaggaggtgggacttccttcagaactagaaagaatggttgcccatgaggaccaagaaatggggcctcatcaagaag

SEQ ID NO: 180661 - DNA, 600 bp, Glycine max
catgctagcttaggttatatgaggagcgacattctttttttccccttcttactatgaaaaacggatcatttttcatgcccatacggctcataagtgatcacaattcaagtaaacagaaccccttgattctctcttatgacttaactacgtaggtctgatttcctctcgcacagtgtaggactacgtacgtatactgaagccccgcttttgtcgactcatcaatagtaagaataaatccaaggaactgtcctacatttgggacaaatctaaattagtacgctgctgtcctttgaatacaatacgtgataggcgctaatcccttactcagtcgtaagtgcaactccagacctgataattttcattatgagcggcttccttcaggttatccggcggagtgcacaaataaaacgttgtaggcgactccatgcatcatttcttgctttgaaaagcacgcccgtgagcctcgcctcgctcgcccgcaaaagggctcgcttgcgacactaggaatctaaattggccttggcattttacgggcccatggcaatattcctataagacacccctaaattttaatattcctcaccaacagtatgtcttgcc

SEQ ID NO: 180662 - DNA, 388 bp, Glycine max
tcagagtatgctccacttggcctggctgaacatattgttggtatgccctaacgagtttaaagtgaaaatgaattattttatatatatgccaaattttctcatgaccttattttatataaaagctgtgtatgtgcttgtaccctccggttgtattccaacatatcatattgcattttcatttttaagcttcttcctgctatcgtatcgtatttaaagttgagagattgtgtattctcttgatgaagtatggacacaaaccattaaagtcattggccgaccgaccatttactctgttgttaatcaacttcgtgccacaacctataggagttcaatctcattcaaaccaataacatgtcatcataataacctcctacgggagccatttata

SEQ ID NO: 180663 - DNA, 589 bp, Glycine max
agcttgaagacaagactatacgaggtatcttccttgggtatagcaatatctctaagggctaccgtgtctacaacttgcaaactaagaaactcgtcatcagtcgagatgttgaagttgatgaatatgcttcatggaattgggatgaaaaaaaagtggagaagaacgttcttatacccgcttaactacctcaagaagaatatgaggaagaagatctaggtgaaccaccttcacctacatcacaacaacaagatcaagaactatcatcaccagagtctactccaaaacgagtaagatctttggtggacatatatgaaacttgtaacttggccatacttgaacctggaagctttgaagaagcgtcaaagcacgaagtatgggtcaaggcaatggaagaagagatacagatgatcgagaaaagcaacacatgggagttagtaaatcgtccccatggaaaagatatcattggggttaagtgggtctataagacaaaagctaaaccctgatggcaccatacagaaacaccaagcgaggcttgtagctaaaggtttctcatagcaacccggaattgactacaatgagacatttgccc

SEQ ID NO: 180664 - DNA, 705 bp, Glycine max
  unsure (1)..(705): unsure at all n locations
tctatataagctgaaccattttatcaatacacacaagttgagttttattcacaaaattagagtttatctcttttatcttagtgagagtgattctcctaaattcttgagtgattcaagaacaccttggctgtatcaaaggactttcacaacctttgtgtgtagccctcgctggaaagagtgattctttccttcctttcatcatcacccttgttctttcaaaccacaattccagaaaatccacctctgcccagaattatctcgtggccataacttccattttacgcactcaaattaagtgattcttgagcctaaattgaatttcaaaacgagacctttcacctcgttttggaatcacctcatttggagccctgtagcttcagttattgccatttctatatttctgtccagccaccacttaacctacgttttaccatcccattcatccattttatgccaagaaccaccttattaagacccacganattagccaccttattttccattctttccttaatcaatntccgcattttccatcaaggtttaatcctagacgatcctaagtcagcccttgtgccatgtgggttcatatcatttggtatcagagctccggtctaggatcaacattcctttgctgggatattggtaacatccttcttattctctttgcatttatataccctcttatcatatatattttttaggctg

SEQ ID NO: 180665 - DNA, 468 bp, Glycine max
agcttctctcttttcttgtttaattattatattttgtttttaagtcttgtattttgctatgtttttatggcatttgaacacttagtatttctttttaatatttgttgagtatgactgaacatgataattatatttacttgcttttggttgtttatggttatgaattttaaacttaattattttgataatatatgatcagtggtatgtttgatcaaatattaattatgttatttgataatgtggttttttttatatatttgatctatttatggttcttgctatgatttggtttatatttttccatgaatgattgtatggatgcttaagttatatttgtatgtttttaatttgttacgcactttggcattttgttgatgcccaagggggagaaaaatatggattaaatcaacaactcacacgagtaatcaacttactttttagagaagcattaattcaaaaacaaagggg

SEQ ID NO: 180666 - DNA, 525 bp, Glycine max
tggtgcatatgatttatatgatctcacttacagggggcttgttataaacttgaattgtcatgaaccaactcttgtcaaagaattaactgttaggctgttaagtgaagacacacatggctttatgttatatatctaacaataatgaatctattaatatagcttacaagttcattatgcatacaattttaggtccaagtcattgcatatattttcatgaacgaaatcaggacctgcatattcattattagattcatatataaatttttgtccgtacttccatagtgtccattgacacatttttagcatatgattctcttttctatctttttctccacaacaatgagcccaaggagcagagttttcttatgagcatcaatcaagaacgttcaattatttatattacatgatagacaaactaaatttagtttattaatattgaacacttttttggataatagaaataattttaatactttaaccaggtcatttttatttgtcttagaataggcattatgtgcactttct

SEQ ID NO: 180667 - DNA, 473 bp, Glycine max
agctttcaattcattctatacacccttaggggttcattctcgctttgtacattttcatcttcatctcgtctacttttggtattctttttcttcattttaaatgagtttcgaccgatcgtttaagccgtaacttcacttaatcaatgtgaaaatgaatttcaaccaattgtttgcgtcgtaatctcatataataacatttaaaataaaattcaaccgatcgtatatgttgtaacctcggttaatcatcaaaagggaaagtcttaaccaaatatttactttgaaagttctctctaattgagttaagaaataaccaattgagactaacgcttacatcaactcacatatcaagcttttgcccgtaaaaaggtcatttgaaactgtttgaatgtccaacgccttgacggtcccccacttactttgatccatttaagtatacatttttaagggaaacattttcgacccccataaatttt

SEQ ID NO: 180668 - DNA, 317 bp, Glycine max
gtgtgtaatcaattacacttattaggtaatcgattaccagtgactgtttctgaataaatcaaaagatgtaactcttcaaattggtttttttctaaaagttataactcttcaaaatggtcttcatgaccagacatgaagagtctataaaagcaaggctttgctttgcattttcaatcaattcattctttcacttttcacttttccaatcaatcctttacaagccttgaatctctttgaacttcttcttcttctttgtaccaaaagatttctgaagttttctggctttccaaaccttgaaaacttgtgctattcatctt

SEQ ID NO: 180669 - DNA, 572 bp, Glycine max
agcttctcatttgatctaacagagaaggagcatgcaacctatttcactcaagtcacacccacggaactctggcacaagagacttggtcattgccatcttgaaagaatgctaaacatgaaaaaaaggacatgtcaaaaggtctaccaatactttctgatagtttgccaaactataatgcttgtcaatttggtaaacaaaatagaaaatcattccccaaattagcttggagaacctctcaaaagttgcagctaattcacactgatgtggcaggacctcaaagaacaccatcactacaaggtagtctctactttattcttttcatagatgactttacaagaatgtgctggattttttttcttgaaattcaagcatgaagtggctgaagttttttgtaaattcaagaaaatggtggaaacttcaagggacctgaagattcaatgaaaatgggaaagaatatccatccccataattatttactttggggaacaccttggtttgaatattaactcacagccccctaccctctgaacattggggattttgaaggattaacaattcattgttgggaaggc

SEQ ID NO: 180670 - DNA, 408 bp, Glycine max
tgaacaatattacctctaaaaagaggtatatgtgatgtgagagaaaaaaacatactcatactccgattattaacagatgctttctggtgttgcatacgagttgcggcaggatgagccaagctttcaatggacccactcaaaataataacattgaagcttctagagagtgacacgtagattatacaaatataatagttagaaatagatagtatcatattatagctgatatatatcagatgactaacataagatgatcactgctagctggaccgcggcgtaaaattcatgccagtaaatgattaaattttgactttattaattcttttaacacctttttagtggaaaaaaggagttgaatatatattgatgcctactatattcttatatcaaaaacagaaccgagttcta

SEQ ID NO: 180671 - DNA, 365 bp, Glycine max
agcttttgctgaaattgaaaaaaaaatagaattaatgggttttatctacattaactatgcataggtaaaagttctatgactcaggggggtctagtttagttggttaattgagtgggaatgtaagtattgtaaatttcattgtacttcaattgcgacagataaaagaaaaagataaaatttttacatacactacaattataggtgtcattgtaagtgtgtattggtacaggtaacttttttgtagtgttaacacctgtagcgacctgccttgtcaatacgaaatctctactctaaaacacgacatttcaattttttcatgatatacattcaccaaataagcataaacatgtgtgtgtgtgtgtgcg

SEQ ID NO: 180672 - DNA, 345 bp, Glycine max
ttaaataattcattcttggttgggcgtttcttataaagtaatatgaccaggacaccattggagagatgtgatcttctaagtggtagtaggacaacactaattttttattcattattcgcaccaacatccttgaatttcttactatcagtaacatggcttacgggattcattgaaatccttagtgagcttacgatatgaacttgatcaattgaaatttaagcatattttaaatttgcattatgtttgtctttcagattaattatatattataaatttgtttttctaatcttcgcacaaggtctaagtctactattcttagatgataaacagagttcatggcacatg

SEQ ID NO: 180673 - DNA, 709 bp, Glycine max
agcttgtgggacccacatgggtccatgacatatggattttaggattgtgtttttttctttcttcaaggttttgtatacaataaaatcgttaaggagttgtggcatatgccaaaagtggtcaatagcttttgcaggggacattgtgctcaagcccaacaattagtaccatttccaccaaatgatttgtgcagttttacatgagaaaagtccatgagagacatcctcatacattagattacaaaaagcacatgctataccaccttgaagagtgacttgccttttgtgtaggtttacctttgtaagtaacctatctttcaaaactctccaaatcatgaaagtaatcttttgtaggattataatttgccataaccttttaaacacatcaacttaataagtcctaatccttaattcattcaaggcacgataggtggatattaccgtataaaacagtggcaatgcgggttttaagttactaaagacgtacgcccattgttaaatttacctcccaaaattgctagacataacctttttttttataacccttttttccaaataaaaataccccacttgttaaatctacctctataaatattttcctttttattattttgattttttttccaataaggatcacctttgggaaactacttgcaattttcctggaatgagaaagatcctttaaaaattgtaataaaaaggggtgaaaaaa

SEQ ID NO: 180674 - DNA, 436 bp, Glycine max
  unsure (1)..(436): unsure at all n locations
tggtcggagcggcggtcatctggtttccaaatctagaggcttcctggattcgctcatggaaggacttgataactgccttcattaggcaatatcaatacaataatgacatggctctcgacagaacccagctgcaaaatatgagcaagcgggagcatgagtcctttaaggagtacgcccaacggtggagagacttggcggcacaagtggcgcccccatggtggaaagggaaatgataactatgatagtggacacactgccagcgttctattatgaaaaattggtgggttacatgccctctagcttcacaaatttagtatttgtgggcgagaggatcaaagtangtctgaaaaaggggatcagcggttaatgcggtggaagaaatgtgacctcagaagctgaagtagttgaaagatgtgataacctcgaggaagtttat

SEQ ID NO: 180675 - DNA, 286 bp, Glycine max
agcttttcttggaccttaggcaaaccttcaactcatccttcatgatcaaactgtctactcgtgattggtccctttcctctctccggagcttaagctcgctgttactgcccccacagagcccctcggaatttgttccggccatgttcttccctacgagcccttttggtctcttgttccaaggccttggtggtagctatatttgcatctctcagtccggcattcttctttcggatcttgagagctgctgatttaaacctttcttttactgttggggcttctccaattc

SEQ ID NO: 180676 - DNA, 605 bp, Glycine max
tcctctctaagcttcttatccaatgaactctcttggtggtgatgctcctccttccatggcttattccctagtggatggcgcctcctctcacctcttcttctttatcttccactgcatctccacaattgaaaatcaccattgaaggacctcattgaagctcaaagatccaacctctatagaagcttctcaagcaagcttcaatcatacaaccccatagtcagtatcacatgaacaacatattctccccctaatggattgacaacagtttcagcattgctctcctttgtgctcacccgtgcacctaatacctatatatccgccttaatcaggggtgagtactgcgatcccctttggaataactcatttttgatggcttcctccaactcttgttttattttctctagactcagtttgttttcttcttccactcttccttaaagtttccgattatctcattcttccaatcttctttaaggattccaattatttcacccaaatgttgttgggtgatggatgtaaaggaattgttaaaccacgtgatgcccttccatagttgtgactgatttcacactaaacccattgcacgaacatgacctacgtgctcc

SEQ ID NO: 180677 - DNA, 528 bp, Glycine max
agcttgaaggcaaactggatgcgttgatcaacttggtaacccagctggccttgaatcagaaatctgtacctgtcgcaagggtttgtggtttgggctcctctgctgaccaccatacagacctttgcccttccatgcagcaacctggagcaattgagcagcctgaagcttatgctgcaaatatttacaatagacctcctcaacctcagcagcaaaatcaaccacagcagagcaattatgacctttccagcaacagatacaaccctggatggaggaatcaccctaacctcagatggcccagccctcagcaacaacaacagcagcctgctccttccttccaaaatgctgctggcccaagcagaccatacattcctccaccaatccaacaacagcaacaaccccagaaacagccaacagttgaggcccctccataacctttcctcgaagaacttgtgaggcaaatgactatgcagaacatgcaatttcagcaagagaccaaagcctccatttagagcttaaccaatcagatgg

SEQ ID NO: 180678 - DNA, 481 bp, Glycine max
ttgcctttagggcttgtacctcatcactttcttccgaagctttaacctcattgtctctcacagtatttagatttgggagccaatccaatccttgtgtccggactctcagccacttatgatagccgccgatgatcccattactgcttcccctaagctctctgttctttcttcacaccgcatcacatgccttgcaaactccttggagtacctttgcattggggtcactaaaaccccgtgtaatgaaaggcgtgatgctttcgtcaaatggcgctcctctcatggggtagccaagctgtcttatggcaaggacaagattataatttatacaaccccttgttcccattaagggaacatttggaaatccttcgcatgaagatagaatcctgattctttcttccttctagcgagggaaccaattaacagacgcccctctatgctaaccaagaattggtcccaattcgtctttcttttttcggcgcac

SEQ ID NO: 180679 - DNA, 595 bp, Glycine max
agctttcatctagccaagattatacaaaagtgttacaagagggcctaacggtttctaatgatatgggtcatcaaatctatcatgtgttgacagtaattgattagcccatgaatctcctcgggggctgtacacgcttcggccatggcttttgctttggctaatagtcgcgggaggtcttgacttccattcaaggtcaaggcgaacctatccatccacatagtcgcttcttgatgcaatgcatcaatcaccctccctcttgcttctttttcggtgtacacttgtgcaaaatcctccactagcttttgctcatgggtcacagactggttcaactcttccttataatgccctatgatagctagcatgctttgctctgtggcttccaagtgttgagccaaactcctcttggatcttgtgcaagcagctaactcttcttttaagatcatgccatgcacccgtgaccaggctcttttctctcttcggagcttgaactcatttttgctaccccacaaagcttctcggaatttctctcggccatggttcttctttgcagcccttttgggttcttgttcaagggctctttgagtggccccctttt

SEQ ID NO: 180680 - DNA, 503 bp, Glycine max
ttgcacgtatcagtcaagtgtatggaccatatcgtagccatgtgctcatcgataatggttccagtttaaacgtgacgcctaaaagcactttggagaaattaccattcaatgcttcccacctaaagccgaattcaatggtggttcgtgccttcgacggcacccgccgagaggttaggggagagatcgacctcccagtatagataggccctcacacctgtcaagttaccttccaaataatggatcttaacccccctacagctgtctgttggggcgaccgtggatccactcggtgggagttgttccctctacactccaccaaaagttgaaattcgtagtggaagggcatctggtcatcgtatcaagcgaggaagacatcttggtgagctgcccatcctctatgccttatgtggaagccgcagaagagtcattagacaccgcttttccatctttcgagggggtaagcattttctccgtggattccttctctgagcaagcttgcctgc

SEQ ID NO: 180681 - DNA, 589 bp, Glycine max
agcttcttagtttcagatgatgcagatgggtttgtagctacctcatgcactcctctaatgactatggcatcatttctggcgctaaactgctgggagttggaagccatcttctcaattaaatttctggcttcagcaagagtcatgtctccaagggctccaccactggcagcatctatcatacttctctccatattactgagtccttcataaaaattttggagaagaagctactccgaaatctgatggtgggggcaactggcatatagttttttaaatctctcccagtactcatacaggctctctccactgagttgtctaatacctgagatatccttcctgatggctgtggtcctggaagcagggaaattttttttctaagaatactctcttaaggtcatctcagcttgtgatggaccttggagcaaggtaatacagccagtcctttgccactccctctaatgaatgaggaaaagccttcagaaatatgtgatcctcttggacatctgggggtttcatggtggagcagacaatgtgaaattctttcaaatgtttgtgcgggtcttcacctgcaaggccatgaaactttgga

SEQ ID NO: 180682 - DNA, 546 bp, Glycine max
tcttatccaaggcacatttttggtggcaaagctccttcttccatagcttattccctagtggatggcgcctcctctcacctcttttcctttatcttccgctgcatctccatggtggaaaatcaccattgaaagacctcattgaagctcaaagattcagccacctcttctcctttatcttccgctgcatctccatggtggaaaatcaccattgaaagacctcattgaagttcaaagatccagcgacctcttctcctttatcttccactgcatctcagagttgtcaattgctgaggagtgaatttttctagccactatcttgtagtcaatctcaaaaactacttgatccaggccaagcaattctacaaactccatggcagctagcaaaccctacgcctccccctcactaacccacatgcacagctccctccacaatgtcctagccatgacaattactcctctagcatagcggatgcacatcccaactcctgtacagttgctctgagcaaaaaagccaacatctacattgcacttaacaaatccatcctc

SEQ ID NO: 180683 - DNA, 462 bp, Glycine max
catgcatgcattgatacatacatgtgaggcactagccactgtatgtccaacttctaagatcatttattccggcatgtatatagatggaatttgagcaaaaaacagccaagagccccatatatagttcaaacgttcatcctgcctcataaaagaaaaccaaaataatgaatgtttacatgaattaacaataactccatatgtataattaacaataaggttcacctatctatatggaagctcataaatgacattatttataacaattatgcttttgccatattgaggctgtgggacaatacaattatcctgtattggtcttggatgagggggagggaaaaggattttaatggtccttatcaccaatgggggtaatctatggctgtggtttttaaataccgaaaatgtctgttggattgggtggaatagctatttgataggaggttgcatatttttatttacttt

SEQ ID NO: 180684 - DNA, 603 bp, Glycine max
aacatgatcacgcttattaattactcagttttatttcattttgactagaatattttttttaagaatgaattttgactagaaaattaatcacatatttatgtttatctttacatttatatacatacaggacatatcatatgagagaaatatatattatatgagagtgagaaaattaaatctaatccatataactaaaatattgatcatcatcatttaatgtcatttgaccccttaagaaatcatgtgactttttgacattaaatcttaattttttatatatgattatataattcaaatttaatcatttcactctcatataatatgttttctcttaaaagatatgtcatatatatataaaaggagaagggtgggatatttttacatataaaaggagatggtgaaggtagttttgaaagaaaatcaaattcatgaggatcactttaatttatgagaaacacatttcattatgttaattgtcacctaatgtaaattcaagatttgggttaaaacaccagggaataaaaataaaaattttaatatattatgtacttaaaacaacaaaaaaattattttggactcagaaacaaaatcccttctttatta

SEQ ID NO: 180685 - DNA, 308 bp, Glycine max
catgcctgcttatttaaaaaaaaaaaacgtaattttttcttctaaaagcgtcatggaaaaaaatatccaaaccgacccaaatgtgtttgagtaaaagcatatttactaccaccatacagggcactgtcctttctagccaaaaagtgaaaatactatgcggctcaaaatttaaacttagacatatgttcttgtgccaaggggttaaggggacagcaacttctgtcatcccctcttttggcccttatatatttatgaactccacaccttgatgtagaaaattcaataaactttttgggtcacccgatctt

SEQ ID NO: 180686 - DNA, 539 bp, Glycine max
tcttgaacgtgatcaatatatttattggcacagaataaaggatgaagatgtggttcgtgatatcttttggtgtcaccctgattcactgaagttagtcaacgcatgtaatttggtgtttttgatagacagcacctacaaaacaaaccggtatagactcccattgctcgattttgttggggtgacaccgactgggatgacattctctgccggttttgcatatgtggagggtgaacgcgttaataattttgtatgggctttacaacgcttctgaagcctttttttaaagcgtgatgccctccctggagttattgtcactgatagagaccaagcattgatgaatgtagtgaaagatgtattccctgaatgcacaaatttgttgtgcatctttcacataaacaagaatgtgaaggccaaatgtaaatcactaattgcgcaaaaaaatgcttgggattatgtcatggattgctggggatctctgactgattgtccttcaaaacaacagtttgatgaatgccttgaataagttcgaaatagcttgc

SEQ ID NO: 180687 - DNA, 923 bp, Glycine max
  unsure (1)..(923): unsure at all n locations
cactcacgtcaactgcgagatttctatagtacgtcatacatacactagcgcacgcgctaactgcgatcgataacttctatagtaatcagatatgtataanannnnncaagagagttgagatcgtgagcattcgcgcacgcatcnatcttatctacaagcatgcagctagcagctaactgaatgagttgattacctattgaaccttggtcgcacaggataataaatgggtacactggatcaaagagtaagaggatcggagctcctatgcagacctatatacaaaccaatgaccgtacaaacatcaacctgaagcagattaatcatctgaagcgaatgcagcccaagaggacaaaatgagatcttagacctcagcaacaagatataaatctcagcaaaaggatcatgacactaccgacaacagacacaaccccgaatggaggaatcaccctaaccttatatggcccagccctcaacaacaacaacagcagcctgcgcctaacttacaaaatgactgccgctccaacccaagcatacactccttcacaattccatcaggagcagcaaccaaaaaaacagccatcagatggaggcccctacatcaaactttctctaaacaactgggaaggaaacgactaatcaaaaccttacatcctaatcaagaaaacgaagtctccattatagacatacaccattcgatgaggacaatagatgactaaatgaaacaaaaacatcccaaaaaattctataaccatctgtttaatcggctgaatctcaaaaaatgaaagcgccttatgcttaaaggtcgataacaagtgatgaagagcttgacccgtagtaagctcctcactatgtaagaatcctgcagaattgaattctattcgtaaaaaagtgacggaaaaacatcacttggcaatactgggact

SEQ ID NO: 180688 - DNA, 631 bp, Glycine max
tcctcggggccatttcctgcgaaggcaaacatttggaaagttagttttaccaagggatgctactcttaaaacaaaaatggcatacaacctcctccaataaatacaaacatcaatgtaaatttagaacaagcttatgcgcatacttctttacgagcgttcacttgcacaagacattcttataactaagaaaaatgcacccatatacaatcaaggcaccttcgttacctagattatttatatgtacttccaaggtgtatttgttacctacatcacacgcatttcctttgctaaatttacatacatgcatactcaaagcactttggctatcaaaaattgcatacgggcacattctggtatttctaatacctatacacacaaacttcatgatgaatcttgactatctacacaataaagtgctacatttcatgctcttttttaagtgtttttactacctaaagccgcatgcaaattcaagtatattttcttttgctgacctaaaatgtattcaaattaaaacgtatttttgtaaagtattttctttacataacatgcaacatgtttatatatttttgtgatacattttgactaccacaaatcacatatacatacatcctagtattttgctactaca

SEQ ID NO: 180689 - DNA, 382 bp, Glycine max
agcttttaatgcataatatacacgcttacgggttcactctcgcttcgtacagactaatattaatctcgtctactttggcaaccctatcatgagcatctaaaagagttataaccactcgataaagccgaaacatcgctaaatctatgccaaaatgaatctcatcccatgggcgccgtacacatcgtctatactatgcttaaaaataaagttcaaccgaccgtctctgtttgcaccttatattatcataagaacggatagccttagccaaatattgactataaaagacctttattgttccattcaaaaataacgctgtcaacctaaggctaaaaacaactctcagaatgtgctgatgccacgaaaagggtcattccaaactggg

SEQ ID NO: 180690 - DNA, 414 bp, Glycine max
gctgtgtgctcaggggcgcgactccagagttcggtggccactgactgcgactaagatgacccgaagacgttgcatttcgtactagcatgcttctctgagttataactatgaaaaatggtcgtggaggacagacatggtcagtatataacgaccatgctgtgaactgctttggcaatcaaagcattctttcactgctcacgctttagagcaatcctttacaagccgcgaagcgctttgagcttctgcttcttctttgcaccgatcgatctctgaagtgtttctgggtgtccaaaccttgaaaaccagtgccatgcatactttcatactcttgaccctatgccatccaaagatctaccacggactaagcgcctgaattcgcgacgtgtctctcttcttccttctcgaaaggaacca

SEQ ID NO: 180691 - DNA, 601 bp, Glycine max
agcttgttactaattagattagattattaaaaataatatagcaaataggagcaaaataattgtcatcgattgtgacgtgaggtgattataaggatgttcacatgtgtgaaaactcaaacagagtcaaatcaattcaattagttcgattttaattttgagagtttgaattaaactcgattcgattcaatatgtataaacccgttaaatgtgtggggatgcttaaccggctcagtttttttaagccgtgatccaacctaattttgcattgatctgacatttaattaaatttattacatatatatattaaattattaaatatataatattttattttttaaaaatactttactaaattattaaatcaaattattcatgttttttattatattttcatcttgattttatttatatttttcatattattgcattatttgattttttttaaaaaataaaatatggtatatattagcatttaaacaattcattctatcaaacaaatatgtcacaatttaatttatttaaaggacattttcatatatttacaaagtttaagataaaaactttttatttaaaaactttattttataactcactttgaaat

SEQ ID NO: 180692 - DNA, 558 bp, Glycine max
tgtgcatgggaaaatagttgtttgtgaaagaggtaaaaagggaataactaagatgggagaggtagtgaaagtggcttatggggcgggaatgatagtacttaatactaaaaatcaagctgaagaaatttatgttgatcttcatattttgctagccacttccttaggagcctccagtggtaagactattaagacctatattctatctgataagaaaccaacaacttcaatttcctttatgggaataaagtatattgaccctgcaccagtaatgagagcattttcttctaaaagaccaagtatagtgggactagatgtgactgacccaactgcgaatatcttggctgctcggccactaaaaactaacccaagttttatcatgaatgacataagagaagtactatttaacattctcttaggtgcttcaatgtctatgcctaatgttagtggcatagcaacactttttaaatatttgcacactgattggtcccctgcagctatcaaatctgctttgatgactactgcttacacattgaacaacagaggagctgcaatttcata

SEQ ID NO: 180693 - DNA, 440 bp, Glycine max
agcttgttacaaccaatattctttgtcctactaagtcattgttggctctaacacaaatgagaagatttgttattttgattgcacaatgactaatggtaaattactttttgagtggtattttgtgtgagtttttgtgtcattttgcatgtatttttcttagtagaactcatgtttggacactagttttgtattgcagaagcataaccgcttaattgagtgaaaaaattaaagattacacaaatttatcaagatttgatgactttacacttgatcacggccgtggtacatttaccacgaccatggtaatcaacacaatgataataaagtgataacaatcctctaaaacaatgtcaaaatccgataatggtcgtggtcaactaatgggggtcatggtcaactaagatggatccattcatgagggtcgtggttaatccataatg

SEQ ID NO: 180694 - DNA, 619 bp, Glycine max
tctagaatctagtgttttgcgaaatcaaattggaatttggaacagtgcgacgttgctcatgactttgaggtccctcaattaaaggtttagtgtaacatttgagtgagtaatttcagtgtaaactggaaaattaaatgtatagtatacttgtatacatttagttgtaattgtatagaatttttagtaaaagagaaccaaaactaatataagattaccagaaatgttaaaactaaaatatttaaaatgcaaaacacaagatacaacatttcacttgttattaaataattatgaacaaagtcactgagttgaaaaccaactctaattatacataacacaactcaacattcaaagttgtaaaaccccccaaaagtaaaacataagtcatccttgaaaagaataaatgaaaatcaaatctaataaaattgaaatacgtaatatattatatataataaaattgtctagttcaaaaatgatagtagaatcattcccaacatcatttctcacaaaatacaccaaagagttataaacataagtttatagagattgatagagtataatgtacttaaattacaaacaaatgcagaatagaacagagttagattttggatttgggaactca

SEQ ID NO: 180695 - DNA, 554 bp, Glycine max
  unsure (1)..(554): unsure at all n locations
agctttcttaattatatgtctctctatatattaaatttttaaaaatttatatatatttttactaccatatactttataaattaaaaaaatacattaaaagttatactaataaataaattttagtagattataaatataataatgatttattatataagatgaacccaacagttgggtgttgagtgggacatttgtgtatttgagcttatgaatagaagtagagggaactagtgaagagataaagaagacggaggcggtttggagtatgacttcttgcacctcttttgcatcctttctcatttcttcttcttcatttccttcattgtgcttcgcgcaaacccactcaatcacatgtaaacaacgcttcccatttccttctgtaaagggaagaagaaagttctcaactttatcattntcatccaccaaaaggctcgttacaagagccgctgagtacaaattcccaaaccctatttccgaatttgcaaatgccgtgagtttatctcttatcttccattctatcactttatcaagtgaataaaattaacttcatgttc

SEQ ID NO: 180696 - DNA, 424 bp, Glycine max
tgtagaactatgttggattttccctacggttgttttttgttccactttttctttgttcaaatatattcaagggaaattcggtttgccggaaagcacaccggatcgtcaagtatttaaaaattaaaacggatgaatccgagtatcgaacacagggaactaatgtttacctgaattaagttcagaaatgaagcattgttgagagaacatgtatgattgataatttcaaacaaaatttaaactaacttttatgctaaaaactataaaaagcaaggtaagtaaaagtgacaacagtaggcagaaattgttgggtctttctaacaaacaagctgatgcatataaatatatttctctaatcaatcagactcttgtgttctatgctgtagcctaaattactaaacctcgatccctcgtcagaccgaatcaa

SEQ ID NO: 180697 - DNA, 503 bp, Glycine max
agctttatcaaatggatgtaaaaagtgaattctcaaatggctttattcaagagaaagtatatgtagatcaaccccctggatttgaaaactcagacaagcccaatcatgtttttagattaaaaaaggctttatatggcttaaagcaagcccctagggcttggtatgagcgtctaaataagttccttttagaaaaggatttctctagaggccaagtagatactactcttttcataaagagaaaattacatgatattttattggttcaaatttatgttgatgatattatttttggatctactaatgaattattgtgcaaggaattctctcatgacatgcaaaatgagtttgaaatgtcaatgatgggagaacttaatttctttcttggattacaaattaaaaaaaccaagactggaatttttgtcaatcaatccaagtactgcaaagagttaattcacagattcaggatggaaaatgctaagcacatggctacaccaatgagcact

SEQ ID NO: 180698 - DNA, 666 bp, Glycine max
  unsure (1)..(666): unsure at all n locations
tgcagctcataatctctccatagtttgtagcaatgttgttccatttgggaattctactctaaaaatttccatgattgctaaggtacatgcgaatattacaattaatgtaaagatatcatgaagaaaaatataatcatcttcaatagatattactctcttgaactattaaatatataaggagagattcacttgcttcacttcaagagtaaatagttatttttcatttttattatttatttttttaaaaatctaatgattaagattagttacttattaaataataaaaataaaaaataactataaaagaattatctttggaataagtggatctctcctctctttacatataattagcttaattgttagttttgttgtttctcacttttatgtctattacataaaactttagtactaaattgttgtaatatatttctgtaggtggaccgtgaattcaacatggcaatggacgacctagtgaaaaaattgaacgaggatttgctgaagtgctgcaacttgcaacaagaatattaatgaatcacgtacgcagcgtattagctatttgaaggttttaatacattatanactcgcatttagtctttgtagtttctcaattgttaaaattgagtctctcacctcatattttgtacaatatttaatagaaatgtc

SEQ ID NO: 180699 - DNA, 643 bp, Glycine max
agcttccatcaagtggtatcagaattaaataacattaattattttgatgatgcttttgtaacctagatggtagtttgcgggctagtgcaatgcaggtatgttgattgggctgagctgcatagaaagggatttaattaacatcctgaattttggaaaattcgtataattccttgctttcaatctcttggaaaattcatatcctcttaaatttattggtaatgcctgttactgaactaaatagaaacaaaagtttttaagctgagatctgctaccttgatgttcttcatctttccatccttcagtttagtattctagaaaaactttactgcttttccttggttttaaactttgattttcttattataaataatttctctatagttgtctaacattatttgcttcatgaaggtacagtaaaatatactttgaaatcatggctcacttctggatatgaagtattgaaaatcagaaatatcctatgggtaatggaacaccctatttgataacttaacttatataaattttgtttttgggtcattttgaggttttgttaatgatggaattaatgaaaaaccttctggtggtttttttttcttcaagttatgacaaccagaacagggatagcaagtaccaacccaatttc

SEQ ID NO: 180700 - DNA, 339 bp, Glycine max
atactcaagctcggtgatggtcataaggtgataacacatggagtgtgtaaatgtgtcaatatgaagatgggggggggattgaagacattgtggatgcgtttgtgttggagctagggggaatggatatggtgttaggagttgcctggttaagcactcttgggaatgtgattatggattggaaggccatgactatgcaattttcttatgaaaatgagttggtgaaattgctaggtcaaggcaataaggtggtcaaacaatgttatttgaactcctatcttgaggatactcatagcacaactgaattgggctggtggggggttcatctacagttaatggaag

SEQ ID NO: 180701 - DNA, 213 bp, Glycine max
agcttcatggaggctggatctttcagcgtcaatgataaccttcaatggagatgcagcataagataaaggagaagaagtgagaggaggcgtcatcccctagggaataaaccatggaaggaggatcttcaccaccaagagagggcccttctcttagaagcttgaagatgaagctgccatggccgaaaagaatgacatagaaatttacgggggggg

SEQ ID NO: 180702 - DNA, 585 bp, Glycine max
tctcccctattttcctataaatagggggagaaagtgaaggtttttatgttcagccctcctggtgattcgagatcacttgaaattagtgaaaaaaattatttccgtgaagaaaatccaagctgaggcgcttccgtaacgtttccgtgggtgatttctcgaagattttcaaccgttcttcgacgttcttcgtcgttcttcggtcttcaaccgggaagttcccaaaatcgaacttttcaattcattctatgtacccttagtggtcctcatttgttttcacgtgcttttattttcatttcatttacttttcgtacccccttttgacgtgctttaatcatttacttaagtcattctctcgcctaatcaaaaaataaaatatatttccaccgatcatttgaattgtaacatccgttaatttttctttaaatgaaatccgaccgttcggtcatgccgtaacccacttggaaaccaaaaaaaggttaaataataatataatattcaaaatatcttttagttaaataaatcacaaaaatcattcggacgttgttctttgggattttctttcttaaatcgaattcactaataacc

SEQ ID NO: 180703 - DNA, 401 bp, Glycine max
agctttgagccaattcaaacgacaataaatttttactcggatgtctgattgagttcaataatatatcgagacactcgaaattgaataccgaagctctgagcaaattcaaaagacaataactttttactcggatgtctgattgagtctcgtaatatatcgagacgctcgaaattgaataccgaagctatgagcaaattcaaaagacaataactttttactcggctgtctgattgagtctcgaaatatatcggaacgctcgaaattgaatatagaagctctgagcaaattcaaacgacaataacttttttttcggatgtctgattgagtcccataatatatcggaacgctcgaaattgaatgtagaagctttgaaccaattcaaacgaccagaactttttact

SEQ ID NO: 180704 - DNA, 528 bp, Glycine max
ttacagcagattttagtgatgactcactaacctacaattaaaataacttaatgccattaacctagggaaataaaaaaacttaatggctgagtgtaactgaaattgtggcaaccaaaagtcacccccaacagccaacaagtcagccaccatttggtctcccaaaaggctgatgcctaagttgccaattgggcccttattacaacttgaactaaacctaactaaagcccttttagttgattaacccaaaacatatttttggtcagccaactttacaaggattgggccattatttagacaaactaaacactctaaaattgaaacaaagtggtgtcatttagtcctcctccatttgggccatgatacaactcacaaccttggacttttctccttgaaacttgggcttgtattcaaacagtatggacaacacttgttgaagagctttcttggctttccttgctctaacccttgtcataagtcctccaagtccttcaagtggatcctttgccttgctcttggtcatgtcctcat

SEQ ID NO: 180705 - DNA, 353 bp, Glycine max
ggacctgccgcatgcatgcttgctattatatcatgtattttaatagctccattgttggaaatttcaagattgagatatgaactgtgtccacgtgctatgaaagaaagacacttttggaagatatatttcacacttgtcaacactcatgtggctccgtaagtactgtatcatgctgatattccatgtactatgttatatttgacaatgaagggggaaactagcttttctattttcttaagtatttttgactaacttaactctgattgtttctttattcttcaaagaataaatatttacataaataaaagacgtacaagaaggaaaaatataaaatatgctagttattagagtat

SEQ ID NO: 180706 - DNA, 513 bp, Glycine max
actcaagtctttgacgattcacatagattataagattaatttttagtccgatatttaatcaaatttaaagctttcaaattggtttcttattgactttattgtacacaaaaatattattaagatataaatttatgatataacctcgcatgaaaacttattaaataagtatttaattaaatttagggttggccaacattattccaatgcaaactttggagtgagcttttacaaaagttttatattttgatttaggcttaaatgtaattttaatcatcttatcttatttaatatggaatcttgattcctttattttaaaatagatatttggtctccttattttaaaaaataactaattttaatctctctattctaatatataaacatttggtcctcttactttaaaatttttataatttttgtcaaatctttaattttacatatattttatttattttattttgatccaattaattcttaaaccttacttatttacaataaagaaatgattaaatt

SEQ ID NO: 180707 - DNA, 791 bp, Glycine max
atttttagtggggcaatctaaacactggtggagacgcggctatttatttgaattggaggatgacgacctaacgggacacgtttcgaatgttgatcttacaagaggtcgtgatttttttatggcaccccccggtggatcctcattcgtgccaaagcacaagctaggacgacttacttgaaaagtgcgtaatgagaaaactcttcttcgcgagtggaccgatgacaagatttgcccggctatttcaagaacttggtgacctttcctcctgattcatgactcaggttcaattttacccacaaaatgcctatcgacgctatgaacttaaatccgctctccatctctaagaaccaaggatatcttccttgagatggggatggtcgatctttgggggggcactgtctataaaaaattgaatccactcatggtcggccagggcttaatataatccggccccagggttttcttgtaataagaactccccaaaatgcccgtgaaggaaacttgtaatgcccaaaactactataagggcgctaaatggcctccccaaccttggggaaccatttttcatctctttccttatgatgatgggaatccgagcgagaccctttggggcttattattaactcgtgaatgcgcatcaaaacacctttggtcgttattgtgtatctctaaatctgcctcttttatgaaaggttaattctattctctctttgggagagtggttagttctccctacttctcgccatgtgtatgaattgtcaccatatactcccactgttttctgccctatt

SEQ ID NO: 180708 - DNA, 461 bp, Glycine max
accttctggccctactcatagttgtggcatgagaaaacatgctctattttcatctaccactccaaatagggcctccggatcattcttttctttaaatggaggaatgttgagtttaataccatcaattccgttttgtctatgaacaccatcattccctcttctcctcctttcttcttcattatgacctctattctccatttgatccaacctttcatggagcgcatcatctcgttggttcattaacctctccatatgttgcatcaaagcttgcatttggaattgcgaaagccccactccatcattaagattagtacctgacattctcaacaaacaaatcaaacgtaacaagacaattatagttgctggttgaataccttacccactcaagtgtatcacacaattatggcttttctctaatgaaacactcctggcttttaccactcttattccccttgagttct

SEQ ID NO: 180709 - DNA, 455 bp, Glycine max
agcttgtaatcgattacacacatactgtaatctattaccagaggagattttcagaaaatattctcaacagtcacatcttttcatttggttcttgaatgggcatcaaaggcctatatatatgtgacttgagacacaaatttgctaagagtttatctgaacaacaagtgtttattctctcaaaaagcaaaatcgttatatcctcttaaaaattccactggccaatgcaattgcaattcattaaggaatcatttgagtgctcaaattgtaaaatctatctcttcaagagagattcattcttcttctctttctaattcactaacggattaagagaccgcgggtctcttgttgtaaaagaattctaaacacaaaggaaggaatttccttgtgtgtttagaacttggaaaaggaatttacaagatatggtaactctcaagcgggttgctatgggactggac

SEQ ID NO: 180710 - DNA, 253 bp, Glycine max
tatatcaacatgggggggggatcgaaaccatttctgacgccgtggtgtctgcactttggtgcatggatctgctgtcatgaattgccctgattgtcactctcgtgaatgtttatattgattgccaagccatcactctacaaaagtcttattaaaattactatgggacaaatctctggctctgcttcttggaccatgaacagtgttaatttaacgcccctcttgaagatgctcttgtcttaactgaggctgactc

SEQ ID NO: 180711 - DNA, 1195 bp, Glycine max
  unsure (1)..(1195): unsure at all n locations
accactcccgcacacctcgtaattagtcanttcgcggacacnttctaacgccattctgacctnctcatttactatattgatatttagtantctaatctgtaatacgnnnnnnaagagaggttgtggatatgattcggtggcacgagcctgctatattatagaagcagcccggcatgcaatgcattgtcctgagcattaagaaaaagctncttgtatcaaatattatataganctaggcgatcgaaattgattggcatgttgagagtaaaatctctgacgcaataagcgacacacattagagagacgaataattcgtataattgatgagaaatctattgttatagaagaaatagcgattcactcacgctctatgacaatggaacttatatgctgggggcgctttatgatgaggaagacaaataatgtatttagtttttaatggtgaaaaagacatcatatcctntgctttatagggatgcaccttttatcgctgcgtcaaagacctaacgcatatggtagagacaaataaaagctgtaattgaatctcccgcttaaagaaaaatcagagtatgggctatagacacaggaagggttaacaacataaaacttcttatttcataacaaaagccttgagttaacttctggacatttgtatgatgatacaaaaaatctcgttaaaatcatctaaattacatgggaaagtaacgtgatgtaattcaaataagacttatactgacacacccaaatagtaaatgttgcaacaaactacaaaacaattggtcaatctaaaatggaatggaagtccgcggccaattataatactatagaatgtaaaccccaataaagtcaatggcgatgattcggcatggccacacaaagggtactcatatttgaggagaaaataaaatgacccctaatatccttgttaataaattgnttagagagccgtttgacagcttactggtatcataatatgttaaggaatctgggggccatctgccaaaagagaaggtatcacccttagtttataaacatggtagaagcggatctgtgtatacacaaggacctagctccgtatggatcaatcccctgttcgatctgcactagagaatattcatcttatcttagacacatacatgccgcagagacgcaatatgtatcgtcatatatgtgctcaacaaccgtcaggcgacca

SEQ ID NO: 180712 - DNA, 520 bp, Glycine max
  unsure (1)..(520): unsure at all n locations
ttgactttgagtcatcaagagattataaatatgtgaccatggcatgaatttaaagatataaaaaatttaagaatctatctttcaatcatctctcaacatcatctttcaactctttctacagaattttctgattcatttctcttcatctttctaaaagtttttgttcaaacactttgttttccaagaaaagctctttgttcaaaaacttgtgctattcatctttttcattctcttcttcctttgccaaaagaacgaaggactaaccgcctgaattcttttgtgtctctcttctcccttacaaaagattgaaaggactaaccgcctgagaattcttttgattcttccctcccccttaagcaaaagatttcaaaggactaactgcctgagatatcttttgtttccccttacaaagattcaaaggactaaccgcctgagaattctttgtnccaacacattggattgtacatcctttgtgggacaagtagagggtacatctacttacggaatgttatactgagaa

SEQ ID NO: 180713 - DNA, 620 bp, Glycine max
agcttgtaggtaaactagatgccttggttaacctggtaacccaactggccatgaataaaaaattttcacctgtcgccagactctatggtttatgctcctctattgaccaccacacagacctttgcccttctgtgcaacaatctgaagcaattgaacaacctgaagcttatgctgcaaacatctacaatagacctcctcaacctcagcagcaaaatcagccacaacaaaacaattatgacctctccagcaacaggtacaatcccgggtggaggaatcatcccaaccttagatggtcgaatccttcacaacaacagcaacaacaacaatagccttattttcaaaatgctgctggcccaagcagacatacgttcctccaccaatccagcagcaacaacaacaacaacaaccccagaaacaacaaacagttgaggctcctccgcaaccttcccttgaagaacttgtgagacaaatgactatgcaaaacatgcagtttcaacaagaaaccagagcctttattcagagcttaactaattaatgggacaattggctacatagttaaatcaacaacagtcctaaaattctgacagattaccttcttaatctgtccagaaatcccaaaa

SEQ ID NO: 180714 - DNA, 702 bp, Glycine max
tctatgggatcaacgtgtctatcatgtggccaacaatatggatgaggactccaagcataccttaataggtgaaggtgcactagttgctaaaaaacacaaggttagcaaaactaacctgaaggctatgaaggtggacttgggacaaacctgtaaggaagctctataagtgggcgtggaagccatcctaaatcgaaaacaaagaagattggccaagtccattgttgaatttgatgagatagaaatgaacattccaacatgtacgatgcattagatagagagtttgtctgggtaattataggataagtgtgcattaaatattatggctgtgcaatgaaaaaaacatattcaagtttttaaaatgaattatatgtattgatgtaacatcctcagctttacatcttaatcatcaagcggatagtataaacgcatatgatattggtactcaagagtttataagttaaagggactacattattctcaagtaattatatcatatacaacaaaagaagtgatccaacacatgggacccttacatcaacatataacaaggtttgcacaaagaagtatctatcagacattaatgacaaaacatagactctctaagcccccttgtttcatcctttctacatgtttaatctggaacatccacataaactaataatacatggtctcagtcagtggtaaaacatgtagcatgccttt

SEQ ID NO: 180715 - DNA, 532 bp, Glycine max
agcttctggtgggacatcttgacttgctttccaatctgacattcaccacagattctgccttcttctattttcagattgggaatgcctctaacagcacttttgtcaaggattttcttcatgcctcttaagtgcagatgtccaaacctttgatgccatattctgacttcatcttctttggaggatagacatgtagaggagtagctggtttcttggggtgtccataggtaacaattgtcctttgatctgctgcccttcattagaacttcactcttctcatttgtcaccaagcattctgactttgtgaagtttacattgaatccttcatcacacagctgactgatgctaatcaagtttgcagtcagtcccttcaccagcagtactttgttcagactaggaagtccatcatgaactagctttcccattccaatgatctttcctttagagccatctccaaatgtcacataactagtggagcagggctcaatgttcagcaagaattctttgactcctgtcatgtggctggaacaaccgc

SEQ ID NO: 180716 - DNA, 600 bp, Glycine max
  unsure (1)..(600): unsure at all n locations
tattcaggggatagttgatgatcgtatacaaccagcaggagttggcttacaacaggccaatctatggagcagtttctggaaaaagtggcatggcctaaagttcagctccctctggaaagagcccataaggttgttcctcctggacctgtactagctaggactgagctgacatcagctgaaccacaacctcctatagtagatccacttgcttctccgaaacttgagacattgtctcctccggcaccacctctgataatcatccccgatgacttagctaatgaagctgctggttctcctaattcaccatcttgcaacatgcaacatagacgatggttctgacttttatgactggatggactgttgaggaagttgtggctcatactgacaagaatgttgatatccttgatgtttttgtgttcttctgttgttgccttttagattattattattantaatttggttttcgtacaatatttcctttatttctacatatactgctagttntatttatgggtaaatagtttgctcatcctaaatcattttgaacagtttgacttgtttttgatgacatggcaggtaaacactctaatctttttggta

SEQ ID NO: 180717 - DNA, 745 bp, Glycine max
  unsure (1)..(745): unsure at all n locations
agcttgtccacaaaaaatagggtttgaaagtttatcatttcagtttcttaccaagtaaaaaagatcatttttaaagtccaacgccttaaaagtgatcacaattcaagtaaaaagaatcgcttgattcactcttaagaaaaaactacgtacggctgatttcctctccaaaggaagatacgtacgagcaaaagccccgcttttgtccaccctcaaaaaaaaaacaaataanaggttaaggtaatacaattttcaccatttttaaaaataagctgctgtcctttgtaaaaaacgggagaaggggtaataccttcctcaaacgttaaaaaccacccccccaacttaaaaattatttttaacggggttcttttgggtttcccaccgtttccccaaataaaacgttggggggaccccccccctcttttttttctttggaaaagaccaccccggaggcttcccctttttcccccccaaaaaggggcgttgcgaccacaagagatttaaaatgggcttgccaattttgggggcccggcgaaataaaaaaataaacccccctttttttaattttaaaaaaataagtttttttgggcaaaaaaaaaaagggggaaagggtttttttttttaaaaaaaaaaagttttcttatatactccaaaaagggcgccccccttttttttctaccgaccccctcttttatttttccactctttaatgaaccccccccaaaaattctctccccttattttttat

SEQ ID NO: 180718 - DNA, 539 bp, Glycine max
  unsure (1)..(539): unsure at all n locations
ttataagcgcgggttcgggagacaaaggtcaagcgttcacgatatgcgaagatgatattccgagtactttggatttggtacgaccatgccctcctgatttccagctgggaaattggcgagtggaggaacgccttggcatttacgcaacaagcataatgtaaacctttacggttttaaaagctctatagttgggcctaggctttagagtttttccttttgttaaggctttgtgtcttttgtttttgaatttataatacaaggatctttcttcatctgttcctggtctctacccattcttattcatttgcatgtttacttctttttctaaaacggcagatccgatgacgagtcccccgaaggtactaatacctgggacacgtctatcgacttcgagcaagaaatgaatcacacggaagatgaagganatgaggatgtgggacttcccccagaactagaaagaatggtcgcccatgaggaccaagaaatggggcctcatcatgaagaaacaagctagttgacttaagaaatggcagtggaaa

SEQ ID NO: 180719 - DNA, 530 bp, Glycine max
agcttcaagaaaaggccaaactcttctccaaaatctgatttcaggcttaaattggtggcttttttcgtgctcatgcgcttagcgcaattttgaaccgcttagcgtgaattagtgaatttcggcttagcgcgtgcttttctcgctcagcagatggactaaagcggtgcgcttagaaagatgaccctttgctcagtgaacatgcacaacttatccttcttccagattcttctttgcgctcaaccgaggagtgttgcactcagcgaatgactcgctaagaagacaggttggcttagcgagagggtaaaaatcagcactatacaaactcacctaattaacctgaaattgagagaaaataattattaaacacaaaaaatggaagtactaagtatttattaactatctttacccaaaagtaattacaatactacaaaattgccataaattggaggagtttgatacaatttatacaagttttatacacaaaagttagtcgtattcatcgactaacaggtatctctttgggaaatata

SEQ ID NO: 180720 - DNA, 370 bp, Glycine max
tcttcttatgcaagcactctattggtggagaagcttctccttacatggctcattctctagtggattgcgcctcctttcaccttttctcctatatctttctctacaactccatggttgaaaatcactattgaaaggccttattaaagctcaaagatctagcctccatataaacatgtaaaccaagctttcatcaagtggtatcagagcacaataccttcacctatgtgctccttaaacctccattaattttcagctttaccttctcctccattgatgatgcttcattattctccatgtatctcctcacatgtattgtgctgaatgttggtaacatgattattttagaattcccactgattaaacttgctat

SEQ ID NO: 180721 - DNA, 526 bp, Glycine max
agcttctaattcaaaaagttttggatgtctctggcttttgtgacacaaataaatacaagtttcatattccagaatgtcattaagggccctccttggttcaaatgatatcatgtgcatgttgatagatatggttatggtgtgcctcttcagacatgcatatattcctgaatcatataagggagtagggacaatctcctaaaaatgaaccaccagccctattatagcttgcaatcagcaggcaataggtagacaaacctattgtccttaaggattgaaacattttactgattagtaattaaatttgattgtgattctcttatgggcatagacttggtctacttagattttagctagtcctagctagctcctaataatatatcctaaccttccattggaacttggaagttgtcttacaaaaaattgataatttgattttacaatgaaactagactattagtatgtaattaacaaggagtagaatatagattacaacctcaactatgttgctaaataccaagtttgtgta

SEQ ID NO: 180722 - DNA, 591 bp, Glycine max
tgactcatttatttaaacaaacctaattataagcttgagtttggcttttttgaaaaaactaaagcatgagcttgagcttgaatggtttagctcatttaaaatttgattattttttaacttgcaaaaaaattattaaatcattttttaactgtcaatttattatttaataaaatattttaatactatgtaataatctacaaataaaatatgtgttaaacatatgatatgatattgtagaatctatgtaattttaatttttatattctatttataaacgagctatttatgagttattaatgtcaagcttgtaaaacttaggcttagcttgagtttgtttatttcattaaacaaacgagtttgatggagcatttagcaagttgaactcgagaagttcacgaataacttgactcatttacatctctatctagaaatacttttgaatttttaattaagtgtcgcattatatatagattgttaacatagtggtaataaatgacatttgtttatagtgataactattatttatggtgatgaaaattgaatgaaaaataattttcatttatagaaataagaaatattatattttatatt

SEQ ID NO: 180723 - DNA, 501 bp, Glycine max
agcttctgacgagtgattatcgatcctctcatcaccttcaataatatctttgactatatatataattgatattttttcacaataaaccactaaaaataatataacttatagcacataatcaaaacactacgatttgaaacattttttcagcaatttattttatcccgtgattttaaactgctaccaattttaaatatttttgttcacctgttactatagtctttatttaaagaaccttgctatttggtacgaaatatacacgctagaaagtagctaagacatacctgaaccaatcacggttgtatggggtcacttaaaatctgatgattaatatttttttcttcaaaaatacaatttgtaactagtatgtaattttttcgtacaatattcatctttttcgttattataaatactcaaggacaaatatggtacatcataaatgaagcccacctctgtcagtataataaaaaattctaacacaagtgaataagatcgaggaca

SEQ ID NO: 180724 - DNA, 553 bp, Glycine max
tcaggattgtgtttagaaaaaaatatcccgtgaactccatccacaatctgagttgagaaaagctcaatgaaaatgaaggaaagtagtagttatggtttcagaaatcaataaatgatgaaaaggaaaaactagaacaaacttacatatttttttaacactgaaaaatcaagtacaacgacaggaatttcaaatgtcattgctctgattaataatggaggaaaaccctgcacctcttgagcagaaccatataggatgatatcagccattagtaacacactattcacatcaccattcaagccatagtgccttatggaaccctgacgaagtcccatacgtgaagcaactccctacatagacagctaataaatcagtaaacaattcaaagacaatatattcaagctgagatatcgtcactaaagataagtcaaacataataaaacagagcattgccacaaatatattctgagagttcatcttcaaaatttctatttctattttttcagtatcaaatttacattacaatgctcaattttggttcatgtattcttttatt

SEQ ID NO: 180725 - DNA, 311 bp, Glycine max
agcttgcatactattgtttgataaaacaaaaagaggatggtaagccttggtatttcgatatcaaacgatacatcaaggacaaagaatacccgcctgaggcctctaacaatgacaagaggacattacagaggttggcaaccagtttcctcctgagtagggatgtcctatataaaagaaaccatgatatggtattgcttcggtgtgggaatgcaaatgaagctgggcagatactaacagaagtgcatgaagggtcatttggcacccatgccaatggacatgccatggcccaaaagattatgagaagtggatat

SEQ ID NO: 180726 - DNA, 540 bp, Glycine max
  unsure (1)..(540): unsure at all n locations
ttaacaccaaaatctttctccaatcgcaccaaaccctaacccctaaaacgcgtggccacaatgataaagacgaggaccagacatcacactcacacgtcgtctaaacataaccctccacgatagcgacaacgggccaaatcattaaccctaatcgccttctatggagaactttgacagaaacctagcaagcaacagataaacatattgattggtcttctgaagcaatgttgttatgtcctttccatatgacacaaacgatgtctttttctttgtttttataaaataattaatccaacatgtataaacattaacaccaaaggttacacatggcaacacgtgtaatcttatgtgtccagttgacgatcacgtaggtagataacgattttgaactaacagcaaagacctaagacaaaaattttcaaatattagggacccaatctaaaagataaatttatcagagaccaaatgtaaaaaacagatgtttatcaagaatcaaaaacatatttaaaccttcttttcctcaaagntaaatttgatgag

SEQ ID NO: 180727 - DNA, 283 bp, Glycine max
agctttatatatgaaattaaggacttcatcatcgaccaacaactttatactgaaataatatctcacttaacattgtaatatccaagacataggaattgttccaagtaaaaggacatgagaattgtacctgtgtgtagatataaacttggagaatatttaggacaatcatttatgtcatgttctctaacataagctgttaacttgaatacatggtgaatatctttgaaatttggccccctgctgagggttatacctagcagcctatgtagtactttttctccat

SEQ ID NO: 180728 - DNA, 470 bp, Glycine max
taccaataaacttgttcttcttaacaaaaccttttatatcttcacagagtagtgctaaatggtaccaaaacaaaaccttttatatcttcacacagagtagtgctaaatggtacgaaagacttcagaaaattttaacgaaacagatgttttaatataattggcaaattgttttcaatttaatagataaaaaggatttgataattaacgaaaatcataggtgatcacacaatatatgcagtattcgtgcaatatgaattggtaagtaattcccttttattaatttagcatgtgaattggcatgaaacctgtaaccagaacttcccaccatgaccaaccaatctaagatgctgttcttctatatagactcaaggaagaaaaaagatagttaactcgtgcaatgcattaataacgaaaattgtcattagtaacaattttttttgtcactaatgcattaatttcttgtatgatcg

SEQ ID NO: 180729 - DNA, 583 bp, Glycine max
agcttatctcaattttgtaatcgaggcaaaagcttgacttgtttgaaattttgtagtttgcctatagcttgaatagcttctttccctttatcaaatctcttctcaaagtattttaaaatttagtaatttagtttttagtagacattttcatgttagaagatacagcaaatattttaagtgaaagagagtgaaagaatatatgaactaattgtagtcctttgttctctagacagaattacaatttactgagtaatagcctgagtcacgtagcttgtgtttagatcctttatatgattgaatttaaagctaagcttgagcttggttttagtaaaacaaacaagtttgattatatttaacgggttgagcttgaatagttgaggaatagctcaacccatttacgttctttaggataccattctcgtggttcaacttacaagactatcaactgtatatgcaaacaataattttacagattcttccaggattatttaaggaaattaaggagcagaacagatctgtggcacattcttcatataaatattatcaatgccttgtccaaaccaaattgaaattgatggtttac

SEQ ID NO: 180730 - DNA, 617 bp, Glycine max
  unsure (1)..(617): unsure at all n locations
tcacagcaaatgatagaatgtctatagttttatcatttgacaatttattgttattatatgtcttatccttcatatatatagactcttttttttcatctttttcaactgtgaatttttacataattcataaattttatttgataccttgcatagcattgcatttagcaaatacaatttaacatgcttggtttataagtattgacacaaaaaaggcttatgaaaataccttgtattgcatgttgctagggcttattaaaaatatcaaataattttacatgtgtctgtgaaatcagacttattaatgatgcgataaattatgtaactatcatgtctctcgttgatgttgctaaaaaaattgtttatgaagtatagggattaaaagtgcattttgcaaaaagtttaaagatcgagaacataattaacccattaaattattatcaataaaataaccttaaatntaaaatacaaacataggtacatgtaatntatattatcaattattgataaaaaaaaatataataatgtttatgtgaacaaaatatttttttgaccaaaaaataaacgcatgttttttatattcaaaatcattttacagttaaatatttaatggttataaa

SEQ ID NO: 180731 - DNA, 988 bp, Glycine max
  unsure (1)..(988): unsure at all n locations
cacacggaacgagaatcgaagcggctgtccnatcattcgtatctgaatgaattaccatgacgaacgagctttttcnnnccccggaggggtggacctggaagaccccggtttttgaaaaccccccgaggcagccaattgcaaaaaaagggagggagaaactttttttaaaccccaataagcagacacggggggggtgtttaaagcccatccccccaaaagtgaaccacaggaagtaacaaacagacgtagattcaagagaaacaaagaaataaggagcgcagttaagctcagacagcaggagacagagtgagcaacaagaagccccgttcatgcaacaccaaaaaagcgcgaatagaagagcgcacgaaacaggcagaaagtagactgactcctaatacaaaaacgcgaatgatgacaatagacgaaatgacgctaataagaaaagaggacacatcgcgcagaccgagacagacgaactggcagcagagaaaaaaacgacggagaagaacgtgtggaactacgacacgccaccgaggcgatccacataaataaaaggtgggagtaaacagacagggcataattggattgatcgggaaaaaggactcgcggggagtatgatcaatacgattgcaccgaaacgggcacgtaggcaaaacctaagtcaactatcacttggacagagaacgaactacgaggcagtcaatcgattacaccgcaacggacggcatacgtagacagacacagcggatggtataggacagaaaactcgacagaaaataaaagctatagtatatggatgtgcatagactcccgacaaagaacgttatcaggagggcgagaataacctacgacaaaagtgattcaagaatcgattctacctctaaaccgccgccgaactaacaccgtacctgcgtatatcacaaaattctcgacctccgcaacgattacgtaatcctcacgcatcgacggatatagacaccggaagacc

SEQ ID NO: 180732 - DNA, 835 bp, Glycine max
  unsure (1)..(835): unsure at all n locations
gcccagtcccatgacncctttgataccctgctatttagtgacactattaatctcagccttatagcgcgggttagggagagaaacgatttacttacaactttatttaatcgactttagtaggggacaatgtagttgagccttgcatcttgcataattatgagactaaaatatccccagtggagaatacctttgcataatgcttttttttttcaactttatacacacatagttaaacaacttataactgtgcctaagctaaaaagcttcttcttttgaacctagcacccagatttaaggttccaattcaattattcccggatcttttaaatttagttaagggaacttccctttgttcttttttaaaacttgccccttccttaactttgacccagatacaaagatgagtcccccgaaagtacccatacctgtgactcccttttttttgttcattgtgcaatccatgaaatgtaatgagtacgtatggaagtttattgacttttccccccacctgaagaaattttttccattttttcacatcttcgttcggagaaataaaagactccggctcttttcttttctgggcgaccaaaaaaaagttctctctccctctctgggtttctcaatttctttcgcaacacagtaaaaaatcttttaaaaaatctcactcacttttccgcgaaataatatgataagcctaggttgtgttcctacatattcacaacttttttctttgccaaaaaagatgttccccactcttttccctatagcctttttagcgagaaaaacacttcacttctacacaggtagtagtagcttttcgacgcctatctctgcn

SEQ ID NO: 180733 - DNA, 435 bp, Glycine max
agcttgtttaatctttccatatgagtatcctgacctatgaaatcaaaagttttccttaatattataaaccaaagaaaaggtatacaattatcaaatattttggcaaataaatacaaacagtttcaggacaaagatttgctctaaataattgctaaaagataggaaacttactacattttgatgagttgtatcatattctacgattgtttaatatgaagatgtaaaatgaaagtgcctgaattgaaacaaagtgacaaatctcaaatatgtattttccatcttctgagtataactccatatatagctagtatgcttatcagaattgtcccatccagctcccattgtcttaccaaacaagtctgcatgaatccacttcattacgaaccatttcttacctttaatcacaagtcatccaacattgagactgctagtgat

SEQ ID NO: 180734 - DNA, 515 bp, Glycine max
  unsure (1)..(515): unsure at all n locations
tgtacctggaagaacttgttccctggagctattgagaaaagcttgatgattttagagcactgcaagaaaaagggtctattaaagatgcacaatgggtgtgggatcaaataattgtgcctgcagtataaacccattgaagaagaacatgcttgcattttgatgatgacaattcacaatatattttgaagagaccaacaatgacatcttatctggcagtcaaagactgtaaaagatggcattccatcggttttaatggcatcccagattttggatcttgtgtcatttagtttaatttgactctaacattaactagtttgttatttaacctgctatgtttattaactattaagaaatacattagagccattacatgcaatcactctttcataaaaaaaaatccactttgttcttttgctcatccctattggggcataataaattcccaaatntgtaaggtttttggattatcagatttaaaaaatgcttaacctgactatttaagaataaaactgtga

SEQ ID NO: 180735 - DNA, 467 bp, Glycine max
  unsure (1)..(467): unsure at all n locations
agctttatgatcacacatcaggggaatagaagtcaatcctaacaaatgcactgctattttagagatgcacagtcctattatcgtccaggaagtccataagctgaatggaagactagcatccttgtgagactaaacctgcgaacaacctttcttagccttcaagaagaccattgtcacattgccagtcctaagtcaacctaggccaggagtacccttactcctatatctctcagtagttgatgaagcagttagcccatcccttttacaagaggaagggaagcaccagctccctatctacttcaccagcagcatactctatgatgccgagatgcgctaccaaatgatagaaaaggtggcactaacactcattacctcagcccagtgtctcagaccctacctttaaagtcattgagtggtagtcaagacgcactataccctatcaaacaggttntgccaaagcctaaact

SEQ ID NO: 180736 - DNA, 377 bp, Glycine max
ttgacagaaatccgacatcgtaacattgtaaagttacatgggttttgttcacattcacaatactcatttttggtgtgtgagtttctggagaatggcgacgtcaaaaaaatttttaaagatgatgaacaaacaattgcgtttgattggaataaaagggtggatgttgttaaaggtgtagcaaatgctttatgctatatgcatcatgattgctcacctccaatcgttcatcgtgatatatcaagcaagaatgttcttttggattccgattatgtagctcatgtcttagacttcggaacagccaaattttttaatccagattcatccaattggacctcctttgcagaacctttgatatgctgctcccggttaatttcctt

SEQ ID NO: 180737 - DNA, 519 bp, Glycine max
agcttgtcttgtgcagaattagggcacacaatttttgtacagcttttacacactttatagaacttccagggcacaaaattccacagcaaccatagtgcctatttagggaatagagccctagaagcagcaaagaggagcagcttgtgcattgaagcctaggttttgtcatttgagagagattattgagtagaaagtgagtgtgagatgctgagaaaaggaggaggaggaatcccccttcttgtgtaacgaactatcattctctgcttttaatctcatttattgttagggtttctttgtaatggctggctaaacaccctagttggggatttctaatgaacaactgatgtaaatacataatatctaattcattgtgttttctgtgttcaatgcatcattcaatgcttgatgtttggatgcttttggtctgtcacccatttgcatgcatagttaagtgactttagcattgggaaatgtattgttgccttaaaacttgattgaaaaagattgaaacttaatctt

SEQ ID NO: 180738 - DNA, 402 bp, Glycine max
atgcctttagggcttgtacctcatcactttcttccgaagctttaacctcattgtctctcacagactttaaatctggcagccaatccaatccttgtgtgcggactctcagccacttatgatagccgccgatgctcccattactgtttcccctaagctctctatcctttcttcacaccgcatcacatgccttgtgaactccttagagtaccctcgcattggggtcactgaaaccccgtgtgatgaaaggcgtgatgctttcgtctgatggcactcctctcatggggtagccaagctgtcttatggcgaggacgggattataatgaatacaaccccttgttccatcaagggaacatttggacatccttcgcatgaagatcgaatcctgattcttccttccttcta

SEQ ID NO: 180739 - DNA, 987 bp, Glycine max
  unsure (1)..(987): unsure at all n locations
tccactccgatcntagagatctctatcggactcggantgtcttcaaactctctcaatgactttcgttaactatcttacgtacatataataaaattctacacccnnnncnaaagagagatgttgttgtagtctctgtccccgggcatccttttgatncgacctgcgagcatgcaagcntgaaaagcatgaagcccgtaaataacttgtttgtttttataatatatacaaatggcgtaacaaagttttggataagatgaacgcatctcgtatatgatgagatcttagtcctagggcattgtgaagagctataaattttaattcttcttatccttattccatgccttggaccaatgattagctcatgaattagtatgaaagattattctttccctaaagcttcttacaaaaacctcaccccctactttgaaacatggtcttgcaacaattgaattgaatccaattgccctcatttggttaatcgactgtcccaagtcatatttcatgaatagaggaaggttgctatagcttgaaagtaattcgatatacctcactttgataaatcgaatacccaacctccagaaaacacaagaaaaggctctttggactgaatctaaaatcgattaccatacatgataatcctgtttcccagccagcatagaacgaactaatattttgatattgaaatgaattaatactcaccccttgtgaaatcgatgaatcagggtctggaatatcaaaacaaatggaatttcgacaaataaattggatacccattgtataatcgataaacttctttttaactggtaaaactactacatccccccatgcgtttaaatttaaaaacaacactgaatgtgcccaaaatttaccgacacacattttcatagaaatttcttaaaaacgaatagtcatctgcattatgttggtagaattcgaacttgacacaataatcgctttaattgggagacgcggtgatttcagggaccc

SEQ ID NO: 180740 - DNA, 550 bp, Glycine max
tgccaaaaataaagaatgaaaaatgggagatttgaatcaagtgagatgtattaaggaataaggatgaagtagggaaagttttggtcacaaatcaagatataaaaaagagatctaagagttattttaatatttttataagcattttgatgatggactgggattgactttgtaatagggaaggactattaatgtaggaggacaaacagaatttggcttaccaccgtagaattcagattggagtggtaaaataggtccttaagaggatgatggatggatagtggtgaaatgattggtctagatggtattcctattgaggtttggaagtgtgtacgaatctcgagttaagaatattttaagaatcttggataagactactattgaggtttggaagtgtgtaggaatctcgagttaagaatattttaagaatcttggataagactactattgttcttgatgctcattttaataatataaataatagagtattttatactaaggaatattcttcataatttgtttccttatttgatcaagagttcagtactaatat

SEQ ID NO: 180741 - DNA, 555 bp, Glycine max
agcttatgaccattcgaatttctcgagagtttccgttgttcaatttcgagcgtgtagatgagttatgtccccgaatcggacatctgtgtgaaaagttatgaccattcgattttctcgagagcttccgttgttcaatttcgagcgtctcgatatattatgaccccgaatcggacatctgtgtgaaaacgtatgaccattcgattttctcgagagcttccgttgatcaatttcgagcgtctagatgagttatgtccccgaatcgaacattcgagtgaaaacttatgaccattcgaatttctcgagagcttccgttgttcaatttcgagcgtctcgatatattatgttcccgaatcgggcatccgagtgaaaagttatgaccattcgaatttctcgagagcttccgctgttcaatttcgagcgtctcgatatattatggccccgaatcggacatccgtgtgaaaacttatgaccattcgaatttctcgagagcttccgttgttcaatttcgagcgtgtagatgagttatgtcctccaatggacattgggtgaaaagtt

SEQ ID NO: 180742 - DNA, 612 bp, Glycine max
  unsure (1)..(612): unsure at all n locations
tcatgggagagtcaaagatcaaattgagaggaaaaataatttctatgctaaacaagccaacaaaggaagaaagaaggttgtcttcgaacccggagattgggtttgggtgcacatgagaaaagaaaggtttccggaacagaggaaatcaaagcttcaacaatggggagatggaccatttcaagtgcttgaaagaatcaatgacaatgcttacaaagttgagctgcccggtgagtataatgttagttccaccttcaatgtctttgatttacctctttttgatgcagatgtagaatccgatttgaggacaaatccttctcaagagggagagaatgatgaggacatgaccaagagcaagggcaaggatccacttgaaggacttggaggacctatgacaagggctagagcaaggaaagccaaggaagctcttcaacaagtgctgtccatactatttgaatacaagcccaagtttcaaggagaaaagtccaaggttgtgagttgtatcatggcccanatggangangactaaatgacaccactttgtctcaatttttagagtgtttagtttgtctaaataatggcccaatccttgtaaagttgctgaccaaaaatatg

SEQ ID NO: 180743 - DNA, 530 bp, Glycine max
agcttagggtatgtcataccctaatttcgtccggggacctttgcttgatgacatgcgacctttgtttggtccttgtaaggtgcttggcacccatcattaggcaatttgtgaaattccgggacatgccgaaaaacaaaagaaaatattgatgcacaatccgtaaaggttccgtgacacaccggaaatcaaatggaagcatcgttgcataatttagtgaggttccgtaacattccgtaagtcaaaaaggggatgattctgtaatccgcaaggttccgtaaacattacggaaagaaaacaagtatcgttacgaaattcgtaagtttccgtaactttacgaaaaaagaatcaccaaaaaaaggtagagggggtgtacttagtaaaaatgggggtgcaaataacaaccaggcccacttgggccctccagaagattcctccagaaggcttgtgcttctggaggaagcaaccctgctcgcctgggcgagctgagctcgcctgggcgagctgggcggcaaacatctcccttattttgc

SEQ ID NO: 180744 - DNA, 362 bp, Glycine max
tgcttgtggagcttctatggaggctggatctttgagcttcaatgaggtcctttaatggtggatttccaccatggagaagcagcggaagacaaaagaaaagaggggagaggaggcgccatccactaaggaataagccatggaagaaggagcttcaccaccaagatgagccttggataaaaagcttgtacagaagcttcaatggatgaaaagaaagaaggagagaaagatagaggggggaggcacaaaattgaatgaagaaaacaagggagagaagttgaactttgagttgtgtctcacaagactctcaattcatcaaagatacaacaagtgttacacatgcttctatttatagactaggtagc

SEQ ID NO: 180745 - DNA, 730 bp, Glycine max
agcttgaaaaacaaagtgaagaaagttttatctgcattaattgggtacatagaacaagccacaagatactcatttgagatctcagacagaaaaccagaactttctatgtcaaatcacatggctcttgttgttcttcattatggcttgtctttttttgttgccctttggttcaaagcacatggcagtggtttgaactagcaagcgtaggaccattactaataagttatcaagcaatggaccggataggattattagaactttcgacgagctcagagaatcaaattctcattattaagtgcaaaagacaaggcattattaaatgtatagacaaagtactcgagggtgtacaagataatttggccattatggtagatgaaaacaaatggaccacataaaaactagcattttcagggtttctatttaaaaaattcccatcttattcaatggaccccgcggcatgtagtaatacgtaacacggccaaagtatcatcaggtggtaatttctttttaatttagtattttggggcaaattttaaattaatattcctatgggaataaggtgtagtagatgtttaatattaaaattatcaaactattatggaattttattttactttttacgttggaaaacgaaaaaaattttatgaattttttaaataaggacttaaaggtataaatttttttttttacgaattaaaggcataaaacatattttttttttaaaaaaaat

SEQ ID NO: 180746 - DNA, 554 bp, Glycine max
tgctcgtcttgctgatatttatcatgcagacttttctgatgatgaccgaggaacaattagggatcaacttgaaacttatgtgcttcaagtgagaagaaatgcttctttttccacttgtgaagatgttcaaagtttggctatgaagatggttcaaactgagaaacatttggtatttccattggtttataaacttattgagctagctttgatattgccggtgtcgacagcatccgttgaaagagctttttcagcaatgaagattatcaagtctaaattgcgcaataagatcaacgatgtgtggttcaatgacttgatggtatgttacaccgagcgggagatattcaagtcacttgatgatattgatattattcgaacatttaccgcaaagaagtctcggaaaggacacttgcctcgtaattttatttaacccgctattgtaagaatatgcttatctcttttattttaaactatatttttggtgacaaaatgacgagtctcttttattttgattgattactatttacatattatatacaaggtgaatttgctatctt

SEQ ID NO: 180747 - DNA, 715 bp, Glycine max
agcttgtaaagaaaaatgatggcatgacttttatccaatcttattatgttgaaaagctattgaagaagtttaattattttgatgcgaaacatgctcttactccttatgactcatccatcaagttaaagaaaaatttgagtaaatgaatttctttacataaatattctcaaagtatcggttctttgttgcatttgacaaacttctctatgcctgtctgatattgcacatgcagttggtagattggaaagtaattgagggatttagtgatataaaattgaagttctgattttgatgaaataaaaatgagaagtggttatgtctttgctttagctagttgtgcagtatcatgaaaatctactagacaagttattatttcacatgaaagcaaaaattattgctttaaatactgctactagtgaggttgaatttcttaaaaatgtattatgtgatttgtcattgttaaataagcgtatacctccaattccaatgcattgtgatagtcaaattgctatatctaaagtgacaagaaaaattttaatgaaaaaagaagacacttaagagtgagacataagtctttaagaaattggatttctcatgatgtcatttcttttgactttggcaggtcaaaaaataatattacagatccgcttacacaaaggttgacctgtcaacaagtatttgagtcttcgagggaaatgaaataaaaccctttatt

SEQ ID NO: 180748 - DNA, 615 bp, Glycine max
  unsure (1)..(615): unsure at all n locations
ttttcaaagtcaactttgaaaaccatgcaggggttatttttgaatttagcttcagctaagacctcattaactatcattacacccgggaggatatgtctgcctttgaaaaaaacaatttgtctttaatcaattaaatgaagcagcacaagagccagcctattagccagactttggacattattttgtagacacaccctatgagagagatgggtctatagtcattaagagattgggggctattggttttggggatgagggctatgaaggatgcattacttcctttggggaatctgccattaatgaataattcatcaaagaatctgataaaattaggttttagagtttcccaaaactgtttgatgaaattgaaattcaaaccatccgagccaagacttttatctcccccgcaagcccaaactgcagacttgatttccagctcggtgaatctatcaacaaggctttccttctgcctttgatcaagggaagagaactagatcccttcaaggttggtctgcaaggattctactttgagaatctttctttanagtgctgaagaactgcaatcttgacactgttagggtcantggatccatcctccatcaatacacagacctt

SEQ ID NO: 180749 - DNA, 917 bp, Glycine max
  unsure (1)..(917): unsure at all n locations
accacaccatacgtctgaagtacttatccaacttctttcaccacatggctttacctctaaacttacaaataacctctttcntcnccacagagaggtgttgacttcctcgcccgagcagcttaatatagaactaccggctgcaagctcgtctcacctgccaaccacaaataacctcgcatttgtatatcctactgactcccatcataatgcgacgtgtatcctatccaaaacagaagctcgtaggttactttaatgacattaactctctactaggagggcacacagagcacaagcaataaactagggcagctaataggaatacggaagagcccctatgatgtaaacaacactcactgcctccatgaagggagtctgacgcaacgaagaattctacacgtgcccggttaaaaacaatacttgtaggtcatatcaatcacaaatgacttactaccggaagtacgagtgagtctaatactatttacgaaacttttcataaatgaacatgaagcactgggtcagattcacaccacaataccttattcctttatagctcacgctaacacctggattctaccgcgaaccggcgaatgaaaatgcccatgccatcgttacaaacaccgtacatggtctcgatcatcatattgttgcaaacaacaaacccctcaaaatcgcaaaacattaaagggagaaaataacccgtattcgtgtatgtaactgatactaaaaagattctccaagtagatcaccatttatagagccttctgctgaccccctccacattctcgaacgtcatctgaagagtctatacaccagaccgtatgacattattcgactacgagaaatcataaaatcatcaggaatagagacaaccggtagtgaagaagtggggtcctacaaacacctgtgctccgtcctta

SEQ ID NO: 180750 - DNA, 429 bp, Glycine max
tccgttttcaatttcgaccgtctcgataaattaccggactcattcggacatccgcgtataaagctattgtcatttcaatctgctcagagcttctagtcttaattttgagcgtctcgatatattacccgattcaatctgacatccgagtaaaaagctattggtccttgaatttgatacgagcttccattttcaattgggatcatctctcgatatagtacgacgctctgttgcgcatccgactaaaaagatattgccgttagacatggtctaagaaatcccatcttcatttgggggcgtgtccatatatcacgggactgatccaaacatccgtgtatagtgtttttggctttccaattttctcagatctcctattctaagttgagcgcgtctccagatgtttcccgattctttcgcactatcgaataaaaa

SEQ ID NO: 180751 - DNA, 373 bp, Glycine max
agcttatgcacggaaaatgtaattatgaaattgagatgcctgaagaaaaaccatttcctagttaaccatgcattaagtaccatgtacaattattttgtttttaagtgaaacgggtttatgatcccaacatggttggctcgtggtgcctaacacatgatactaagaatgtagtgtgaagattcacgcttcccccttttttgtttttgatctgcagaggaaaactcgtggatgagcaaacatgaaaacctatgggatgcttttgaggatatcaaaaagttagaagatcacatatgcatgctgatgccatgactcatgcgttatgtgaagctggaacatcattaccgagaaatggaagacacatccatttttatgt

SEQ ID NO: 180752 - DNA, 310 bp, Glycine max
ttttggagtagaaacatgggaccaactcattttatttcaaaaaggaagtcgtatctagtcaaggtcttagagaccatacaaggttcctaccgatttctaattatgtgggccattaagtctatcatatgctgacaatagccgagaagtccgtggatctcttcgggggcggagtaagtgtctgccatcgccttggccttggctaacaatcggggaagttcttgactcccaatcctggaaacagctaaccgatccatccacatagttgccagcaggtgtaaatattatatcaccctttctctagcctattttt

SEQ ID NO: 180753 - DNA, 598 bp, Glycine max
agcttctcccccaattttctataaatagggggagaagtgaagtgaaaaagggttcagccccttaggcacttatctctctttcgaatttgcttggaaaaattgtttctgtgaagaaaatccaagccgaggcgcttctgaaacgttttcgtaacgtttccgtgaggaatttcgcgaaggtttcgaccgttcttcgacgttcttcattcgttcttcatccttcttcgatcttcaacgggtaaatacctcgaaccaagcttttcgattcattctatgtacccgtggtggtccacattgtgtttcgtgtatttttattctcgtttcattcactttttatacccccctttgacgtgcttaagccattttatttaagtcatttctcgcttaacctaaaaataatataaatttccaccgatcggttgaattgtattatccggtaacttcggttaaaatgaattccgaccggtcggtcgtgccgtaaccacgttggaaatcaaaaaagaggtacaataatattctcataataaaaaaagacgtcttttaataaaataaagcggaaaatcattcggccgttttcttttgggatttctcattcttaatt

SEQ ID NO: 180754 - DNA, 630 bp, Glycine max
tgccacccagctcgcccaggcgagctcagctagcccaagcgagcagggttgcttcctccagaagtaacagccttctggaaggcccaagtgggcctggttgctatttgcacccccatttttactaagtacaccccattgcctttttttttgtgattcttttttcgtaaagttacggaaacttatgaatttcgtaacgatacttgttttctttccgtaatgttacggaaccttgcggattacataatcatcccctttttgacttacggaatgttacggaacctcactaatcatccccttttttgatttccggtgtgtcacggaaccttacggattgtgcatcaatattttcttttgttttccggcatgtcccggaatttcacaaattgcctaatgatgggtgccaagcacctcacaaggaccaaacaaaagttgcatgtcatcaagcaaaggtccccggacgaaactaaggtatgacagcgtgtaaatcctgacattgacaaaaactgccacacatggggcaattttgaaagctgttgtagatatctctaatgactcatcacgattttcaagtttgtaccattattgtaaaccacagttacaatgttaaatgaaatggataaagttgatatc

SEQ ID NO: 180755 - DNA, 359 bp, Glycine max
tgcatgcttgctcacgttatatagggagtcgacagttctatcttttcagccttcttaccatgtaataacggatcattttttaaggtccattcggctcataagtgatcactttttaagttaacagaacccccagattcatctcttaagattgaactacgtaggtctgatttcctctgcaaaggaggactcttacgatacatgagccccgcttttgtcgacctccaaaataagaataaatccaaggtactgccccacaatttggacaatatcttgctttgaagctgctgttctttgaaacaaagatgagatgctctaatcccttactcagtcgaaagtacaactccctacctgctaatttt

SEQ ID NO: 180756 - DNA, 558 bp, Glycine max
ttcatcctaagcctaaactgtattatttgatttgatcataggaaaagggggaaaaagatacaagatataaacatgaatacaaataagaaattgtaaactacattacttgaattcctattatatacaaccagcataccgagttgaatttggataatttcctcccaccaccaacttcaacctcaaggggagaattacaagaacaaatggtttagtgtcaaaaaagatagcacacagacaaattaaaaaagatagcctgaacagctactggagttctatgaatatgtcttggcacttaagatgacctgccatacttgttaactgaattcatatgattcatctacatctgcaagttgtttggtcttgaaaattgattatgcatggctgagttaacaacaaggttattatcacaaccaacaaattgctgactaaatgccggagaaacagtatcaggcagaataggtagctcagagttaccaattgtttgggtatcagacctattacggataaaacaaactcttggctaaaagtatctatttgagtgttaacattttgattaac

SEQ ID NO: 180757 - DNA, 1288 bp, Glycine max
  unsure (1)..(1288): unsure at all n locations
tcactcgcgcactctgcaanttcgtcaanactcgtaaactcttacactctgtcactctgttgcgtctgttattganacatgaaacatgccactttncagtatctcttnccaannncccccgaggagagaattgttggacatcgtattacgacccccatacttttcttatagagaacatctcaagccgtgcgaagtcctggtaatancacaacatgtcatgtgaacaagcatgctaatctatctgcttaatcaagcgcctaataacctcactcacggcacgtttagttgttctacccacgtaaatactatgcgtgctcagtcgctgaagaaatcctctatcgcttcaaagccataactaagggatttgcttagtacacacggacagaacctcgttatcactagatggatgccccacaccggaattagtggaaccttatcgctgcactaattggacgaagaaatcccttgtgatggccgcattgtatggatattagcaccactggccggtaggactcgaaaaatagcgaaatgtaacttttcctgaccgaattcgcgacctcaatttcagctccaccgctatcgttagaccaaaacgctagggcgctcaaacaatcagtcatcgagccatcgcggaactggaatcgaatactaaatcagcctgagcctgagcatctgctctgcctacgaatgcaaccacgaatcggatcgactcgggcatccgaaatgcttgagtgatttcctcttgcaattcttctgtatatctcattgcgactgtgcattgcacaactgaccgcgtgtgtctaatcggcgtcggaataacacactctacttcgtacatgtgcctctacacttcatcagagacacaattatacgtagaacgttagcccaccagtaacgcaacacgcgagggggtggcgtaaggtcggatcacacgatgaggtagtacgcgtctgcgagggcgaggaagaaagacacattctctatcggtgagtatacactaacattttctggcaatgtggtaggacactgaatgcttcacttcattttcacctgcggtctcgtatcggagacagcgacctcctaatactttcgtcattcacaacacagaaaatgagaagcagactcggataagcccaccctctatacttgaccgtctgagtgatatataacactcttcatgtgtataacgaagccgttcagatcgtcttggaacgtgtaatctacgcacacctacaaaagaactcgctcgctaatactttaagcacacatatcacagtcgcatatctca

SEQ ID NO: 180758 - DNA, 636 bp, Glycine max
tgttccggcgccaccagcgaccgctcgcaacgacgacacttgttgggtaccatgctgaattttactaatttacgggatcaaaccacgcggtgatgatatggtttgcctttaagaaagtcaaaaagtatattaccagtttgttggaaatccccattgggccttctgttgttaaaacgtgactccaagttctttcaaagataaatgataaagtgatattctcatggaacatgagaaattattgactattattttgaatgataaaaattatttccgtaaaatattaaaatttaatcaaacatattaaaagataaatagaatgtgatgggattaaaacaagaaaaaggttttacagcctaaaaaaagttacatagtatgtgtttagtcctttcaaaatgagtgaaatttaactttggtttctctaaatttctttttgaattttattcttaagaaatataatttggcctattcttatgaatttaatggttatacattattcatgtaaaacctaactctatatcattattgaatcattagtcatcatttaaattactttaggacaattattttgaaaataataaatttatcatacttaatttaaaattattttaaaagtaaccaaatttatcattgtgaatt

SEQ ID NO: 180759 - DNA, 463 bp, Glycine max
agcttatcctgccattttattcattcacgctattctgcatcattcttcctttgaccatgttccttcctgaagccgagctcccagcctgggttgtttgttacattcctggaatcatgtccctcctaagtgttctcccagctccacggtcatttccatttatagttccttaccttctatttgagaacactatgtcggtaactaaatttaatgccatgatatctggattattacgctttggaagttcttacgagtgggtggttacaaaaaagttgggaaggtcatcagagacagatttggttgcctttgagaaagaagctgaacctctaatgcgatctactagtcttcatagatcatcctcagattcaggcattgaggaactaagcaaactagaattgtcaaagaaaactgggaagaccaataaaaatcgtcttttcaagaaagaactttatctcgcattaatttt

SEQ ID NO: 180760 - DNA, 586 bp, Glycine max
tcatgactagggcttccaacaggatggcctttaaaatttcaattgattcttttgcgtatgcccttggggcagcgctgccactgcttattgcaatctttttctccgggttttttgctggttataaagtctcttctcttatcaccatggttggtgcttgttgacacacaaaagaaagaaaattaggatcaatctatgttttattttaatctcattgtactttgattaattacctaattaaaccaggattatgcatcctcgaggatggctattttacctaagctagctaagttgttctggccttggccctccttgtggatctaataatttttagcttgaatattgtacttaccaaaatccgaagctagcacacataagggtgaacgtggctaaggtggacttctgaacttcgcacatcgactaagagtgacctttgttaggaggacaaaagggggacctgcaaaattaaggacttcaacgctcaagtaaatttatgagttatgaaaataatagagtatgagtacacgagtatgaaaatgggtgtgcatgtgtgttagaaatgtgttaagggttcaaaggaacttgttac

SEQ ID NO: 180761 - DNA, 630 bp, Glycine max
  unsure (1)..(630): unsure at all n locations
agctttctccactaagttgcctgatgcttgaaatgtattttctgatggcagtggtcctagatgcagggaagaatttctccaagaacaccctcttaaggtcatcctagctggtaatggacctgggagcaaggtagtacaaccaatcttttgtcactccctccagagaatgaggaaaagcctttagaaagatatgatcttcctggacatcagggggcttcatggtggaacagacaatatggaactctttaagattcttatgaggatcttcacttgcaagaccatgaaacttgggcagcaaatgtattagtccagtcttgagaacatatggaacatcgtcatcaggatattgaatgcacaagctttcataagtgaagtcagctgcaaccatctccctaagagtcctctcacgaggtggagattgagccatgttcttagtatgaaaattagcagccgaatgctcaaaatcagaatgttcagaccaacaacagaatgctcaaaatgcacagaatgattaggatgcacagaatgataaggatgcccagaatgatcangatgcacactatgccttactaatatatgaaaggttctatcttattcagggatcaaggggtgtaaatcacctggattggc

SEQ ID NO: 180762 - DNA, 501 bp, Glycine max
acactatctagatctcaagcttacaacataaactaccctcattctttgattcatttaatataggggaacttattccaaggattaccaaatgaggacccctatgaacatttggcaacattcattgaaatctgtaacactgtaaagattgcaggtgtgccatatgaagccattatactcaatctatattcaatttccttagtaggagaagccaaaaggtggctacactcatttaagggtgacaatctgaaaacctgtgaagaagttgttgaaaagtttctgaagaaatatttcctatagtcaaagactgtgaaagggaaagctacaatctcttcatttcatcagttgcctgacgagtccttgagttaagcgttggaaaggtttacaggtctattgagaaagactcccacccatgggttctttgagccaattaagttgaatatgtttatggactggctgagaccacagaccaagcaactactatatgcttcataagggggaaaa

SEQ ID NO: 180763 - DNA, 511 bp, Glycine max
agcttgtaattgattaaaccgatacgagagatttctctgtaagctagaaacatttatgtaatcgattacgatcaatctgtaatcaattaaaatagaaagtcttaacttcaaaaaaaatcttctaactttataaactattcctcttactcctacaagatgatgcatgatgcacatatgaaataatagagactaagatggaacacacaatataaccctcaatacaaatgccactcaagagagttgggcatgtaaaagacaaaaaattttcaagctcttcttcaagattcaaggctaggtctttatgattctccccctatctataacaatctcccccttttggctttgatgacgccaaacttgaattttccatttgagtacatttggagagtcttaagagtaaagacttttcttagtcaaacctaaaactttcttaacattaagagaagtaccaattcatatcatcatcattaagtagagctttatatgaatgtatgatgccatggggtacaaa

SEQ ID NO: 180764 - DNA, 441 bp, Glycine max
tatcgttatggcctgcctccggacttcaccccccgtgccaccccggaagatttaagccaagcccctactttcgaggggcagctcccaccttatgaagactatcccgggcaagacgatggggaaggagatacccatcttggccccctgctccacctcaaagatccatccccgcatgaactaccccagccgaacatagtccgccatatcccggcctcacccacacccgtaaaagaatttgttcccttcgtggaagataagggaaagattgaggcgcttgaagagaggttaagagcagtccagggccttggcaattacccattctcggatttggcggatttatgtctcgtgcccaagatcgtcatccctcccaaattcaaagtaccggactttgataagtacaaaggtacgacatgtccgaaggggcatctttggatgtaatgc

SEQ ID NO: 180765 - DNA, 586 bp, Glycine max
  unsure (1)..(586): unsure at all n locations
agcttatcaggtaggcccaactgctattactaatataagaggcccatgatttaggaagagggcaagaatacagagggcaagaaagatcgtttttagagaagaaaaatgagtttggcggcgtctaagctcaaggactgcattttgtttttctcttcatcaaatcctttgattcccatagctatgagtaactaattccatgtctgttgggtttggtgtaattagactaccttcatctaattcctgctttttttattcaataaagcaattgttattgttcttcttttgtgcctattgcctttgattgatcacctaattacttgattcattgtgttcaattgtatttggaaaaatctatttgaactgtgaattgaagaagacaatgaataatttttatgcctagggatagtgtaacaaggattgttcatcgttaaaacccttatccttaatgcaagtcgtttggctacacttttcaaggattggtattgaagtcaaaggacttaagttctctcgcctaaagaattaaagttaggataaattgtgtattggtnataacgtaatctcaattgaataaagattattggtaatg

SEQ ID NO: 180766 - DNA, 634 bp, Glycine max
tgaaggtaaactagatgccttggttaacctggtaacccaactggccatgaataaaaaatctgcacttgttgccagactctgtggtttatgctcctatgctgaccaccacacagacctttgcccttctatgcaacaatctaaagtaattgaacagcctgaagcttatgctgcaaacatctacaatagacctcctcaacctcagtagcaaaatcagccacaacagaacaattatgacctctccagcaacaagtgcaatcctgggtggaggaatcatcccaaccttagatggtcgagtccttcacaacaacatcaacaataagattagccttattttcaaaatgctgctggcccaagcagaccatacgttcctccaccaatccggcagcaacaacaacaacagccccagaaacaacaaacaattgaggctcctccgcaaccttcccttgaagaacttgtgaggcaaatgactatgcaaaacatccagtttcaacaagagaccagagcctccattcagagcttaactaatcagatgggacaattggctacacagttaaatcaacaacaatcccagaattctgacagattaccttcttaatctgtccagactcccaaaaatgtgagtgccattacattg

SEQ ID NO: 180767 - DNA, 540 bp, Glycine max
agcttgggagttctgagtccatgagggtactcagaagctaaagggaatcactaatagggtctatttccgctgaatctttcgtctttgattttttttttttcctttcaatggggtagagagggttttctctctcaaaatccaattttatctcttcacaagagataaatttttctatgatgaattgtctaattattagagctatactaataaagaaattagaaacaaattgagcaatgaatttctaaatagggcaaaagttatggataaggaatttatttctctggatatattagaaaaccaaattcgattgtctaatgatgaaactaaaacaaatatttaactaaaatatctctcaatttggatattgaacagagagaaagagtggaagcattttggtgcctgttgtgaagatgatacccacaaatattctgatgcaagtagaataaacaatgtgaagcattttctggaggtttaaactggccgaaaattcttaaaacccttttaaaacacttttagccaagcattttttagcgggttttt

SEQ ID NO: 180768 - DNA, 380 bp, Glycine max
taaggagacgctgactcaatttatgtagatatccatgtccaaatacaggagcacaaagtcatccatcaagaacttggagatacaagtaagacacttagccaaacaaatggttgagaagcccactagttgctttggagctaacatatagaagaacccgaaggaggaatgcaaggcgatgttgactagaagccaaaggagagcacaaggtgaagaagagaaagctgaaggaaaccagtctgaggatagaaagagcagactatgaaagagagaaagagaaagaagagaagaagagtagaacgtcttaacctttaagaccaaaagccagctagctcgagaggtaagaaagaagagccactagtccctctaaaagagctctcata

SEQ ID NO: 180769 - DNA, 791 bp, Glycine max
  unsure (1)..(791): unsure at all n locations
agacgaggttgaancctgaggccctcgcagaggcttcataatatgggacagacaacccagcgggattgacattaattcattaaaatgatggtttttgtttttttaagatcacaaactaacggggcggaggggggatttttatttgaattagacttccctccattgaccataaaattaataaatattagtcaatattggaatactgccttaggtcattaattaattgaactcaaaataccttaaattatattcaattacaccgtaaatattgataaaacctaaaaaaaaatcatttaatatctgagcaaatgtaaaatccattgcttcaatttttgatttatcacatgcaattcaacatacatttcttaataagaaccctgcaactcacaaaaaatctaaaaaatcgcttgctgaataattcattgaacaccaacactactctttagctacacggtaaaacattcactgacaaattaaatgtacgccccaaattataatagaagaaacactaaaatttcttaaaaacacatttaataatctcgaataacttctaattcgctcccaatatcagatactcacaaacattatttatacaaaaacactcttaccaaccatgcttccgaaaatttatactccttaccaattggtagcactcaatatcttaacttacaaaaaattaaacctcatatccaataggctaactaccatttataaacactactaagtaatagtctatcattttatatacaaggaagcaatccctcttacacataaactgtacaaccgtataa

SEQ ID NO: 180770 - DNA, 181 bp, Glycine max
tttcataacccttcccacttcttacatgtaacgacgtatgtttaagggcacttttttatcttgacatcaaagagcctgcggtgcatttaatgtaactactcttgaacacccttcctgttattatcatgacgaatgacttgcctctattctaaggaattttttatttaccttttatgcatac

SEQ ID NO: 180771 - DNA, 419 bp, Glycine max
  unsure (1)..(419): unsure at all n locations
agctttntgtaagaatggaggagaggaagaaaatacaatagcaccaagttttgcccaatgaacttttcttgacaaagcaagtgttgaacaaaaactcttagaaagatgttgagaattaagcatctttaaattcgtgtcatggtcacatatttatagccatttgatggctcttgaggaatcatgttaaaagttgtgactcttggcaaaagctaatcactttaaaagttgtgactctctggcaaaaactaatcactttaaaagttgtgactcttgacaaaaactaatcacatacaaaagaattctaaggcggttagtcctttgaatgcttttgtataagggaaagggaagaatcaaaagaattctcagactgtgccgtcttgaattctttgacaagggagaagggagacacaaaagaattc

SEQ ID NO: 180772 - DNA, 458 bp, Glycine max
  unsure (1)..(458): unsure at all n locations
atatatttgagggactcatggtcactatgaatgacaaattccttgggataaaggtaagtgtgccatgttttcaaagcccgtactaaggcatacaactccttatcataagttgaatangtaagggtaggaccacttaacttttcactaaaataagcaattggatggtcttcttgcatcaacacagccccaatcccaacatttgaagcatcacactcgatttcaaaagatttttgaaagtttggcaacgcaagtatggnggcattaattagctnttgcttaataacattgaaagcttcttcttgtttctctccccatttgaaaccaacatttttcttgagcacttcattgagaggtgctgccaatgtgctaaaatccttcacaaatcgtctataanaactntctaagccatgagaactcctcacctcggtcacggacttatgtgtaggctattcttgaat

SEQ ID NO: 180773 - DNA, 497 bp, Glycine max
  unsure (1)..(497): unsure at all n locations
atctctaagtcacctgaggcatgcaagcttgtacacaataccatattgaaagatgaaaaatctaagactcagaatggtttctgctatccttgaacccaagctcctgatatgagcctgtcgatggaataatttatgaatattgagacacggatatttgaatacagtcaaacaatgatgaaaccaaatgtgtccatacatccaagatccaacaaaacattatcatctctactacattgagttctaaaaaagtgtccaattattagagtatgttgtcagtcaactgtaaaaacagttctgtaaactaattgtaagggctgttagcttttgctaacagcacctatcctagagttagttagagttggttaggttctgttagttagttagttacaatctgttacaataacagaacagaggtctatatatacctcttttgtaaccttctgtaattaactntgataatcaataaaatcagcctttctgtcaacgattttctcttc

SEQ ID NO: 180774 - DNA, 473 bp, Glycine max
  unsure (1)..(473): unsure at all n locations
tccctgatatattgagaacatattggataactacaactntgtagtaaaacaccttctattatttgaagccacaaagttcagcagaaccacaatgaacaccaggaaatattaattgatttaatacaaattcatctgcttgcgggagatcattctatcagagcgaatcacaagccgatgaaaatgctaataacaattggttgggatcagatataaaataatacaatggttcttcaacaataaatcaagttctcatcacatcttactttggcaatccctcctcgagaagtcacttcaacaaagaggcgatgcaaatctagttctcttcctccaacaatgggaatcctgcaacaaaatttcaaatgccacacaagtaactaanaaggagttggggggacatgctnttatgttacaaagttatgcaattaaaaggcattaataattaggaggagacaatagttccaaaaactacaaaa

SEQ ID NO: 180775 - DNA, 470 bp, Glycine max
  unsure (1)..(470): unsure at all n locations
agcttgtccnncaattttctataaacagggggagaagtgaagtaganaacggttcagccccttaggcacttctctctctttcgaanttgcttaggaaaattgttcttgtgaagaaaatccaagccgaggcgcttccgtaacgtttccgtgagtgatttcgcgaaggttttcgaccgttcttcgacgttcttcatcgttcttcagtcttcaacgggtaagtacctcanaccaagcttttcaattcattctatgtacccgtggtggtccaaatttggtttcatgtatttttagtctcgttttcatttactttttatacccccttttgacgtgcttaagccatttatttaagtcatttctcgcttaacctaaaaataaaataaatttccaccgatcatttgaattgtatcatccgttaactttgngtgaaataaattccgaccgatcggtcgtgccgcaaccacattggaaat

SEQ ID NO: 180776 - DNA, 479 bp, Glycine max
  unsure (1)..(479): unsure at all n locations
ctataattctcagcttggtctctatagatcttacacagcagaatctctcanaactctctggaacttggaccttctctctctagaaaccctagacacgcanagctctgaatcccagtccaaactccccttctgaaatctgatttcaggcttaaataggtggccttgtttgtgctcgtgagcttaacacacttatggaccgcttagtgcacattagtgaatttcggcttagcgtgttcctttctcgcttagcaaatgaactgaagcggtgcacttagcgaacctgtacatcttatcttcttccagagtcttcctcgcgcttagcccatgagtgttgcgcttagcggaggctcgctaagccagcagattggcttagcgagaaggtgaanaatagcactttccaaagcttgcctaattaacctgaaattgagagaacatgataattaaacaaacaaaaaggaagtactaagtatttattacct

SEQ ID NO: 180777 - DNA, 454 bp, Glycine max
  unsure (1)..(454): unsure at all n locations
agcttcttatccaaggctcatcttggtggtgaagctccttctttcatggcttattccctagtggatggcgccgcctcttacctcttctcctttgtcttccgctgcatctccatggtggaaaatcaccattaaaggacctcattgaagctcaaagatccagcttccatagaagctccacaagcaagtttccatcaggaatgatgcaatcctaccccgcaagggcattggatagaagactccaagtagattgggctagagatgcaagagaaggccctagggttctcatgagccttaggatagatttcgggcccatgggctaagtatgagcccacttatctttgtacatattagattaaggtttcattaattntgggtcttttatttaaggctccataatgtaggaagggtaccctagaaatataggaattttcagcccttgtattttagggcacct

SEQ ID NO: 180778 - DNA, 459 bp, Glycine max
  unsure (1)..(459): unsure at all n locations
tgaacgaatgtaagacacatcttcttcaactntggtgattcttgactccatctcattgaagcgcatatccacttgtaattccaaagtgtcaaacctttcaccaacaaaggtttgaagacaatcaaacctgtccaaaatctttgaaagaagagatgaatcttctccatcatgtccttcaccaacatgtcgagcaccctttttcacccaagagccatcatgctctttttgataaccaaaggatgctatgactgaagcgcctataaggaaggatcttttgattggaacatagggttcagaatcaagaggaatgttaaagtgttgaaagaaaagggtgactaaatgtggatatggcaatggagcattcaatcgcaatgccttatgcatgcgatatctaacaagacgtgcccaatcaatttgtaggcctttatgaaaagcccacataataatgagatcttcttc

SEQ ID NO: 180779 - DNA, 416 bp, Glycine max
  unsure (1)..(416): unsure at all n locations
agctnganagaacatttcctaagaaagtattttccaataggtgctagacatgcaaaggagatggagtttctacgactaattcaggagaacatgactatgaacgagtactcatccaaattcgaatacttgtctagattttgcacctagactacttcaaaagaatggagatgttgaaattatgaagaaggagaaagaattgagatacagaaaacaatcatcccggtgactattanagagttcccaaagctagttgaaaggatcaagacagttgagtgtcttgagtatggtaatagagttgttaggactcgtgaagcttgaccatgtggattaaggaaaagattccagtagaaaaaacgtgcagtaggccccaagaccagcaaaagacaagatctttaattatcagtagtatgcacaca

SEQ ID NO: 180780 - DNA, 472 bp, Glycine max
  unsure (1)..(472): unsure at all n locations
tataagaacannaatgcctcaatcatttccaaatatacatgtgaattangaagcatcgacaagaatcaagccaagactatggtgcaagcaatcaatggggcaaaacacaccaaatgattatgatgatggatggctcaaattctcacaaaggtaaactcatcactttcaaattgagctttcaaaactatcatgacatgtagaggagaatcaaggatttcaagtcacaagatatcaagaaattntattttcaaaacaattacccatttcttgaacatatcctataattcaaagaaaaacatgcaaagtcgtacatgcacacaaaattgacccaaaatattaaactaaaaatccgacgaaactaacaaattaacaaattaacacaactaacaaattaacaaaaccaacaaaactagcaaaaccaaagaacactcccccccatacttaaacaacacattgtcctcaatgtagcaca

SEQ ID NO: 180781 - DNA, 345 bp, Glycine max
actttgaagctatttaataatgtttaattatttacaagcctttgttcatgggtggacaatccttacaaataattacctgattcccttctagttatttgaagttagaatgaaattttactctgtagtttaagcttaagtttaagttagtagatgaaacaagccaatatacttgtttattctaaactactatcgttatgatgaattattttaattctgtcatgtaggtatatcatgaattcaattattacagtgttgtatttcaacggaagagtatatgaagacaatgatggtgtaatatctgaaggcagtaaaaatgcgattcacaataaacgcgaaattagtttc

SEQ ID NO: 180782 - DNA, 396 bp, Glycine max
  unsure (1)..(396): unsure at all n locations
atcctctagagacacccgccgcatgcaagctntgcatacnccaaggatccattatgaaattacttgtgaaagagagccatgtgggtgggttcatgggccactttggaatagacaagacccttgtcttactcaaagaaaagttttattggccccatatgaagaaagatgtccataagcattgcactacgtgtgtggcttgtttacaagccaagtctagggtgatatctcatgggctatacacacccttacccatcccatctgcaccttgngtagacattaatatggactttgtncttgggctttctagaacccaaagaggtgtagactctatctttgtggtggtggataggtgtagcaagatggcacactntataccatgctacaacgtggatgatg

SEQ ID NO: 180783 - DNA, 245 bp, Glycine max
caacccgggcatagtcggtcagcgagaacctgtaatgtacctaagcaggcgagctcctggcagtcaacagataaaaggaaaacaagaccacaaagcaaggaggcttgtggtggctggccagcttgtgaatttgtataatatgtggattgtggcctctggtaatcgattactaagggtgggtaatcgattacaaggctaaaaattgaagacaggaggctaagatggtctctggtaatcgattacca

SEQ ID NO: 180784 - DNA, 436 bp, Glycine max
  unsure (1)..(436): unsure at all n locations
agctagtaccatanattacaaccatgcctgtcattgtcttgatttaggagcaataacagaatcatgaataaagtatttgtgcagttgaagccaattaactgaaatgaaagcaaatacaattttctatttttttgttctcattnttttaagttttttcctgttgtagtagttactttttattgattcttggatatcatgatgatgctttgtataaacttgctactatcaggtatgtctatgcctaccatggaacaaagggaggaattgtatgatcccttggcaatggcctggtggaccaagcccgcttattaattattataactcggatgcaatgttttttttattagaaatcactatctatttgactggttgtagtgtaggtgcttaaattgaaacaatggtgtgttatgtataaaaaaaatggattatacatatt

SEQ ID NO: 180785 - DNA, 455 bp, Glycine max
  unsure (1)..(455): unsure at all n locations
tctgcatcgggaaggtaagtgttggtgcgaanatggaagaagaatccatgagatagagaatgaaagaatggatatgcgtgttgttgaagaagaaggagattgggaatatactgtgtgtgttgtgaatgtgaagtgaaggggatggaacatgaggctcggaacttggttgtgaaaatttgagggatggatcttcttagtgcctcaatagattttttattttttctagccacgaggggatatggatgaaatgaattttttttttttttacttttacatacactatgacaaacaattgtaggtataagtattttttgacttttacctacactaatttatgtgtgtaggcaaaagtctccgtaagtatatgtcattnttcttgtagtgagggagctatgggaccagcaaaacctgcagataggccagatcatgagggtgatgatcccctatatctgatg

SEQ ID NO: 180786 - DNA, 418 bp, Glycine max
agcttagaaatcaagtgcttagaaatcaagtgatcaagtgatcattaattccaaaacatagggggagtatgaaatgagtgaatgtaacattatatcttgcatatactctgcttgtatcttgatttcaggaattaaattgtcatcataaaaaagggggagattgtagaacaagcaaagactttgactttgatgttatgatgatgccatatgatcatgagggtttgatatcttatgaaaatgcacttctcaagtttaattcaagacaaaaatccaagaatacaacatacaacatcaagaagatctctagtgatttaggaagggaattccaaattgaaacaacaaaatgtttggccaagaaatttaagctaaaatgtcttttcaagttattactctctgcaatcgataccaaaggatgtat

SEQ ID NO: 180787 - DNA, 458 bp, Glycine max
  unsure (1)..(458): unsure at all n locations
tgttaactaatcaatcgtatttctgattctcaattganaaagaaacataatatttggccaagctatcactggccaatcaatcatccgatctctaacttataaagaagattcataattgataaaaatgttgtactttaaatggtagaagaatttaagttataacttgccaataagttaactgatctccaacgtataaagaagattcatgattgataaaaacactctaagttatttagttgtttaattttctgctagaagttattgtgtcattcatgtctatctcaaccatgtactcttgtatatggcggtttatttatatcgatcatgtcatttgtgtcgatttcatccatgaactattggtgtcatggcggtttatttgtgccaatcgtgtcaattctgctagagttttcccgtgatgatcatgatcgtgatcattccttacttcgtttcttattcgg

SEQ ID NO: 180788 - DNA, 397 bp, Glycine max
  unsure (1)..(397): unsure at all n locations
agcttgtagcanatgcaaacggcaataacattttactcgaatgttctatttagtcacgtaatgcatcaaaatgctcgaaattgaaaacagaagctcggtgcaaattcaaacgacaattagtttttactcggatgtccgattgagtcccttcatatatcgagacgctcgaaattgaaaacggaagcttgtactatattcaaacgacaatcatnttttactcggatgtccgatggagtcccgtaatatatcgagacgctcgaaattgcaaacagaagctctgagcaaattcaaacgacaataacttttttttcgaatgtccgatggagtcccgtaatatatcgagacgctcgtaatggaaaacagaggctctgacataattctacaacaatacatttta

SEQ ID NO: 180789 - DNA, 428 bp, Glycine max
  unsure (1)..(428): unsure at all n locations
tcgaaattgaacaacgtaagctctcgagaaattcaaatggacataacttttaactcgggtatccgatttaggctcatcacatatagagacgctcaaaattgaacaacggaagctctcgagaaattcaaatggtcataacttttaactcggaggtccgattcaggcgcataatatatcgagacgctcgaaattgaacaacggaagctctcgagaaattcaaatggacataacttttaactcggatgtccgattcaggcgcatcatatatagagacgctcgaaattgaacaacggaagctctcgagaaattcaaatggacataacttttaactcggaggtccgattcaggcgcataatatatcgagacgctcgaaattgaacaacggaagctctcgagaaattcaaatggacataacttntaactcggat

SEQ ID NO: 180790 - DNA, 298 bp, Glycine max
  unsure (1)..(298): unsure at all n locations
agcttatatggaggctggatctttgagcttcaatgaggtccttcaatggtgattntccatcatggagatgcagcagaagataaaggaaaagaggtaagagcaggcgccatccactacggaataagccatggaagaaggagcttcaccaccaagagagtgccttggataagaggcttatagagaaagcttcaatggaggaaaataaagagagagagaggaaaagagggagaaaaagtgaacttcgaagtatgtctcacaagactctcattcatcanagttacaacaagcattacacatg

SEQ ID NO: 180791 - DNA, 446 bp, Glycine max
  unsure (1)..(446): unsure at all n locations
ntaggatatgtaatttatattntatagttcaagacaagcaaaatgaaacaataactcaactactgtgaccactccaacataactattgccactgaacaagttacttcatgtttagaattctgcattttatataatcaacatatgaaagatggagaaaatattgtaatttcatgacattaaccccacttgtggtgattgatgtangtggtgattgagttatttattggattcttgcttccatttgggaccgtgttgctcatcatcacaggtacaaatgtttgttaccgattaattnttttattacttgttcactgccattaaagacaactaatatttgatatacaaattntgttcatgatgagagaaccttagattcccgtttgagactgaatgcaatgattcttgcagacagtttgcattaatcaatgtattcaatcttgaattgg

SEQ ID NO: 180792 - DNA, 303 bp, Glycine max
  unsure (1)..(303): unsure at all n locations
agcttctcccncattntcctatatatagggggagaagtgaatggaacanatgttcacccctcctggtaatttgagaatcacttgaaattagtgaaacaaattgtttccgtgaagaacatccaagccgaggcgcttctgtaacgtttccgcgggtgatctcgcgaagattttcaaccgttcttcgacgttcttcgttcgttcttcgtcgttcttcggacttcaaccgataagttcccgaaatcgaacttttcaattcattctatgtacgcttagttgtcctcatttgtcttcacgcgcctttat

SEQ ID NO: 180793 - DNA, 440 bp, Glycine max
agcttgtactgagattcttttcttattaataatatgccagctaaaatatttttggtacctatagtttggcaattgccagctaaaaaatacacgctcacacaaattgaaacatctaccccctcccacataccaacccagttatgttaatcataattaactttaattatgatgattatcattataaatacataaatattataaaacagaggaaagcagcctggataccaggttcttctttgattcttgagaggtggttggcaattttagcctagcaaacaactcctggataaatgtactgtcatccttcaacaaagagacaatctaaaaataatagagtagacaacaataaggacatcattcactaaattaaatgatatgtctttattcctagttaatcaaatcttagatagacctgaccctttcaaacctctttctcatac

SEQ ID NO: 180794 - DNA, 406 bp, Glycine max
  unsure (1)..(406): unsure at all n locations
tctatagaaactcccagccacccaactgataagcttttattaataaaacaatagaccttttattaagccactcaattccctctaattggcttgcaatcaagtattatgttgagctgaagaagtataatattaaaaacaacataaaatatcattattattgagttatataataagtagaataaaacaatcaaggaaaggttgatcatttgacctttcaccactaaccacacaaacaacacaagagtagccgatcacaaagaanagagatattcgtaggtcaggcacaaagtagcttatcacaaggaaaggaggagacaaatcacaagattaaacttacctttacaccatcatgtgtacatttcttctttatctcctctccaaaattatcctttcttataccatatat

SEQ ID NO: 180795 - DNA, 422 bp, Glycine max
  unsure (1)..(422): unsure at all n locations
agctngcaaaagacaatgcaataagggccttatccatgggctcttgcgaactccatccaacaaccatgatgcacatggatcttcaacttggtttctacattagccaattaatataagtgatgtggattgttctacattagtaggtccttgcatgtccttattgccatatcttttaataattaagtcactttatttatttatcggagttttctaagttgtgaatcttgattccaaaacatcaaccacatcaaataatgatgaaaataacccaaacatttgattaattaaacgaaataataagaagatgagtcaatcctttgcgatggttacgataagatttcaatgaattntcatttggttatcatatctctaggatattaaaataacataaaaatcttattatcattntgtggggggggggg

SEQ ID NO: 180796 - DNA, 469 bp, Glycine max
  unsure (1)..(469): unsure at all n locations
atactcagctttttcttccnagttgcccttggcggtcgacaacacctatcttctccaacggcttcatcggcctaaatccacatggtctctgatgctgaaggagcgtgtggcacaaatgctgagtggaaagggcaactttggaagataaaagtgtttgccaactatcgtgttttaattgggtccttggaataacctccatctctctaatacttcccttaaattaaactatgatgtataaagtttttaggtaagggaaatttgttaaattttaaataattattttaaaagtttatatcaataattattatttatttattattagttgttaatacatatttattcaactttaaaattaagaattatccttgtgataataaaaaaattatccttgttttattntgttntgcaacaattganaaagaaacaaataaagaattcatgattntaaaatatcaatttgaaccaattc

SEQ ID NO: 180797 - DNA, 434 bp, Glycine max
  unsure (1)..(434): unsure at all n locations
agctnttcanaatatttatgtatttcttttataaccttccttctctcttcttcaacctanaagtttccaaaatcttgttctcaaactcgtgactcttccctcacgtcgatgatcatcttcttcaagaaacgccgtctgaacttgcgagcgtctatcgggtgcgggcgtagggggacacataaaattgcacctgccagtcatgggagcagttgtcgctatccatcacgtgacggaggtgcttgccggcgcggaggatctcgatcattccttggatcgctgacggaatgctgtggtcgggtgaggtgatgtatgtcgccgtatcccgattcccctacgacttcccatgccgtatcagtattcttaattttagaagcacaccaaccatatattctcttctctttgcattccattttctttcatgctgacaaatttaa

SEQ ID NO: 180798 - DNA, 456 bp, Glycine max
  unsure (1)..(456): unsure at all n locations
tacgttacctatgaaaagaataganattntattgtttacattntgtttgttacaaatcactcatattttgcagaagaaacatcctacttgaagtgggtaaaatcactgtgcatggacagtaaagttttcttttttgtatggttctcaaatggagggaattagatggtcccactaatttttcaattattattttttttttttgcaatttgttaaagtttttgttaatttatgggcacaatttattcaccctcctaactctttctgatgatattacctggtgtacagtgaatttgcggtaattcccattttgagactgatgttgaagctcttatcccgaagcaattttagtgaagacttctccanataatcatggactaaaagtgtagctgagattcttaagttcgcttttcttttgttagtctaccattgttaatctcttttatacatagatttttt

SEQ ID NO: 180799 - DNA, 462 bp, Glycine max
  unsure (1)..(462): unsure at all n locations
agctntgtccgcanaaatcactaataaccgttttaaggtccaacgccttanacggccctctttgcttttatcgattaacatggaccgttcaaaagcataaaatcaatatgtaactttactgcttttgcaagaactacgtaggtctgatttcctcatcgcaattgaggatatgtaggagcaaaagccccgcttttgtcgaccaccccaagagatcgttaatggttcaacgccttaacatttctctcctttcaaaaacaagagatcgttaatggtccaacgccttaacgtttctctcctttcaaaagaatcaaagatcgtttaatggtccaatgccttaaacgacttttgtgcggttaaaatcgatcttgcgaaaaaagatcaaaacaacttaactggaaatactgatcatacattagtatgattaaacattgtanacacaatcaaacaattttcaacaattat

SEQ ID NO: 180800 - DNA, 415 bp, Glycine max
atgcaagtcaattgtaggaaacatctcggagaggatcttttctgtgcatatttgcgcaaaatgtcttgaactaagaagatgttgtccatcatctttctgttcttgatgaaggcagtttgagtttccccaacaatagtctcacgcactgtggctatgcggttggccaaaattctagacacaatcttgtattacaaattacagcaagatatgggtctaaaatggttaacctgagaggtctgatcatgcttaggaataagcgcaataataacatggttgagttgctttaaaaatttgtcagtggtaaagaattcatttaccggctcatagatatcatcaccaatgatattccaagccttcttcgaaaataaatcattgagaccatctggccctacagctttattgttatccatcacag

SEQ ID NO: 180801 - DNA, 323 bp, Glycine max
ttgtcagctatgtggagccaacttcaactgtcttttgatgattttatgaagcattctcgaggctatgaagagtgtgttaagagctccaaatctacaaacatggtgagaaattcatgtttaggtttaaccctccctgtgagagtgacctacttttgaattgggccttcaaagctcgcaataactttagatacaagtgtgaaattatgtttctaagtggaatccttctactgaggagaaaatctataatttgtgacgttgaatcacacactcacttttctataaagaccggccgtggctggtagtggagaaatctaatggtgtag

SEQ ID NO: 180802 - DNA, 380 bp, Glycine max
  unsure (1)..(380): unsure at all n locations
agcttcaggctgttcaattgctccatattgctgcacagaagggcaaatgtctgtatggtggtcggtagaggagcataaaccacagagtcttacgacaggtacatatctttgattcatggccagttgggttaccaggttaaccaaggcgtctagcttaccttcaagcttcttagtttcagatgatgcagctgagtttgaggctacctcatgcactcctccaatgactatagcatcatttctagcgctaaactataaggagttggaagccatcttctcatttaaattcctggcttcagtangggtcatgtcttcaagggctccaccactggcagcatctatcatacttctttccatgttactgagtccttcataaaaatatt

SEQ ID NO: 180803 - DNA, 348 bp, Glycine max
  unsure (1)..(348): unsure at all n locations
taagaaagcttctcaaggaagctacctagtctataaatagaagcatgtgtaacacttgttgtaactttgatgaatgagagtcttgtgagacacaactcaaagttcaacttctctctctttntcttccttcaatttcatgctccctcctctctctttctctctctcattcttttcctccattgaagcatcatctccaagcttcttatccaaggctcatcttgggggtgaagctccttcttccatggcttattccttaatggatgacgcctcctctcacctcttttcctttgtcttacgctgcatctccatgatggaaaatcaccattaaaggaccccattgaagctcaa

SEQ ID NO: 180804 - DNA, 358 bp, Glycine max
agcttcttatctaaggtactctcttggcggtgaagcttcttcttccatggcttattctctagtggatggcacctcctctcaccacttctcttttatctttcgtcgcaactccatggctgagaatcatcattgaagggccttattgatgctcaaagatccatcttccataaaagcttctcaagcatgctttcatacaaaatacacaaatttcttgtcgctaggcctggatctatggattattggagttaaatactccaatgcaaaatcaaaccttttcgctttcaacactaaatataggaaaaactttctattcttcttgcccaataagaagaaccctccaaaaccggaccagtgatga

SEQ ID NO: 180805 - DNA, 457 bp, Glycine max
  unsure (1)..(457): unsure at all n locations
gacactactgaaactcagcttacattgaattgataattcttttataagagattgataatattatgttgcacaagtagtaattagaatttacgagtacttgtatttatggctcgngaataatagagccatgcgccatgtctattttgatacantttttatataatattatgcaggtcccttaacgtgggtactatatatgtatgggtactggtagctatgcttcctcatcataaatcatgcttattggctgagatttattntctcagatgtgcataattaccaaaatatggtgcaaaatttcactattccttttgtttcctacttcattgacgatacttaatattcttaatttggacagctctctttgttccttctttttgcctaaaaaattttaccatacatagacatagagttcattaaatctagcactgaccattattacaaaatctgactggag

SEQ ID NO: 180806 - DNA, 264 bp, Glycine max
aaactctgatgagccatgtgcttattgaataggcgacgcgaacctcttgaggctgatcgcgtgaatcacacatgtctcgaggtggacagcttataatcgaagacatgacgtacatggcgtcatactactgattaaacgcataaacttcagcgttgatgggccacaatatcagtcttaatcaatttataccccagcctgacactaactgtaatttgacgtattctttaagaggatgtgcactagatagctgtcatcggcttaacc

SEQ ID NO: 180807 - DNA, 353 bp, Glycine max
  unsure (1)..(353): unsure at all n locations
agcaagctttgtatattgcctctgtgctggatatagagactactttctactttctagaccaccaagatatcaagttgggaccaacatacactgctgcaccagagttagagtgcctatcaatagggtctgaagcccagtaagaatcacaaaaaccttacatgggaagagttttatgaggtgaggcaagatacaaaataagtcctgaatgtaaagcacccttaagataccttaaaattctttctactgttgtccagtgggattcaagaggtgcagacatgaactggcaactttatttcaacanaactaactctagatgagtgatagtacatactgacagctccacaacagatctg

SEQ ID NO: 180808 - DNA, 413 bp, Glycine max
  unsure (1)..(413): unsure at all n locations
tgtcgattaaattgatttggatccatttggcananaagaaattaaactacaattaanattgacaagaagagatggagaaattaagattgagaatgagaatgaggaattgtgtgggaattgtgaagatcaatgatacaatttataggattctttatggccaatatttagaattntttagtatganaaatagtgaacataacatttatgagttgcaactagtagcaaacagtncaattttttatttgtaaatcgtaaaattttgtagataacgttcaattattcaactactctgatcacctattacaaacaacgacaacatttccaattgtcacaatggtaataactttgtttcttttgacatgcactacacgaggcatcccaggtctcttaaatctccccacacagcattcctt

SEQ ID NO: 180809 - DNA, 370 bp, Glycine max
  unsure (1)..(370): unsure at all n locations
tcttacaagagactaaganatttctgacngaaaattntgagatgaaatatcttggggaagcctcttttgtattaggaatcaagatactaagagatcactctcaagcatnctaaggttgtcacaagagagtatatcgataaggcctagatagattcggcatgaaagatagtaaaccagtagatacccagatagctaaaggaaacaaatttagtctcaaacaacaccccaataatgaccttgaaagaatagagatgcaaaatatttcttatgcattagcattagaaagtctaatgtacgcttaagtttgcactcgtctcgatatagcatttgtagtaggagttctgggtagatattttgagtatcctggaat

SEQ ID NO: 180810 - DNA, 469 bp, Glycine max
  unsure (1)..(469): unsure at all n locations
agctngtatgagctagagagagagagagagagaggcacatgcttgatgctcgtgtgctgagcgtgtgatggattgtgtagaggggttcaatggaacctgtatttatagtaattgaggatgactgttggcctttgtttgtaggggctattgcagcctttctagataattctaggcttctagataatagccaggagcttacatataatgttagagataaacatttacttatagataaaaggtagaagataattgtaccttgtagataatgtgtgagcttatagataattaattatctgctaatagataagatattcaaatacatttgaatattcataagttagagatataacctgtttgttggagagcccgactactaagggtcaatcgtctgtgctcctgtagtagggctaacattgagggtggacacgtgtctttgcgtgtcatatangatgtcacgtgtattntatgg

SEQ ID NO: 180811 - DNA, 427 bp, Glycine max
  unsure (1)..(427): unsure at all n locations
gagctgcactngatcccacaagagaaaaagcggtgcaaacaagcatcacaaaggaatcttctttggttctaatgtccctacagcaagtggccaattcaattccaacagacagtagcaacacccccaagatccccactggaaactgccttaaaatgtgtgccaaagaagttcccaacaccaaacccaacaccaatttggcaacaccaagaagtgccacacacccaccactccttccaccaaatttgtattgtcctgcaagtccaccagcaccatggcaacatggcattgcaccaaaccaactaccaaccaaattcatcaaccctacactcactgaaagtgaagtggcagaaaattccctctctgggaacaaatcctttgacaacttgcaaacagctatcactgagtttagaattgacaatgggagctg

SEQ ID NO: 180812 - DNA, 495 bp, Glycine max
  unsure (1)..(495): unsure at all n locations
atctcagagtcacctgcggcatgcaagcttctaatatctcccacactnnttggngtgggccattcttggatggccttgattntctcagggtccacttggaccccatttctaccaactacaaaccctaagaaaactatattttctacacaaaaagtacacttctctatatttgcatagagggtgtttttcctaaggactgaaagaacttgtctgagatttcataagtgatcatctaggcttctactgtacactaaaatatcatcaaaataaacaactacaaatctacctatgaaatcccttaagacatgatgcataagcctcataaaggtgcttggtgcattagtgagcccaaaaggcatcactagccattcatacaaaccaaacttggtattgaaagcggttntccactcatcaccctttntcatcctgatttggtgatacctaactttaagatcaatntttgaaaagatattggcaccatgcaactcatcaagc

SEQ ID NO: 180813 - DNA, 464 bp, Glycine max
  unsure (1)..(464): unsure at all n locations
ntgacttaagtcatcaagagattataaatatgtgaccatggcatgaatttcatatcatctttctaaaacatctctttcaacaatcaagaaatctatctttcaatcttctctctcaacatcattcaactttttctatagaattttctgattctttttctcttcatctttctaaaagttnttgttcaaaaatttctcttctaagaaaagttctttgttcaaaaacttgtgctattcatctttttcagtctcttctccctttgccaaaagaatgaaggactaaccgcctgagaattcttttatggtacaagttgagggtacatctacttggggattgttatactaagaacaagagagggtacatctcttgtggatcagttcaagtggagggtacatccacttgggttttcaaagagaacaagggagggtacatcccttgtggatctttggcttgtaaaggaatttac

SEQ ID NO: 180814 - DNA, 404 bp, Glycine max
  unsure (1)..(404): unsure at all n locations
agcttacacaaacattcattagtccaacacacactcaacaaatagtcatcatccgtccatagtttcaatcaatcatgctcagtatgatgcatgcacctgacctcaactctcaaatgcaatgtgagaccatccccaacgaaatagcctaagtgtgtccacacgactctcttacttaggagaactaggcagtaagtgtcaaggttaccctatcgtgcaatggcaactccccccttcccctccccccccacggtgatcagcctgagtcttaagggagttccaaatcgagtgacatgcactgacccagcttatactatttccatgtcatatgaagnatgaaacaagggcaccatcaatgctctgaccgtggataatataagatattaaaccctctccctctagagatg

SEQ ID NO: 180815 - DNA, 351 bp, Glycine max
acccaacccgggcatactcagtccgagagaacctatgacgttcctaaacaggcgagctctcggcagtcaaccaataaaataacatagcccacgaagcaaggaggcttgagcggcgactagcccgctatatatcttgcgtcgtatatgaaaattagtcgctggcaatcgattaccattcgggggtaatcgattacagggtttaaaaatggagacaccatgataagtagcttctggtaatcgattaccaattgtgtgtaatcaattacacaatgctacctgctactgcgaatcgatttacatatatgtgtaatcgataacacaactgtattagtagacttcactctgcttctc

SEQ ID NO: 180816 - DNA, 470 bp, Glycine max
  unsure (1)..(470): unsure at all n locations
agcttgtggttgttgtggagctctatttgaagaacctacataagatntgttagaatgtcctagaaaaaagtgttagtgggaccagaatatgcattattattttgtggtctccagccataaggctaatttgaacatgagccacctctgtagccttgatagtttccttggaagttctattgaggtcttgcttgattctatatataatgggcctcctcttcctattgacaatgctgaatagtggccattctgatggtgaccaccacagaagtcacatcttagaactcgttgaacttgatgagcttggtgtgttttttgtgatccaccttattcatattgttgagggagttaacctatctgcttggttaaggcctctatttgttgagacaagagtttgttctgagccaacattgcatttagagtatcaactccattataccatttctttgaatcggagctctatcatggtgact

SEQ ID NO: 180817 - DNA, 484 bp, Glycine max
  unsure (1)..(484): unsure at all n locations
cgacactatgaaactcagcttataagtgcgggtctgggagacgaaggtcaagtggtcgcgatatacgaagatgatgttctgagtacattggatttggtacgaccatgccctcctgatttccagctgggaaattggcgagtggaggaacgccccgcatttacgcaacgagcataatgtaaacctttacggttttaaaagctctatagttgggcctaggatttagagtttttccttttgttaaggctttgtgtcttttgtttttgaatttataatacaaggacctttcttcatctgttcctacgtctctacccattctcattcatttgcatgtttacttctttatttctgaaacggcatatccgatgacgagtcccccgaaggtactaatacctgngacccgcttatcaacttcgagcaagaaacgaatcanacggaagatgaagggaacgaggaagtgggacttcccccagaattagaaaggatg

SEQ ID NO: 180818 - DNA, 459 bp, Glycine max
tgcgcatatatggattcgtccattactttataacagcttatgcatccaaagcgctacacaattgacctggccgaaaatcttttataaaaatattcatcagcgtccaacacatctttttgtccaactcgctaacaaaacttgtggaaatattttatactttcatttaagatttcttcatccaaaaatgaacactcgatataggtcttttctctatgttgttcgaatgctaagggttatttgtgcttacattcttcattgtatgaaccttacactgatattccttttcgtttctttcaaagatgctctaatgtctaaatttcaaacatgaagataaaacaattgtaaatataagcacaacctctgatcacaataaagctacacaacgaggttcacgacaaggagaagaattgaagtgggaagatgcataaatattgtatataccttcagagggtgtctata

SEQ ID NO: 180819 - DNA, 437 bp, Glycine max
  unsure (1)..(437): unsure at all n locations
tgtactccattgaatgccccattgtgcttttcgatctgcctcctacttccacaatcctgctcccctcctatcttcctccanatcaaagtccatagagtgctctaacatggagaagcctatttcaagctacatttcacttccttcacttgaaacacgatctttgtcagatctataactacccctgttacaaccacaatggtttaccactagaatggtatcctccacaattcttactaaatgaatcttgtcattgatcattacccttaacgatgaagatatcatctgaagggacgaagtgaacaccataattcaagcatagtctgctctcaagaaattctttgtttcttcatctatgtcaaccaaagctcatattccattgacaatccttgataagtattcttcccccaactaacaagggaatgccatagcactttacc

SEQ ID NO: 180820 - DNA, 358 bp, Glycine max
  unsure (1)..(358): unsure at all n locations
agcttagagatgcaataatttaatataatttactgtattgtacttagtatctcatagctaaactaaacaacgtatcgaatcatctaattcattaatgttttattnttgtaatatgtgaaggatcaataaaacataacagacaaggaagaacatttttcacgaacgaatgaaaagaaacacttatgtcatgggatgatcaacttaactaccttagactatgttaatatttgaataacttacgagacatttatgaactattataattctactacttttaaacttattcttgtaataaatgtaagatgaatttaatttgtctatcttatcataaggctctgacatgtttgtttgacttaca

SEQ ID NO: 180821 - DNA, 356 bp, Glycine max
  unsure (1)..(356): unsure at all n locations
gtactgaaccgtaccatgagacgtatgtcgtggtttgagatctcctttcttcttttgccacagtgccccgatcctcctagtgtcggcatttgtggaggagacgtgatgcaattctacctcgcaagggcattggatagaaaactcctagtacattgggccagagatgcacgagaaggccctagggttcttatgagccttacggtagatttcgggcccatgggctaagtacgagcccacttatctttgaaatattagattaaggtttcattatttttgggccttggatttagggctccataacgtacatagggtaccctaanatataggatttttcagcccttagattgtaggacatc

SEQ ID NO: 180822 - DNA, 395 bp, Glycine max
agcttgagttgaaatccaccaatgatggaagatcaggtttcagtttttcatcatatgagttacaatagattgtgacatttagtatgtcaagattcatcatctaattgttagtattgtatatgaatgggaacatgtggaaaattcgagtttattgctgtcagaatcaaagcagggagaataagtttgttaaaaaaacaaaaatagtgctatttagtgacccacttatatttatgttgtgactagtgaccacttactagtgacttcagggttgattacatgacttactggttttcttggagtttcaaaaattatactaatatgtagagctggcaaaatgacctgacccgatgggttgggctgggccagaaggctgcacatagggtcatgatgggctc

SEQ ID NO: 180823 - DNA, 436 bp, Glycine max
  unsure (1)..(436): unsure at all n locations
tattattttatattgattgtaactgtaattagtactcatcaactttntacttggactaaaaaattattctctctatttaacaccagtccatcacaaagagtaaacatacattnttatctaattaaaaaaatgattaaatatgtttttttatatctaaaagatatattatttttaagttaatacatacttttggtcaattattaattattaaatacctgaaaaaaatttattttaacataggacctgtattactcttactctgttattccgatgttccgtagctatttcttaatcataatcgntcatcctctttgcaacccagcttctaccctttcgttcctctntgcaatccagcttctaccctttctttgatacagcgacctcgttgaanacctatattacatgaggctatgaagcacggatacccaagtctctt

SEQ ID NO: 180824 - DNA, 434 bp, Glycine max
  unsure (1)..(434): unsure at all n locations
agcttntanaaaanatgactactttcntatagttaaagcaactcgtatcttccaattaccactaaataatccaatctttttacctaataaaagaaagaattaattacaaggatatgttgtatgatacaactaggcaacaaagaaagataaattgtgttcatctaacaaattacaacaataggtggtccagtgatcaagagtaaatttcagaatgacaactaacggaactaaaatgacattcttttacaactaataatgagctttcaatgccaaagttatagcctataaattcaacataatctatataacatttataaacattattagaaagaaccaaacacaagtatgtaagacccaagattcacagaattgatgcaatatgaaagggatggccacaccttttttaagagaacactccatgctctttgattcaa

SEQ ID NO: 180825 - DNA, 443 bp, Glycine max
tgtgcgaagatccatgtataaattgcagcttttggtgtcaatccatggttatatgtattcaagacatcctactatacataccacaagtataaaaggagggccacccaggacccacttcagggtggatcctctcttgaacccggaaaaaaaggatgactcatgagccctcactaggcagggataatgaataatgaaattgatagcacaaaaagatattttacatcaataaaacatgctacattaataaacatttgaagaacccaacgaacccctcgaaggatatcaattacacccaagaagattttagagacgccagacaaggaagcagtatttcaccattgatgaattgtaacttcaatcaaaacaaatatgctattagggaggtaatgaaacagggttgtggtcccctccgaatagaatcgttgaaccaattaccttgaagt

SEQ ID NO: 180826 - DNA, 439 bp, Glycine max
  unsure (1)..(439): unsure at all n locations
agcttgtcgtgccatccncgtttcaacctatacctattccgggctcatatccgtccctcaacataacccgagccaccatcatagcgacaccagataagcgtggctacaccagaggagatttcacataagcactactctcaatttccagtgcttggaatgatgttttcaatgactcctctgcagcctcaacatacgacatagaagacaaacaacttaccaatatgtcttcctcccccgatactataaccagatgcccttccactacaaactntaatttctggtgcagcgttgacgggaccaccccaaccgagtggatccaaggccggtctaacaagcaactgtaggcagggcttatgtccattatttggaaggttatttgacacacgtggcgcttatggatgtgaataagtgtgtggttaacacttgatatgacaactac

SEQ ID NO: 180827 - DNA, 410 bp, Glycine max
  unsure (1)..(410): unsure at all n locations
tctcccccaattttctataaataggcggagaagtgaagtgaataaaggttgatccccttaggctcttctctctctttcgaatttgcttggaaaaattgtttccgtgaagaanatccaagccgaggcgcttccgaaacgtttccgtaaggaatctcgcgaaggtttcgaccgttcttcgacggtcttcattcgttcttcatcgttcttcgatcttcaacgggtaagtacctcgaaccaagctttttttattcattctatgtacccgtggtggtccacattgtgtttcgtgtatttatattctcgtttcgtttactttttatacccccttttgacgtgcttaagccattttatttaagtcatttctcgcttacacctataataaaataaatttccaccgattcgttgaattg

SEQ ID NO: 180828 - DNA, 375 bp, Glycine max
agctttattgcctaacaggccaacttacaatatctagccccaagagacttatcataaggatgcacaggccatagtggagtatgtgaaaagattgtatgaccaagtgaaggtgcgaattgctaagaagaatgaaagctatgccaagcatgccaacaagaaaaggaaggaagtggtacttgaacccggtgatgatcctggacatttgagggcaaatgttatccaagaaggaaggaatgatgagaatcctgaaattggccaaatgcatgctaaaggcccaagtggagaagggcaaaggcccaagtggagaacgacaaagcccccgagtggagaaagatgaacgcccatagacaaaggctctaccaagactattaatta

SEQ ID NO: 180829 - DNA, 448 bp, Glycine max
  unsure (1)..(448): unsure at all n locations
tanaagaatacttaattaaacaacttaagagtgaagtagaaacacttggtttatactggttcactcaaatagagctacatcccagttctcctttacataattgtaaagggttccactaatcaaaactttgattacaaacaagtattcaatcctgccactcctgattgtacaagtattctctatgccactcttgttacacccttagactccccctgaatctaagaacacccaagtattgtttaactctaagccactcctagatttcacaaacaaaagtttgaatgaatacaatgattcaataacactcatagaattcataaatagttaagctaaaaggtcaagttcaattaacaactcattagttcatgaacaatntatacttttgtaaacatcaaaatccaaggtatgataaacaatataaattntgactaagataaaacataatcat

SEQ ID NO: 180830 - DNA, 265 bp, Glycine max
  unsure (1)..(265): unsure at all n locations
agcttncacaacatctaagcaattctacatcctacacatcatgaactatcaaaaccaaggaaaacaaggcagaggcggaaaactcagcccaacacaaaccaatatcacaagttttctcacttaaagaccccagtaacatttccttcgttccaatatgttcaccgatggatcgactcgaagactactggaagtccctagtgcataagtctacatcttgaccattgggatctactaaaagatttccagaaccccatctgtactactt

SEQ ID NO: 180831 - DNA, 120 bp, Glycine max
tattacggacatataaaactaagcttctcgggtattctgcaatgaaaattcgaaagtaggttaccagcgggacattactctcacgacaaaaatggcatatacatctcctcacacagatac

SEQ ID NO: 180832 - DNA, 269 bp, Glycine max
agcttctaataatgaaagttataatattgaaccatgaactctgcttgcacgaatttggttcggagaacaagaagagaaagacaaataacactggcttaacgtagcgcgtgcttctgttggatcgcgggcttaacgcgcgtgttgcaagcttagcgcgttcttatgttggatggcaggcttatcgcgcgcttctggtggatcgcgggcttagtgcgtgacgcgcgctcacctatctttgcaaataataaaacggcagtatcataattaaa

SEQ ID NO: 180833 - DNA, 427 bp, Glycine max
  unsure (1)..(427): unsure at all n locations
tctcccncaattntctataaatagggggagaagtgaagtgaaaaagggttcagccccttatgcacttctctctctttcgaatttgcttgganacaatgtttccgtgaagaaaatctaagccaaggcactttcgaaaccgttccgtaacgtttccatgaggaatttcgcgaaggttttcgaccgttcttcgacgttcttcattcgttcttcgatcttcaacgggtaagtacctcgaaccaagcttctcgattcattctatgtacccgtggtggtccacattgtgtttcgtgtatttntattttcgtttcatttactctttatacccncttttgacgtgcttaagccattttatataagtcatttctcgcttaacctanaaataaaataaatttccaccgatcgttcgaattgtattatccgttaactt

SEQ ID NO: 180834 - DNA, 474 bp, Glycine max
  unsure (1)..(474): unsure at all n locations
agcttgagctgactctatcttggatcattnttatcaggggttatattggcaacttggcataataatatgcatggaattatgttttggctgatggccatgccaaatatttgcccaccttttatctgtaaaaagtttgttatctcttattctatcgtatgagtacatggaaatttatagaagtttagtgattcagtccttttattaaattttcttttgctactcttgaacaaaatatatgtcattatcaaattggtacaaggtagccaaaagatcctaccttggattggattagaaaggcagagggaacacttaagttgtgtaataatatggacagtatgttcctgtctaaaatacaaaattatatccatacataattntttgtgcataactgcatataacataaataagaattgtactaacatttagttaaacatacactgaaagaggataaggtcacactcacatatgacttat

SEQ ID NO: 180835 - DNA, 392 bp, Glycine max
tgttgaacctctcccattactcatataatgtctctccaagttgttgccttattgatgcaagctccattggagcttgtaggcctaggatcttcttcatcaatggattcctttgcttcttggaagatgaatggcagtggaatgaagaaggaagagagagaggagacgccacttcaaggagaagatgagtctagaagaagctcaccaccatatgaggccatggataaaagcttggaggaagaaagagatgaatgaagggagagggagagaagagcacgaaattttgtgctccaaatgagctctgaaatctgaagtttaatattcaaatgatcaaagttgaaaaaaatgcacacacatgacctctatttatagcctaagtgtcacacaaaattgga

SEQ ID NO: 180836 - DNA, 168 bp, Glycine max
ggtgagagtgagatcttacagtgtgagtgaacgactctctgtgagcaataatctttgcatgaatctctgaatcgtagaccgaaacgttagatgaggacaagattacggctatgaatgtgcatacacaagggttatgccctctttgcttacctatgaaaacatgtggat

SEQ ID NO: 180837 - DNA, 406 bp, Glycine max
  unsure (1)..(406): unsure at all n locations
aatgtcaaagaactgggtgttgaaaaagcataacaagactttctgtgattggtttaaagatacaatctttgcatgtgagaatgcttcagaaacattaagaaagctagcagataggcctaaaagaaatgttataacttggcaaggatacgacataaacaagtattcattttacacaaaagcacaagatgagaaaagtacaatgcagaacagcggagtcaccctaagggctgaatctcaacacttcgcaagtgtgaatgacaccaatccctgtgtagcttccatcccttactttgggttcattgatgaaatttgngagcttaactatgtgaaatttactgtatgtattttcaaatgtaaatgggttgatagcaacaccggtgcgcacaccgatgatatangatttaca

SEQ ID NO: 180838 - DNA, 472 bp, Glycine max
  unsure (1)..(472): unsure at all n locations
agcttaacatcagaccacttccagggtgctggaactacttcacatggatttgatggggcctatgcaggttgaaagccttggaggaaagaggtatgcctatgttgttgtggatgatttctccagatttacctgggtcaactttatcagagagaaatcagaaacctttgaagcattcaaagaattgagtctaagacttcaaagagaaaaggactgtgtcatcaagagaatcaggagtgaccatggcagagaatttgaaaacagcaggttcactgaattctgcacatctgaaggcatcacccatgagttctctgcagccattacaccacaacagaatggcatagttgaaaggaaaaacaggactntgcaagaggctgctagggtcatgcttcatgccaaagaacttccctataatctctgggctgaagccatgaacacagcatgctacatccacaacagagtcacacttagaaga

SEQ ID NO: 180839 - DNA, 465 bp, Glycine max
  unsure (1)..(465): unsure at all n locations
tctgatagctggttgtaatcgattaagacaacactgtagtcgattaaaacaaagtttttgcctctgaagaaacttttctaacttagaaatgtttcttcacactaaccatgatgatgcatgatgcaatacagatattaaatttactaagacacaataaccaaggtaacaaccaatataaatgccactcaaggaagtggggcatgtaaaagccaaaaacttcgtcaaaacttcttcaagcttttccttgagctttaagctttagcctttaggttgttcaccatgttgctcatgttgcttatctcatgttgctccccctatctctaacatatagtagtttttcattntgacaattataataccaattctctaaatagctaatgaagtaatatcaaagctatactacacactntntgataaatgtcattcttctgaaattntaatgggttgtagtcggagattatacta

SEQ ID NO: 180840 - DNA, 467 bp, Glycine max
  unsure (1)..(467): unsure at all n locations
tagcttgacgagagggtggtttcatatactcatgctntgaaagatattggcgtggattatggagtcactttcatgacatatgaagtcagtgtggatgtgcatgatgagctgtccggcatgcagaacacgcgcgatgaagattacaatgaaaagaaacaacttccttcacgctcaaagccagaggcagatacagttgcaccatagcatagacctaaagaacaagaaccacatggttttcatgccaaacaagctcaacccactgcgacagctacgtggattccttctaataagggctcttatcacgattcaatgcacgtctcatatccaccatcaagaaataataattcaccagctaacctttcagatgttacctcatcaaaggagagaattactgatgccaaaggaaaagctatttctggntcttatgtctctgaagcaattgcttccatggacatgagaaatgacct

SEQ ID NO: 180841 - DNA, 476 bp, Glycine max
tataacactaagctggacgtcctgctaaataaaattaatctgatgcggtcaacattacttcacatgtagaaagtaatttcaaaaacacacatagctataaaaaataattgaattacgaataatgtatttctaagtaatcatgtaagtgttagttgtcacatcctccctgctgtagcctataaagactaattcttagtaattgtgaaagtaattaaaaactcttaaaaaatcctatggtaattagatacgcattttctagttgtagctgactaacaggtaagttacaaatattactaattatgatttgaagcatcccatgttctggtttgaatttggtttatccctagtttaacttctcatcttgctcttaagagaagtggaaagtctttactaagaatcgtatacatgcactcccaccatggcttcaatgtatccccaacatgaattctaataacaaccttatattattgattaac

SEQ ID NO: 180842 - DNA, 460 bp, Glycine max
  unsure (1)..(460): unsure at all n locations
agcttagacacatttagcagacaaggatgtccaccaataaatataattgccaggaacatttaacttacttgatttcttgtaagtgtcaccagcattgcttcttgaagaggacaacactggatcagcgactgatgtttgcgaggctagagatcgaattacactacaattcctctagctagtgcagttacttcttctcgttgacaagccattactgctgataaaatccctagacaccaatcttactaaattgttttgatgctcttggtgatgatttacattattcagataagaacgggactgcaaagtaccaatagcctgttaatatacttcagcagccatggatgaagaaacattatcatagaggatgaagatacatcttacattttggatcccaggaatatcaacaggttggattccagctaatcctttcgtgagtaatgcttnnaaaataacaaatatg

SEQ ID NO: 180843 - DNA, 447 bp, Glycine max
  unsure (1)..(447): unsure at all n locations
agctcataaatgtcttttctgtgattaactccatcaagttgtgattgataaatgttttacttattaaaagtaattntctagtctccatagtatacacttttaaattttagtccttacggaaacatctcaattttaatccttcaaaaataagacttttcacttttggttcgtggtgtttgactttaatcctaagaaaaatcttcagcagccaaattttctgtagccacagaggatctgcgttcctttaatcttagtaattntatattgaattagtccttctaatattntaattgaaaaataatatttttcactactatntaacttcatttcttaatcgtattgacattctagtttaattcaaaaactgattctaattctcaataactgacaaaaatatagtggtgagaatatcggcttttggatgtanataaatagtcactattatga

SEQ ID NO: 180844 - DNA, 200 bp, Glycine max
agcttcgtgcattgcacacacactattaagagtgcaagaccattaacagtcacaattgacactaaacgtaaggagctcgacatgaatatatacctttgtgataatgacttttttattaaatttgtctatgaacaaacagaatttggaccgatttacattccacaagcaatattaataaccacgtcgcgcgattgtgacgg

SEQ ID NO: 180845 - DNA, 442 bp, Glycine max
  unsure (1)..(442): unsure at all n locations
agtctattacttntaatcaggatttctttgggaatattttggaggacaagaaaagattgaaaataggcttaaaggtgtttaaagatctccggaaaggatcgattctacaagattagtttatcttgaanagcaactccaaagagattatgaccaaactttgtttcaagaattgctccactatcagaaatcttgagaaaattgcgttaaacttggagatattaataccaagttcttccatgcctaaactgttgttaaaagaatgaagaacaaaatacatggtttgttccctcccagaggcaaatggtgtttagatgattagattttaaagtttgaagcttagaggtactttcaagctcacttttaaattctcctgtgcaggtgtgttctaaccttanttctgttaataacaatcccaaataaaataggggagaatgaaatttgg

SEQ ID NO: 180846 - DNA, 451 bp, Glycine max
  unsure (1)..(451): unsure at all n locations
atgcgagacggagaccaacatgctagctatcatcgccaagtaccaagaagagttaggtctagccgcggcccacgagcatatgattgcggacgaatatacgcggaaaaagaggctagaggaagggtgatcgactctntacaccaagaggcaaccatgtggatggatcggtttgctcttaccttgaacgggagtcaagaacttccccgattgttagccaaggccaaggcgatggcagacacctactccgcccccgaagagattcatgggcttctcggctattgtcagcatatgatagacttaatggcccacataattagaaatcgttaggaaacttgtatggtctctcagaccttgactagatacgacttcctttttgaaataaaatgagttggtcccatgtttctactccaaaaagcttgtgcaaatcaagtcacttccgcattttatctct

SEQ ID NO: 180847 - DNA, 410 bp, Glycine max
  unsure (1)..(410): unsure at all n locations
ttgagccanaatcctgactcaccatanaccttgacccagggtgagaatgtcaatccttaccctcggaagcggaaagaatagaagggaaatttccaatcaaagaacaggaaagaaggaagatttccaatcaaagagaaagcaaaaaaagaaaagaaggaaaattccccaatcaaagagtgggagaaagcaaaaagaaaagatagaaaattcccaatcaaagaatgggagaaagtaaaaaaggaagaagaagaaggaaagacagctcctgatcagggatcgaaggaaaacagaagaaatgtgcagaaaggtctttgaaccggacaatatctgaacaatacagaattgtcaccaaatgaacaaaaagaaggaaaggaaaccacgacctanaatggtcttctccctttgattac

SEQ ID NO: 180848 - DNA, 455 bp, Glycine max
  unsure (1)..(455): unsure at all n locations
agctntgnngaattcagattattggttcatgacaacttcaaagcaaataatcccataaatttcagttgatttcaaaagatgacaaattaagttactcaaagatggcgacagaaatccctccccattacttttcttgcccttcacatgctggaaaccgagacaagaataagattaacaacaaaatcagagccaataattctgtctacattgagaatgttgtcagttaaaagctttcattggcaacaaaattacaaggttggatacgaaattattttggcaaggcacaccatatgccaagttctttacacaaaaagttntagttgaatttccaaagattgtacataaatggctaaacaaaaagtcatcatagaatgtaatatatgagtctaacaaggtaatgttagtaccatttctttacatgagaagactacttcagcaatctgtaaacnaaacat

SEQ ID NO: 180849 - DNA, 411 bp, Glycine max
  unsure (1)..(411): unsure at all n locations
tgtcattcgaatggaacccccaaggtcaaactctaaactntccaaccattttccttcttcctcctttctagttnttttatttttttttttatttttttatgcagctgaatagtgtgcttcatgttatgtttttgcagagttgctgtggataacatttcaagcggaacagacactgtcataaaggttccaaattcacctttcgttggctttgtcttttctgcattgccaaagggtcctttttctctttgtgtgaccaattttccgtgtgtgttgttgcaggttgatagcgcgaacaagcgtgggagcttgttggaggtggttcangttctcactgatatgaatctcagtgttagaagagcttatatttcctctgatggagaatggttcatggatggtacggatcccttcacg

SEQ ID NO: 180850 - DNA, 399 bp, Glycine max
  unsure (1)..(399): unsure at all n locations
agcttggaagaatatttcatgattctatagaagtcaaaaatgttaattattgtggtttaaaaaaatgattatgttcaaacttattagaataaattaaaacattccgcataagctacttaaattaagctaagctcaaataaattaacattctttcatagcctctttcattntagttccataagttctaccaaacttatattctcttttccttttctatcttttcttatattatactttatttcttctattaaattattattatttttggccgagacaaaggcagcgcttgagaaaaaaaattggaagatcaaaataattaaaattataatatataaattaaatgtaattattatgataatatcgtctcttatgagtgattttaagcatctcagctatttc

SEQ ID NO: 180851 - DNA, 453 bp, Glycine max
  unsure (1)..(453): unsure at all n locations
tcacctttaggtcctcctcatagttgttgcatgagaaaacatgctctattttcatctcccactccaagtaggcctccggatcattctttcctttaaatggaggaatgttgagtttaataccatcaatttggttttgtctaggaacaccatcattccctcttctcctcctttcttcttcattatgatctctattctccatttgatccaacctctcatggagcgcatcatctcgttgtttcattaacctctccaaatgttgcatcgaagcttgcatttggaattgcgaaagccccactccatcattaggattagtacctgacatctcaaacaaacaaatcaaatgtaacaagacaattatagttgttggttgaatacctcacccactcaagtgtatcacacaattatggctcttctctaatgaaacactcttgccttntaccactctaattcccc

SEQ ID NO: 180852 - DNA, 148 bp, Glycine max
cgcttgaaactcaacgaatagcttgattaacttgtttgaagaaattgtggctgttacatgccccactccctggagtgacaattgtattgcttgctattttggatgatgcatcatagtacatattgatatctcgagcagcattgctcat

SEQ ID NO: 180853 - DNA, 468 bp, Glycine max
atactcaagcttcttgagatgcctttcggtaatctcccaaatatgatgaaattttcaaactagacacaattaagagagtgtctctcttggttcttatgtgaaaccttaggttcttatcaaagaattctattctttgtagcgaatcatcctcaacttatcaatctcccaagattgtggcgttgctcttttcatcaccttctctaactccgttttttccctttcttttccccaaaagagccccaaattggttccacggtttgctgatgctaaaaattggatccgcaaatcacggttccatcacattgcgtgtgccaattttgttgttgtgagaaatcttaatgcttaactaaaatgaatttagctataattgctctaacacaattctaaaatttgaaaagtgactcaaggatttagttgtcaagacggaaaatccgcatcttgacttgagtgtggactctcaagttacta

SEQ ID NO: 180854 - DNA, 333 bp, Glycine max
  unsure (1)..(333): unsure at all n locations
agcttcttatncaatgcactctcttggcggtaaagcttctccttccatggcttattctctaatggatggcacctcttctcatggctgaaaatcaccattgaaggatctcattgaagctcatagatccaacttttatagaagctttctcagctagcttccatcaagcgtaccttgcgatttgtagatgtgagtaccaagggtagaccttgtgtctgttataaacctatattcctacacaagataaagttaagaataggaaatattgccaatggtacaccttgcgtaccttgagttcctgtggaggtggaactttagtaatatgaggctttcacc

SEQ ID NO: 180855 - DNA, 408 bp, Glycine max
  unsure (1)..(408): unsure at all n locations
tcctcggngccatttcctgcgaagggcaaacattggaaagttagttntaccagtgggacactactcttaaaacaaaaatgacatacaacctcctcccataaatacaaacatcaatgtaaatttagagcaagcttatgcgcatatttccctacgaacgttcacttgcacaagacatcctattaactaagaaaaatgcacccatatacaatcaaggtagcttcattacctagattatttacatgtacttccaaggtgtatttggtatttacatcacacacgcctccttggctaaatttacatacatgcatactcaaagcatttcggngtaccaaaaattgcacatgcgctcatcttggtatttctaatacctatacatatacaaacttcatgatgaatcttgactaccta

SEQ ID NO: 180856 - DNA, 380 bp, Glycine max
  unsure (1)..(380): unsure at all n locations
agcttgagatgaggaagtgtaaaanggtgaacttcctgcttttattcgttgaccacagagtggtacctggagatatgtcgcgggggtcaggagaccttgngaacgtcaggtggggtgctattgcccaaaaccaagcttgaccaatcccgacccaacccgggcatagtcggtcagtgagaacctgtgatgtacctaaacaggcgagctcctggcagtcaacagataaaaggaacaaaaaccacaaagcaaggaggcttgtggtggctggccagctgtgaattttgtgtgatatatgggttgtggcctctggtaatcgattaccaagggtgggtaatcgattacaacgcttaaaaatgaagacaggaggctaagatggtctc

SEQ ID NO: 180857 - DNA, 422 bp, Glycine max
  unsure (1)..(422): unsure at all n locations
tgcctaattaacctganattgagagnaaatgattattaaacacacaaaataaaaatactaagtatttattacctatacttaacagaaaatacttataaccttacaaaataaccataaattgggagagtttgatacaatttatataagttttatacacaaaagttagtcattttcaccaactaacagttgccccaaatttacagttttgcttgtcctcaagcaaaaagagaacaactcacttgtcctcaagtgacaatgacatgcagtgattatgtacgaaggtgtatgctacaaagtgactaattgcatgataagagaatggagtaaaatgccctcaacacttgtctttcacaacagttatctatagacaagaatanaatgtaacctggacagatagatgaagntaggcataagacagatat

SEQ ID NO: 180858 - DNA, 475 bp, Glycine max
  unsure (1)..(475): unsure at all n locations
agctntagcaacaacatgctcatctccaatgactaaagccacgacctctccaacgatggaagagaatgtagcattcaaaaatctgcaattggatgagttgatggaaatgctcagacaataaaagatagtggtcaaggagcaacacaaattgattgcagatttgtgaacgggaaaagaagatatgtagaacaaacatttgaaagctatcaaatatgaagtagattcgaaggcaaagaanaagcatagcaaaaataagatgagcaagttgaaatcacaaattccattgaagtctatgaaaatagagtctccaatcactgtcatcacgaaagtagaaggagaagtggattatgatgaaatcattcctttcaatatgccattctccaagcgcttaataaaaatttaggttccaaaacaattatggcaacttccgacagtggatttgtacaatggatctactaatccgaacgattattta

SEQ ID NO: 180859 - DNA, 463 bp, Glycine max
  unsure (1)..(463): unsure at all n locations
tccatcaagtggtaatcagagcacaagagcttcaagtaggtgctcctntaaacctccattaatttttttctttaccttctcttccattgttgtttcttcatttttctccatgtatctcctcacatgtcttgttctaaatattgttaacatgattctttagagtttccaccgattaaacttgctatagaagttagatttgattttctatggttcaaatttcttgttcttagttcttgaaccatgaattgtgttgagtttaggttcctttgagttttgtcttgttattttttgtggctgaaacctaaaccataaaattcttacaaaaatattaaagtagaagaaaacctcaaaaatctagagtgacttgttcacctattgtagttttgtcatagaagtcatgtctagtcatgaaacttgtcacataagatttcttatgttgtgctgagatttattttcttggttc

SEQ ID NO: 180860 - DNA, 478 bp, Glycine max
  unsure (1)..(478): unsure at all n locations
tgcagcttggcaattaccatgattacagttggaggatataaaggtttctcttcatcaaagaagttgacacttgcattacacctctgcacagcagcttgaccaatgatgacctgcataaatgatcagccttagcccctaccacaacaacaacttgaaggccacaaggcaattaacacagaaatcttattcttacattaataagaaaaatgttactatcaatccactctctaacaccatgttgaacgtactttttttattggttcaaaccgaataaattttataaatctcgcatcatgattctctctcttaatttgtaggttttaataaattttaaataatcatgttcctaacagtcctgcagtaatactataaaggttaaccatcaagctagctcataagcctgtcaaacatcaacaaaggaaattggaactactatggtttattgtatgtaccaatctctacgaagaanaactataca

SEQ ID NO: 180861 - DNA, 470 bp, Glycine max
  unsure (1)..(470): unsure at all n locations
tctcatccatctcccaagatggtccattgaagaaaanaatgaagggaaagaacaacaaaaatgaagacaaagggagtattgtcaatctgtttctcggattcaagagtttgttattggcaagtattgacttttaaactaaggaaaaaactatttttcttctgtgttctataaatgactgacaacatcatgagaaaatacaagattattagattatacaccactcaagatgcttatgactcatgcctgttattttagagctacacttaaaaacacaactatttgcagtttaccaagtaacatgtgtgtgtaattaagagttgaaacttacaacagcaactacttgttcttcttctggaagatcttcaacaaaaacagctcccttctcaggagtcttcacaacttcatcagctgtacccatcatcattagctnttgaccctgganaagaagattatgtagatcaattaaatga

SEQ ID NO: 180862 - DNA, 471 bp, Glycine max
  unsure (1)..(471): unsure at all n locations
agcttgaaccttgagtcttgattcttgaaatcaaatttcctcttgaaccttgaagtgttcttaattcaatcttgaacatcttgaacatcttgattcaatcttgaacatcttgaacatattgaactcattctttgattatcatgaattgacctttgagctttttgtcatcacctttgttatcatcaaaacatctttgaatcaatcttgattcatcatgaagctttgcttctacacatacttagtaggatcaaaagttattgtttatactgaccatgaacccattaagtacctgttgaataaagctgattccaagcccagattaatcagatgaatcttgttgctttaagaatttgatctggttatccaagacaagaaaggatctgaaaatcttgtagctgatcacttatcaaggttagtcaatgaggaggtgactttgaaagagctatagataanggatgaatntcctgatga

SEQ ID NO: 180863 - DNA, 464 bp, Glycine max
  unsure (1)..(464): unsure at all n locations
tagcaacagccnncnnaacccaattttgtcgaaaccaagtgtcatgatttctatattaccaattttgctagctgttgatgttgcatcatagttttgctatgtcatctacctttggtctcatctctttaccttacaattcaggcaattctatcattaccctttttcaatatatagaattggcaacatgcaaacatatctaatccaggaaattccaccactaatagtcagcctataatccataaccaatgaagtcccccatctccaatttattccatcttctaattttattgtagtttctgcagatttaaaataagcgtttggttcttcgttttaacataaatctattgtttagtttataattcacccaattctgcctttagtcattttcaacatgcagaactatcaacatgcaaagagatctgattatacaaaagccaggatcaacagaaaacgtattatgcaac

SEQ ID NO: 180864 - DNA, 456 bp, Glycine max
  unsure (1)..(456): unsure at all n locations
agctntggagtttccaagtgccaattcgtcctcttctttagtccagtcttcttctggcttcaattcatcagtgggctttccttctgtgtccagcatcttgngatgttcccagcctatgatgacagctttccaggttctgctatccactgatttgaggaaggccaccattcttgctttccagtattcatagttgcttccatcaagaattggtggtctgttcactggtcctccttctttctccatgttcatcagaatttatctccccagatctcactctgtgatttcgagtgtttgctctgataccaattgaaattctgataccacgggacagatgtcgtacaggatgtcacgacatcacgcttcataacatgcagattgtatgtgtccgtatgaacagactacacaagtnaataacacaagagaattgtaacccagtcggtgcacctcacctacatt

SEQ ID NO: 180865 - DNA, 452 bp, Glycine max
  unsure (1)..(452): unsure at all n locations
tgtaatcgattacacatatactgtaatcgattaccagagcagattntcagaaaatattctcaacagtcacatcttttatgtggttcttgaatggctatcaaaggcctatatatatgtgacttaagacacgaatttgctaagagtttttcagaacaaaaaggtcttatcctcttaaaaagcaaatcgttttatcctcttacaaattccttggccaaattacttgtgattcaataaggaattatttgagtactcaaattgttcaatctatctctttcaagagagatttcttcttctcttcttcttcattctgaaaagggattaagagaccgagggtctcttgttgtgaaagaattctaaacacaaaggaagggttgtccttgtgtgtttagaacttgtaaaaggaatttacaagatagtggaactctcaagcgggttgcttggggactggacgt

SEQ ID NO: 180866 - DNA, 463 bp, Glycine max
  unsure (1)..(463): unsure at all n locations
agcttgtatcttcatgccaaatactttcctccaactntcctttatatagttggattgtgcagaaaaaggcaaaaaaaagaaaagtagcgttaaacttttgcttttaataaatatttttaatttaataaaattttaaaatacaaagtgacaaattatcataaatttaatcttgcaatattttatgtttctttaataaatgttnttatatataattctgttcatataaaaataaagaaatcgttctttaatttattcattccatttcaaaattatactctcaatcaaaattttggagaaataatattaatattttatttttaatttattttcttgaaaaatctcaattactaattaaatttatcaaaattcatataattatatatacaatttataaaaataaaaaatatgttaggaagttccacatcatatgcctcagttcttgagggtacagtttatatatcta

SEQ ID NO: 180867 - DNA, 148 bp, Glycine max
gcttgctgctcgagccatcaaatgtgttttccttggatattctatattacaaaaaggttaccgatgctactctcctattcacaatcgctattatatctctgcagacgcaacattttttgaacgaaaaccataccttgctcccttcatg

SEQ ID NO: 180868 - DNA, 393 bp, Glycine max
  unsure (1)..(393): unsure at all n locations
agcttatgcatgganaatgtaattatgaaattgagatgcccgaagaaacaccatttcctagttaaccatgcattatgtaccatgttcaattattttgtttttaagtgaaacgggtttatgatcccaacatggttggctcctaacacatgaaactaagaatgtagcgtgaagtttcacgcttcccccttctttgtttttgttttgtagaggaaaacgcaaggatgagcatacatgataacaaatggtatgcgattctgcagatcaaaaagtttgctgaacgcatatgcatgatgatgccatgactcatgcaaaatgtgaggctggaatatgataacggactaatgcaggatatgttcattatgatgttatgaacagatgcttatgcgatgatat

SEQ ID NO: 180869 - DNA, 455 bp, Glycine max
  unsure (1)..(455): unsure at all n locations
ntgcacgtatcagtcaagtgtatggaccatatcgtagccaaagtgctcatcgataatggttccagtttaaacgtgatgcctaagagcactttggagaaattaccattcaatgcctcccacttaaagccgagttcaatggtggttcgtgccttcgacgacacccgccgagaggttaggggagagatcgatctcccagtacagataggccctcacacctgtcaagttactttccaaataatggatattaaccccccctacagctgtctgttggggcgctcgtggatccactcagtgggagttgttccctctacactccaccaaaagttgaaattcgtagtggaagggcatctggtcatcgtatcaggcgaggaagacatcttggtgagctgcccatcctctatgccttatgtggaagccgcanaggagtcattagaaaccgctttccagtcttttga

SEQ ID NO: 180870 - DNA, 469 bp, Glycine max
  unsure (1)..(469): unsure at all n locations
agctggcttgtggngcttctacggaggctggatcttgagcttcaatgaggtcctttaatggtgattntccaccatggagatgcagcggaagacaaatgagaagaggtgagaggaggcgccatccactatggaataagccatggaagaaagagcttcaccaccaagatgagccttggataagaagcttggagaggatgcttcaatggaggaaaagaaagagggagagaaagagagaggggggagcatgaaattgaaggaataaaagagggagagaagtggaaatttgaagtatgtctcacaagactctcattcatcaaagntacaacaagtgtcacacatgcttctatttatagactaggtagcttccttgagaagctttcttgagaaaactttcttgagaagcttctttgagagaacttcctcgagaagctagagcttagctacacaccccatataatagctaacctca

SEQ ID NO: 180871 - DNA, 444 bp, Glycine max
  unsure (1)..(444): unsure at all n locations
tctagcaacttgttgattgacattaatttcaatccacagatcagagaaggaataagaacatgaacagaaagaagcttgcagggattctagcaggacttattgcattcgttataggactaacaattcttgtgtgggccacttcctcatttataaaaaggatgaatctaggcaagccaggtgaaaatttataagtgaacttttaatgatatactcttgatagttttatattctaatgaatacataattatattgacataaaagaagtattcttcaattctgaagtttattttctatttcatgtatatccctctaaatagttaacattataacctccaatatattaattatgagaaattcatgtctcccacaaaatcagaaattataaaaaagctaattcactggaagcacatganagagatggaagagaatgacatacaaacaata

SEQ ID NO: 180872 - DNA, 416 bp, Glycine max
agcttgatacacgcagagactaacgtcgtcttttgcggccttcgtcaatcgcggccgacaagcccgttgacacgcagagatttatgtcatcttccgcgcttacaagatctgtcatactgagctttgagtcacgctgacgggcggaaatacccgagtggctatccgtataaactttttgttgtatgtaagacgaaaagcctggtagcacgcagagactaacgtcgtcttcggcgcccttagtcaatcgcggccgacaagcccgtttacacgcggagatttacgtcatcttccatgctcacaagatctgtcatactgacttttgagtcacgctgacgggcggaaatacccgagtgtgtatacgtataaactttttgctgtctgtaagacgaagagcctgatagcacgcagagactaac

SEQ ID NO: 180873 - DNA, 410 bp, Glycine max
  unsure (1)..(410): unsure at all n locations
nttcgtctaacagaatgcaacaagtttatacggataaccactcgggtatttccgcccgtcaacgtgactcanaagtcagtatgacagatcttgtgagcgcggaagataacgtaaatctccacgtgtcaacgggcttgtcagccgcgattgacgataggcgcataagacgacgttagtctctgcatgctatcaggctcttcgtcatacagacaagcaaaaagttatacggataaccactcgggtatttccgcccgtcagcgtgactcanaagtcagtatgacagatcttgtgagcgcggaagatgacgtaaatctccgcatgtcaacgggcttgtcggccgcgattgacgaaaggcgcagaagacgacgttagtctctgcgtgctatcangcttttcgacttacagacagc

SEQ ID NO: 180874 - DNA, 437 bp, Glycine max
agcttaagaacatgacaccaaaagtaaattcattaacttcaaaagattgaaagaagtgactgcagaatccaacatttaaaaataaataaataactgattgtgagataacaatttttgatcttttcaaaggtagatgctaccagcacgctataaagaggcatattgaagcccgtcatctagatttcatttcctaaattataaaattttcaattatttaaaaaaaaaggaaagaaagaccaaagactgcataagaaagaatcataaagacataaagaagtacattttcaaaaggactgtcaccttgtagacatcctccaaccctttgtcatttccttcaatgataaatgtttgaacaggaattcttccacgaggtaagtcggttatctgtgatgcaaggcaaagttgaaagcatttgcaaaagaaaatgatttcacaca

SEQ ID NO: 180875 - DNA, 431 bp, Glycine max
  unsure (1)..(431): unsure at all n locations
tcatgatgatgaatcaagttgattcaagaagttntgataatgacaaagatgttgacaaaaagcccaaagaatgatttcaagattaaatcaagaacaaattcaagaatcaagagaagtttgatttcaagattcaagaaaagatgaattcaagttccaagagaagaaatcaagaagacttcacaagggaagtattgaaaagattttttcagaaaacaaacatagcatagttttgtttttcaaaagagtttttactctccagtaatcgattaccagtttcctgtaatcaattactagtggcaaagtttgatttcaaaatggtgtaatcgattacaagatattggtaattgattaccagtgcatctgaacgttggaattcaaattcaattgtgaagagttacatcctttcataaaaagctttgtgtaatcgatta

SEQ ID NO: 180876 - DNA, 415 bp, Glycine max
  unsure (1)..(415): unsure at all n locations
agcttgcctcccagctcgcccaggcgagcaaggttgcttcctccaaaagcaacaaccttctggaggaatcttctggagggcccaagtggggctggttgctatttgcacccccatttttactaaatacatccccctgccttcttttttttgtgattcttttttcgtaatgttacgaaactttacgaatttcgtaacgatacttatttttcttccgcaaggttacgaatccttacggattatgtatttactcttttttagctttcgaagaagttacggaaacttaaagattgcgcaaaaacacctttnttcgacttccgccacattacggaatttcacggatcgcgcaagcctgcttcctttagatttctgagacgtctcgggacttcatttattgtgcaacaaaggacgccaagta

SEQ ID NO: 180877 - DNA, 460 bp, Glycine max
  unsure (1)..(460): unsure at all n locations
tgtaagtctccagacgacgagagtaaaaacctgcaaaatttttgaaaataatcagaatcggacgaccaacatcatccagataccgtcgaatttgttcacctcgattgatgaaaggagcggatgatcataaggtatctctgcctgccacctaacttgctgtccctggatgacaaaaggtgcggaagacgatgttattctctgtatgtcaacgggctcgtttgcccctggttaacgaaaggtgcggataaccatacagtatccccgcatgtcacctgacttcatgggtcaggatgacaaaaggtgcagaacacgatgttagtctctgcgcgtcaacgagctcgtttgcccctggttgacgaaaggtgtggataaccatgcggtacccccgcatgtcattggacttggcatctctagatgacataaggtgcanaagacgaccttagtctctacgcgttaacgg

SEQ ID NO: 180878 - DNA, 348 bp, Glycine max
  unsure (1)..(348): unsure at all n locations
agcttgccgacagtagtaatggcggattgcatgtaaataacagacccgcaccggatattgttntgaaacggaccctctctcgtaaattggttctaaaaggaaccccatacagtaaatttgccaagaaattaatgctgtacccataaaataattttttaaaatgaatactaatgttatacgagataataaaaactgatattaattctatgattttattttttaatattatagtatcgaccatgaataaattatataatatttttgaaaatatatatacgcgtaaagaataattataatttgctacaatataagcattctgaatccttttatcatgagattatatatttt

SEQ ID NO: 180879 - DNA, 354 bp, Glycine max
  unsure (1)..(354): unsure at all n locations
tatgaagcttgtctatgatctcttactaagtctggttatttggatgtagtagtggctcattttataatgaactcacccttgcgattatgcatcgtgtggntgatacctgtgatgatcgcgaaccttgttcatgggagcacaatgacaacagcaaggtgcaggaagtgagactctgctgaggagccgtcgagtcgacgtgatgacgctgggattattttgngagagaggcgtatttcgctgatcaactcctccatagtaggctcatgattcccttcgtcgaactatagatgtaaagctcatatgttgaattatatgtgaacacattttaattttcattatgtgtgtgacgtatac

SEQ ID NO: 180880 - DNA, 430 bp, Glycine max
  unsure (1)..(430): unsure at all n locations
agctatattgaaaccattntcttcaggcaatggagctnttacatgctagtcattcattntttccacccgacgtttaaatttgggcttcaaagattcaagctcatccaacacagctcgtgatctctataacggaaaaatgatagaaaagaagaaaatgaccacatatcaaatataacaaaatcaaataaaagaataaaacaaacacacacaaaactatcatataaagtggcatggaagtttctcgcttatatgctgctctttcattgggcagngaagcttgataatctcgatgatatggtatagtttcagaaatcaaactttaagaaaaaataccaatagttggcacagtgaggaaaaaatgaagatgccatactcaatttaattgcnnnctgacgagtccaccatagagaaaatccattacgctttcata

SEQ ID NO: 180881 - DNA, 399 bp, Glycine max
  unsure (1)..(399): unsure at all n locations
tagaaacatcttcaaatttgtctaaatattattacaactcataaccaatccatattcaaaacgacaaaagcttccaaagagctcataacattntaagttcgttctcaatatcattctagctcggaaccaatacatattcaaaacaacaaagtatttcaaatcatcaaaacagaaaatagttccaaatgaaccaagtttaataaaaatcatcatcttcaaggcgggagattgcaacagaagtaacgtcagttatcaatggttctgtcggttcacctatattgaaaaataaaagttagaatataaatatttaacttgacaaaattaattcaatctttaaaaagaataccttcatcatcaaactccatttcagtgagtaaaatagcattttcatttcccaca

SEQ ID NO: 180882 - DNA, 472 bp, Glycine max
  unsure (1)..(472): unsure at all n locations
agctngaagtgagaaagtgtggaagagtcagtcttcctacttttatttgttgaccacagagtggtacctggagatatgtcgcggnggtcaggagaccttggggacgtcaggtggggtgctactgcccaaaaccaagcttgatcaatcccgacccaacccgggcatagttagtcagtgagaacctgtgacgtacctaaacaggcgagctcccggaagtcaaccaataaaagaataaagaccacaaagcaaggaggcttgtgtggtggctggccagctatggatcttgagtgatatctggaatatggcctctagtaatcgattaccaagggtgtgtaatcgattacaaggcttagaaatggatacaggaagttgagatggcctctgataatcgattaccaaggggtgtaatcgattaccaggcttaaaaatggaaatgggatgttgaggtggcctctggtaatcaattaccagt

SEQ ID NO: 180883 - DNA, 456 bp, Glycine max
  unsure (1)..(456): unsure at all n locations
ttttgtcatcacctaaannaaccattttaaaggtccaacgtcttgaaatggtccctttttcttttattggttagacatggatttaaaaagcttaaaaaaaacaacacatagctntgtcacctctttcaaaaaaccaagagatcattaatggtccaatgccttaatgttttctctcctttcaaaagaattgaaagatcgtttagtgatccaacgccttataatgacctttcattcaacataaatatatcttgcaaaaaaaggataaagacaacttaaccaacgttcaattctcaaagaactacgtaggtctgatttccttatcacaattgaggaatacgtaggagcaagggaaacacccttgtcgaccacaaaaagataaaaaatataaaaaggcataaaaagacataagaatgtaaaaaaggggaagataaatcaaaatgaagtcatattcgcaca

SEQ ID NO: 180884 - DNA, 467 bp, Glycine max
  unsure (1)..(467): unsure at all n locations
agctntagcacaatggcaaggttactttcttatgagttactaattcaattcttaacccccactatgtaagagccttgtccattgggtcacctcttttttattttgtaacatttatattaataaagcaaagtatgatacatagtaggaacacaataatatacaaaagttaaataatatattttatcgctcaatatataattcgctgataaatgaatccttgaacgatgaatatataaaatttagtccctaaaagtataaatagtgtgaaaagtaagtaatcgacaacgtgaccatgctgattagatttgatgaaaatgtcaacaagatacaacgtaaatgttaatcattntttggtggacaaaaaatgtcaatatttcttattgaagataatatcagtaatttgttatttacctaaatgtcaatacatttcattggatcaaaatatcaatacgttatcattattggac

SEQ ID NO: 180885 - DNA, 468 bp, Glycine max
  unsure (1)..(468): unsure at all n locations
tcagggtcatangttttaaggtttcactcatcaataattgatgtgtggngagcttagcaatggcgtccgccaagtgatttgaagaagccttcaacctggttgattccgccattgaagaacaacgagagcaccaatgttattccgccattgaagaacaacgagagcaccaatgttaggaaaggcagaggaaagggggatagggaaagggtctggacttctagggacagtacctccaaagcacaaacttggataaggtatttctcatatctgccctattacataggagtctttataaagtagtgattcctataacagaatttgtattcttgtgacaacatggatcttaacagataatagaatcaatggtaaatgacacacaatgtgaacactaccgcactaatgtcagctaagcactctctccttcttcctctcataagaagtgaagactagaatattatttattgacta

SEQ ID NO: 180886 - DNA, 447 bp, Glycine max
  unsure (1)..(447): unsure at all n locations
agctntagatagcttgttgtaatcgattacgacaaccctgtaatcgattaaaacagagagttgtgcctcttgaagaaactcttctaacttataaacttttcttcacactaatcatgatgatgcatgatgcaatacaaatatcaaatgtactaagatgcaacaaccaagataacaaccaatacaaatgccactcaagggatttaggcatgtaaaagtgaaaacttcttcaagcttttctttgagcttcaagctttagcctttaggttgttcaccatgttgctccttctatctctaacactgcactccattccatcccaccatgtttgtccttaaccacgaaaaacgactttgttatcctttgtgtagaccaagcaatgaagtacataaaatttgngataaatatacttggacacctacttagagagagagagagagagagagagagag

SEQ ID NO: 180887 - DNA, 452 bp, Glycine max
cctatcgcccttagactaatggctagattgaacggaccattcagtcgctggaggaccttttgagggcatgtgtcttagaacaaaagaggagttgggagagttaaagactactcaaagtaggcagaaaaactatcaggctgctcaagaaaaactgagaaggtcaagttaatccaagaaaggctaaagactgctcaaagtacgcagaagagctatcatgacaagaggaggaaagacctgaaatttgagattggtgatcatgtattcttgagagtcattccattgattgcgttggtcaagcattgaaatcccaaaaactcatacctcgttttatcaacccttgttaaattctcaacagagtcagtcctacggcataccatattgcattacctctgtctctgtacaatcttgacaatatctttcatgtgtctcaactcagtaattatatctgtgat

SEQ ID NO: 180888 - DNA, 446 bp, Glycine max
  unsure (1)..(446): unsure at all n locations
agcttgaaccttgagtcttgattcttgaaatcaaatttcctcttgaaccttgaagtgttcttaattcaatcttgaacatcttgaacatcctgattcaatcttgaacatcttgaacatattgaactcattctttgattatcatgaattgacctttgagctttntgtcatcacctttgttatcatcaaaacatctttgaatcaatcttgattcatcatgaagctttgcttctacacatacttagtaggatcaaaagttattgtttatactgaccatgaacccattaagtacctgttgaataaagctgattccaagcccagattaatcagatgaattttgtcgctttaagaatttgatctgggtatccaagacaagaaaggatctgaaaatcttgtagctgatcacttatcaaggttagtcaatgaggaggtgactttganagagctag

SEQ ID NO: 180889 - DNA, 465 bp, Glycine max
  unsure (1)..(465): unsure at all n locations
tagcaacagccnncataacccaattttgtcgaaaccaagtgtcatgatttctatattaccaattntgctagctgttgatgttgcatcatagttttgctatgtcatctacctttggtctcatctctttaccttacaattcaggcaattctatcattaccctttttcaatatatagaattggcaacatgcaaacatatctaatccaggaaattccaccactaatagtcagcctataatccataaccaatgaagtcccccatctccaatttattccatcttctaattttattgtagtttctgcagatttaaaataagcgtttggttcttcgttttaacataaatctattgtttagtttataattcacccaattctgcctttagtcattttcaacatgcagaactatcaacatgcanagagatctgattatacaaaagccaggatcaacaganaacgtattatgcaaca

SEQ ID NO: 180890 - DNA, 469 bp, Glycine max
  unsure (1)..(469): unsure at all n locations
agcgttgtgtggggagattcacataatcatcgtaagagtcatagagtggctcggaaggagctatgtatgcccaagggcactggaggcttgtgctttaaagaatccataaatttcaatttaaccttcttgatgaagagcgggcggagcttatgttcgaatacgatgcgttgcgggtcacaataatcagagaaaagtatcactgtggagaatctttgatcccagatattgattgtaataggcttgagactaatttctggtggggcctttgtaanacctggcctgaggtacacaagaacctttgctgaaatactgtggatgggaacaatgttagagtttctgggagagcgtttggcgtccttctcaacgtaggctttaatttggacaaagcaattttcctctagacgtatggagcatatgaattaatatgtgcgtgagtatgttgataatcatgggaactataacttaccgc

SEQ ID NO: 180891 - DNA, 407 bp, Glycine max
  unsure (1)..(407): unsure at all n locations
tcctaaatggcatatctcatttcctcaagctntggtggaaactctccctcttcataattttgatcataaccccatgttattaagctactttaaatctcattccaagaagttgagatcctttcaatttcaaggaacttggatgtcccatccagattactcaccactagttcgaaacacttggcaagatgcaaaggggtctatcccttataaactgcgtcgtattcagatgaaatccaaggagtttaatgagaaggtgtttcggaatatttttcgtaacaagaagaagcttgaatcccatattaaaggtgttcaccaacagcttgagtggaggcaggatcattctcttattatgttggaaaagatcttcaaagtcaatataataatatcctagcccaagaggagttatt

SEQ ID NO: 180892 - DNA, 383 bp, Glycine max
  unsure (1)..(383): unsure at all n locations
agctagagcctacnagtccaaaggaataatagttgttcttcacagagagactctaatgtttgtcatattactggcgcagtattaactatgggcttaacattctacagggcattcaaaatgagaacaaatacttacaaaaaccactgaaggcaatttaatattagaagttacaaagataaacctttctccatcatattttgcggagagatattgcattactactggtatgcatctagtttctttaccttgtcatgagatgggcactgcggaaaagggcgtctaaaataaatatgacatgaccccccttttgcccattgacctgcattgtattagattattttcaaggatagaccttattggtggagggcatttgtaatccctgc

SEQ ID NO: 180893 - DNA, 459 bp, Glycine max
gacactatgaatactcagcttgtaggctagatatgaactgttggactctgttaacactgtgtcgctgtgtgagcattctggacatacacgcacactttctgattcatgctcttatgcacacacacacagagagattcgttctctcgtcagaaacactacgcatacgaacaggcagacgctcacgctgagaacctgtaacacagacacttgtcagactcacgcacttacacagacaccacagactgactatgacctattcagagacaagcgcactcccagatacacgcactctgatagacttagatggcagaacttttcacagaagcacacacacccacagattcactgtcacacagttgctgacacacagagaccatgcgctcatccacacttgtagacacacacatacacacacgcacactcacactgagaactagccccagacacacacacacgctg

SEQ ID NO: 180894 - DNA, 376 bp, Glycine max
  unsure (1)..(376): unsure at all n locations
agctntgagcanattcanacgacaataacctttttactcggaagtcggattgagtcccgttatatattcagacgctcgaaattgaatgttgaagctctgagcaaattcaaacgacaataaccttcttactcagatgtcggatagagacccgtaatatattgagacgctcgaaatggaataccgaagctctgagcaaagtcaaacgacaataactttttactcggatgttcgattgagccccgtaatatatcgaaacgctcgaaattgaatgctgaagctctgagcaaactcaaacgacaataaatctttactcggatggccgattgagtctcgtaatatatcgagaagctcgaaatggaataccaaagctctgagc

SEQ ID NO: 180895 - DNA, 451 bp, Glycine max
  unsure (1)..(451): unsure at all n locations
gtgaagctcctgttttagctttacccgattntactcaaccattngaagttgaatgtgatgctagtggagttggcattggggctgttttgatacaaaacaaaaggcctatagcttatttctcggagaaattgggaggagccagattgaactattgcacctatgacaaagagttctatgccattgtgagagctcttgatcattggaatcattatttgcgttctaatcactttatattgcattcagatcatgagtcattgaagtatatcaatgggcagcagaagttgagtccaaggcatgctaaatgggttgaatttcttcaatcttttaatttctcttcaaaatacaaggatggtaagagtaatgtggtggctgatgcactctcaaggaggtatgctttaatttcaattcttgaaactcgtttacttggttctgagactctgaaagattatat

SEQ ID NO: 180896 - DNA, 453 bp, Glycine max
  unsure (1)..(453): unsure at all n locations
ctgaagcaatctctgctgcttgaatgcaatttcagagccaatcccttcaatagctttgtcccctgggatgataagagcaaagaaataataaatttggaaatctcttttgttagctcactaaaaggtgatacttaaaagcaaacacttttcaagtttcaaaactgtatataaagaatgtatacttacagtattctttgtcaatacattaagtgaatcctcatgaaaccacaatcgactgcgcttcccaggtttctttgttgaactttcacgaattatctctcttcccatgtctcgtagtaatggatgcattccaagttcgttgttctttgcaacttttacgaggctacgctccatgagaactgttattcctatatcagcatgtagtccacagccatntagtatctctgtaacataagctctatctttaccaataaagagacaacatacatcaag

SEQ ID NO: 180897 - DNA, 364 bp, Glycine max
agctcgatgcaatcctaccctccatgggtattgtatagaagactccaagaggattgagctagagctgctaaagaaggccttggcgttctcatgaaccccaaggtagatttctgagcccatgggccatggttgggtccactcttctttgtaaatattagaatatgtttttccttcttttgggccttgtatttaggccattctagtagtataggattttagccttgtctttcatggcaatttgagtagactttgtagtagggacttttatttttcatgtattttggcatgggggcgagcttatctattatagggagtgcgtaactaagccctaccttttttaggaatcttcccaaggaatcttctt

SEQ ID NO: 180898 - DNA, 396 bp, Glycine max
tactcattgactataagcctctcaatcattttcttaaagatgataagttccctatcccaaaggcttcatctttccccaccttgataagagaatcaaactcattctcaaagaatgatttaaaatcaggttctcggcaacttggcctaaaaccacataatcgatacaaaacagcatcctgtatgccaaatgctcaatatcaatggacaggcttacctttaggcttaaaagtagcttcttctctcttgcagaaagccatgaccaaaatctttgaacccattctggaaaacactcttgtctacatagatgacattctcctttgttcaaaagatattgcctctcactaaaaattgttgaaccaattctttgaaatagcacaccaacatgggatcatgcttt

SEQ ID NO: 180899 - DNA, 326 bp, Glycine max
  unsure (1)..(326): unsure at all n locations
agctatgtgaaactgccatgttttgatgagttatacatacccattctgttgtacgcgttttgtgatgatgattgcgatgtttatcttctgacaatactgatggaaatctgttagagacgaagggtcaaactaacctaaggttacaaagtgagaatgtgatgttatgagtggaaaaagagtgagactctgagagttggaaggttaagtctgaattctgtggtaaatggaggttaaaatgagttaatcctagcttganatgtcatttaagacatgtgagaaaggttaggctgagctacagagattatcacttgaccaaagtgaacaaa

SEQ ID NO: 180900 - DNA, 417 bp, Glycine max
  unsure (1)..(417): unsure at all n locations
tgtagaattcaccccaattctggtgtcctatgttgaattgctcccatatctactcgataattcaatggttgccataaccccaaccaaggttcctcaacctccatttttccgaggatacgactcgaacgcaacatgtgtttgtcatagaggggccccagggaattccattgagcattgtaggaccttgaagcataaggtgcaaggcctaattgatgcgggcttactgaaatttgaggagaattgcttgtgaatcctgacattcacaagagatgccacacatggngcaatttgaaggttggtgttagatgtctctaatgactcattatgattttcaagtttattccattattgtaaaccatagttacaattctaaataatatggatgaatttgacatcgctatctctcttatcctctca

SEQ ID NO: 180901 - DNA, 407 bp, Glycine max
  unsure (1)..(407): unsure at all n locations
agcttgtctcagtgtttatgcgagacaaagaccaacatgttagccatcgtcagcaagtaccaagaagaattaaatctagccacggcccacgagcacatagtgacggacgagtatgcccaagtgtatgcggaaaaggaggctagaggaagggtgatcgacttgttacatcaagaggcaacaatgtggatggaccgatttgctcttactttgaatgggagtcaagaacttccccgattactagccaaggccaaagcaatggcggacacctactccgcccccgaggagatccacggaattctcagctattgtcagcatatgatagacttaatggcccatataattagaaaccgctaggaagtttgtattgttactcagatcttgactagntataactttctgaataaaat

SEQ ID NO: 180902 - DNA, 412 bp, Glycine max
  unsure (1)..(412): unsure at all n locations
ntgngagaatgcataccctgatcaaaatntgatgtgtcctcctccagaaaaggttaacacaaaaggtgcatcgaagaaactgattaacagaaacccaaggtcaacaaagcgtgatccatcttactaggagtatgtagatgttttttattctcagcaaaatagcaattcgtcagtgaagcatagtgcatcatcttctaagcagcccaatccaagaaggatcatgcctatcttggatcacatttagccatttatccatgacttcattgataacattgttgatgtccaagctaatggaaactatgggtatcggtcggttgtcggtttattaggtataggtgaaaactcttggtcgttggtccgcacccatctgcttatagaacttggcaaattcttagaagactatatcatattc

SEQ ID NO: 180903 - DNA, 301 bp, Glycine max
agctcttggcggattgaatagtgggtccaaagaatcttctggtttagccttgtgacaactggaatcacctataggctctgcactgtaggctgagtaatcaccactgcttcttgtgtgacataaaagggactcctgcagcactcacttactgaccttctcgtttgtgagtcttgacatcaagaacaattaaatgcttgattacaaccaacatccctataactgaagtgtgaaacaacaactatcgtccattaatttccataaattatcatgagaatcatctctctctatccctttcaacaca

SEQ ID NO: 180904 - DNA, 437 bp, Glycine max
  unsure (1)..(437): unsure at all n locations
tcatcccttgataatgaggataggagatttgccctggattcagctagggactactttccttagcacccttatgttcaatacgttcgataaataaatcttnttcttttgctatatgcatgagagtttcaatgctagttgtcacacaaatgtgtgacaccctctaccccgcacatatattttaatataggaataaaaactcacatattaattaacagtattgttaaattattcttaaatacaagcctttcaaatgggtaacaggctcacattcactttcttctacatcatattcaaacttgtccatataaataataaagtcatatcggctcaaagaacgccatctaagtatcatacaattaatatagaacccatatcctaatgtcacatcttatcagagcgtggtgttcccgtgttctctagcatgaggatcttcatag

SEQ ID NO: 180905 - DNA, 477 bp, Glycine max
  unsure (1)..(477): unsure at all n locations
agcttgntccccatcaaagataagacaaagtatataacaagtacactccccattctgctagctatcatgtccacagaaatccatatatgtcaatagagattgtaaagtaataatcatatcacaatatcacatgttatttgctacggcctacgggaaagctcgagcgagcaaacttgcttggtgagtaatgctaactgtttgttgaaaacgcccaagtaattcattacattnttacatcacttgacaaggagtttcggatcaatgtcttttgttttgcgtgatagcacggatgcagatcaacttggacactacttcaaaaatcaaaacgtgaatgataataaccaaataaataagtggataaactctgcaaatgcagggtgttgcaaattgcatgaagcccaagtactggacttggaagtttattgtttttcttcaatcaattgataacatgagcattccnccttcatctggagttca

SEQ ID NO: 180906 - DNA, 461 bp, Glycine max
  unsure (1)..(461): unsure at all n locations
actatgaaactcagctgatagatttanaccacacctttatctctatagtactttataattgaagaatacacattcgtttatttattatttattattttaaaatgataacaaaattgaataaaagtgagtttattctttattcgttgcaagtgtaatttttttatattgtcaagtaactagaaatcatgttagatattatttttaagatcattttataaaattcaagaaacttatttaatctataattgaataattctgtaaatttaaattaaactttaaaagtaattataaacattcaatagataatttaacttcaaaccataattatgaatgcctccttttcataactataagatgttttagctntatttcttatcttanaataattgatattntagaaattcanaatttaattaatattttttccaattatatccttatttattatctcattattaatg

SEQ ID NO: 180907 - DNA, 440 bp, Glycine max
  unsure (1)..(440): unsure at all n locations
agcttatctaacaagatataaaatacatagctctgtcttattattgtctaaagcgtttctttataatacacaaaaacagttctctgctttttttagacacaaattctatctggttctcaaaaaatcacttctttaaacaacacttttttctgaatcacttttttgaacgttaaacatactgttccataaacaatctcagaaatgataagttcaatccaattatacacccacagagacagtggattagtgaatctttnaaacaagttacatgcaacacatgtccacagaaaaaaacacaactaagttaaactaaataccattctactactgaggaattgatacagctctatcttcaccatataatcgccgttgcgtttttagcgatgttcacaatactggcatgacggtgatcagagaatttcaaactatacccgaacaca

SEQ ID NO: 180908 - DNA, 372 bp, Glycine max
aagtccaacgcagcacgcgtgtcgttaaagttgttatatgttatgctttgaaggagatgaacgtggagtgtagttaccactgtactctactctagcagtggttgtggtgttatcaaaggcaacaccaacaccacttgaatatgctcttgcagcaagacacccatgattaggttcttggttggcatgcaataacacatacattggtcgtcccggtgatatgcaaatgtattcccttgccaatggcttggttaacataccatcagcaccaacaacagcgaggttgtgttctgtatcatagaacaagagaatgagattcattgccgcattgtctacacggagataataagtcctgccttgctctacatgaaactc

SEQ ID NO: 180909 - DNA, 466 bp, Glycine max
  unsure (1)..(466): unsure at all n locations
agcttaaggatttcanattctgcctgacaaataataaattaggttntattgttagtaaattataaattttggctactaaacaaaatcaaagaagaaaacaaacatacctgaatatcctcctatatcaaattcttgcatcccgtatacaaaggcttctttgaatcactctgcaatccttcatacataggggcatgtgcttgctaaaaagactcttgtccaaggtcacgaatcatatcctccaagcgatctcctatttctacatcaaacggttcagattgggacccactttgcatgtctatcaattcaccatgccatatccacgtcgtgtaattcttcttaatcccatcacacaatagatgctcccacatgccgtccagtagttgttgtcttccattcaaacaattgatgcaaggacaataatgttttccatcttcatccgatcgacctcttaatgaagtaaattaca

SEQ ID NO: 180910 - DNA, 469 bp, Glycine max
  unsure (1)..(469): unsure at all n locations
ggatggagaatatgggtccatacttgtcagccaagtcacccaatgttntatgaggtgtctttgaaccaagcaacaatgggaggtgaccaattattggccacgcacctgcaactgtgggaggaccctcttcgccactcttcgaggaacgacgacacaaaaacaagtataagaggatcagagaaacaacaccaactccaattgttgtggtgtttagaactaagtccattntgacttgtttttgtgttgttgcatgcagatcctcatcagtttaaataggaactgcaccgtgcatctgtgtgccgttgtacgacctgactagatcgagtagagatatttagatattntaatattntagaatatattcattacttgaattaactaanaaataaaataatgttgctgaaatgatgaaataatatagccaaataaaatcttgatattntaagatatnntttaattttatattaca

SEQ ID NO: 180911 - DNA, 459 bp, Glycine max
agcttgtaatgaagatgaacataaacttaggatcacttatttctggtcagatttcactcattgctcaatccaactccttgcggcttggatttccaaccctgattactgccttgtgcaaggcccgaggagtcacctcagattctcttaccttcgagtcactcagcctagccattaatttggcctatattaagaagaattgttggaacctggatgacccttttgtcacttttccaaggacccaaaaatccagggctagaaaatctgaggacccatctctctctgctccccctacttctgctcttccttcaccaccagcagctccaattctttcaggtccctccacttggagctcagagcctttcatgtttatgctacagagcctgcaccagggccagctcctgattatgcatagcttgcaggatgtggcccagcagtggccagttatgagcctggaggagt

SEQ ID NO: 180912 - DNA, 465 bp, Glycine max
  unsure (1)..(465): unsure at all n locations
taacgtctntcacagtanaaggaccactccatctctcaattntaattntccaggaaacaactttagttntaagttgtagagcaatacttgttgtctgggactaaattctttgtggaggatctttttgtcatggtccctcttataatccctgaacactttaaacttggagccaaacaggtaatgcctccacatcttaagggcaaaaactacagtagccaactccagatcaagggtgggataattcctctcatgagtcttgagttgtctagaagaataggccactccttggccattttgcatcaacactcctcctaaacgcatctttgatgcatcacaatacacctcaaggngttctcttgggttaggcaaaactagcatgggagcggccgtcaacttttccttaagggtttggaaactatgctcacattaggtatcccacacaaaagcttgacccttacgagttag

SEQ ID NO: 180913 - DNA, 458 bp, Glycine max
  unsure (1)..(458): unsure at all n locations
gcttgaggattatggngtacccatcacatgtggtactatgtggcggtcgggcgatggtgcacaacaagttttccacatccacaatgcgcgcataaacccaccatcccctgttacccacctccatctgagctcacgtactcccacgtagcccatatcctcgtttctctcaacaccgagtccccatcaatcctcccaagcttccacaacatccaagcagaacaacattcaaacagcacaagctatcacagccaagcaaaacagagcanagccagaaaactctgctcaacacaccaacaaaatcacagcttttctcacttaaagaccccagtaacaattccttcgatccaattcgttaaccattggatcgactccaaaattttactggaagtctatagtacataagcctacattgtgacgcgtgggatctactagaaaacatncagaactcattctgcact

SEQ ID NO: 180914 - DNA, 456 bp, Glycine max
  unsure (1)..(456): unsure at all n locations
agatggaccatttcaagtgaaagaatcaatgacaatgcttacaaagttgagctgcctggtgagtataatgtttgttctaccttcaatgtctctgacttatctctttttgatgtagatgaagaatccgatttgaggaaaaatccttctcaagagggagagaatgatgaggacatgactaggagcatgggcaaggatccacttgaaggacttggaggacctatgacaagggctagagtaaggaaagccaaggaagctcttcaacaagtgttgtccatactatttgaatacaagcccaagtttcaaggagaaaagtccaaggttgtgagttgtatcatggcccacatggaggaggactaaatggcaccactttgtctcaattntagagtggttagtttgtctaaataatggcccaatccttgtaatgttggctgaccaaaaatatgttttgggttaatc

SEQ ID NO: 180915 - DNA, 461 bp, Glycine max
  unsure (1)..(461): unsure at all n locations
agcttctagtctntaggtttctattgtttatggtgaatctgttctttggaaaatactttcacattctgacgtcaatctttttctgagatatcctgtatcttcattaaatttaagtccattcatttggtgtgttggggtgtcctggtctggtttctgtccatttgtcctacccttttctggtacaatagatgcatgtaggtgtgtaggataattataatcatcttgcccctattgcctgttttgttctttttcttcatgactttnttctctttcctgttcaatcttgtgatatttgcagataatttgttttctctctttccaaagggtattatgcactttctgcanacattnttctatgcntagcgttttaaccatttacattntgcatgtttagtttataggggcaacaatggtgtcttcagaattgcagatacanactgataatggtctaattggcatgc

SEQ ID NO: 180916 - DNA, 460 bp, Glycine max
  unsure (1)..(460): unsure at all n locations
gggaattcaagtaacctctagttgtctttttttatttgtgtttgtatatataaataataaataataataatagttaaacatcgcctttcttttctcttcacttgaagacatatcanagtcatataggtggattattatatttatccgataaccacaaaagtaggtattaatatgataaagcagaaggaattaattgccaaatcttaatcaaagtattgatacgtattaaccccccttccaaagcatgtttaagatattggtgtggaaaacaaaaaacaaaatacatgtttaattcaaaaaaataattntgcgacaaaaataattntgttaaagaattaaaactcatacaacattntaaacttcaatccaaaaatctacaaaagaagacaaggngcacaaaggtagctgtggctatcagtcttacaagggatgttcatataaacactgagcctttctcggg

SEQ ID NO: 180917 - DNA, 466 bp, Glycine max
  unsure (1)..(466): unsure at all n locations
agcnttgtccccaattttctataaacaggnggagaagtgaagtaganaacggttcagccccttaggcacttctctctctttcgaatttgcttaggaaaattgtttttgtgaagaaaatccaagccgaggcgcttccgtaacgtttccgtgagtgatttcgcgaaggttttcgaccgttcttcgacgttcttcatcgttcttcagtcttcaacgggtaagtacctcaaaccaagcttttcaattcattctatgtacccgtggtggtccaaatttggtttcatgtatttttagtctcgttntcatttactttttatacccnnctttgacgtgcttaagccatttatttaagtcatttctcgcttaacctanaaataacataaatntccaccgatcatttgaattgtatcatccgttaactttggttgaaaaaattccgaccgatcggtcgtgccgcaaccacattgga

SEQ ID NO: 180918 - DNA, 449 bp, Glycine max
  unsure (1)..(449): unsure at all n locations
tgtaggcgttggatcttcttcatcaatggagtcattggcttcttgaagatcatggcagcggaatagagaaggaagaaagatgattggagaccccacttcaaggagatgatgagtcaagaagaagctcaccaccacaggaagccatggataagagcttgaaggaaggcgaagatgagtggagggagagggagagaaggggcacgaaattntatgcctcaaatgaggtctgaactttgaagtgtaattctcaaatgatcaaagttcaaaaaatgcacacacatggcctctatttatagcctaagtgtcacacaaaattggagagaaatttgaatttctattcaaatttcacttgaatttgaaattgaatttgtggagccaaaatttcaataattatgattaatgaattttagatatggttcagcccactaatccaagatcaagtccaagat

SEQ ID NO: 180919 - DNA, 355 bp, Glycine max
agcttctaaggaagctgtctcattatagcttctcaaggaagctacctagtctataaatagaagcatgtgtaacactcgttgtaactttgacgaacgagagtcttgtgagacacaactcaaaggtcaacctctctccctttatcttccttcaatttcgcgctcccccctctctctttctctcgctctgtctttgcctccattgaagcatcctctccaagctatcttatacaaggctcatcttggcggagaagctctttcttccatggcttattccttaatggatggcgcctcctctcacctcttttcctttgtcttccgctgcatctccatgagggacaatcaccattagaggacc

SEQ ID NO: 180920 - DNA, 448 bp, Glycine max
  unsure (1)..(448): unsure at all n locations
atgcttcaatggaggacaaaaatgagagagaaagagaaaggcgggagcataaaattaaaggaggataagggggagagaagatgaactttgagttgtgtctcacaagactctcattcatcaaagttacaacaagtgttacatatacttctatatataacctaggtagcttccttgaaaaacttccttgagaagtttctttgagaagcttctttgagaagttagagtttagctacacacactcttctaataactaagctcacctccttgagaagcttccttgaaaaacttctttgagaagcttccttgagaagatttatagagaagttagagcttaactaaacacacccctctaatagttaagctcacctncttgagatgagaagctagagcttaactacacacaactcctataatagctaaattcatcccatgccaaaatacatgaaaa

SEQ ID NO: 180921 - DNA, 390 bp, Glycine max
agcttgctcagattccacatatcctgtgactgttaaaacaacagctggtttagtgacggaagaatagtccatagttaaggattcaactatatataggaacgtcaagttgttgactttgaacttgatagtttatagtttggaacgacctatgtctagttaatggcccagaggctaatattaaagacattgactaaatcaggagtcttaaaaattattattttttaaatctaaacatattctcactattttttttttttacttacgctatccattttatttggtcaattcttacttgttcgaagcactcattggagcattttattaatgttatcctctcttttctcttaacatcaggcatatataatccatatccttcctccatattctttc

SEQ ID NO: 180922 - DNA, 434 bp, Glycine max
  unsure (1)..(434): unsure at all n locations
nttataanaagcatttctaagcataaaactaaaatatgttgtattgagctcttggtattttttttatgataacatttttaattatgagtataattttataattattaaaagccatcagtttttttttaaataataatttgttcacattttgttcaaataaacttaatgtaagttctctgaatttattgcattctggcgactgaaattcacaatcaaaacttaaagtgtgctgaataaaagtttttcatagatgtaatctagtaaaataatgcttcataaataattaggtgtctaatagaagaataaagttaatacaactgttctcgaaattaaagtagaatcgatacattcacagatgtgtatacataataatggtgtagtattcaatacatattgttttgctttactgtcgaactatggaattccatatacat

SEQ ID NO: 180923 - DNA, 137 bp, Glycine max
cgagactgtatttttgggaaagatgaacagcccgaggaggatcctatcatttcttcagcacagataatggggaattcgaagaaaaatactctacatataaccgaaaaaaacatttaggagaagggaaactacttata

SEQ ID NO: 180924 - DNA, 417 bp, Glycine max
  unsure (1)..(417): unsure at all n locations
tggagggaggtccctcactcgtatctgtcaggtgatagtggcacccataagaaagtatcatgttgaagcacctgatgacaagtctcttttatatgagattacatataccatcaactatcttatcaaaatatggcaatcctgtagtcattaattctccaatccttcagttaggttataatatctgaaatgctagctaggaccagattcttcaactcaaggggaatatgataatgtggaattcattntaagaatgcttcgtgcattcgtcactggcatcacattattggaatgccgttgatgatgccgtacagtagcataaattaactaacgctagcagaatttcacgtaatattctaattacacagttttaccttagnttaaatttcaagagagctctctctgngttctcaagcatat

SEQ ID NO: 180925 - DNA, 353 bp, Glycine max
agcttcttatacaaggctcatcttggtggcgaagactcttcttccatggcttattccctagaggatggcgcctactctcccctcttctactttgtcttccgctacatctgcatggtggaaaatcaccattaaaggacctcattgaagcttaaagatccagcctccatagaagccccacaaacaaggtgtccatcagtaatgtcttacgcaagatataaaggttgaaacatattgaggaagaagtggtttctgttctcacacccagcatgaagacaaccatgagttacagtgggagggacaagattgagactctagagcacgcgacgtttgtgaggccatatgcttactatatg

SEQ ID NO: 180926 - DNA, 374 bp, Glycine max
tcatggtgaatcataggtgattcataggtgtctcgatgataacaatgatgacaacaaaagatgatgactgaggtgatgaacataaagctcaaagatcaatcagagaacaactcacgtgaatcaaagaacatctcatatgaatcaagaacaagtcaagagttcaagataagaatcgagaagaattcaagactcaagaagacagtctagagtcaagaatcaagattcaaggttcaagatctcgagaatcaggactcacagattcaagaatagagagaaaacttaatcaagataagtattagaaagttgttcaaaactttgaatagcacatgagttcttgcaaaaccttttactagaggttgtactctctggtaatc

SEQ ID NO: 180927 - DNA, 330 bp, Glycine max
agcttgagctttgaattgagtgtcattgtcagtggcaatggcgtaaagaagaccatattttcatatgaagggtttgcatgagaacttctctacctcatctggtgaaatttctcgcaatggtcttgccttaatccacttagtgaaataatcaatagcgactaataagaatttgacctatcctgcggcttttgccaatggtcctagtatatccatcccccacatggaaaaagggccaggtcctagtatgaccaataagaatgtaccctttggctcgctcacgtagctcgtccatgctgctagggggtttcttgcatatactatcagggaact

SEQ ID NO: 180928 - DNA, 334 bp, Glycine max
  unsure (1)..(334): unsure at all n locations
cgcctctatagctagccatcacaagaagatcatattnttcaattgacgtgttatccacatcacattctacacggtctcaccatgaataaaaagggaaatggntatttcttctccttccatactcacaaacaaacatgattntacaagcatcaaactcaacttatgaaaacatgtgcatcatgcaccacaacagcacatcacaatccacaacaatgccttgaagcattctcacctattccacgaattggattcatgccccaccccatgttttattgcatgttatgttatccttccttttctcaatattatgcggagtttatcatgactcatattc

SEQ ID NO: 180929 - DNA, 471 bp, Glycine max
  unsure (1)..(471): unsure at all n locations
agctnntgcgtttcctcatgcatttcattaaaggcttccaaaacttcctcaaattcagagtttacctgaagtaattatcacagcatcacaatcataatctcgttctatttgcaatcaaaatgttatgctctattcctagaaacataatgtaaagagtaaattcattcagttcaaattctaagagtactttccaatcaaaattaaaatccaatttcatgaaacttgtgatcaaatagaatcaaacattaagaatagaatgaaatcaccaataatgagtataaaatattcatacatatatataatatcaaaagagatacataagggtacaaagattacatccaatcctttagagaaactaaccgatcattgcatagagtacaagatcaacaagagaaatgatgaaggatgcgatccatggttacaactctgtaacacctgggctccactntgtgctttcttcttccttctatg

SEQ ID NO: 180930 - DNA, 471 bp, Glycine max
tagccaattctactgcctggggcaaagacaatggtcaaagtgctggacttcgcgatggagctctggattcaggccagacacaaagcccttgacaatctccattgataggcaactaaatacatgcaactggaggagctcaccaagtacaaccggcagttgaggaatgaagcatccgactcaaagaaggagttagaaagggatgcccaaaaaggaaaaagaacatgcacgcaagactagaggacctttctacaactattacactccccttaatgatagccaatcaaggatcttggaacaagcccttgctactgaatttttcatgatgccaaagcaggctaaccccccctaagagccaaccactcaaagcatttttgataccataggaattggggtcattcctcagaagaatgcataacacataaatacaagattaaggatctaattaaaaaaacatgcctaaaggatttcaat

SEQ ID NO: 180931 - DNA, 444 bp, Glycine max
agcttatttaaaaaaatataaaataaatagctgtttcttaagattgtctacagtgtttttttataataaaaaaaaacagttttctgctttatttacaagcaaattctatctggttctcacaaaatcacttttttaaacaacacttttttcggaatcacttttttgaagtttaaacaaactggtccataaacaatctcagaaatgaaaagttcaatccaattatacaccaagagagacagcggattagtgaatcttttaaacaagttacatgcaacacatgtccacagaaaaaaacacaactaaattaaactaaataccattcaactagtgaggaattgatacagctttattctcaccatataattgcagttgtgtatttagtgatgtttccaataaggtaatgagggtgatcagagaagtccacactagacccgaacacaattt

SEQ ID NO: 180932 - DNA, 444 bp, Glycine max
ctcagcttgaatgaagtccaacgcagcacgcgtgtcgttaaagttgggaaggttaggcaatgaaggagatgaacgtggagtgtagtttccactgtactttactctagcagaggttgtggagttatcaaaggcaacaccaacaccacttgaatatgctcttgcagcacgatagtaatgattaagttcttggttggcatgcaataacacatccattgtttgtcccggtgatatgcaaatgtattcccttgccaatggcttggttaacataccatcagcaccaacaacagtgaggttgtgttttgaaacagagaagaagagaatgagattcattgccgcattgacaacacggagaagataagtcctgccttgctctacatgaaactcgaacgtttctgaaaattaaaagaaagttttgtgtttagatgagcttaacctcatagatac

SEQ ID NO: 180933 - DNA, 471 bp, Glycine max
  unsure (1)..(471): unsure at all n locations
agcttgtggtgcacgatggttccttcaaggagatcttctgccttccacagctganagtattatgcttggaaccccttggagaactcatttccattggattaaagaactcttggattgagcccttcctacgaaatctagaaaccttggaagtaatgagttcttttagttccataaacttggtaccacacacagtgtctttctccaatatgacgtatttggaaataagcagctgcaatagcctgttatatttgttcacatcctcaacagccacaagtttggttcaactcaaaagaatggagataaaatgctgcaattcaattgaagagatagtgtctaaggaggggggtgaatcacatgaggatgagatagtatttcagcagctaaattggttgaatctttgctaattacaaaacctcaaaagtttctacatagggagtttaagttcccatccttggacaattgtcaataacc

SEQ ID NO: 180934 - DNA, 475 bp, Glycine max
  unsure (1)..(475): unsure at all n locations
tctaagcttacctacgctngagtgaatgggagtaagccaagatcttaaagtggagatgaaggaatgtagaagctctttgtcttggagtctcgaaagcaagaaaatgagaagataaatgacaattgttaatgaaaatcgttaatagttctttaaaagagtttatacctattaaacactaatttttactagtgattttattaactaataaatatttaagagatttacttaattattaataaaaataataataataatttcaataataacgaccattataataactttttatataaaagatttatgtaataatttcaataaaaatagcaattcttgatgataataattttgatgataaattcaataatgcattcgataacaatgttaatagtaatttcaatagcactaaacaatgaagattgaataaaaataatgtttagaacagaaatggagattaacaagagatgtgagtttatag

SEQ ID NO: 180935 - DNA, 470 bp, Glycine max
  unsure (1)..(470): unsure at all n locations
agctntaagcatacatgaaatacaggcgccaatcttgttttctatccaaactcacgcacttgcattgtgtgattctaaacagtaattaatgttggttcttttatgtatcgaaactgttaggagagagaaaacacctcaccacttgaaggattatgtttaagggattttggcacaagttcatttatttggtagcgcagtactgcattaggataattctgttagtgttccctctgcttgcctagaggattctgttggtggctgttgtcctatagtgagcacatataactatatatatgcagngtattgacagaagggaaataagaagaatataagcaaagttttctctctatgtcttaagcttttctactctcttctctctgcttctgcattctgcatttctgcttctattcaagttcttaacatttggggctttcattgagctcccatggcggaacctgaccgatggaacc

SEQ ID NO: 180936 - DNA, 365 bp, Glycine max
  unsure (1)..(365): unsure at all n locations
ntgtccgcaaatccctcatgtaagactaggcctaaactaaacagcattattgtaacagcataattaaaaccaaaacttaactcgcagaatcctcatgtaaagctaagtttcaatcctgcttcaatcaaattctaaggcaacagtacatttctcgatgctaaagtcacctaactgtgcacacaaatgggtgatcagacccaaaacatacaaatattaagcattgaaggaagcattgaacattaaaacataatcaattagatattaggtatttacatcagttggtcattagaaatccccaactagggtggttagccagccactacaaagaaaccctaaccataaatgagattaaaagcagagaatga

SEQ ID NO: 180937 - DNA, 367 bp, Glycine max
  unsure (1)..(367): unsure at all n locations
tctgagtcacctgccgcatgcaagcttggactcttggaaattctttgcactagtcactcttacagttgtgacgtttgaataaatctacagaaacaagtcacttatagaattgtgacttctggaaatatattctgtgagattagtcactggtgatcgattaccattaaggtgtgatcgagtacacatcaacagatgtgacttttcattttgaatgttgaanaattaaaacatttagaagctctggtaatcaattacaagtattgtgtaatcgattacacaagtctaaaatactgtaagactatctaaacataagttataactcttgaaattgaaatcttaacgttttaaaacattggtaatcgattac

SEQ ID NO: 180938 - DNA, 423 bp, Glycine max
ctaagattagcctgtaggcaatttcttagtgcgctaaaaattcaattcatcactcatgccaaatattagcagagagcatcagaccggtcaactatgataagaaacagcacagtagacaatctgcttcatttccttaaacagcaaccgctcgatgaagcaaacctcctgcatacaaccatctttagttgcacttacttggtacattaaaatactcagaccaagaaaattgaaatgcattagtctttgcaatttgtattgcaccatacttaaggatttccatgtgaatagtttataccataacacagattatgctgaccaaattgacccaagtatacacacaagacttcaataaagtgattacaccaactcacttatcatcatcttaaaatgaataatccttcacatcagatcttgaatcaccca

SEQ ID NO: 180939 - DNA, 419 bp, Glycine max
  unsure (1)..(419): unsure at all n locations
ggatcttaagcacctgcagctgcagcttttatccaggaaattcttgtgggcgaagctccttcttccttggcttattccctagtggatggtgcctcccctctcctcttctcctttgccttacgctgcatctccatggtgaaaaatcaccattgaaggacctcattggagctcaaagatccagcctccatagaatcttcacaagcaagcttccatcacattggaccattaatgatctttttatctttggaagaggtaataaagctacgtggttattctaggccttctttagaaatctatgcttaaacaataaaggtggaaaagaccattttaaggcactggaccttnaaacatggctctttggtgatgaaaaacactttgcttatgaattgattttagccttagcttcactgtggttatta

SEQ ID NO: 180940 - DNA, 437 bp, Glycine max
  unsure (1)..(437): unsure at all n locations
nttanatgccaaaatagcccctacctcctttcttcattaaaaatgtaactnntttttttccgganaagttgtttagctccattnttagaaacgttgngcttcttgttttctcttttttcgtgcgacattgcctctggttcgtaggggtagcagcgttgagcacagcggtgaaggtgaaggtactggcgtcgagcgttgcggtggtcggtgggggcaaacgaggtacgcagatggtggtttgactgttgcggacgtacggatgagttccggatcaacttgatccgtaagcttttttcagatcaacttgatccagaagctgcttaataatcttctggatcaagttgatctgtaagagactttcggatcaacttgatcccttgatccggaagagtattaagcagcttccggatcaaantgattcaaaaaagtcttatgga

SEQ ID NO: 180941 - DNA, 394 bp, Glycine max
agctagtagaatggctagacatgatacatgtcaaggtttggtttggttcaaggataaaagggatgccccacattatttccatgacacaaatgcaacaatgatgatttggaaattttatgcaaaactggtcatgcatgcacctatgtggacactcaagtgtcaaatttttatggtcatgtgatgctagggctcaagattcatttcctctactttagtccacccaaagtttccaaaatatgttcttttatcaatttgtgcattcatccgagtccattatgagcgtccgggaaaattttcacagcattcacccttcaggtgtacacacacattatccaaaaatatggtatgatcagtgaattgtttcagagaataggtggagatcatctcttttcat

SEQ ID NO: 180942 - DNA, 356 bp, Glycine max
  unsure (1)..(356): unsure at all n locations
ttcaacaagagtcttcacatataaccatcatgaagcagatatctaacaaaactacccatcatatctcccaaaaccccatacccacgaaatttaagagagaaagaagtncacccagacctgaattttcgaagtcccacttggaatcacgcactttacgacatgcgaaaggctctggttgtcgggctaggagcanaaatgagcaccccaggttggagctctgttggggtttcaatggagaatggaggagaaggaaaaagcaccgtgatgaagagggagagcttcttgaatttctgttttggctgagtgaggagagagaacagctttttgggttaaataaaaggatttcctcttttcta

SEQ ID NO: 180943 - DNA, 434 bp, Glycine max
agctctactacactaaccaaattccgaatgtatgatacgatggtgcatatcttatattactatttacaaacacaactgaaatttaaagcaaccactactagtccaggatctatactattgcaatttccaactgttagtttattagtggctaaaagagtaggtaaaagttaaccagactaattaaataataatatgccctgtttctatatattgttaccataaatatatttaaaaaatcagaccaggcttattgctttaagtttttcactatatataaattcataatgaaatgtatatttgataatatatgctctaaaatttagatatttatttattattaaattcttatatgatggatatattactacatataaaattcactataagaactcagagtgccttccaaccaccaattattttatattgtagaatcg

SEQ ID NO: 180944 - DNA, 347 bp, Glycine max
ttagacctttgatggcatgctggcatcaccctcattcttgctcttgtcagcttcaaacttatcaattgctacctgcagttcatcagtgcctccaacagccctcatggtgtagaagtatgcaccaaagacaaaagctgtcaaacccccagcaactaccagattctttgccttaggtggaaggctcctatatcctaaaagtccagccatcttgatcaatgtgggaaaaaagggttagcacaatttcacacaattacaattacccttcaattgcagaaagcacaaaagatcacaaaacagataattcagatctgtaaagaataatgagtagacattttcacaaacagatt

SEQ ID NO: 180945 - DNA, 464 bp, Glycine max
  unsure (1)..(464): unsure at all n locations
agctntaatggtgttaagaagaaatcacatgttttgtatcatcaacaagagggagaatgtgaatgtatgtatacatgattttgatgatgtcaaaagaagaatcaaacaaggctcattttgcttcaagattaatacaagattggttcatcaaacaaagccttgattcaagatttcttcaagatcaagccttgcctcacaatgaaaggtttcaagtcattcaaggcacatgtaatcgattaccaatacatgtaatcgattaccaatggtttgaaagtgtgtaatcgattacacatcatatgtaatcgattaccagagactctgaacgttgggaattcaaattttacatgaagggtcacaactgttcaagacaaacaactgtgtaatcgntacactaattatgtaatcgattaccagagaggattttcaggaatatcgccaacagcacatcttatcatttgaatttg

SEQ ID NO: 180946 - DNA, 362 bp, Glycine max
  unsure (1)..(362): unsure at all n locations
ctgtcgaaatgccatgtgtgggtgagttagacatacccattctgttntanggtttttgtgatgatgtttgtgatgtttatatgctgaaattgctaatggaaatctgttagagacgaagggtagaactaacccaaggttagaaagtgagaatgtgatgttatgagtggaaaaagagtgagactttgagagttggaaggctaagtccgaattctgtggtaaatggaggttagagtgagtcaatactagcttgaaatgtcatttagaacatgtgagaaaggttaggctgagctagagagaaaaataaatgaccaaagtgaaccaagagccatttctagggcaaaattgggtgttgaagagtcaaa

SEQ ID NO: 180947 - DNA, 399 bp, Glycine max
  unsure (1)..(399): unsure at all n locations
tatcaaaatgcaccttaagtgcatgtttggaaaagattaatttcacgaaatattcacttcttntttgaaagttctcttggaaagctaacaaaaaataaaagtgattatctctagaaaataagttgaatcaaacatgaactaaatcttttaagagcctaaaagtgattattggctgcaaaaaagacttcaactaaccaaatccatacaaaacaagcactaaccaaagttctctcatgtacaacattgacaaacatgtgttctacttctaatgcgccctttccaatttccaaattcagtttctaaacctttgaagagctcgagtgattactgaccggtaaaatcatattctcagggccaaaatgcagcgagctatgggactctattatctactacaaaaaa

SEQ ID NO: 180948 - DNA, 341 bp, Glycine max
  unsure (1)..(341): unsure at all n locations
agcttaatcacaaaggatggcatggtcactggctgccatattttcaatcagctccataacttcatcaggtgtcttcagtttgatcttcccaccagtggaggcatcaagtaactacttcgaatggggtcgcaagccatcaatgaatatgttgagctgaaccggctcgttgaacccatgggtgggagtcttccggagtaaaccgtggaagcggtcaagagctctccaccttttccttcggagtcttggactctggaaaatatttcttcaaanatttctccaccacctcttcccatgtctgcaaactatttcccttgacgagtgcagccatttttttgcttcac

SEQ ID NO: 180949 - DNA, 429 bp, Glycine max
  unsure (1)..(429): unsure at all n locations
tacgtgacactataaaactcagcttaatagtcaggaaataatataattcaccctcttttatattcgagccattgatcaacaagggatcaagcagtatcttgaaaagttcacaactacagatcatggctcttaattttgttctgaggaaaccatcataggccaccatattaatggggagggttaccactattttggaaatccgaatacaaatctttattgagccataganttaaacatttgggaagcaatagaaataggaccttacatacncaccatagtagatgtaagcactagcaccacaacacanaaacctagagataagttgactgatgaggatagaagaagatccaatataatcttaaagacaaaaacattatcacttctaccctatgaatagatgaatattcacacatatagtcaatcatcttg

SEQ ID NO: 180950 - DNA, 293 bp, Glycine max
agcttaccaatttcactaaacttccagctgttgctcatttaccctcttgtgctcgcctggtatgtataattatgcacaaaatcgctgcccggctctatgtttaatatcctgcatataataccatggtgtcttcttctacaatcgcacaacaatatttacttgtcatgccggcttctcagtttaataatcattaacactctttaattaaagaacgatgcccatttttgattgcatgaataaatgaatcggaatccatccaatgcttagaataacttttcatgctgtcatgcatg

SEQ ID NO: 180951 - DNA, 365 bp, Glycine max
tctgtggttatggaataattgattatcaaaagtgattatcgattattttaacacacaaagaactcctaataaaggttccaaacaaaatctaatcgattactaaatgtagtaatggattatctcgagccataaagtctttattctggtgaaacttacatatgtaatcaattattgaaactgggaattgaataattccgtgattcttgccaaatttcaagtagaagtgaactatgtggcttattctaacactttgtaattgattattaaactttggtattgattattaaactttgtaatcgattacattatattgaactcattgctttaagaaactttgagaatcaatcattaatctaccatggttg

SEQ ID NO: 180952 - DNA, 393 bp, Glycine max
tgtagcaaggttattattatggttaatagttggactacattgtgagatacattgcaagttgtctataacaatagtttttgtaagtataatataatattaatgtgatgatatgaagaataataataatctataaatgaattgcaaattacaaattacaaatctgtattaagtatcaccattaatagctgaatgttgtcttttttgttcttgcaaaatagttttcctacgcttccttcgttcaacatatatgtccatgagtaattgatttctgcaacaactgccttataattgccaaacaataggaaaatcaaatgttgaaattgagttaaataagttgctgtagtaggctgactttaaaatgataccaacattatagttatttgcatttgcttc

SEQ ID NO: 180953 - DNA, 217 bp, Glycine max
tatacattttatatgtgcttcagggagctatgagaccaccacaactggcggatagaccggatcatgtggtcgatgatcccctatatctgatgacattgatcatcccaaagcttattctgaagccattgaaagatatatgagatgctacccgagatcgaagtgcttaatgaagacttcccgttgacataaagcatgacgatctatctgatatatcaca

SEQ ID NO: 180954 - DNA, 414 bp, Glycine max
tattcaagtgacacagctagaagcctggctggaaccttcgagtgacagcaatcttgtacccatcccaagaatgatttgggttccaagattcccaccattggaaccaacccaaagcttctccatccatcgcgatcatcactgcttccagcttgtcctcttccctaactgcccataaccgaaagtattgctcaatcttggtatccagcccattggatcctcaccatcgaatatgggcaattctaaattcctccaccgattgccgttgtgcgctgccataccttcatcccctccgctcgcctaaactgtatgcacatttgtcgctggagattttttctcccacgccactgtcaacctttggatcatcccttcgatcgagctcagccgcgattccactgcttcgcgattctcctccat

SEQ ID NO: 180955 - DNA, 314 bp, Glycine max
  unsure (1)..(314): unsure at all n locations
tctatcaattttataatccatngnattcatgccactggttgttaacaaacaaataatactcaaacctattacatgtgggtacctattaaagatatttattttttatttgtgtggatgcgaattcttatgttatccctacttagtatccaaaattggtagcgagccttttgtgtatgatgtatctctccgtccattataatgtttctttccacttacatatctctcaaaaaagataagggttatagataccaacttattgcatatattctaaagagaaaaataataatcctacaggatagaattgctcatatttt

SEQ ID NO: 180956 - DNA, 399 bp, Glycine max
  unsure (1)..(399): unsure at all n locations
gcagaggatntttcaaactcctcactttcttagatctcttctctcagataaaactttttccctcttaccattttcttaccgtctattcacacccagcacacacaagagaacaagaagagagagacagaaagagagggagaaagagaaaatcaaaaaccctctctttcaaggcatgtcatagatcgtgtttatggaatagggaggcaataacataggagataagatatataccaagttattagaatcatatgtacataatttgttttgtagcacacatttctgattccaaaatcagttgaataagaactttactgaaataggaggcagattctcatctgtagtaaaagtgttccttctcatattaaattagatgaacagacaaaattgtactatgttttt

SEQ ID NO: 180957 - DNA, 416 bp, Glycine max
  unsure (1)..(416): unsure at all n locations
agcttcttgacctgaatcaacacatcctcaatcacttcatatggtcttgtgacagagcgatcaaccaactggagggtcatgcatgtgggcattatctctatctctccaagtcgccgacacatggagagaggcattaaattgatactagctcccaagtctatgagagctntacccacaacaacctcaccaatagaacacgatatactgacacttccaggatctttgtgcttcgggggaaggatgcgttgaatgaccacactatagttaccttccacaactattgtgtcactgtggatataccggttattctttgtcagcatgtcttttaaaaatatggcataaagtggcatctgttggagagcttctccaaaaggcaaagtgatcttcatcttcttgaagatgtcaagaaatctggc

SEQ ID NO: 180958 - DNA, 398 bp, Glycine max
tgaaaagtgcaagaaaacgaactacattttctgcattttttgaaaaaagagatgaactcgctaagcgagcatgctgcgctaagcgagttcatcagtactcattgtatataggcgttctctgaagaactcgttgagtgtgcttaacgcgctaagcgagttcatcctttgaggatgaacacttatcctcttgcttaattacctgtggctaagtgaggatgaatcgctaagcccaggttacttagaaaattttttattgatagccgcgcgctaagctgagctttcctgggccaagcacgatttgttgcggcatccgctgagttaagcgagcttcgctcgctaagctcccaatacttagtgaaattttttaggagttggtgccgctaagcacaacctttaag

SEQ ID NO: 180959 - DNA, 418 bp, Glycine max
gcgagcttgcaagtggaaacttaggggtacatagcttgtcctgcctcacctgcgttttgtattgcatctgagaggcggaaggatacattttatttggttgatagagtaaacttatttttaaaatatatcatgtgtaaatatagtacaatttgtagatctgatattcagcatataaaacaagtctttttcttctcagaatcatttcttcctacattgttcctccactataaaaatgatccaaaaagcatagctgccgacttcttgtttaaaatcaaggcgtccatcaccaatagttcctctacgccattaattactatcaaagtgatttttaactagatgtactcttcatattggtctgggtacagatcgcttaagagatgttgttagataagaaacgaaacacatgtgaatgtaatat

SEQ ID NO: 180960 - DNA, 402 bp, Glycine max
  unsure (1)..(402): unsure at all n locations
taagctctttcaactgcacaaagctattaatattngaagagtatccatatggaaccttcacccgacgaagacactgacaaaaacttatcttctcctttttggacaaagcatggcaagctaggggcaagtaaattttcttcccatcagaccttggatgcaactgtgatcgtatccccatataagctagatcttgatgggtattcaagccatccttcgtctttccttgaatgttaaggagcatcccaatcacactgtcacaaacatttttctccacatgcataacatcaatacaatgtctaacgtctagatcagaccagtacggaagatcaaagaaaatggacctcttcttccatatgcaactcttacttttatccttcttttgggtttttccaaatataatat

SEQ ID NO: 180961 - DNA, 369 bp, Glycine max
  unsure (1)..(369): unsure at all n locations
gtaaccgccccanaatggctatttccctataaatagccgtgatgggggaggggtttaaggggttccaaggttcaagagttgatagaagaaagaaagaagaagaaacaaagatgaggcgctaccgaatcgtgactgtgatcattccctacatcgttttcttgttctgtgttcctcgtgcaacaatcggttagttttgtttttaaggattgagtatgatctatgtacccttaggggtcccctctgttattatgtgcatattcatcttctccatctatcattggtaatctcattttttatttgtaaagtttaatcttaactgatcactagtttcgtaaagttgtctttaaagagattgaaagctaataaaca

SEQ ID NO: 180962 - DNA, 386 bp, Glycine max
tatgtaaactggctctctgtttgtttgttacaaaccctaattaatcaatcagtttgatttgattttggtgtacaataatttaatctgtgaacataatttgttgatcgcatcacacgtctgctgaaattggttatattcaaacggtgcgttaattaattagaagatttgataattgatacgtttgtgtacttaaaagcaacgtatggtcttttgtagtcgatctagttgaagattttgaagtggacacaaacttcttattatttaatttttgttttttatagtcgacagtggttaaaaaatgttattaaagctctatttactgaatgtttttggtttattagaccatgtataaggcgatattgtttaaaacatatccataattaatc

SEQ ID NO: 180963 - DNA, 331 bp, Glycine max
  unsure (1)..(331): unsure at all n locations
agcttgtcttttccaattctntataatttaattaagtttaagcaagatgtcaaagtgggcgtcttcatttttcacaccttaagcccaaaaggatttatgagggttctaaagatataatagcaccattcttgggcctctctacttaacagtgtaatctcttgcattggtttggacttgacattggctttgtccttatttgttttttagttatcagcntatcacatagccacactcattcacctcaaaagtagagccatgtatccattcaaatatgttaaagatactacaaaagaactttcattccaatatgtaaaatttcctatagatatta

SEQ ID NO: 180964 - DNA, 378 bp, Glycine max
  unsure (1)..(378): unsure at all n locations
tatcatagaaggcaanaaaaaggtctttataacgtcttccaaaccattgggattctaagccgcaatcgaaagtttggaactcatgatcccccttagtttttgctctatccaagggaaacgcaaccatgtgtcagagcatcatggagtctatgacaacaacgagtcgtgacgaagatggatttgtgatagcggcaaaactatgtcagtcgatggagatgttgttgtattgtgaaagatgtaagaaagaagaatccgtggaagaaatgttatgacaaaaaaatgatcatgattacatttgacactctcttaaatatatgaataccatacataaattatcatagtagaccagtcttaacttaacctttaagatagataata

SEQ ID NO: 180965 - DNA, 399 bp, Glycine max
  unsure (1)..(399): unsure at all n locations
agcttctatagaaggttcgttcctaatttctctacaattgcatcacctctcaatgagctagtgaagaagaatgtggcatttaactggggtgaaaaacaagagcaagcctttgctttgcttaaagaaaagcttactaaggcacctgttctagctcttcctaacttttctaaaacntttgagctagaatgtgatgcctctggagtgggagttggagctgttttgttgcaaggtgggcaccctattgcttattttagtgaaaaacttcatggtgcgacccttaactaccccacctatgataaagagctttatgccttaataagagcactccgaacttgggaacattaccttgtttccaaggaatttgtcattcatagtgatcaacaatcacttaagttcatt

SEQ ID NO: 180966 - DNA, 350 bp, Glycine max
agaatcggacctcagtgtgaaaagttatgaccatttgaatatctcgggagcttccgttgtacattttcgagcgtctgtatatgagatgcgcctgaatcggacatccgagtgaaaagatatgaccatttgaatatgtcgagagctttcgatgtttaattttgagcgtttagatataagataagcctgaatcggacatcctggtgaaaacttatgaccatttgaacttctggagagcttccgttggggattttttaacgtctctttatgtgatgcgcatgaattggacatccgaattaaaagttatgaccattagaatatctcaagagcttccggtgtacaattctgagcgc

SEQ ID NO: 180967 - DNA, 242 bp, Glycine max
  unsure (1)..(242): unsure at all n locations
tngcttctgcaaatctaatcactactacattgtatctctaacatgcattgtatgcggggctcatcctttgacatgggaagccggatagtccatatcgccattttaattagacacatggggcactgcgcccccaaatgcgcaagtaagaagagataatattccaggctgtagtgcccgtcaaatgcatccatgtcatgcatcgcataagcatctctttctaacatattaatggacatatcctg

SEQ ID NO: 180968 - DNA, 170 bp, Glycine max
catgggcgatcgccccctgcataattttttctaacatatcaatcacccctaagtgacttgtacttatgacataagccgtatattgcctttttaacttcttcgacctaattaataaaacaagcactttctgcaacaccctcggcaatggcttgccactataagaaatgatt

SEQ ID NO: 180969 - DNA, 399 bp, Glycine max
  unsure (1)..(399): unsure at all n locations
agcttcaaaccacagcaacacaaaatctaggtatccaaaacccctcaatttaatggattttctaggtctgagaagtgaaattgagaatggctaaaccaaagtcaagcttcaaaccacagcaacacaaaatctatgtatccaacacagcaaactctcacctcacacaagtctataacatcaatntaaacttgttcaaactagatttacgcctaaaatttcaccgaatcaaaatttgactcctcaacacccaaatttaccctagaaatggctctttgttcactntggtcatttgnntttctctctagcatagcctaaccttcctcataagtcctaaatggcatttcaagttaggattaactcattntaacctccatttaccacagaatccagatttaacct

SEQ ID NO: 180970 - DNA, 354 bp, Glycine max
  unsure (1)..(354): unsure at all n locations
tnctcttttcttctgttgcgcggggccggccttccgtggacaaaactattggatgtgtcgcgatgttgggttgaggcaacgtgctgggtgccggcccttctgggatcgggggatagaactcgacatcccttcgagcatagtcttgagggtctttgtggacttcttcggctgttgaggaggctctctttcaagacgggagaagcaatatggcccgcatcctcctgcaagacgggtggtgagttattgggcggcaatccataagtgtaagccggtcggtgtatcccaggtgagggctgccatcgtgccccagaggtcccttccccgcctactatgttgagggagatggtgcgcatt

SEQ ID NO: 180971 - DNA, 431 bp, Glycine max
agcttgcctgtccgatgcagcagtaatgatggcccgagttatgttggggaacggttacgaacccagaatgggtttaggcaaagacaacggcggcataactagcctgataaatgccaaaggaaatcgtgggaagtatgggttaggctataagcccactcaggcagatataaagagaagcatcgcgggaaggaagaacggtagtcaaagctcgcggttgagacaagaaggtgaaggaagcccgccttgccacataagtagaagctttataagcgcgggtctgggggacgaacgtcaagtggtcgcgatatacgaagatgatgttccgagtacattggatttggtacgaccatgccctcctgatttccagctgggaaattggcgagtggaggaacgccccgacatttacgcaacgagcataatgtaaaccttta

SEQ ID NO: 180972 - DNA, 399 bp, Glycine max
tagtatatggacttgggtgttgcccagtttcatcatatcttccgtaatacttatcacctctatcatatctaataattttcacatttatgtctaattgccattttacttcattgtagtaaatttctaaagcatccattgcctaagaaatctcgggcagtaagtagacataaccgtaacgtgaataatcatcaataatggtgataaagtattattcctttccgaaagaactaacatcaaaaggtccacaaatattagtatgcacaatttcaagaagctgagtgcttcttgtagctcttttctttgtatgttttgcttgttttccattaatacaacccacacaaatatttagatccataaaatctagataaggaagaatttcattctttattaatttttcca

SEQ ID NO: 180973 - DNA, 423 bp, Glycine max
  unsure (1)..(423): unsure at all n locations
agctctataagcgcgggtctgggagacttaggtcaagtgttctcgatatgcgaagatgatgttccgagtactttggatttggtacgaccatgccctcctgatttccagctgggaaattggcgagtggaagaacgccccggcatttacgcaacgagcataatgtaaacctttacggttttaaaagctctatagttgggcctaggctctagagtttttcctttgttaaggctatgtgtcttttgtttttgaatntataatacaaggatctttcttcatctggacctatgtctctacccattctcattcatttgcatgtgtacttctttctctgaaacgacagatccgatgacgagtccctcgaatgtactaatacctgngacccgcctatcgacttcgagcaagaaatgaatcaaacggaagatg

SEQ ID NO: 180974 - DNA, 392 bp, Glycine max
tgtaggattatggggtacccatcacatgtggtactatgtggcggtcgggcgatggtgcaaaacgattctccacatccacaaatcacgtataacccaccatcccctgttgcccacctccaactgagctcacgtactcccacgtagcccttatcctcgttcctctcaacgtcgggtccccatcaatcctcccaagcttccacaacatccaggtaattccacatccaatcatcatggactaacaaaaccaagcaaaacagggcaaaggcagaaaactctgcccaaaactcaaaccaaaaatcacagctttttctcacttaaggaccccagtaacatttccttcgttccaattcgttaaccgttagatcgactcgaaaattttactgtaagtccct

SEQ ID NO: 180975 - DNA, 356 bp, Glycine max
tttatcatcctactatgacgactgataaaactggggcacatgaagagggtgagatagatggagaaacccatgctgcgactgccattcctatacagtcaagttttctaccaacccaacaatgtcattactcagcctataacaaacctcctccttacccaccgtccatgtatccacaaaggccatccctaaatcaatcacatagtctgtctaccgcacttcccatgacgaagaccacctttagcacataccataaaacacctacaaaaaggaattctgcagcaaaaagcctatagaattcaccccacatttccgtagtcatatgctaaacttgaatccatatccactcaataattcaa

SEQ ID NO: 180976 - DNA, 381 bp, Glycine max
taaagcacaacattgaccatgagctcttcatatcgccctcagtccaatggccagactgagaatcttaataagaccattgagatgtatctaaggtgctttgtatttgaacatcctaagagttgggttactatgctaccttgggcttaattctagtataatacttcctttcaccaaagcttgggcatgacaccatttcaagcagtttttggtagacctccaccaacggtgatgcactacgaggttgatcctaaagatcccgatccactcaaggctttattacaactacgtgatcaacttttgagcaagcttaaaggtaatttactaaaggctcaacaatatatgaagatgcaagctgataagaaaagaagagaaagagaattg

SEQ ID NO: 180977 - DNA, 433 bp, Glycine max
  unsure (1)..(433): unsure at all n locations
agcttagccattgtgctatttcagctaagcgagtgtgtctcacttatccagagtctatgtttttgcgttgttgcgctaaacgcaccttgcgcactaagggagtactgttatttttataaggcacgctaagcgagccagtctcgctaagcgcccaatctattttttagttntatttttctgctttcagctaacataaaagcatgtctaatatgattattgtgcttattttttatgcagatgacctccaggaagaggaaagccatatcctcccgatcccgggaaccatataacaccacccattttgtttttgaggtcgcttaggagcgatattctcaaaacattcacaccaggaacatccttccagagaggaatgttaatcttcttgtgatagagtatgatgaatctcgacgagagctgataagaagaaactggc

SEQ ID NO: 180978 - DNA, 397 bp, Glycine max
  unsure (1)..(397): unsure at all n locations
agcttctacaatctccccctttntgatgatgacaaccctgaaatcaagaaacacacacacacacacactttttcctagtcgatcactcacttaattctccatattctccccctttgtttttgagtttatgcttcacttgaaattaagttaattacttatgtgagttcttgatttaatccctatttctctccccctttggcatcaacaaaaagccaaagtgcgtaacaaatataaatcatacatacattactaatcattcacaagacattcattgaaaaatctaaaccaatcatgaagcaagaaacatgaatagatcaaatatataaaatccacatagtcatataacacaattcataattgttcaatcatactatgcaaataaaagaaatactaaatt

SEQ ID NO: 180979 - DNA, 337 bp, Glycine max
gcttatgataggagagtgaagtcaatatcttttagtgtcggttatttagtgtttaaggctatcctgcccatagattgttaagatcgagccttgggctaatgaaccccatattgggaaggaccgtttaatataattgatatgtattcgaatggtgcttatgagttagaggagctagccccttagagacgtactttgaccatatatggtaagtctttgaacaaatataagccatcactgctcgaagttaaaataagcatataattctagaaactctggagacgtaaaaatggctattcataaaattgccacaaaagggcatgtgtcagtattacatcga

SEQ ID NO: 180980 - DNA, 402 bp, Glycine max
tgtaagatttgcaagatcatcttccttgacaactccttgaaaattattgccatcaatacgcagagatgacaatttagagagtgatccaatactttcaaatggatttccactgaatttattaatagacagattgagatatcttaatgatgaaagttttccaaatgatattggaagagcaccaccaattaagttgttggaaaaatctagcatgtcaatatttttaaaagccccaatttgatctatcagattgcctgaaagttgtgaactccgaactgcaagtgttgtgattccctaggaaatacaaagagcaagaatttctaaaagttcattaacctgttggttgagtttgagatatgataaacctatctcccttaagttgcagagattatccaaagaagttga

SEQ ID NO: 180981 - DNA, 359 bp, Glycine max
  unsure (1)..(359): unsure at all n locations
gcttcatgctctgagcattgtgggagatgtattgaatcaacgcttcttgcgctgatcattaaagtctcaatttgaatttgttgtccaaatctagaagtagatggttcatcctccacttggttaactgttatcttcatgattctcttatccttggagttgttgtaaggattggagcgcatgtcctctatgatcttgatggcttcaattggaggcgttatcatcatattgccttgacatgtatcatcaaggcttgtcctattgtgggagggcactccaccataaaatatgtgcattatcctctgctggttgaacccatggcgtggacaacttntgagcaactcctggaatgtttcccatgc

SEQ ID NO: 180982 - DNA, 390 bp, Glycine max
tagacaacacagcatacaaactacattaattggatggcaaagtatttccaagaacatggaacgccacccacctgaatttctactttagttgacctaatgcaaaactagatgttattcttttttttcctactcaagtcttttttcccaaaagagaaaaaatatgggttttagcttgagaggttttcatgaggtacatctaagataacaaagggaatttgtactcaatcaaatacattgaataaaattctgcatcccttcattttcataattttcttgtgtcttcaagacaggtacatccgtggttgcagctccacatgcttgtcaaacccaaggtccacccttggtgagtcttgccaaaatctaggataaatgggtcattggtcattttcc

SEQ ID NO: 180983 - DNA, 384 bp, Glycine max
  unsure (1)..(384): unsure at all n locations
caagctggngcatatgatctatatgctctagcttgagggtgagtgttgaatatccttgtagtttagccatttgtagtaacttagttggtagctttttcagagggcaacagtgcattgtcactgtcatagcctctctctctctcttctctccctatcttttggactctatatatatgtacctatttgaattcaataaagtaaggaaaaaggctcccttctggtctccttcaactattatcatcattagtacacaactagatgcttctcagtctaatgaattactgtcccataagttcattgatattatcctttggagtcacatcttatacggcctacaanttggaagttattctgtatgactgattctgtcaagtgtcatcaatt

SEQ ID NO: 180984 - DNA, 389 bp, Glycine max
tgaggtttgggtctcaaaaccagttacaacaatttttgaagcgaaagaaagataaaatctcaacattgaagtttgtttggtcgtgggtgtggcttaatctccaaattcatttttgaaaccaaccttaaactatccacattagtgaaactcccaccatcaatgatcaaagagcataactacccttggatgaggcacctcgcatgaaaaatcttttctctttgactatcatccaattcaactgcttggctacccaacatccttctaatcgtgaacaaatctccttctaactctctttcctcttgatgctcctcttcatcgctagatgggaaagattttgaagaagattcactaattatttctctatcctccttaagtaacatagtcttctt

SEQ ID NO: 180985 - DNA, 366 bp, Glycine max
agcttgtcctatatgggaagttaacattgttgccaaattggatttcacagttcccaaatcttgtcaactgtatttgtactactccaggttgactaattatggattgaaatcactaaaaaatttgccaagggtgttgttcctcgttttaagtgacaatgcttacgaaggtgaaactttgaattttcaagtggagggtttcagaaactaaagcaactgcaactcagatatttgtatcaattgaagtgcatccttatcgacagaggagcactgtgttctgtggaagaaattgttttacaagacctcccccaactcaaaacagttccctctggaattcaacacttggagaagcttaaagatctcgatatc

SEQ ID NO: 180986 - DNA, 397 bp, Glycine max
ggacactatgaatactcagctcgattggagcggatgggccagtctgcctcgtttttcacgaatcaataaatgattcgccctgcctcgtgaccccacgggtcaaacgtgccgatccgcgacctaatttaaaagaattcgattttataaaaatacaatacaatgaaattaagttgaatacaaatgtaaataaaatctcaataattagtcaattacatcaataaaataaatattgtcttaataaaagaaaatccaagcaatacatctaaaatatgaaatttaaacatctccaacaacaaatgattccatatttgataatgtttaatgaattctgactttaataaaaatataatacaatgaaattaagttgaatacaaatgtaaataaaatatcaataatt

SEQ ID NO: 180987 - DNA, 285 bp, Glycine max
agcttgagtaccattaagggtaaagacttcttcccatgttcttcggaggtccagcttggtcattcagacctaccccattctgcttctttttgggatgtggacaatctctctgaagatgcccgctttttctacaattaaaatagattatatctttatctggacaaccttgaggagaagtgccctggctttttacatccgtaacaagagattagagtggggatagtattgtgcttgttaccacttccccccgtataccccattggtgcatacctttgattgttgggg

SEQ ID NO: 180988 - DNA, 361 bp, Glycine max
tgaaggtacgagatgatgagaggatggataaagagtgtaggaactctatcgcctgtgcctcagagaaggtctaaacattgaagagtaatcctcaaataatacaaggtgaaaaatgcacacacatggcctctatttatagactcagtgtcgcaaacaattggaaggaatttataatttcttttcaagattcacttgaatctgaatttgaattggtggagcccaattttggagccgaaattgcagtaattattattagagaatttcagttatggttcagcccactaatacaagacctggtgcaagagtttggactaatagtgctgatgtggcatgacgaatgtatagcatgaaagacatgcac

SEQ ID NO: 180989 - DNA, 394 bp, Glycine max
agcttatcatatttataggtcatcttctacaagtgtctattgtctctaaatgatttaattttcttcattgaaggcttgggtctgatgaagtgtctgttgcattaaatgcatgtcctctccatgctaggaaaccactctctttagctttcttaaaggtagtggtgtctatgtcgtagtacacacacaaagtcaaagttagccaagaacaaagtaatgtatcaaatagaaaattctattaattgtatctatctcttttacctataatgaggaagtcttccattttcatagtcttgtctaaagaattaaaagttgtgttgcatgaaagacgaaaaaaccacattaacgtgtgtactgcaagataagtaaagaatgacgtcataagagctcccacatg

SEQ ID NO: 180990 - DNA, 373 bp, Glycine max
  unsure (1)..(373): unsure at all n locations
agcttcatcaaatctttttctaacactgataaaaaaaacaccaacggttcagccacacactcacattggagtttgatgccaccgtcgagctcaagcccaacgacatcgttttggccaaggttgagaccatcgtaaaaaatgaattggcgcatgagtgcaacattttagatcttcaaactcgcatcactccctatagtggggttgtgtttgacacaatgctattggatcttgaaggggtggtttgtgtgaatctcgattagggaaggatggcacgacgtgatttggtcgaatcttgactgggaagtggtggtgcaagacgatttantcgaatgtccaatctatggtcaaggtanggtggcatgacgtgacaatg

SEQ ID NO: 180991 - DNA, 380 bp, Glycine max
ttggagaatgatttctatacaaaagttagtcgtataaagcgactaacagtgtgttacattatggcatttgcctatgttcctgatgcaggaggcttgaggaagaagattttggaggaagctcatcattccttttacaccactcatccgagttctactaaaatgtatcaagacttaaaggagttttattggaagggagggatgaaaaggatgtagctgaatttgtatctaaatgcctagtatgtcagcaagttaagacagagcatcagaagcccgtaggtttgttttagaggattgatatacttgaatggaaatgggagagaattgtaacaccccagattctagttcaaaacattgctttgaaaactctcgttaattatttt

SEQ ID NO: 180992 - DNA, 399 bp, Glycine max
agctttagcatgacctccgtgatagattccatttgatctttaaaggtcgataggtcggccttcatctgttcttgcactccctcttcattatccatttttctggatcgagtgttataggggtgcctctgcactttcttagttattgtgagttccctaaagaaacaaacaatggtgagtatgccaccaaaacatgaatatgctaatgaattatcggagcacttggatccacctcaagaattttagataacgtgatgagtttcagaacttctcgttttataaaaaggaacaaagcttttatctagccaagatcatacaaaagtgttacaacaaaacctaacgggttctaattatatgggccatccaatctatcatgtgttgacaggagttgattaactcatg

SEQ ID NO: 180993 - DNA, 379 bp, Glycine max
tctaaggaccaccgaaacgaattgcatcaattttcttctccagtgaagcagggtcacccaccaacaagtttgaagcaaccttcatttcttccatttgcaaatttttcccgcaaacagaactagaaaatgataccctttaacgaaaaagtgtcataataattaataaattcataaaaggaaaagaaaaatacaaactttaacatatagatgtgcaatacaaatgagggtcttgaattattatttacctggaacctacaaatatagttattgttgcccatgatggcccttgaggctctgaatgggctttcgattaaggtttttggggcagaacacaatccataagctagccacgacactttcgcttggaactcaaacttct

SEQ ID NO: 180994 - DNA, 442 bp, Glycine max
  unsure (1)..(442): unsure at all n locations
gcctgcaagcttgtgcanatcaaatcactcctacattttatctctagcatgcattgaatgttggtctcgtcctttgtcatgggaagccggaaggtccatatcaccttcttaattgtacacatggggcactgcgcccccaaatgcgcaagtgagaagagataattttccaggctctcgtgtccgataaaatgcattcatatcatgcatcgcataagcatctcttcataacatgataatggacatatcctgcatttgtccgttatcatgttgcagcctcacattctgcatgagtcatggcatcatcatgcatatgcgttcaacaaactttctgatctgcaaaattgcataccatatgttttcatgtttgctcatccttgcgttttcctgtacgaaacaacaacacagaatgtggaagcgtgaaacttcacactacattcttagt

SEQ ID NO: 180995 - DNA, 415 bp, Glycine max
atgcaatgctcaagcttccgttgccgagagcatcgatgatttacgcatttcagcctatggtgccttgtagcttatgacaagagccggaccttgttctttctttcgtgcacatccctgtctaaagttccaagtgctttctgcatcacccacatccacgattagccaccacaaaccatcattgttctccatggaaaacccacaccgagaggaacccttgaaccgaagcacaatttccaacttggcttgcgggttctgtagagaacgaaaaccctaatctgatctttcgctttctttcgaggtaaccatggctctatgcttgtttcttgttagtttcatcttgtctttgcatcttttctaactttgcaaccaccattgcatgtcttatgcttgctttgaaaaaccttacaaaaagaga

SEQ ID NO: 180996 - DNA, 394 bp, Glycine max
agctgactctatcttggatcattcttatcacgggttatattggcaactcggcataataatatgcatggaattatgttatggctgatggccatgccaaatattcgcccaccttttatctgaaaaaagtatgtcatctcttattctatcgtatgaggcatgagaaattatagaagtttagtgatccatgccttttataaaattttctttcgctactgttgaacaaaatatatgtctttatcaaattggtacagtgtagtcaaaagatcctaccttggattggattataaaggcagagggaacacttaagtggtgtataatatggacagtatgttcctgtctcaaatacataatgatattcctacataattctttgtgcataactgcatataacata

SEQ ID NO: 180997 - DNA, 397 bp, Glycine max
tgttgaacctctcccattactcatataatgtctctccaagttgttgccttattgatgcaagctccattggagcttgtaagcctaggatcttcttcatcaatggattcctttgcttcttggaagatgaatggcagtggaatgaagaaggaagagagagaggagacgccacttcaaggagaagatgagtctagaagaagctcaccaccatatgaggccatggataaaagcttggaggaagaaagagatgaatgaagggagagggagagaagagcacgaaattttgtgctccaaatgagctttgaaatctgaagtttaatattcaaatgatcaaagttgaaaaaaatgcacacacatgacctctatttatagcctaagtgtcacacaaaattggagggaa

SEQ ID NO: 180998 - DNA, 414 bp, Glycine max
  unsure (1)..(414): unsure at all n locations
agcttaacactagtctgcaggacacatggacatggagagctgaacctaatgggaatttatctactaaaactgcttatcaagttatcaaatctgagcagttttatgaaggccagcacctgtgttttcagcaactttgggagataaaaattccccctagagccttaacttttgcttggagattgttatgggatagactccctactaaggacaatttaattaagagacaaatcctcattgacaatgacctttgtcccttttgtcaaagccaacctgaatccgcttctcatttgttcttctcatgtgctaagattatgcctctctggtgggaatttttttcttgggtgaaggaagataaggtcatccactatangcccattgataacttccttcagcatcaacctttatcaggatcaa

SEQ ID NO: 180999 - DNA, 394 bp, Glycine max
  unsure (1)..(394): unsure at all n locations
ntaattaaatccataattntgttttgttgttgagtgtgattttttttctggtatccatgacattggtgtgaagtattcatctgatgactaattttcattgaaaaatctgactaatcacttttagtggagtatctccttccaactatgctttttttcatctataatgttcgaacccaacaccttacttaagggggatgtgtgtatgatttgaaaatgactaagttgggtattatgttatgtgcaggaccctttatgtgaggagcaaaacagattaggttcaatgcctcccacttgccacaacaagtgcaaccagtgtcatccatgcatggcagtgcaagttccaacctcgcctaaccatgaacgagttcacccaggtcttcttcccccaactgct

SEQ ID NO: 181000 - DNA, 382 bp, Glycine max
gaaggagtacaagatttggtgttctgtctatattctattttctcttgttacatctttcttggaaaattattccgatatgcagaaaaagtcttttttaagaatatgacatatcatacattgaatacacctttcattatatctcagattacagtaaaaaaagatattattatggcccaattatcttaccttttaatgttgataataactctcttatatagatagatagtataatgtatttttttttatataaaaggagtgtcaatatacaacagagtgtttgcgaatgtattgttggattaccataatatcgatatagcgacttgctggtatggataaataatgtatttacaataattaatgagattgatatagggaaagaaaa

SEQ ID NO: 181001 - DNA, 410 bp, Glycine max
  unsure (1)..(410): unsure at all n locations
gcttgtaagattatggngtacccatcacatgtggtactatgtggcggncggtgtgatggtgcacaacaagttttccacatccacaatgcgcgcataaacccaccatcccctgttgcccacctccaactgaactcacgtactcccacgtagcccatatcctcgtttctctccacccgggtccccatcaatcctcccaagcttccacaacatccaagcaaaacaacattcaaacagcacaggctatctcagccaagcaaaacacagcaaaggcagaaaactctgctcaacacatcaaccaaaatcacaacttttctctcttaaggaccacagtaacaattccttcgatccaattcaatgacacgttggatcgactccaaactttcactggacgtctatagtgcataagccta

SEQ ID NO: 181002 - DNA, 406 bp, Glycine max
  unsure (1)..(406): unsure at all n locations
ntgagccaaaatcctgactcaccataaaccttgaccctggtgagaatgtcaatccttaccctcggaagcaaaaaaggaagagaaggaaaatttccaatcaaaggaaaaaagagaggaaaggaaattcccaatcaaagagtgggagaaagcaaaaagaaaagaaagaaaattcccaatcaaagaatgggagaaagaaaaaaaaaagagaaggagaagaaggaaagaaagctcctggtcaaagatcgaaagaaaacagaagaaatatgcagagaggtctttggaccagacaatatctgaacaatacggaattgtcaccaaatgaacaaaagaaagaaaaggaaaccataacctaaaagtggtcttctccctttgattaccaaccaaaatcatgtgcattcgtgacttg

SEQ ID NO: 181003 - DNA, 345 bp, Glycine max
agcttcccgtatccatacttggaaggatctaattactgccttcctaaggcaatatcagtataattccgatatggctcctgatcgcactcagctgcagaatatgttcaagaaagagggcgaaacctttaaagaatacgcacaacggtggagagacctggcagcacaagtggctcctcccatggttgagagagagatgatcaccatgatggtagacactctgccagtgttctactatgagaagctagtagggtacatgccgtccagcttcgcggacctagtgttcgtcagggaaagaatcgaggtacggttgaaaagaggaaagttcgattacgtttcctccacgag

SEQ ID NO: 181004 - DNA, 391 bp, Glycine max
taataagtgcatatgatgtagctccatgtagagcttgtaagccttggatcttcttcatcaatggagtcctttgcttcttgaatatcaatggtagcggaatggagaagggggaaaggtgattggagacgccacgtctaggagaagatgagtcaagaacaagctcaccaccatatgaagccatggataagagcttgaacgtatgagaagataaatagagggagagggagagaaggggcacgaaatttatgcctcaaatgaggtatgacctttgaagtgtaatttctcaaataatcaaagttgaaaattgcacacacatggcctctatttatagcctaagcgttacacacaatcggagggaaatttgaatttctattcaaatttcacttgaatt

SEQ ID NO: 181005 - DNA, 405 bp, Glycine max
  unsure (1)..(405): unsure at all n locations
agctntaaagcacagcaacacagaatctatgtgtccaacacccctccattcaatggcttttctaggtttgaaaggtgaaatttagaatgaggtaaatttgaggcaaactctcacctcacaccagtccataacgtcaatctaaacttgcccaaactagatttacacctaanattccaccaaatcaaaatttgactcttcaacacccaattttgccctagaaatggctcttggttcactttggtcatttgtttttctctctagctcagcctaacctttctcacatgtcctaaatgacatttcaagctagtattaactcactttaacctccattcaccacagaattcagacttagccttccaactctcaaagtctcactctttttccactcataacatcacattctca

SEQ ID NO: 181006 - DNA, 380 bp, Glycine max
tgtcattggtttagacatgattggtacatgatttgggactaggattcaatttgggcaaaattggatgagggaaagagtggttttcgaaatctgcactttatgcagaattgtgctgttgaaatgtgcagcacaattttgtataagtgcagaaaaatgcttgtgtatggctggttgtgaaagggtagtacatatggggttctagatatttactagcagatcccaacggtcaaaatgtagacttatgtactagagacttccagtaaaaattttgagtcgatccaacggttaacgaattggaacgaaggaaatgttactagggtaattgtatgtgaaaagctgtgattttgagttgtgttttgggcagagttttctgcctttgc

SEQ ID NO: 181007 - DNA, 304 bp, Glycine max
  unsure (1)..(304): unsure at all n locations
agcttaaaggatactagggtaatttgttcatccatcctggtgctaccaagatgtatcatgatttaaagacgatgttttggtggcccaacataaagagagaggttattgagtttgtgtatgcatgcctagtctgtcagaaggctaagatagaacattagagaccttcagggaagttacaacccttatagataccctagtggaagtgggacagtatttccatggatttnnnnggtggactacctangacccctatagggttagattctatctgggttattctcnatagattgactaagnctgctca

SEQ ID NO: 181008 - DNA, 361 bp, Glycine max
agagatgaggaagtgttgaaaggtgttactttctgcttttattggcgaccacagagtggtacctggagatatgtcgcgggggtcaagataccttgtggacatcaggtggggtgctattgcccataaccaagcttgaccaatcccgacccaacccaggcataatcggtcagtgagaacctgtgatgtacctaagcaggcgagctcctggcagacatcagataaaatgaaaacaagaccacaaagcatggaggcttgtggtggctggccagctgtgaaacttgatagatatgtggattgtggcctctgggaatcgattaccaacggtgagtaatcgattacaggcttaaaattgaggacagga

SEQ ID NO: 181009 - DNA, 417 bp, Glycine max
  unsure (1)..(417): unsure at all n locations
agctntatactaagggttagtctcattattggtctaaagaattaaaactaatggaaaaatcttaggaacccattgaagaattaaagaccctaatttcaatggtcataaacgattaaaactaaagatccaccgtaaaatcacatctttaaatggtcatcaaaaaatccatcaatatattattcacacaaattaatcacacctcctattaaagactagcatttattattcagataaattaacatgtctttaacacattgcttgattgtcccaaattacaatgtattgcatagttgaacacgtatttttgacggggcaatgaaccttatctctagttaacctctatatcaaaggttagtttcataatttgtctaaagaactaanacttatgaaaatatcttaggatctcattgaaaaatc

SEQ ID NO: 181010 - DNA, 387 bp, Glycine max
tccatcacagttggaagcaatagagggaatgcactatctatgacggtaggacgagagtgagatagagtagtgtgggcatgacagagcttgcaacagactttagaagtcacggcagactgaagggcgaaactgagtaaattaaaggcacatatgtattcgatcaaagagtgaaaagtgaaaattaaagtaattaaaaatctaatgacttcaaagatggtttttaaaaaatcgtagtagtcaagttagaaacaaagatggtttttataaaacttccttcgtaacattcatatcaaagaaggttctataaaaaccatcgttaacgccttaaaatagttggtattaatttaaaaaatgtcaccacatgttttactacattggtttttcgat

SEQ ID NO: 181011 - DNA, 388 bp, Glycine max
  unsure (1)..(388): unsure at all n locations
agcttggtgctttattaccttatctttgaataaaaaggtttgaattcaattcatgtaaacactatttttattttcactttatttaactccttactatataaatgtcatgtcagtagtctacataaacgtcacgtcaataccaatatgtcacatcaacatcaatacgttatatcaaagttaatatttgactttggatggttaactgatggtaggataaaaaattgcttattttgaaaaataagaggacttaatgtcttgatttagaaatcaaagaaccgaaattgtagatttaaaattatagagaaaccaaaattataatttagcaaaaaaataaaagaatgaagaagaaaaatcagttaggggtgccccgattntaacatcaacagta

SEQ ID NO: 181012 - DNA, 372 bp, Glycine max
ttggaaaagataagctttgaaaggaccccttcaatgagtaaagaagaacaaactatcaccctaagtcagccacaaccataagcatcaatggtgcccttgaccttacatttcatcaaaatggcataacatattgattctgcaaaaggccaatggccaccatacgacctttcacccaactatacacctctaaccatggcaaatttttcagaaagtgacccactaatgactcagcaactagtggtgcaacaataagctcaaccgcagatcttgttcagaacatgtctcagccccgaaataataaaccttgcttctcaaggaaaattcttggactatctagacactacacactcccctctaattggttggtaaggg

SEQ ID NO: 181013 - DNA, 465 bp, Glycine max
  unsure (1)..(465): unsure at all n locations
attgaacgtgttgagccggatgatacctcgcaanncangacnanaagagnctcactcagtgatgggatagttccttcaaacataaccacactttcggttggattagaagatttatgtgctgagatttacctagcgaacgacttgtacgagatctatgtttcttacctcctctagtctggcttacgctttctaaggaatgtggtgctttgtcacaatgattgacccttcctcggtaagaattagctcattcatgggccatttaggccttgtacttatggcaggacacttgaaataatccagagctagccatgagaccggagctgccttagcagaaaggcccttctttggtttagggcaaacggtcagagctgtattttaaaatacgctttcattaaaaaatctcacgactatacgttatttatgatcgaggccttgatatncagtccatcgttatggggcatatcg

SEQ ID NO: 181014 - DNA, 369 bp, Glycine max
tctaacggtgaatttttgtgattactatatgggcgtatataaaatttgcaatcatatgttcaccgacacgacattttctttgtttggtgaattctattatatatcttattggcccctcttgtagtatatcttcatctgttcaacaaataatagtattcattatttagcattacagttattaaaacgttcttgatctttctgctgaacacaatttctctataaagacaagatagattctttggacctagataaaagtaacaaatttacaaaagggccgtgtccttgttgcttttatttatatctttccttactgatatattacaacataagtcttattaaaaggacaagattttgaagtatgctacttac

SEQ ID NO: 181015 - DNA, 159 bp, Glycine max
agcttagatggcagctcaagtgggttatgtaggtgcttaaaaagaaaggaaaattcaagcattcctccaaaaaaagaaagataaattcaaaaggaaggactatgaggaaagaagggatttttttttaccaaactaggtactttcataaaactatatatc

SEQ ID NO: 181016 - DNA, 396 bp, Glycine max
tataacttacaagccttcaactaacttatccgttagttttatcaaacataaccatactgaaggttcattagtttttttatttcatatatttactagcaacattctaaactctagtttccacaacttacttgtttagcttctaaaaattagtttttaaacatatttacataattctaaaaaaacaaattatgaaaatataaccttttacttatagagtataatttcaaaaattttaaatttagtcatgtatacaagagcatctttagaagaaagctttttttttcttttataaaaaaaggtcaaagctgtatttaaaaaaaaattcaaaaaaaaaaactcacatatatacgtcatcattgatcgaagccttactatcaaaccaaaaattaggtgaat

SEQ ID NO: 181017 - DNA, 240 bp, Glycine max
  unsure (1)..(240): unsure at all n locations
agcccctcgaaacttggtcctgctccattcttctttctgggccctctttgtttcccgctctaacgctttggccgtagtcatattgacatccctttactcgtcaaactcttttctgaccctagtgactgtcgtcttgagctnttccttgaccactctcattctttcaagctctggtttcanggcttgcacttcttcgctttctctgaggacttcagcttccttcccactcanatcttttag

SEQ ID NO: 181018 - DNA, 120 bp, Glycine max
tgtacgtgagcaagattgtggaggatggcgtaacatcaacaacaaatgttggtggcgagcttcccaagggaggaactgggtggctcattcaggagagcaccaaagaggatctgaaggagg

SEQ ID NO: 181019 - DNA, 116 bp, Glycine max
agcttgtagctgaagttcttgagaggtgctgcaattggctagtcaatagcaaaagacacattcccctgccttcatttactggaagctcacaggcacttcatccctctcttatttcg

SEQ ID NO: 181020 - DNA, 100 bp, Glycine max
  unsure (1)..(100): unsure at all n locations
tanagtatgcccgagtcattcatccctataagatgttgttgaagtattggcgatcagaattgccatctcttggactatagggctgaaccaagctcatgct

SEQ ID NO: 181021 - DNA, 161 bp, Glycine max
  unsure (1)..(161): unsure at all n locations
agctttagatcgactgcgtcttgaccgtanaaggttagtgtcatctgaatttcttcaagcaaagntactattggcattctacatcatacttatgtgcatctcaacaagtgatgatggcatctacaatccacattaacataatgtctactctgtcttctaca

SEQ ID NO: 181022 - DNA, 176 bp, Glycine max
tcgaactctagcatgtacatcgtgaaactcaaggtctaaatacaatttggaagtggcattagataggatgcccaagagcaagggaccagaaaaattttaaaccaacaattaaggcaaacctattctaaagggacagaaaaaaaatgattttggttaagtgaaatgaaccggctatt

SEQ ID NO: 181023 - DNA, 389 bp, Glycine max
  unsure (1)..(389): unsure at all n locations
cgcaagcttcatgtttgagagataaccatcagaatctctctattcctttcacttctaattaactaataagtgatgatagccaaaatggtagccagcaaattttgttttctttactttcatgagtctgcatctttgccctcaaatgaagcaaaacctttttttgtggntatcaacgttcgggtctcttttggacattctaggttaaacaatcttattntctcagcccgggtcctctcatagcatgatataaacacaaccatttcaagtcaccaatccaattcacaagaaacttagaaacaattcttatacttaccattatcactactctaagaaacattttttatactcatatttatcgctaatcctaaagaggaaaaatgataatttat

SEQ ID NO: 181024 - DNA, 269 bp, Glycine max
  unsure (1)..(269): unsure at all n locations
tanacatgtttttaatttctcaaatttaggtcattttttttgtctttcaaatttaaatttatttttttagtctctaggtttttaagggtgctttgtagtccctcttgttagtgtgggtcaaattgaaaataatgagtcttttttttaccacatttgagcaatttttctaattaatcacataagtatgtaaatttccaatgaggtacgagaaatgagtgatttgtggttaggaacacgatttcatatgtgaaggaatcatccctgctcgt

SEQ ID NO: 181025 - DNA, 336 bp, Glycine max
tctaacgctttgaaccgtaccgtattggaggacctctagtcgtcaaagtgtataatgatcctagtgaacaaaagccaagacgtggcacttgccaactcgaccagacgagctcgtgggtgatatcgtgaagattttcaccatcctgcggtcattcttcgttgttcttcggtcttcaaccgagaagctcccgaaatcgaacttttcaattcattctatgtaccctcggtggtccccatttgctccgcgcacttttattttcatttcatttacttcttgtaccccccttcgacgtgctctacgcatttattcaagacattctctcgcctagccaaaaat

SEQ ID NO: 181026 - DNA, 382 bp, Glycine max
aggtgatgagtaattggagaaaatttttgaatgctgtttaggtgaatggttaaagtaaaggtgaacgatgaaaagaatatttgaaggaaaataaggaaagataatgtgtgaaaaaaaaatttaagtttaatgaaatttgattttgatttgttttttaaagaagaacagaaaataagtttgatcactttttgatttgcttaagccaatgtttgacagagagaattttaaacaattagaactgaaacaatttggtttaggagcttgagcttaagccattttgttttatactaaggccaaaaacaaatagaattcacccttttgctcccaatgggctaggcttaagccaaagttttcaagcttaaaaatttacgcagaaaaaaag

SEQ ID NO: 181027 - DNA, 356 bp, Glycine max
agcttgcctaattacagtgcgacttgtatttcgacactatcctatcttagacgtttggaaaagaataagagtaaaaaattaaaagaaaagatcatttaactaagagaaaaaagattatatatcaacaatttaaaaagttttataaagtcattaaattataatttatcatatatcataaattctattgacttataaaataattatcataaaataattcaaatgattatttcttactagacggtagaattgttttacacagtaagcgtataaacattacatttactaactaattcctttctctttctatctatacatttaagattctaaataattatagagatttaaaacttattaaa

SEQ ID NO: 181028 - DNA, 368 bp, Glycine max
tgttggcaaaaactttgttggcgaaggacaagaaattgtaaccgacacactcgaagaggtaccacaatgcgatggcataaatgagcaccgcaaccgctccacgccaattcatccacaacactacatcagcaactaagcctttgtcgagaacacgatgaaaggatgagaaactaaggcaatgccaagattgttagaagaatgaagaatgagggggttagaatcatcaatggcaggcttggccttgaaagaaaaaaaagacccacccagccatccgaagggttcctaaaaaacgaataataaggaggggcctggccattattttaggacctaattatcaatggacttcaagggcctgagagaaaaaaaaa

SEQ ID NO: 181029 - DNA, 421 bp, Glycine max
  unsure (1)..(421): unsure at all n locations
agctnttcactttttatcgagggacattttatgtcctgatatcaaaaaataaatttccacatcctcattgcataattgaatgaggaaacttgtgagaaaaacaagaatacagagtgctcagccatgagcacataaaaattgagaacgaaaacctattgaggtagtcctacaaccaaacctctgcagaaaataaatagttntgtaaagatccagtactgaagcaaataaacatgttgagaaaaatgttgtcaataaagaaagatataagtcatgtggtaatcttggtcctgggcctattgaactcctacaaaacgagcataatccacccacctgccaaggaacaaatacagaaaatgaaccactggcaacaagtaaagcttccattagaagtaacagaaaaggtatgaaatttcttacaata

SEQ ID NO: 181030 - DNA, 389 bp, Glycine max
  unsure (1)..(389): unsure at all n locations
tagatgtagcttttgggagaaaaagagcatgccaactagcttagatgtaatacttggngaaaaaagagaataccagtccaattcctatgccaaatacaagtctcccaagcaccaatacaggaaaattaggagctaatgctgttacaagagctccaacaagataaactactgcagctccaatcagctcctttcttctacctaaatataaaatttgtcacagcagtttcaccagggaaggaaatagcgaagattataactgacaaaaagggaaattacctaagaagtcagcaacattgaaggccaacaaggagccaattaaggcaccatacaatgatccactagtctggaaaagaagcaaatgccattgccccagtttatattcaagatca

SEQ ID NO: 181031 - DNA, 385 bp, Glycine max
tagagtttgcggaagtccataaggatcatacggcctttaccactcttttcactactacggaatatggattcaagggagtccatctttgatctcttgtaggaatgccaatggtgactaaaggtactatgtcattgttgtttataaggtgttattgttggcagtacgtattactagcttgaggtcgagccattaccttgacatcgttagcattaaaaaaagatgtttgtgtgagctgacgaaggatattatgggaactcaattggatgtccaatgtatctcactacatcaaggccaaacattgtatttttgtaaaagaacaaaacttgaatttttgttgcatttcaagagccattgttaaacatttcaacatcaagttctattattt

SEQ ID NO: 181032 - DNA, 325 bp, Glycine max
agcttcaacattcaatttcgagcatctctatatgttacgggactcaatcagacatccgagaaaaaagttattgtcgtttgaattagctcagaagttcaacattcaatttctagcgtctcgatatgttacgggactcaatcaaacatccgagaaaaaagttattgtcgcttgaattagctcagaggttcaacattcaatttcgagcgtctcgatatgttacgggactcaatcagacattcgagaaaaaagttattgccgtttgaattggctcagagcttcaacattcaattcccagcgtctcgatatattacgggactcaatcaca

SEQ ID NO: 181033 - DNA, 376 bp, Glycine max
  unsure (1)..(376): unsure at all n locations
ttgagccaattcaaacgacaataactttttactcggttatctgantgagtcctggaaaataacgagacgctcgaaattgaatgttgaacctcagagcgaattcaaaccacaataactttttactcggatgtgtgattgagtcccgtaatatatcgagacgctcgaaattgaatgctttagctttgagccaattcacccgacaataactttttactcggatgtctgattgagtcccgcaatatatcgagacgctcgaaattgaatgttgaagctctgaaccaattcaaacgacaataactttttactcggatggctgaatgaggcccgcaatatattgagaccctcgaaattgaatgttgaatctttgagccaattc

SEQ ID NO: 181034 - DNA, 293 bp, Glycine max
  unsure (1)..(293): unsure at all n locations
tttgctntgagccaacatgctaactcactataaaccttgacccagggtgagaacggcaatccttaccctcggaagcaaaaaagaagagaaggaacctttccaatcaaagagaaaacagagaaggaaaatttccaatcaaagagaaagtggaaaaaagagagaaggaaaatttccaatccacggaaaagagagaggaaaggaaattcccaatcaacgagtgggagaacgcgaagatgaaagaaacaaagttcccaaccatagagtgagagaaaggaaaaggaaggaccgaaagc

SEQ ID NO: 181035 - DNA, 307 bp, Glycine max
tgcttctatagccaaaagtacatattcgattgtattattaataaagaggagtcaaatcacatctaaacagtgttttgtcgtttatattgctgaaattgataagacagacaaaggttgcagttctcaatgggaaaggaatcattcagccataggacacgcatataggccaactattcttatttaaattaatgattttcatcatttggctaattgtacccttttaacggtttattcaagcataagacagtaaatgggccatattaggcatgctcttattatttaaaaaataaaccattgaatttttgac

SEQ ID NO: 181036 - DNA, 223 bp, Glycine max
agcttccttttcttattttaacaacctttcatctacagactgtgacggatagttggatagagaatgctgtcaatgggctgatgggcaagcaggtatcagattcatcttatacatttactttaattcccacatatgctgcctcacatcttcagtgtatattatgatggctgttgcagattatcaggaagaatggaagaataaagtttctggatgatatcttgct

SEQ ID NO: 181037 - DNA, 202 bp, Glycine max
tcagaggaagagaaagggtcatagaagtggcgaggttgatacgggtagggtttgggtttcaaggaaatgggtatggcgaaacgagaaacacgacttcagtgtttgaaaagaaagagaagttgaagagagagaaagtaagagaagcatggggaagagaggaactgactgagaagaaacgaggctgtagaatggtctcttggta

SEQ ID NO: 181038 - DNA, 439 bp, Glycine max
  unsure (1)..(439): unsure at all n locations
agctntaacaaccatatgatgaaacactttgctatcttgtactggtttggttgtgtttggcactccttaaattatgacaaatgatgtagttccatgtagagcttgtaggccttggaccttcttcattaatggagtccttttcttctagaagatcaatggcagtggaatggagaaggaggaaaggtcattgaagatgccacttcaaggagaagatgagtcaagaacaagttcaccaccataggaaaccatggataagagcttgaaggtaggagaagatgagtagagggagagggagagagggggccacaaaatttatgcctcaaatgaggtctgaaatttgaagtataatttctcanatgatcaaatttccaaaaaatgcacacacaaggcctctatttatatcctaagtgtcacacacaattagagggaaatttgaatt

SEQ ID NO: 181039 - DNA, 314 bp, Glycine max
cgtggaagaccgatgaactatgaaggcgaatgacacatggaaaacgtcgaacctgtgcgcattcatcaccgtaaatgtatctgaaacggactcgaagcgcctcagcacatactgactttactgaatcaacactatcgcacaaatgcgaacgagagagaattgtctaacgggctgaaccctttgacttcgacttgctcccgtatgtatagcaaactaggggagatgcttgacgaccagctcgctcagacgagcagggttgcttactccataaacaacagccatcgggaggaatcttcttgagggcccaagtgggc

SEQ ID NO: 181040 - DNA, 429 bp, Glycine max
  unsure (1)..(429): unsure at all n locations
agcttctaaactntatacaagaatgattctctgataccacttgttggacaagtggtctcagatatcttaagaagggggggttgaattaagatatcacaaactatttcccttattaaaattttatttcactttctattcaagttataaattcccttaaaaatgaacttcttaaatattgattcaaatagagcaatttgaatatgaatataaaacaataataaataaaggagtttaagggaagagagattgcaaactcatatttatactggttcggtcacacccttgtgcctacgtccagtccccaagcaacccgcttgagagttccactatcttgtaaaagcttattacaagatctgaaccacacaaggacaacccttcctttgtgttcagatttctgtacaacaagagaccctcggtctcttaatcctt

SEQ ID NO: 181041 - DNA, 394 bp, Glycine max
  unsure (1)..(394): unsure at all n locations
gtattggacgataactctgtcttgtgaganaagattttaaaaagttctaaaatcacaactcaatcctctgtcttgtaatacttgtctttacacaaatgaatttgaccatcattaataagatgctttatgtgcgatgacatcaacattaatattatgttggctgtagaaaataacttaatcgaggcatacaccgcaacaatgaagagggtttgattatccttttagaactgcaaagagataaattgagatgatgaatgtaagacaactgattgcaaaatgcaaatgttccttgcaaagaccccaaaggttgggcagaggaagacctctgtcattcacaacaaaaggcataagcttaatgcttttccaaaaaggactattttattgttaatctacc

SEQ ID NO: 181042 - DNA, 390 bp, Glycine max
  unsure (1)..(390): unsure at all n locations
gcttcacatggagctatgtcacaacttttgcaagctggttacttccatactttaccttgacttgatgacacccttttcttaaaagaatgtgcttggttcgaccccataatccaaggaatagaaatnttgagtgtcaatacttcgacaacctatcatagagatgaatgacttgggcacaccttatgtatgcatgacaaatgtaattatgagatcgacctgagatgcccaaagaaccatcatttcctggttaacaatgcattatgtaccatgttcacgtgattttcaaacattttttaagagaaataagtgtataatcccaacatggtttgtttatagctatcatcatggtacccaacacatgtaactgtggtgtaaacttcattcttcatt

SEQ ID NO: 181043 - DNA, 414 bp, Glycine max
cactatccactactcaagcttgctctacatttacattgatgtttgtatttatgggatgaggttgtacgtcatttttgttttaagaatagtatcccactggtaaaactaactttccaaatgtttgccttcgcaggaaatggccccgaggaagcttgcctcaaagaggtccaggaaggacaaggcagcagaaggaactagttccgctccggagtatgatagtcaccgctttatgagcgcggtacaccagcagcgcttcgaagccatcaaggggtggtcgtttctccgggagcgacgcgtccagctcatggacgacgagtatactgatttccaggaggaaatagggcgccggcggtgggcaccactggttactcccatggccaagtttgatccagaaatagtccttgagttttatgc

SEQ ID NO: 181044 - DNA, 431 bp, Glycine max
agcttctttcaaaatgctactcacaatattgcggattctcttgtccatctccgtgtctacttccctaggaattgttgcagggctagggttttcagcaatcttcactccctgttgtcttctgggaaccagtgtctcagggactgaagcttgaccaggaattacttgtatgggttggatgttgaaatctggttgttcctggtgcggagatgatggtacagcgggtgaaccagaagcggaagtttcttttggtgaggaagccatggaaaaacacagcgtttggaatgatttcgtaaatctcaaaatactattgggaaatgctggtgaaaacactaatgctcagcagatattaatttgaatgaataatgtataggggcgcgtgaagcaacggtcaaatacgtttcgcttaatagtgaacgtgctattaatgttaa

SEQ ID NO: 181045 - DNA, 406 bp, Glycine max
  unsure (1)..(406): unsure at all n locations
actcaagctagtagcacattcaaaccacaataactnttaactcagtatgtctgattgagtccggtaatttatctagacgctcataaatgaatacggaagcacgtaacaaatgcaaactgcaataaattttaactcagatgtccgaatgaatcccgtaatatatcgagacactcgtaattgaaaacagaagctctaaacaaattctaacgacaataactttttactcagatgtccgattgtgtccagtaatatatcgagacgcttgaaattgaaaactgaagctctgagcaaattcaaacgacaataactttttactcggatgtatgattgagtcccggagtatatcgagacacttgaaattcagaacagaagctctgagcaaatttaaacgacaataacatttaac

SEQ ID NO: 181046 - DNA, 422 bp, Glycine max
  unsure (1)..(422): unsure at all n locations
agcttgaaggtgtgtagcccaccatcttttcatagtagaacatttgtaatgtgtctactatcacggntatcatctcccttttcgttattgggggtgccacctaggctgccagatccctccacctttgggtgtattttttgaaggattcatgctcctttgtgcacatgttctatagttgcatcctatctagagccatatcagaatngtactgacactgcctaacgaagtcaaccattaggtccttccaagaatggactcgggaaggatccaagttattgtaccacgtaacaactaccccagtaagactttcttggaagaaatgtattaacagttcctcatcttttgcatatgcccccccatcttccgacaatacatctntagatggttcttgaggcaagtagtcctcttgtacttgtcaaagt

SEQ ID NO: 181047 - DNA, 397 bp, Glycine max
tctcatccttagtaacagctactactggacacacacttctacatattgtgttccctctctgaatttcggaagtaatagtcccttgactactcttctaatttctttccctctaatcctaagggatggactctacactttttgggatatcttttacttaagctccatagatgaatttatttacatgcactcttttagatttgaatctactaactccacctagagcgttttggctatagaagttccttctaataaggggttaattatctcacttgacattaccctcactttttggcacttattccttgcaattttctccttcaaatttgaacaatttatatagtgatatgggactagtcgttgttgtgaccattggacgatgaattcaacattcaaatgt

SEQ ID NO: 181048 - DNA, 351 bp, Glycine max
  unsure (1)..(351): unsure at all n locations
tgatgctctgatacctgttgntaaacaagtggcctcagatatcttaagaagggggggttgaattaatatatgccaaacttttctctctaattaagaatctatcttactttttactaaagatatgaattcccttggtaacaatcttcttagatattgattcagctgaatcaacttgaatatgaatataaagcaatattccatcaaggagattaatggaatagagaatgcaaactcagttttatactgtttcggccacacccttgtgcctacgtccagtccccaagcaacccgcttgagagtttcactaacttgttaattccttgtacaagttctaaacacacaaggacaacc

SEQ ID NO: 181049 - DNA, 385 bp, Glycine max
  unsure (1)..(385): unsure at all n locations
ntgcttcttgctcatgtagcgcgtctgagcagtcacttgctgaatctccctcgatcaacttcacgcacttgcgaacaaccaataagttgtactcgcatcaagatcctttgagtttctctaacttccgcggtggctctagctgtggctgtgccaatggtgatcaccgcagcggcgtctgtgctagtggtggcagtggctgaggtcgaggaggcagctgcttcgtgaacttccaatttcaactgttacaagtatggtcacactgcctatgtgtgccattattggtttgaaacaaactatcaacctagttcatctcttgttcttcatgatccaacctcttctaactatggacctcattctcagaacaattttcatctggtcagaataa

SEQ ID NO: 181050 - DNA, 347 bp, Glycine max
gagagaggggggagcacgaaattgaacgaagaaaaagggagagaagctgaactttgagttgtgtctcacaagactctcattcatcaaagttcccacaagagttacacatgcttttatttatagactagggcgcttccttgagaaacctttcttgagaaaactaccttgagatacttctttgagaaaacttccttgagaaactagagcttagctacacacaaccctgtaataactaagctcacctccttgacaagcttccttgtgaagattccttaagaagctagagcttatcttcgcacacttctctgatagctaatctcacctccttgaatgagaaactagaacat

SEQ ID NO: 181051 - DNA, 350 bp, Glycine max
  unsure (1)..(350): unsure at all n locations
ntggagtttccaagtgccaattcgttttcttctttagtccagtcttcttctggcttcaattcatcagtgggctttccttctgtgtccagcatcttgggatgttcccagcctttgatgacagctttccaggttctgctatccagtgatttgaggaaggccaccatccttgctttccagtattcatagttgggtccatctaggattggtggtctgttcactggtcctccttctttctccatgttcatcagaatttatctccccagatctcactctgtgatttcgagtgtgagctctgataccaattgaaattctgataccaggggacagatgtcgtaccggatgtcacgact

SEQ ID NO: 181052 - DNA, 411 bp, Glycine max
tgcttcgaattttagagagagaccgattaccatcacatagcatggttttaaaagaagagttatccgtttgctcaaggtccaaaaaaatctcgtctcaacgtttatgtgagacatagaccaacatgttctctatcatcaccaagtaccaataagaactttatgtagcctcgacccacgaacataaggtggcggacgagtatgcccacgtgtacacgcaaaaagacgcttgaggaagggtgatcgactctttgcaccaagaggcaaccatgtggattgactcgattgctcttaccttgaatgggagtcaagaacgtttccgattgctagccaatgccaaagcaatggcggacacctactccggccccaaagagatccacgtacttctcgactattgtcagcatatgatagatt

SEQ ID NO: 181053 - DNA, 386 bp, Glycine max
catcttcctttgagtgcgtcacatttgaattctagctccatggtggtgcgagccttggacggtactcgtgaaggagagatgggggaaatcgacattcccatctctataagcccccacacttgcaatgtggcgttacaattcataggcataaatcctgcctatagggtgtctcttggggagacctctgattcatgcgccaggagtggtccactaaacacttcaccacaaatcgaagttcgcagtgggtggacttttggtgatagtatcgggtgaagaagatatgtcggtgatctgcccctcctctgccccatacgtagaagcggcagaagaatcattggaaacggctttccaatccttcgaggtggtgagctgcgcctctgtggaac

SEQ ID NO: 181054 - DNA, 491 bp, Glycine max
  unsure (1)..(491): unsure at all n locations
nttgagaccnttgnaaancttgagnacctagtttgtacccgttgatcctctcccgnggatctgtaagcatgccatcttgtctgtctacttgcagctgatttccaccgctttttacgaacctcaccatggatcacctcgagaggttccagaacttgatggggagagtgattctctaatgaacgtcttgatcagatctgcgaatggtctaaaaatatcatcaagcttgtgaaataccacatctattattttgacaaacatggtcttggttattgaccgaagaaatctgctcctgatgaatcccatgatgtattttatatctctggaaaacctgaacgtgtaatgtcctaatgccaacacctggctatgagatgttcatccaatacctcttacgctatcaagaaatgatcctattccattagccacctatagaaatcattcatgtctcagatgtgcttgacactaggaaagaaccttcaatcttggatctatcg

SEQ ID NO: 181055 - DNA, 396 bp, Glycine max
ctggaaggatgcttcaatggaggattatatagagggttcatgatagacgatatggggtggagtcacctacaagttgatagtgaattataatgaggggggaggaacgtataacttctgaattgtgtctcataagactttccttcatcagagctacatctagtgtttcacatgcttctattataaactaagtagcttcctttgaaaacctttctgagaaaacttccttgagaagcttcttttgagaagacttccttgagaagctaaaacttagctactcacacccctctcattactaagctcacctccttgagaagcttgcttgagaaaatacctagagaagctagagcttagcaacacacacgtctctaatagctaagctcacctccttgagatgag

SEQ ID NO: 181056 - DNA, 362 bp, Glycine max
agcttgagggcaccttaacccaattttgcaagtctctatctcaaatcacaaaagcgccgaatcgacaattaataatcttgaagtgcaagtaggccaacttgcaaaagaacttatgagaagtctaatgggaatctatggctaccatggagcctaacccttaggagcattgtaaagcagtgctcataaggagcatgcatgaagagggcctagctcatgatgttgttaagggtgtagttgaggatgatagtaatgatgaggaagagaaatatctacagagagagagagagagagagagacagctgagtgtggaaaatgcagaaaaaatgatgaatataaaaaaaattgtctcaaggagggtgggt

SEQ ID NO: 181057 - DNA, 383 bp, Glycine max
tcttagtttcagatgatgcagatgggtttgtagctatctcatgcactcctctaatgactatggcatcatttctggcgctaaactgctaagagttggaggccatcttctcaattaaatatctagcttcaacaggagtcatgtctccaaaggctccacctctggcagcatctatcatacttctctccatattactgagtccttcataaaaatattggagaagaagctgttctgaaatctgatggtgggagcaactggcacatagtttcttaaatctctcctagtactcatacaggctctctccactgagttgtctaatacctgagatatcctatctgatggctgtggtcctggatacacggaaaaaatctttctaagaatactct

SEQ ID NO: 181058 - DNA, 52 bp, Glycine max
gccccggatcttaagcaccgcagcttctctgatttctatttgtccctattat

SEQ ID NO: 181059 - DNA, 411 bp, Glycine max
tagcttaaaggaaaatatttcaaagctttaaaatgaatcctcttcaaaggatcaacctgatgatgttatataacttgatggggagattgattctctaaagaagtttttgtcctaatttgttgaagggtctaaaaatctcaacaagcttttgaaatacgacatctattattgtgacaaatatggtcttggttattgaggaaagaaatttgttcatgatgagtccaatgatgtatgttatttctttggaaaacctgaacatgtaatgtctaaatgcaaacacctggctataagaggttcatccaatacctcttaccctatcaagaaaagatcctaatccatttgacacctagagaaatcattcatgttacagatgtgcttgacaatacgaaagatacttcaatcatggtatct

SEQ ID NO: 181060 - DNA, 340 bp, Glycine max
tttggtcaatctcaaaagtggtgtcttcatgctgcaaattgatggtttctgagtggaaaatcctaatttggttaagcctgaaattttgcagcatttgcaaagcagattcaaattaattgaagttatgtacgagcactgtagcttttacaaaaataagcactgcagcttatttaaggcacaaattctgcagcatctgcagtatgtgggtggaaaaagggtgggagtggaaatttaaatggagaagacacttgtttgacagagagcttgagatggcagattgtttccgtaatgatgttgttggtagttgtattcagattcacaaaaaagatgactggagaac

SEQ ID NO: 181061 - DNA, 426 bp, Glycine max
  unsure (1)..(426): unsure at all n locations
gcttctttcanaatgctactcacaataccgcggattntcttgtccatctccgtgtctacttccctaggaattgttgcagggctagggttttcagcaatcttcactccctgttgtcttctgggaaccagtttctcagggactgaagcttgaccaggaattacttgtatgggttggatgttgaaatctggttgttcctggtgcggagatgatggtacagcgggtgaaccagaagcggaagtttcttttggtgaggaagccatggaaaaacagagcgtttggaatgatttcgtaaatctcagaaaactattgggaaatgctggtgaaaacacgaatgccaagcagatataaatttgaatgaagaatgtagaggggcgtgtgaagcaacggtcgaattcgttttggcttaatagtgaacgtgctattaat

SEQ ID NO: 181062 - DNA, 398 bp, Glycine max
tgtagcatattcaaaccacaataactgttaactcggatgtctgattgagtccggcaatttatctagacgctcataaatgaatacggaagcacgtagcaaatgcaaactgcaataaattttaactcagatgtccgaatgaatcccgtaatatatcgagacgctcgtaattgaaaacagaagctctaagcaaattctaacgacaataactttttactcagatgtccgattgtgtccagtaatatatcgagacgctcgaaattgaaaactgaagctctgagcaaattcaaacgacaataactttttactcggatgtatgattgagtcccggagtatatcgagacacgtgaaattcagaacagaagctctgagcaaatttaaacgacaataacatttaactc

SEQ ID NO: 181063 - DNA, 407 bp, Glycine max
  unsure (1)..(407): unsure at all n locations
ttgtgacaaatccgcccccattccgactctcaacgcgtttgtttccactgtgaatggaaggttgaactcangcaaggccagcacaggcgccgtcgacaaggcatgtttgagattgtcaaaggccaattgagcttgtggggtccagtggaagggatcaacaatggtgaacttgactaacggagttgcgatcgtggcatatccacgaatgaagcgacgataaaatcctaccagactaaggaagctntgcaaagctttgatggagcgtggttggggccattggtggattgcagcgattttcgaagcaacaagttctactccttggtgcgagaccatgtgacccangtactccacctgagatcgagcaaacaaacacgtagataatttcaaaacaaattggtttgcgagaa

SEQ ID NO: 181064 - DNA, 393 bp, Glycine max
  unsure (1)..(393): unsure at all n locations
ttgnggctgaggacttatataacagtatcaaggttttatttttaggagtttttggagatgagaataattctaggattttagaattccagtttttactattcatgcgcactattcacgtagaataaaattcattttctgcaattccatttttgcttcaatctacaatttcgttttctactgattaatggaaggctaagtctccagcgttgttttctcttgaggatcaaacacatctctctttgaggttttgttattactattgaattctaatcagttttttcttcttcaccaattactctgtatttgttgctattaatccatgcatgcttaatgcttgattaattttctctgcgcttaatttacattcatgcttaatgatcaatttctgtcatg

SEQ ID NO: 181065 - DNA, 403 bp, Glycine max
agcttgtgaaatctcaggatggaccattgtgtcaagcccagctcatcaaagggtgagatttatttgatagtatgatgaaaaattgcaagaatctattattccgaaaattaaaaatataaattgttacttgtcccttttttcttggctaggtttgaatctgttctcagcactttggaagatgcggttaatgatgcccccaaagcaccagagtttcttggccgcatttttgccaaagctataacagagcatgtagtctctttgaaagagattgggcggttaatacatgagggtggagaggaaccggggagcctcttagaagctggacttgcagctgatgttcttggaagcacctcggaggtaataaaaatggagaagggtgatgctgttttgagtgagatctgca

SEQ ID NO: 181066 - DNA, 398 bp, Glycine max
tggttcgaggtactcacccgttgaagatcgaagaacgtatgaaaacgaatgaagaacgtcgaagaacggttcaaacctttgcgagattcctcacggaaaacgttacggaaacgtttcggaagcgcctcggcttagattttcttcacggaaataatttttccaagcaaattcgaaagagagagaagtgcctaaagggctggactccttttcttcttcattttctcccctatttatagcaaaataggggagatgcttgccgcccagctcgcccaggcgagctcagctcgcccaggcgagctcagctcgcccaggcgagcagggttgcttcctccagaagcaacagccttctggaggaaccttctggagggcccaaatgggcctgggtgctatttgcaccc

SEQ ID NO: 181067 - DNA, 438 bp, Glycine max
  unsure (1)..(438): unsure at all n locations
agctntganagcggagctcgaanaaactagagtggtcaaggataagctaaagatgacagtcactatggataggaaagagtgtgatgagctgagagatgtcaacatgactatggacgaagcaatcgagcaggaaacaaaaagggcccgaaaggaagaatggagcaggaacaagttccgaggggctctatggggcaacaacaatgagctcaagcttataaaggatgagagggacgagtcaaggatggaaaccatggtgttagaggataagttgaaggcttatcaaagggtgaagagaagtttgacggaatagctgagcagaatggaagagaatatgtttacaattattcatcaatatacggagaaggtgaacctatctactagtcatgggcagaggctggaggatgaacatgcgaaagtatccgtgatgtgtcattattt

SEQ ID NO: 181068 - DNA, 397 bp, Glycine max
  unsure (1)..(397): unsure at all n locations
ntactatgcagagaatatccaaggaaaataccttcatctgacttagcatcaaattttcctaagttatcttttccattatttaatacaaaacatttacaaccaaagatatgaagatgtgagatgtttggttttctgccattgaacaattcatatggagttttctttaagatgggtcttattaaagccctatttaaaatgtagcatgcagtgttaacggcttcagcccaaaaatattttggaagaggtgtatcatttaataaagttctagcaatctcttccaaagatctatttttcctttcaacaacaccattttgttgaggggttcttggtccagaaaattatgcttaatccctgcttatcacaaaataattcaatttttattttcaaactcaccccg

SEQ ID NO: 181069 - DNA, 417 bp, Glycine max
agcttatactctcatttccatttatcatagtacattcttactttctatatatatatatatatatatatatggcagttcattatcctattctttgatgttataagtaaaattacaagattaatactccttagggtgttacaaaaagcctacaattgtgagattggacgtaacctatgttgagtgaaccaatataaatccttcgtgatcaatgatttttttatgaaactattttatcattgagaagcaacttgtactgttaactaattgacaagtgcaccaatttgtccaagtagtattctataacggtaaaactaagtatcgtttccacatggatattgtttgtgcttaactagtgcgtattcaatttgtatgcaattaatgaataaatttgggaaatgctaagtaaataattttttg

SEQ ID NO: 181070 - DNA, 403 bp, Glycine max
tgattatcaattgtgtgctgtgttatggcaatcagttgatccggatattttggatattcttagatcatttaaaacgagtcgttctttttggaagaaagctcaagaaatttttgccaatgatattcagagcttatttgatgcaaccatgaaagttacagccctcaagcctaccagccatgacatgactgctcatgtgggtaaagctcgggctgccgtggaagagctgagaaagcttcttgaggctgattcattagaagaagtgaacaagaaactggacaagttttacatggtccttatcctgagaagcttacactcagactttgatcatgttcgtgatcaagaactcgctggggatcaagtttcatccatggatactctcatcactaagcttctccgcgggcct

SEQ ID NO: 181071 - DNA, 378 bp, Glycine max
agcttatttgtatgtgttgaataatggtaatgaagttttgccatacatactttgccatgaaggtttagtgaaggaaagtgatctaaagatgtccaagaatagggtcttgaaagagtataacaagactttcctagattggtttaaagaaacaatctttgctgatgataatgcttctgaaacgttaagaaagctagcagatgtgcctaaaagatatgttataacttggcaaggatacaatataaacaagtattccttctatgcagaagcacacgacgagaaaagtacaatgcggaataatggggtcaccctatgggttgaatctcaacacttggctagtctacatgatgacaatacatgtgtagcttccatcccttactt

SEQ ID NO: 181072 - DNA, 387 bp, Glycine max
  unsure (1)..(387): unsure at all n locations
tgtaatcaattacacacatattgtaatcgattaccataggagatnttcagaaaatattctcaattgtctcatcttttcatttggttcttgaatggctatcaaaggcctatatatatgtgacttgagacacgaatttgctaagagtttttcagaacaaaaaggtcttatcctcttaaaaagcaaaatcgttttatcctcttacaaattccttggccaaatcacttgtgattcaataaggaattgtttgagtgctcaaattgttcaatctatctctttcaagagagatttcttcttcttttcttctttattctgaaaagggattaagagaccgagggtctcttgttgtgaaagaattctcaacacaaaggaaggattgtccttgtgtgt

SEQ ID NO: 181073 - DNA, 298 bp, Glycine max
  unsure (1)..(298): unsure at all n locations
tgaatacatagctgcaagaagttgttgtgctcaaagtctttggatgaaacaacaatgatgtaagctccattggagcttgtaagcctaagatcttcttcatcaatggattcctttgcttcttggaagatgaatggcagccgaatggagaaaggaacagagagatgagactccactcgatgagaagatgagtctagagaaagctcaccaccatatgaggccatggataagagcttgtangaagaaggagatgaatgaacggagagggagagaagagcacganatattgtgctctaaatga

SEQ ID NO: 181074 - DNA, 388 bp, Glycine max
  unsure (1)..(388): unsure at all n locations
ntntggagtagaaacatgggaccaactcattttattttaanaaaaaagtcgtatctagtcaagatctgagagaccatacaagtttcctagcggtttctaattatatgggccattaagcctatcatatgctgacaatagccgagaagcccatgaatttcttcaggggcggagtaagtgtccgccattgccttggccttggctaacaatcggggaagttcttgactcctgttaaggtaagagcaaaccgatccatccacatggttgcctcttggtgtaaagagtcgatcacccttcctctagcctctttttgcgcgtatacttgggcatactcatccgcgaccctatgcttcggggccgtggctagacttaactcttcttggtacttggc

SEQ ID NO: 181075 - DNA, 389 bp, Glycine max
atcctgaaaatcctctgaccgatgcagagagaagctgacgaacagacttccataggtgaagggagctaatttctggtctatagcttctgaaccatacttggggctaataaaccaaactatggggaactatgatcctccctctgcatgctgaatttccaaaaaactgtgtctttgactagtgagatgcgatatatctctgattgaataatgacattagtaaagatattgatggcttatcaaacttgtgttggctgtagaactgggaactgtgcatcctgtgcgtgaatatatctgcttttattgggaatactcttctgaggatgctcatcttctagatcatatctaaagcagaagatgtacattcgaaagttcagattgtatgtttctcc

SEQ ID NO: 181076 - DNA, 316 bp, Glycine max
ttttctaaactttagtttggattaccaagactaagtctttccttactagatgattaagaggatgcatatttatgtgtgcaatcctaagatgccataaaccattcttatttgtagtatgcttttgcacgttgagcaagtgattaagatcactctttcctttgtttaattatgcaaacatatctttaagatagaaaaaatcaatttgcaacttcatacgttcagcatagtgatccttttttatattttaaaatttagtttgcatagacttgttatcatccatgtttaaagaaatagtagtacaattacaactagtggc

SEQ ID NO: 181077 - DNA, 421 bp, Glycine max
  unsure (1)..(421): unsure at all n locations
agcttgaagctcaaggaacaaggaaatgtttgaagaatctntagaatatgttttggcttttacatgcctaactcatttgagtggcatttgtattggttgttaactttgattgttgcatcttagcacatttgatatttgtttcgcattgtgcatcatcatagtgtgtgtgaaggaaattntctaagttagaaaactttcttcanaggcaaaaactctttgtattaatcgattatagagttgtcgtaatcaattacaacaggctgtctgaagcttgtagagttaagtctcgtactggtttaatctattacggtagtaatttaatcgattacattgttggttgagacaatgattgattttttcaagagtctctactttaattgattaccaagtagattaatcgattacttctctcttgtttaag

SEQ ID NO: 181078 - DNA, 345 bp, Glycine max
tggagggattgatggggacccggtgttgagaggaactatgataagagctacgtgggagtacgtgagctcagttgaaggtgggcaactggggatggtggatttatgtgtgatttgtggatgtggatagtcgacttgcaccatcgcccgaccgccacctagtaccacatgtgacgggtaccccataatcctacaagcttgaagtgaggaagtgtggaagggtgagacttcctacttttattcgttgaccatagagtggtacctggagatatgtcgcgggggtcaggagaccttgtggacgtcaagtggggtgctattgcccaaaaccaagcttgaccaatcctgacc

SEQ ID NO: 181079 - DNA, 326 bp, Glycine max
  unsure (1)..(326): unsure at all n locations
agctntataaaaactattaaagctctatctctaggcaatgtgagacaaatcataccccttcaagacctgcaattaaggcaacccaaagaggttgcaactaaggtgggctagtggtgactgcaattgagttgtctttataacacaccttctcatgcccaaggctatgggctttgatggaaccctgatttgtggattcaatatttagcatcaacatactgngaacctaattgagactcttttctgataataaaagggaaaaagcggaattagagaaagagatggtaagaacagccacaatctttggagatccactagtggaggatgat

SEQ ID NO: 181080 - DNA, 377 bp, Glycine max
  unsure (1)..(377): unsure at all n locations
tggattnttgcttcttctctctgatacctgcaacaactcaaaatcacaattcagttccagtcatacatattagaagccacagcagcttccacagttgagtgaaaagcacaaagaagcactagttaaaaatttgagtgaaaggcacaaagaagccatagcaggttctgctaaagttagacaatgaaataccttaagctttcttgacctggcctctgctttagcattttcgaggtttacccaagcttggatttttggttcttctctctgatacctgcaacaactcaaaataaacactagttaaaaatttgagtgaaaggcacaaagaagccacaacaacttccactaaagtacctcctcagcttctacggctaccgctt

SEQ ID NO: 181081 - DNA, 348 bp, Glycine max
  unsure (1)..(348): unsure at all n locations
agcttgtaacatcctaattttcatattattgaattntatcttctttgatgcttgtatacatgaagtaaagagtatcacacttagatgttgcttggaatangataataggtacaaccccaaaattataatagaaatacaatggtgataaagtgagatgactagattntcatatgccaacagttctaagcctaggtctacttatatcagaataagtaatgcattaatgattcctagacttagagaactcatctctaatcttaatcctacatgtcaattgaacctcaactcagtgtaatgatgaggaggacaacaaaggtgaagaagaagatatcttcatgatctccacaa

SEQ ID NO: 181082 - DNA, 332 bp, Glycine max
tgaagaggatgatttaatggaggaaaagaaagacttaagaggggagcacgaaattgaaggaatgaaagagggagagaagtggaactttgaagtgtgtctcataagactttcattcatcaaagttacaataagtgttacacatgcttctatttatagactaagtagcttccttgagaagctttcttgagaaaacttccttgagaagtttctttgagaaaacttccttgagaagctagagcttaactacacacacccctctaatatctaagctcacctccttgagaagcttccttgagaagattcctaaagaagctagagcttagctacacaca

SEQ ID NO: 181083 - DNA, 433 bp, Glycine max
agcttagatataaacattgaacagatgataataacctcaaatagataataaaaatgtttacatcaagtgctcagtagaaattcccaacaaaggattttagccctccattacaagggagtagcttttagaaatatgagaagggttttagagaaattaccagatgacaaagtagtggggatgtctcctccacttctaagaacctagaaaataaatctaacacctagaatctacctaaaagttaggacctttgcttccttgctcagcttttcctctgttctttgcacacaattcatagtcaattcaaacctctttcacattgtcatactctcttcacgctttctctttttttctgtgcaaatcaggcttaaaaatggctttctgacctcgaaggcgcgcttagcgccatcctcgcgcttagcgcgagtaagtgata

SEQ ID NO: 181084 - DNA, 397 bp, Glycine max
tatccttatggcctgcctccggacttcaccccccgtgccaccccggaagagttaagccaagccccttcttttgaggggcaactcccaccatatgaagagtatcccgggcaagacgatggggaaggagatacccatcttggccccctgctccacctcaaagatccgtccccgcatgaactaccccaaccaaacatagtccgtcataccccggcctcacccacaccctaaaagaatctattccctttgcggaagataagggaaagattgaggtgcttgaagaaaggttgagagcagtcgagggcctcggcaattagccattctcggatttagcggatttatgtctcgtgcccaacatcgtcatccctcccaagttcacagtaccggactttgataaata

SEQ ID NO: 181085 - DNA, 401 bp, Glycine max
  unsure (1)..(401): unsure at all n locations
aagtcacctgcggcatgcaagcttctcggtggcctcgctgttcgcatgtataacatgttactctgctaatgcattcttctagtttgtgatgtgatttatcattaggcaaggattttaggtttagttattacgaatttgttgattacttgttttaatgtttatgtttcatcatggtggattaatgtaaaagcaagatcacctgtttatattatttgatttggtttaacaatttatttactggtaattntactattgttgttcatagttgtatacctagtcctagatgttaaccgggcattcttaaagggaaagctgaatacaaaagttaaaacagaatggtgtatttcatatttccaccgcttaatcaaagccgagtacaaaagggagcatttataataact

SEQ ID NO: 181086 - DNA, 395 bp, Glycine max
tgaacgagcctttggcgatcaaactcaaacctcagagatgaagacacaagtgcaaggctaattcagttgcgcaagaaagtcacacacgcaggagacctgttgtgcatcaagggaggtaaaccaagaagatttataccaatgagtcataagccattatataagtaaacctaacatcatactttaatccaaaatcttaaagttcaagtttatgaatcttctccttacttatatggttctcaatttttccatttctacttgatgtgagacttcacctcatacttgtactttaacaatcatttcatcaagtgtgagtctttttcacatgttagtctccctctcgagcggaagtcattatcatccatgagtattccatggtgaccattaagctcatatgc

SEQ ID NO: 181087 - DNA, 424 bp, Glycine max
  unsure (1)..(424): unsure at all n locations
agcttcccacatcaatgcaagattgatataatctgggtcatttcctttggcctcaacttcacagatgagaaacataagctctaggtccttaaaacacaagcaaaacgaaatttgggcctttccaaagggagaaaaactgcatgctggtactcaagaatcaaacatgttggtgtccagttctgtgaaagatacttcttatgagaagacaatgcctttancgagtgatcttggtgtggatagtgccatgaaacaaaaagcaataatttcttcagggccttctcagggatcaaatcacaaagggtggaatcaagtggttcttcatcaattcaaannnntnaaacagaagataaaacatgttcttgtggaattcagaanaagcggttaccaaactacttctgctgaagccatccatcgcagagcttca

SEQ ID NO: 181088 - DNA, 381 bp, Glycine max
  unsure (1)..(381): unsure at all n locations
tatggaccaaaatgagaaanatggatcatttacagggacttaaaatgaaactttnttaaaaaaattaaggatttatttgaaatttccttaattttaaggataaaaatgacattgggatacaaatctagagactatagagagaaaaagagatgggagacaaaaaaatagatatagaaagaggaaagaacaagaaaaaagaggagggagaaaagattgagagaaaaacaagagagaagcgagagggaggagcatatgaaaaaaaaaacaattttctacttttttagatgaaatttgaaattctataattttaggtaattaaaatacttcaacaaattattagaatttcaaatatttttattatctaaaataaaacataagtga

SEQ ID NO: 181089 - DNA, 436 bp, Glycine max
agcttcgacaaatttgccactgtattcatacgcaaccacaattgaattccaatatcccgccaccaaaaaacatattgctccaagtgtacaaatctctatctttcattttgtcaaacatgttgagtgcctaaatcaccaaagtcgaggttaaggatttattagatataaagtcatatcatatattcacatattttgcaaacatacagcacaaaaactaacctgttaatatgacatactatgcattacatcatatatgacaaacatataacttgacatattttaacatataatatcaatcctttatacattttgcaaaaaaaaaaaatcttttttttattaacatggaaaggtgaaaaaatgtaattacacagctacaaaacatgggatggtcacccctctagcgtcatctgaaatcagagaagctggttgaggggga

SEQ ID NO: 181090 - DNA, 402 bp, Glycine max
tatcctttgaaagatcaatactctcagttcttttgaattcgttcactagaaaatccaataaagcattatcaaaatcctctcctcccaagaaagtgtcaccatttgttgctttcacctggacacaaaaaagttattagtgacaatttccaacattatttccaattactggctatgaaatataagcatagaataaacaagtgttaatacctcaaaaacaccattagaaatctctaagatggacacatcaaatgttccacctccaagatcaaaaactgcaatgagaccctccttgttgttcatcccataggaaagtgcagcggcagtgggctcattgatgattctctgaacatcaagaccagcaattctaccggcatcttttgttgcctgcctctgagcatcatt

SEQ ID NO: 181091 - DNA, 375 bp, Glycine max
acaagtctcctttgatgagtctgatctcattcttccaaggaaggattttttagatgatatttcagataccttagaagatacacatattcatggaaatgactctgaagaacaagatgaatgaagctatgacgattctcaagataatggagttagaggaaataatgatcttccgcgagaatggatagcctcaagagatcatcccctcgacaacattattggtgatatatcagaaggggtaacaactagacattctcttaaagagttatgcaataatatggcttttgtatctatgattgcacctaagaatataaaagaagcgatagtatatgataactggataatttccatgcaagaagaactgattcaatttgaaag

SEQ ID NO: 181092 - DNA, 315 bp, Glycine max
  unsure (1)..(315): unsure at all n locations
tgggaatacgggagatctttcttgcatatgaagttctgctttgatatanatgtctaatgcaaatggaaggccattgaatgttattcttgtgggaatactttgatgagatagcttgaaaaactagcattccaaacattttaatgtcagcttgttatagcatgatgtgcttgctactatttttgagttctttgacccttcgaatggcctaactatcttttgttttgttcataagagcttggtggaattctatcatgggcttttgagcactggtctcatgtcatttggaccactacaacataacctatcttcaaagca

SEQ ID NO: 181093 - DNA, 305 bp, Glycine max
agcttgatgttgctttaacatttatctctatagaatgttaactttgggttggtgagttcgttgtttcgcaggtttttgacataatcttggctcctggttggtgggttggtgagttggtgagttgctaggttcgtgagttcctgagttggtgtgttctcgagctggtgagtttgttgtttaaaactgttgtgtttgtttactgcaatgattgttattggtgcaccattttcttgtgtgctgagtgccattgttttgttctagggtataagaaaacaagacgtagtttgcattggatttttgctttg

SEQ ID NO: 181094 - DNA, 384 bp, Glycine max
tctttaggaccttgaacaagcaatttactcctctttcagaaccatgctatgtgctcgcgactggtctctttcttccctccgcaacttgagttcactattgctaccccatagagctccgcgaaatttgttccggccatactcttccttgcgagccctcttggtctcttgttcaagggctcttgcggtaatttcattctcttcccgtaacccggcacactccttccgaacgtgtgtagcggccaacatgatcttctccttggcaagttttgcctttcctaactcgcttttgagagcttggacttcttcgtcctcttccggtgcttcaaaactctcttcgctgacgacttttaacttggcgagccaatctaaacctcgtatatgaac

SEQ ID NO: 181095 - DNA, 379 bp, Glycine max
  unsure (1)..(379): unsure at all n locations
agcttgagctcattgttgctgccccacaaagctcctcgtaatttatctcgaccatgttcctccttgtgggcccttttggtttcttgttcaagggctcttgcagtggccgcgttttcctctcgtaactcggtgcactctttccggatgtttgtagcggctgtcttgaatttttctttggcgaggcttgccttccctagctctaattttagagctnggatttcttcatcttccttcggagcttcgaagttcttctcatcgataaatttcaacttggagagccaatctaaccctcgcgtatgagctcttagccattcatgataaccaccgatgacgccattacggatgcccctaagttccttatctttcctcaacggacttc

SEQ ID NO: 181096 - DNA, 389 bp, Glycine max
tgagatgaggaagtgtagaaaggtgaaacctgtgatgtacctgtgatgtacctaagcaggcaagctcctggcagtcaacagataaaaggaacaaagaccacaaagcaaggaggcttgtgtggtggctggccagctgtgaatcttgtgtgatatatgggttatggcctctggtaatcgattactaagggtgggtaatcgattacaaggcttaaaaatgaagacaggaggctaagatggtctctggtaatcgattaccaagggttgtaatcgattaccaggcttgaaaacgaggtcagcaagctatgggggcttctggtaatcgattaccaagggggtgtaatcgattaccaagcttagaattgaaggcagcaggttgtagaggcctctgg

SEQ ID NO: 181097 - DNA, 380 bp, Glycine max
  unsure (1)..(380): unsure at all n locations
agctgtntgtataattctagtacagatacaaaagctttcaaaacaccttgaatatcttgaaagacaagactaactgcttgaaatacaatataagggggtgaataatgtcttggtcaaaatataaaacctttataaaatggaagattttaataaaaacaagttgataaaaaccttcatctcataactaatagtagactgtcgtccaatgatgtataaaacttatttttcagtgaaaaccttctgtgcacgatgtatcaataatgaactttgaaatactttgataagctaatggagaatagtaaaaaatacttcattttatactagttgagttacatgtaattctcctttaccaactagtaaaaagttccactaatgaaact

SEQ ID NO: 181098 - DNA, 383 bp, Glycine max
tcttgtacccccgctccctgcagtatatacacccgatgcatcttccttccaaatccacttgtcttctcgatccggatggatgctgataccttctagatcttctaagaactttacagccatctccatcacaccatcgaaaagttgccttctccatttaaagtctcattcccaacctatagttgtgaagttgcccatcatctttatgacatgttgttgctgtttggaaatggagaaaagtgtaaggtatttcaacttaagtggtactccatcctccttccatccatcctcccaaaatttgtccttttctccacaccccactttccattttatccctctatcgaaaccgctgccatctgcatctaaaggatctatgatatttatat

SEQ ID NO: 181099 - DNA, 421 bp, Glycine max
agcttgtaatctattactagaagatttaaacgttttattacaacctttagaaatttgaatttaaattttaaagcctgtaattgattacaacttgtgtgtaattgattaccaacatgagaattcaaatttcaagtctgaagagtcacaactcttcagaaattaactgtgtaatcgattacaacagttatgtaatcgattaccaataaggaattttcgaaaataactcccaagagtcacaactgttcaaattttttttgaatggtcatcaatggcctataaatcaattaccagacatgaaaattcaaatttcaagtctgaagagtcacaactctttagaaactaattgtgtaatcgattacaacaattatgtaatcgattaccagtaacgaattttcgaaataacttccaagagtcacgacta

SEQ ID NO: 181100 - DNA, 391 bp, Glycine max
tgaaagtgcataccccaccatttttcatagtaaaacactggtaatgtgtctactattattgagatcatatctttctttgtcattggaggtgccacttgagctgccaggtctctccacctttgggcgtattctttgaaagattcgtgcccctttttgcacatgttctgtagttgcatcctatccggagccatattagaattgtattgatactgcccaatgaaggcaaccattaagtctttccaagaatggactcgagaaagttccaagttagtgtactaggtaacagctaccccgataagactttcttggaagaaatgtatcaacagtttctcatcttttgcgtatgcccccatcttccgacaatacatctttagatggttcttggggcaag

SEQ ID NO: 181101 - DNA, 358 bp, Glycine max
agcttgtgaaaatattgtcctcttgcattatataatatttgctttaagcttaaaatatacttatctcttgactcttgtattcattcctatttcatcaaattctaatcacagaggtctaaaactgatctgctacaagaaacggaaagttcaatttattacctccacttgactttttcctttttgcagaaagctgcaattaaaaagatggatatgcaagcatcaaatgaatttcttgcagaattgaaggttctgacacacgtccatcacttgaacttggtatgccatttttcctacgctaatattattcaaattaaaacagaaaaaaaaaaactcaaaaagaaactatgcaaaaacatat

SEQ ID NO: 181102 - DNA, 378 bp, Glycine max
tcgatggtgtcgagaagaaatcacatgtgtgtcatcatcaaaaagggggagaatgtgaatgtatgtatacatgattttgatgatgtcaaagaagaatctaacaaggctgcttcaaatgataagcatttgcttcaagaataattcaagattgcttcaacaaacaaagccttgtttcaagattcactaaagaccaagccttgccttaaaacaaagtgctttcaagacatgcaaggctctggtaatcgattaccaggaagtgttatcgattacccgaagacagggttgacaaatagctggtgaaaaaggttttgaatttgaatactcaacatgtaatcgattaccacatgtctgtaatcgattaccagctacgaaactttt

SEQ ID NO: 181103 - DNA, 264 bp, Glycine max
  unsure (1)..(264): unsure at all n locations
tttctntgcttccacaatctcccnctttttgatgatgacaacttctgaaatcaagaaacacacacacactttttcctagttgatcactcttataaatgctccccctttgtttttgaatttatgcttatcttaaaaataagttgattactcatgtgaattcttgatttaatcccatttctctccccctttggcatcaacaaaaagccaaagtgcgtattaaataaatttaatttaaacatccatttaatgttcataaaaaaatca

SEQ ID NO: 181104 - DNA, 334 bp, Glycine max
  unsure (1)..(334): unsure at all n locations
tcatacaattctcaactcttttagccattgggaatgcaaaaggcatgggtctaccttgccttgggtaggagccttctcacagagagaacaaaaccaatcatttctccatttgaactgaaagttcaagtataaccatgataagaacttatatatctagtgaatccaatatttattccactaactgaataaactacaactataatgatcctcanagcacaggctctttaacaggtcacaagattaacaactttgtggatgtgttgtatttaagctgcttgaacatctcacaataacataaaacatatccaataagtaaagcttattccatgtttgc

SEQ ID NO: 181105 - DNA, 430 bp, Glycine max
tcgccccggatctctaagcacctgcggcatgtagcttagctgaattcatatcgaattttagtagcttagctcaaccttggccagcttagcggaccaaatcagccttagatgcaagggttgggcactaagcgcttgagactcgcagcttagcatatgaatagagatgcgcttagcacgaggcttgcgcttagcgaaatgactgcttttcagaaaatatttttctaagttattttttagtcctttttccaagaaattgaaacccttatgttaaacatccaaagattggctgatatactcctatctacagactatatagcaagttccaaatgatttaaatgcatgaaaacaaagataacataatttaaaactgggttgcccccacgaaacgcttctttaacgtcattagcttgacgcataacttattaccttt

SEQ ID NO: 181106 - DNA, 385 bp, Glycine max
ttgcggatttggtcttcgctggcgaaatgatcgaagtgggtctaaaaagaggcaaatctgatcatcatgctttgataaatgcaaaaaaaaaaattggggcaagtgaagagggtgagaataagggacaaacccatgctgtgactgccattcctatacagccaagtttcccaccaacccaacaatgtcattactcagccaataacaaaccttctccttacccaccacccagttatccataaaggccatccctaaatcaaccacaaagcctgtctaccgcacttccaatgatgaacaccacctttagcacaaaccaaaacaccaaccaagaaatgatatttgcagcgaaaaagcctgtagaattcaccccaatttccgtgtcctatgc

SEQ ID NO: 181107 - DNA, 432 bp, Glycine max
  unsure (1)..(432): unsure at all n locations
agctntntattntcagtagatgaagatttatctgtggccacctcatggactcctctaaggacaataccatcatttcttgcactgaattgttgngagttggaagccatcttctcaatcaaattcctagcctcaacaggggtcatatcaccaagagctccaccactgggagcatcaatcatactcctctccatgttgctaagtcccttgtagaaatattgaagaaggagttgctcaaaaatctggtggtgaggacagcttgcacacaatttcttgaatctttcccagtactcctacaagctctctccactaagttgcctgatgcctgaaatgtcttttctgatggcagtggtcctagatgcaaggaagaatttctccaagaacaccctcttaaggtcatcccagatgaaaatggacctgggagcaaggtagtat

SEQ ID NO: 181108 - DNA, 417 bp, Glycine max
gcttgttcagaaatgtgcatttgtgtgtaatacacaattaatggttcaccacaacaaaatggtgtatcagaaaggcggaatagaactttaatggatatgattaggagtatgttaatcaattagactttatccgtatccttgtggatgtataccttgaaaactgccatgtagttgttgaacaggattcctagtaaggtagttccaaagacaccttttgagctgtagacaaataggatacctagtataaggcacctgcatgtttggggttgccaggcagaaataaggatttataatccgcaagaaagaaaattggatgcaagaacaatcagtggatatttcattggttatccagaaaagtcaaaggggtatatgttctattgtcctaatcatagtatgagaattatcgaaactggaaat

SEQ ID NO: 181109 - DNA, 460 bp, Glycine max
  unsure (1)..(460): unsure at all n locations
agatggaggttttnntttcattagtcatcgatganncgctagacnagcaagacncacgcttgctaggtngacggtctaagttcagattggaggcacttcatccacgtttctaacttgagtaccggcagccgcttgggggtgaggctaggcaagatccctactgggaggataaggtgccacctctaggcttagttcataacattgtcatgctagcatctgatctaccattattgtcacaatcacaccagacagagtggggaataccaaattcggatgcaacgtggaaactatttgtacaatcctaataaaaagtctactgctaatcaaagcaaaatatgacgtatttgcatcaagcaaagaataagttattcattattctcctgcggagtaaaccataacctggaggagatcattaagaccttgttggccgttttttttactaagatactacattcccagt

SEQ ID NO: 181110 - DNA, 91 bp, Glycine max
agcttatggttacttttaacgcgacagtacattatggccttcttgtgaagatactttgcatctggagatagatcatcacccacctccactt

SEQ ID NO: 181111 - DNA, 186 bp, Glycine max
tgcacttcaatacaatgctcgattgaaggatttgtttttgagcttaacgacaacctcccgggagccaccttcgtccttgccaatgtgtatgatttagtgctggaactcataaaaaattatgataaatacgggaattaaacatgcaatccctttcattggattttactttttatatgaaccattata

SEQ ID NO: 181112 - DNA, 226 bp, Glycine max
gcaagcttgtaggtacctgatatgcgatatattgttgatgatgtgatcggtatggatcagtagatttgtaatgtccttctagcatagcccggactatattcgctgtcggtcttccaccccgccctccctctctcctcccccctctcttctcccctccctctctctcctcttctcgcttcccccccctttcccgcatctcttccctttctcttctccttcttctctc

SEQ ID NO: 181113 - DNA, 371 bp, Glycine max
ctcaagcttaacaaaatataaatctaggagcttctacctatgtattataaacaaatttaaattaaaactcatggagagtttagtaagggaactcagaaaaatagccccgtaaaataaaactcatggggtgcctcctcacaaagggggtcgcagtgaccaggcttgggcgactggttatcaaaaacacaggtgttcacaaaggcataagatcatttatgggggcttagatgtaatctggaatatgagagatgtttaatgaaaggaaaatggactccatttggataaaaataactactttctttagacgccttttttttgcctagattcttcacaacctatctaagtggttaagctactttccgcgttttata

SEQ ID NO: 181114 - DNA, 137 bp, Glycine max
  unsure (1)..(137): unsure at all n locations
tagctntgctcactaacttggagtcctttttatacacacaacagacgaatagccaactcagggcaccagcacaagcacgatatctagactaacacgcaactgcatgctcagtgcaaaactgtatcaaaacgttattg

SEQ ID NO: 181115 - DNA, 170 bp, Glycine max
ctcaagcttgagacttgttcgttgtttgaaatatagcccgctttgtattctaggcatgggacctgagataagactatatggatatgagaatccgcgggataacaaaagacagtcacaggcactgacccttctgttgaagctaaacataaaaacaaagtatgccacatggt

SEQ ID NO: 181116 - DNA, 334 bp, Glycine max
  unsure (1)..(334): unsure at all n locations
agcttgtcgttattagnttcaattatttgctcgcggcatcctatggattgagcgaaaaggctcgggtcattaaagactatgcatcttttaaggcacanagcgaggatcgaaaccccaatcctacattcttttaaatgactgtgatgagaaaattacagaggacagacatccctaggggaaaccacagaaaaataaaagcatgcagcgacttccttaattgccccagaacttaagcatagcatcgcttgacaacatcggagttcaccggcgaaggtagntccttctcatccatgttggcaagcacaagggcccctctaaagaaagtcttttttac

SEQ ID NO: 181117 - DNA, 382 bp, Glycine max
  unsure (1)..(382): unsure at all n locations
tatgcgcatatttccttacgaacgttcacttgcacttgacattctattaaccaaaaaatgcacccatatacaatcaaggcagctttgttacctagattatttacatgcactcccaaggtgtacttgttacttacatcacacacatctccttggctgaatttacatacatgcacactcaaagcatttcagggtacccaaaaattgcacatgcgctcatcttggtatctctaatacctatacatatacaaacttcatgatgaatcttgactacctacacaataaggtgctacatttcatgcctttttttttcaagtttttactacctaaagccgtgtcataccctaatttcgtccggngacctttgctcgatgacgtgcgacca

SEQ ID NO: 181118 - DNA, 404 bp, Glycine max
  unsure (1)..(404): unsure at all n locations
agctntgaaggtgcgtagtccaccactttccctagtataatactggtaatgtgtctactatcattgtcatcgtttttttcgtcattgaggtgccacttaagttgccaggttctctccacctttgggcgtattcttttgaaagaatcgtgccccctttttgcacatgttctgtagttgcaccctatccgaagacattatactgacactgcctaacgaaggcaaccactaggtccttccaagaatggactcgagaaggttccaagttagtgtaccaggtaacagctaccccagtaagactntcttggaaggaatgtatcagcaattccttatcttttgcgtatgcccccatcttgcgataatgcatctttagatggctcttggggcaagtagtcctctcggacttg

SEQ ID NO: 181119 - DNA, 383 bp, Glycine max
  unsure (1)..(383): unsure at all n locations
tgctntcacagttcactctctttcataaattaggcctttctctctttcactccctctctcctctctttcactctctctcctcattaggccaccaccagccgattgcaaaccttccgtgcaatactggagattgtggaccggaagttcggctgtgtgtgcaatgtgctggcgtatggcggcggcgcaagccaacatcagcagcagcaccacgcgttccaaaggtgttcaaggcgtacatgaggctctggaagcaccagcaggagaaccgcgcgaagttggtggagtgcgggttgaagcagtgggaacttgacgagatcacgagctgaatccaacagctgtactttgggcagtacctgaggagcagtgagtgcaagttcctcggc

SEQ ID NO: 181120 - DNA, 93 bp, Glycine max
  unsure (1)..(93): unsure at all n locations
agctntgcggatttggtcttcgccgataaaaggatcgaaggggctctgaaaaaaggaaaatttgatcatcctacctggacgaatgagaaaact

SEQ ID NO: 181121 - DNA, 352 bp, Glycine max
gtgtgatcaacaagtaaccatgcgttttgtctccagactttaaagaagcgctactaggaggcaaccaaaaattttctacgaagaagcttcctgcgtagtggtctatgtagggcaccattaaagaggattctagtgtgtccccacaagctgacacaggctttgacatactccatatatggagcgtgggacaataattacatgggggggcaataaagtgttctcatttctatacagagacaggggcagctgagagatgatgattttcgcactttcttggaggaggtggagcttgacaacagggatcgtcaaacttgtgatttattcttcattaatgttcgcaatgtctctatta

SEQ ID NO: 181122 - DNA, 84 bp, Glycine max
  unsure (1)..(84): unsure at all n locations
agcttaactcgtttttataatattttgggtagtttatgttaaagtgatgattataacgaccttctagtatagntaggaatatat

SEQ ID NO: 181123 - DNA, 355 bp, Glycine max
  unsure (1)..(355): unsure at all n locations
tgtaaaccccctagagcttggacaagtattgtgcgtgtctacttctgtcaagntatccggggtggacatgcttttggttttacaagtaaggtctaacgtgtttggtgagggaagcctctatatttgacaactctgcccttgtctgaccggtagagagtacattgaatacaaatgttatgctttttctattacgacaggtgtgtgcggcgctcgcatagcactcgtgcatatgtatcactcatggagtgggtacgtactggagatgtgatccgtgggtgagaagggttgtgtcatggtgcataaaaataagacaccgaatcagcttccgccagttaccaaagagtccatttaaatg

SEQ ID NO: 181124 - DNA, 134 bp, Glycine max
  unsure (1)..(134): unsure at all n locations
agcttgtagcttataagcttatcaattagttnttaccaaacattgcctacaagctaaaaaattagatggtagttgagagttgaaagctatcgagctagcttattgaactataagtttttgataccactatacta

SEQ ID NO: 181125 - DNA, 169 bp, Glycine max
  unsure (1)..(169): unsure at all n locations
caccanaaaactcagcggagggcccaatttgaagatttttaacgtttttgtaaagagatactggggacaggtggggtaccagatgaccggcgtcatgctctatagcatgcgagagtgggttgactgtaataacaggagttatctagttatgatacacactatgtacggt

SEQ ID NO: 181126 - DNA, 353 bp, Glycine max
actaaaaactccgctttgcactccactcatatcggccttgacttaatctgactaacaccatcgacatagcggggtgtattatggacctcatatacaaaggcttctttgaacaactctgcaatccttcatacataggcgcatgtgcttgttgtaaagactcttggtcaaaggcacgtatcatatcccccaagtggactccccattctacatcaaacggtttatattgggacccactctcgatgtatgtcatattaccaagccatatacacgctggtgaatcgttctaatcccatcacacaatagatgctccccgttcgtgtccagaatttgtcgctttccattcaaacaattga

SEQ ID NO: 181127 - DNA, 312 bp, Glycine max
  unsure (1)..(312): unsure at all n locations
agcttccatcaagtgtgtaatcagagctcaagagcttcaggtaggtgctccttaaacctccattaactttttttctttaccttctcttccattgntgnttcttcatttttctccatgtatgtcctcacatgtctttttctaaatgttgttaacatgattctttagagtttccaatgattaaacttgctatagaaactagatttgattntctatggntcaaatttcttgttcttgctcttgaaccatgaattgtgttgagtttaggttcctttgagatctgccttgttattttttgtggctgaaacctaaccc

SEQ ID NO: 181128 - DNA, 262 bp, Glycine max
  unsure (1)..(262): unsure at all n locations
gtgatggtgtagatatgaaatcacatgttnggcattattaaaaagggggagaatgtgaatgtgtgtatacatgattttgatgatgtcccatagaagaatcaatcagcgctcattttgctctaagattcattcaagatctgttcatcaaacttattctngactcaagattacttttagatcaaaccttgcctcacactgaaaggtttcaagtcattctaagaacatgttatttattaccaatacatgctattgattaccaatg

SEQ ID NO: 181129 - DNA, 294 bp, Glycine max
  unsure (1)..(294): unsure at all n locations
agctntgataaagaaggcgatgggatgttcctattgtgacaaaaccgcccccattccgactctcaacgcgtttgtttccactgtgaatggaaggctgaactcatgcaaggccagcacaggcgccgtcgacaatgcatgtttgagattgtcaaaggccaaatgagctngcggggtccagtggaagggatcaacantgatgaactagactaacggagttgcaatcgttgcatatccactaatgaagcgacgataaaatcctaccacactaangaagctttgcacagcttttatgga

SEQ ID NO: 181130 - DNA, 432 bp, Glycine max
  unsure (1)..(432): unsure at all n locations
ntgaggctgaggacttatataacagtatcaaggttnttgttttaagagtttttggagatgagaataattctaggattttagaattccagtttttactattcatgcgcactattcacgtagaataaaattgattttctgcaattccatttttgcttcaatctacaatttcgttttctactgattaatggaaagctaagtctccagcgttgttttctcttgaggatcaaacacatctctctttgaggttttgttattactattgaattctaatcagttctttcttcttcaccaattactctgtatttgttgctattaatccatgcatgcttaatgcttgattaattatctctgcgcttaatttacattcatgcctaatgatncaattcgttcatgattaattggngtatgtgtngcttaatcacataatgacaa

SEQ ID NO: 181131 - DNA, 387 bp, Glycine max
  unsure (1)..(387): unsure at all n locations
agtcacctgaggctgcagctntcactacatcatttagaagcgttcaagagttttagaggcgcctaactggggcggatacattctttcctttgggtagaggtgcattcggaatgtgcaaaagagcattgggactagaaaatatgatgtatggcaagatctatctcagaggacaacaggctaacccatctgagatcacttcgggaatcctaaattagctctattacaaatgtgattcgaacatctttggagggaatatgtccataaattgcatcagatttagagatcaatcctacttgtcattgtgatcactgatcatatgaatcataattgtagttatcaatggttgcacgcatgatcatgagttgtgaactagagatgtttgactac

SEQ ID NO: 181132 - DNA, 354 bp, Glycine max
tatgcagagctgatgtatctcatgctgaaattggagtctctgaaagggtgcctcacaaatgagctgaggactccttaaatagccataacatctactgtagctacattgtcagttttgtgaccagaactatttacacagcataagtaatttcgaattaatcatcatttaatgaaataccaaaatagttgtcttcattttggtagaaaggatcatatttttttgaagaattattatcttccttctttgacgaagagccttcatcttcttcttgttggagaagatgtacgacttctattagattttgggccagactttcttttgatctataagtggcaaggaaaacagctaattgag

SEQ ID NO: 181133 - DNA, 413 bp, Glycine max
  unsure (1)..(413): unsure at all n locations
agcttgcgcaaatgggacgagaatgatgtgtgccattagatttattattaaaaaaggaatggatgagatttgttgatgtctacctgtttggtgggtaattgtaaaaaataaggttagtgaaaatgttcaattggttcggcatgcaaaatgcttcttatttgggatcgaactcacagtacactaatgctcgtggcccattaacattaaattactacccttcaataaccaagtaaacaactataaattttaaacgttatctaatattaaattgcacttaanaataattataaatgattagatgagttttaattacctatagattacgttaaattatatgtttggttttatttttcaaactacaccttttctctcttatctttttttaaattacacatanttttggaaaaattttc

SEQ ID NO: 181134 - DNA, 217 bp, Glycine max
ctcaagtgccacagatcatgtcacagcctttcctcctttattctctttatgcaagaaaataaatcctataatgggtaggattctcactggtcacacagtcactgcaacttatgcatgcagaattcagtttctcagtttctatacctagaagatattctatacatacctaattgtcattcaatgtgatctcagtatccaagttggatttcttctttgc

SEQ ID NO: 181135 - DNA, 405 bp, Glycine max
  unsure (1)..(405): unsure at all n locations
agcttttatgtgaaaggatgtgactcttcacttttgaatttcaacgttcaaaggcactggtaatcgattaccaaaacattgtaatcgattacagctttttgaaattaattggaatgttgtaaattcaatttgaaaactttttcaaaatagttntgctactggtaatcgattaccagagagtaaaaactctttggtaaacattttttgagaaaaatcatgtgctactcaattttttagaaaaactttttatacttatcttgattaagcattctcttgattcttgaatcttgagtcttgaatcttgatcttgatttttgagatcttgaaccttgaatcttgattcttgactcttaactntcttcttgagtcttgaattcttcttgattcttatcttgaactcttgaa

SEQ ID NO: 181136 - DNA, 316 bp, Glycine max
tgaaggtaaactagatgccttggttaacctggtaacccatctggccttgaatcaaaaatctacacctgtcgccagactcttgggtttatgctcctctgccgaccaccacacagacctttgcccttctatgcaacaatctaaagcaattgaatagcctgaagcttatgctgcaaacatctacaatagaccttgtcataccctaatttcgtccggggattataatttgatgatatacaaccattgattgaccgcttcgagatgtttggcaccctttgttgcacaatatgtgaagtcccgagacgtgtcgaaaatcaaa

SEQ ID NO: 181137 - DNA, 412 bp, Glycine max
  unsure (1)..(412): unsure at all n locations
agcttgttccttggtagtttaaacttatccttgcatcattttctgtctttggaaccaccattgtatgttttacgcttcctttggaaaaccctagagaaagagactttgtcaaagctatccttttctgaaatgggtgttattttcgtgaccttcattgaactccgttcgcattgacgtgattggaatttcaaaatgatgctccttttgtagaacccgtaataccccttagccttttcatgtagtgacatgagtatttgactcagggtatcgttgtcaacattatttctgaaatccgtatgaagtttccttcattttgacgtatagagactagcgttggaccgacaagcgtgaacgaggaagagacctctaagtgacgcacagaggaacccggcggngagctcacaataggtga

SEQ ID NO: 181138 - DNA, 423 bp, Glycine max
  unsure (1)..(423): unsure at all n locations
gtatgcccgagtcattcattcatatgagatgttgttgaagtattggcgatcagtattgccattccttggattatagggttgaaccaagctcatgcttttataaaaagggtcattaagtcaagttgaaatatggaagtaaccgtcttgcaaaattggggcaaaagatgaatcgagtcacatcactgcttcgtctactgccaaacatatttaggattattgatgtccttgttacatccagtttcaccttgacaaagatgtcatggaccatgttgaaaatctaaattgattcaaccccatatcctgcgtaaaaattcgcaatacttcaactgtacatcattcgcatacatccatgcttttcattggttgcattgctcattgcattctttccttgaaaaataaaatanaataaaatgaacttaatca

SEQ ID NO: 181139 - DNA, 331 bp, Glycine max
agcttcccgtatccatacttggaaggatctaattactgccttcctaaggcaatatcagtataattccgatatggctcctgatcgcactcagctgcagaatatgttcaagaaagagggcgaaacctttaaagaatacgcacaacggtggagagacctggcagcacaagtggctcctcccatggttgagagagagatgatcaccatgatggtagacactctgccagtgttctactatgagaagctagtaggttacatgccgtccagcttcgcggacctagtgttcgtcagggaaagaatcgaggtagggttgaaaagaggaaagttcgattac

SEQ ID NO: 181140 - DNA, 393 bp, Glycine max
  unsure (1)..(393): unsure at all n locations
tactcccgcttaataagtgcatntgatgtagctccatgtagagcttgtaggccttggatcttcttcatcaatggagtcctttgcttcttgaatatcaatggtagcggaatggagaagggggaaaggtgattggagacgccacgtcaaggagaagatgagtcaagaacaagctcaccaccatatgaagccatggataagagcttgaacgtaagagaagataaatagagggagagggagagaaggggcacgaaatttatgcctcaaatgaggtatgacctttgaagtgtaatttctcanataatcaaagttgaaaattgcacacacatggcctctatttatagcctaagcgttacacaaaattggagggaaatttgaatttctattcaaatttca

SEQ ID NO: 181141 - DNA, 401 bp, Glycine max
agctttgagccaaaatcctgactcaccataaaccttgacccagggtgagaatgccaatccttaccctcggaagcaaaaaaagaatagaggggaaatttccgatcaaagaaaaagagaaggaaaatttccaatgaaagcaaaaaagaaatgaaggaaaattccccaatcaaagagtgggagaaagcaaaaaaaggaaaagaaggaaaattccccaatcaaagagtgggagaaagcaaaaagaaaagaaaggaaaattcccaatcaaagaatgggagaaagtaaaaaaggaagaagaagaaggaaagaaagctcctgatcaaggatcgaaagaaaccagaagaaatgtgcagagaggtctttggaccagacaatatctgaacagtacagaattgtcccaaatg

SEQ ID NO: 181142 - DNA, 421 bp, Glycine max
ttagaaaatgatttctataccaaagttagtcgtataatgcaactaacaaggatgaagctttaagtgtgattcctttctttttcttatcattctcctcatgttgattcagtctcattagatccatttcgtgttcctataactttccaaataaagttgcaagagacatgttagaaagatcccttgattctgtaatagttgttacctttggttgtcattccctacttaaacatcttagaactttattaataagatcctcattgggaaatatctttcctaatgatgcaagatgatttactatgtgtgtgaatctcttttgcatatcatgtatagtttcatttggattcattctaaacaattcatattcatgggttaaggtatttattctagacccttttacatctatggttccttcatgggttac

SEQ ID NO: 181143 - DNA, 403 bp, Glycine max
agctatgctgatttagttttcgctgatgaaaagatcgaagtgggtctgaaaagaggaaaatttaatcatcctgcttggacgaatgagaaaactggggctaatgaagagggtgagaataaaggagaaacccatgttgcgactgtcattcctacatggccaaacttcccaccagcccaaaaatgtcattactcaaccaatatcagctcctctcattacccaccacccagtcatccacaaaggtcatccctaaatcaaccataaagcctgtctaccacacttccaatgacgaacaccacctttagcacaaactaaaacgccaaccaagaaatgaattttgtagcaaaaaaggctgtagaattcaccccaattcccgtgtcctatgctgacttgctcccatatctac

SEQ ID NO: 181144 - DNA, 357 bp, Glycine max
tgtatagttccccaatctatggttattttgtagtcaagaacactcaatcatccataaaggcaacccctaaatcagccacaaagcctgcctgccgcacatccgataccaaacaccacccttaacacaaaccaaaacaccaaccagggaaggaattttccagaaaaaaagcctgtagaattcaccccaatttccgtgtcgtatgctaacttactcccatatctactcaataatgcaatggtagccataatcccagcaaagattccacaacctccattttcttgaggatacaacttgaatgcaacatgtgcttatcatggaggagttcccgggcattccattgagcattatatgaccctg

SEQ ID NO: 181145 - DNA, 379 bp, Glycine max
agctataaaaatatttctcacccataactaattaaaaagagatttatgtatatttatttaaatgattattatgaaaaagaaatattagtattattttttatttttttagctcaacaagagtagtctggtatttctacgtattttcacgcgcaataaaagaataagagttatgttgtaattctttgtagaaaatatttgtaaattgatatttttatattcttaattttgttataagcttttttgtttacttaattatgaaatttttattgtggcagtaaattaaatttgatttaataggatcaattaaaagagaagttttaaaacaatcaatcgtcacacaacttatgtttcaacatctcaaaattaaaaagatgtcaca

SEQ ID NO: 181146 - DNA, 363 bp, Glycine max
tcatagctaatattagtcaatgtcaacctagatatactcaccaatatattacaaaatttgacattcataaatgtaactgacttttgattcatataacttgtgaaattataagaaatgactcaactcacagcaacattttctttatgtagtagaaagtggacaaggagatacccaagcaatattcatcaactaaattatattgatttaaaccacaaatattaaaatttggaaattacatctatgcttaataagactcagtactaaccagtgagtagagatccagagtactaaccttaataaaatactgatacataccacttggtgtttcttgtgtccaatgcacgctgataatcaagaaagcat

SEQ ID NO: 181147 - DNA, 383 bp, Glycine max
agcttcttggcaatccccattccagcgatcagtttggtttttgcgtaagagcttgaacaacggctcacaaatggcggtgagctgtgatatgaatctggcaatataattcaagcgtcccaggaagcctcggacttgcctctcagtacgtggttctggcatctcaaggatggccttcaccttttcggggtctacctctatccctttctggcttacaatgaaaccaagcaatttccctgatttgaccccaaaggtacacttggcggggttcaaccttaactgatatttcttaagcctttcgaacaacttccgcaggttgacaaggtgttcttcctcagatttagatttagcaattatgtcgtccacgtagacctcgatctcttgat

SEQ ID NO: 181148 - DNA, 398 bp, Glycine max
tgaaggtaggagaagatgagtggagggagaaggagagaaagagcacgaaattttatgcctcaagtgaggtctaaaatttgaagtgtaattctcaaatgatcaaagttgaaaaaaatgcacacacatgacctctatttatagcctaagtgtcacacaaaataggaggggaatttgaatttctattcaaatttcacttgaatttgaatttaaattggtggagccaaatttggagccaaaatttcactaattatgattagtgaattgtagctatgattcaacccactaatccaagatcaagtccaagattctccactaagtgtgcttatgtgtcatgaggcatgtaaaacatgaaggatatgcacaaagtgtgactatatgatgctgtaatggggagtagc

SEQ ID NO: 181149 - DNA, 218 bp, Glycine max
agctattgcgataacttcatgtgctactcaacgattggaagaactttttttttgtacttatcttgattgagccttttcttgattcttgaatcatgagtcttgaatcttgatcttgattattcttgattcttgaaacttgaaacttctcttgattcttgaattgatcttgactcaatcttgaaattattctcatgggctttttgacatcatctctgcta

SEQ ID NO: 181150 - DNA, 414 bp, Glycine max
  unsure (1)..(414): unsure at all n locations
tttcgcaaatcttacggttttatctgagatctagccatgcgagaagtatccacagaggccaattcctcccttccccagtattatgatcagccgttgagatgctttacctttggggacttccaactgtcacccatggtggaagaatttgaagagatcctatgatgtgctctacggggaaggagaccatacctcttctcagggttctatcccttattagctagaatttcaaagatagtccaaatctcggcacaggaattagaccatggaaaacaagtcacaaatggggtggttggaataccgagaaaatgtttggaggcaaaagcaagaaccttggcaggtagaggcgaatgagccccgctcatagacattctcgcactggtgatcttcngaggagtcctctntcataatatggat

SEQ ID NO: 181151 - DNA, 102 bp, Glycine max
agcatttgacttactataccaagctctatgaaccagggacggaaaaagatctatatttacgcttgctcacggtatacagaggaaaactagacatttggatca

SEQ ID NO: 181152 - DNA, 399 bp, Glycine max
  unsure (1)..(399): unsure at all n locations
tgaaccagaaccggtgagtgtgtgaccttaaactgcgagtgaacgactagctatgagtaagaatctttgcatgaatctctgaattttagaatgaaatgtataaactatgacatgatgaagaccataattgtgcattacaagccttttgaccaaaaagcttaccttgaatgataattatattctctgcaccctttttgagctgaatgatattgtcaaaaatttgaaccctgaacttaaataaatgtctcctgataccttgtttagattctatgagagcatatggttcaaggcaaaattaccccaaatntgcgggaagggaactaattgcgatgcaaagaaaanaagagaaagcatcagcncacacaacaattaagttgtatggtaaaataaacagagaga

SEQ ID NO: 181153 - DNA, 378 bp, Glycine max
agcttagcatgacctccgcgatacaagccatttgatctttaaaggtcgatagggcggacttcatctgctcttgcactccctcttcattatccattgttctggatcgagtgttataggggtgcctctgcactttcttagttattgtgagttccctacagaaacagacaatggtgagtatgccaccaaaacatgaatatgctcatgaattatcggagcacttggatccacctcaagatttttacataacgtgaagagtttcagaacttctcgttgtataaaaaggaacaaagcttttatctagccaagatcatacaaaagtgttacaacaaaacctaacggtttctaattatatgggccatcaaatctatcatgtgttga

SEQ ID NO: 181154 - DNA, 355 bp, Glycine max
  unsure (1)..(355): unsure at all n locations
tgtagggaccaccggnacgaatagcatcaatgttcttgttcagtgaagcatggtcacccaccaacgagtttgaagcaaccttcatttcttccatttgcaaatctttcccgcgaacagaactagaatatgaaaccctttaacgagaaagggtgataatgattaatagaatcataaaaggaaaagaaaaatacaaacgttaacatatagatgtgcaatacagatgagggtcttgaattattatttacctggaacctacacatatatgtattgttgcccatgatggcccttgaggctctgaatgggctttcgattagggtttttggagcagaacacaatccataagctagccacgaca

SEQ ID NO: 181155 - DNA, 421 bp, Glycine max
  unsure (1)..(421): unsure at all n locations
agctntataagcaaaaagtaaaaatctatcatggcgaaaagctatcaaaaaggaatttttagcttggtcaacaggtattgttatttaattcttgattaagattgtttccaagtaagctgaaatccaagtggtctagaccattcatcatcaaagaagttatgccatatggagcagtgatattggaggacccaaccaccaaaaggacatggaccgtgaatggtagaagaatcaaacactacctaggtggagatttcgagaggataatcactgttgtccagatgcaaaaggcttgaaccataacgaagacgtccaattataaagacgttaaagaagtgctcttgggaggcaacccagtgttttttaaactttgtcttaacttgtgttactttaatcttatgccttatatatctaanacttactt

SEQ ID NO: 181156 - DNA, 362 bp, Glycine max
  unsure (1)..(362): unsure at all n locations
tctccccaatttctataaatagggggagatgtgatgtataanagggttctgccccttaggcatttctctctctttcgaatttgcttaggaaaattgtttccgtgaagaaaatccaagccgaggcgctttcgtaacgtttccgtgagtgatttcgtgaaggttttcgaccgttcttcattcgttcttcatcgttctttagtcttcaacgggtaagtacctcaaacctagcttttcaattcattctatgtacccgtggtggtccacaattggtttcatgtatttttattctcgnttcatttactttttatacccccttttgacgtgcttaagccattntatttaagtcatttctcgcttaacct

SEQ ID NO: 181157 - DNA, 409 bp, Glycine max
  unsure (1)..(409): unsure at all n locations
agctttataagcaaaaagtaaaaatctatcatggcaaaaagctatcaaaaaggaatttttagcttggtcaacaggtattgttatttaattcttgattaagattgtttccaagtaagctgaaatccaagtggtctagaccattcatcatcaaagaagttatgccatatggagcagtgatattggaggacccaaccaccaaaaggacatggaccgtgaatggtagaagaatcaaacactacctaggtggagatttcgagaggataatcactgttgtccagatgcaaaaggcttgaaccataacgaagacgtncaattataaagacgttaaagaagtgctcttgggaggcaacccagtgttttttaaactttgtcttaacttgtgtactntaatcttatgccttatatatct

SEQ ID NO: 181158 - DNA, 364 bp, Glycine max
  unsure (1)..(364): unsure at all n locations
tctcccncaattntctataaatagggggagatgtgaagtagaanagggttcggccccttaggcatttctctctctttcgaatttgcttaggaaaattggttccgtgaagaaaatccaagccgaggcgcttccgtaacgttttcgtgagtgatttcgtgaaaggtttcgaccgttcttcattcgttcttcatcgntctttaatcttcaacgggtaagtacctcaaacctagcttttcaattcattctatgtacccgtggtggtccacaattggnttcatgtatttttaattctcgttcatttactttntatacccccttttgacgtgcttaagccattttatttaagtcatttctcgcttaacct

SEQ ID NO: 181159 - DNA, 374 bp, Glycine max
agcttcttataccaatgtcacgaggagtgtggtagtcagattcatcaagaaggagctaatttgtcgatgcggactccctaggaagatcatcactgacaatggcaccaatctgaacaacaagatgatgtaggaaatgtgcgaggatttcaagatccagcatcataactccaccccttatcgtccaaagatgaatggggctgtagaggctgcaaataaaaatattaagaagattgtccagaagatgaccgtgtcatacaaagattggcatgagatgttgcctttcgccctacatggatatagaacttcagtacgaacttctactggggcaacgccgtattccttggtttataggatggaagcaatactcctatttg

SEQ ID NO: 181160 - DNA, 344 bp, Glycine max
  unsure (1)..(344): unsure at all n locations
taagcctccagcttgcctgggcgagctgngcggcaagcttctcctccattttccctataaaatggcgttggaggcttgagggaaagggttcagcccctttggcaattagatttcacttaaaattagtgaggagaagaaaaaagaaggagaaaatccaagctgaggagcttccgtaatgcttctgggacgtttccgtgatcaattccactaacgttcttcaccattctttgtcgntctttattcgntcttcatcctttgttgatcttcgaccggntagttttcgatttcgaagctttgaattcattctatacacccttaggggtcaattctcgctttggtttaaa

SEQ ID NO: 181161 - DNA, 412 bp, Glycine max
agcttggagaagatgcttcaatggaggtattgaatgagggagagaaatagagaggggggagcacgaaattgaaggaataaaagaggtatagaagtggaactttgaagtatgtctcacaagactctcattcatcaaagttacaacaagcgttacacatgcttctatttatagactaggtagcttccttgagaagctttcttgagaaaacttccttgagaagcttctttgagaatactttcttgagaagctagagcttatctacacacacccctctcataactaagctcaccatcttgagaagcttccttaagaagattcctaaagaagctagagcttagctacacatacctctctaatagctaagctcacctccttgagatgagaagctagagcttagctacccaccccctat

SEQ ID NO: 181162 - DNA, 403 bp, Glycine max
  unsure (1)..(403): unsure at all n locations
ctcaagcttgagatgaggaagtgttgaagggtgaaacttcctgcttttattgntgactcacagagtggtacctggagatatgtcgcgggggtcacgagaccttgctgacgtcaggtggggtgctattgcccataaccaagcttgaccaatcacgacccaacccgggcatagtctgtcagtgagaacctgtgatgtacctaagcaggcgagctcctggcagtcaacagataaaaggaaaacacgaccacaaagcaatgaggcttgtggtggctggccatctgcgaattttgtgtaatatgtggatcgaggcctctggtaatcgattaccaatggtgggtaatggattacaaggcttataaatgacgacaggaggctaatatggtctctggtaatcgattaccac

SEQ ID NO: 181163 - DNA, 388 bp, Glycine max
agctaggagaagatgcttattggaggataagaaagagggagagaaagagagaggggggagcacgaaattgaaggaataaaagaggtatagaagtggaactttgaagtatgtctcacaagactctcattcatcatagttacaacaagtgttacacatgcttctatttatagactaggtagcttccttgagaagctttcttgagaacacttacttgagaagcttctttgagaaaacttccttgagaagctagagcttacctacacacacccctctcataactaagctcaccttcttgagaagcttccttaagaagattcctaaagaagctagagcttagctacacatacctctctaatagctaagctcacctccttgagatgagaagcta

SEQ ID NO: 181164 - DNA, 282 bp, Glycine max
ggtacctggagatatgtctcgggggtcaggaaaccttggggacgtcaagtggggtgctatttcccaaaaccaagcttgaccaatcccgacccaacccgggcatagtcggtcagtgagaacctgtgatgtacctaagcaggcgagctcctggcagtcaacagataaaaggaaaacaagaccacaaagcaaggaggcttgtggtggctggccagctgtgaattttgtgtaatatgtggattgtggcctctggtaatcgattaccaagggtgggtaatcgattac

SEQ ID NO: 181165 - DNA, 408 bp, Glycine max
  unsure (1)..(408): unsure at all n locations
agcttggtgtggaatcgatattggggaatgccatgtgggttcgngnatttatagactaagaaatggaaatggctttggattttggattcggcttatttttcaactacataagggtttacgttatggaagctaggatatgagagattgagacgaacggatctctatggtacgtacacactgacttttgctccatacaggcttgtacccagaaggtttacgaatgtacatgtcatttattatgtgagtacgtgtattgaatatgctagctcttaaatagtaggataataatatgtaaagacgattaatagttatatcttttttttcgatacctgagtaatacgtcctatttgtttctagatcaacattatatgttatatcaagtagccatagaccacgtttacgtataaa

SEQ ID NO: 181166 - DNA, 465 bp, Glycine max
  unsure (1)..(465): unsure at all n locations
ctgancctgatgacgcgtcgtaaccgagacctataaaactcagctttaaccgccccagagaggacgtgaattctataagagctttgacggttgagggagttaatgggtttcaaagttgcttaggagaagaggaaccgaggaagaagaaccagccatgacgcgctaccgaatcgtgactgagatcattccctacatgcgtttcatggtctgtgattctcgcgcaacaatcggttagttttgtgcgggtggatagcgtatgatctatgttctcatacgggtcctctccgcgatgatgtgcataatcagcttcacgtctatcattggtaatctcattacttatttgtaccgcttatgataactgaacactagtttcgtaaagtagtctttaatgagactgaaagctaataacaatacccagatggaccgactcataattggacttctctcctcagaaagacacttgat

SEQ ID NO: 181167 - DNA, 354 bp, Glycine max
agctaggagaggaagctactatggaggataagacagagggagagaacgagagaggggggagcacgcacccgaaggaagaaaaacggagacaagctgaaccttgagacgtgtgctacaagactctcattcatcaaagataccacaagagttacatatgcctgtatccatagacaaggaaactcccttgagaacctttcctgagaaaacttccttgagaagcctctttgacaaaacttccttgagaagctagagcatagctgctcacacccctctaataactaagctcaccttcttgagaagcttccctgaaaaaattcctaaagaagctacagcctaactacacccacccctcta

SEQ ID NO: 181168 - DNA, 461 bp, Glycine max
  unsure (1)..(461): unsure at all n locations
aacattgacccttgatagaccggtcctatgcggagacactcataatactcagcttagcttctctagggagacccctgttgttttcctttttgtccagtaacagcgcggacggagccgagaccaactggaccacaacctccagcaattaatacacttgcttctacagagttgagaaactatatcactgaccagattcaccgtgaccagctctcgtnattcttcctgaagactcacgtgatgacantgctgctccttctaattcaccaacctgctgcctataggatggtttggacctttgtggatggatggacgactgaggaagatgtggtcatcttgacatgaatgtgacactcttgagggacatgggcttcttttgttgcgcctattggttactattgatataatcatggctttacaacaacatcttctttttggttattttgcgcatgggtagcttagat

SEQ ID NO: 181169 - DNA, 373 bp, Glycine max
agcttaatctttccctatctcaatagaccatcttcttgatcaaaacttgaagacacaacacgaacaaaacaaacaaaatggttgatctggaatgattacatccaccccaaaacaaatgcgaaaatgatttgaacagaagctcatataccaatttattgggtttaagactgtaaaatatgaaaaagataggaaaacaaatgatataaggaaaagagagataacacaacaatgaaagtttattgcatataatagaaaatggtacaatgaaagaggtgttcataagctctctctaactaactaattccttttatagaagtgtacacacaaaacagaataactgaaaaacagttataacaactaaagcagttataac

SEQ ID NO: 181170 - DNA, 145 bp, Glycine max
tcatgtattcctagattacaagacatttttttggagatttatccatgttcatcatatgccaaggatcgtggattggttgatttacactaagctcatagactgcattcattagatgtaaggacttgctacataatgtgatgtttgt

SEQ ID NO: 181171 - DNA, 384 bp, Glycine max
  unsure (1)..(384): unsure at all n locations
agcttgtaaattntttacacctcgtgctgtttgtattaattattattgttaaccttccagaatatatattcgtatatcatcattcattttggtgtctttcctctgtgggcatggggatattgtcctaatttcttttagaatgcatttagattcataattttacttgaggaaagtaatttattagataatttaaatttctttaatctaaaattgattgtttgaatgtttttttataaagaatttaaatttttataattttaaacaattaaaaatatagaattttaatttccttctaaaaagcgagaaattgatattctcttcttgataaaagagccttacaaaatatttgcgtattttctttataacctcccgtctctcttccac

SEQ ID NO: 181172 - DNA, 420 bp, Glycine max
  unsure (1)..(420): unsure at all n locations
tgaacatagaagaatctgtttcgcattacaactcaatgtttcaacatatgaagacagtgctatgtaaaaatatacatacactgatctaaacatgcaaataaatttaaatagcatatttagatcaaacaacggaaattaaaagaattacgagcatatctctggccattgcaaattgaacgggaagcggcgcacacactaacctgaaagacagttntgttcttccatacccttactcactctgaatagatgatgtattttttctgaatagagaagtgggtttggtgatacaaaacttagagcaccccatcctatttatagagtctgtccatcacagagctctcagcttgttatcagacagcttgtcatcagaacgtgagatangaagttatgaaacgtgacatacaaagtgatcagtacatg

SEQ ID NO: 181173 - DNA, 276 bp, Glycine max
tttaggccataccaagatttccacattaacttcctcctgttgcatactcgtgattaaggtaattggagcttgacaaagatccgaaaggagaaaaggtcacgaattcattcctcgctatcaaaaataacaattgtcattgaccgattaaaaaaaatactgtggtgctaaataacctcttgaacaaacgatgcatcaacaatttcgtttatacagactaattgattaattactcactttagtaaacagtatatgagaagcatgacattaagatagtga

SEQ ID NO: 181174 - DNA, 338 bp, Glycine max
agcttggaaaatggcagggcaatcttgctaaaatcctggatgaatctcttctaaaaacttgcatgtccgagaaaagaacgtacttcctgcatagaagcgacgtaaggaagagaagtaataacatcgatcttggccttatcaacctcaatacctttactaaagaccaaatgccctaagactatacctttatggaccataaaatgacatttttcaaagttaaaaacaaggccaatctcaatgcattggtcaaaaaatctagagaggctactcaagcaacccacttgagatttttcactccctttgtaaaaatcgtttacaacttctgaaccacacaggga

SEQ ID NO: 181175 - DNA, 300 bp, Glycine max
  unsure (1)..(300): unsure at all n locations
tctataccaccccatttctcttcccctttggcaacttctaaaatccaaagtacgtggtaataacaacacaatagcattcatataattcaatataacacacaaacactaaaaccaaaaataatccaaacattcataaggtaaataaataatccaaacattcataagtcaaaccacatagaatctaatcataaaagactaaagtccaaataccaaaagataactaaagtgcagaaaatgatagcctanagatcatagccaaatacacggcttataagaaaagagaactataaactaaacact

SEQ ID NO: 181176 - DNA, 423 bp, Glycine max
  unsure (1)..(423): unsure at all n locations
agctnttaggcagtaaaatagtataaaatctaatgaaagaaaaaataagttggaggaaaataatcataagctacaaatgttcaatttcataaaaaataacttttttcttagaaagaaaagcattttgtaaatttaatttaggattccaaatatccaacttaattgtttcggaaaaaacttaaaaaaaaacagttaaaattttagattatgagttctcccaaacattttaatcacataaccttatatttcctagattaatacttaacctttctactatttttgtcccttttttttctctcttcttcaatcaatttaattctctcacaatcttatctaatattatcaagtgtcttaatttagtcatatttactatatttttttaaataaaatgtttaataaaaaaattaatgaaacatataaagc

SEQ ID NO: 181177 - DNA, 365 bp, Glycine max
  unsure (1)..(365): unsure at all n locations
tattgtgtcacttactntntggttagggcgtctcaatttcatgttagctcttagattttttttttttattaatccctgggtgtattcatcatttcattaatatagaaatgatgagctgatttcataaaaaaaaagtctgagatggacttttgtgctaaacaaagggcaacgagtaaaatatcaaattagtccctcatttttagaagcactgtcaatttgatccctgagatttaaaaaatatcaaaatgatcctcgattttacatttcgtttgccacgttagcccctgtcattaataatctcctaagaccgctagtaaatgtgtgatatgacacgctaaatgtcacctagacacacacgtgaaact

SEQ ID NO: 181178 - DNA, 417 bp, Glycine max
agcttcttagtcttggctgatgaagatgaattcgtgtttacttcatgcactcctctaatgacaatagcatcatcacttctatcactaaattgatgggagtttgaagccatcttctcaattaaacttctggcttaagtaggggtcatgtctccaagggctccaccactggcagcatctatcatacttctctccatgttactgagtccttcataaaaatattggaggagaagctgctcaaaaatctggtggtgagggcaactggcacatagtttcttaaatctctcccagtattcatataagctatctccactgagttgcctaatgcctgaaatatcctttctaaaggttgtggtcctggaaacacgataatattttctaaaaagaatactctcttgaggccgcccatctcgtgatgga

SEQ ID NO: 181179 - DNA, 329 bp, Glycine max
ttaccagaatttctaggcgaaattcatgttaaatatatttgatgtgctctaactcatatatatatatatatatatatatatatatatatatatacacacacacacacaaatattaattacaaagacatctagaaaattttgttttctctttcacaatattaacaaagtagtgaatagaataatataactcaagaaaaagagtagaaaacaccctcaaatttgacaagagagttacaaagcatttcttttactggcacttaatagaatttttgtagttacatgtaactagtgatgacatttatcatcttccatggattagaaatgactct

SEQ ID NO: 181180 - DNA, 410 bp, Glycine max
  unsure (1)..(410): unsure at all n locations
agcttggttcaaccccataacccaaggaatggcaattttgattgccaatacttcgacaacatttcatagagatgaaagactcgggaatacatatgttatgcatggaaaatgtaattatgagattgagatgcccgaagaaacatcatttcctagttaaccacacattaggtaccatgctcaatcatttagntntggtttttttcttttttttttggaaataggtttatgatcccaacatggtaggctcatggtacctaacacatgaaactaagaatgcattgtgaattttcatgcttcctttttttgtttttgttttgtagaggaaaatgcaaggatcatgcatgagtaaacatgacaataaaaggtatgcaaaaagcatggtagatgcagatgcatggtcatgaaatgac

SEQ ID NO: 181181 - DNA, 309 bp, Glycine max
tgaggcacctgccttttaacctaatgtccccaaagtggtcttacccaaggatcttgttttccatacattacgaaaattggcaccttgattttttgacatctaaatggaaaattaacttaaatagtattatttatcattttttgaatttaatttcagaaaccaaagttcattcctgaaaattcagtagcatgttatgtcaaataacacttgctgcatctgatccccacatccctataaagaataacttcagattttcacatcccttacgatatattttgctaagtttcacaacctcacacacaaaagatg

SEQ ID NO: 181182 - DNA, 394 bp, Glycine max
agctttgagctttgaacacccacgagtgtttcagcaccctagtagcaacagtgtatgttgggttttcttcgagccagacttccaagaacagtgtaaggggttctgtgggttcgagcgaggacaatgtgggtgttgaaggagcattttccggcagatttcaggcgggaggagaaagagaagagcgattttagacaggaggatgacaaagagaagagggagggaaaggttttcgagcgcgcggggcttgtgaaatctcaagttttaacttataaacataacaacatcggttttttatggataaccgatgttaactgaatataaaagctgatgttaacatcaaatagattacatcaattttttaaccaaaccgatgttaaatcaactccctaacatc

SEQ ID NO: 181183 - DNA, 418 bp, Glycine max
  unsure (1)..(418): unsure at all n locations
tagtaaatatggtccaatgaaggaggtgaagttttattgagaaggcaaatgggaagtcgaatggctattgtcaagttgagttatttgacccttttgctgctactacttgcaaggaagggatgaatggattttttttaattttaatttaatttttcattctaaattaattttaatttaattaaaatatgatgttatatcagatgacaagtggtcagcatacatgtcacacttaatctaacgtgatatcacaagtagtttgtcgacgtatcaaataaataaccacatcagcaattaatggatcctttntaacgacagagacctcatacaaaacttttaaattatagtgacccatctcannaatgaaaaattatgaggaatcaaatgtaaaattcaagtatatatcangggatcaaaatat

SEQ ID NO: 181184 - DNA, 366 bp, Glycine max
agcttatctgctataagttagaagctaaataactaaaagcttatattctctagctgatttaatttacagtatttaataagactaatatttaaaaaatataaatgtcaaatgatgaaaaattatatatttattatttctaacatttaaattttatgtctaataaatttcatcttaaaaagtaggtaaaattttaatctctttttgttggggtttcaatgctatacaatggattatgcataattttgatatttttatcatcaactctgatttagaaaccaaatattttaaccataaatccaaataaacaatgcaataattcattaaaataaatagtttgacattaaataaattaataaaaaagtagaa

SEQ ID NO: 181185 - DNA, 440 bp, Glycine max
ctcaagcttgtaggctacatttacaaccatacattggctttgaactctatgaggaaattcacactttaaactgaattagagacatggagttacaagatttgctaccactttcttaactttgcaaagattgcataagcaaaaggccaatcttagaaggatgtttaattcagatgaatggttgaagtctaaggcagctaaagagcccaaggggaagcaagcaacagatgttgttcttatgccatcattttggaatgatgttgtttatgctttaaaggctatggggcctcttgtaagtgtgttgaggttggtggataatgaaaaaaaacctacaatgggtttcatttatgaagcaatggatagggccaaagaagcaattcaaagagctttcaataacaatgaagggaagtataaggatatcctttgcatcattgataaaagat

SEQ ID NO: 181186 - DNA, 391 bp, Glycine max
  unsure (1)..(391): unsure at all n locations
gatccttaagtcacctgcggcatgaagcttggtacctccttcttcactacatcaagaatcaccgggttgagtcttctctgtggctgttgtcgcaacctacccttcggcgggagggtgacgcatgactcgcgggtgcatgttccaagaaaggaatatgcgcggagtcgccaccaacgtttatttgaggaaaacgtcagaaaaactggaaaagacgtgatctacgaactttaagtgaaaggttcgggagttgtatttacgcacggggaaggtattagcaccccacacatccgtcacaagagacgacaacctttattcaaatgtgcaaatataacttcaatttatgttatctttcctttttacgtacttatgtnctttttatgcctttttatat

SEQ ID NO: 181187 - DNA, 372 bp, Glycine max
  unsure (1)..(372): unsure at all n locations
taactccttcactgtcttttaaggtttgtagtacgaccatgttgcaggatggatgcatgaaaaccaggttgctatgcttaatgaagaaaccgatcaagatcagccgaattgggtgcaagcatgtcccctagactttgaattgagaaattggcagatcatagagcaacccgagatttatgatttgatgtaattaaacattcccagatcctattgctatgcctaaggctttaggattcacatgttgttgagcgtacttttcttttcaattctagtgatcgntaataaaatgcatttcaaagacatatttccttctgcatctcttaacatatttattttcgttgcaattaaatgagttgctgcatatctaataat

SEQ ID NO: 181188 - DNA, 383 bp, Glycine max
  unsure (1)..(383): unsure at all n locations
agcttattggatagaatactccaagaggattgggctagagcagctaaagaaggccctaggattctcatgaacctcanggtaaaattttgagcccatgggccaaggctgggtccactcttctttgtaaatattagaataggttttctttcttttaggggttgtattttgatgcaatnctaccccttaagcttattggatagaagactccaagaggatcgggctagagcagctaaagaaggctctaggcttctcatgtacctcagggtagatttctgagcccatgggccaaggctgggtccactcttctttgtaaatattagaatagtgtttccttcttttaggccttgtattttgaccattctagtagtataggaatttaccct

SEQ ID NO: 181189 - DNA, 278 bp, Glycine max
tgaattgaacaatggaagatcttgagaaattcaatcggtcttaacttttcactcggaagtccgattcacgcgcataatatattgagacgctctcgtgaaattcaaatggtcataacttttcactcagaggtccgattcatgcgcataatatatcgagatgcacataattgaacaacggaagctctcgagaaattcatatggtcataccttttaactcggagctctgatttaggcgcataatacattgagacgctcgaaattgaacaatggaagctctc

SEQ ID NO: 181190 - DNA, 385 bp, Glycine max
agcttcatgggaaaccagtggttgaagggcaaggttggatggtgaagttgatgtgcgggagtcataatcatgaattgcgaagtcattagttggacatccatatgctgagtgattgactaaggatgaaaagataattattgctgatctgacaaagtcaatggtcaaaccaagaaacattctgctaacgttgaaggagcacaatgtcaatagttgtacaacaatcaaacaaatatacaatgcaagaagtgcatatcattcttccattagaggaagtgatactgaaatgcaacatctaatgaagcttcttaaacgggatcaatatatttgttggcatagattaaacgatgaagatgtggtacgtgatatcttttggtatcaccctgat

SEQ ID NO: 181191 - DNA, 350 bp, Glycine max
  unsure (1)..(350): unsure at all n locations
tgtagaaattgattacttaatttttttttgagacaatgattgatttattcatgaatctctgctttaatcgattaccatgtgatataattgattacttctcccttaaaaagtgtatcaaaagttatcaagaacacattgatcaattacattgaggatctagtcgattacattgttcttaaaagttttctagttctcggaagaacactntaattgattgaaatgataatataatcgattaactgatggaagcttgcttgtggtgcttctatggaggctggatctttgagcttcaatgaggtcctttaatggtgatttctccaccatggagatgtagcggaagacaaaggaga

SEQ ID NO: 181192 - DNA, 336 bp, Glycine max
agctgttggagtagaaacatttgaccaattcattttatttcagaaaaagaaatcatatctagtcaaggtctgagagaccatacaaatttcctaacgatttctaattatgtgggccattaagactatcatatgctgacaatacccgacaagcccatgaatctctttcggggcggagtaggtgtctgccatcgccttggcctttgcttacaatcggcgaagttcttgactcccgttcaaggtaaaagcaaaccgatccatccacatggttgcctattggtggagagagatgataccccttcctttagcttctatctccgatatacttgggcatactca

SEQ ID NO: 181193 - DNA, 401 bp, Glycine max
  unsure (1)..(401): unsure at all n locations
tttcgattcattctatgcacccatgtgtggtccacattgcgtttcgtgcatttttactctcgttctgtgtactttttataccccctcttgacgtgcttaagccgntttacttaagtcatttctcgcttaacttataaataaaataaatttccaccgaacgtttgaattatattatccgttaacttcggttaaaatcatttccgaccgttcggacgtgccgtaaccacgttggaaatcaaaaagaggtcaaaaataatataataatcaaaaaatatcttttttagtgaaataaagcggaaaatcaatcggacgttttctctttgggatttctcattcttaatcgaattgattaataactaaggtgaaactaaggctaacatcaactcgcctagtcgagctcg

SEQ ID NO: 181194 - DNA, 374 bp, Glycine max
agctttggctattcaactatcataatttttgactcgaatgtatgatcgatgccgattatatatcccgacactcaaaatggaacaacagaagctcttgagaaattcaaatggccaaaacttttctctcggatgtctgattcacgtgcattttatatcgagaccctcgaaattgaacagggaagttttggcaaatatcaatggccatattttttagtcgaatatatgatcgacgcccatgaaatatcgagacgctcaaaaatgaaataagacagctcgcgagaaattgaaatggttataactgtttacctggatgtgagatttacgcgcataatatattgaagttttgaaattgaaaacgaaaagtgttggctaat

SEQ ID NO: 181195 - DNA, 402 bp, Glycine max
  unsure (1)..(402): unsure at all n locations
tcacaacacagcaacacattatctaggngtccaatacactcttaatctaagggagtntctaggtttgagaagtgaaaccgagaatgaggtaaatttgaagcaaactctcacctcacacaagtccataacatgaatttaaacttgttcaaactggatttacacctaaaatttcaccgaatcaaaatttgacttttcaacacccaaatttaccctagaaatggctctttgttcactttggtcatttgtttttctctctagcacagcccaaactttctcacatgttctaaatggcatttcatgctaggattaactcactttaacctccatttaccacagaatccagattgaccttccaactctcatagcctcacttctttttcactcataacaccacattctcac

SEQ ID NO: 181196 - DNA, 362 bp, Glycine max
  unsure (1)..(362): unsure at all n locations
agctattcacttttcatcgatggacaaattatgtcctgatatcaaaaaataaatttccacatcctcattgcataattgaatgaggaaacttgtgagaaaaacaagaatactgagggctcagccatgagcacataaaaattgagaacgaaaacctattgaggtagtcctacaaccaaacctctgcagaaaatacatagttttgtaaagatccagtactgaagcaaataaacatgttgagaaaaatgttgtcaataaagaaagatataagtcatgtggtaatcttggtcctgcgcctattgaacccctacaaaacgagcataatccacccacctgccaaggaaaaatacagaanatgaccactg

SEQ ID NO: 181197 - DNA, 406 bp, Glycine max
tagatgtagcttttgggagaataagagcatgccaacattcttagatgtaatacttggggaaaaaagagaataccagtccaattcctatgccaaatacaagtctcccaagcaccaatacaggaaaattaggagctaatgctgttacaagagctccaacaagataaactactgcagctccaatcagcttctttcttctacctaaatataaaatttgtcacagcagtttcaccagggaaggaaatagcgaagattataactgacaaaaagggaaattacctaagaagtcagcaacattgaaggccaacaaggagccaattaaggcaccatacaatgatccactagtctgcaaaagaagcaaatgccattgccccagtttatattcaagatcaatatatggagtaattac

SEQ ID NO: 181198 - DNA, 466 bp, Glycine max
  unsure (1)..(466): unsure at all n locations
cgcgcncanncncncncnntttganncnttgcattgtncgtagtatagangacgtaagcttctagaanactagtggtttctgaattatatgaagccagtatataaacatcttatccttgtataccagtttcactagtgttagccttgatgtacccttcgtgacagggtagacgtggggacacacaccaacggttcacctctctccttttttctccttcaaattcgtggcccccccccttctttcttccctctttttttcctccttgaagcatcctctccaagttcttatccagggtcatcttgggggggagctccttcttcctggcttattccctaatggaagggccttctctaccccctttctttgttttcgtgcgtctcatggggaacaacccttcaaggcccctttgagcctcaagaccgccctctaaaagccccacgcaggctcataagtacatgcgggccg

SEQ ID NO: 181199 - DNA, 79 bp, Glycine max
agcttgccaacccatggaagctcctaatatctcccacactttttggggggggccattcttggatggccttgatttgcgc

SEQ ID NO: 181200 - DNA, 61 bp, Glycine max
gcttctatggagtgagatcttgagcttaatgaggtactaaataggattttttaccatggag

SEQ ID NO: 181201 - DNA, 209 bp, Glycine max
ctttccattgatgacaattttgcattgtttatgtatgtcttgggggtttccctttatcaatgtaacgcttcccacttgcggtagtataaataggtcatcatgtggattagtgtggaatctttgacgatgcaggaagcaagaccttgccgatgtataggtaggaccatggcggtcttcgaaaaagtagatgacaaaaaatcatcttaggc

SEQ ID NO: 181202 - DNA, 404 bp, Glycine max
  unsure (1)..(404): unsure at all n locations
tctcaaggaagttntctcaagaaagcttctcaaggaagctacctagtctataaatagaagcatgtgtaacacttgttgaactttgatgaatgagagtcttgtgagacacaactcaaagttcaacttctctccttttttcttccttcaatttcgtgctccccctccctctttctctccctctttcttttcctccattgaagcatcctctccaagcttcttatccaagggtcatcttggtggtgaagctccttcttccatggcttattccttaatggatggcgcctcctctcacctcctttcctttgtcttccgctgcatctccatggtggaaaatcaccattaaaggacctcattgaagctcaaagatcccagcctcatagaagccccacaagcaangcttcatc

SEQ ID NO: 181203 - DNA, 66 bp, Glycine max
  unsure (1)..(66): unsure at all n locations
agcttttattactgatacttctgttcatgataagttgaatatgcctaattataggtttngctattt

SEQ ID NO: 181204 - DNA, 116 bp, Glycine max
tagatactaagcttccgttcccgagagcatctcttatttaagcatttcagcctttgctttcttgtagcttaggaaaaatgccatttcttcttctttctttcttccaaacccatttc

SEQ ID NO: 181205 - DNA, 206 bp, Glycine max
tctgattgcctttgaagtttgaaacctctccagacatatctcattatcactcttcgaggcagaattttccacgttgccctttgtgctgagaataaaatattcgcatccaaatggatgtacattggctgggtgggtttcaccccttccataattcataaggagtatttgtaagggtaggtcttatgtaaactctttttgaagataac

SEQ ID NO: 181206 - DNA, 381 bp, Glycine max
  unsure (1)..(381): unsure at all n locations
agcttattttcatcaaatcttatgttaataacttcttcaactaccaaggttcttgagttatacactctgagtgcctttgaagtttgaaagtatccaagaaatatctcattatcacttttcgagtcaaattttcccaagttgtcctttgtgttgagaataaaatatttgcatccaaatggatgaaaatatgttatgttgggtttcatcccttccataattcataaggagtatttttaaggttaggtcttatgtaaattcttttttgaagataacaagtagtattcactgcttcaacccagaagtgtttaagggttgaattatcattaagcatgggcctagtcatctcttgtagatatctattaattntttcaattacccctg

SEQ ID NO: 181207 - DNA, 321 bp, Glycine max
ctaagcttgaatctttctaccttcactacttgctgtacacatggagaacttgtttatgttcaccttcattagagactcgcacacctttccagcatgatactaccccaatagccaaggatatctaggaaatgatggatccatattcatcgttgttcacgccaatcatgcgtcttccaccatcaaggagacactgatcactccactaacatcctacctgaatcaccaccagtaaatgtgagaccatataggtctccccactatcaactatgggaaatcgaagaccagataagctctatgctgaataacggcttcatacgcacc

SEQ ID NO: 181208 - DNA, 412 bp, Glycine max
agcttctcatccttagtaacagctactactggacacacacaactacatattgtgttccctctctgaatttcggaagtaatagtcccttgactactcttctaatttctttccctctaatcctaagggatggactctacactttttgggatatcttttacttaggctccattgatgaatttatttacatgcactcttttagatttgaatctactaactccacctagagcgttttggctatagaagttccttctaataacgggataattatctcacttgacattaccctcactttttggcacttattccttgcaattttctccttcaaatttgaacaatttatagagtgatatggagctagtcgttggtgtgaccattggacgatgaattcaacattcaaatgttgcatgagtta

SEQ ID NO: 181209 - DNA, 354 bp, Glycine max
  unsure (1)..(354): unsure at all n locations
ngctctanatttacattgatgtttgtatttatgggaggaagttgcatgccatttttgttttaagagtagtgtcccactggtaaaactaactttccaaatgtttgccttcgcaggaaatggacccgaagaagcttgcctcaaagaggtccaggaaggacaaggcagccgaaggaactagttccgctccggagtatgacagtcacctgtttaggagcgctgtacaccagcagcgcttcgaggccatcaagggatggtcgtttctccgggagcgacgcgtncagctcatggacgacgagtatactgatttccacgaggaaatatggcgcccgcggtgggcatcactggttactctca

SEQ ID NO: 181210 - DNA, 412 bp, Glycine max
agcttgaagagaatggaagagggaggatattaaaacttgagatagcaacatggaaagaaatgaaggtgtttatgaggaagacattcttaccaccttcttgtgagaaagatgcttatgaaaggcttcaaaacctcacacaaggtagcaagagtcttgaagagtaccatcaagaaatgataatgactatgaggagagctaattacaagagcctaaaacttccatggcaaggttcctatgtgggcttaatagagacattcaatgcattgtgaagttgaagcactatgaaagtttggaggatatggtgcagaaagccaagaaagtggagagacaacctgagaggaagcattcctacaagaagacctatcactatgacttttctagtggtaaagacaagtccaagaaggagggatct

SEQ ID NO: 181211 - DNA, 421 bp, Glycine max
tatcataggtggggtagttgagggaggcactatgaattttttcactaaaataatttatagggtgcccaccttgtaacaatacagctccaactcccactccagtggcatcacattctagctcaaaaggtttagaaaagtcaggaagagctagaacatgttccttattaagcttttctttgagaaaagcaaaggcttgctcttgtttttcacccaagtaaatgccacattctttttcactagctcattgagaggtgatgcaattgtagagaaattaggaacgaaccttctatagaagcttgctaacccatggaagctcctaatatctcccacactttttggggtgggccattcttggatggccttgatattctcagggtccacttggaccccatttctaccaactaccaaccctaagaaacta

SEQ ID NO: 181212 - DNA, 388 bp, Glycine max
  unsure (1)..(388): unsure at all n locations
atatatagattggctgcttcaggcgctttccagaatttcttttggagcactcaaacacgtacatggccaaccatcacaactaggggaggtggatcaatgcgagaactatgccttttgtggtgaaaattctatttgcatgtatccaaatattggccttctgttttgtttgcttgtttaagctttttgtaagagtcggcttcatatatagcgatttccggtaattatacattttgtatataaaatgtgtctctacatgggtttgattatgattcttaaataacagccaatattactttatatatatatatatatatatatatatatatatatatatatatatatatatatatatatatatatatatatatatataagagaagccatgccn

SEQ ID NO: 181213 - DNA, 361 bp, Glycine max
tgccgcgacacctaaattcgatgtacggcaaatcctcatgcgggatcagttggaacatggatgccagagtggcaagggcatcggccatctaattctccactctggggatgtggtgaaaggatacatcatcaaagtactctatcagttttctaatgtaggcctggtagggtatcaacttatgatccctggtctcctattctactttcaattggtggattaccaaggctaagtccccatataccttgagcaacttgaccttgaagtcaatttccgcttggatcccaagggcatacgcctcatattcagccatgttgttcgtgcagtcaaagcccaacctagtcgtgaagggtatacattgatc

SEQ ID NO: 181214 - DNA, 403 bp, Glycine max
agcttgacacaatttatctttctcaaacttgagtttctgaagaccaattactaagtctttcgtaactagatgagttagattatgcatattagtatgtgcagtcctacaatgccacaaccatgaatcatctattttactcaccaagcaactaagctcatgaaaagatgcatgctcaatattcagcatatagatgttacctattctcttaccaaggtggacaactttaccggatatggcttcacttatcagacaacaatttttgttgaattcaatcttgacacctttatcacaaagttgactaatgcttataagactatgctgtagtccatccacatataacacattctttatctgatttttgaggtgatcccctatatttccttctcccattatattacctttg

SEQ ID NO: 181215 - DNA, 357 bp, Glycine max
  unsure (1)..(357): unsure at all n locations
tgcatatggaattgcgaaagcccccctccatcatgaggatntgttcctgccatctcaaacaaacatatcaaacgtatcaagacaaatatagttggtgtttgaatacctcgcccactcaagtgtatcacacaattatggcttttctctaatgaaacactcttgccttttaccactctaattccccttgagttcttaggcaattcaagagattatggccacaacaaagaacaattcaccaatatgtgtaaggtaacgctagagagacaaggaaaaggttaaccaagacaaaggctaacaatgttattaggcacaaatgaaggaaataaaattctgaatctatgaattcaagtaacaatc

SEQ ID NO: 181216 - DNA, 409 bp, Glycine max
  unsure (1)..(409): unsure at all n locations
agctntataattagtagtgaccataccctaatatagaggtcagtgaaatctcacaagtgcatatctttgttctcatgtgaaacacactgtttggtcctagctagcttttcccttgccattttctacctagcctttcagagatcacatgtagtgttcccttcatttcatttggaagcaatttgaaagatatcactctttgaaaatgagggtcctctgttttttcactttttgctaacaattagcatacatacacgagctacaagcttagtcaactcaactaagattacgctatgcaaaagctgcaatgtgtctaatgtctatgctcgagccaaagcttcttattagaaacttttgtgaggtttatagatacaatacaatttacaaacgtttggatagaataagttactta

SEQ ID NO: 181217 - DNA, 377 bp, Glycine max
  unsure (1)..(377): unsure at all n locations
tcaatttgcttggatagcaacttgttatgtgccaacaatgcatcatatgatgaaagttccagcacgcttcttttggttgggatgtccttcagcagtcttggactctgtgaagtatttcttcaagaatctttcaaccacttcatcccaagtcttaagactattacctttaaatgaatggagccatctttgtgcctctccagacatggaaaatgaaaacaagctcaatctaacagcatcttcatgcacgccagccagtctgacagtgttgcaaatttcaatataagtggctagatgtgcatacaggtcttcttttggcagaccatgaaacanattgttcttaatcaactaaattaatgaatgtggataggttatatttt

SEQ ID NO: 181218 - DNA, 408 bp, Glycine max
agcttggagaggatgcttcaatggaggaaaagaaagagggagagaaagagagatgggggagcacgaaattgaaggaagaaaaagggagagaagttgaactttgagttgtgtgtcacaagactctcattcatcaaagttacaataagtgttacacatgcttctatttatagactaggtagcttccttgagaagctttcttgagaaaacttccttgagaagcttctttgagaaaacttccttgagaagctagagcttagctacacacacccttctcataactaagctcacctccttgagaagcttccttaagaagattcctaaagaagcttgagcttagctacacatacctctctaatagctaagctcaccttcttgagatgagaagctagagcttagctacacaccccc

SEQ ID NO: 181219 - DNA, 415 bp, Glycine max
  unsure (1)..(415): unsure at all n locations
tgaatgtagttccatccctccttggaggtgactgcaaattgagttgagaatgagcgagaaaggttatcaacgttagtggaataaacattatcaaagttgtatgagtaggagttgtggttttattggacaaccactggcgtgaagaaccacacacactctggacattgatgctctattatccacatctctagtatagttagtaagactcccaagaattgagttctggatatttcttgatctttcanatacgttctctccacaccttcccaatgtgttccacaaccacaagttctaatattatgattaagaataattggtaaatgagaatattatcattattaaacgattaaattgagtgataataatataaaaagtgaacgttgctattcatagttctaaattcatcttttcttta

SEQ ID NO: 181220 - DNA, 404 bp, Glycine max
  unsure (1)..(404): unsure at all n locations
agcttgttgatctcttcatgatgatcaacacaatattgcatttgctgcttcaattttgggctgcagatttcataagcaatgcatttagtatgtttacttggtaggtttaaattttcaataaaagtaattaatttttttagaatttaattttttatgcaaggtcaatgtgagttcttgttacacaaatgtaattcattttattaccatattacccaattcattaatatgatgcagtgaatttgtattaaaaaaatatacttttaattatatataatatagaagttttagcatttagcaactcactctttaacacatttttatataagaaattntattatacgttaaaatttattanaaaatataaaagaaaaaagactcacaaaaattatgaattttaattaatt

SEQ ID NO: 181221 - DNA, 412 bp, Glycine max
  unsure (1)..(412): unsure at all n locations
tatgctgcaaacatttataatagaccctctcagtagcttaaccaacaacaatataataattatgatctttcaagcaacagatataatccaggttggaagaatcatccaaatctgagatgggcaagtcttccacaacaacaacagcctgtccctcctttccagaatgctgctggttcaagcaggccatatgttcctcctccaatgcagcagcaacaacaacaacaaagacaacaagcagctgaggccccttctcaaccttccttagaggagttagtgaggcaaatgatcatccagaatatgcaattntagtaagagacaagagcctccattcagactctgacanattagatagggcagatggctacttagttgaaccaagctcagtcccaaaattctaacaaattgtcttcac

SEQ ID NO: 181222 - DNA, 387 bp, Glycine max
  unsure (1)..(387): unsure at all n locations
agcttgctgaatattccaatgtagaatatcggttgtataaaaaaaatgtagaaaacaatggagaggaagtattgaagtaacactaactaataaatatttcttgagcaccattgcagatactcccaagtcccaccatagatgttggtcaatcttgttgctttctaactagtctcaaataacatcactcaatcaaataatcaaatgaaaaatcaactcatatctcatgcatattaatttttcacttcaccgtatacaattataaaatccttttttttcataagctataaatcaaatacttatatatcaattgaaaatatctcataaggtaaaatctaatccaacctttaccataagcttttgttaagcaagccagacacanacatatac

SEQ ID NO: 181223 - DNA, 389 bp, Glycine max
ttagaacaagctaaacatgcatactattaactgaaacataaatatatacccacattataaaatgtgctaaaagcacgaaatgataataaaagtgttcaaaagacaggaaaatagaatataaatcctgtcatgagtcctagtgatgctttaaatgggtcatcatatggagcataaggggcaaaatccatggctgcaacatcatcttcattctcagagagctccatcaccggtgtcgtcattggggatgcctatagaatagagagctccagcacacgtgtggtcactggtgatgcctgtggagtcgtctctggagttgcctccgcagagtcctcatgagtagctaggacagtctctgggtcagcctctggcatgtctagctcttcgatatc

SEQ ID NO: 181224 - DNA, 347 bp, Glycine max
  unsure (1)..(347): unsure at all n locations
agctttgaaatttatataaagcctgaagttgttcatgttatacaaagtaaatcgagaagaacaagagaatattttgaggtaaaacaaacaagtattgtaatgctatcagttcactaggttaataaacaagaattgttttcagttttcaccaaatgattgtcaatgcattaaatttaattttttgagtgcatcctttttctgctagttacagctctctagctacttatcacaatttcacaatattcttttttgtatttaacctcacatttattataatctattactatttaaagtatatgtttttgaagggtggtggatntacatttgcaagttcaatatccatctac

SEQ ID NO: 181225 - DNA, 174 bp, Glycine max
tctagccaaatgagcgtaccctgaattaattcctttgatagcccctttgagcctatgttcccctttctttgttttgaagctcattacaagccttaagtgaaaaaccatgataccctacccttaaggaattttggagctttggaattgttttgggaataagtgtgaggggggggg

SEQ ID NO: 181226 - DNA, 378 bp, Glycine max
  unsure (1)..(378): unsure at all n locations
agctntacagcatattntagtaatgacctcctaacctagaattaaaataacttaatgccattaatctagggaattgaaaaaaacttaatggctgagtgtaactgaaatagtggcaaccaaaagtcacccccaacagccaacttcagccaccatttggtctcccanaaggctgatgcctaggatgccaattgggcccttattacaacttgaactaaacctactaaagcccttttaggtgattaacccaaaacatatttttggtcagccaactctacaaggattgggccattatttatacaaactaaacactctaaaattgagacaaagtggtgccatttaattcttctccattttggccatgatacaactcacaacctt

SEQ ID NO: 181227 - DNA, 404 bp, Glycine max
tataatatattgatatgctcgaaactaaacatcggaagctctcgagaaattcaaatggtcataacttttcacacggatgtccgattcgggtgcataatatgtcgagatgcgtcaaagttgaacaacggaagctctcgtgaaattcaaatggtcataacttttcacactgatgtttgattcaggcttataatataacgatacgctcgtaattaaacatcggaagctctcgagaaattcaattggtcatcacttttcacacggatgtccgattcgggtgcaaaatatgtcgacacgctcgaaattgaacaacggaagctctcgagaaattcatatggtcataacttttcactcggatgtccgattcaggcgtatcacatatacagacgctcacaatttgacaacgg

SEQ ID NO: 181228 - DNA, 335 bp, Glycine max
agctttataagtgcgggtctgggagactaaggtcaagtgttcgcaatatgcgaagatgatgttccaagtactttggatttggtacgaccatgctctcttgatttccagctgggaaattggcgagtggaggaacgccccggcatttacgcaacaagcataatgtaaacctttacggttttaaaaagctctatagttgggcctaggctttaaagttttcattttgttaaggctttgtgtcttttgtttttgaatctataatacaaggatctttcttcatctgttcctggtctctacccattctcattcatttgcatggttacttctttttctaaaac

SEQ ID NO: 181229 - DNA, 398 bp, Glycine max
  unsure (1)..(398): unsure at all n locations
tggtcacctcctttntcaccacatctagaatgatggggttgagtcgttgctgtggctgcctcactggcttagctccatcctctaaaagtatcctatgcatgcaggtagatgggctaatgccaagaatgttttctaaagtccatccaatggatttcttgtgcttcttgagcactagcagcaacttctcctcttgctcagtagcaagggaggcanagatgatcactgtanattnttccttgtcctcacagtaagcatacttgaggtttactgggaaggacttcaactctggtgtgggtggtggctgaacagtgngaggaaccacngtaggagaagaagaaaaacgttctcggcttgtacctcataaagcaagtaagaagatatgtaccttctgcaacatg

SEQ ID NO: 181230 - DNA, 397 bp, Glycine max
  unsure (1)..(397): unsure at all n locations
agcttggcacagtcatgccttcctgatttccaattaggaaattggcgagtggttgaacgacccaaggttttcatggcgggcataatgtaattctttagctttaaccctacaactgggcctaggctttagagtttttctccctgttaaggcgttatgtttttgctatcgagatatataatataagatctttccttcatctgttcttgcaccttcacccattctcattcatctgcatgtttatttctgttgcgattaaatggtatagatccgacgatgagtcctgcgaaggtactaataccgagggccctgacgttgattntgaacgagtagcaaaccaagttgaggatgaagaagatgaagatgcggngtttctcccggagctagaaaggatggtcac

SEQ ID NO: 181231 - DNA, 365 bp, Glycine max
  unsure (1)..(365): unsure at all n locations
tattgggcattaaagtttttgaacttcgattcanatgcatctagtgaacacaggaagctcccactccatganatggaagaattgtggtttccagcttatgagaattcccagctttataagcaaagaagtaaaatttatcatgacaaaaaagttgtcaaaaaagaaaattttcagctttggtcaacaagtattggtatttaattatagattaagattgtttccaggtaatctgaaatccaagtggttcggaccattcatcatcaaagaagttatgccacatggagcagtgatattggaggacccaactaccanaaggacatggaccgtgaatggaacataataaacactagttagatgatatttca

SEQ ID NO: 181232 - DNA, 403 bp, Glycine max
  unsure (1)..(403): unsure at all n locations
agcttattntatacacagttttcatcttgaagtatctgttgtctcacagtcgttggattcttcactctgatattcgtctaaagtcttaagtctgttatttaatgcaaacattaaatgtacatctcttcttcatgcaaaatccatggtgataggatatcgtgtcttttacatcaacaggaaagccacttttttcattataacatgtatgcaacaacaaagcgtgctttttaatgaggatcaacgtctttcagactgtagactttattcttcataggactttgacagatcccatgagaatgttttctactttaaagaatattagacatagagtattaaatgaaagtcttaatgtattacttaattgttacatcatatcgtcttacgagtgcatcatctaanaact

SEQ ID NO: 181233 - DNA, 412 bp, Glycine max
ctccgcttcatcagtggtataaagcacaagagcttcaagatttgctccttaaacctccattaatatttcgctttaccttctcttccattgtgtgttcttcattttttttctccatgtatctcctcacatgtcttgtgctaaatggttttaacatcattctttagagtttccaccgattaaacttgctatagaagctagatttgaatatctatgggtcagaattcttgttcttgttcttgaaccatgaattgtgttgagtttaggctcctttgagtttagcttggtattttctcgggctgaaacctaaatcataaaattcttacaaagaatataaaggagaagaaaacctcacaaatctagagcgacttgttcacctattggtagtttgtcatagaagacatgtctagtcatg

SEQ ID NO: 181234 - DNA, 408 bp, Glycine max
agcttcacatgtttgagtggactcgtctagtgaaacatctacttgatcctaaagggttttctcaatttttaaatgatctttggatagattcttgaaatttcattgtaggtttttgtaagcttttgagagaatagactagttagatagaagctcatgataagcatttctaagagatttagggtccgaaatttacctcatcttcttagtctgattcaaactcctcagaggttgtatttgtcatcaggcatatgtgggcttcttcgttgtcttcattagatgaggtgttgtccaggtcttccttcccactgctcataagaaccttcttttctttagtcttgaagaatttcttcttatcttgacttttctccagatctagacattcaaacttagactttttatactcgtagc

SEQ ID NO: 181235 - DNA, 427 bp, Glycine max
actcagcttaagccaggccagactcgtgcatgcagaggcttctatggaaaaatgccaaactcctacaaaaaatctgatttcaagcttaaataagtgggctggtccgtgcttgcgcgcttagcgcaaatcttaattgcttatcgcacatatgtggattttggcttagcgcgcttctctcgcttagtggataagctgaagcggtgcgcttgatgacctggagcgatgcactcagcgaacctgacagcttatcttcttctggcttcttcctcgcgcttagccactgagtgccgcgcttagcgaatgctcctaagccaacagattggcttatcgagaaggtgaaaacaacactttttccaatttgcctaattaacctgagattgagagaaattgattattaaacacacaaaacaaaaatataaattatcta

SEQ ID NO: 181236 - DNA, 412 bp, Glycine max
agcttataataagaaagtgaagtcaaattcttttaatgttggagatttagtttggaaggttatcctgcccatagatagtaaggatcgagccttgtgcaaatggtccccaaattgggaaggaccgtttaaaataattcagatctattcgaatggtgcttatgagttagaggagctaacccctcagaaacgtactttgagcataaatggtaagtatttgaaaaaatataaaccaacactgctcgaagttaatataagcatagaataagagaaatacgggaaacataaaaatggcgataacagtaaattgccacgaaagggcatgtgtcaatattacatcgagaagtagaatcgaaatacagaattcgaaataaagaaatcataagttctactaagtcatgaccaaatcttcata

SEQ ID NO: 181237 - DNA, 380 bp, Glycine max
tgtaagaattgcaagatcatcttccttgacaactccttgataattattgccatcaatacgcagagatgacaatttagagagtgatccaatactttcaaatggatttccactgaatttattaatagacagattgagatatcttaatgatgaaagttttccaaatgatattggaagagcaccaccaattaagttgttggaaaaatctagcatgtcaatatttttaaaagccccaatttgatctatcagattgcctgaaagttgtgaactccgaactgcaagtgttgtgattccctatgaaatacaaggagcaagaatttctaaaagttcattaacctgttggttgagtttgagatatgataaacctatcttccttaagttgc

SEQ ID NO: 181238 - DNA, 389 bp, Glycine max
  unsure (1)..(389): unsure at all n locations
agctngctccactatatttggattggatcataaagtttgcacccctgaatcaataacattntgttcactcattgatggcttggccagacatggcaaggtgaatgatgcctatatgctttatgaaaaaatgttagattatggtcagactccaaatgcagtgttgtatacatcccttattaggtactttttctcgtgtggtaggaaggaagatgctcacaaaatttataaagagatgatgtataagggctggtctcctattccttgctccttaataattacatggattgtcttttcaaagctggtgaaattgagaaaggtatggctctatttcaagagataaagcctcaaggtctaacttctgatgtaagacgtattcaatttttattcat

SEQ ID NO: 181239 - DNA, 436 bp, Glycine max
  unsure (1)..(436): unsure at all n locations
actcaagcttgtcctaagctccctttcatagtaagagggaatgtgcctcttcctaagggcactcttaagatcattccaatactctactggaggatccctatggatccttcgttcgagcttgtccataagctccttttcatagtaggagggaatgtgcctcttcctaagggcactcttaagatcattccaatactctattggagaatccccatgaatcctttgttccctaaaaagggaagtccaccaatagagggcatacccttganagctaatggtagccaatggaacttttctctcttcgctaatatgatggcaagcaaagagttgttcaaccttcatttcccaatctaagtaggcctcaacattatcttttccatggaaatataggaggctaatggtatcctcttgaagccttattntcttttctcttatttgg

SEQ ID NO: 181240 - DNA, 375 bp, Glycine max
agctctgagccaaaatcctgtctcaccatataccttgacccaaggtgagaatgccaatccttaccctctggagcgaaaaaaagatgagaaggaaatattttctatcaaaggaaaaaggagaatgaaattttccaatcctagaggaagcataacaggagagaatgattatttccaatcgaaggaaaaatgagaagaaaggaaattcccaatcacagagtgggataaagcgaaaagaaaagacagaatattctccatcatagaatgggagaacgattttagagatgtccataacatgattgttcctgatcattgaaactagaaaaaatgtgcctaaagatcttttgaccagatgatatctgaacaatacataattgt

SEQ ID NO: 181241 - DNA, 338 bp, Glycine max
tttaattgaatccgcaccgcccaattgtgtctgtaaatggtgtaatcgattaccagatattggtaatcaattaccagtgtatctgaacgttgaaattcaaattcaattgtgaagagtcacatcttttcataacatgctttgtgtaacggactacatggtttcggtgatcgattaccagtgacaagttttgaataaaaagtcaagagatgtaactattccaacgcgttttaggttttctcatggttataactcttccaatggctttcttgaccagacatgaagagtttataataacaagaccttgattatcatttaataactatttataactttttgac

SEQ ID NO: 181242 - DNA, 409 bp, Glycine max
agcttaaagataaattaagaataatgattgaatatcttatcttatattctgataatatattctatcaaatacaaactgattagttaggctaaaaatactgatataatatcttatcatatattctataactcgtaaattaccccacaaaaattatttacttcgaaatcttctagctgaaatttcttggacaaatttccaaattcaattgtaagcattattatcacagtttcagataaaacaaaaataacattacctctctactcttataatccatacaaaaattatcatattaaggctatgcaacttcttctgaattctttttaaccacttgatcaagcataattaaaatatccaatatccaatgtcaatggataaaaacatgtagaatgggagtataattctacatgtt

SEQ ID NO: 181243 - DNA, 404 bp, Glycine max
  unsure (1)..(404): unsure at all n locations
tctaattttattataccactagnattatattatcataaaataagtaccttttggggaacacatgtcaagattaatagagaaataaaatggtaaacatttaaattaaaggagagattaccaaactctgtattctaatgactaagacatgcgacaagatggggcaaatagtggaagcatttccatgactaagacatccattatgataggagccactgttacatcccatgacactataataaggtggagatattactttagtatgatacaaaaatattggtataattcccaattaaatagatcaagtaaaaactatggagtatagacgatggatccttgcttagacttatctaagagggaataaaagagactatactacgagtacatactcacaagatctggtaaat

SEQ ID NO: 181244 - DNA, 305 bp, Glycine max
agctattgtattcaattttgatgcgtctttaactattaaatgactcaatcggatatccgagtcaaaagctattgtcgtttgaatttgctcagagcttctgcttgaaattcgagtgtcttgatttattacgggactctatcgatcatccgagttaaaagttattgtcttttgaatttgcttagagttactgttttcaatttcgggcatctcgatatactacaggactcacttccacttttcagtaaaaagttattgccatttgaattttgtgagagcttctatattcaatttcgagcgtcctgaat

SEQ ID NO: 181245 - DNA, 333 bp, Glycine max
tgtccaaaatgcagacaataataatttttaactcggatattcaattgagtattgtaatatatcgagacgctcgtaatggaaaacagaagctcgtataaaatgcaaatcgcaataacttttaactcggatgatcgagtgggtcccgtaatatatcgagacacttgaaattgaaagcagaagctctgagcaaattcgaacgacaataacttttgactcggatatccgattgagtcatttaataattcgagacgctcacaactgaatacacaagctctaagcttattcaaatgacaataacttttgactctgatgtccgattgaggcattatataa

SEQ ID NO: 181246 - DNA, 396 bp, Glycine max
agcttgtgcatccaataccttgatgaggatgtcccatatgttcttaagactggactgattcatttgcttccaaagtttcatggccttgcaggtgacgacccgcacaaacatttgaaagaatgtcacattgtctgctccaccatgaaacccccagatgtccaagaggatcacatatttctgaaggcttttcctcattcattagagggagtggcaaatgactggctgtattaccttgctccaaggttcatcacgagctgggatgaccttaagaaagtattcttagaaaaatttttccctgcttccaggaccacatccattaggaaggatatctaaggtataagacaactcaatggagagagccttgttgagtactgggagagattaagaaactatgtg

SEQ ID NO: 181247 - DNA, 365 bp, Glycine max
  unsure (1)..(365): unsure at all n locations
tgtatactgaactgagtattgggcactcattgcatgtctgatatgccttttagaggcttgaaaagtgcgagaaaacaagctatgttttctgcatttcttggaaaacgcgatgaaatcgctaagcgagcatgctgcactaagcgagttcatcaatactcattgtatataagttttatctgaagaactcgcttatcacacttactgtgctaagcgagttcatctttntgaggatgaacactcatcctcttgctgaactacctgtggctaagcgaggctgaatcgctgagcccgggtgacttaaccaaatttcatggtgttagccttgcactaagccgaggttataggagctaagcgcatttcatcac

SEQ ID NO: 181248 - DNA, 288 bp, Glycine max
ctttgaattcccatgttaatagctcgaggaaatcagtgatgtgcacaggtaagctattacatcttctggtcatcgattaccagagagttaatttgttgaaaaagactttttaacttatctttcttggcccaaccttgtgatacgttccttggaattcccttcctatttaatataccctctctaagactctagagactaggttgatcatccatcttgaatatcattaatttctttgtcctgaataaagcttcgaacacatcgtaaactttggcatcagtgaaacattca

SEQ ID NO: 181249 - DNA, 240 bp, Glycine max
  unsure (1)..(240): unsure at all n locations
agcttntcggtatattatgcacctgaatcagacctccgggtgacaagttatgaccatttgaatttctcgagagcttccgttgttcaatttcgagcgtctcgatatcttatgcgcttgaatcggacctccgagcgaaaagttaagaccatttgaattgctcaatagcttccactattcaatttctagcgtctcgatatattatacgcctgaatcggacctccgagtgaaaagttgtgacca

SEQ ID NO: 181250 - DNA, 388 bp, Glycine max
  unsure (1)..(388): unsure at all n locations
tggaaggatgcttcaatggtggaaaagaaagagggagataatgagagaggggggagcacgaaattgaaggaataaaagagggggagaagtagaacttttgagtgtggctctatagactttcattcactaaagttacaacaagtggtacacatgcttctatttatagactaggtagcttccttgagaaactttcttgagaaaacttccttgagaagcttctttgagaagacttccttgagaagctagagcttagctacacacacccctctcataactaagctcacctccttgagaagcttccttaagaaaattcctaaagaagctagagcttagncacacacacatctctaatagctaagctcacctncttgagatgagaagctagagc

SEQ ID NO: 181251 - DNA, 149 bp, Glycine max
  unsure (1)..(149): unsure at all n locations
agcttgagattaagaantgttgaacggtgagacttcctgctatcattgttgaccacagagtgttacctgaagatatgacgcgcgggtcaagacaccttgaggacgttaggaggggagctattgcccaaaaccaattttgaccaatcccg

SEQ ID NO: 181252 - DNA, 366 bp, Glycine max
  unsure (1)..(366): unsure at all n locations
tccanagattggaatcgcctggtatcatactgagctgttggtctagaagcagagctcttcctcttcctggatgccatctacaataaaaaaaaaaagaaccattggtttattacactagaagtctatctaaattaaaactgaaattaaagactgaaattgagaacgtgcgcttagcgagacgcatctcacttagcgcgccttatgaaaaacaacacaccaacttaacgtaacaggccgtgcttagccggtgataacatataaaaaaattctgcataattggcttagagagacaacactcgcttagccacatgtttgtcattaatgacgtgtacagcagctgtgcgcacacggtggtcgctcacccac

SEQ ID NO: 181253 - DNA, 397 bp, Glycine max
  unsure (1)..(397): unsure at all n locations
gnnctagtataggcatgtcttcctccattattcagacacccgctatgaggatgctactggaggctttattccgttccggacgcgagttcactatcgctaccccatagagctcccccaaatgtgttccgggcatacattctcttgcgagccctctcggatcttgccaagggcttttggagacatgtgattcttttgcagtgacccggcacactgcttacgaacgagtgaacccgcccacttgaacctgtccgtggcgagacctgccttacctaacttgctatcgagagcttggacttctttggcctcttcggtgcttcaaagtgccttcgctgacgacttttaacttggcgagcccatgtatacctcgtatgcgaacttgtaggctgtcgtggaaccg

SEQ ID NO: 181254 - DNA, 300 bp, Glycine max
tctccccttggcacatcattagccaagaactcggaaatcaacacagttataacaatgggagtagcagatataagtatcagagtattaaatacaataagccagactctttaacaagaaataatcaaaccagaattcaaataacataaaatgtcaacaaccacaaaacatccaagactgaaattttaaaacacaagataaataagcaaagtacttagcataataatgtagattctaagaaactaaaagccaaaatacacggcttataaaagataaataatcagaacctaaaatctaagaaga

SEQ ID NO: 181255 - DNA, 408 bp, Glycine max
agcttctatagaagcatacatagcatgatgcttttgatgatgccaaagatgaaagctattcaagattgatcaaagtcaagatcaagaattcaagagaaacgatgaacaaattgtacatagtatgttaaaagaattccttataaaagattgcataggcttggccttaggttaactcaacaaaacatcctacaaagttttaaagtgaaactctgtttttaaaagaaatgattttctctctggtaatcgattatcagaggttgtaatcgattaccagaagccaaaatgagttttaaacagttttgcaaacttgtgaatttgaattttgaattgtgtaatcgattacacacaattactagagataaaactgttctaaacatcttttagaaattctgaattaaattttaaaac

SEQ ID NO: 181256 - DNA, 280 bp, Glycine max
tcggaagaaagtgatgaggtacaagccctaaaggcagatcttgaaagagcccgggtagtcgaagagaaactcaagtccatagccatcaaagtctgaaaagagtatgatgaactaagggacgtcaatatggccacagctgaagcctttgaacgaaaaaccaagaatgccccgaaagaaaaacacgaccaatacaagttttgaggggctttatagggcaacaatagtgagctcaagctccgaagaggtgaaaggaatcatcacgggtcaaaggaatgatctt

SEQ ID NO: 181257 - DNA, 410 bp, Glycine max
  unsure (1)..(410): unsure at all n locations
agctntatggccatataaacactaaggcttatggtttttttttccccgttcaaatcaaaccaatgcttctaacaatgctctttttatcaatttacgaacacattcgagtccatttaggaatttgggaaaaaatttcattgcattcaccctttaggggcacacacattttttttttcaaaaatccatttatgttctgacccgtgaattttccaaagaaaactggcggtcatcttcttttaaaagcgtgttagtttttttcttttggctttttctttcaatcaatctcttttaagcaaaaatgattagaaaaggtttgcaacccgggcacagttggcatctgagattacgctttatcggaaggagtaaaaggcgtgcggataaaatacacagacccctattttggcatttaa

SEQ ID NO: 181258 - DNA, 412 bp, Glycine max
  unsure (1)..(412): unsure at all n locations
ngaagtgagaaagtgtggaagagtcagtcttcctacttttattcgttgaccacagagtggtacctggagatatgtcgcgggggtcaagagaccttggggacgtcaagtggggtggtattgcccaaaaccaagcttgaccaatcccgacccaacccaagcatagtcagtcagtgagaacctgtgacgtacctaaacaggcgagctcctggcagtcaaccgataaaagaacaaagaccacaaagcaaggaggcttgtgtggtggctggccagctatggatcttgagtgatatttgggttatggcctctggtaatcgattacaaagggtgtgtaatcgattacaaggcttaagaatggtgtcaggaagttgagatggcctctggtaatcgattaccaaggggtgtaatcgattac

SEQ ID NO: 181259 - DNA, 302 bp, Glycine max
agcttctcgatatattatgcgcctgaatctgactttctgtttcagaagttatgaccatatgaatttctccactgtattccgtgtgacaagatatgaccatttgaatttctcgatagcattcgttgttcaatttcgagcgtctcgatatattatgcgcctgaatcggacttccgtgtgacaagctatgaccatttgaatttggcgagagcatgcggtgatagatttcgagcggctcgatatattatgcgcctgaatcagacattcgtgtgacaagttatgcgcatttgaatttctcgagagca

SEQ ID NO: 181260 - DNA, 257 bp, Glycine max
tctcgatatattatgcgcctgattcagagtttcgtgtgaaaagttatgactcttggaatttctcgagagcttccgatgttctatttcgagcgtctcgatatattatgcacctgaatcggacttccttgtgacatgttatgaccattttaggtactcccgagattctggtgttcaatttcacacttctcgatatattatgcggctgaatcagacttccgtctgaagagttatgaccatttgaatttatcgggagcttt

SEQ ID NO: 181261 - DNA, 199 bp, Glycine max
agcttgagatgaggaagtgttgaagggtgaaacttcctgcttttattcgctgaccacagagtggtacctggagatatgtcgcgggggtcaagaaaccttggggacgtcaggtggggtgctattgcccaaaaccaagcttgaccaatcccgacccaacccgggcataatcgctcaatgagaacctgtgatgtacctaaac

SEQ ID NO: 181262 - DNA, 427 bp, Glycine max
  unsure (1)..(427): unsure at all n locations
tgcctgtccgatgcagcagtaatgatggcctgagttatgttggggaacggttacgaactcggaatgggtttaggcaaagacaaaggcggcataactagcctgataaatgccaaaggaaatcgtgggaagtatgggttaggctataagcccactaaggcagatgtaaagagaagcatcgcgggaaggaagagcggtagtcaaagctcgcggttgagacaagaaggtgaaggaagcccgccctgccacataagtagaagctttataagcgcgggtctgggggacgaaggtcaagtggtcgcaatatacaaagatgatgttccgagtacattggatttggtacgaccatgcnctcctgatttccagctgggaaaatggcgagtggaggaacgctccgacatttacgcaacgagcataatgtanaccttta

SEQ ID NO: 181263 - DNA, 402 bp, Glycine max
  unsure (1)..(402): unsure at all n locations
agcttctttcggaccttgaacaagcaatttactcctctttcagaaccatgctatgtgctcgcgactggtccctttcttcccttcgcaacttgagttcactattgctaccccatagagctccgcgaaatttgttccggccatactcttccttgcgagccctcttggtctcttgatcaagggctcttgcggtaattgcattctcttcccgtaacccggcacactccttccgaacgtgtgtagcagccaacttgaacttctccttggcgagttttgcctttcctaacttgcttttgagagcttggacttcttcgtcctcttccggtgcttcanaattctcttcgctgacgaactttaacttggcgagccaatctatacctcgtatgcgaactttcagccattcgt

SEQ ID NO: 181264 - DNA, 347 bp, Glycine max
  unsure (1)..(347): unsure at all n locations
tgtgcaaatcaaatcactcctacatttcatctctagcatgcattntttctttacccactcctcacgtttggttttttaaggaaaaacaccataactaaacgcgccacaaggcattcctatcgcaccagatccaaatctaaaatgatgggtgatcaagaggagacacaggaacagatgaaagccgacatgtcggctctgaaagaacaaatggcctccatgatggaggccatgttaagtatgaagcagctcatagagaagaacgcgaccaccgctgccgctgtcagttcggctgccgaagcagacccgactctcttggcaactgcgcaccatnctccctcaaacatagt

SEQ ID NO: 181265 - DNA, 404 bp, Glycine max
agctatataattggataatatgtctcaccaaaaagtactaagagacatcatattccccaatacaaataaatataacagaaataaaccataataataaagcctcacaaaaagaaatactatgagaaaccatcattgtaaataaagatttaagccatttccttttgttcttgctcaccatcattgaaaaacacaacttctaactctggttcatcaagagataactgagcaacctcaagagttccattgtcatcaagtggaccaaattcatcttctgcaatgtcccacattttagttttcccttgattgtattgtggggaatttctataaaggaggtgaagattactatgaacacaacttctaactctgtgtcatcaagagataactgagcaaccttaagaattcca

SEQ ID NO: 181266 - DNA, 405 bp, Glycine max
  unsure (1)..(405): unsure at all n locations
tgcaatggaaaatattgnctatttatgactctgagggctatctaaacacacaaaccaaggccatgatggaaaatatgtaaggtagaaatgatcatagatattggcggaaatatttacttctgtaactgctactaagcttgcaatggaagacattgtatatatgttgataaattttccattcactaacacaaatttgtttaatttgtacgctcaaatctattagctcatgtgttcaatttgaaatatgaaatatctattttacatcttttatgtggcattatgtaaccttgtccagcacatcacaaattnttctttgatttctcttcgccatagagtagaacctgtctatatagttctactttgctgtagctaaaatcaagaataaagttgcgtaagccatcaatg

SEQ ID NO: 181267 - DNA, 324 bp, Glycine max
agcttctatggaggctggatctttgagcttcaatgaggtccttcaatggtgaatggagatgcagtggaagataaaggagaagaggtgagaggagtcgccatccacctaggaataagccatggaagaaggagctttgccaccaagaatgtgccttggataagaagctcggagatgatgcttcaatggaggaaaagaaagagagaggggggagcacgaaattgaaggaggaaaagggggagaaaagttgaactttgatttgtgtctcacaagactctcattcatcaaagttacaacaagtgttacacatgcttcaatttatagcct

SEQ ID NO: 181268 - DNA, 351 bp, Glycine max
  unsure (1)..(351): unsure at all n locations
taaatgggtttagttnttctcagaattggggataaactttggacaccaagttgtgcaaccaaactccacatgacagttcacttttgcaacacctaatgtcactgcactactactctgtttcactttactactcctttgttttactactactctattctattgctaacacttattctatataacaacattaacaagaccaatgcaatatgcaatacgcggagataccttacggttatccgcacccttttgtcatccagaggcggcgggcccgatgacaagcagagaccaagtttggtcattctgcacccaagatacgcggagataccttacggttatctgcacccctttgct

SEQ ID NO: 181269 - DNA, 404 bp, Glycine max
agcttcatgcttaagtatgtatggcaaaatcttattactgttgttcaagacatacaagtgagcttgtaacaaatcttctagacttggagtgatcacatgtagtcctcttgaacccttaccacccactcaggaaggccaacaggtttagccttctcaatgtattttgaacaaaattcaatggcttcttctgcaatgtacctttcaacaatagatgcttctggatgatatagattctttgtatacccttttaagatcttcatgtatcgctcaaccgggtacatccaccgcaaataaacaggaccacaacatttgatttctcttaccagatgcacaatcaagtgaattgtgatgtcaaaaaaagcaggggggaaaatacatctccaactggcacagtataattggga

SEQ ID NO: 181270 - DNA, 414 bp, Glycine max
  unsure (1)..(414): unsure at all n locations
tcaagaataatggcctcaacaaacttcttattcatagaaggaaattcaattaataggcctcctacttttaatggagagggttaccattactggaaaacccaaatgcaaatcttcattgaggcaatagacttaaacatttgggaagccgtagaagtacggtcttatgtacccactatggtggctggaaatgcaacaatagaaaaacctacagaagagtggactgaagatgaaagaagattagtgcagtacaatttaaaggctaaaaacatcattacttttgccctaagaatggatgaatattttagggtttcaaattgtangagtgctaaggatatgtggcacactttacaagttacacatgagggcacaactgatgttaaacaatctangatacatactntaactcatgagtat

SEQ ID NO: 181271 - DNA, 374 bp, Glycine max
agcttgaaggtgtgtaacccaccattgtccatagtagaatactggtaatgtgtctactatcattgtcatcatttttcgtcattgaggtgccacttgagctgccaagttctccatttttgggcgtattctttgaaagatccatgccccctttttttgcacatgaattgtagttgcatcctatctgaagccattataccaacactgcctaacgaaggcaaccattatgtcctcccaggaatggactcgggaaggttccaagttagtgtaccaggtaacaactaccccagtaagactttcttggaaggaatgtatcaaacaattctcatcttttatgtatgcccccatcttccgacaatacatctttagatggttct

SEQ ID NO: 181272 - DNA, 407 bp, Glycine max
  unsure (1)..(407): unsure at all n locations
tcttagtctcagctgatgaagatgaattcgtggctacttcatgcactcctctaatgaaaataacatcatttctggcactaaattgctgggagtttgaagccatcttcttaattaaatttctggcttcagcaggggtcatgtctccaatggctccaccactggcagcatcaatcatacatagttttttaaaatctctcctagtattcatataggctctttccactgagttgcctaatgcatgaaatatcctttctgatggccgtggtcctggaagcagggaaattttttttctaagaatactctcttgaggtcatcccagctcgtgatgaaccgcggagcatggtaataaagccagtcctttgccactccctctaaagaatgangaaaggccttcagaaatatgtgat

SEQ ID NO: 181273 - DNA, 400 bp, Glycine max
  unsure (1)..(400): unsure at all n locations
agcttgagggttctcttaactcaatttatgcaagtctccatctcaaatcacaaaagcaccgaatcgacaattaaaaatcttgaagtgcaagtaggccaacttgcaaaagaacttaggagaagtctaatgggaatttatggctaccatggagcctaacccttaggagcattgtaaagcagtgctcataaggagcatgcatgaagagggcctagctcatgatgttgttaagggtgtagttgaggatgatagtaatgatgaggaagagaaaaatatagagagagagagagagagagagagagagctgtgtgtggaaaatgcagacnaaatgatgaaaataataacaattgtcttaaggagggtgggtattcatgaggtcttaattcaaaaaccaagagtcatg

SEQ ID NO: 181274 - DNA, 369 bp, Glycine max
gttttagtttcagatgatgcttatgggtttgtagctacctcatgcactcctctaatgactatggcatgatttctggcgctaaactgctaggagttggaggccatcttctcaattaaatttctagcttcagcaggagtcatgtctccaagggctccaccactggcagcatctatcatacttctctccatattactgagtccttcataaaaatattggagaagaagctgttctgatatctgatggtgggagcaactggcacatagtttcttatatctctcctagtactcatacaggctctctccactgagttgtctaatacctgagatatcctttctgatggctgtggtcctcgaagcagggaaaaaattt

SEQ ID NO: 181275 - DNA, 136 bp, Glycine max
  unsure (1)..(136): unsure at all n locations
agcttgtcagctatgtggagcccactcctagtggctattagatgactctataaggcatttgcgaaggctatgaagcacaagccgaagcattccanattggtaattcctcgcgctcgatcccttacngagaaaccta

SEQ ID NO: 181276 - DNA, 243 bp, Glycine max
tataagatactcaagcttagcgaatcagcctcgcttagccacaagtatctcaatagtgaggatgagtgttcattctcccaggatgaacttgcttagcgcggtaggcacacttaatgagttcttttgaaaacgcatatattcaatgaattttttatgaactcgcttagcgcagaatgccggttagcgagttcatcgcgctttccaaaaaaaaacacgatctacacactcccctttcttccattt

SEQ ID NO: 181277 - DNA, 114 bp, Glycine max
  unsure (1)..(114): unsure at all n locations
agctttgagcaaattcaaacgacaataaattcttactcggatgtctgattgagncccgtaatatatcgagacgctcgaaatggactactgaagatctgagcaaattcaaccgac

SEQ ID NO: 181278 - DNA, 152 bp, Glycine max
agcttataagaacaacattgccttaattatttccaaatatgcatgtgaattaggacgcatcaacaagaatcaagccaaggctattgtgcaaccaatcaatggggcaaaacacaccaaatgattataatgatggatggctcaaaatctcacaa

SEQ ID NO: 181279 - DNA, 84 bp, Glycine max
  unsure (1)..(84): unsure at all n locations
tgaaggtgtatagcccactcatcttttcatagtagaanatcgttaatgtggctactataattatcattgtttctccgccattga

SEQ ID NO: 181280 - DNA, 68 bp, Glycine max
  unsure (1)..(68): unsure at all n locations
agcttgcctcanagaggtccaggaaggataaggcggccgaaggaactagttccaccccggagtacgac

SEQ ID NO: 181281 - DNA, 81 bp, Glycine max
agctttaaaatttgaattaaaacattcatcatattactggtaatcgattaccatatatgcgtattcgactacacagcgcac

SEQ ID NO: 181282 - DNA, 303 bp, Glycine max
tgttaaagctttatatggattaaaacaagctccaagagtttggtataaaatgacgcgctcattcgtctggaatgctaacactctcttaactgttgcgaacagtgcaccttcccaaagcgaatcttagaacgatggttaattcttaagaatcagcgaaatctaaggcagctaaaaaaccccaggggaaagcagcaacaaatggtggtcttatgccatcattttggaatgatgttgcttatgctttaaaggctatggggccccttggaagtgcgttgaggttggtggataatgaaaaaaaaccca

SEQ ID NO: 181283 - DNA, 92 bp, Glycine max
tgtactagtcatatatatgttacaaaacaacgaaagcttatattgaatcgattattgcagatacaggaatacttaaacaaacctgcccatta

SEQ ID NO: 181284 - DNA, 320 bp, Glycine max
ggggtgaacctagctcatgcttttatacaaacggtcatcaagtcaagtctcaatatggaaggaaccgtcttagcaaattggggccaaagatgaatcgagtcacatcactgcttcgtctactggcaagcatatttaggattattgatgtccttgttacatccaatttcaccttgaccaaaatgtcatggaccatgttgaaaatctaaattgattccaccccatatcctgcgtaaaaattcccacatactttcactgtgcatcattcgcatacatccatgcttttcattggttgcattgctcattgcattctctccttgaaa

SEQ ID NO: 181285 - DNA, 383 bp, Glycine max
  unsure (1)..(383): unsure at all n locations
gagagggtgcttcaatggaggatataaaaatggagagaaagagagaggggggagcacgaaattgaaggaataaaagaggtagaaaagtggaactttgaagtatgtctcacaagactctcattcatcaaagttacaacaagtgttacacatgcttctatntatagactaggtaggttccttgagaagctctcataagaaaacttccttgaaaagcttctttgagaaaacttccttgagaagctagagcttagctacacacacccatctaaaaactaagctcacctccttgataaaatacatgtaaatacaaaaaaaaagtccctactacaaagactactcanaatgccctgaaaacaaggctaaaaccctatactactagaatg

SEQ ID NO: 181286 - DNA, 447 bp, Glycine max
accgcggctgcagcttgtcctaggttctttgcctttgtttcttttttttaggtaaatgagctccattcttcatcctagacttgattcttcttcattctcttggtctaacttccctaacaacttaaaactatcattttggtttactcatgaaggaaaacattgaaaaactcaacattcttcgttctccttcaatatttcttgagctcatcaagaggtaaggggggtcttgaacatgctattgctttgaaatttttgagcatattgtcatgtcttgaatctatgcgttgagctattttccttgattttgatgccaaaaatgagttctttgcatattaaaatataaagttagccttaaatttcacttaaatcaaagtttcctagcacaagtgcaaacaaaactagtttaaggacttttatgcaaatgaaaaatctatcacgaatttggat

SEQ ID NO: 181287 - DNA, 447 bp, Glycine max
  unsure (1)..(447): unsure at all n locations
cacctgagctgcagctgcaaccaatgtcaccactacttaggagatacctttcggtngnnncatataaacctcttcctctaaatcgccattaagaaatgttattttcacattcatttgttgtaactcaaggtcaaaatgagcaactaatgctaggataatacaaagagaatcttttttatatacaggagaaaaagtctttgtgtactcgatttcttctttttgagtaaatctcttagcaacgagtcttgccttgtatctctcattgttgcctaatgaatctcttttggtcttaaagacacatttacaaccaatggcctttgccccattaagcaactctacaaggttcaaaactctattcctctgcatggaattcatctcatcatggcatcataccataaatttgactctttataactcatggcttgatcacaaagtttgggatcatta

SEQ ID NO: 181288 - DNA, 337 bp, Glycine max
tcgctattgtatagcgatgttactacatgggcaggacataaacatgttccctggagcactccaatgataaaatgtgtggtatatggcactatgcctttgttcaagacaaatactcggcataagattattttcgtatcaaaatagatagacggatcagataaactgactgaaggtcgagatgacctataaaataattcttttctaatcgccgagaacatgaatgaaatgcatcttctgaaaagagataatctcacaaaataaactgcgagatgtgagagtcttactgtctcaaaagcaatcaatttgctgataaataaatccaaccaatacacaatct

SEQ ID NO: 181289 - DNA, 321 bp, Glycine max
  unsure (1)..(321): unsure at all n locations
cccgacatccaaacaaacgattaaacggaaaagacaacatagctggcgatggaatacctcacccacacaagtgtatcacaacaaaatggctattctcaaaagaaacacatcagccttttaccactccaaaaccccgtgagatcctaagcaattcaagagattatggccacaacaaagaacaaatcaccaatatgtgtaagggaaggctagagagacaagggaaagggtaaccaagaaaaaggctaaccaatgtttttaggcacacatgacggagaaaaaatccagaatntaggagatcaaggaacaatccttcatgcaacc

SEQ ID NO: 181290 - DNA, 422 bp, Glycine max
agcttctcgtcatgattgttggcttaaagtattgttttctttttacatgctcttcaaatgaacaacacttggactctaaccactctaccgcctcataaaactgccatcgggtgtcgctgggtgtacaagatcaagtacaacgccgatggttcagtcgaacgttacaaagctcgccttgtggccaagggatatactcaaatggaaggcctggattttctggacacgttctctcccgtagcaaaactcaccactgttcgtttcctgttagccttagcaactcttcatggttggcatttgcgccaactcgatgtcaacaatgcttttctccacagcgagcttaatgaagaggtatacatgcaacttcctccaggtctcttggttgataatcctcaccaggtatgtcgcctgcaacgttccttata

SEQ ID NO: 181291 - DNA, 274 bp, Glycine max
cggataaagaccactaaatgagttttattcccgataacatcctggcaagtgctcataaatgcaagaggtgaaatgacacgttgctagtctttggtctgagaacggaatgctattggtacccctatggtggagggggattggtagaatggtttaagtaccgagcaacgaaaaaccggatggatatgagagccttctagaaactgtaatttggaagcccctttgccaataccagaaaagatcctgaatgggccataaaaacctttcgccaatttgg

SEQ ID NO: 181292 - DNA, 402 bp, Glycine max
tttgttattgagttgaataagcatattcatgtgctatatgcataagtttcaataaattcttccttgcttgtcaatggtggtctcaatttttagaaaagaatgtgaaaggaagaaaaatttatctcattctaaattgattatggattgcatgtatgtgttgtgattaggggtaagaataggcttatgccttcgacagggacctgtggcctaacctacattaggcacaaactttttcaaaaataggtgagacttacacttttataaaagtctttgattataaaagatcaagttttaggccattcaaaaagtctttttatatctagcaggccaaccaatttaactaagtataaaatataatcattctattttattattattgtaatgtctccaatcatacatttg

SEQ ID NO: 181293 - DNA, 414 bp, Glycine max
  unsure (1)..(414): unsure at all n locations
agctttgaagttagatatattttattattttgatacatgnnnacctatngggtaagtatattttgtagttagttaattgagatttatagatgtatataagggttttatacttactattttgttttggttagtgcatgtatattacatagagtttatattgttattaattaattgacatcgaagatgttatagttttgctatgatatgattttgaaaattatttgagtcaacgtatatgtatatgggttgtgtcttgtaaacattactatgaacgtataatatgatatatgagcactactaanaaaagttgtttttacgacacactaaccacatcggtcctcctaaaccaatgtggtataataagaggtggcaatttcgtaattatgaacttagaaaacaaagacggtgatgtac

SEQ ID NO: 181294 - DNA, 473 bp, Glycine max
  unsure (1)..(473): unsure at all n locations
tgcacttcttcgcttctctaaggactattgcttctttctctttatgccntatagctnccggagccaagttatcccttggcgtctacacttcaaccacttgtgatagccgtcgatgatgccattgctacttcccctaatctccttatctttcccttccactatattccacgctctacggattctctgaagtatcctcgcattactttcattgaaaccttgcacgatgaaaggcgatttgatctcctctgatggtgcacctctcatagggtggcctagcttatggagacgatggagacctccggctgtcacggcatatgaaacttttttctaccagaatacatatataataattgcgattctggtcaccggagcaaaagttatggtcgtttgaagttctgacaaacaccaaaattgctacttttgtggaactccaaatctaccaaacaaaaagcatatctgttttcccacaaata

SEQ ID NO: 181295 - DNA, 430 bp, Glycine max
  unsure (1)..(430): unsure at all n locations
ncaagctgaatgctctgtggagtgttctcttatatataagaatattcaaggggccacaactatagaagtgcaaggcaaatgtgagacatactctcattaacatatgaaggtttgacacagataaaacataacaagctcaacttgttaacacataagtatgaactcttcactctggaagaaaaggaagatatacaaaccatgtttggacacttcaaaccatattagatgaattacgttgtattgataaaacatttgataattatgataatattgacaaaatactaagaattttatccagaaagtggagactataggtaaccaccttatgagcagtgaagaacctatactccatgtccattgaagaactaataggaacattaaaggttcatgaacaagggaattaaaaagagaaaggcactgactctaacag

SEQ ID NO: 181296 - DNA, 470 bp, Glycine max
  unsure (1)..(470): unsure at all n locations
cactctgaaggcttctaccaacactcattccataggtagaggtatgggtaaaggcacaggcagaggaaggggtcaaggcccatgcacaaccaactatataggaaatcagcagcatcaacaagaaaaagaaagaggaagttggagccatcatacaactaactacaagttagcaaacaagtctaacattgaatgttttaaatgtcatcggttgggccattacaaatcagagtgcaggaccaattngtccaatgagcaaggggaaaaatctaactttgttgaaatagaataagaagaagaagtgtgcctcttaacctcttgtcaagaagaaaaggaatcaagtaaaagtttgtgatacttacacacaacttgtagcaatcaaagatggaaaatggatatgagtcatccttcaaagatggagcatgcaatattcaagattcaaagtcgattataattgctgaagccacacagac

SEQ ID NO: 181297 - DNA, 429 bp, Glycine max
  unsure (1)..(429): unsure at all n locations
agctntgatcacatttctcattctagacttacttctcattctgacgagtcagtttagttaggggtagcgctaacttagaaaatccctcaatgaatttcctataatagccggccaaccccaagaaactttgaacttcggttggagttgtcggttgttgccactccataaccgactccactttaatcgagtccaccgcaaccccatctttagaaatcacgtgccccaagaactgcactttctctaaccaaaattcacatttcgacaatttggcaaacaatttcctatccctcaggatatgcaacacaattctcaagtgcttttcatgctccttcttattccttgaatacactaggatatcatcaatgaacacaaccacaaactgatctaagtaatcatggaatatacggttcatatagtccatgaagatag

SEQ ID NO: 181298 - DNA, 425 bp, Glycine max
actccatgataatttttgtgtgctccatccacaggaaggggagtcttttcatttcttgaaccctaaccctgttgtctttggaagctaagcttcattgcatgttgctttaatagctaaaatttcgtatccacttccacgccatgaactatataatatgtcgtctctatggaaactttaaagttaaaaatgagcgcttacggtgataaaacctacgggcagccttaaatttcactcaaatcaaggtgtcctagcacaaagtatgaaaaaaaacaagttttacgatttaggacattctattggataaaacatgtcatgaaactaaacttggagttggagctcgatggactatcttgctcaatacttcaccaaaaaatgagtctgtaggcgcaaaataagggtacatttaaactcataaaaattgatcc

SEQ ID NO: 181299 - DNA, 421 bp, Glycine max
  unsure (1)..(421): unsure at all n locations
agctnttatttacaattcatgatagatgctattatcctaccacacttttatcatcaacataaagaaattaccttggactgtaactccttgccacatatcttccatgctcaggagttatgcgaataattagactatgtggatcattaacaccttctgaaataccagcccaccaacccacctgcaagagccattacatgtcaattttaaagaaattttattgaatactgataagtcaagagataaaataataaaattacaagtcaaaatcagatgttaaaagcagtgcaatttattggcagggcataaaacactaaaatgacacaacaaggcattaatccatttgaaaaataaataaataaaggatacaatctgccaactcaattgcaaatgaattagaattgtaactaaaccaaagtaataa

SEQ ID NO: 181300 - DNA, 268 bp, Glycine max
  unsure (1)..(268): unsure at all n locations
ccccccccccaccatgacccgaccccccccccccgccgggttatgaactgaaaccccctaaacacccccgagagcnctcaaaatattttaaccaccaagcaccaacaaaaaaaaaaccaagcaaaaaaaacaaaaaacacaacaaaaaaaaaacaggaaccacagcaaacaaacgcgcacccacgcaataataaaccaaaaacaacaaccaacggaacgccaaacaaaaaaaaaaaaccaccaaaaaaacaaaaaaaaaacaacgaga

SEQ ID NO: 181301 - DNA, 383 bp, Glycine max
agcttgccgcccagctcgcccattcgagctaggttgcttcctccagaagcaacaaccttctggaggaatcttctggagggcccaagtgggcctggttgctatttacacccccctttttactaaatgcaccccccttttctatttttttgtaattctttttccgtaacgttacgtaactttacgaatttcgaaatgatacttattttccttccgcaaggttacgaatccttacggattatgtatttactcttttttggctttcaaagaagttacggaaactcacggattgctcaaaaacacgtcttttcgattttcgccacattacggaatttcacggattacgcaagcctgcttccttttggatttctgagacgtctcgggac

SEQ ID NO: 181302 - DNA, 435 bp, Glycine max
cgcttgatgaaagtatagtctgagggtatccaaatactcttcttatacaaattaaaggtgggtgttaacacatgatcatggtaggtggctgggtctgcatgaaccttctcccttaagggtataaattcattatgcgattgtaattccttagacagatcttcaagaaatgcaaagtgaggtattgagaggatgaaaaaccaggcacttggttcctctgaacatcgtgataacgcgtatgcaaccatgttagtttcgtccgttctatattgtatagagtaatcaaaacccaacaaacatgccaaatatcagtgttgcttctgtgtttgaacagcctgattcattaattcttttaagcttctatgatcccgcaaaatttcaaagtggtgccccaataggtattgcctccacttcttaacagcagtggtaatggcagct

SEQ ID NO: 181303 - DNA, 433 bp, Glycine max
  unsure (1)..(433): unsure at all n locations
agcttcttttaaactacacaaattnaattttctaaggactntatctngacagagctataaaggtgcgtatttattaatataattcaatcatttcatgcatgctttcagttgtgtgtttagatcaatgttctcattttgtagtctttaaacctgcaaattttgtatcttgtctgtaggggtttggatcccttagcccctctcttcttttcactgagtgatatgccttcaaatctatcagtgagatcctaaaccatattcaatctgtaatnagttaatgtgtgtatatatttgtgcaactcttttattactacctccttgtttttgcctcttcacctttcaacccatccatctaatgttgcatgtactctgccctaaattggattatgcacgatgatatttatctatggtggatattgatctggagtctcttacc

SEQ ID NO: 181304 - DNA, 397 bp, Glycine max
  unsure (1)..(397): unsure at all n locations
agctntgcttctacactaccagcaacaattttgttttttatataaaaactctagaggagggttcactgttatcaagcaagtcggagacccagcatgaccacaaattcacctccactccttatgttcccatggacccgggtatagggccccttttcaactcaccgggtgtacaaatagtgttggtgtttatgtgcatcaaatgaataaatatctatctcatgcttacatttcaaaagcacactaaaagcaaaaaagagttatatacaagaacgtaaaggaaataaaaggaaaccgacaaaagaggaagtcatgatattgcacgagattagaaggcctaactctctaaaaacagtccccagtggagtcgccaaatgtcgcaacctacccttcggcggga

SEQ ID NO: 181305 - DNA, 418 bp, Glycine max
  unsure (1)..(418): unsure at all n locations
cacctgcngcatgcaagccttatgatgttgaatcaagatagaattctgtgtttttgattattaccaagacgctgacacaaggccctctagaatgaattctaggttgaatccagaacactctccgaatcattaggaaatctgttttccagattcaagaatcaattttcaacatttaagtttcaagaatcaagaataatcacgttgaagattcaagaatcaagaaaagactctttctagataagcactaaaaagtttttcaaaacattgagtatcacatgaatttttcacaaaaccttttaccaaagagtttntactctctagtaatccattaccagtttattgcactccattaccagcaggaaagattggtttccaaagctctcacttgaatttacaacgtctcaattgatttcaaaat

SEQ ID NO: 181306 - DNA, 393 bp, Glycine max
  unsure (1)..(393): unsure at all n locations
accagntccgctcccgagtatgacagccaccgctttaggagcgctgaacaccaacagcgcttcgaggccatcaaggggtggtcatttctccgggagcgacgcgtccagctcagggacgatgagtatgccgatttccaggaggagatagttcgccggcggtgggcatcactggttacccccatggccaagttcgacccagacataatcctcgaattttatgccagtgcttggcctacggaggagagcgtgcgagatatgagatcctgggtgaggggtcagtggatcccgttcgatgcggatgctatcagccagttcctaggatatcctttattgctggaagagggccacgagtgctagtatggccacaggaggaaccggtccgatggttttgat

SEQ ID NO: 181307 - DNA, 440 bp, Glycine max
  unsure (1)..(440): unsure at all n locations
actgggctgcagcttgaggtcttggatctcncacattggattttnttcttcttgaagatcaatagcagcgtaatggagatggaagaaagatgattggagacgccacttcaaggagaagatgtgtcaagaaaaaactcaccaccataggaagtcatggataagagcttgaaggtaggagaagatgaatggaggaagagggagagaaggagcaccaaattttgtgcctcaaatgagatttcaactttgaagtgtgattctcaaattatcaaagttgaaaaaatgcacatacatgacctctatttatagcctaagtgtcacataaaattggagggaaatttgaatttctattcaaatttcacttgaatttgaaattcatgaatttgtggagccaaagtttggagccaaaatttcactaattatgattagtgagatttagctat

SEQ ID NO: 181308 - DNA, 400 bp, Glycine max
  unsure (1)..(400): unsure at all n locations
agcttggagacgatgcttcaattgttgatttataaagagggaaagaaagagagaggggggagcatgaaattgaaggaagaaaaagagagagaagttgaactttgagttgagtctcacaagactctcattcatcaaagttacaacaagtgttacacatgcttctatttatagactaggtagcttccttgagaagctttcttgagaaaacttctttgaaaagcttctttgagaaaacttccttgagaagctagagcttagctacacacacccctctcataactaagctcacctccttgaaaagcttccttaagaagtgtcataccctaatttcgtccggggacctttgcttgatgacatgcgactnttgtttggtccttgaaggtgcttggccccatcatta

SEQ ID NO: 181309 - DNA, 354 bp, Glycine max
tgctttggcgaataggaagccttgggcaaatggagagaattataacgagggagaaacccatgtggtgagttgtcgttctacatggccaaattttccactagcctcacaaatgttaatactcacgttatatcagaccttcttattacccacggcctatcactcaaaacacccagttatccactaaggccacccctaaatcagccacaaaacccacctgctacacatccgatgcctaacaccacccttaatatgaaccaaaacacctaccagcgacggaattttctagaaaagaagcctacacaattcaccccatatctggcgggcgatgctaacttacctccatatttactcaat

SEQ ID NO: 181310 - DNA, 273 bp, Glycine max
  unsure (1)..(273): unsure at all n locations
ctttgatgaatgaaagtcttatgagacacacttcaaagttccacttttctccctcttttattccttcaatttcgtgctccccccttctctcttttttttcctccattaaattatcctcttcaagcttcttatctaaggaacattcttggtggngaagctccttcttccatggcttattccctaggggatggtgtctcccatctcctcttcttctttgccttccgctgcatctccatggtggaaaatcaccattgaaggacctcattgaagctc

SEQ ID NO: 181311 - DNA, 428 bp, Glycine max
  unsure (1)..(428): unsure at all n locations
agcttccatcataaccatacattatatatttttctttgtaactatngaaaaggagaaaaacagagggcctaaggtgatgggctaacccaccacaccgttatgcttaaatgaatgtttatcaaacgaggagaacatagactatatcttggtggtgggttaagcataactatgggtataggttgtggtcgtgaaagactagaaggtatgacacttcttatcatttattcaaaaacaccatagtacttacgacagtggctgcgtgtatacatacataaaaggatgtttttaggcgtaagggatgatgttgatcaacagaagaagtttgctcataattttagacgtaacagtggaagtaaaaaaatgtgaaatatacgggtaggtaaatatggtcaagtctatggacctgctcgcgggagttgtggtctatg

SEQ ID NO: 181312 - DNA, 455 bp, Glycine max
gtcgactaaatacacaacataaatatgttatcattgtatcagacggactacaacaaaaacacagattcattatatatattgtatcaatagacatcaaattttttatgtaattttttgcccctcctattacatataaaaaattgtttctttgatcaaatacataacataaatgtgggtgtgtcacatcctattaagtgttaaatttaaatacacatgctaaaggtgagtctactgtactaaaacaacctactctttaaaacaatgaatttaaatacatttgaacctataactaagataatgatgaacttaaatacatttgaatatatctgaactatttatattgttacaaccgtcccatgatataggaaaaatactatctgggattcacttaatttatgagaaatcttcacttaattcacccgaataaacaaaatataacacatgggaaagatttt

SEQ ID NO: 181313 - DNA, 428 bp, Glycine max
  unsure (1)..(428): unsure at all n locations
agcttagagtagagggggnaaatatagaatangttataataangnnnncttattcataagaaaaataataattaaaggaacataagtgggtgggtgccatacaagcaaatgcatagattaatttttttgcccttcacttagctggttttctttgatttttgcaacataagaaattctacaagtgtaactaccatatagtcataaaatatatagtatacatgacagacaaacttgaataacagattcaaaccatggttattaaaatcccactcacactactacatcagattacaactgtctggcaatactaattacaaagagaatagcaaaatggcactgaatcatagcccaaaacactaaaaagctgcatctgaaatgatggcttaaacaactcagactattaagaaaataactatttcaggggttat

SEQ ID NO: 181314 - DNA, 318 bp, Glycine max
  unsure (1)..(318): unsure at all n locations
cccgattcaagtacgcggtgatgctactgcggtgtctctctcatgagcaatttccatgtgttgaaagcgggcgccatccctgttcctgttggaaacacatgccctccttctactactcctttgtccgagcttgagaacaccggatggagatttgcgatagagggaggcttgggtctttctttgaatgcgctcttttctgatactgatatgactataccgatacacagagatattgaattcccaaaaagatntgaccttactcctgccatgaaaagccttgtgaaaagaaatgttgcaacggttgctgatggtttaagg

SEQ ID NO: 181315 - DNA, 341 bp, Glycine max
agctttatattgagttgtgaagttattatttttaaattactcctgctattctatgtttccttcccctatatgtagtagggatagagagtttcacaccccatgcatataaaatatgtaaaccaatgtaacgatacaaatatagtctgaaatggattagcgagaagggctaactccaacaatttcaacatatgaattttgccacccaaattttgctacataagtattatgtttaatttaaattcctctattggcctatctttgtaaaacaaggtttgataatttttataattagaaaacaaactcagaattttgagacattttaaaacttacaactcattcat

SEQ ID NO: 181316 - DNA, 427 bp, Glycine max
  unsure (1)..(427): unsure at all n locations
ctgagatgaggaagtgtataagggtgaaacttcctgcttttattcgttgaccacagagtggtacctggagatatgtcgcgggggtcaggagaccttggggacgtcacgtggggtgctattgcccaaaaccaagcttgaccaatcccgacccaacccgggcatagtcaatcagtgagaacctatgatgtacctaaacaggcgagctcttggcagtcaacagataaaagaaactaagaccgcaaagcaaggaggcttgtgtggtggctggccagctgtgaactttgattgatatgtgggttatggcctctggtaatcgataacaagggtgggtaatcgattacaaggcttaaaaatgaagacaggagattaagatggtctctggtaatcgattaccacggggtgtaatcgattaccacgcttanaaatg

SEQ ID NO: 181317 - DNA, 372 bp, Glycine max
ttcaatggtgaatttcaaccatggatatgcagcggaagataaaggagaaggggtaagaggaggtgccatccactagggaataagctatggaaggaggagcttcaccaccaagagagtgtcttggataagaagcttatagaggaagcttcaatggaggaaaagaatgagagagagagggggcatgaaattgaaggaaacaaaagagggagagaagtggaactttgaagtattacacattagagaggaagcttcaatggaggaaaagaatgagagagagagggggggcatgaaatcgaaggagacaaaagaggaagagaagtggaactttgaaggtcagtaactaaatgacagcttccttgagaagcttccttg

SEQ ID NO: 181318 - DNA, 480 bp, Glycine max
  unsure (1)..(480): unsure at all n locations
tgacggaacagctaagcataacagaagagaatatgttgtctattattgatcaatataaggagaaggtgaacctagctgctagtcatgggcagaggctggaggatgaacatgcaaaggtatcaactctgcaaattgaaagggaagcaagagagagggtgatagaatcattgcacagggaagctatgaaatggatggataggttcactctcactctgaatgggagtcaagagcttccaaggttgttagccagagccaaggcaatggtcgacacatacttggctcctgatgaagatcatggtcttttcgattactgccaacacatgattaaactaatgacccgcataattaagaatcactgaggcatttgtgttgtatttatgctttggctttggcaagataaacgatgttgtttcttaatgaagatgggaattgattcgaccctatgtctntactgaaagatctgcatggattcaatacctc

SEQ ID NO: 181319 - DNA, 444 bp, Glycine max
agctttgaaaggatggttttttataggtaaaaacatttttcatgttaacatataaaatagttatctacaatcactaaagcataataatttcctcctatgctcatagttctcgaaggaccaaataagtctagatgcaaaagttcaagagcactagaggtagaaatcatatttttaactttaaaagaaactctagatttcttttatttcttacaagcatcacaaagaccatccttcaaaaacttaagcttaagaagacccctagctaattctttagataaaaatatgtttaaatgatgcatgtgaattagagctacccttctatgtcatagccatgacagatcatcattactagttaaacaagtcaaatgtaacgatgaaacacaatccacattaagtgtgtaggtatttccaatgcgattaccaacaaacttaatttgatttgtg

SEQ ID NO: 181320 - DNA, 435 bp, Glycine max
  unsure (1)..(435): unsure at all n locations
agcttgttcgaagatcctcgagatgttataagaggatcttatctttcagaaaaaactttcaagaagttnttgaagatttctctagatgaaaactataacctgcatccttttgagttcaaccattcccacttctgcaccatagggtttgttacctggtgggagaaatattattcgggccgttcagttggagacactactatcatgatctccagacttgagagtggttttacacaaccaacggtcgagaatatccgctcaaaccttcaagctcgaggtactaacttttgattttctaaattgatatgtatttttgccttttctaatattcttactttcaggcaaaacaatcatgacaaagaaaattgctgaaacgtctcgagctgatgtgagacccaagaaacccactgtggtgaagatccaagaatggaaacaaga

SEQ ID NO: 181321 - DNA, 430 bp, Glycine max
agcttgaagaggatgctttaatggaggataagataaatagattgtgggagcacgaaattgaaggaataaaagaaggagagaaatggaactttgaagtgtatctcataagactttcattcatcaaagttccaacaagtgttacacatgcttctatttatagactaggtagcttccttgagaagctttcttaagaaaacttccttgagaagcttctttgagaaaacttccttgagaagctagagcttatctacacacacccatctaaaaactaagctcacctccttgagaagcttccttgagaagttagagcttatctacacacacccctctaataactaagctcacctccttgagaagacaagctagagcttagctacacacccctataatagctaagctcacccccatgacaaaatacatgaaaatacaa

SEQ ID NO: 181322 - DNA, 439 bp, Glycine max
  unsure (1)..(439): unsure at all n locations
agcttcatgatgttgaatcaagatatattcttgttgttttgatgataacaaagatcatgacaaaaagtccaagagaatgatttcaagattgagtcaagaacaattcaagattcatgagaagaaatcaagaagacttcacaagggaagtattgaaaagatttttcaaaaaacaaacatagcacagttttgtttttaaaagaagttttcacaaaattttctaagttaccaaagattttactctctggtaatcgattaccaaatttctgtaatcgattaccagtggcaaagtttattttcaaaagctttcaactgaatttacaacgttccaattaatttcaaaatggtgtaatcgattacaagatattggtaattgattaccagtgtgtttgaatgttngaaatcaaattcaattgtgaagagtcacatccttccacaaaaa

SEQ ID NO: 181323 - DNA, 437 bp, Glycine max
agcttcaccaatggcactgcttgccttaatttgaaattctggtgcatcaataaacatttctataggaattaataagttcaaggcatatatttcaatctcttaacaattaagtataagcaatcaataagggatttaataattaagatggtacatgacgtacagagtagtaatatataagaatacaatatgtataagctagaattggaaccaactagaataaacaaatgataagggcaatatgagtagagagggtggaacgtacgatggggaagacagagctgagttattaaagggaaacataacaacaacactatatgctctctgaacactgccaacaacttgtctatttatttctttgaaacgtcccttttgaaccaaagattaactgcacctctcttacttttccatgaagaatcctcaataaaactgcacacgtg

SEQ ID NO: 181324 - DNA, 196 bp, Glycine max
agaaacaatcttccttattaggaaactcaagaagaggcctgatagccattatacctataactatccaaaacaccaacttacctatataaactcttttttcacccattatttaagaaaagcctattatatgcataaatcttttatttaggactactaactatgagtgatgctaagctccaatatgtatatcaaatca

SEQ ID NO: 181325 - DNA, 397 bp, Glycine max
  unsure (1)..(397): unsure at all n locations
agctngatcaaaaaaaggatctaatcatttcaatctactcaaatcatacagttgctcattcaaatcattcgcagacactcatttcatacaaaacaatccactacatatcaaattcaactagttcactgttcaaacaagctttttgtacaagcaatcaactcaaagtactgaaatttaaatgactgaacataaatcataaaatgactgaaataaaataaattgttcaaaatgcacaaatttaaatgtcctgctcctgtgatttctcttgtgcatgctcattgagatctaacacctgagcggctggtgaatcctgagggataggctgctttaactcaaatgctggtgcagatggcatggaatcattacgtatggatactagggatggctctgggatctg

SEQ ID NO: 181326 - DNA, 426 bp, Glycine max
agcttagagagaatggtcacctctgcatttgctatcatgtggaaggccccccacaaccagtaggacttatgtgtatactgcggatgtaaatgctatcatctccaaacctacaccattggtgagacattatgcatatgatgaagtcgtccttgtttattattaacaatactaacaaatttcacttcctttattgtcatctagttcttgcctaccgctgctctcgattttgttgatgcttcaacacgatgtatgacaatgcaacataggattggcgttcgtggcatatggagcatctccatgcataatgctatacaatatgaggatgacccttggcacggattcttaatggaaaatcacttgatgggtggagatgaggtcctgttttattacccgcctaaccaacatgtgggggagatcattttggga

SEQ ID NO: 181327 - DNA, 432 bp, Glycine max
  unsure (1)..(432): unsure at all n locations
agcttntttgtgcggtgtggcttaaaaatttactgtttatgtcggcaagggggtttcgtgcgagctcaaccgaggttgtgtttcggccgacattggcatgttcccatgcactcggccaaaaaaacattaccccacttcgaaaagaaaaaaaatactttaatcaccgatattgatcggaaaaaatgctggttgacgtcggccaggaaaggaggccgatcgaggtctaataataaaataatcaccggatgacgcccatcgagcattttctaatggacatcatccaaatattgttcagggatgggatagaataaacaatagccgataccacgcgttatggtgtcccgactgacatatttcagccgacattgcacagtatatttttacaaacgctggccgattatatttccttacggtagaggaggttctgttgtt

SEQ ID NO: 181328 - DNA, 394 bp, Glycine max
  unsure (1)..(394): unsure at all n locations
tcaacctagaggagacggaccattccaagtgtgggagaatatcaacgacaatgcctacaagatagacttgcctaatgagtataaagtaagtgccactctcaatgtgtctgatctatctctttctgatgcacatggaggagccttggatttgaggacaaatccttttcaagaaggagggagtgatgaggacataaccaagggcaaggaccatgaaacacttgaaggtcccatgaccagaggcagacttaaacatgcccaacacgttatatagacaaggctggtcattcgtatagctgcccttgatgatgattgaaggcccaagcggagaaagatgaangctcagatgcacatgcactaccaacactactaattgttgttgaggccgcaactaact

SEQ ID NO: 181329 - DNA, 453 bp, Glycine max
  unsure (1)..(453): unsure at all n locations
acccggatccttaagtcacctgcggcatgcagcttaccctaaggatgtttttttttgttttggatatgatcaataacaatgcctataggttggacctcccaaaagagtatggagtcaacaccacttttaacaattctgatttaattccttttgcaggtggagctgatattgaggaggaggaactaacagattngaggtcaaatcctcttcaagaggaaggggatgatgcaatcctccctaggaagggaccagtcactatagccatgagcaacaggctccaagaggattaggctagagctactgaagaaggccctagggttttcatgaacctcacgatagatttctgagcccatgggccaaggttggatccaattatctttgtacatattaaactaggatgtcattatatttggtccttgtatttagggctccataatgtaggtagggtaccct

SEQ ID NO: 181330 - DNA, 328 bp, Glycine max
  unsure (1)..(328): unsure at all n locations
agctnggncattatgttctggattgctggtaatgagagggngctaaaaataagcccaataatcagccaaacttggcacaagatgaaggatcagattctgaggttgaaatgctcatggcaaccacaagcaatgaatcctccaatgacacttcatggtacttggattctggctgttccactcatatgacagggagaaaggaatggttcatcagtttggatgactcattaaagagcaaagttcgttttgcatatgatagcaccctcattgtagaaggcattggcagaatggcttttagagacacaaatggaaaagaaacaatcattgagga

SEQ ID NO: 181331 - DNA, 425 bp, Glycine max
  unsure (1)..(425): unsure at all n locations
agcttttcagggaagtggacagcgtgcgctttatctantcccttttaaatttttacacaatgaacaaagacggtcatagaccaggaccgtccttgtattcattcaacctatttacaaaattgccatcatgtgagtttctaagacgtttccttatgaccgtcttagaacccgcgacgtaaataacaattttaatgacattaattacaaaaataccaccgcgttgttttctaaggcggttctacagaaccgtcttagaatagctgtcgtagaaatttgcttttgtagtagtgccggggatatatgtcatccattcctaacaccacaaatccacaatcagagtgtgttaataaggcatctataatctggacaacggtattcaaaatgtgaaaaattacgctaaaacaatttgccanattatgcgaaat

SEQ ID NO: 181332 - DNA, 436 bp, Glycine max
  unsure (1)..(436): unsure at all n locations
agctntaacctcatcgtctctcacagtcttatatttgggagtctttccagtccttgggttcggactctcagccacttatgatagccaccgatgatcccattactgcttcccctaagctctctatcctttcttcacgccgcatcccatgccttgcgaactccttggagtaccctcgcgttgtggtcactgaaacctcgtgcgatgaaaggcgtgatgctttcgtctgatggcactcctctcatgggacatccttcgcatgaagatagaatcctgattcttccttccttctagcgagggaaccatttaacagacgcccctccatgctagccaagagttggtgcacaacaaacaaattttgcgccgctcttttcacatccccggtcgaacgtgtcatacatggccaaaatggcgacgaccgggctttccttgccatgat

SEQ ID NO: 181333 - DNA, 442 bp, Glycine max
  unsure (1)..(442): unsure at all n locations
agctttcataggtgaaatcaggtgcagtcatttcctttagagtcctctcacgggggggaggttgtgccatattctcaaaatgtacaaaatcagaatgttcaaaattataatgctcaaaatcatcaatatcagaatgcttaggatgctcaaaaggtactaaatgatgtataactaatctatgaaatgtcctatctatctcaggatcaaagggttttaagtcagatggatttcctctagtcatacactaaattcagcatgcacaactagttgcctttttatgaaagtaacagtgtaggtttgaactacagttaccattaaatgatatccaaatgacttgaaattttgtgagcaaccttataaaatgatgagaagatagcacaaaaaatttcaaatgaaaattcgaagtctaactatataagctaaanatgataagttaagaaaa

SEQ ID NO: 181334 - DNA, 441 bp, Glycine max
tctcttggaccttgaacaagcaatcaacttctgtttcagaaccattgcttgtgctcgcgactggtccctttcttcccttcgcaacttgagttcattattggtaccccatatagcatcgcgaaacttgctccggccatactcttccttgcgagccctcttggtctcttgatcaagggctcttgcggtaattgcattctttttccgtaacccggcgcactctcttcgaacgtgtgtagcacccaacttgaacttcctcttggcgagttttgccttccctaactcggtgttgagagctcggacttcttcgccctcttccggtgcttcaaaaatttcttcgctgacgacttttaacttggcgagccaatctaaacctcgtatgccaactctcagccattcgtggtcccaccaatgattcacttccaatgcctttagtcatgatct

SEQ ID NO: 181335 - DNA, 436 bp, Glycine max
  unsure (1)..(436): unsure at all n locations
tgagctgcaactgcttgggggttcatggagttggatcttagcttattgaggncctttaatagtgattttccaccatggagatgcagcggaagacaaaggaaaagaggtgagaggaggcgccatccattagggaataagccatggaagaaggagcttcaccaccaagatgagccttggataagaagcttggaaggatgcttcaatggaggaaaagaaagagggagagaaagagagaggggggagcccgaaattgaaggaataaaagagggagagaagtggaactttgaagtatgtctcacaagactctcattcatcaaagttacaacaagtgttacacatgcttctatttatagactaggtagcttccttgagaaagcttcttgagaaaacttccttgagaagcttctttgagaaaatttccttgagaagctagagc

SEQ ID NO: 181336 - DNA, 436 bp, Glycine max
  unsure (1)..(436): unsure at all n locations
agcttctaggactataacagctggctgctatttgtatntgaccatagtgtgttataattagggctttagtacgtgtatttaaagcctttatcagctatgagaagcaggaagaagtattattaatatacttcttcaacagcaataatatatgtataatgatacatttaaagtgtttgttgaatctccagaataaacagttgtgaaaaagttattgctactattatgcatataattgcatgcctttacctttttcctttagacttttggtaaaaaaaaattggtaagcttgaattgtaccttccagacctgtccctaatactaagcatgggcactatacccgttaatgctagtcacattgggaaaccatactttgattttgatttggtagtttttcctagactctgatattggaagggatttggtaaagattagttta

SEQ ID NO: 181337 - DNA, 447 bp, Glycine max
ttgcagatttggtcttcgccagtgagaggatcaatgtttgttctaaaagaggcacattcgatcatcctactatgaccactgagaaaactggggcaaataaagagggtgaggatgagggagaaacccatgctgtgactgccatttctgtacggccaaatttcccaccaacccaacaatatctttactcaggcaataacaaaaccacctccttacccaccactccattatccacaaaggccatccctaaattaaccacaaagcctgtctaccgcacttccaatgacgaagaccacctttatcacaaaccaaaaaaaaacaccaaccaagaaatgaattttgcatcgaatagcctgtatgattcaccccaaattccggtgtcatatgctaacttgcctccatatctactagataacgcaatggtacccataacccctgctaggttccctc

SEQ ID NO: 181338 - DNA, 438 bp, Glycine max
  unsure (1)..(438): unsure at all n locations
cgacccggaccttaagtcactgcggctgcagctttaaacatcttgaacattgtttttatattcaacaaaacatcctatatcttggcattggtaccttggtgattagattgtttttcccatctctaatggaaatactagaatctttcatgtgaatatcataaccttttttgagtaattgtcccaaactcaaaatattgttcttcatatttgggacgtagtagacatttgatatgaattcatgtctttcatccttcaaaaaaaataaagattttacctttgccttttacaggaatcttggaattataaccaaataagacattatcacttattgattcatcaagatccacgaacaagcttcttttttcgcacataaggttgtttgcactagtgtcaaagtaccatgtngtttcttggctaccttcattacttccacactct

SEQ ID NO: 181339 - DNA, 475 bp, Glycine max
  unsure (1)..(475): unsure at all n locations
tattgtatgtaatgcgtgtcacaataagatgtagatgttcctcttgagtttcgntcacttataaaaacatataagttaagcttttaagagagttggtcgttcacatggtataaaagtctcttgatccagttgcaaagagtttcatccttggtgccctctcattaaggtctttgatataagttaagcttttaagagagttagctttcactttgcctggaagctattaaactcagacctaccaattaacctgattggtgagggtagcatctaacaggggggctagtggtattgatggggtacttagcacaaccattgagtatgctgtaagatgcaacaaataggtatctttttagattttgagaaataaggaacttttatatctaggatattttattaagttgcatgtattaagtcgcatgtcctatttgcggaaataatgaataacacaaagtgtgtgttcattgatgctgtagta

SEQ ID NO: 181340 - DNA, 432 bp, Glycine max
agcttgtaggcctaggagcttcttcatcaatggattcctttgcttctcggaagatgaatggcagcgtaatggagaaggaagagagagaggagacgccacttcaaggagaagatgagtctataagaagctcaccaccataggaggccatgaataagagcttggaggaagaagaagatgaatgaagggagaggaagagaagagcaccaaattttgtgctctaaaagagctataaaatctgaagtttaattttcaaatgatcaaagttgaaaaaatgcacacacatggtctctatttatagcctaagtgtcacacaaaattggatggaaatttgaatttctattcaaatttcacttgaatttgaaattaaatttgtggagccaaaatttcactaattatgattagtgaattttagctatggttcagcccactaat

SEQ ID NO: 181341 - DNA, 353 bp, Glycine max
ggacgaaattgaagagagagttttgcttggcaaaaatgtcttatcctctcaaaagaaaatgagagagatttcaagagaacttcattgtaaaatgctctctcaagaactcttgggcaaacacttgcaaatccatttaagagttcatccatggatcttcattggaatattcttctcttgaagagagaattcttcttacattcttcttattcaatgagattggttaagagactgtgagtctctcgttgtaaagcatctgaacacaacggatgggttgtccctgtgtgggtcacactctgtaatggagtttacaaagatagtggaaaactcaagtgggttgctcgagtactggatgt

SEQ ID NO: 181342 - DNA, 425 bp, Glycine max
  unsure (1)..(425): unsure at all n locations
agctttattcaagacaaagaaattaaagttattcttttatggatgagcaagacagnctctagagtcttaggaagggtatattaaataggaagggaatttctaactgaagtagcaaaaggtttggccaagaaatttaagttaaaaagtctttttcaagaaatttactctctggtaattgattaccagaggatgtaatcgattaccagtggccagaaatgatttacaacagctattaaaatttgaattcaaaatttgcactgtgtaatcgattacacatatatggtaatcgattaccagcagttattgaacgttttaattcaaattttaaagcttgtaatcgattacacacatactgtaatcgattaccagaggagtttttcagaaaatattctcaacagtcacatctttttatttgattcttaaat

SEQ ID NO: 181343 - DNA, 428 bp, Glycine max
  unsure (1)..(428): unsure at all n locations
attattcgctgacgaaaggatcaaagtgtgtattataagaggcaaattnaatcatcctgcttggatgaatgagaaaaccggggccaatgaagagggtgataatgaaggagaaacacatgctgcgactgccgttcctacatggaaaatcccccaccagctcaacagcatcattactcaaccaatactggcccttcttattaccccaccacccagtcattcacaaaggccatccctaaattaaccacaaagcttgtctaccacacttccaatgatgaacaccacctttagcacaaaccataacaccaaccaagaaatgaattttgccgcgaaaaaacctgtagaaatcaccctaaataccggtgtgatatgctaactagccccttaatacttgaaatgcaatgatagcataacccctccacggtcctaac

SEQ ID NO: 181344 - DNA, 427 bp, Glycine max
agcttgaaggcgtgtaacccaccaacttctcatagtagaacactggtaatgtgtctactatcatttttatcatctccttctccgtcattgggggcactacttgagcttccaggtccctccacctctgggtgtattctttgaacgactcatgatccttcttgcacaagttctgtagctacattcaatctggagccatatcagaattgtactgaactttgaagtgtaattctcaaatgatcaaagttacaacaagtgttacacatgcttctatttatagcctaggtagcttccttgagaaacttccttgagaagcttccttgagaagctttcttgagaaacttccttgagaagcttctttgagaagcttccttgagaagctagagcttagctacacacacccctctaataactaagctcacctccttga

SEQ ID NO: 181345 - DNA, 468 bp, Glycine max
  unsure (1)..(468): unsure at all n locations
tgtatntaaatgtattctaaaaaaaattaatttaatttgatctcttatatctcttatttatttatatatatatgtcggggtagagggggtcacatgatcaaaatttcagccaccaattcattcaccaaaactcaaattcacaatagacacaatcataaggaaacctaaaagttcaagaaaaggttcacaatcaaagactctctaagaatcttgaatgaacatgttaaggactaattaacatgcaagattngactcaaatcaaataataagttaaaagaatttcatacactcatgaacaaatgagttagacaaagaaacaagaaaaataaaatttagcacaacttaagaaatcttatgtgacaagtttcatgactagacatgacttctatgaaaaaactacaatangtgaacaagtcactctagatttttgagaatttattctactttaatgtttttgtaagaaattta

SEQ ID NO: 181346 - DNA, 428 bp, Glycine max
  unsure (1)..(428): unsure at all n locations
agcttgcttgtggggcttctatggaggttgtatctttgagcttcaatgaggtcctttaatggtgattttccaccatggagatgcagcggaagacaaaggaaaagaggtgagaggaggcgccatccactagggaataagccatggaagaaggagcttcaccaccaagatgagccttggataagaagcttggagaggatgcttcaatggaggaaaagaaagagggagagaaagagagaggggggagcacgaagttgaaggaagaaaaagggagagaagtngaactttgagttgtgtctcacaagactttcattcatcaaagttacaacaagtgttacacatgcttctatttatagactaggtagcttccttgagaagctttctcgagaaaacatccttgagaagcttctctgagaaaacttccttgagaa

SEQ ID NO: 181347 - DNA, 481 bp, Glycine max
tgcttgtggggcttctatggaggctggatctttgagcttcaatgagggtctttaatggtggttttccaccatggagatgcagcggaagacaaaggagaagaggggagaggaggcgccatccactatggaataagccatggaagaaggagcttcaccaccaagatgagccttggataagaagcttggaaggatgcttcaatggaggaaaagaaagagggagataaagagagaggggggagcatgaaattgaaggaataaaagaggtagagaagtggaactttgaagtatgtctcacaagactctcattcatcaaagttacaacaagtgttacacatgcttctatttatagactaggtagcttccttgagaagctatcttgagaaaacttccttgagaagcttctttgagaaaaacttcttgagaagctagagcttagctacacacacccctctcataactaagctcaccttcttgagaaact

SEQ ID NO: 181348 - DNA, 437 bp, Glycine max
  unsure (1)..(437): unsure at all n locations
ctcacacgactgggctgcactccgcagggctgtagatatttgttacgattncagacacctccgcaaagagacgatgttgataaaataatggtaatacatgacttgcgagactgctactttggcttttatgaagtataattgcggatgattgcctttagaataagaaatcaaattacgctaacaaatgtctatttttcttctttaaagatcgaaattttatcgttgaatgtgtctatgtcttcaataaaatttggtatcaattatttatctaaactttactctgatgacatattttaattttgggagaattaacaaaaatattaaatattttatcagggaattcttgaacatctttcttatattgccccggaaaaagattatctctacccaattaaaactattattattttaggatgataatgctatggaattatttt

SEQ ID NO: 181349 - DNA, 437 bp, Glycine max
  unsure (1)..(437): unsure at all n locations
tctanaaaaaggaatccaatacagatcttctttttacttgtttatttataacaatctaatgaaagcttatcatgaactattaatcaataccagcagtcgtcctatccactataaaaatccgttcgcagaaagcaatgtatattttggctattcttttcattcaaatacattaaatagtttgatatacttaaactataatggacataaatagtgcatctttttatggtcatattgaaacactagcattttcccgtgccatgatatatccaactttattgagaaacatattgaaaataattgttataaattgatgctaacgataattattataattataatttataaatcgatatgtctaaatatattctctatagaaaagaaacataaaaactatttacacaaattattattattattaataaatggagcataagaaa

SEQ ID NO: 181350 - DNA, 438 bp, Glycine max
  unsure (1)..(438): unsure at all n locations
agcttgnncctatttaatatttaatttaatttatgttatgaatttaccttactaaaattaaaaatatatatcttattaaaatagcaggagtactgtattaggatttttttgcataatttctatctaccatagtaaattctcaggaaaaaaaaaaaaaactatcatgctaaattggacaggaacttaagaaacaggactaggaggttggatcacctattcacctacctacctcattgaatttcgaggttgtttcctgtgattgtacaggcatatttattacttccatttatttggctactcgcctactcgttttcattcttttttattcaatattttagtattttatattataattgccgtttcacaatattaataaacaatatttcttttctttttttcacacttggtaagtaaatcttttctaattccacacttagt

SEQ ID NO: 181351 - DNA, 492 bp, Glycine max
  unsure (1)..(492): unsure at all n locations
tatagaaactcaacttanataaggtgaatgttccaaaagcttaaaaatgtttttaataaagtggngtaatcacttaatatgtgaatcgatagaagttgggacgtattaatgctttcattcgtttatccggaccatttacccattaagctaattaggcctttatcaaatatgatgccacttgggccttcttcatgaagcattgaagaacctttcttttatatacgtcactaaaaattaaacatcaataaaataaataaatcaaaatgactaattattattcttattaaaatacgcatttatttggacaaccatataatgagtttctaaagaaaagttcattaaataattatgtacacttcatttgatgttaacctagacccttaaaaaattcatttatattcgagttttgacacacggtcttctgtcaaatatacncacacagatgtgcgagatgtttaaccacttaatataaataaaataaatatttatcca

SEQ ID NO: 181352 - DNA, 399 bp, Glycine max
  unsure (1)..(399): unsure at all n locations
agcttataatatatcgatacgctcgagattgatcatctgtatttctcnagaaanacaaatgggcataactttcccaccgatgttcgattcgggcgcataagatgtcgagaggctcgaaattgaacaacggacgctcttgagaaattcaaatggtcataacttttctcacgaatgtccgatacaggcttataatatatcgagatgctcgaaattgaacaatggaagctcttgagaaattcaaaatctcgtaacttttcacacggatgtccgattcaagctcataatatatcgatacgctcgaaattaaacatcggaaactctcgggaaattcaaatggtcataacttttcacacggatgtccgatttcggcgcataatatgtcgaaaggctgaaattaac

SEQ ID NO: 181353 - DNA, 411 bp, Glycine max
  unsure (1)..(411): unsure at all n locations
agctttgtcctcagatcatacaacaatgttttcgctttatgaatctgaaggactttctaggcttgtaatggggttaggcttccaacaaatcgtgatttttctaggattcaaaagcttaggttctaggagagcattcatccatagataaacctttactttttcattcattcacatcccatacttgcatatcctgttcctgtgggtgatcttcattaagatccaatgctggagctactgatgaatcctggataggttgttctggctccgtgactggtgtagatggctgggtctcttcaggaacaggtgcaggagatggcttangtatctgatatgtggaagtcccctcccgctgagccatgtgtgcatctacatcaaaataaaagggctcaggaggggtgagctcatcctccc

SEQ ID NO: 181354 - DNA, 178 bp, Glycine max
  unsure (1)..(178): unsure at all n locations
gcttgaggtcagctacgcagtccctctctaatagctcagatcaccttctcgagatgagaagctaggaatttatcttcaccgccctctatgatatgtaatgctccccccatggacgatagaatgataatacctataaaagtgctttctacanagacaacttataaatgccccgaataca

SEQ ID NO: 181355 - DNA, 417 bp, Glycine max
  unsure (1)..(417): unsure at all n locations
agcttgagcaaaagatggggatatactatttgaataacaacntggtaaattttattaaagtcattttatttatctatataactagtattttaatacatgcaatttatatgatgaataattctatataattaaaatttataataactaattaatttaattctatacattattatttaatgtaatttttataccatccatcaacaaaataaacctttttaggaaaaaataaaataaataaatgtgaagaaaaaaaaagaagagagaaaaaacaaacctcgcgtgtttgagtttttcattgataaaaactaacaattttaacaagttattctatctcaaaaaaaaaatgaatagcaatggagttgcacatcattattctatcaatttgcacgttgatttatatatgaaacaatgatacac

SEQ ID NO: 181356 - DNA, 376 bp, Glycine max
atagtgtaattaaactcgccttcatcctaatatcttaaatgctatttatatttccaatcccatgcatctcgggcttgaagatacagtaagtcgagcacgctcttctcgtctagtgggaaatggccgaaacgcaacatatcacaatataactcgccatgaattcttgtatatacatagagctaactagccataatgtatatacatgtatctctagagagaataaacatttgccgggcagagctgtggaatcaagaggttacaatcttatcccaaaatcaagatctttttatgcacaatgggcaatgcgttccaacttccatgtcgctcgccatgcatggctagggagcttaccctgctcatccttcataaagacaaa

SEQ ID NO: 181357 - DNA, 430 bp, Glycine max
  unsure (1)..(430): unsure at all n locations
agcttgttaataattgataaaggtaagtttaattttttcattcacattaacccaagcttaggtgatcaactccattntttcaaaataaaatattaaattattgaaaaaaagaagaattgttgatttgataaacttgcattgcttatagaagaagtttaaggtgaaaacttctttcttcaacaaaaagttttgttcccaaacatgcgtgaattgtgtcaatttttatcaagaacgagaaagtcaaatacaattatacaacttgattgattgattgattgatttttcttatcttgactctttcagtttctacaattataacaaagatattttgagcaataaaaataatcaaaacaaaattggttaatactatgaaagataaattcttgctgcaatatgattatttatattggaaaaaatacaaaaagcttca

SEQ ID NO: 181358 - DNA, 350 bp, Glycine max
tacaataaggagatcccttcctaatattctagcgaccactctgatgtggtgacctgtaatcttgaagtattgacttgaattttaatcttgaaaagcccatttgcatcaattgcaacacatcatcatgatcatcatcaaaacatcaaagccaattgcatctacaaccaatgggtgattaaaccaaaagcatgcaataattaagtgcagatagaaacattgaacacataaaaataactttaaatagatagttaaaaaaatacatcaagttctcagcaaaattccccaacaaagggtttagtcctccatcacaaggcaacaccattcacaacaagaagggggagttgaagaaa

SEQ ID NO: 181359 - DNA, 477 bp, Glycine max
  unsure (1)..(477): unsure at all n locations
caccccagtccctgagaaactgattcccagaagacaacatggtgtgaatatagctgaaaaccctatccctgcaacaagtcctatggaagtagacaccgatatggaccacaaaatccgcagtattgtgagtagcattctgaaagatgcttctgtgcctgatgctgagaaagatgttccaacatcttccaccccaagtgttttcgtgcctgatgttgagaaagatgttccaacatcttccggtccaaatgctgaagtactctctttccccagcaaagagagatcaacagaggaagatgatcaatcgacaaaggagacccctgcaccaagggcaccagaaactgttccaggtgacctcattgacctggaagtagtataatctgatgaagaacccattgccaacaggttggcaccctggcattgtggaaagacttcaaacagataggganaactccctcaagaggttggacaatcagacta

SEQ ID NO: 181360 - DNA, 447 bp, Glycine max
gtcacctgcggcatgcaagcttcgctcgcctgtgataaatttgaattcccattctatgagccacgccaccagtagtacttcaaagtatttgttcaatcaaaacaaatcatgtcgtttcaaaaaattaaatctcttgtctaagggacaaaattttcatcacagttaaaatcatggggacttttggaatcatcatcgtactttcttatttcaatttcacgtattatttgataaatgaatcacgcactacactgaagcaccatattaatactacgatctttaaaatttaaccttgttttatgtcccaaggtattttacaaattttgggcatcttgaaaatcaaatttgaatgcatcccgcatgggatgttttgatatgtatatgtatagcattaattcatgtgctcattctctcggtattaatatctgaagccacattatacgcacatac

SEQ ID NO: 181361 - DNA, 362 bp, Glycine max
gagtctttgacgagttgagactaaggaaagaaaatgctttgttctactcatgacatatatagcataactatctacattaaagtaggtccaaacttgatgaacctaaataaagctaatagttatgctatcaatgtgtcgcgtgttgtagtcttaagacggacagaatattccctttccttatgtctcaactgtccaagactaaatctcgtcgtcgtcattatgctcagtaaggtgaggaatgacaattaacacgaacgacgatgagctttaatcttggttagtttgagactttgagaaaagaagaagtttggggagttgacctatgactactttataagacacatagatagcctgactaatta

SEQ ID NO: 181362 - DNA, 424 bp, Glycine max
  unsure (1)..(424): unsure at all n locations
agcttgccacccagctcgccctggcgagctgattgcttcctccagaagcaaccgccttctggaggagttttctggaaggcccaagtgggcctggttactatttgcccccccatttttactaagtacaccccttgccttttttggtgattctttttccgtaacgttacgaaactttacgaatntcggaagaatgcttattttctttccttaatgttacgaaaccttatggaatacctaatcaaaccccttttggtttccgggatgtcatagaactttacagattgcgcactaacactttcttttaatttccggcatgtcacggaacttcacgaattgcctaacgatgggtgccaagtacctcgaagtggtcaaaagagggtcgcatcccaacaacggatggtccccggatgaaattagggtatga

SEQ ID NO: 181363 - DNA, 136 bp, Glycine max
aaaaaccccatcagaattgggggagttttttttggtaccatggagggctcttacttttatgtttcagcttcaggggaatccctgagacttatgtgcagatcacctgtaactccagcagttctaagggtaacaaaac

SEQ ID NO: 181364 - DNA, 353 bp, Glycine max
  unsure (1)..(353): unsure at all n locations
agctttaacctcatcgtctctcacagtctttatgatngggagccaatccagtccttgtgttcggactctcaaccacttatgatagccgccgatgatcccattactgcttcccctaagctctctgtcctttcttcacgccgcatcccatgccttgcgaactccttggagtaccctcgcgttgtggtcgctgaaacctcatgcgatgaaaggcgtgatgctttcgtctgatggcactcctctcatgggacatccttcgcatgaagatagaatcctgattcttccttccttctagcgagggaaccatttaacagacgcccctccatgctagccaagagttggtgcacaacaaacaa

SEQ ID NO: 181365 - DNA, 428 bp, Glycine max
agcttccccaacatccaggtaattcaacatccttaacatcacaaactaacaaaccaagcaaaacagggcaaaggcaaaaaactctgcccaaaactcaaacaaaaatcacaactttttctcacttaaagactccagtaacatttccttcgttccaattcgttaaccgttggatcgactcgaaaattttactggaagtctctagtacataagtctacattttgaccgttgggatctactagcaaccatccagcactaattctgtactactctttctacaaccagcaaatacatagcattttttctgcacttatgcaaaattctgctgcacatttcaacagcaaaattctgcataaagtgcagatttcgaaaaccactctttccctcatccaatttttcccaaattgaatcctacaagtcccaaatcatgt

SEQ ID NO: 181366 - DNA, 421 bp, Glycine max
  unsure (1)..(421): unsure at all n locations
aaaactacgcttggacttatgcttgaggccacgcactttctatctttgccccggagtacccctgtgatatgcgcaggtcgcattggggttgtaccaccttgggaaaggagactggtagattcttctgagggtcaccactgcgaactagttggcgattaaggatggaaacaaatccccgtatgacattgaaatcggagcgaactccagaatcttttccactagaggattcctcccccaattggaactcgtgccaggattgaaatcactggcgggacaaggccttgcaggagccgggacttgagcgggggctctttgtggtggggcagatgtcctttgctagacgggtgccaagttggaggagtttttggcactagccaaaaagccggatggtgttgggcatatngatgagtattctgagggg

SEQ ID NO: 181367 - DNA, 387 bp, Glycine max
agcttcagcctcagaaccgtgcatcttctcatgtatcacttcaccaattccaacgtcaagaaaataggtacgaaattatcaaatttttaatttttttttttgtgattctcgcttactcaaaaaaatcgaatacatattcttcgttaaaacattacactactcctctctctctctctctctctcacaatcagaaaaaaattaggatccgctaaattgcgccggggaagaggttttccggcgcacggagctaaggtgcgccggtgtttgggaaatgacgcgttttttgttgtgatgtttgttttacctgcatgggaaacgcgtgtcgtgtgctctcaatgcgaatgcggtgacgtggcacacgaactgaggagttttgattttttcggg

SEQ ID NO: 181368 - DNA, 506 bp, Glycine max
  unsure (1)..(506): unsure at all n locations
tacggacctatgaatactaagcttctcctaagctaanattggcttatgcatatttgtaaatatatatttttataaaagttaatatgagatagcttctacaaattagcttatgtataagctaattttagcttttgggaaaactttttcattttctttcctataagtacttactatctatatgtttaatggccaagaaagtatgaatttatatctttttatatatctctcaaacttcaatattttttctcttctcagaattttgggtttgttggcatgacccttgttctatggtctcctactgccattccattgccaatttttggatccttgctacaactatttgagttcttcaaagggtaggttggtggggtncatcttcatttttgaatccatgttgtcaatgcattagttggttggaaatgcaagtttctctcgacctcatattccaacttctttacatgccataacttggctaanagtgtatggacatatgggtcttggagttg

SEQ ID NO: 181369 - DNA, 438 bp, Glycine max
  unsure (1)..(438): unsure at all n locations
agcttctgctcattgtggaacttcaagcttctttgatagtcctaataaaaaatttgtttcctagcagataatgcctccatttcttcactgctaacaccactaccatcagttccctctcatatattgacttgacttgagccctgtctgacagagccttgctccaaaaagctaaaggtttctcttcctacaataaaactgcccctagcccagttcctaatgcatcaggttccatgataaaatttttagagaaatctggtagtgccagaataagaagcctcctcattgctgccttaagctctttaaaggcatgagtagcttctacgaggtatntataaaccaagttagagatagttacaatccaggtatttataaacctctatacagcagaactaactataactaactctaacaaaaagctaacttactctaacagctagc

SEQ ID NO: 181370 - DNA, 425 bp, Glycine max
tcttatccaaggtaattcttggcggtgaagctccttctttcttgtcttattccatagtggatggtgcctcccctctcctcttctcctttgccttccgctgcatctccagggtgtaaaatcaccattaaaggacctcattgaagctcaaagatccagcctccatagaagctctacaagcaagcttccatcacaatatatataaattatcatccgggaaatcatcccgaatgggtaagtcctcatcagacacatgttcgatccgacttaaatgatcagcaactaaatcttatgctctgcttctatcacggatctccaaggcaaattcttggagccaaagcatccatcagatcaacctacgctttgaatcatccttctgcaacaagtactctaaagctgcatgatcagtataaacaataatgcgagta

SEQ ID NO: 181371 - DNA, 343 bp, Glycine max
tccaagagagggaagagtaggagtcccttctcaaagccttgatggaagaaacctctattgcacttgtataaagctcaaaaaatgacaaagaatgacttcctctccctcttggtgaactcgtgcaaatgaggaaggaaatgggttccaaattggtttttaacaaaatataaagatgaggtttaaggttgggccaaaggaaacttggttaggttaaagttgacaagcttaattgacaacatgaatgactcatgaccagccatgtgtaatgtgccaagccatgccatttaaggttatagtggcttttgaaaattaaccaaaagcggctaaagatggtttaaacaaa

SEQ ID NO: 181372 - DNA, 418 bp, Glycine max
ggaaagtgaacacaagtaataagcaactatgtttttatttatatttatggcttaacgacacttacatgaacaaatgttaaaaacaaaaagtagatgattcacaagccgataccgatgatcctaacacttagcaaagtaaaaacaaaagaagacagcgaaaaacattgatccttagcatttcggtctgttacctccactatttccccattcaccacttccttgaagggccgatagcttcaaaggcaacatcgttggccacaactttcacttgctccatcatggcattaaaatacggcacttcctccctaggtcttcaaccatatagtattgtgcttaaatagttcactttgcatgagcacccctaacactgctcctgaaagtcaggttgtaaagatccacatgattggcctctgtcata

SEQ ID NO: 181373 - DNA, 315 bp, Glycine max
tttggagccaaccctccctcaacaagtctataacatcaatataaacttgctcaaactggatatacacctaaaaattcactgaatcaaaatgtgacttctcaacacccaattataccctagaaatggctctctcgtcactatggccattgagttttttctcttgtacagcccaagcattcttcataagtctaaatgaacacttcagctccgaattactcactttaacctgcaaatgccactaaagcaggattgaccttcaactctcaaaacctactcttgttcactcataacaccatatattcacttctaacccta

SEQ ID NO: 181374 - DNA, 432 bp, Glycine max
  unsure (1)..(432): unsure at all n locations
agcttngangcaacatttggagagggaatgaaacatgatttgatgcactccatgagaggggggatcaaatggagaacagagatcataatgaagaagaaaggaggagaagagggaatgatggtgttcctatacaaaaccgaatggatggtattaaactcaacattcctccctttaaaggaaagaatgatccggaggcctacttggagtgggagatgaaaatagagcatgttttcctatgcaacaactatgaggaggaccaaaaggtgaagctcgccaccacggagttttctgactatgttcttgtgtggtggaacacgctacaaaaagagagagcaagaaatgaagagccaattgttgatacgtgggtggagatgaaaaggatcatgaggaagcggcttgtgtcgactaattactcacgggatttgagattca

SEQ ID NO: 181375 - DNA, 339 bp, Glycine max
  unsure (1)..(339): unsure at all n locations
gagcctctatggaggctggatcgatgagcttctattatgtcctccaanggtgatcttccaccgcggagatgtagcggaagacaaacgagaagacgtgagaggaggcgctctccaccacggaataagccccggaagaaggagctctcccacccaaatgagccctggataagaaactcggaaaagatcctcccatggacgaaaacaacaaaggagagaaagacagaggggggagcaccacatcgaaggaacaaatagggagagaacttgaaccttgagttgcgtctcacaacactctcattcttaaagttacaacaagtgttcacatgctcctattataaa

SEQ ID NO: 181376 - DNA, 369 bp, Glycine max
  unsure (1)..(369): unsure at all n locations
agcttgtccagaagctcccttttatatttgagggaatgcgcctcttccttagggcattcttaagatcattccaatactctactagaggattgttagtcggtgaaaacgactaacttttgtgtataaaacttgtataaattgtatcaaactcttccaatttatggttattttgtagcgttataagtattttctgttaagtataggtaatcaaatattagnacttccattctgtgtggttaataatcattttctctcaatttcaggttaattaggcaagctttgaaaagtgttgtttttcaccttctcgctaagccaatttgttggcttagcgagcgtccgctaagcacaacactcatgggctaagcgcga

SEQ ID NO: 181377 - DNA, 479 bp, Glycine max
  unsure (1)..(479): unsure at all n locations
taatcaacacccagtattctttgtctataccaagctcctattggctctaaactaatcagaaaagattagttggttgtgtttgcacaatgactaaatctatgatcgtcttaaagagggatttacaatcaacacttatgtttttctctcaatatgttcaaggtgttttgagagttttttctaactttacaagaatatccataatgcttcttatagaaataataatgaatacttttgcacaaatggtagttcttatcttcaaagcttctgatataatataggtctcatcttcaagagtccattgtctcacaatacgtagaattcttcacttgttcttcgtttgatgaatgtggtcgttgaaacatttattacttgcattaaatgtacatcctttcttcatggagtgagtccactctttgtcactggcgtgtngaacactgtaacaagtaatcactttctttttgctagagcacgtctatgta

SEQ ID NO: 181378 - DNA, 406 bp, Glycine max
  unsure (1)..(406): unsure at all n locations
agcntgagggccgggagcgttttcacatttggtttttcngcncctagaaaaccaatgacagtggaatggagaaggaagtaagatgattggagatgccacttcaaggagaagatgagtcatgaacaatctcaccaccataggaagcaatggataaaagcttgaatgcatgagaagatgagtggaaggagaaggagagaaaaggcacaaacttttatgcctcacatgaggtgcgaactttgaagtgtaattctcaaatgatcaaagttgaaaaaatacacacacaatgcctctatttataacctaagtgtcacacaaaattggagggaaatttgaatttctattcaaatttcacttgatttgaatatgaatttgtggagcgcaaatttcactaattatgaatagcgaa

SEQ ID NO: 181379 - DNA, 363 bp, Glycine max
  unsure (1)..(363): unsure at all n locations
atacacgatttatgatttgtatganccaatttgagcaaaattatatgtgggcaatatggatcttcaaatctgccctattatgcagaaaaatgctcttgaattgtgcaccaaattttttatgagtgcagaaaaatgcttgagcattgctgggtatgggaaaggtagtacatattgggttctagacatttattagcatatcccaacggtcaaaatctatattatggtactaggaacctccagaaaaattatcaaggcgatccaacggttaacgaatcggaactaagagaatgttactgtggtatatgagtaacgaaagctgtgatatttgaatgtgctttgggcagagttatctgcctctactct

SEQ ID NO: 181380 - DNA, 417 bp, Glycine max
agctacagataacagcttctttggcttttttattttgtagggaagaattattgtttttgctgttgaaaatggaaaactacatctaattgccgagaaagagacaaaaggagctgtttattgcttgaatgcatttaatggtaaattgcttgcagctattaatcaaaaaattcagctgtttaagtgggtgctccgggatgatggcactcatgaattgcagtctgaatgtggacatcacggacacatcctagcactttatgtgcaaactagaggagattttattgtagttggtgatctgatgaagtcaatttccttgttaatctacaaggtacattttaaactgttgtgacactaatctctgtctggtgttgtaaattacaactgttcttctgcttagtgtttggatgaataatgattttt

SEQ ID NO: 181381 - DNA, 158 bp, Glycine max
tggaaccctacaacggaccacaaacagagtcacggcccacggaaacaaatagatccaaggcgcgtacagaaatgggatgccctgctctgagaaaccatgctctaagacccaactggaaaaggtccttgccaagagaggcatcacccaaggaagacaat

SEQ ID NO: 181382 - DNA, 421 bp, Glycine max
  unsure (1)..(421): unsure at all n locations
agctntgcttgatggagaatacgannnctatggtttttttgatnnngggcccggaccctttgagtgtgaagttgaaacgagacaatgatgggggactttctaaaacagagttctttgatgaggttggaaatggactttatttggatacagatgttgatgagtatgactaacacattaatttggatcttgaagaatccatggtacccaacttcaattcatttgtaaggaaggaatgtagcgatggtaacctgaaaaatgcattggttttggttgaagaaatgctttgttggggacaagaattgctatttcctgaattttcaaatttagtgagacaactttgttcatctctttcacaaatcaagtcaatgaccaagcttttggagcaaatgccaaagtctgcccataaactcgacccagaaac

SEQ ID NO: 181383 - DNA, 360 bp, Glycine max
cgtgatcgattacacatatactgtgatcgattaccagagaatattttcagaaaatattctcaacagtcacatgtgtttacttgggtcttgaatggccatcaaaggcttatatatatgtgacttgagacaccaatttgctaagagtttttcaaaacaaaaaggtcttatcttcttaaaaagcaaaatcgttttatcctcttacaaattccttggccaaaacacttgtgattcaataaggaattatttgagtgctcaaattgttcaattggtctctttcaagagagataacttcttttcttcttctttattttgaaaaaggattaagagaccgagggtctcttgttgtaaaaaatctgaaca

SEQ ID NO: 181384 - DNA, 398 bp, Glycine max
tggttctataaccaactaattaagtcgatgcaaagattagataacactataacaatcatgaagctctcataataaaattacctcttttatttatggcagatactttactatcaagcaaacaagataaataaaattagaaagatacccacgaaagatgaagaaacacttgagaatactcgttctagtaactaatttgttataagatttgcactgctagatcctcaaacaaccaatctttccagaaaaatcattaatgatttaccattcttatttaaaaaatattaaggttaacttttatgaaccataatcatggatcatgttatttgaaacaaaatttataccatcatcaagaaggagaatgatactttaataatgatacttcaaattgtaccatcaaa

SEQ ID NO: 181385 - DNA, 339 bp, Glycine max
  unsure (1)..(339): unsure at all n locations
acttgagtcatcaagagattataaatatgcgaccattgttttagtttcaataacaaccaataatcaatcatctttgaatcatctatcttttacatcatcttttttcaacatccttgaatcaatctttcaacatctctcaatatcttctttcatctctttcaacacctttaatagaacattctaattcatttctctttatctttctaaaagattttgttcaacactttctctttcaagaaaagttctttgatcaaaaacttgtgttattcatctntttcattctcttctccctcttccaaaagaacgaaagactaaccgctagaattcttttgtctctct

SEQ ID NO: 181386 - DNA, 450 bp, Glycine max
gaccttaagtcacctgcggcatgcaagctggacctaggatcaaacatggcgtttgttccataagagaaaactaaagagaagattttatgtattctgtacaacaaactcccaatattacaatggaagcagaacaagccatttatagctgatttgtttgtacagtaaagaaccaactacctaatgagagctggttacagtatacagctgtcaaactaactgaattaaaaatacacattacgacaactacactgactactggagtaagaccatactctaaaataatatccaatccccccccccctcttaagttagcttttggatttaaagaatagggactccgactaagctacgacttacaaatgaactaaactatttttgctataaacataatgaatggtgataactggctatggaatagggatcaacgactgtcatattcaaacatacaaa

SEQ ID NO: 181387 - DNA, 311 bp, Glycine max
  unsure (1)..(311): unsure at all n locations
catatacttagtcttagatctttacccccangatagaggccctgtcgctgggatatcgaaagaactaatacattctccggtgatgcattaacgattaagtggtgtgtcctagatgatcctaataggaaggtcttacaatgtggagccaaacattatcttcctaaacctaccccttacatgctgatggattattccaaagattggttccaaatcaacagttagatatggaaggctgttgattgaccacactaatgggatactttcacaatgagcgtgattgatcctacatgataacctctgtctatgggacg

SEQ ID NO: 181388 - DNA, 423 bp, Glycine max
  unsure (1)..(423): unsure at all n locations
agctttgagcaaattgaaatgacaataactttattcacggatgnccggnngagtcccgnaagatatcgagacgctcaaaatttaaatccgaagctctgagaaaattgaattgacaataactttatacacggatgtccggttgagtcctgtaatatatcgagacgctgcacattgaaaacggaagctcgtaggaaattcaaacgacaataactttntactcggatgttcgattgaatcgggtaatatatcgagacgctcaaaattgaaactagaagctctgagcaaattgaaatgacaataactttatacacggatgtccggttgagtcccgcaatatatctagacgctccaaattgaaaacggaaactcttaggaaattcaaacgacaattaacttttactcggatgcccgacagagtgtcgt

SEQ ID NO: 181389 - DNA, 471 bp, Glycine max
  unsure (1)..(471): unsure at all n locations
ttctaacaaaaattntcatgtaggtggaccttcttctagttattctgacttaccgcagcctcatatccctcttccattcccacctagagcaattccaaacaaaaagatggaagaagcggaaaaggagatcttggagaccttcatgaaagtagaggtgaacatacctctgctagatgccatcaagcagatttcaagatatgccaagtttctaaaggagctgtgcacccacaaaaggaagctcaaaggcaatgaaaggattaacatgggcagaaatgtgtcagcattgataggtaaatttgttccacattcctgagaaatgtaaagacctaggtactttctgtataccttgcattattgggaacaataaatttgagaatgccatgctagatctaggagcatcagttagtgtcatgcctctgtctatttcaattcttatctcttggaccttgaatctaagatgggtgatcattg

SEQ ID NO: 181390 - DNA, 414 bp, Glycine max
  unsure (1)..(414): unsure at all n locations
agcttctggaaggagatcaacttgatgttctatgcctcttgttgtggcagnccatgaggaatctccataggaaagacatttttaaattcctgcaacaagggttgaacactaggagaaatagaaatagtaaactcattagaattatcagtagaaattttactgtttttgcaatactgtagattgagtggttcataagcaggtaacattttcctcacttcactcgcctctgcaaaataattaaattttctctcatgtgtatcactctctctcttatgtgtatcactcttttcctcgggtgtatcactcttctttttatattcctttgtggggcctcactatcttctttctcttgttctctcttttctctcattctgattnggncttcacacacttctctaggggatagaggtttaa

SEQ ID NO: 181391 - DNA, 508 bp, Glycine max
  unsure (1)..(508): unsure at all n locations
tacgtgacactatgaaactaagcttgtcattcaatttcgagcgttccgatatattacgggactcaatcggacatccgagtaaaaagttattgttgtttgaatttgttcagagcttcaacattcaatttcgagattntcgatatattacgggactcaatcagacatccgagtaaaaagttattgtcgtttgaatttgctcagcgcttcggtattcaatttcgagcgtctcgatatattacgggactcaatctgacatccaagtaaaaagttattgtcgtttgaatttgctcaaagcttcggtattcaatttcgagcatttcggtatattacgggactcagtcgaacatacgagtaaaaacttattgtcgtttgaatttgctcagagcttcaacattcaatttcgagcgctttgatatattacggcactctatcggacatccgagtaaatagntattgtcgttggaatatgctcagagctngtacattcaatatcgagcgttccgatata

SEQ ID NO: 181392 - DNA, 432 bp, Glycine max
  unsure (1)..(432): unsure at all n locations
agctngagggttctgtagattaaacaacttatggatttctatttataaactattgggtcgaatttgttcagctttgagcttaagcattatattgttctgctcacaattacagtgaaattcaacactgtttgatccacaattcagtctaagtatcagtcgaataaattctaacagaaaatcatacaaaatcattaattaaattttaaattagattttttttctttaagtaaaatcaatcaagttaatcacaattacataaaacatggtgtcacacctatctaatgatttcaacataacttacaaaggtgtcaatctctgtacaccttgtacaggttgctttttgtaactatgcttgacacatcaatacaaatcctatatttgtctttcaaaaaaaatatatttgatctcttaattatactatggtttcaacat

SEQ ID NO: 181393 - DNA, 322 bp, Glycine max
gggcgatacccctctattctgtcatctgagaacacacactccaataagcgtaaaaggtcccattatggattccagctacaataacacctccgctattgtctgcagaaaagatggaagaagacactaaagcggtgatttttatctacaacaagctccaatttttatctcaaacaggtttgcgttctttgactctccgactatattatgtatgtttctctgcttctcacaatacaaaagcatcaattctttttgcgaacctcagccttcttccatgtcccacctttttcgggatttgcgatcttcccaagacaaaagctttcaa

SEQ ID NO: 181394 - DNA, 313 bp, Glycine max
tcacccacgacaccaaggttttgtttgggggagatcacttcaaccctgtattatttgctctaaacattaatttcttttcagggttaacccacaatatgttggaggcctcatagatacctggtttggactaagtatatacatgacaaacatgtacatgggaaagcttgatggagaactaagaaaggatccactacctgagatattggcatagtgtgtaagataaaggaatcattgatcggcatgttatgtttcccttaaaacacaagacaaataaggtagtgagaaactttgagaaactggttgaaaatcctct

SEQ ID NO: 181395 - DNA, 388 bp, Glycine max
ctcaaatagtgcaaaaaacacttgtaacaattccagaacaacatgaagccacattgacttccttggagaactcaaaagagcttgctactatcaccttggcagagctcttgaccgcactacacgctctggaacaaacaagactcatgagacaataaggcactactaaaggggcgagctaaatcactggacaaaaaacagaatggcaagtcaagaagtatcaaccacaaaaatggtagcaaatcctctcatgatattccatcatgcactttatgaaaaaaaacaaccatccacagaccaagtgctggcggaggccagatgcgaaatgccataaatgtggacaattagggcatgtggagagaatatgcaagtcatcacaaaaacaagagaa

SEQ ID NO: 181396 - DNA, 428 bp, Glycine max
  unsure (1)..(428): unsure at all n locations
gcttttatttttaacagactagagtttatngcttattgttttgaatatccactgttatgttaccatgacacctactgcagtataagtggaagtgggtaaattggaaattattaacttaaatttaaacagacaatctatttcattacgtaaagtgatcattgaacaccaacataagacactacaggaaaacctcatagcagaaacaacttaaaacatgaatcatccccagattaccaatcttgtttgaattttgtttcgtgggatggagacatgttacttcctttaggtctagaagaggattcagtatcactatcatgatttttgactcaacaactctcgtattcatttgataggtcctcaagataggagaatgagccatgttggttgcttggtgggttattattgccacaaaatatggtaaataactc

SEQ ID NO: 181397 - DNA, 369 bp, Glycine max
atccttttatgactatccggcggcggcacctcgcataataggcacttgaagaatggcattcacatcccttagaatgaatatttgattaatcacatccatgtttcaacttccatgtgaagcatccataagacttgttaccctgagatttttcatcccattgattataagagtttcaatagtgagattttacttcattctcaactagggttcgttcaaataccaatattagtaccatttcccaacattcatttatatccttcctttatgaccattttagaagagaacatacttcaccatgtaaatgatgggttgtgccttactaaagcttccataaactctccctctagaaatatttatgcttgatgactc

SEQ ID NO: 181398 - DNA, 433 bp, Glycine max
agctttacataagtttctctgatacaaaattatatctttctatcatatccaagctatttatatttacttttcatcttgcctgatgttttatcctaatatcgatgaataatgttgaaaataaaaaacacaaccaacaaaagaccagattcttatctaccaaacatcccacctttccaccagtccatgaaaagaaacaatcacaattcagtgaacttttgcttcataagggaacagaacaagagtttaagactaaaataattaggaagaacattagtaccttactgattgccagaagataaccataattgggtgaaaatcatacctgaagagtagctttatcctcctcagacaacttactattgaccacagcactgtcttcagtgggactaacactgcaagatatcccattttttgggatacagaaagatatccc

SEQ ID NO: 181399 - DNA, 435 bp, Glycine max
  unsure (1)..(435): unsure at all n locations
agcttgtacagataagcaatatttttgtgtttattcactgnannnggnnngggatcagctatttacttagtataagagtgttaaaaaaagaatgatattgaatctacttgctaataagtttcaaccagcttaatgtacaatggctgtgtggtagggaaactataattgagattctattgtggcataatcgaagtgtttcttgaggataacacaaatctatgatcattagtatatgcaagaacaattgatactgtgacttagggcataattccattacaaacttaaaatggaaaccaagtgcacttacaggaaaaaaaatgagaaaccaaaatgaattaagcttattctataagttaaaattaatttaggcatatgttaatgtataaaatacaaactcttgataaaggcaatggatatgtacccattcactccctt

SEQ ID NO: 181400 - DNA, 381 bp, Glycine max
caaacatgaaagcaatatgcgaattctatttgtctgacacacactacttgattagcgcacagtcttgcttagcgagttcataaacattcaatcattcatcagaaaagatgaactcgcttatcgggacagggccggcttatcgagttcatctataaatccagatattcctcagaaagtgatgaactcacttagcgcattcatcgccatttccaaaaaaattggtgttggatcaagtggccttggaataattaagaaggggggggggttgaatcaattattaatgaacctttactaattaacaatctatccttcttaatgtgactagatttaattacgcttttactatactgttgagaaagccaagaacacaatttgaaactt

SEQ ID NO: 181401 - DNA, 378 bp, Glycine max
ttgtttcgacagtgacactctggtttccagtgcctggatgcaagaggggtctaacgcgagcgtaccgttgcaaacggcgattgaatttgcgattctgcctgcggaactgtgcgcggaggcccagtgcatgcatcactcagcgaggaagctctgctgcgcgctgcggcggccgccgacgattttggagaagaggcggacggtcttcgagtagagtccaaccgccagggcggcgagcgcaccggctccgcggccgatgacgaaccttatgtggcccaagagatggccacgctctctgagactgccagaagggttacccgcggacttcatggtggcgcgcttgtggaaacccccgagaacggtcttttggtacacaaaaac

SEQ ID NO: 181402 - DNA, 409 bp, Glycine max
  unsure (1)..(409): unsure at all n locations
accttgactcgaggaggatggtatggggttgatgattgggaancatggngaggtgaggtgggtgaaggttcacgggatttactggccaaggttgagatgagagtgtcaagtttatgggtcatggtctacaggctttcgctgaggctaagctgatggatggtaagcttagcgatggcatcttccagtttgtcagaattggatttcgaagccatgagtgcgagactagagcaccaaattgttaggaacgcaatggacaattctggacttcgagggccagacctcctaaaataaaagaaagctaagttttgtgttttcaattcatactctgccttatttcattagatggtatttataatggattacaataacagaatctgtaattctgtgatgaccggtcctaacataaatg

SEQ ID NO: 181403 - DNA, 496 bp, Glycine max
  unsure (1)..(496): unsure at all n locations
gaccttagaaactcaagcttacaactgaatcttcaaaagaagatgttgggtcttctttatcttctagnacaggacggagttggattattgaaccagtgggtatttcgaagaccgattcattctcacaaactggattattggagcaaataaatacaacagctgataaaagtgattacttgtggtactcattaaggtagatatatgcctctccaaggttgaaagacattccctctgacttataattttctgctccttgattgcactgctctcgtgtttttttaaagcattgattataaaggtgatgctagntctcaaactgtccttcacattgaatcacttggtcatgcccttcatgcctttattaatgggaagctngcaggtcaatacaaactaagcattggcaattggatatatgtctggatcactctgcgtctaccaatgttcttcctaaatattcatatgtctttatgttctgtataaatgaatgtccctatgt

SEQ ID NO: 181404 - DNA, 402 bp, Glycine max
  unsure (1)..(402): unsure at all n locations
agctnggaatgctgttgtatgagagaatattgatttcttctcccaaagnccagggctcctattgcaccacacgccgagagggtcaccaccagagtggcgtcattgggctgcaatccattctgcaccattctgcaaaacagatggtgagctcgtttatagtttccacaatgcatatgacagtctatgatagagttccaagccactaaatcttcatttggaatttcctcaaacaggtggtgtgcagtttctatgtccttcaccattccatacatatgcatgagtttcgagtccaagtttaaggatggtgcaatgcagttgctttcccactgtaactgattctttctatcaaccaataattntaagcaggaaaaagaacgtgaaagtgtcacctgcatcgggttg

SEQ ID NO: 181405 - DNA, 343 bp, Glycine max
acgggttttgaccttttcaaactggtcttaagatattctaaaagaataaatcttttaatggatctcttgaccagacatgaagagtctataaaagccacgcgtttgtttgcctttcaatgatcttgaacaacctttacaatacaatcccttacaaactttgaatctctttgaacctcttcttcttcttctttgtgccaaaagcttccctaagtttattggtttctaaccttgaaacatgtgctttcattcttcatctgtctcctctgcaaaagaatcccaagacaactgctgatcttttgtgcctctgccctttccaaaacaagacaacgcccaaaacttggcc

SEQ ID NO: 181406 - DNA, 420 bp, Glycine max
agactgggggctaataactcgtttattgttttatgtctaacaacataaaaggaagagaaaagttgaagcatcttaaatgaatttattattttgctttaaaagggcgaaagtggaataaacaccgaaaaaatcctaacactcaagtttatagatttttttatttatttatatgatattcaattttttcacttttactttgggacttcaccacacatttactccaactccaataaagtgtacttgctacttaagccaccatatgtccctatcctcatgtgaaataatgtcttatctttcaccttcttttacactagaaaacaagttgagttgagtaatgtctgtttacacaataacttgtaaatcctgcaagagatatcccacctctctccttttgaaacattattcacactggctaataaa

SEQ ID NO: 181407 - DNA, 474 bp, Glycine max
cgctgaataaatatattatcaattgttaaaattatatttttttttaaagaaaaaaaaagcacatcatcttaatgctttataaacaaatatttaataaataaaatgcatgaattaatattcactatcttaaaaacatttaatatttttatttaataagattaattaaaaaaatgtaactattagtagatctagaattatgttttattagaattatatacaaatccttccaatgaattagaatcataatggccagagaccaacttttgttattttttcttcaaaataataaaatataaaaaattattcaaattatttaaattacatttattgtatgtaaaaataaaaattgattcaccaattaacccgttattccacagacccacttaacctatgagttgcatacataattattggatccaacgtgtcatattatatatctgaagaatattactcatattaaaaatttatattata

SEQ ID NO: 181408 - DNA, 453 bp, Glycine max
  unsure (1)..(453): unsure at all n locations
acccggatccttaagtcacctgcggcatgcaagcttgaaagcagttaggcgttctctcttatttttttaattnttataaagacaaatgttataagaagtgaggctgaattatgattttagaagaagaaaaattaaagcctttttttgaaaaaaaaaagttaacgtttaaagaaaaactttgtaagaaaaataataaatttttacaaaaacttgtttagacaatgaaaatagatttcgcaaaacataaagtattttcaagatgaaatgaaattcaaacccctatattaatttaaagcaaaagataaatacaataaagacatataagatataaagaattatactagtttatctttaccactaaggctatgtttaagttttgattaatcactaagtttcactaacttctcacaaatacaagtattacgtcacaatcatttctcgctctacaaatca

SEQ ID NO: 181409 - DNA, 414 bp, Glycine max
gacacttaaaactaagctgtggctgctgattctattatctcaacactgtatcacttatggggtaaacatatagtaaatctaacatctgcaagaagtctgaattttatgttgcagtcttttacaaaaataaaattagcggcaatcagtcttttccttgcaaatatattactgaatttcatctttaaagacttctatttgaatcaattattatcttatatcaaatatggcttgtccaatctttttgagaaaaaaaaagctaggaatgagtgcagtaaccatcttccaagtcccagacgaggaccttcctatcaactccactagtgttggaaacttagataatagccagtgctagtgactaaagggaagaagaacagatcatagaatatgcatggaaagaaagaaaatcccctactg

SEQ ID NO: 181410 - DNA, 438 bp, Glycine max
  unsure (1)..(438): unsure at all n locations
accttaagtcaccgcggctgcagctaataagcaactgangntacagttctgtttcnntnnnnncnaaccaaggataattcccagctaagagccaaagactgatctcattaagtgactgattgttttcaatagatgtttttcctgacattaggacatagagatcaaaccccctaactgcaggcttaagttaagagacaagattatctgataaccatgtcatactatgttggtttagtgtacgttatttgttatcactacttgactaccttctaattctaccaaactacaaaattcattgtttaagcaagcaacggagagcctagaatttgaccagtagagaaagtatacatgattttcatttcaaagcaaaattcaacttctcaaacatgatatcttgatttgtaggccgaattacgggatagaaacaaaattgaagtc

SEQ ID NO: 181411 - DNA, 386 bp, Glycine max
  unsure (1)..(386): unsure at all n locations
tnttgaaatgaacagcgcatgaatattagttgatatttcttttatagccgatcattgaatttagaatctgatttaagttgtcttgttctgtattccatgctttacatgtgtctgttggatgataccaatgtggcaatgttcttattagtcattcataaagttgaatcacctgtggtgtggcatacttatttttaaacagccaaacttgaatttgtttgctaaataaaagtgcttggatgttgttgtgaaatacatttgattcaaataagctctttcttctgtctattaagatttaaaataggtcaattcaacctaactgacatgattgagggtctgaggaagtaactaaatggtatttttctggactgaactgcttttttgtgtgt

SEQ ID NO: 181412 - DNA, 436 bp, Glycine max
agctgtgtgtatcttcttgcaccatattcatgttctcaagccttctttctgaagccaagggatgtttcttagcattcacaccagtgttgttgctaattggttcgttctgtaattgaattgcaattactatattgcttgatgaggaatttcttaatatattcatatatgacaaacaaaaaaatgacttcactaatttttcacactattgatgaaaatatgactgttactactttttacacttaatattgagtcatttatagtttgatttcactaggtccagttaccctgctgatggcaagttataaaccttgttcagcaagcataaagcacacaaaagttgcaatgatatattctattgttgtttgtctgagccacttatatttgtccttaaaatatgcaatgctagcatatgaaatatcaaaattcttgttcatga

SEQ ID NO: 181413 - DNA, 487 bp, Glycine max
  unsure (1)..(487): unsure at all n locations
tcttcatgttggctcccctatctctaacaatctncccctttttggcnttgatgccaaacttgaatttccatttgagtgcatttggagagacttgagagtagagacttttcttagaaaacctgaaagtttctgaacacttagagaagtgtcaattcatatcatcatcatcattaggtagagttgtatatgatgtgtgtatgcaatgcactacttcttcctaatgcaatgctaatgcaatgtttctcccccttttggcataacaaggccaaaaagtcacaactactcataaagtaaaaacagacgaacatatgatgtgagaacgaanaagatcatagcatttcattcatagaaacaaaacattacaactaatcattataccattataagagactaaagctacttaataaaaaaaaaatagaaacagaattgaatataatcagaaatgacaatcaaacaactgaactaagcacttataacaccactaagc

SEQ ID NO: 181414 - DNA, 439 bp, Glycine max
  unsure (1)..(439): unsure at all n locations
agcttcaaactntttccagtgtccaaattttgacacatagagaaaaagccaaaagaagctgcaaaattttcttcttttgtcacttttttctgttttttcatcacaaaagtttgaaccttttctttccttccattgaatttggatggctggcggcggaggtggggaccggccgccgtggaaggaggcggcgccgccacgacccaccatcactctgccgccgcggtcgggttccatggagacccttttcaatggagggttcagccctggtcccatgactctgctttctggctttttgggtgatggggatgatggaaagtccttctctcagctcctcgccggagctatggcttctccggtggccggagctgtcgccgacggagtgatggactcacctagtctcttttcaccttctcaggtattattgtgtagatccctctct

SEQ ID NO: 181415 - DNA, 464 bp, Glycine max
gggtactatatatgtcaccataaattatcattctgcctctttattacagtgataaatatgaatatgaaaaaagtttcttagaatagtgattaacgcgaatataaaaattgcctctaagtttcttttgaattggattggtgacttgcaatggttgtgtttatatcatgctatgagaggacccacgctgagaaaataagaatttttaacctaaatatccaaaagaggccaaaacgttgattaccacaataaaaaggttttgcttcatttgaaggcaaagatgctgactcatgaaagtaaagaaaacaaaaatttgcaggctaccattttggctatcatcacttattagtcaattagaagtgaaaggaatatacagattctgatggttatccctcataacatgaagcctgaatggtcaagtgagagatagagggtccagcgtgatatcaatgattgacattggaata

SEQ ID NO: 181416 - DNA, 428 bp, Glycine max
  unsure (1)..(428): unsure at all n locations
gcagctgctttaaagggcacttatgtacatctnagtttatggtngaaacaatttaaaaaaactagtttaccaaacaaacaaatactatgttaggcaaaactagttgaaaagttagctaaaaacttgaaagctatcttattgaatcataagtgttgataaaattatctactgaagtagttggaaaatataaaattaataaaaatatttttttaccttaaatagaaaatatttaaaggaaatctaataaatatttaaggacaaaaaaataaatataaaaagtttgaaggtaacatcttaataaaagtcacttcaaataacgtttaaaaaaatggtagaaactattaaaaaaaactcatttactacatagttgaataaacttttcaacttgtaaagaaagatagaaactaattgaaatatttcgtcaacac

SEQ ID NO: 181417 - DNA, 389 bp, Glycine max
ggagggcagaccaaattcgagacgatccaccggctaacgaatgctgagcactgcttttaccatagcagcttcatgtggcttccttgagaaccttcattaagaggcttcctcaagaagcctcctcgtgacttccttgagaagcttcctcaagaggcatctttgagaagctagatccttatctacccacacccctttattaactaaattaacctccttgaaataattaccgataaaaataacacaacatatattatccaacatcaagcattattactaataatatatagagatatatattatggtgttacataaacaactggatgaagctgcttaatctggaaatacaacaccgtcattgatccctcatcctccatcagacgacacgtgaa

SEQ ID NO: 181418 - DNA, 434 bp, Glycine max
  unsure (1)..(434): unsure at all n locations
agctnttatgggtaaaaaaatgcaatattatattaaaacacaaattattcgttccttacttttttaagtaattagaatcatgatgctccataaccaatgccttttaggcccttaataacaaggatttgactcatccaaagtgagcaactcattttagggaataaagtaaataatcttagtcattgatgagaaaatcatctatcaatattacgtgctcatgcacaacaaattatgaatatgttggaaatatcaaaatttttatcctctcaacaactgaaattactttattgcttactttagaggagccaaatcctaataacaagacactaattttttaaattttgtgtactggttttgcaggcagttcctctgtatctttctgaaatggcactaccacagctaagaggggcaattaacaatggcttccaattaag

SEQ ID NO: 181419 - DNA, 402 bp, Glycine max
tagcaggctcctaaaccaataaaaagaaaggctcttaattattattaaatacaaaatataaggaccatccataatgatgaatcgttaaaggcactaaacacaaaacaacttaaatcaaatacctgtaccctcaagcacattataaggagaaggcgcttcaaagtttattataagataagggttccttgcccagtactcttgaaaactctgtttaacatactccttgtagtcaaagtcgatagtgtttacttgtgcctgaacaaattaatcagaagatgaaacaatgaagaatgaatttcctaccctatttactacagcgtatattatacagtatatgtgggatttctaatggtgcaatatggagaaaatatcttatgctaatggccacaaaatacataatat

SEQ ID NO: 181420 - DNA, 419 bp, Glycine max
  unsure (1)..(419): unsure at all n locations
agcattgtatcgncctaggttcttctattttttcctccagcatattgctgcttgatactttgacactaacctcatttttcaaacatacttcaataacttttgcagaatctgaatcaactgtgccaccattttccatgcagtggaactcttcaccagcagagtttaaagtggacccgagggaatgaaatccacattctctaaccactgaaataaccctctctattgtttctagagcatttctcacatctgagcgtatatatgcattcattctgtccttcagtacactctttgtaccatcttcctcaactggaaggtcatgcattttgttgacatccatctcaatctcaacaatctcttcactatctgtttctacaatctcaccattttcctttcccatcagtacacttaatgaattacct

SEQ ID NO: 181421 - DNA, 415 bp, Glycine max
ttgccctagtgcataggggactgtgcttaacctaaattcttgcactgagtgcaagaagtggactttggcttaccgcaacaagctcgctaagcgtgatttgcaggttataaatacgtttttagcatgaaaaacacgatttttcactctcctcttttccaaaatgccacccaaaccctaaaacctcattttccaccacccaagaccatcggtggccgccgttgcttgccgttggacccccacaccaagagaaacactttaatcgaagcggaatcctcagaatccttcttaaagattcggtgaagaaaatccctcaatcctttatttcaaagtttctctaaggtaatcttgactcttaaaccttctcttagctagattgagttcctcttagtggcttttatgtgttggaactgtaata

SEQ ID NO: 181422 - DNA, 473 bp, Glycine max
  unsure (1)..(473): unsure at all n locations
cggatgtcctttagtacggaatctatccttccttatatggtatccaacccagtcaccctcattaagaactagctcttttcttactctattgcctntagttgaatacaccttagcttggtactctatttggatcttaaccctctcatgcatcttctttacaaattctgacctagattccccttctttatgtataaaagaagtgtccagtgggaggggaatgacgtctaacggtgttaggggattgaacccatatacaacctcaaaaggggactgcttggtggttctatgaacccccctgttgtatgcaaattctacatgaggaagatactcatcccaagacttatggttgcctttcagaagagccctttaaagggtggataaagacctattcactacctctgtttgcccatcagtttgtggatgacaagtggttgagaaacaaagtttagtctctaacttagcccataaagttt

SEQ ID NO: 181423 - DNA, 369 bp, Glycine max
gtggtacttggagatatgtctcgggggtcaagacaccttggggacgacatgtggggtgctattgcccaaaaccacgcttaaccaatcccgacccaacccggacatattcagacagagagaacctgtgacgtacctaaacaggcgagctcctggcagtcaacctttaatagatcaaagaccacaaagcagggaggctcgtgtggcggctggccagctattgatcttgagtaatatttggaatttggcctctggtaatctattaccaatgggtgtaatctattgcaaggcttataaatggacacaggatgtcgaggtggcctctggtaatctattaccaatgttgtgtatcgattacacagagtacacggc

SEQ ID NO: 181424 - DNA, 391 bp, Glycine max
agcttctaaactgtgtacaatattgaactctgataccacttgttagacaagtggcctcacatatcttaagaagggggggggggttgaattaagatattccaaactgtttcccctaattaaaaatctatttcactctttactcaagttatgaattcccttaatgacaatcttcttaaatattaattcaaacgaagcaactttaatatgaatataaagcaataataaataaaggagattaagggaagagaaaatgcaaactcagttttatactggttcggccacacccttgtgcctacttccagtccccaagcaacccgcttgagagttccactaacttgtaaattccttttacaagttctaaacacacaaggacaatccttcctttgtgttt

SEQ ID NO: 181425 - DNA, 440 bp, Glycine max
ctagcttctcaaagaagcctcttaagagagcttcttattataatccacgaggaagcttcttgaggaagcctcttaatgaagcttctcaaggaagctacatgaagttgcctctgtaaaaatgaccccccagccttcgttagctgttggatcttctcgaaacttggtttgcaacttcacaagacaagttgccacgatctgaccgttgggatctttgagaagatgtctggagtctgtgcaacattttcgtgtccgagagcattgctcacttgagtgtttcaacctttgctttcgtgtagcttaagaaaaacgccattttcttctctttctttcttccaaaaccatttctaaacttccaagctttttctccatcacctacagccacctttagccaccacaaactgccattgttctttctttgaaccccacaccgagaggaaccc

SEQ ID NO: 181426 - DNA, 420 bp, Glycine max
agcttacctcgatggatgccaaactctaatcatatcacatgtacttcacatcacaaaacttttgcaatacttttataaagaaaattacaaaaaataaatgcgggttgctttgtatagaaacattaatttagtattctattaagttatcttgtgttatatggagagaaaatatattatataaatgaaagatgttttatatgaaggtgaaagagattaatgaatatgacttaaaattacagctaatattgttttatattattaatttaacagattatattctacagaaaaaattatctataaaaaaattaatggattaatatttattttgcatattttggaagagaaggatgataatatgttcggatgattctatatataccgtacagtatgttcacgtcttaacaataataattatcatga

SEQ ID NO: 181427 - DNA, 284 bp, Glycine max
gggatattttctcctttttattctggaccgaaatgatattcgccctaaatatgaaagaggggagaggatatgtttattcatggtcaatcaagaaagctgccgaatcattcttttacatgatatcagagcccactccaattaactctcttctttaaaaattggagattagcttctgagtatgaaaatgaagaatatgtcaaatgaatcacaatttgcttcacatatgcaggatctatctacaattcctacacctgagcgtcttgatgggaccagttatcccgaat

SEQ ID NO: 181428 - DNA, 415 bp, Glycine max
agcttcttgcattctactaatatatttatttggccactgctttgcctgaggatgacaattcctagaccacaacaatgctagaggcaataaaggacaacaatctttcaaataaacatgttgtacgtgaacaaacattattaattcaaatgaacacaaatgattgcataaatataaagattagactaactatcttcaatgtacctgaacaaaattatttccaaacacgtgaccaacacatatcatgcggtgcacagaagaatctggtggtggttgacttctaagaggaaaaaatgtcatgctttgttgtcaggacaacgatacacggattacattataccttaatgcaatgacatatatgatctccgatatatccatccacttgtccacactaacctgaatcaaacaaacacacaca

SEQ ID NO: 181429 - DNA, 358 bp, Glycine max
  unsure (1)..(358): unsure at all n locations
tcaagaataatggcctcatcaaactatttattttctgatngaaattcaataaataggcctcctatttttaatggagtgggttaccattattggaaaacccgtatgcaaattcttatagaagcaatagatttaaatgtctgggatgcaatagaagtaggggcttatatttccaacatgggtcctggaaataccacaattgaaaagcctatgggagaatggagtgagggagaaagaaaacttgttcaattttacctttaagcccaaaacataattacatttaccctatgaatggatgaatactttatggtattaaacctgtaaagtgcaaggatatgtgggatacccttcaagtacacat

SEQ ID NO: 181430 - DNA, 427 bp, Glycine max
  unsure (1)..(427): unsure at all n locations
agcttgaagtagttcccccatctccacctctgctaattntatttttgggtagttggtttgcttattctgaagcatatggaacagtttgacttgattttgatgacatggtagtaacacacttttatctttttgtgaaaattggtgtatgcttttattttgaattgaatgcatgattgtgatggagtttgtgttctttttcatgattttgaacaagtgtgtttgttagacaaagaaagaacaagaatgtgaacttgcaattagaattgttagtcagtagacaaattaattgagaaagaaaagtttgaaccaaaaccggtgagagtgtgatcttaaactgtgagtgaacgactagctgtgagtaataatatttgcatgaatctctaaattttagaatgaaatgtataaatgaggacatgatgaagtgatg

SEQ ID NO: 181431 - DNA, 455 bp, Glycine max
tctagccaaatggacttaccttgaattaattccttttattgtccttttgagccttgtttccctttccttgttttgaagctcactacaagccttaagtgaaaaaccatgatattaccatatccttaaggaattttggagctttggaattgttttgggaataagtgtggggggtttttgtttcattggacaacttgttttgttggctatgctttatgatgtattttgggccatacttgatgtacattgtatattggttaaatgttggacatgctgaatgaaatgttgtttctcaaaggcccaagagtctaactaaaaattaacactcaattaaacttcttgagaaacgccctcaagttgagtgaataagaacttaaatggcacaagaatgatgaaactcttggttctactctccatgtgtaaattatatctttacttcttttattctttcttttttt

SEQ ID NO: 181432 - DNA, 424 bp, Glycine max
agcttgtcatgtgttgttgactatgatttatttattgattgaacatacctttgattgtttataatgctggaaaaaaattgttgaccatgattcttgtctctatagtatatgtaaatcaaatagaggactgatataatttttatttaacaagtagtatagttgcatatgtttgagagatattgtgaacatttgttaataaataaattcataataatttctttgtattatgccgtaatgtagttatttactttgttgcacatggttagttgaatggatcaaggataattattcttattgttagttaacataaatgttaatggaatttctaaagtaatacctctagagctaacaaagcttaaggaagattaaaggaactagagaatatgaaccaaacatgcctcttgttgttttaggcttggactgg

SEQ ID NO: 181433 - DNA, 422 bp, Glycine max
  unsure (1)..(422): unsure at all n locations
taatattttttgccaaacacactaggcaactactttggatatttgattaatcataacagagaagaacttacattttatcatgattaattgattatacacacatatganagcatgacgaattgaatgtttgaattaggttttaactctatcaaaatcaattctaaaattagttaaaagtaaggcggatgtctttcgttgtcgggtntgttctgatggttggatccatgatatgagataaagtttatgacaganagggtccggtgtttttgtttggttctgtgtgaattggattcaaatgtcactgtccctgctagcatgtgtatatcagcgaatctcccagtctgaaatattgtgtatgccattttgggtcaatgaatatgtattagccatctctcatttctctatgtgtggttaatttaatt

SEQ ID NO: 181434 - DNA, 373 bp, Glycine max
  unsure (1)..(373): unsure at all n locations
aaatgctntgtattacctgtatcaatgaaggtaggcaagttaagttttgtgcctgaacctctggccgcgcaacaccttagaaatattatggctctcgaaatactcatttatatcatgcatgtcacacatcaaggatgctctctagccatgagttccacatcacataactttgtttgagattccgtatatgtatgtgaattacaagatgatgactcagaaaagtgagcctctctaacgattgatgctactcgtctattgtgcagaagctctcctttactctctgcattgtttcttctaaaggtggcttcaatctctatatccaatggaaccaatccatctgcagaagatctactcatgccaacctaacacgaaa

SEQ ID NO: 181435 - DNA, 292 bp, Glycine max
atgaatgagaaacccgtgctgggacttgcattcaatacagtccaattttccaccaacccaaccatgtcatttactaaccaataacaaaccttctccttacccaccgcccatctattcctaaaagccattcctaagatcaaccacaaagcctacctaacgcacttccatgacaaacactacctttaacgtaaaccaaaacaccaaccaagaaatgaattttgcagcgagaaagccttagaattcaccccaattcctcagacgtatgctgacttggtcccatatctacttgacc

SEQ ID NO: 181436 - DNA, 138 bp, Glycine max
  unsure (1)..(138): unsure at all n locations
caanaccgcgcgcgaacaacgaacagccctagacaccaaacacgcgacaaagaagaacccgcccccggaaagccgccaaaagaagncaccaggcgggccccggggacggcggacaaggaacaccgagcaaccaaagca

SEQ ID NO: 181437 - DNA, 260 bp, Glycine max
tactacttctgcttggtctatagatgacataccttttgtgaaggaagaaaaattagtcttaataatagtcaactctactatgatctgagtaaatctaacaagacattatggacttatatttgtctagttggtttgtcaaagaatagtgaagaacttctaaactttttttacggtgatcgatccctgtcattcatggattaactttgtcgattggaataaagttataaatgtgcatgcaggcaaggggaactatgtcatga

SEQ ID NO: 181438 - DNA, 397 bp, Glycine max
  unsure (1)..(397): unsure at all n locations
tgcaagctttggctttgaggactagctccaatgtctcatcatgtcttctatcgaacctttcttcataggcttgaagagaacccatcaattggtctacggtcattgagtctaaatccttagactcttcaatagcacaaaccacataatcaaatttaacgattaaggagcgaaggatcttttccaccacacgaacatcttccatattttctccataacgcttcatttggttcacaatagccaacaccttgttgccaaaatctgagataaattcaaattccttcatatgcaatgattcaaactctctacgtagagtttgtaggcgcacctcttttaccttatcaacaccttcaagggagggtttcanaatcctccatgcttcttttgatgtggttgcatt

SEQ ID NO: 181439 - DNA, 213 bp, Glycine max
aaactgggcgttaaaatgaagtgtgtgtgctcctatctaagaaaaataaaagctccatgcgcgaaggccagctatagagcttgcaataaaataaaaagggcgatctatggatgaacgctctcttacaacccaagatgtcgcctcctacaaaaaccatgaattgattgtagcccagccctattacacacctagtaaagaccttcagattcaatc

SEQ ID NO: 181440 - DNA, 407 bp, Glycine max
  unsure (1)..(407): unsure at all n locations
agcttcggaagatagtgatgaggtacaagttctatttgcagagctcgaaagagcctgggtagtcgaagagaactcaagtccattaccatcaaagtctgaaaagagtatgatgaactaagggatgtcaatatggccaccgatgaagccttggaatgagataccaagaaggccccaatggaagaacactaccaaagcatagttttgaggggcttcatatggcagcaatagtgagctcaagctccgaagaggtgaaaggaatcatcacgggtcaaacgcatgatcttgaaggacgagctaaaggttcgccttacgtccaaaagatatntgtcccaacagttaagcgagactgatgggaatatgtgggccatcatctataagtgcaaagagaagctaaatctatcggcgac

SEQ ID NO: 181441 - DNA, 400 bp, Glycine max
  unsure (1)..(400): unsure at all n locations
tatcttacctatctatctggcagatgtttttctaagattcatagataaaaacatgaagttctaattcaagatgttttctttgttgcatgggcataatgcaatcactctatgtctagcaatgattntattaagatgtccctacctttgagttctactaanaattatcctctctcgagcgactaatccctaanactgatgcatataaaaccttcaatgtatttctactaaagattaccctctttcaagcgccaaacccctaaagatgatgcaaggatgaaacatataatacatttgttggcattntaagcctgccaagccctaactaaagggggttagcctttcattgtcatgagagacttttacactctacggacgtgatatggatggaagaagatggatg

SEQ ID NO: 181442 - DNA, 456 bp, Glycine max
  unsure (1)..(456): unsure at all n locations
agctnttacatgcatgtgcacactatattttctatactntgatcaactgatacaatctatttgattgaaaagataatttatactactcttctaatgtaggggacaactaaaattaaaataatataataaaaaatactgcttaagccattcaaatcaagtcattttgaatctcaccattagtatcatgcatgtcaaagataaggaaaatcaggcattgtaatgcataacacaacaaaacattaaaagaaaacatgcttcctaaagccaaccaaggtaaaaatgtattcatatttcgcgaactttttcaaaattataagacacatataaccatatataaaaacacggtggaacaatctcaccacatgcacaacacagaccacacattatttcagaaaattagtggtaaggaaaaataataaagcactgttaataaaaccgtaggtgcactaagataac

SEQ ID NO: 181443 - DNA, 425 bp, Glycine max
  unsure (1)..(425): unsure at all n locations
ngactcttctgactcatgatgaagatccatgtcattctttagtagtctatcactatggacaaaaaataccttccaccacctagagagggtactcttgcaagcccccaacagtcagcatgaatgtaatcaagagttcctttggtggtgtgaattgctttaagaaatttaatcctatgttgcttgccgaaaacatagtgctcacagaattatagttcatccagtttctgatttcccaacagttgctgtttttgaagtatcatcatacctttttcactcatatgacctagcctcatgtgccacaattgagttaagtcaagtatgctcttattggatctngatgcagcagctacaagaccatcctcaaaacatgttgtaccttgaagtatataaagaattaccctctttatacccttcatcaccattat

SEQ ID NO: 181444 - DNA, 469 bp, Glycine max
  unsure (1)..(469): unsure at all n locations
agcttgtgataaantacaaacaccatatattctatattcgnttattctctcttccaccattgttaatgctagagtatactattgacctctatacattaatagttgcgcatggccaaaaaccaagaacctacagtaaatagttgctagcaagctgtttggcattcattgttttggatgttgtttttgtataggctgcctttgattctttattcttattaattgctactcccactttgctggaaatacatgcgcgttaatggttcaatgaaccaacgtgtgattaatcaatattgagtggccttacctttttttttcttgaattactcattntacctaacgcttggacggttttatttggacaaacattctcaataactctatcgaatgttgatcaaaattcccatacttgattatcgggaaattaatttcactgatttcatgtcgggtacttggggaccaatgcgaaatg

SEQ ID NO: 181445 - DNA, 299 bp, Glycine max
cggatgatcacactcccaacaagaagatagttgtgcgcttaatgtacacctaaacacaaactaaacacaattccatatgataaattcgaaaagatgctgttaagataacttctgcatggatgcgcgaattgttatcatggccaaaatatcatgcttaataagaataatacacctactttgaaatcaatcatccatgttcttaattcgagaattatgttctcataaacaatatattacctatactgtaataaagccctctctaatacttcactcactttattaaaaaagtggaaaaaaaa

SEQ ID NO: 181446 - DNA, 442 bp, Glycine max
cattacgtgaccttagaaactcagctgaggaaactgagcctggcaatctattacttatcttgccatgaatcagaaatatgcacctgttgcaagtgtctgtggtctatgttcttctgcagatcaccatacagatctctgcccttctttgcagcaatctggagtcaatgagcaacttgaagcttatgctacaaacatttataatagacctcctcagcagcaaaaccaacaacaacagaataattatgacctttcaagcaacagatacaatccaggttggaggaatcatccaaatctgagatggacaagtcctccacaacaacaacagtttggtcctcctttccaaaatgatgttggtccaagcaagccatatgttccttctccaatgcagcaacagcagtagcagtcacaacaaagaccacaagccactgagtcttcttctcac

SEQ ID NO: 181447 - DNA, 405 bp, Glycine max
agcttaggaatcttgaagaaggttatcatataaatgggtaaggctgttaagactgaattaatgagggttattctaccccccattgatagatttctttgcttccattttgtaagtttagcctcgcatttgctaataatgggctgccacacagacctatttttagagctcacccctacaggaattccaaggtaagagaatggaatatccatttgactacaattgagagaagatgctgcctccctacaccagtcctccgatttgcccaaacacccaaatttgctctttcaggatacactttagaattttcccggtatcttctccatatgcaatggccaccttcacgatttgaaatcaaataaagattggttggtggcgctttctcttgtgtccagcacattctttgga

SEQ ID NO: 181448 - DNA, 447 bp, Glycine max
tagtgagcttgtagacccattcttgtagttgagtcatatctagtagttaacaggatgctaacttcagtagcaaggttggcctttcagtgtgtgcaacgagacaatgaattaaggccttctatggatgaagttctggaagcacttcagaaatttcaaaatgggaattatgagtctgagaatctacagaaaggagatgatgatggcgttatctcttccacttcatccagcgaagtacatccacctgtttacactggaatttggtaaacaaccgctagtctaagttaattgcttgcgagaccaactagtgaatctcaagagcatgtcaattatgtgtttgctttaaaatgtcaagttttctgatgttcatcattgcaacaaaccgttactgtgtcggtattgacagacagaccaactgttaacagaaatcgaatgctggaagaacttgac

SEQ ID NO: 181449 - DNA, 398 bp, Glycine max
aaaaatattgctcatattcctctaaaaaatttactataatgcatataaaaaggaatttattatatcattatttcaaactcctttcgatattgaatatatgcaaagaaaaatataatttatacatattaagaaaattggttaccataacttaattatatcaatttcatttaaaacataagccttttttttcttctaaattatcctttaacttggtataagaataaaataatcatgagaacaaaacctcaattaaatgaagcattcgtaagaatgatctcattgaataagataaaattattcaaattttacttatatttaagattgaaagagtactatttaataatatgatacctcatttaatctccattataaacaacaaaaaaatcaatttcactcct

SEQ ID NO: 181450 - DNA, 99 bp, Glycine max
cccccccctcgacacctattacgtttacaattatctaataaaaggggggggctcatccctatatcccccttatctcaccccacaccaccctaccatccc

SEQ ID NO: 181451 - DNA, 420 bp, Glycine max
  unsure (1)..(420): unsure at all n locations
gctagagcctagctattacacccatctaaaaactaagctcacctncttgagaagcttccttgagaagctagagcttagctacacacacccatctaaaaactaagctcaccttcttgacaaaatacatgaaaatacaaaaaaaagtccctactacaaagactactcaaaatgccctgaaatacaaggctaaaaccctatactactagaatgatcaaaatacaaggcccaaaagaaggaaaaacctattctaatatttacaaagaagtttggatccaaccttgactcatgggctaaaaaatctaccctaaggttcatgagaaccccagggccttctttagtagctctagcccaagcctcttggagtcttctatcgaatacccttgggggttaggattgcatcatccnctccaccttggaaag

SEQ ID NO: 181452 - DNA, 466 bp, Glycine max
  unsure (1)..(466): unsure at all n locations
agctntaaaatttgaattaaaacgttcagtttctactggtaatcgatnaccatatatgtgtaatcgattacactgtgcaaattttgaattcaaattttaatacctgttgtaaatcagttttggccactggtaatcgattacatcctctggtaatcgattaccagagagtaaatctcttgaaaaagacttttttaacttaaatttcttggccaaaccttttgctacttcaattggaattcccttcctatttaatgtaatcttcctaagactcaagagactgtcttgatcatccatcttgaatatctttgatttctttgtcttgaataaaactttgagaaacatgtaatcctttggcatcgtcaaaacatcagcttgatcctttgtctacaatctccccctttttgatgatgacaatcctgaaataagacaagcttatacaagatgatgcacgtcacacagccttact

SEQ ID NO: 181453 - DNA, 340 bp, Glycine max
  unsure (1)..(340): unsure at all n locations
tgaagttgagcttcattcaatacccggaaaccaattgtcttctggcgggttccatgatgttctgagattcttgtctaactcaacaagagtcttgggttccactaaagggttgattctttgtaatcacgccacgagccacacaccaattgaactcttcatttgtacccatcacaaaaacttggtacccattcccacctccgaggaagttcaaaatagatatgatgctgctgatcccacaatgctgttgntagaatcttcctacgatggctgtgatgatgattacatggtatttcaccttgaacttgaaagcacaacagattgttcttccactatgtctgca

SEQ ID NO: 181454 - DNA, 411 bp, Glycine max
  unsure (1)..(411): unsure at all n locations
tgaaaacgagctcgcgcctttcctgatctcntttttctctcaactagctttcaatgcagcaattctggatctgacacccctctctggatctgtttgtaatacaggtgaaaattgtgttgcattgataaattttttttgggtgaatgattggagttcaattttatttggatcggtaatanctgatgtgactgcaccccaccgcgatcaatgaatttatatgcatccatcacttantaattcaaaatctataatttgaattgacaagttttattcaaatatgtgttgtatcgcgctcatcattcggtgtgttaaatctcatttctcgcagatctggcgctaattatgaataaacttctgtatgttaaaactacgtcacgatattatgaggggctgaattgaaagccatacact

SEQ ID NO: 181455 - DNA, 374 bp, Glycine max
  unsure (1)..(374): unsure at all n locations
tttgcaagctggaatatttatcctatcttcgacagcctatgtggtgagtccgtctaaggaagccccaagaagaccggcctcacagtggataaaaatgagaaggaggagcttattcctacttcggtgcaaaacaagtggaaaatctgcattgactataagaagctgaaccaggttaccaaaaaggaaccatttcccctggcattcattgaccagatgcttgaacgcctggcaggtaaatcccactactgtttccttgatgagttttctggttatatgcacaattactatgctcctgaggatcangaaaagaccacattcacttgcccccttcggacttttgcctataagaagatgcctttcggcctgtgcaatgc

SEQ ID NO: 181456 - DNA, 454 bp, Glycine max
  unsure (1)..(454): unsure at all n locations
agcttgcagactataccttcgactgaacttttgtctgtttctgnctacgcccggattcaaggcgggctgcaacaccggctccgcttccctaactgtactggaggcggttgcggcggctctatcctctatggtttttggagttttaacatgacctccaagatggaaaccatttgatcttttaaggccgatagatcggccttcatctgttcctacacgccctcttcattatccatttttctggatcaagcgttataggggtgccttggtgttctcttagttatgatgaaattcctaaagaaataaacaacggtgagtatgccaccaaaacatgagtatgcaaatggatgatcggagcacttggatccaccccaaggttttntagataacgtaatgagtctagaacttctcattttatataaagaacaaagctctcatctatccaagattatacaaa

SEQ ID NO: 181457 - DNA, 448 bp, Glycine max
  unsure (1)..(448): unsure at all n locations
agcntggacattccttgtntctttcaatttttaccttattttcatggttttaaatattgatatttgtattacatatatgtttcaaacaatccaaaccttcactatgcatcaagaacacaaaagtaagaaaatagccacagacccttttgcagccaagtcaacaatgtagcaccggttggtcacaatgaacttgttgattaccagcgtcttccctgcaacgaccattaccatacatcagcactaaaccaagcttaaatggtacccgcgacatgtcttcaacactacaccaagcttaacctaagtaagtaagtaagtaaccaacgtaccgtggacaaagccctgatcttcacgaagtgccactccttgattcacataactgcgacccgggaagagttgtcgaagtcgtccggttgaatggaagaacacatgactaagggttgaagttgat

SEQ ID NO: 181458 - DNA, 428 bp, Glycine max
tcaataatcgaatttgtctgtgcaggatcacgcctctcatatgaagcagcaaaataattacctcttctgcttccaatgataccccaatcaatccagtaatgtaagatagagaaacttccatattgtagacagataaatcagggtatatgcttgagttaccatcagaaaaaataacttcaactggttcaatgacaaatttgttttcacaatattctgagaaggctattacctaaagaaaacaaaatactctatcatcatctaaccaattgcaccacatataaaatgccaatagaaaaacatacaataaaactcactactctaccattgtattcaaaacaactttcacttttgtaagatcagttgcagtacattcaataaatatattctctgtcttcaaactcatggctaaatgtgcaccattaataatt

SEQ ID NO: 181459 - DNA, 375 bp, Glycine max
catttaataagtatacttaacaaaataaccataaatcggaagaagttgatacaatttacacgcagtctatacacaaaagttagtcgtattcaccgactaacaactcccccaaaattacagctttgctcggccttaagcaaaaagagaacatctcacttgtcctcaagtgacaataacatgcagtgactatgtacaaaggtgtatgcaacataatttactgatcgcatgattagaaaacgaagcattatgtactcatcacctgtctttactaaatatgcagcttttaaagagaagaattaatgtagttgcctattgatgaagttatcttacacatatttaataaagtatttataccccagtctacagttctgttac

SEQ ID NO: 181460 - DNA, 245 bp, Glycine max
agcacaccactggatctgactaagcgcacagcttcacgccatccgctaagcgagaaacgcgcgctaagccaaaaatcactaacgtgcgctaagcgggccataagtgcgctaagcgcatgagcacaaacaaggccacccatccaagcctgaaatcacatcttacaaggatattctggactgggatccacagctctgcatgtccacggctctagagagagaaaagccaagtccacagagcgtgggag

SEQ ID NO: 181461 - DNA, 443 bp, Glycine max
  unsure (1)..(443): unsure at all n locations
tcagcatgcttcatatattccagagcctggtccctacattaaagatagtcaatgaaagctatattaaatatattaattatcacatattcataagaaaatataaacacttatatcaccgtagggtatacaccctttcgggcatatgtaaaagacaatgctacatttggaatgttcacatgataaaggaccataagaaaaagtaagaaattcaaattgcactccattactcttgtctcttgtgctcatgaactctgaattcatgatggatttatgtaagacacatactttcaattaactaaacgatgtattttagtgtaccaaatttttttccacaaaaagcagattaacttacaatctcacaataggcttaagaatacccctcataattcaagaaacaaattcaattntcttgtattacacattcttttcttgtgcctaaaata

SEQ ID NO: 181462 - DNA, 499 bp, Glycine max
  unsure (1)..(499): unsure at all n locations
gtcccggatccttaagtcacctgcggcatcaagcttgaaaggtgatttgatattcattccgggggtttgtattcaaggtaaagaggattatgtttgcaaattaaacaaatccatgtatggtctaaaacagtccccaagacaatggaataggagatttgatgaatttatgactcacatacagtttcatagaagtcactatgataactgtgtttacttcaaatttccttctaaagttgagtttgtgatattgctattatatgttgatgatattttgatagcaagtaacagcaagagtgaggttgaaaaattgaaatctgagttgagcagggaatttgaaatgaagggattgggagcagccaagagaatattgggaatagaaatcaaacgggacagaaaaaggaaattgttgtatttgtcctaggagttatatctcacaanagttcttgaaagggttggaatgtcaaaatctaaacctgtaactactcctatgtcacagcag

SEQ ID NO: 181463 - DNA, 269 bp, Glycine max
  unsure (1)..(269): unsure at all n locations
tatttttcagccgacattgcacaattctttntagaaaagctcgctggtcgataatggtctttttaccgcagagtaagatttcttgttttggtgttggcatanaaacagttacaaatgtaccttcggctagagtttttccgtgcgagttcaaccgacattntgtttcggccaggaaaacattagcccacctctgcaaaaaaaatatttgctaaccggcttcatgcatatttcattcaacgattgaatagaaaactcaatagccgacaacc

SEQ ID NO: 181464 - DNA, 405 bp, Glycine max
  unsure (1)..(405): unsure at all n locations
agcttctntgttagacctcgatcggtcatttttcaggccgaggtcgaccgtcatttgtttcgatccatttcggtgaataatatttttttgccgagatgggctaatgttttcctggccgaataaatgggaaaatgccagtttcggccgaaacgaaaagtcggttgggctcgcacaaaaaaacctagccgacctacattttaaattttttatgcaacaccaaaacaagaaaacttcctgtgccgtaaaaaaaaaaaaaaacattacatgacagcgagcgttttgaaaaacaaaattgcgcaacgtcggctgaaaaatatcagtcggggctttttcacgaccgatgtcggttattgagttttctattcaatccgcgaacggaatttgcatgatgtcggttaggaaatg

SEQ ID NO: 181465 - DNA, 468 bp, Glycine max
  unsure (1)..(468): unsure at all n locations
cctgcatacggaccttaaaactcagcttgggaagaccaaaggagttagtaattgttgaaatttanggtcaagaaccagagagcagttgggcactaaggtctctctggttactaagctctatggatggagagctagaatacttcatagacactatttggagaattttggatccctgatgcattcacaattatgggactgcaagagttgttttatgaccaaatgcccgaggcacgtaggagtttgggggttgcaacatatataggagtgcctaacaaaatcgactggactcacttgttggggtttttgttccatatacgattctggaaattaagttatgggttaaagaggctcaaactaatgtgtatgtggatgataggaaaaacaactaagttatgaagaaactatgaattaaggtaagtatattcttccttgcgcgttattcatattataattaaactaattctactc

SEQ ID NO: 181466 - DNA, 450 bp, Glycine max
agcttgtgcatccaataccctgatgaggttgtcccatatgttcttaaaactggactgatccatttgcttccaaagtttcatggccatgcaggtgaagacccacacaagcatttgaaagaactccatattgtctgctccaccatgaaaccaccagatgtccaggaggatcacatatttctgaaggcctttcctcattctttagagggagtggcaaaggactggctatattaccttgctccaaggtccatcactagctgggatgacctcaagaaagtgttcttagaaaaaattttccctgcttccaggaccacgaccatcagaaaagatattttaggaattaggcaactcagtggagagagcttatatgaatactaggagagatttaagaaactatgtgccagttgtcctcaccaccagatttctgagcagcttctcctccaatattttatg

SEQ ID NO: 181467 - DNA, 456 bp, Glycine max
  unsure (1)..(456): unsure at all n locations
ngcatgaattacattctccctctttctcaagtataatcttaattcttcttgacatcatcaaaatcttcatgatttacattctccccctttctcaagaaaattcttaattctgcttgacatcatcaaaatcttcatgatttacagcctcagctggccttgcccttggtcttctggccccacaaataataattgttggatcatcagggttccaacaattcttccttatgtaggccagattaatgaccgggctcagacgttcaaagacaagactgtcggaggcaactcctctggtcctgcataaagctgtgataagagcatgaaacacgagttttgaggagttagactgggccatagaagtaatctgccctaaaatgaaggctccgacattcatgtccagctgagtaactaggccaaagattaacctagctcgatccacagtcagatcagatgtgtggg

SEQ ID NO: 181468 - DNA, 264 bp, Glycine max
agcttcatatatgatctacgtcacaaacgttcataaccaaataaaaccaacagattcttgcctattaatagaaaaacataaataaaatggtcttcaaaacaaatggcaacatgtgtcttcgatcattgatcgaggccgtacccgaatcaaataaacattaaaatgcagtaactaggaagtgatcctaggtcgtttcccaacgagcaatgataaaccaaatgttcatattatacttgcagtaatagtaacaatgggggggggggg

SEQ ID NO: 181469 - DNA, 385 bp, Glycine max
  unsure (1)..(385): unsure at all n locations
ttacggacctatgaaactcaactgctctnattacataatgtttgagttattggaagtatgttgtatgccattttggtttaagagtagcattccttggtaaaactaactttccaaatgtttgccttcgcaagaaatggccccgaagaagcttgcctcaaagaggtccaggaaagataaggcggccgaaaggactagttccgctcctgagtatgacagtcaccgctttaagagcgctgtacactagcagcgcttctaggccatcaagggatggtcgtttctccgggagcgacgcgtccagctcagggacgacgagtatactgatttctatgatgagataaggcgccggcggtggacatcactgngttaccccatggccaagttcgat

SEQ ID NO: 181470 - DNA, 403 bp, Glycine max
  unsure (1)..(403): unsure at all n locations
agcttagcaagatttatggctcgcttattctgcgcttgcgcgcatagcctaatttgagatattacaaaacaaaaggggttttgggcttagcgcgacatgcaagcttagccagttgcccatacgtgcttagtctacacatgtgcacttagcctgcacttgtgcgcttactccaaatacgaaatatnttaaaacatggaattctttgggcttatcgcagcgtgcaagcttagcgcaacaaaacaacatgtgcttgctaagcgaacacatgcacattgagcgcatagcataatcagacaacaaacaacaacaaacatttgcacttaaatcaactaacacaaatattcatagagtcatgagcataaccaaaatcaacctaacatcaacacacaaaccaactaacaca

SEQ ID NO: 181471 - DNA, 315 bp, Glycine max
tacataatttcatatttttctcagtagtgtaaattagaacaactagtatgggttatagtctctcttcctttatcttgattaaagaaacagcttacttgattttactctcccgtttatcatagtataatgttttaaattatcttgttatgccttgagcgctgagtatatttttgcttaagtcgatgatttgctgtatgttaacaggtgcagtggtattatggggaaatatgctgcaggagaactcaagcctccatcaaccggtacattaaattatgataacttaatacagaacgctgctctttatttttttaaatg

SEQ ID NO: 181472 - DNA, 388 bp, Glycine max
  unsure (1)..(388): unsure at all n locations
agtaacacactatggaatactgaagtaaaaaaaaacactatgtattttcacacaacatttataatgaattaaaatttattaaaaatataaaattacaggtgaaacccattaaataaaaaattattaaaatttattttctaatacatcttaatcaataataaaaaaatacattaaaaataatgtaaaaagtgtgttacaaaacgaatatcaaaatttgaataattctcggttaaataagtaattggaaatctgttggaaaccagttgggcccagaagcagctaaatatccatntaatnttgtagtctgataactgctttggatgttntttcagatgcacaaagacatctcaacaggcaataanttgggtaagcaccaatcaacacttac

SEQ ID NO: 181473 - DNA, 87 bp, Glycine max
cagggagcagattctacgtgcagtttgttgttcaagggtagacctgaaaatttatttgtgtatctaaaaaaaggccttataaagtgg

SEQ ID NO: 181474 - DNA, 265 bp, Glycine max
cccaacacgggcgcacgagaaaaaggccttgtataccgaaaaaccggacggggaaaacgaggcccaaaataaacacccacaagcccacggacgtcgtcctggggagaacctaggctcgcataggccccgggggacacgaatggccgggacgacagaggccggcaaccggacgagtgccgataggccccaaaggggggaggacgacagacaaacccccccagaagaagacggggaaacgaaaggggaaagggaaccaaaagaaagg

SEQ ID NO: 181475 - DNA, 412 bp, Glycine max
gtcaagaatcaagatttatagagtcattcaatttagaatcaagattcagtgaagattcaagagaagactcatgatatgcaagaacctcaagataagtataaaagaatttttcaaagaaaagattgaatagcacaatttggccaaagaatttgtcaaaagaaaaatcttttaccagagttcttactctctggtaatcgattacctgaaggctgtaatcgattaccagaagcctaaaataggtttataactattttacaaagtagtaatcgattaccatgggcatgtaatcgattaccaatgtttgtgaacgttgaatttcaaatttcaagagtcacaacttgtgatagaacatttctaaacttgtgtaatcgattaccagtatttgtaaacgttgattgtcaaatctaaacat

SEQ ID NO: 181476 - DNA, 214 bp, Glycine max
ttctcaacatcccacgatactaaaacttataacttaaaacatcaaataaagaccttctgggtggcccttatcatccactttctatcaatccatatctcgcgatattccaactatatgaagcaatgaattgcacagaaagacaatacccgccagagattctcaactgactgatatgtaaaaccaatccttcactcttactcgatagaaaaataaa

SEQ ID NO: 181477 - DNA, 175 bp, Glycine max
  unsure (1)..(175): unsure at all n locations
gcacttcactatccatgttcacacattatngccagttgggggtacgtgagcctgaactactaccaatatatagatgttgtttacacgaatgagaacatcttaaaagcatactccgcacaggggtggcctcttgggaatgaagcgggaattccttcttctgatgaggcatggacac

SEQ ID NO: 181478 - DNA, 390 bp, Glycine max
  unsure (1)..(390): unsure at all n locations
agctnntcaagcaagcttgcatgaagcggttatcatattacaagagctccaagtaggcgctccttaaacctccattaattttcagctctacctctctcctccattgttgcctcttcattatcctccatgtatctcatcacatgtcttgtgctaaatgtcgttaacatgattctttagaatctacaccgattaaacttgctataaaagtcagcttgattttctatggtccacatttcttgttcttgttcttgaaccatgaaatacgttgagtctaggctcctttgagctctgactttctattttttgtggatgaaacctcaaccataaaattcttacaaaaacattaaagcagaaaaaaacctcacaaatctagagcgactcattcaccta

SEQ ID NO: 181479 - DNA, 471 bp, Glycine max
  unsure (1)..(471): unsure at all n locations
cacttcgaaactcagctgcttgggagcttttggagctgatcttgactttttgaagttcttcatggtngattttcaccatggagatgcacggaagacaaagagaagaggtgagatgaggcgccatccattaaggaataagccatggaaaaaagagcttcaccaccaacatgagccttggataagaagcttggaaggatgcttcaatggaggaaaagaaagagggagagaaagagagaggggggagcacgaaattgaaggaagaaaaagggagagaagttgaactttgagttgtgtctcacaagactctcattcatcanagttaccacaagtgttacacatgcttctatttatagactagctagcttccttgagaagctttcttgagaaaacttccttgagaagcttctntgganaacttccttgagaagctagagcttagctatacacacccctctcataactaagctcacc

SEQ ID NO: 181480 - DNA, 438 bp, Glycine max
  unsure (1)..(438): unsure at all n locations
agcttcttccattttactgtgtgggctgtttatatttattttcgcagaattctttaatggcttaattnttgtgggattaattaagttcttcaaactattagaaaatatgcattttatattggttatttatgactttccacatcggtttttaaccgatgttgaaagtattatcgttaacatcgattttctagaaccaatgttaacgtagaattgacaacatcggttatttaaataaccgatgttatataataagaattacaccaaaaaaaggtatgaatgttaacagttcacatcagttttgtgttaacatcggttttatgtaaaaccaatgttaacttatgcattaacatcatcagtttttgtagaaaaccgatgttaacatatgttatgttaacatcagtttcactcacaaagtgatgttaacgtataagttaacat

SEQ ID NO: 181481 - DNA, 430 bp, Glycine max
  unsure (1)..(430): unsure at all n locations
acctatgatactcagctcactccactagatgaactgncatgatattttcatttattctngcnctatggggaggacaataatatatacccttttgattttactaaataaccaatgaaatatccactgattgttcttgcatccaatttcttttcttgcagattatatattctaatttctgcctgaccaccccaaacatgtagatgtctcaaactgggtttcctacctgtccacagttcaaaaggtgtcttttgaactgccttactaggaaccctgttcaacaaatacatggtattttttaaatcatacgtccataatgatacaggtaaatatgaattacttaacatgctcctaaccatatccattaaggttcgattacgcctttctgacacactantttgttgtggtgtacctgatattgtgtatagagcac

SEQ ID NO: 181482 - DNA, 428 bp, Glycine max
  unsure (1)..(428): unsure at all n locations
ttacggacctataaatctcagcttgcnttggagaggtccatcaccgccctattccttttgctggtggtatctaagcttttaaccttgacttggtagaacctcttgccggtttgatttgttcccatgcttgctaaagtgagacaaaagctggtgcaaatcaaaactccgatatctcatgggtggaatggatgaatgcatgaacgaatgcatataacacagatgcaatctacgaatgccggggtccggggaattcgtccccatcttatacacaacgtctaggggtagcaaagtgccccaacgtacgtttctaataaagcgatactgaccctcctgtggtttgtttacaaaaaggatcaagacagaacccatatgcgatgcccatgcaaaagacacaatgccggaatgttcattctttgacaatattcact

SEQ ID NO: 181483 - DNA, 455 bp, Glycine max
  unsure (1)..(455): unsure at all n locations
agcttgtagaatggctagacatgtttcatttcatggctcggnttggttcaaggataaaagggatgccccacattatttccatgacacaaatgcaaaaaatgatgatttggaaattttatgcaaaactggtcatgcgtgcgcctatggggacgctcaagtgtcaaatttttatggtcatgtgatgctagggctcacgattcatttcctccattctaaatcaacccaatgtttccaaaatatgtccttttatcaatttgtgcattcctccaagtccatttcgggcgtccggggaaatttcatagcattcacccttcaggtgtacacattttnttttcaaaaactagctatgatcagcgaatctttcttttaaagaaaagatggaaaccatctctcttcaaaagcatgtcaatttttagctagaccacttattttctctttttcaccttttttcttac

SEQ ID NO: 181484 - DNA, 438 bp, Glycine max
  unsure (1)..(438): unsure at all n locations
ttcttttagtgcatcacgtntaaaactgagctcgatggttgtgcgagcctttgatggtactctgtgggaagtgatgggggaaatcgacattcccattcaaataggcccccacacttgcaatgtggtgtttcaagtaatggatataaatcccgcctataactgcctcttgggaagaccttggattcatgccctgggagtggtcccttcaacgcttcaccagaaattgaatttcgcagtgggtggacttttagtgatagtgtcgggtgaagaggatatgttagtgagctgcccctcctccgccccatacgtagaagcggcggaagaatcattggaaacgactntccaatctttcgaggtggtgagttgcgcctcttgggaaccaagtccattgctaccttctctctccaacgcggccataatggtggcgcgtgttatgct

SEQ ID NO: 181485 - DNA, 392 bp, Glycine max
agcttcacatgattgatagtggtgttagtattggtcaatttgaaggcaagatatgggaggagtgataaaattttcactgaattgcttgtgttgttgaagaagatgatccctaaagataacaagttgttgaatattcactatgaggtgaagaaaatactatgtcctattagtatggagtaccagaaaatacatgcatgccttaatgattggataccaaaaaatgagtttgcagaaatgcataagtgccctacatgtggggtatcgtgatacaaagtgaaggatgatgactacagtaatgatgaaagcacacaaaaaaaccatccaacaaaggtgtgttgctatcttccaataattccaatgcttaagtgattctttgctaatggagacaacat

SEQ ID NO: 181486 - DNA, 397 bp, Glycine max
  unsure (1)..(397): unsure at all n locations
ttacggacctatgatactaagcttactttctaattattttatacaaaaaatatatggacgatttataatgtntcaancaatgatgataaatatttctaattagagtattgtttttttactgaatctaaatagtgtacctaaaaggtacaatattgaatgaaaatgtatagttaaacattttcaaatattaataagtagtggtttttttgtgtgaatatattagtaaagtatggtgagcattacccaatccggtccattaactttttttacatgaaattgagagatgtgctaagaccaattgatgggagcaatcctaattatagattgacactataacctttaatagccaaaataacacattccaatatgaagtgcctttgcacaacatgtgcaatat

SEQ ID NO: 181487 - DNA, 492 bp, Glycine max
  unsure (1)..(492): unsure at all n locations
atccttaagccacctgaggcatgcaagcttatgcgcatatttgcttatgaaacgttcacttgcacaagatatcctattaactaagaaaaatgcacccatatacaatcaagggagcttcattacctacattatttacatgtacttccaaggtgtatttgttatttacatcacacacgcctccttggctgaatttacatacatgcatactcaaagcattttggggtaccaaaaactgcacatgcgctcatcttggtatttctaatacccatgcatatacaaactttacgatgaatcttgactacctacacaataaggtgctacatttcatgcttttttttcaagtttttgctacctaaagccacatgcaaattcaagcatatntccctttgttgactaaaattgtattcaaattagaaggtatatattctctgtaatatgtcttcttcatgcaacatatttatatatatnnttttgagacacattatgactacc

SEQ ID NO: 181488 - DNA, 382 bp, Glycine max
  unsure (1)..(382): unsure at all n locations
ntgcataccctaaagatccatcaagaaatttcttgttttatatagccataagggtgggctcatgggccactttgggatagacaagacccttgtcttactcaaagaaaagttctattggccctatatgaagaaatatgtccatacgcattacactaggtgtgtggcttgtttacaagccaagtctagggtgatgcctcatgggatatacacacccttacccatcccatctacaccatgggtagacattagtatggacttggtccttgggcttcctagaacccaaagaggtgtagactctatcttatggtggtggatagggttagcaaaatggcacactttataccatgccacaaagtagatgatgcttctcacatctcaaaac

SEQ ID NO: 181489 - DNA, 466 bp, Glycine max
  unsure (1)..(466): unsure at all n locations
agcttcctcggagccatgtcctttgaatgttacattnggaaagttagttttaccagtgggacactactcttaaaacaaaaatgacatacaacctcctcccataaatacaaacatcaatgtaaatttagagcaagcttatgcgcatatttccctatgaacgttcacttgcacaagacatcctattaactaagaaaaatgcacccatatacaatcaaggtagcttcattacctagattatttacatgtacttccaaggtgtatttgttatttacatcacacacgcctccttggctaaatttacatacatgcatactcaaagcatttcggggtaccaaaaattgcacatgcgctcatcttggtatttctaatacctatacatatacaaacttcatgatgaatcttgactacctatgcaataaggtgctagatttcatgcctctttnntttttttttttcagttttgcta

SEQ ID NO: 181490 - DNA, 439 bp, Glycine max
  unsure (1)..(439): unsure at all n locations
nnttggtcaanaggcttgtgttgtacaatcattgcctttatgatgttctcgtttatgcatttcattctaaaattcagagattgatgcaaatattattactcacagctagtcgttcactcacagtttaagttcacactctcaccggttntggttcaagcttttctttctcgatcaatctatctcctgattaacaattctaattgcaagttcacattcttgttctttctttgtctaacatacacacttgctcaacatatgaaaaggaacacaaactccatcacaatcatgcattcaattcaaaataaaggcatacacccatttttcacaaaaagacaaaagtgtttcactgccatgtcatacaaatcaagtcaactgttcaaaatgcatcagactaagcaaatcaactatttataaattaaactagtagcgtatgtaatca

SEQ ID NO: 181491 - DNA, 372 bp, Glycine max
  unsure (1)..(372): unsure at all n locations
tcttctccctttgatgttgtttggcttacccacaaagtggtaagcacctcttcttcctcccttgggtttcattttcattttcattttcctcagaatacccatggaagctcatgacaaaactttgtttgtgggtttttgattctatttgttgtcattcttggttntgggtgatgttgttgtgatgagcctattgttggtgtaatgaccctccttgtcgctaagatatcaccactctaaactacgaaaatttcaatttttaaatgaaaactccgttaatttgcttatgaaaaatgaaagtaaatntttcacgatatacatatatcaaacaacgcacaattacttaaataaatacatatatagatatagtaactc

SEQ ID NO: 181492 - DNA, 428 bp, Glycine max
  unsure (1)..(428): unsure at all n locations
tgtaagattatggagtacccatcacatgtggtactaggatgctgtcgggcgatggtgcacaacaagttttccacatccacaatgcacgcataaacccaccatcccctgttgcccacctccaactgaactcacgtactcccacgtagcccatatcctcgtgtctctcaacatcgggtccccatcaatcctcccaagcttccacaacatccaagcaaaacaacattcaaacagcacaagctatcacagccaagcaaaacagggcaaaggcagaaaactctgctcaacacactaaccaaaatcacagcttttctcacttaaagaacccagtaacatttccttcgatccaattcgttaacccgtggatcgactccaaattntactggaagtctatagtgaataaacctacattgtgacccgtgggatctact

SEQ ID NO: 181493 - DNA, 416 bp, Glycine max
  unsure (1)..(416): unsure at all n locations
agcttactaaccctatatatctctgcaatttctgctcctctagttgnctccagagctcttttccctaactaggcactatgtctactgtgaaattctgtgccctggctttctctacaaagtctaaaaagttgtacgctaattcacgcttatcaccgataagtgagattgggcttggcgccaatctcgcgcttagcctggttgaatgcacctgctgcgcttagcgcactgatctcacgcttagtgcacgactttgatgttgatgctctgccagattctcctttgcgctaagcgcgctgaagctatgcttagcggtggatatgcgcttagcccaactgctactttttgcaattcaaaacttagcctcttttcacctgaaaatgtacatatttcatcattaaatccaatggaaatgttct

SEQ ID NO: 181494 - DNA, 231 bp, Glycine max
ataattacccgccacaccaagggaacaattcctgatgttcgaaagagtgaggagggacactatactagagcacatggatgacgattgtttattgacgagtaaacttccgatgtaccagcaacatgggccctattcctcagaatccgatctacttgcacttgaaacttaccttatagacttagagtgatgcctagttgattatactttataagatatcctttatcaaatagc

SEQ ID NO: 181495 - DNA, 451 bp, Glycine max
  unsure (1)..(451): unsure at all n locations
tgcagcttntatataagctgaaccattttatctataaatacaagtggagttttattcagaaaattagagcttatctcttttatcttaatgagagtgattctcctaaattcttgagtgattcaagaacaccttggctgtatcaaaggactttcacaacctttgtgtgttgccctcgctggaaagagtgattctttccttcctttcatcatcacccttgtgttctttcaaaccacaattccagaaaatccacctctgcccagaattatctcatggccataactcccattttacgcactcaaattaagtgattcttgagcctaaattgaatttcaaaacgagacctttcacctcgttntggaatcacctcatttggagccttgtagcttcagttattgccatttctatatntctgtccagccaccacttaacctacgtttaccactccattcat

SEQ ID NO: 181496 - DNA, 366 bp, Glycine max
  unsure (1)..(366): unsure at all n locations
atctttcatctggaactctttttctttctgggacatctatataaatcttttcatacttgttaactcatttttttactcgatttcttgcatcataacgttaatccaagtactagtgctgatccacatgtcatgtagcatggtcgattacgttacgtcggttgtttgtcatattaatactataataaccacagtccacaagtataaatttgaaccaatacatctttcagtcatgccgatgtatcaaaatttgtacattnttcattaagtatgaactgttaaccgatcgatgtgtatagaatcttgagatatttttctgtatagacaatcatatagaagtatatatcctctctctctccaatatgaatc

SEQ ID NO: 181497 - DNA, 411 bp, Glycine max
cacgcgctcacttatttaaggactatttttttttaatacattaaaaagaagttttatttttgaatttctgttcttcaattaatattaattttattacgcaccttgtcatactatgtcaaatggaatgtaaaatcgctataacccttaaatcaacgagagatacaactttaccttccaaaggtaaagaataaatctctgtattaatttttttattttgttttaaagttaacctctgtattactttgaacattattgtattttttatttaaatttatttgggttctttatttgttagtaactgttttcattttatccatattatgtataataagtattggctcaaatggaaacagataagattatccaacggatatttcaatttcagaatatattattatatatcatagatat

SEQ ID NO: 181498 - DNA, 346 bp, Glycine max
ccccgcatctccaattattgggtatcttttttcctttggtaccttatctctatgcaattatataaggatttccttatattttttacttcataacatgttcgtctttaattttttactggacttaaaagattacaagtttgcaaaaatactacttttggtatcacttaacattttcttaataatataactgtaacaaaaaataattattattagtttatcactgatattggcacaccttgaaaagaatctaaatacagaagaacatcctttgttggttttttttccctatgcaattataaacacaatgaaaggagtgatcaacttgtattgataaaaatagaacatg

SEQ ID NO: 181499 - DNA, 425 bp, Glycine max
  unsure (1)..(425): unsure at all n locations
gcaagctntccgcgctacttcaaaagctaaaggtatccattatctncaacattttttacttgttagcagcaaggtctagtctataaactaagtgtactctttgcaggaagctaatgaggaatccaaagctgtcacaaaagcatcttccatgaaaggcgtgttacaatgctatgctatgtcttaatagaagttgcctcgttagaattcggctgcaacattttctggtataagtgctgaccatgtatcaaactggttctgttgggcacgtatatccagacatgacaatggtcttgttgctggcaacaatgatgagatataaatattcatgtttcacatttaatttttactaatgcatagcatcggatactgacattatttgtgagtaaaacttaatactcttataacaaggaattgaatctgttact

SEQ ID NO: 181500 - DNA, 275 bp, Glycine max
cttcattccaagtaaaggtggacttcttctccttgaaatctgaaggtgttgggttctttgggagtataatgggtaattctactagggttatcgcatttaagtagttgttgtgaaaaaattgttcgtaatcatgctaaaacttgatatgtttgatttaagcaaaactgcccatgttgattgatggttaaataatgatgttttgatgtatatgtatgcttaaaatgcagttagtaaactggtagagaagattggtagagttagcttatagttaaatg

SEQ ID NO: 181501 - DNA, 414 bp, Glycine max
  unsure (1)..(414): unsure at all n locations
agcttgccacccagctcgcccaggcgagttatgttgtttcctccagaaggcaccgccttctgaagaacttcacggaaggcccaagtgggcctggttgctatttgcatccccctgtttactaaatacaccccctgcctttnttttgctgattctttttctgtaacgttacggaaaccaacgaattacgtaacgatacttgttttctttccgtaatgttacgaaaccttacggatcacgtaatcatccccttttttggcttccaagatgttacggaactttacggatcgcgcactaacacttccttttgacttccagcatgtcatggaacttcgtgaattgcctaacgatgggtgccaagtacctcgaagtggtcaaacgagggtcgcatcccaacaacggatagtccccggacga

SEQ ID NO: 181502 - DNA, 296 bp, Glycine max
tttccgtaacgcttttgtgacgtttccgtgggtgatttcgcgaagatttcaaccgttcttcgtcggtctttgttcgttcttcggtcttgaaccggtaagttcccgaaatcgaacttttcaattcattctatgtacccttagtggtcctcatttgtttcgcgtgcttttattttcatttcatttacttttcgtacccccttttgacgtgctttagtcatttatttaagtcattttctcgcctaatcaaaaataaaataaatttgcacagatcattcgtattgtaacatcatttaatt

SEQ ID NO: 181503 - DNA, 377 bp, Glycine max
gcaagcttggatatgactgtgtacatgcagcctatgatagaaataggcctgttttcatttaaggattgaggatgatttgatttggtgataagggccatgaaggaagcattgctgcctctaggaaagcttccatggcaggggaactcatccacaaatctcctgaattcaggtctcagaatcttccaaaaagccttaataaagttgaaattaaaaccatcgggacccgggcatctatcaccaacacaactccaaacagcatatttaatctcttgatcagaaaaaggggcaatgagtccctctccttgattctgatcaatggagtggaagaaaaccccatcaagggtgggtctgaaactctcatcttcagaaaatctatg

SEQ ID NO: 181504 - DNA, 388 bp, Glycine max
  unsure (1)..(388): unsure at all n locations
tcgtgcanatnggagaatgaatcctcaatctaagactatatagatctttgttntgaaaagccaaatgagaaatccttaaatcgggtcttatttttattatttcattttctgcattcatcacttgttcttgcaggttccgaggacttcattttttatttacaaatctgagaagcaaaaaaaaaaaaagttgagattacactcgaatttgggggttccttctctcagatatggtgctctttatgatttcatgttccctactcatctttttccttgcaagtttggaggcttcattacgatctttgacatacttacacccaagcgcccacggtggatacgtttccgatagttaacttagatttgtctggttataggtctcttagttcgatga

SEQ ID NO: 181505 - DNA, 97 bp, Glycine max
tcacatactttgtttaaaatgatctttggttcatgtcgtagctgacctgctttcttgcaaacaaaagaaagggaaattacctattcactcaggtagc

SEQ ID NO: 181506 - DNA, 469 bp, Glycine max
  unsure (1)..(469): unsure at all n locations
agcttataagaacaaaattgccttatttatttccaaatatgcatgtgaattaggaagcatcaacaagaatcaagccaaggctattctgcaagcaatcaatggggcaaaacacaccaaatgattatgatgatggatggctcaaattctcacaaaggtaaactcatcactttcaaattgagctttaaaaactatcatgacatgtagaggaaaatcaatgatttcaaatcacaaaatgtcaagaaacttttattttcaaaacaattacccatttcttgaacatatcctataatttaaagaaaaacatgcaaaatcgtacatgcacacagaattgacccanaatattaaactagaaacccaacgaaactaacaacattaacaaattaacaaaaccgacaaaactagaataaccaaagaaacacccccccnccatacttaaacaacacattgtcctctatgtagcacaattaaa

SEQ ID NO: 181507 - DNA, 170 bp, Glycine max
ctcataactgaaccccgggcgcacgcacatgtttttttaaatttgcgagctctttttaaggcaactttcttcttacacttgccactccctaagtcttccctatcgcaaaccgtcttcttctttcactatggtaacactaattttaagcaccgtttaaaatgaccaacaaa

SEQ ID NO: 181508 - DNA, 432 bp, Glycine max
  unsure (1)..(432): unsure at all n locations
tccccaacatcaaagtaatacaacattcaaacagcacattctattatagccaagcaaaacagggcaaaggcagaaaactctgcccaaaacaccaaccaaaatcacagctnttcacatacaaataccccagaaacatttccttcgttcccattcgttaaccgttggatccactcgaaatttttactgcaagtctctagtacataagcctacattttgaccgttgggatctactagcaaacatctagaacgcattctgcactactctttccacaaccagcaaatgcatagcaatttttctgcacttgtgcaaaattctgctgcacaatttcacagcaaaaatctgcacaaagagcagatttcgaaaaccacacttcctctcatctaatcttgcccaaatcaattcctacaagtcccaaatcatgtatcaatcat

SEQ ID NO: 181509 - DNA, 415 bp, Glycine max
agcttgaagaggctaagagtgaatgctattaacctggtgaaacagatcccatcataagataggatgtaatattagcatcaactatgaaagcaatgagtgtacaaagaatgaggtccattgttccctaaagctgaagcatccctttgttgaatggagtcattagtgaaaagagtattcttataattttgactagcaataaaagcaacttcatcactagttgtacttgcaacaggagatgcaagtatagttgaatctccaataatagattttggatcaagtacttttgttgtccatcccaatcaacatacaaaagcagcaacaacttgcaactatgacaaattagtctgtagggttgttgccaaatccctaactgttacattttcatttgaaactataaaaattgcatacaacaacc

SEQ ID NO: 181510 - DNA, 388 bp, Glycine max
  unsure (1)..(388): unsure at all n locations
gtattcgagacaaagcagttcgatatattcaagatggattatcgagacagtgtatatagtcttagaaagggtctattaaataagaaaggaattccaatcgaattancaaaacagttgtccaagaaaattaagttaaaaagtgttttacaagaaatttactctctggtaatcgattaccactggccaaaactgatttacaacagctattaaaatttgaattcaaaatgtgtcctatgtaatcgattacacatatatggtaatcgattaccagcacgttctgaacatcttaattcagaatgtaaagcttgtaatcgaccacacatatactgtaatctattaccagagccgactttcagataatatactaaacagtcacatcgttttatgt

SEQ ID NO: 181511 - DNA, 434 bp, Glycine max
  unsure (1)..(434): unsure at all n locations
agcttatgataagagataacttccaacttttctctgaaaaaaaaattcactgatcataaccaattcttgaaaaaaatgtgtgtacacctgcagggtggacgctgtgaaaattttcctggacgcccaaaatggactcggatgaatgcccaaatggataaaagaacatgttttggaaacattgggttgatttaaaatagaggaaatgaatcctgagccctagcatcacatgaccataaaaatttgacacttgagtgtcgtcataggtgcatgcatgaccagttttgcataaaatttccaaatcatcatttttgcatttgtgtcatggaaataatgtggggcatcccttttatccttgagccaaaccaaaccccgacatgtatcatgtttagccattctacaaaccttgagcccaaatcctgactcaccatanacct

SEQ ID NO: 181512 - DNA, 436 bp, Glycine max
  unsure (1)..(436): unsure at all n locations
tagctacacacacccctctaataactatgctcacctcctttgtaagagaagttagagcttagctacacacccctataatagctaagcgccccctgaaaaaatacatgaaaatacaaaaacaaagtcccgactacaaagaatactcaaaatgccctaaaatacaaggctaaaaccctatactactagaatgaccaaaataaaaggccaaaaagaaggaaaaaacctattctgatatttacaaagaagagtggatccaaccttgacccatgggcacaaaaagctaccctaaggttcataagaaccctanggccttctttagtagctcaagcctaagcctcctggagtcttctatccaatacccttgggggttaggaatgcatcatcctctccaccttggaaaggatttgacctcaaatcccgaggttcttcatactct

SEQ ID NO: 181513 - DNA, 441 bp, Glycine max
  unsure (1)..(441): unsure at all n locations
agctnttgctaaagaattattgcattntgttatactcatgcatacacatatacatgcatatttgttatcttgtgacagggataggatcgttttaagcaatagtcaaataccgcgccaaatccaagacagagatgaatcaaggtaagtggtaacgtgggcacgatttgctgcgcaatgtcatttcctgctttcaggtacttggggacgggcacgaatggatgttaggcccatgatcaacagatcgctgtcccgtgtccagctccggacaatcgagaagcgctactgggaggcagcctagtatcctttaaattcctacctattattgctgtcgtttctttaagataatgatcggatgcctaacttaccctaagggtttcgagtaagcgaacgccgactcatagagagcgcgtactttcttcaaaaaaatgtgtagggttagtt

SEQ ID NO: 181514 - DNA, 394 bp, Glycine max
accaaatcaacctccatatgggattttggtcacacccaacaatttcacacctttgaccaacatccattataaacacaagctgcaccctcctaacacacatgatgtttaccccaaccatctacattgagcaagcttaaacagtgatccaacttgctctttggaactggctttgtgaacatatcagcatgattgtgcagagtgctaatcttatgaaacttgattcttctctctgacctaatgaagtgatatctaacatctatatgcttgggtctatcatgatgaacctgatccttggccaagcatatagcactaatggtatcacaatagatgttagcatattcttgattaattccgagataatttataaacctttcagccaaatccttcctttgag

SEQ ID NO: 181515 - DNA, 350 bp, Glycine max
  unsure (1)..(350): unsure at all n locations
ctagagaaattaaacgagagcttacgacaatgttgaggtgttaagttaactttaacttacaagagaagcttgatctcctcaatacattttagttccttctccctcgagtgttggttgagaaatttattcaaactgactcagcgcaatgttatcttccatacattggatattccaccatgttttgctgaccttctcagagtgcggctcttaattagtcaaatttatcctagaattcaaagaacaggaacaaccattttccatattttcctaagaatatgctcgtacacttcgtccacgtgttaccacacaattaatcttactatttattctctgcctacacttngaattga

SEQ ID NO: 181516 - DNA, 191 bp, Glycine max
actctatggccaatttgatccaaaatatccttgaatttatcccatgcttggcacagaagaggcgtcgtgacagaatcctggtagggtagtggatccgttcatgccaactatcaccactctggatatccatgggttgaaaggccagaatgcatttgccaagagaacgtttatggttcatgagagcatccccc

SEQ ID NO: 181517 - DNA, 431 bp, Glycine max
  unsure (1)..(431): unsure at all n locations
gcatgcaagcttaaagatgcccgagacattcatctctatgttatgttggcgaagtttttcgatcagaattgccattccttggattatagggttgaaccaagctcatgcttttacaaaaaggtttatcaagtcaagttgaaatatggaagtaaccgccttgaaaattggggcaaaagatgaatcgagtcacatcactgcttccgctactgtcaaacatatctaggattattgatgtgcttgttacttccagtctcaccttgacaaagatgtcatggaccatgttgaanatttaaattgactcaaccccatatcctgcgtaaaaaatcgcaatacttccactgcacatcattgccatgcatccatgcttttcattggttgcattgctcattgcattcttttcttgaaaaataacacaaaatgaaatgaactta

SEQ ID NO: 181518 - DNA, 354 bp, Glycine max
  unsure (1)..(354): unsure at all n locations
ctatgacctctccaccaaagggtcaattcccgattgaagaatcattccaaccttagatggtcgaattctttacaacaacagcaataacaacagccctattttcaaaatgctggtggccccagcagaccataacgttcttcaccaattcaacaacaacaaccacaacaggcacagccccagaaacaacaaacaggtgaggcccctctacaaccttcccttgaagactngtgagcaaatgactatgcaaacatgcatgttcacaaaagacagagcctcattcgagcttaacaatcaatgggatagtggctcacagctaatcaacaacagcccagattctgaagataccttctcatc

SEQ ID NO: 181519 - DNA, 359 bp, Glycine max
  unsure (1)..(359): unsure at all n locations
agcttatcaaggaagctacatgaagctgttttcttttttacgctgnnccacctctgttaaccattggatctttttgaaattagactggagcttcagagaacactcttctacgatttaactgttgcgatctatgagaagaccgttggagggggcaagacatttccgtctccgagagcattattcacttgtgcgttttgagccttgtagtccaagtagttttggaaaaatgccatttacttctccttctttcttccaaaaccatttccaaagtcccaagctctttctccgtccctatagccaccaggagccagcacaaactaccattgttctttgttgaaacccaacatcgagaggaaccc

SEQ ID NO: 181520 - DNA, 372 bp, Glycine max
ctagagaaaatcaattattgaagatggtcttattcacaaagtgagttatgcttttaagtctaatccatgctctttagtgaaatatatgatatcaaccaggaatctgtggagtctcccttgcaccatcgcggcaagggtgtgaatccctttctctctctctgttttgagtcaccgatccacactaacttttctaacgccaataatcctcgatttcttgcttgctttattgtagcatgagatctactaatgcacccctgtttaccaatgctcctaattttctaacgagtgtaaaagtgctccaacgctcctaatttctttacagctctagactaacttttcagtggttaaaaaaatacgctctgacactcttgt

SEQ ID NO: 181521 - DNA, 380 bp, Glycine max
ctgctaggtgatcattagaactaacgaattcagccataactttcttagaaaggaccttctcctgtacaaaatgacaatcaatctcaatatgtttagttctctcatggaatactggattagaagctatatgtacggcagcctgattatctcaacatagcttcatttgctgagtatttccaaacttcaattcttaaagaagttgcttaatccacatgagctcacatgtggctacagccatagctctatattcagcctctgcactagaccttgcaacagcaatttgcttcttactcttccatgagacaagaattcctccaatagacacacaatatcctaaagtggaacgcctatcaatgcgtgatcctgcccaatctgcatcg

SEQ ID NO: 181522 - DNA, 251 bp, Glycine max
gtttattttcatgcaacacattgtgcctacaataatcaaccagtatagaacttgaacctttgtgttgacaaaaaatgttgaaagctcaagtttgactccctaaactgattagcgccttaatatatcaactgatacaaccgaccaaattctagagtaattgcaacaaacacttgggaagagaagaaataaaaaaataagttgactaccaaaactgctccctgtccctccttccactactacacacatacatg

SEQ ID NO: 181523 - DNA, 346 bp, Glycine max
  unsure (1)..(346): unsure at all n locations
caaagcctaggcataccccttatgggaaatcctcttttcttagctactccccattttcttactactagtcatccaaccccttcttctattagcatctgaagtgtaaagtctctcatgattatgagagcctaaaccccctctattggaacctagcagccaatgtccttataatgtatatgttctttttatctattaatgccaatttcaatctnttattaggcttttatctactcttcatctctattgtgtaatttggtcattcatgcatcttgttttacgggttatacattggaaaatggtaatgtctaaagaatctgaaaaagacatctcgaccttacattacata

SEQ ID NO: 181524 - DNA, 455 bp, Glycine max
  unsure (1)..(455): unsure at all n locations
gcatgaagctagaaaactgtgagggatnttttaatttgtatgacccngatcaaatcaaacacctggtcaagtcatgccactttatataataaatcctcattatatattcttataactcatttttaacctccctctctcccatcatctattctgtgcctctttttaaaaacaatataagaactgttgcaaaaattgtttacgaggataatttttcttatttctctactaaattctaacaatctgttcgcgaaaaaaatggtgcaagtaacattttcctaaatgcctatcgcagaggctacttctgtggccaacttatcacaaggtttcccttatcgcaccttgtcctgacctgacagcacggctctttacagcgtcaccgagctaacaaaatctttgtgctccaaaagaataaacgaactacactctcaatcactatgcacccacactacttggtg

SEQ ID NO: 181525 - DNA, 364 bp, Glycine max
  unsure (1)..(364): unsure at all n locations
cttancaagaacatgtcncagagttctagacatttatcgttattcaaaacgccggccaaactcgcggtagagattcctgatatntataaatgtcagacttttgtcttggagggttagagacaatgatttactataaagagttcttcaaaagacacatactttaagatcccatgaagaagtcctaaaggacttgactcctctgtattttgcaaacctcttcctagcaggaacatccaatggtgtatccacttcatccggaaactctgtcacaggagaacacacatatggccagccacacaatagaaatactatcacattatatcagctattcgaccgcaaaccatccatattctgtcatctctgg

SEQ ID NO: 181526 - DNA, 259 bp, Glycine max
gagcttggctaccatgaccttatttctgagagtgaccgcaacatgatagtaaataacatcaccttcatctgaatcacatattcccatgttactatggtcaaatgtaaagctatcctctctctgattccaaactctagggtaaattctattacgagacaacctaatatcgttgtccattctcttgcaaaggcatcaatatttctttcttgtaactatgttcatgaaaaagttcccacttgtcctgagtcttccatcctta

SEQ ID NO: 181527 - DNA, 345 bp, Glycine max
  unsure (1)..(345): unsure at all n locations
ttgattgtgaaagaatgcattgactgtatcacggtgagagtgtgatccttaaatttgatagaaacgactatcatttagtattgatttttgcatgaatatctgaagtatggattgaatgcatgaattgaggatgatgaaggccatgttntgattgtgatagctacttagccaaaaagctaaccttgtgcttgaatgatttatcccttgcacccagtttgagctgaatgaattattgattgattgaaccttgagcctatacagtgttatctcctgatacctcgtcttaggttgaggagagcatcatccacaaaaacttggttcaaccaaattgtctcaatttggggg

SEQ ID NO: 181528 - DNA, 439 bp, Glycine max
  unsure (1)..(439): unsure at all n locations
agcttgtgttctctacatgacagncttattttcgatctagtccttcattgcaatggaaagttgaaaccctgaatcctactattggtggaaaagatgttgctcaaccatggtatgattttcttgaagaaatgaactttgatgatggagatgaaatctctatttactttagatattatgaaaaaatttgggatattgatattagaaggcaggaggattgggatgatagcgacaccgattaaactgcctttcgtagtctgggattttgaacaaaaaaaatcttgctgatgtagttccaacaaactctattctattttgttggtcatcaatgtttcctaagtctatttttgctttaatcaacattgttgtcatcaatatttcttaagtttattctctgttatcaacattggtatttgctctcatcaacatatgcaatcgttac

SEQ ID NO: 181529 - DNA, 370 bp, Glycine max
  unsure (1)..(370): unsure at all n locations
aatattatgagagatgaaaaacttattgatgcttcaattgtttggccttcttgggcgtaaagaattgccagtttcatttcaaaatcttgttggactccaaagtttaatcctgcaagattgtgaaaattttttgttaccaagtaacattattgccatgatgcctaaactgtcttcattgctcgctgaaagttgcaaggagttgcaatgggtgaaatcacaagagggtgaagaaaaagtgggctcaatagtatgttcaaatgtagatgactccagtttcgatggttgcaacctgtatgatgatnttttttcaacaggtttcatgcagctcgatcatgtgaaaaccttaagcctaaaggacaataatttcaca

SEQ ID NO: 181530 - DNA, 476 bp, Glycine max
  unsure (1)..(476): unsure at all n locations
agcttataataattatactttaggctaatttatattaatgagaaaatatagttntatagtctcaataaaatcacagttgctacaatattagtggaatatgcttctacggtgagttttaagagaattggtgttcagaaatagacataggtgagttttggatcaatgatagtcacatatcattaccgaaattagctccaatcctatcttcactttcaacacccctctctttgctttcatctacgatgttagctaattttcacctctagttccagtcagagaaagtcacttgtccatcttacatttacttcatttcatcagctaaaatgctctcttttttcgcacacctttctgttcttgctgcaccaaatcaaggtgcacacccttcttcattcattggtgatacgtgttgccttttatattntaaaatttcatcttcttgtctaactttatgataagtattggtgtttattttaatt

SEQ ID NO: 181531 - DNA, 214 bp, Glycine max
tggacaaggaaataaatcctatgaaaaaagagaaaaaggatttgtgtctaacaaccaatgatgtataactacattctccttaagaaaatatcaagctacttgatgagaataaaaaacatgttttatcacactatagagacaaaggaactgcgctaatttcactatctctatgacatggccaatattaaaggggggtgatatatagtcctatata

SEQ ID NO: 181532 - DNA, 333 bp, Glycine max
  unsure (1)..(333): unsure at all n locations
accacatgcaattcaagcaacatgcctctcttcantttctagcccaaagaaatatctacattaatactctcttataacagaatgcacattttcttcttcctccttttgcctctctcatataaatttaagcatgtcatgtactattcatttatcactatcagctaatggaccaccaagtgctcttgaccaaaccagttgtgtatatctagcatcaaaccattgccctcgtgtaatcctccttgtccaagtatacgaaccttcatattgcaacttatatattattattgagcaccttacccttgccaaagcttcaatacataacctttgttatct

SEQ ID NO: 181533 - DNA, 372 bp, Glycine max
gagtggagccatcttctgcgtataataagtacaaagaaagcctgcgtttggagaatgccactgggattgagaagtaataaccacctttttataggggctagcgatcgaataagttatccattaatatgtggttatagaataatactaccatatcgagcacgccaaaacttggagattagaacatattaatatattacaacgctgtacgtaattgcttaacacacaagaaaaatcagtaattatttattatatatagtttataaaatatctattattagaggagagaaacatatgtgtactcattacgttatttgtgaagaataccaatgtttagaaaccaggtaaaaatatgtttacacaaggatcaaaagt

SEQ ID NO: 181534 - DNA, 472 bp, Glycine max
  unsure (1)..(472): unsure at all n locations
acgcttacanaatatgctactatcaagctttttataagtatttntttcaagaaccagattcgttctaaactgattcccctctctgaatgtaggctttggctaataaaatcttcttgtactacttcatttcgtggttcgaaagcagacgggccacaagaccttccaacttttggcaattcagattcccttattagctacaacccactaccctgagcaatatataagcatagcaccagctgcatattcttacagaacctttcccttcaactaaaaaaaataactccttgttcttttttcccttatcattaatctttctcttccttttctagctagcaaagtgcaacattacaatccttcttaggctcttagtatccaacanaagcctagattatcattntatcagtcatggcgtcaagctctcttaccaaacaaaaggcttctgactcctctcggcaccaaaacagaacaagct

SEQ ID NO: 181535 - DNA, 252 bp, Glycine max
atgcttcaattgaggaaaagaaagaagcacaaaaagagaaaggggttagccatggaagaaagagcttcaccaccaagatgaaccttggataagaagcttatagaggatgcttccatcgaggaaaagaaagaagctgagaaagagaaaggggggagcacgaaagtgaaggaagaataagagagagaagttgaacttcgagttatgtctcataagactctcattcatcacagttacaacaagtgttacacatgc

SEQ ID NO: 181536 - DNA, 434 bp, Glycine max
  unsure (1)..(434): unsure at all n locations
cgctcgcaagntatgtctcatatgccggatcgagttgcctcacaataattaagaaatggcggttgaattaattattcctaaaactttaccaattaaaaattactcttttaaggctctttactttgttgttaagagaatatggaatagaagagaaacttaacggaaagtaaaagcgaaaattaaatgcacagcggaaagtaaaagagtagggaagaaggaaacaaacacacaagagtttttatactggttcggcaacaacccgtgcctacctccagtccctaagcgacctgcggtccttgagatttctttcaaccttgtaaaaatcctttcacaagcaaagatccacaagggatgtactcctccttgttctcttcgaaaccctagtggatgttcccttcactagaactgatccacacgagatgttccctctcttg

SEQ ID NO: 181537 - DNA, 360 bp, Glycine max
gttttctcataaagcttctcaaggaagttttctcaagaaagcttctcaaggaagctacctagtctataaataagaagcatgtgtaacacttgtggtaactttgatgaatgagagtcttgtgagacacaactcaaagttcaacttctctccctttttcttccttcaatttcgagctcccccctctctctttctctccctctttcttttcctccattgaagcatccttccaagcttcttatccaaagctcatcttggtggtgaagctcttttttccatggcttattccttaatggatggcgcctcctctcacctcttctcctttgtctttcgctgcatcttcatggtgaaaaatcaccattg

SEQ ID NO: 181538 - DNA, 443 bp, Glycine max
  unsure (1)..(443): unsure at all n locations
gtcgancagaggcctgcaagctttgatatgatgatagaccagatatttttatcatcccttctacaatctccacctttttgatgatgacaatccctgaaatcaagacaagctatatacaatatgatagcacgttcacacaacccttactccccctatcttttggcatgtatgcctaattttacttaattctaattgatttctaacccaagctctctcaagttctctctccctttggcaacatcaaaaagaactaagcaatacaaacaaaatccaaacatatccaaacatgaaaccaaaataaatccacacattgttataaccaaccaaagcaaagtcctgaaatataatacataatgcaagagtacggatacttagagcaacaaatagccaaatacacggtgataaaacaaagtactaagaatacttaattactaataagactc

SEQ ID NO: 181539 - DNA, 370 bp, Glycine max
cactccgatggagaacaaccttatgatgcttatgtcccacgcattgataacataaaaatgacagcaaaccacgtcgctctctaatataattaaacattgaagttcaacatcggtcttcaatatacaaaaaaaccgatgtcaacaaactgatgttaacgttaacatcggttttatacaagaaaccgatgttaactgatcatacgctaacatcgattcttccacaaccgatgttaaattcactccgttaacatcgcgttttttcaaacccgattgttatcgatacacattatttacaattatgccaccgcgttcatcttaacattcattttttacaaaaccgatgttaataaagtctcattatttaccattt

SEQ ID NO: 181540 - DNA, 334 bp, Glycine max
ctgcacttacgtgtgaaaactacttttgtaaactttatggacgttatttgattggcaaatatcaattcaaatcatcattgcgggataatgatcccaaagctatttcgaccccaaatttaaactatattcgggaagttagcaaaacctactattcaaaacttatttgagagaataccatggatgctacaaatcaacttggctaattcaagtggcactgcaattgaataagaaaaaggtttcagcttagttttcatcgttttttaaacacttgatgaaaaaacctggatttctcaaactcgggttcccagaacatattcattactcatcctatgta

SEQ ID NO: 181541 - DNA, 186 bp, Glycine max
agctcaagtgcagagagctcgagatttctcttttcatcattcttgatgactatgctttaacctattttagctcgaattagcttatgcttacttaatgtgagccttacacaatttttgtttatgctaagcagttcagccaatttttgtaaaacaaattttaaacacgcggcatcatcattttttaaa

SEQ ID NO: 181542 - DNA, 332 bp, Glycine max
  unsure (1)..(332): unsure at all n locations
attcttatacaacgattcacccctactcctacaggtatgtgggtcctcttatgactctccttggcctgtcactgctgcaagctaatgccttgttccccatcttctgatcttactccagcctactattgctatcataaccgtagtccagtgcttgggaggctcaattttntgtccaggaaatacttgactgtggtgatgtctatcaatctatgtccacctacgtacatgccacgctttcaatcacatcttttgaataagatgggtcacacgttcctgcgatcactctccataatactatgaaataaacgctacaaccaagtaattttctatct

SEQ ID NO: 181543 - DNA, 303 bp, Glycine max
  unsure (1)..(303): unsure at all n locations
cgaaccctgggtttgacaagcctttggatatgtgagactcaccaatgatagaccttgggtttgacgagcctttggaaaaacgagactcaccaagggcagaccttgggtttgacgagcctttaaaaagcgagactcaccaagggcagaccttatgtttgaccagccctttggagatgcgagactcaccaatgatagaccttgtgtttgatgagcctttggaaaagcgagactcaccaaaggcagaccttgggttngacgagcctttggagatgcgagactcactaaaggccgactgcacgtttg

SEQ ID NO: 181544 - DNA, 423 bp, Glycine max
  unsure (1)..(423): unsure at all n locations
agcttgtatgtgagcttcactcatagtttatgcctcacttttcaccatttctcaccatttcctctccaanaaccaaaacttgagccttcattttcttctagcttacacgagaccatcacggaggaagagaccaccattttcatcttcttacaagttccatagtagtgtcttcagaatcctctctctcaagctttgataagaagctcttcaatctcttcttttctactcatttcatcatcatattcgtgcaaagcccttatgtttggttccaaaatatatttctcatnctttgaagcttgggacttcaagatctgaacctttgttccttgaccatctcatggaaggttcatttaaggtaaagggattattctttatttcttaaaccttaaccttgtcggctttggaagctagactacatcacat

SEQ ID NO: 181545 - DNA, 355 bp, Glycine max
  unsure (1)..(355): unsure at all n locations
ccttnaaactcacttggaattggggggtaatgaaactttttttttttcccccgaccagcttgagaaaaaaatcccaatattgattgtatgtctcttatccatgaattataacttcatatgtgcggcattgtgcatcactatcgtctggtaaaggagcgcaagttgtcatttcttaataatactctaactttgtaacccaaacacacagcttcctctttgccctggtaatgcaacaagggtaaaaccattcaagaaggaacattgacccccaccgtgtgttactataacagacttcccctgagctcacagagatccccaaattaatcaccctgaccagcgggatattttttgaacc

SEQ ID NO: 181546 - DNA, 257 bp, Glycine max
cctggtactcgactctgaaaagcacataaattggtcaccccaagtatcttgtctacattttatcaaaaaactagaattttatttattaataaaaataaaaattgctcccacgctggcggaaaaatttagtacctatttgcaaacaagaaagggttacattattgcggccacaaaaatgttgcccaacagcatatctgatcatatatatcacatcatatattaatctattataatctaccctatatgtgggaaaaaaa

SEQ ID NO: 181547 - DNA, 328 bp, Glycine max
catatatacacaaatctatctttgctgatcaaaaaaaaaaaatcatgcatcatcaacaaatcttaagtgcatcctatctgttcactacataacgccatccctgctgtttataacagtatatatacgcataactgttaaaacagtcttgtaagagctgccagctttggctaacaccacctccctctttgctattaacacgctgactctctcagctcaaagttctataaatacctcccagcaattaactttgcgatatccaataacaccagctcctctctctctgtatgcaaaactccctccaaactatctgaaccttcacaactcgaca

SEQ ID NO: 181548 - DNA, 400 bp, Glycine max
  unsure (1)..(400): unsure at all n locations
atttatgtggttgcctggcaacttcctgtataaattacttcatcctataacaattcaccttactagcaatgcatgaaaacaaacaggggtctcaaagaaaaaaatctaatgggtgtgtatttgggaaatccatcgtgaagtttcggaactaacgttcaaattctgaanaaagaaagtaaaagcgaaattatatgcttaaatttcacatatttttctgtggattttctctataaagctatgaaaaatatgaaaaaccagatatgctgatatgatcatgccacattaacatgctttaaatatcacgactaatataaaattaatggcattccgagtattaatccgagacataaacttggatatagcataattcatgacatgtgtgtggaaacaataatcactg

SEQ ID NO: 181549 - DNA, 507 bp, Glycine max
  unsure (1)..(507): unsure at all n locations
tcgtcccgtatctcatgtcacctgcggcatgcaagctnttgaaatcaaacttagccactggttattgattacaggaaactggtaatcgattaccaaagtgtaaaaactctggtaacttagaaaattttgagaaaaactcttttgaaaaacaaaactgtgctatgtttgttttttgaaaaatcttttcaatactctccttgtgaagtcttcttgatttcttctcttgaatcttgaaatcaaatttctcttgaatcttgaaatcaaacttctcttgaatcttgaatcttcttgatttcttttcatgaagcttgaaattaatcttgatcctgaacttgttgactcaatcttgaaatcattctttgggattttngtcatcatctttgtcatcatcaaaactacttgaatcaacttgattcatcatcatgaagcttgcttctacaaaggcttctttgaatcagtttgcaatgtatcatagattgggacatgctcttactgaaaaactcttgt

SEQ ID NO: 181550 - DNA, 184 bp, Glycine max
tggttagagttaagaaaatataatcttctaaatttagcaagaggaccaacagaacaattataagaagaaaatttataaaaggcgacaccaattttattattaaatgtttgaaactttgtctgagatataccaaacctaaatgccaatatatgattttacaaagaataaattgtctgtaatgata

SEQ ID NO: 181551 - DNA, 408 bp, Glycine max
  unsure (1)..(408): unsure at all n locations
agtcacctgcggcatgcaagcttngcctgccccttgatatatggaagtttattttggtcactatgaatgaaaaattccttgtgataaaggtagtgttgccatgttttcaaagcccgtactaaggcatacaactccttatcataagttgaatagttaagggtagaaccacttatctcttcactaaaataagcaattggatggccttcttgcatcaacacagccncaatcccaacatttgaagcatcacactcaatttcaaaagatttttgaaagttcggcaacgcaagtatgggggcattagttagcttttgcttaagaacattgaaagcttcttcttgtttctctccccatttgaaaccaacatttttcttgagcacttcatttagaggtgctgccaatgtgctaaaa

SEQ ID NO: 181552 - DNA, 374 bp, Glycine max
  unsure (1)..(374): unsure at all n locations
acctatgatactcagctcaagaatatggcctcatcaaacacgtgtttctcgatttgaaatctatacanacacctcccatctttaatggagtgggttaccactattggaaaacccgcctgccaatctttatagaggccatagaactaaatatttggaaagccatagaataacgaccttatgttccctctatagtggtcgaaagtgccacaatagaaaaacctagagcagattggactgaggaagaaagaagattagtacaatataatttaaaggccaaaaatattattacatctgccctatgaatagatgaattatttatggtttcaaattgtaaagtgctaaagatatgtcaaatacccctccagtaacacatg

SEQ ID NO: 181553 - DNA, 409 bp, Glycine max
  unsure (1)..(409): unsure at all n locations
agctcggccanacatctactgtataacttggattccaacccttctaacggaattacatgtttcttttcaaactcctgcctgtgataatcaaagtgcagtgtgcatagctcacaatccagtgtttcatattagaacaaagcatatggaaattgatgtcttttttgtaacacaacaagttttggccaaacaactcttagttgtgcatcttcctgccttatatcaatgggcagatgtcttaactaagtcactttcctcaacaagatttgaagcactaagggacatactcaatgtgaagcatttttcttttctgtagaataaccttccccctgagcttgcggggggtattagaatgaatgtttaaaataactattacaaacaattattacatgacacgtagacaactaactat

SEQ ID NO: 181554 - DNA, 347 bp, Glycine max
gaaagggcgagcaaacacaacaaagctagggagcgtgaaagccagtattaaaaaacaagagtgtgtagaattgtgttcacgtgtcgcttgtgaaacaagtgttgctgttttatttttttcaaaattccaactttgtcaactagaagcatacacgtggtaagcttctagggaagggtacattaggaattttcctggccttctcttttaatatataatacatagatttatacatatagatatatagataaataattagctataaaaattggcctaagttaccgaatgtcaataaagcatcaaaacatattaattattgagaatttaatctcttaagtgatgaacaacta

SEQ ID NO: 181555 - DNA, 221 bp, Glycine max
attgttgaaaaagactctttcaacttaaaatccttggccaaaccttgtgcaacctcaattggaactcccttcctatttaatatcctttctaagactctatagactgcctcgagcacccatcctgaatatctccaatctcctcgtctcgaataaagctctgagacgcacgtgaaactttggcatcatcataacattcagctctatcctttgtctacaaattt

SEQ ID NO: 181556 - DNA, 345 bp, Glycine max
aaactcactgaaggccactgaagaaaagaatagtgttatcagtaaaaaggaaggacgctggaaaaaaaaacctcactgatttataataccgacaaaactttaagccaaactaaaattatgaaaacccaacctttttatagatggagacattcttgtttaaaccaacaaacccttttattttcactgcaaaatacttggaaaaacctcgcgaatacgaaatcaccctactcatgactatcactggactacacacttcacactgctgcattccggtaacaagaaaaaaaaacactatccctattcattaaaaaaactacaaggaacaataccctttaaaaatttaaa

SEQ ID NO: 181557 - DNA, 437 bp, Glycine max
  unsure (1)..(437): unsure at all n locations
ttcatcatgtgaagatgaagcaatcgcactgttataanatatatttccagnactcccatcaaggatcaatccagtctgagacattatcatacgtcttagtcctcctggcaaagacattggatgcaagctcaaaccatttctcatcattaacatctgcacaatcaatcacaagttctaaagtgacaattagtcattgaaagagcaatggtaccaaataacctaaatgtagcatgacaacttcaaagccttttcttttcttttttcaccctcaattaactcaagtgaatcagttaatattgaagccgcttgagcatgtgttataagttcaacatgttctacccactctaaaatgtgttacgagatgtaatataagaaacattcacgtgtctttgcctaacaactacaactttaggataggaggttcgagcattagtatc

SEQ ID NO: 181558 - DNA, 432 bp, Glycine max
  unsure (1)..(432): unsure at all n locations
gcttgatgntatgtcgctcaactcattccttcttccttcctctcttaactgcttcgacaacatatattcaacacaccgccatacaacatatatgcaccccacgcacagtactcatcgttaagcagtggattagtcatgatcaaccatcacacggtcaatctataattctgcctntagaatcagagagttggacgcattatacatcaaatattaacttatgcttacattcttataacaaaagattcaactgataacgaagcaatagctccatttagggaaaatactaatagacaaacctcctctaccataaaataaagatgacgagtatccacgacaaactacatcaacaagaaaagaggaacctcgcccacttgccaccgcttttttccttagaagcctccattgccagactgctcacctctgtttatctat

SEQ ID NO: 181559 - DNA, 430 bp, Glycine max
ctattacgtgacctataaatctcagcttgttcttttataaatgagaagttctgaactcatcatgttatctaaaaaaccttggggtggatccaagtgctccgatcattcatttgcatattcatgttttggtggcatactcaccattgtttatttctttgggaatttcatcataactaagaaaacaccaaggcacccctataacactcgatccagaaaaatggataatgaagagggcattcatgaacagatgaaagccgatctatcggccttaaaagatcaaatggcttccatctcggaggtcatgttaaaactccagaaaactatagaggataaagccacgacaaccgcctccactacagttagggaagccgagccggagctgcagcccaccttaaattcgggccgagacagaaacacggtcgtgtttggt

SEQ ID NO: 181560 - DNA, 457 bp, Glycine max
agcttatggtaagatctgggacctaaccatggcggaggtctccatggaggccattgcctccctcgcccaatattatgaccagcctttgaggtgcttcacctttggggacttccaattaacacccgtggtggaagagtttgaagagatcttgggatgccctatgggaggaaggaaatcgtaacatcaagaagcaacaatgtggatggaccggttttctcttactttgaatgggagtcaagaacttccccgattgctggcaaaggccaaagcaatggcagacacctactccgcccccgaggagatccacgggctcctcagctattgccagcacatgatagacttgatgacccatataattaggagccgttagggagtttatattgtcactcagatcttgacctagtataactctcttgataaaatgagtttatcccatgattttactccaaagaaaatc

SEQ ID NO: 181561 - DNA, 448 bp, Glycine max
  unsure (1)..(448): unsure at all n locations
acctataaaactcaacctcaccttctgcgcctgctcatagttgttgcatganaaattatgctctattgtcatcttccactccaagcaggcctctggatcattctttcctttaaatggaggaatcgttgagtgtacatccatcaattcggttttgtctatgaacaccatcattacctcttctgctcctttcttcttcattatgatctctattctccattagatccaacctctcatggagcgcatcatctcgttgtttcattaaccacttctaatgttgcatcaaagctcgcatttggaattgcgaaagccccactccatcattaagattagtaccctgacatctcaaacaaactaatcaaacgtaacaagacaattatagttgctgtgtgaatacctcacccactccagtgtatcacacaaatataggttttctcttatgaaacactct

SEQ ID NO: 181562 - DNA, 383 bp, Glycine max
tgtagtggttgttgtataagtatgagccattgagggagagcaaggtgaagggcccgcgaagtgtgagggcatcaacaccatgcgaaaagttgttgagggttactccggtgatcgttccagaggcactaatgacagtgaggctaacgtggcctcgctgagcaacatcaagaatggactcaatgatatcgctgcttggggtcacatggacaatgatgaccttcatgtagggttccataggttgggccaccacgaaaggggtggtcttgggcttgttcttggagcctgcgggcctgccacgtggcttcttggtgggtgggtttgtaagaaggagattctctaagggttggtttgtagctggtgatggtggacaacgagggcgctgg

SEQ ID NO: 181563 - DNA, 389 bp, Glycine max
  unsure (1)..(389): unsure at all n locations
aaccccatgtgtctctcttgacctttttaaacaccccaatttttttcttaaaagaaattaaaaaggattatatttaaaaataaatagaattttagaaaaataatgaagattttggaattaaataaataaatagggcagataaataaatatatgttcttaaaaaatgttgtatttattcatttgataagtagtaaaatagagtttatttttataaaatgataaaatcactaccacaaaaatggtcttctacaatgcaagttttattatggttgtacaaaaactgatgtcataagtaaagtggtgacatttttgtaaacaactggaaattntcaaagaggatgttatcaaaatcttctttgaaaatgaattacgacatcggttctacaatg

SEQ ID NO: 181564 - DNA, 444 bp, Glycine max
  unsure (1)..(444): unsure at all n locations
agctnttcgcanaacttacggtaaaatctgggaccttccatgatagaagtctccacagaggcgcatttctccctcgcccagtattatgatcgaccgttgagatgctgtacctttggggacttccagctgtcacccatggtggaagaatttgaagagatcctacgatgtcctctacggggaaggagaccatacctcttctcagggttctatccctcattagctagaatttcaaagatagtccaaatctcggggcaggaattataccatggaaagcaagtcaaaaatggggtggttggaatatcgagaaaatgtttggaggcaaaagcaacaaccttggcaggtaaaggcgaatgggccccgctcatagacattctcgcactgttgatctttggaggagtcctctttccgaatatggatgggttggtggatctagcagcgatcgac

SEQ ID NO: 181565 - DNA, 420 bp, Glycine max
atatgcattaaaagagtttttacaagttttgttttatttcataaaaaagatcatgattctttaaaaaattctaatctaattcaaaccttcaatacattctatggaaaaactattaaaaaatattttaactgatttaataaatttcccaaaataacatataaataaactccttttattaagtaaaaatgtatttggataaaaacataattaagtagttcataataacttaataacttattataggagaggtttttttataagtgaatagcgaaacttgttaagctaagctaaaaacttatatagagatcatgtgttagtttaataaaaataagtttaaccaataagggtggcattattagtatataaatttggcccttagtcatgcaatcgcgatttaatccttgactagtggatatgaaa

SEQ ID NO: 181566 - DNA, 454 bp, Glycine max
  unsure (1)..(454): unsure at all n locations
agcttcagtactagtaattcctccgaaattgttttgctatatcttggagcaacggcttcctcaacaataataggaacatccttagcagtgtgaactttggaagacaacaaatggaaaacatgaaccagtcctacatgcaaaagaacaacaacaacacaagccttcttcctcaagctgatactatatctgcagcaacgaaagtgatcacagcggaccccgcttttcagtcagctttggcagcagcacttacttcgtttattggcggnggtggtgttggaaacacgcgaggaagtcaaggtggtaatgttgttggagaaagttngagtttgggtcacaaaatgaaatggggtgaggtgtttccagcgtctaataattctaattcttcaatttcgaacaataaagtcaatggttgttgcatcagcttcttgaacaaaacgccggcagcgaatacaca

SEQ ID NO: 181567 - DNA, 327 bp, Glycine max
ccctccactctcaaaaactaccccaacgggttaaacgccaaccacaacgcatttgaatgacatagtgtcagatcaactacgctgggtcaacacgagaagaccaaatgtagtgaaaaacaaaacccttacctctaccggaaagcaccgatagcatcaatcaacactggaaggtgaccatgatcgaagtggaacacacaaaagcacttattgtgtcaacgaacagtgaagggtgacgaagaacggcgaccaccaccactggaagagcgatgatcgaccgggacctaacacaagaatgctattcttcaaccatatgagggagaaaaaggg

SEQ ID NO: 181568 - DNA, 408 bp, Glycine max
agcttctctaactgtaggacactctacgctatttcagttctaatttcttcgcacctacatggtcctttagctataagcaacatcattctttagtacaataatttaccagtgtttggtggcacccaatatagtttgtcgatactgtcacaacatgcccttttgtgggcgagcgaggcaaggctcatgggtgcgctcttcaaaggtggaaagatgcgcggagtcgccaccaatgtttatttgtggaaaacgtcggaaaaatcgaaggaaaccggtcataaagaatattccaagttcgggagttgtatttacgcttgaggaaggtattaccacctctcacgtttgtctcaaaggacaacagccttattcttttttagaattgcggaaattgtgctaccttaacttttattt

SEQ ID NO: 181569 - DNA, 447 bp, Glycine max
  unsure (1)..(447): unsure at all n locations
ggcaatactcctacatttttctctagcttgcattttctttctttacccactcctcacgtttggttgtttatggaaaaaacaccataactaaacgcgccgcaaggtatccctatcgcaccatatccaaatctataacgatgggtgatcaagaagagacgcatgaacagatgaaagccgacatgtcggctctgaaagaacaaatggcctccatgatggaggccatgttaagtatgaagcagctcatatagaagaacgcggccaccgccgccgctgtcagttctgctgccgaagcagacccgactctcttggcaactgcgcaccattctccctcaaacatagtaggatggggaagggaccacactgngcatgatggcagccctcacctgggatacaaccgagcggcttacccttatagattgctgcccaactattcaccacctgtcttgc

SEQ ID NO: 181570 - DNA, 412 bp, Glycine max
  unsure (1)..(412): unsure at all n locations
agcttcatgttgctcattgactccacatttctgcaaagaaggacaaagatctgtatggtgatctgcagaagaacatanaccacagactcttgcaataggtgcagatgcagatttctgattcatggcaagctgagttactaggttgaccaaggcatcaagttttccttcaagctttttattttcagtagatgaagatgaatctgtggccacctcatggactcctcgaaggacaatagcatcatttcttgcactgaattgttgggagttggaagccatcttctcaatcaaattcctagcctcagcaggggtcatatcaccaagagctccaccgctggcagcatcaatcatactcctctccatgttgctaagtccctcatacaaatattgaagaaaggagtgctcacaaatctgg

SEQ ID NO: 181571 - DNA, 412 bp, Glycine max
  unsure (1)..(412): unsure at all n locations
tgaaggtnnganaagatgagtagagggagatggagagatttgtttctaaactttgtgcctaaaatgaagtcagaactttgaagtggtattcttcaatgatcaaagttgaaaaaattcacacccatgacctctatttatagcctaagtatatcacataagtggagggaaagttgaatctctattaaaattttacttgaatttgaaattgaatttgtggagccaaagtttggagccaaaatttcactaattatgaatagtgaattttagctatggttcagcccactaatccaagatcaagtccaagattctccactaactgtgattaggtgtctagacgcatgtcaagcatgaaagacatgcacaaagtgtgactatatgatgtggcaatgggatgtatcaaacanatgctcac

SEQ ID NO: 181572 - DNA, 440 bp, Glycine max
  unsure (1)..(440): unsure at all n locations
agcttccatcaagtggtaatcatagcattttatcttaagtaggngctccttaaacctccnattaatttttttctttaccttctcttccattggttgttcttcatttttctccatgtatctcctcacatgtcttgttctaaatgttgttaacatgattctttagagtttccaccgattaaacttgctatagaaactagatttgattttctatggntcaaatttcttgttcttgttcttgaaccatgaattgtgttgagtttaagttcctttgagttttttcttgttattttttgtggctgaaacctaaaccataaaattcttacaaaaatattaaagtagaagaaaacctcaaaaatctagagtgactcgttcacctatggtagtttcgtcatacaagtcatgtctagtcatgaaaattgccacataagatttcttatgtt

SEQ ID NO: 181573 - DNA, 374 bp, Glycine max
  unsure (1)..(374): unsure at all n locations
tgttcagaaggcagcagngagtngtcactgtcacttgcccttctctcttcatcttgnactctatatatatggctttttttgaaatgaataaagctgtgagagaaacgagggaatttcccttcagtttcaaagtggtatcagagcangttccgaccgtcgtcctccgccgccggccgcggtcatctctggcggacttttccggcgagaccagggttcggatcacctccaaaagtgcgatccacccctggaacttgcgccgccgtctgaagccccacgcgccgcttcttcctcgcgcgctttccggcgcgtgcagctcacgccccgccgtgccggcgtcagaagctgcccccttcctgtctcggcagcttcgttgt

SEQ ID NO: 181574 - DNA, 395 bp, Glycine max
gcttgaaatgaggaagtgtagaagggtgtttacttctgcttttattcgttgaccacagagtggtacctggagatatgtcgcgggggtcaggagaccttggggacgtcaggtggggtgctatttcccaaaaccaagcttgaccaatcccaacccaacccgggcatagtcagtcagtgagaacctgtgatgtacctaaacaggcgagctcctggcagtcaacagataaaaggaacaaagaccacaaagcaaggaggcttgtgtggtggctggccagctgtgaactttgattgatatatgggatatggcctctggtaatcgattaccaagggtgggtaatcgattacaaggcttaaaaatgaagacaggaggctaagatggtctctggtaatcgatta

SEQ ID NO: 181575 - DNA, 340 bp, Glycine max
tcttttcattctcttcttcctttgccaaaaagaattcgccaaggactaaccgcctgaattctttttgtgtctctcttctcccttttccaaaagaacaaagtactaaccccctgaattctgatgtgtctcccttttcccttgtcaaagaattcaaaacgacacagtctgagaattcttttgattcctccctttccctaatacaaaagtgttcaaaggactaaccgcctgagaattctttttatccccattcacaaagtatcaaaggtttaaccgcctgagatctttgtcttaacacattggagggtacattctttgtggtacaagtagagggtatatttac

SEQ ID NO: 181576 - DNA, 344 bp, Glycine max
ttgtgcaagcaatcaatggggtcaaacacacccaaaaattatgatgatggatggctcaattctccaaaaggtaacttattactttcaaattgagcttttcaaactatcattacatgtaaaggaaaaacaaggatttcaagtgacaaaatgtcaaaagacttttattttcagaacaattacccattacttgaacatatcctatgattcagagacaaacatgcgaatttaacacaaccaaactaacaaaaataaactagaaccccacgaaacatacaaaataaacttttttaacacgactaacaaaaccgacaccaaataacacacttcccccatacttaaacaac

SEQ ID NO: 181577 - DNA, 422 bp, Glycine max
  unsure (1)..(422): unsure at all n locations
agcttgccacccagctcgcccagtctagcttatctcgcccaggcaagctaggttgcttcctccagaagcaaccgccttctggaggaatattctggaaggcccaagtgggcctggttgctatttgaacccccattttttcaaagtacacccccctttcccttttttggtgattcttttttcgtaacgttatgaaactctatgaatntcgtaacgacacttgttttctttccgtaatgttacgaaaccttatggacttcgtaatcaacccctttttggtttccgggatgtcacagaactttatggattgcgcactaacacttccttttaatttccggcatgtctcggaacttcacgaattgcctaacgatgggtgccaagtacctcgaagtggtcaaacgaaaagtgcatcccaacaacggatg

SEQ ID NO: 181578 - DNA, 460 bp, Glycine max
  unsure (1)..(460): unsure at all n locations
acctatgaaactcagctgagtctagcgatcagggctttttgtctgtgttgattttcancgagcnaacaattgaggttttggtgttattttttagagtgcgtgaacttgaataagtgtgaataatgtgtgtgattgtgttaagtgatgtttcaccaccaagtattatatatttcgcatgctctagtgttttattatatacgaatgtgataactcattcccgatgtgtgttcgtgttttggctgaatgccattttgtttcacgtgagccaatatatgataagtttcatgctggagatggagagacttcacctttgccatgaaaatgctcttatatacggtgcatgaggctttatttcatatgttactattccatgaataggatagttttatatctttcggtattaagttgacttctcttcattcataatggatgaccttattttgagccagaacatagttgt

SEQ ID NO: 181579 - DNA, 447 bp, Glycine max
  unsure (1)..(447): unsure at all n locations
agcttcattggctacttcatcattngnatccttgtcgacttgttacatgtattcaatcacatttcgtaaatgtggctgtagtgagttaaccattacaatagataagaaagagcatatagaaataacattaatttttaagaaagctcatcagcaagagatttggttcttactggtataagtagttcgaaaattagaaatgcaaattgatattataaaatgcaagatattttgatattactgtttccaaatgaattttacttactcaaataagtaaacacctagatatagtgtgacaaagaataaaatagatcaaccacctcaaagtgcaacattcccaaaacaataagcgtattcaattaactttaaaagctccaatgaaccacaagaagcacacctccaagaaagatgggcagacttcaattagctaaacaaataatgcacaaacct

SEQ ID NO: 181580 - DNA, 314 bp, Glycine max
ttgaattttacttttagcaatctcgtgaaaatttttaatatatagcatttaaatatagtgatgattaatgataattttctactttaaaaatttgataatattgtatcaattgtgtggatgaattatgatataacatagtagttctaagagaaaaaaatcaaagttaaatgggtaactcattggcccgagtcgaaccaaatagttcatgaatgagttggattgagtttaaaaaaattgtgaaaaccgaaccgaatcaaaacgatcaaatttgattgcgttggaacctaaatttgggcaatctcgactcgaactgg

SEQ ID NO: 181581 - DNA, 471 bp, Glycine max
gatccttaagtcacctgcagctgcagctatttctttttctgccaaggctcttaatatttgaagagtatccttgtggaaacttcacccgacgaagacactgacaaaaacttatcttctccttcttggacaaagtatgggaagctgggggcaagtaaattttcttctcatcagaccttggatgcaactgtgatcgtatgcccatatcaactagatcttgacgggtattcaagccatccttcgtcttgccttgaatgttaaggagcatcccaatcacactgtcacaaacatttttctccatatgcataacatcaatacaatgtctaacgtcaagatcagaccagtactgaagatcaaagaacatggacctcttcttccatatgcaactcaattctatctttcttttgggtcctcccacatacagtattcaggtgttgaacccactcatatacctgctcaccagtcaacggtatc

SEQ ID NO: 181582 - DNA, 294 bp, Glycine max
taccagacttaattcttacatttttggttcacaagatgattcaaaccacatcatgcatataatttgctttcatatatcttattttactaatgttaataataatcttggattctttatgtcatttgccgaaagtttaatcccatagcttgcgatcatcatttaactctaagaagatatattccttatagttcgcaggtcaatgcaagttaaatcttcccatctatttcacagtagtctatagttcaattttagaacctcaacatgtaaatttctggccagataaatttgttttaa

SEQ ID NO: 181583 - DNA, 442 bp, Glycine max
agactgttgtgatatcatctgcatggctattttctaaagaatcaaggatcaatgttatatcacgataagcttctcaagtttaataaatgctgaacacatatggttacaatctactatttgcatttcttcctctgtatggcataaacttggaaagcaattgtggctatgggctgcaatgcataaagctatatataatctcctattctttctcttttttgttaattggaattatattttactaaataaacagtactgtttgtcgtttgttgtatggaaatgttatactctgtgaacctttgtgatacctccttattaaggaaaataataatgaagaattatgtggcctaatattttcagcaataaattacgtaaggctatgacgattgtctacaaaaccaatctgggactatactttaaatggatttaattttgtgctctttcc

SEQ ID NO: 181584 - DNA, 473 bp, Glycine max
  unsure (1)..(473): unsure at all n locations
ctatacatactcaagcctttgtcactccactcatatctgaccgtaacattaaccattacttacaccttcgtcaaccgcgtcaacgaattcttgcaccccgcatacaaatgcttctttgaatcacattgcgatccttcatacatagagacatgtgctagttgaaaagactcttgtccaaggtcatgaatcatatccttcaagcgatcgcctatttctacatcaaacagttcagattgggacccactctgcatgtttgtcaattcaccatgccatatccacatcgngtaattcttgttaatcccatcacacaatagatgctcccgtatgtcatccacgatttgtcgtcttctgttcaaacaattgatgcaaggacaataatattttccatcttcatccggtcgacttttttctgaagcaaattgcacgaactgctcgacgccttctcatattttgggtaatgcgacttcattcat

SEQ ID NO: 181585 - DNA, 349 bp, Glycine max
cattttgtttcgcgcattttgactctcgttgtgctacttatataccccctgttgacgtgcttaacccattttacttaagtcatctctcgcttaacttaaaaataaaatatatttccaccgaacgtttgaattgaattatccattaacttccgttaaaataaattaccaccgttcggtcatgccgtaaccacgttggaaaatcataaaaggaggttaaaaaaaatatataaataatcaaaaaacatcttttagttaaataaagcggaaaatcaatcggacgttttctctttgggaattctcattcttaatcgaattgattataactaaagtgaaactaaggctaaaatca

SEQ ID NO: 181586 - DNA, 333 bp, Glycine max
cagaaaggcgattgtggcttacatgcacctctaccattgtctatgttgataggattacgacaagcatgacatgcatgtcagccagatggtaaaaggtactcatgttgacgatagagaaagacgcagaatcttggcaatgaaaccagccgcaacaaagaaaaggcaaaccaatcaaatcctacaaatagttaagctgttacaacaaaattcattccacttcaaaatataaaaactatcgcaaccatgtacatcacaatacctttctaagtcagacaattcaacttgttccttattagaaaatatcaactagagtattagccacaattctcacta

SEQ ID NO: 181587 - DNA, 453 bp, Glycine max
  unsure (1)..(453): unsure at all n locations
actcagcttaaagatgcccgagtcattcatccctatgagaatgtgttgaagtattggtgaacgcgattgccattccttgaattacggggttgaaccaagctcaagcttttaccaaaaggttcatcaagtcaagttgaaatatggaagttaccatcctgcaaaattggggcanaagatgaatcgagtcacatcactgcttcgtctactggcaaacatatttaggattgttgatgtccttggtactctcagtttcaccttgacaaaaatgtcatggaccatgttgaaaatctaacttgattcaaccccatatcctgtgtagaaattcgcaatacttcaactgtacattattcccatacatccatgctttccatttggtgcattgctcattgaattctttcttgaaaataaaataacatcaatataatgacttaatcattttattaaaagaaaaga

SEQ ID NO: 181588 - DNA, 202 bp, Glycine max
cttaacctaatcctacgactattatgcttagaggatcttttgctatcctcagctccaaaaaagcttaaactttaactggattttctttaaatcttaactgcaactcatcaagggagtactatattttccatttacaaagattcccactaaaacctagggaggtgatcatttaaattttccaaattcgttatgatcatattga

SEQ ID NO: 181589 - DNA, 449 bp, Glycine max
  unsure (1)..(449): unsure at all n locations
cttcttctntttcccatgattggcattggcattcctgtagaatgcgagcttctctcccttattctcatcaaagatcctacacatgttggtcagttgtgcaaagttatggatgtcgtggtagttcaccatcatcttcacttctggtcgaaggccattgataaacttcacacatttggacctctccctaacttccccctggtaatgaggaaaatacctgactaagttctcaaacctagttgcgtactctgccactatcgtgctcccctatntcagcttgaggaacttcatctccttcctgttcttcacatctactggaaaatacttcttgagaaatattcttctgaaagtcccctcgttggatagcagccgccaccctgctcctctccagacatagtgacaacagtgacaacatgtgagtaacaaacaacaccttctactggtcttaacaa

SEQ ID NO: 181590 - DNA, 366 bp, Glycine max
gcttggactcgttctacctgaacaatttattatcaccactggatggctctattaggatttgagattttttcaatgcatgctgaacgatacgaaatgctgggtaaccgagactgttttgccatagtgaggtggacgggcaatggacatggagggcttgaggggtattctttatataaaaaaattcttttaaagtcttgaagtcttgaagggtttaggaccaagagatataatgttcttgttgctaatgatgttgttatacgtttggattaatgacaaacttgatgtggctcatgccatcaactatgatatgcccgggaatattgaaatttacacgcacagtattaaacatgttgtatgcctgtttgg

SEQ ID NO: 181591 - DNA, 280 bp, Glycine max
attgtgacaatacttaacgtttttttaagggcattgacagtactataaaatgacatgcaactgaaagagaccacttgataaagataacacaattttttcaaaaagataaacacaattatgggtattataactttgcagatgtgaaaaagctatcgtttatgcaattatttttgtcataaatggaggcatgtaatacctttataatatacaacaacatttattcgataaaaacaaaatctgattagccaacataaaatacacaatgtttaagacattaaac

SEQ ID NO: 181592 - DNA, 331 bp, Glycine max
  unsure (1)..(331): unsure at all n locations
aactttaactcgcttattcatggtcatttcaccatcttcactacgctattgaagcttgtaacgctatcgttgtggtttagcctccaaattcacattntgacaccaattcttgcactagccatattggtgcaactccctccatccattatcaaagaacataacttcccttgaataatacaccttatgtggaaaatatttcctctttgaaaatcacgccatttcattgtttactgcccaacattcttctaaccatgaacaaatacccttatgttcccttttccttctcatcactagatggacctgaatcctaagacgaacactacaatccttc

SEQ ID NO: 181593 - DNA, 417 bp, Glycine max
tgtcatgcgtatcggataatctaccccgtgtgtcagtactttaaatatgtgatcaaagtggatgaaagcaacatacataagtgacgaatatgagaacggcgttgaagaattcttgcaatttgcccaacaaaattcaccagaaatgggtggagtatatttttgtccatgtgttaaatgtttgaatgggcgacgataatcattgaatgacattagaacacatcttatatgagatggtatcagtcatacttatacaaaaatggatatgacaaggtgacttaccacaaatgttaatagtccctccgacaaatgcaagtgatgtacaagtcggtgatcgtatagaagacatgctctgcgatcttggacaggagggtttaggcaagcacatgcaccttattatgaaaaattagaaactgattc

SEQ ID NO: 181594 - DNA, 392 bp, Glycine max
agctttggcgctcaggttttgaaggcacttttattgctctcctaatggcaattgataatgttggacttctctcaacatcatggggtggcggctttgttctccacatgctcacgatcacaacaacaaagtttgataacatttggttggcgaatttgatccgcaacattttaaggattgctccactttggctcctgtttttggtgcctagagctgaccgcagctcttcaattcttccatgtaaaagcatgaattcagaggtggctatcgacccttcagacaccaaaaatgttgaattggtgtcccttgtacacagtgttgatggtaaatagtggaatgacaagacattcttttgtgatctcaatctcacatacacgaaattaccacaccactgt

SEQ ID NO: 181595 - DNA, 429 bp, Glycine max
  unsure (1)..(429): unsure at all n locations
tgacttcacaagaaataaatgtcattgccatgtatatnttagttatgaataaagtctaacagttctcacctttgcacttcccatcagcatccattgtgctgcttcttcttctcttgcgtatatattaaaccaataggttgctataaatcaagctctaagctctagtaggctagctcgtatattttttcacttcattgtttcgagctagctagcttcattaggttttgcagtcacttctctactaggccattgttcttgtggtagctaggtataccactatcagaattgtttctctgttccacaaaaaaaaaaaacacaaaacttaggtttcacgtgcttttctgcgtatgacattcatattttttcatatcttacccgtttatatatcaagtttaaaattgccacactttcttttttttcttttttttt

SEQ ID NO: 181596 - DNA, 436 bp, Glycine max
agcttgtgaccaacaatgtatgtaatgcatgatagccaaaagtttctcatcttcctttctttgacatattgatcaaatgcttcctctgcctctgcgatgtttatctctgcagtttcttcagctttcttttgtgccaggcatctagcatgaactagtgcatcttctatggaggctgagccaccctgtgcaatgaatgggcctgtggcatgcattgcgtcaccagcaattgttactgtacctttcctgaacttgttaaagaccaagtcccacggtgccctatacttcaactcagtcagatgcaagaagctcaacttgcaatttcgtattatctccaccgccccttctgggaaaccttttattgattctattaatgactggctaataagaactgggtctttccaacatgtgaatctgctcttattatcaacatactaat

SEQ ID NO: 181597 - DNA, 435 bp, Glycine max
agcttgcagccattagtttattaagtacatgtgatcacaagtatgactgaaaatgttagtcagtatgtcacatcgatcgtgaacgaatgcattgatcgtatcccactgagagtgtgatccttaaattttgagagacacaactattatttactactgatttttacatgaatctctgaaatatggactgaatgcatgaattgaggatgatgaaggtcatgtcttaattgtgatagctacttacccaaaaagctgaccttgcgcttgaatgatttatcccttacacccaatttgagcttaatgaattattgattgattgaaccttgagcctatacagcgtcatctcctgctaccctgtcttacgttgtaggagagcatcatccacagaaaagcttggttcacggcaaattttgccccatatcggcggagttatatgtc

SEQ ID NO: 181598 - DNA, 449 bp, Glycine max
  unsure (1)..(449): unsure at all n locations
tgagtgtgagcctccataaagtgagtctattttgtaagttcgttcttgtaaccctactatcattttgtatagtggaataatctccatattggagaattataattgtgtgctcccattactatctttaattactaagtgcctatcttaaacttcacgaagcaggaaagtccgagttttcccaacaattagtgcattattaaaatcagggagggtaatggaagcttttaatcatcaaagccaaatggctgttcggggcatttcttttgatctagttttgtgtacaactatgatggatggacttttcaaagttgggaaatataaagaggttgaggcctatgaagcatcgacacggacacgtggacacctataatgtccaaaatatagaacgtagtacgggtgtcgtgtcngtgtcggacgctgacacngacgcgtgtcggacaccggacacg

SEQ ID NO: 181599 - DNA, 431 bp, Glycine max
  unsure (1)..(431): unsure at all n locations
tctatcacagaactaaagccaccatggcatacatagcacttcttacttgagtgcttcagtgcaagctgctgctgaaaccaaccaatgtgcaccactcccctattcttcactctttccaaaaacccttttgttaatgctctttccaactcagctttggcagaaaagatggatgggaaattcaaaaccaaaatgaaaggtaagccaatgagttctaacccagtggctagttctttgatttgatcctcattcagaaatgtctcactatcacgttttgaacactcactaaggcttcgcaaaactcgctcataacgggtaagggttttttcaccaaatcttgtaaagaggaacatgaggcaaatntccccaatggggtgcttttacaaatattattccaaaggggtccttttgaaaatattacatggggttgattc

SEQ ID NO: 181600 - DNA, 247 bp, Glycine max
cttgggcttaagacttatgggaccaatatctagaataactagaggatcatctccttgagcaccaccatccttggcaagataatcagccacttgatttccctcttgcagagtatgcttgaactcaatatataatccaatcatgttgccacaaagaaaataatcttgaaacaattggataaaaaggtgagttacctctactccattcttaataaatttgagtgcacaaagtgagtcagattcacacact

SEQ ID NO: 181601 - DNA, 374 bp, Glycine max
  unsure (1)..(374): unsure at all n locations
tactgggcaagggcttatgttcacaaagcgatcaggctgcaatatccaaaaaggaacctgctttgcatattgatggttcttgcaataccaaaaacaagttcaatgagatctcacatcacttagatacttatatccacaatggtgcatcttctcagtctatatttaatttctcaaacaagcactttaattntcccaggttattaatcacttattatgattacaggtgaaatgaataaattgcctgtggacaagactcccaaactgtacagttccgtggataaattgaatgtaacaggtgttttcctcttctgttgaaatctcttatcactctaaatctcattattcatgggtacatgcacttgtctgcaataatg

SEQ ID NO: 181602 - DNA, 314 bp, Glycine max
  unsure (1)..(314): unsure at all n locations
tgagaagcttccttgagaagctagagcttagctacacacccctataatagctaagctcacccccatgacaaaaaaacatgaaaataccaaaaacaaatcctactacaaagactacttaaaatgccctgaaatacaaggctaaaaccctatactactagaatggccaaaatacaaggcccagacgaaggaaatacctattctaatatttacaaagataagcgggctcacacttagcccatgggctcgaaatctaccctaaggctcatgagaaccctanggccttcccttggatctctagcccaatctacttggag

SEQ ID NO: 181603 - DNA, 268 bp, Glycine max
  unsure (1)..(268): unsure at all n locations
tggctaacacacatacaacatcattctcctggctcttactttcacatactacatgacgaatttatcgctggtaataacggaagtcgcgaacatcgccagtttcatcgagtattttcggaactttggtcaacgcaaagaggcttttaagcactgtaagtcaatcatacaagttgacggcacacatttatacggcaaataccgcgcgaccctattaatggccacatcccacgatggagatggcggngttcttactctatcattccccgtg

SEQ ID NO: 181604 - DNA, 411 bp, Glycine max
  unsure (1)..(411): unsure at all n locations
actcaactggaagttatgggcttgtggtggaggaggtttatctggttttatttaaccgataatctaaaaaatgacattgtcatccttctcttatgattaggaagatcatggttattattaattttattggaaattaatttattttaattcgaagttaccatttattaaactaggttttatataaattatctttattaacagtaatcatattaattatgatattaatttgcatcatattgatttgattataattaaaaaattaacttgtatcgacattaattcacattttaatttcattaaagaataatttatttatattactactaaaagcagtaacgtgtcaccatcatttngaatgggttttttaaaaagaactaatacctataattaattacanatttttntcattaa

SEQ ID NO: 181605 - DNA, 463 bp, Glycine max
  unsure (1)..(463): unsure at all n locations
nggcatttttgtctagttcaagatgacttgtngggcctctttttaattccttctttttacggnnntggtgcattcattcgtttattgttttacattgcttaaagaatatatgaggcactcgttgtatgaaaagattattgttctaggtctagagtttcaccgatttcttacctaaataaaattgtgtagagttcaatcctatttataaatcaacaacaatccaattttgtgctttcattaaacacattcagttcagtatttaaaatatcaagctgtttacggttatccaattgagattcaatcatttttctatatggctttaaggtgtgttttattgcatgagcaagatgttgaatgcaaggggttcataaaacanatgtcaaactnttgcatgccttacactctctctcatctgagaagttatttttggttgaatttgaaaccactctactacatatatcac

SEQ ID NO: 181606 - DNA, 449 bp, Glycine max
  unsure (1)..(449): unsure at all n locations
ggacctatgaaactcagctctcctcttttctataaaagggattatgtgaatttatanatgntctaccctcctggtatctgagaatcacttaaaattagtgagaaaaattgtttctgtgaaaaaaatccaagccgaagcgcttccgtgacgtttccgttggtgatttcgcaaagatattcaaccgttcttcaacgttctttgttcgttcttcggtcttgaaccggtaagttcccgaaatcaaactcttcaattcattctatgtacccttagtggtcctcatttgtttcgcgtgcttgtttttgttttatttcatttactttccgtacccccttttgacgtgctttagtcatttatttaagtcatttttctcgcctcatcaagaataaaataaatttccaccgatcattcgtattgtacatcctttaattctgttaaaatgattccaacca

SEQ ID NO: 181607 - DNA, 391 bp, Glycine max
  unsure (1)..(391): unsure at all n locations
tgaaggagtntcatgcatcacggaacaatttcactctaatattgggttccaannggcttcctaaatttcagcttacctctttgcatgtgagatcgtggcagtaaggtgccaattttccatcatggattcagtcacaaaacaaacttcaagatattggactgtctaacacggggattttagattctattcccatacggatgtgagaagcactttctcacgttttgtatttaaacctctcttacaatcatatccatggtgagcttgggactacattaaagaatccattatctatccatactattgatctaagctcaaatcacttatgtggtaaattatcctatctttcaagtgatgtgtttcggntagatcttcaagcaattcattctctgaa

SEQ ID NO: 181608 - DNA, 388 bp, Glycine max
ataaagagaggacaatttagagagtgacccacgactctcaaatggatttccactgaatttattaatagacagattgagatatcttaatgatgaaagtcttccaaatgatctaggaagagcaccaccaattgagttgttggaaaaatctaccagcacaatatttttaaatgccccaatatgatctgtcagattgcctgatagttgtgaactctgaactgcaagtcttgtgagtccatgggaaatacaccgagcaagaatttctaaaagttcattaacctgtcggttgagtttgagatatgataaacctatcacccttaagttgcagacattacccaaagaagtcggaatggttccttcaagtcgactatattgacaatcaagttcaaca

SEQ ID NO: 181609 - DNA, 438 bp, Glycine max
tagcagatatgaatggcactaagctaattttaatcctatttaaaccacaagaatatccgcttagccagcagattatgcgctcagccccatggccctcaattctgaccgtaatgaatagagcttggtgacataaggtcgcgcttagccaagggaagccatcgctgagcgattaggtcgtcgcttagtggaaataatcaaccttatgtgccagggtggtgcgctaagtgcttgagctcctggcttagcacatgagtgctaatgcgcttagcaagaagcaaatgcttagctaaaggactaattttaaaaaatatttttctaagtgataacttagtcctttcccaagaaattaaaacccttaatttcacattcaaagagaggttgatatgctccatgtaaagattattaagcaagttcctaatgatcaaatgcatgaaaaac

SEQ ID NO: 181610 - DNA, 397 bp, Glycine max
cttcgagcaacaaggaggtccttcaatggtgattttcaaccgtggagttggagtggaaaatgaaggagaagaggtgccatacactatagaataagccatagaaggaggagcttcaccaccaagtgagtgttttggataagaagcttaaagagggagcttcaatggaggaagaatataagagagagaaagtggcatggaaaattgaaggaagaaagggcgagaagttgaactttgaagtgtgtctcacaagactctcattcatcaaagttgtgacatgtgttacacatgtttctatttatagcctatgtcactaactaaatgaagatcactttcatgtgaatctaaaaagaatattctaaggatatgccaaaggcatcttagcatattctaaaaatat

SEQ ID NO: 181611 - DNA, 332 bp, Glycine max
tctcacctaacactacccgtgcgatctctcctaagatttatttttgatatgagaaccctcggtcacgtcctttgactcacactctggggttacaattaagtcaagacccaccagagatcaactctggacaaaaaagaacaactcttcacactagagatcaactctacacactagagatcaactttacacacataggtcaacacttgatgtaggggagcatcaaggtgctcacaaaaactcagtcccaaaactactaactactcttaatcccggactggtcagaactcgtgcagctcatgattatatacatctgcgttttggctgaacttctg

SEQ ID NO: 181612 - DNA, 446 bp, Glycine max
  unsure (1)..(446): unsure at all n locations
agcaggaaggggcgcattttatccattnataatataagggncgtgggcggcggcgaaattaaggcccctccaaagtgttttgcaggggtataccaccaactgcttgccctttagtggcatatccgaggcaaggctcgaagtccgctatattgtggtggggaatttcatgtgtctccccaatggtttgagagacatgtgcatgatcagtttgaggttgtcagctttcaatgagtatgggttcagagttattaacatcctcactgcgagtgtatgccacattgggtggtgtatagttgggaggcaagccatatggtgagaaggcatgtttgtttttcgcactatatgagggccgcccatacctcccaactctttgccttccagacctaccatatctggggttggatgatttatttacttgaggccatatggaggggtcaactccacct

SEQ ID NO: 181613 - DNA, 453 bp, Glycine max
tcgatcggtcattcccagagtaccaatttttagtgatgttctcagtgctaacaaccaatgcatatgaattggggtggacttggagaaggtccttatcaagatcaatcgaaatgagacctgcactgcatcccatcccaccaaggttgagactctttatgttccctctaagtttataatgattgataatcattgccgaaagcgatggcgtggggcaaaagaggctgcaattcacaatcagaattccaatgtccttatgcttcacagaagtcttagcaaacagctcatcaattgcaccaaacataacagcctcagcctcttttcttgcctctttcattgaagggttgggaggatcattgagaacagcctctggaaagtaagtgctttcaccaaggccagccctctccagaatcttccgctggaattcaagagtttcctctgtgaaaaaaccactct

SEQ ID NO: 181614 - DNA, 324 bp, Glycine max
caacgacgaagaacgaatgaggaacgtctaagaacggttgaaacctctcccagactcctcacggaaaacgttacggaaacgtttcggaagcgcctcggcttacattttcttcacggaaataatttttccaagcaaattctaaagagagagaagtgcctaaggggctgaaccccttccttcttcacttcctcccctatttatagcaaaataggggaggtggttgccgcccagctcgcccaagcgagcagggttgcttcctccataacaaccgccttctggaggaatgttccaaagggcccaagtgggcctgggtgctatttgcac

SEQ ID NO: 181615 - DNA, 439 bp, Glycine max
  unsure (1)..(439): unsure at all n locations
tactgaagtgcaggaagttttgttgtagatactccactctatgatcatgnattagtagccaagtaacatgtgtgtgaagggtacttatcgtgaagaaaaatggagctgggatgtggatgagatgtcatatattgacatcataaagctgtgtgccaatatgtgatacaagcatttcaaatgtctacgatatcgatatccaagaaatgcactcagtcgtgagcttaagccattaaattatgatagcaatgtgtgcaactagtttttgacattagagggtttgatctggtagaaatctatgtagagcaccttattgatattcctatacttgatgaagagttgcccgaaggtagaagaaattttttggtactaatggaagttgttgtcattgatgatgctgcacgtgataaagatggtgtgcacgtagttagtgagggtataa

SEQ ID NO: 181616 - DNA, 434 bp, Glycine max
  unsure (1)..(434): unsure at all n locations
agttttgttagtncgttttctaacaccacttaagtaagtttatattaacgagttttaattaatatacactctcactaattattgacaaattaccatatgtgattaattaagtgtaaaaatcttttggactgtcagcccataagactgtttaagtgcatgcttgcttcaccttattttaaagaaaaataatagtttgttttatataaacgtgcagtcaattttgtccaaacccgaaatttcaaatattattatgagtttttgattaatcatgtcatgtctaactgaaaaagaagataacaaaatttgacaaaacctcgtataagatcacgcctaacatgcacatgtctggtgaaagtatgtatataataggagcatgctcaacggcgtatatttttattttgtttttctggatttcttgattgagatttttgaat

SEQ ID NO: 181617 - DNA, 387 bp, Glycine max
  unsure (1)..(387): unsure at all n locations
taacctataaatatataatactttgaantcataattaatttgaattgaaangaaatttgagttttccttttctaagagtattcctttgttcttgggcaaatgattaaattggatcttattaagatagttggcgatcaatccaataacttattacttatcttctcatttatttcttgagtgtggtattaatattttaccttaaaaataaatttaaatataattttttaagtttgaatccttcaaggtggtccatttcacttatgtgtttgcataagtcacaatttaaaatctaatatttgacatggtcattagaagtttgagtggagcttggcaacaagtggcgataacattggtggaagtgggaatacatttatntttttgcacaat

SEQ ID NO: 181618 - DNA, 331 bp, Glycine max
  unsure (1)..(331): unsure at all n locations
gagaggaacggaatataccaccccttcattcaatccattcagttccctcttactgcacaagcgtttcaagaactctttccaccaaattcccataccataaaattagcaagtgaacaaagaagcatgttttagacctttgtgttaaatttgttcatgctgtttctctttctcaatggccaccacaatgccgaaattcaagcgaaaacttgtgatgggtgcaaatggtcgcaccaaccccttggtgtggctagtggcgattatctgcaccatcataagcacagcagaggtagttgtaggcattgagtgntcattggtacatagcatacaccct

SEQ ID NO: 181619 - DNA, 324 bp, Glycine max
gcaaaaacctcctcatcacaatcaaatgaacccccatcccggttccccttcacgagttacgtcttctactagcctatcctcgtcctttagaataggtcccaataaccctccagcttcaaatatcaagcactcattccactatatgaactaccctaaccaaaaaatagggcgagcagatacttgccaaaaacattccatatacagcttcctactcaataccctgaacgtcccttcgtccgatcgtaaccgttgagcgactgaagatttatcgaggttctataccatagccacatttgaccctggattcgtagatatgccagacca

SEQ ID NO: 181620 - DNA, 453 bp, Glycine max
  unsure (1)..(453): unsure at all n locations
gatagatntcatagtaagcagaataacttgagcatctttgtctatgaatcatccattataatagggaacaaattcatagtaaccctcgagtacaagaccgagatgactatagagtagtattccctcatatttgatttccccatttccaacaacttagtatatgttttattttcatttgaaaatgttgtgacatgtgtttcaataaatccaacgaataaaaacaaaataaatgttaaaacaaggattctttgataaaattattttcacctcaaacgtaattttataacatgttcttagttaagtacgaggctttccaccttttgcttgacaatggcnaaggagatgcacattcagagtaactagcgagctagctaaaaaacctctcgtgacatttgaccaggggaaagaaacatgatgtccaaactctggggcacacaatatcaacatatatat

SEQ ID NO: 181621 - DNA, 351 bp, Glycine max
  unsure (1)..(351): unsure at all n locations
gcaagtcatttcccacaaatcaaggataatgtccataatcatcatggatcaataggaccttttaagatcggacttgtaagaaattttggctttggttgctctagtctttttttttttggtgagtaggagaacaggcacaaagatttggttagtaacttgaacgggttatcacttcctatcccctctcatcttgaccaagttactatcgtttcccttcctttntactttttaccacaactctgtacatggttcaaaccattgttgttccacagaacttggttttcttttccattttctcttacccttctccattttgaatggatttttgtatcgtttttttttctttctttc

SEQ ID NO: 181622 - DNA, 439 bp, Glycine max
  unsure (1)..(439): unsure at all n locations
tgaagcaaactggatgcattggttaacttggtaacccatctggccttgaatcagaaatctgtacctgtcgcaagggtttgtggtttgtgctcctctgctgaccaccatacagacctttgcccttccatgcagcaacctggagcaattgagcagcctgaagcttatgctgcaaatatntacaatagacctcctcaaccttagcagcaaaatcaaccacagcagaacaattatgacctttccagcaacagatacaaccctggatggaggaatcaccctaacctcagatggtccagccctcagcaacaacagcagcctgctccttccttccaaaatgctgctggcccaagcagaccatacattcctccaccaatccaacaacagcaacaaccccagaaacagccaacagttaaggcccctccacaaccttccctcgaagaac

SEQ ID NO: 181623 - DNA, 428 bp, Glycine max
  unsure (1)..(428): unsure at all n locations
ntgatgttattgcttaccttcaagtgacacagagaaaattcaaatttgtccttncnnncgagtaccaaatggaggattcattatgactctaacaacaattcgacatagctagagacaatacccagataaccatatgaatntgttatagaaaaaattcagcaacatataaaatctagagttcgaagttaaaattgattttggctcactcgatcattttgtttaacaactactagaacaagtcatcatacatggaatacttgaaaatagcgtacaatgtccatgagtcatataaataatagcatacttgaaaatagcataagttnttatactctaattctgattagataagaagacaaaagatacataacaaactggcttttaagtatttgtttttggtgtntaaaacgaaccacgtttacataatataa

SEQ ID NO: 181624 - DNA, 439 bp, Glycine max
tgtaaccacctataaataccatgtaatttttcttgaaatcatagaataatacttgatcatttcttccttctcttgcttctgggaggtttcttgggcctcgaacaccaagtataacacatgttttcttgaatttctttgtctagaaaaccacatcattaaccagttgagccaactagggttaagcgacataaaggttaaattaaatttaaagtgagcttttgtggtaaactaaagatgattactcttttcattttgggaatgtgccatgcatcaatgggagagagcgcactcactctttttctgcttaacgtctacggtgtgtttgttacacatgaaagttgaggggtgaaagtgaaagacaagtgaaaagagctgaaagtaaaaaaaaatgtgttttgtgggcataaaaattaaaagtagttgaatatgtttggtcaat

SEQ ID NO: 181625 - DNA, 294 bp, Glycine max
ctttgcgtaacttatgtgttcatgagtgtatgaaatttttaccctattttttgatttgattcaaatattgtatgttaattagtccttaacatattcatgtataattcttagagagtctttgattgcaaacctcttcttgaaactttaggttttcttatgattgtgtctattgtgagtttgagttttggtgattgaattatcggctgaaaatttgatcctaaatgtatattgaactcctaaaactgtggtaaacaagcctagtgagtttaacatacataggaaagttgaaagtaa

SEQ ID NO: 181626 - DNA, 394 bp, Glycine max
taacctcatacgccctcacagtctatagatttgggagtttatccaatccgtggggtcggactctcagccacttatgataaccgccgatgatcccattactgcttcccctaaactctctgtcctttcttcacgccgcatcccatgccttgcgaactccttggaggaccctcgcgttgtggtcactaaaaccccgtgcgaagaaaggcgtgatgctttcgtctaatggcgctcctcttatggggtagccaagctgtcttatggcgagaacgggaatataattaatacaaccccttgttcccatcaagggaacatttggacatccttcgcatgaagatagaatcttgattcttcctttcttctagcgagggaaccaatttacagacggccccccatg

SEQ ID NO: 181627 - DNA, 366 bp, Glycine max
aaattttttagcacctgggagagagacacagaggctatcgcctccatcccccagaattatgaacagccgctgagaagcttcacttttggggacttccagctatcacccatggcggaagaattttaacaaatcctacgatgtcctctagcgggaaggagaccatacctcttctcagggttctatccttcattagctagaatttctaagatagtccaaatctcggcgcaggaattagaccacagaaagcaagtcgaaaatggggtggttgcaataccgagaaaatgtttggaggccaaagcaagaatcttggcaggtagaggcgaatgggccccttcacacacatcttgcactgttgatcctcggagg

SEQ ID NO: 181628 - DNA, 382 bp, Glycine max
  unsure (1)..(382): unsure at all n locations
aataaggctataaacattattccgattgattcataatagcctctattttatggaggggtacattatggaaaccgttgcaattttttagagcatagaattaatatctgggaagccataaaaatagggccctacattcccactatggtggcaggaaatacaaccatagaanaacctatggaagaatggagtgaagaagagaagagattagtacaatacaatttaaaagccaaaaatataattgcatctgctttaggaatgaatgagtactttagggtatcaaattgtaaaagtgcaaaagatatgtgggataccctacaagtaacacatgaaggcacaacagatgtaaaaagatctanggataatacattgactcatgaatatg

SEQ ID NO: 181629 - DNA, 343 bp, Glycine max
  unsure (1)..(343): unsure at all n locations
aaagggagcggattatccattttcggacctgaccaaccgatctgctctaaaaggatcatgtcatttaccatcaccatccagatctctctctccactttttctttactttaacattagcataaatggttcacataaagaattagaaattctttttactacacggcgaacataaatggtttataatatatgcttgaaagctactactagtagagtagcagcgcgccactgtattaagccaanatttgatccctactattagtaaatgtgacgggtcaacccgaatatctggatagtatatttgacaaacatatgacaagcttttttaatctattgttccccataa

SEQ ID NO: 181630 - DNA, 422 bp, Glycine max
actaagcttcttgaactagtgagaagttttgaataaatagccagaagttaaagattggtatctctataatcaaacagctattgatattacaatatattcactggtttgaaagtctaccttcagttggtcaacaatataaaaaagaaggcaaagggatacaagtcaaatatgaaaaccacatccctgacaaaaaaatgtcctctttgttaccttcatataggcatcaatatctggatcaggcttgatatttgcctctttttctcttctggacaattccgccagcaagtctacagataatatacatagtcaaaagttaattttcctctaaaatgttagcccgtgtttttaacattgagtttaaaaatgagtgtaagcattaagaattcctgtgaactaaccgtaacgaggtccaactccttgga

SEQ ID NO: 181631 - DNA, 233 bp, Glycine max
catattgggagcccatggggaaggagggtactgagccctaaccacttcgacatcctcacgggggacgagaaagatccatactgtgcgcctatcactatgggcgacacaaacataagaacacaatctaaaacaagaaaacccagccgaggtctcaagtatcaagcttacacagaaagtcacaaactcaaatcatggaaccacatctaggtaaggcactactcctaccatacata

SEQ ID NO: 181632 - DNA, 380 bp, Glycine max
ccctctattgttatttagcttctatgggggtttaaagcagaaaaacttcttcaatatcttgaggaatggtctagaaaccttgaagcctagtgttagttgttttatacgactaaattttgtttaaaaaacctttttcaaaacatgtataagttccccaatttatagttcttttgtaggaatttgtaaataaatcttgatatgttttggtacctatcattagagtacctttaattggaattaatgagaaaatctgtacaatctcatgtcaaaagagtctaaaatctcgaagtcctaaaaggatcagttgtgctaagcggaccttgtgggctcagcgcgcatccactgctaagcgcagctttagcatgctttgcgtgacaagg

SEQ ID NO: 181633 - DNA, 235 bp, Glycine max
  unsure (1)..(235): unsure at all n locations
gaaacttcgggcttatcgcatganatattatgcgcttatcgagaagcacgcgcttatcaaaatgactaattttcaaaaatgactttctaagttttaaacttattcctttcccacgaaattgtaaccctcacgtttaccatatacaaggagtctgactttctcccatgtccacattatacagcaagttcccaatgatccaatgcttgataaaccaaaaataacaccaattgtaact

SEQ ID NO: 181634 - DNA, 349 bp, Glycine max
  unsure (1)..(349): unsure at all n locations
tacgagagactatcctagatcaacttttattttattcccaacctttacttgccccttttaacntaatttttttattaaaggcacacacacaccactttattttatattagtttttttgactggggctgatattttttaccatttacactttacccagaactccccaaattgggacaaattgcttgaacaagattttttataatgacctctctacacctaaataagagaggagataaatgtgcngctcaagtaataatcaactactttcactaattgggcaatatattattataccaggaagctttggctatggtattacatcaacatgcttatattctaatcagcttat

SEQ ID NO: 181635 - DNA, 371 bp, Glycine max
gctacacgaagaacaagacttgaaacactcaagtgtttctgctgttgggaaaagagaagtttttcacacaaccgaagacatatcacagatcgcaacggtcagatcgtggacatctgtcctctgaactttcagactaaatttcgagacgatccaacggttaacgaatgtgggagggcacttttaccaagacagcttccttgacaagctttctcgtgaggctttcttgagaagctttcttgtaaggcttctttgagaagctatagttttaactatccacacccctctaataactaaactaacctttttataaataaaacatggattacataacacaccaaataaacaccaactccaattataattgctaataa

SEQ ID NO: 181636 - DNA, 238 bp, Glycine max
  unsure (1)..(238): unsure at all n locations
tgttagtctttgcgtgctatcaggcttttcgtcttacagatagcaaaaaggtttatacggatgaccactcgggtatctccgcccgtcagcgtgactcaaaagtcagtatgacagatcttgtgagcgcgaaagatgacgtaaatcttcgcgtgtcaacgggcttgtcggccgcgattgacgaanggcgcangagacgacgttagtctctgcatgctatcaagcttttcgtcttacagat

SEQ ID NO: 181637 - DNA, 302 bp, Glycine max
gattattttgatgatgccaaagatttttcaaactttatttaagaaatcaagattattctaatgaagattcaagagaagactcaagatatgccagaacctcaagaaaaaacatcaagataagtataaaaagaatttttcaaagaaaatattgaatagcacaatttgtccaaaagaatttttcaaagaaaaatcttttacctgagttttttactctggtaatcgattaccatatggcagtaattgattaccagaagcccaaaacaattttataactgttttacaaagtagtaatcgattaccat

SEQ ID NO: 181638 - DNA, 288 bp, Glycine max
gtacctaattgcctgtcattagcttttatgtctctagaggtacttctcttgacatctttgtttgatgaatgccataacaggttgtgtactgctcgattttggagtggaataggttgggaggtattccatggattaactacatcttcattccaatgtatgacatatgtgtgatccctatatgctgctccaggatctattctttgaggatagctaaccctcaaaaaagacatatgtaccttcacaattcgcactgcctgattgctctgtgccctgaagggaaacactctt

SEQ ID NO: 181639 - DNA, 315 bp, Glycine max
cgctataataccaaatatacgataatgaaaccgggccaaatgttagcggtccagtcttgcgccaatttgatcatattgttccattaggtgcctcggatttgctaaaaaggtagcaattgcggcaaattcacttgccgcatctttatcatcattttatttcaaggcgcaggaacaaataatattgacaacgtgtgcttaaattaccacaccagctggatattattgtctttgcaaaatgctatccactctgcacccggtgatttatcagttattatgtaattaatatgactaaaatcagctaactggacaaaagct

SEQ ID NO: 181640 - DNA, 264 bp, Glycine max
ctgaaaagcgccggctgcagagtggatagcattttccaaacacaataatatccagctggtgtggtaatttaagcacacgttgtcaatattatatgttcctgcgccttgaaataaaatgatgataaagatgcggcaagtgaatttgccgcacttgctacctttttagcaaatccgaggcacctaatggaacaatatgatcaaattggcgcaagactggaccgcttgcctttggcccggtttcattatcgtatatttggtattata

SEQ ID NO: 181641 - DNA, 394 bp, Glycine max
cgcccggggccacgagggcaaaatttggcttcacaactcgcgaaacacatgaacaatacgatttgctcgcgacagttcttgctctaatttggggctgccccatgtttgatactttacataaaggtagcgtggaaaacaccttgcactagtgcgtatacatatgtaaatataaagagcatgatattcctaccaaagcgtgaatgatcgtcttcctaaatgaatgaatgattgtgtggaacgcctttcgaatgccagtatgtgcctaatgtaaatagctcgctcatatgttgaagtgtgagtgaagcaatgaaagtcgcatggtatatatattaccagtgagcgtacgtagttggcgatagcaaatgtctacgacatagttcaatgtaaactttga

SEQ ID NO: 181642 - DNA, 338 bp, Glycine max
  unsure (1)..(338): unsure at all n locations
attgtcatgaaaactcaagaaaggttcatgtcgcttcctaaaaatacatatatatnaagaggtaactttcgtcaagacacacaaatattaaattaattaggttaggttatttttttctttaattatttagtacgtttaatttggccttattttctttcatttgctttgaacactttaaaaaatgataccaaattaatttaaaatggaatcaaattagatcgattctaaaaaataaagaacctaattgaaagtttacaaattaaaaaataaattaaatgaattaacgattaagagataaaaaatatttaaccaatagtattcagcctatatttactaat

SEQ ID NO: 181643 - DNA, 452 bp, Glycine max
  unsure (1)..(452): unsure at all n locations
ntacttcagctatatgtttagtaaatgtgtggatcagatatgtttgttgtccggnttggcctggctgagtttagtcaaacctggttactcggaccgagttggcccggtttaacccgattgaaacgtttttttccccatatcctaaaaaatgttaagttgttaatagctaattattgagtaacatataatatgctcctataatattattttttatcttgataacaatatataataactaattactattatattgatcatgtaatatacaataaaatgaccttaaaaattcaggatttctagttttctacttcctatttaaatatatttttgaaatgatttgttctagtgagtgattttattgaaatcagtaaattaatttcagcactggaactagagagtaaaggcaagccacaggacctataagacttgaatgagactgtgaatctgtgatg

SEQ ID NO: 181644 - DNA, 300 bp, Glycine max
atataaggggcaacaatgcacatatatttcttttctcttcactcggttcattcatgctcgtttaaccatcatgccacactatatcgtgcttcccaaatatgctcgaaggagacgccaatgtgcttctccaatacgctccactctactatcaattgctttatttttggaccatctgaggaaatgatctaattatctcttgtttcccctttcataattaactaatttttacttctgcgggtgataattgcctttattttgcggattgattatagatttatcttgagacatcatctatataaa

SEQ ID NO: 181645 - DNA, 353 bp, Glycine max
tgagatgaggaagtgttgaatggtgaaactttctgcttttattgttgaccacagagtggtacctggagatatgtcgcgggggtcacgagaccttggggacgtcaggtggggtgctattgcccaaaaccaagcttgaccaatcccgacccaacccgggcatagtcggtcagtgagaacctgtgatgtacctaagcaggcgagctcctggcagtcaacagataaaaggaaaacaagaccacaaagttaggaggcttgtggtggctggccagctgtgaattttgtgtaatatgtggatggtggcctctggtaatcgattactaagggtgggtaatcgattacacgcttaaaaatga

SEQ ID NO: 181646 - DNA, 362 bp, Glycine max
  unsure (1)..(362): unsure at all n locations
aacctgggaggcngactggaggctttaccaaagcacgttccgtaaagcccaatctatctctgtttcactcctctttcacttccaccgatcaaaatccagaataacttcatcaaatggcagagccatcacagaagagagagggatcatcctccaccgctaccgttgatgcccatcgccgtcacggcccatccggagcacccacagcacctattcctccttntttgtcatctccaagatcatcaacattgttttcatccgatgatcaacgtctacggtacctttctcagtgttcttctagaataatcttagaccctaagtatctagacgtagagttctttaatgatgaaacgtttgatcgctat

SEQ ID NO: 181647 - DNA, 273 bp, Glycine max
gtgcctagaaattggtggatttgtttgggagaattaactaatttattatttttcgatttaatccttcttgcatgcttgaatttatttcattagaaatatctaaattccactatttatatttgaaatatttctgacgactgaagtgattaaagcactgactgtgttgttgacttcaaatcttttacgacaggaaaacatataaaatattaatcacaattgtggggtggcaggcctaatttaaattatatcataatataccactgattgaatatt

SEQ ID NO: 181648 - DNA, 462 bp, Glycine max
  unsure (1)..(462): unsure at all n locations
actaagctgagctatctttttttaaagccaagccagaaactcttttgttcagctcatcttgactcatttatatcccatgtacttatgtatagggatctcacatccgctaagtctcctatcgttgagattggtattttttggtaaggattttaactatagatgccatggaatgtataagatctaacatcttgatgatcccttcactttaaacaaaaacaaaattcttcaacacaaaatgttttctacaaaagaactatgtaagtatgattcaccattatccagagatatgtaggaataagaaccaacccttgttgattcaaaaagacaaattttanaaaaaaaaaaaggaatattattaaccctcgctagccttctgcctataaaaaaagaagaagaattgttcattaanaaatatatattattattcctaaagtactcaataaataaataaataaaatatat

SEQ ID NO: 181649 - DNA, 423 bp, Glycine max
  unsure (1)..(423): unsure at all n locations
tcagcctaaacctaggtttagntggtttatccctctaaatgctctttctgccttctntttaccaacctccttttaaaatatgtttatgaacactaagtttgaagttattaacatttgggggtttgtggcccatatgtcctgaatataaacatctttctagataataaatgttttgatggattgtgaatttataatgaaaaaacagaccaccaagtcttccatatattttttggtattaacatttatttttaaaaattgaccgtatctaaatctaatctaaattgtatgtaaatcaaaatatatttataaagtatattggtatgaattaggatctctntggccatagtctagtaccctcttgaccatggcctagtgtatgttcttgacaaaatttaaactcgagttttcgacctagctgaatac

SEQ ID NO: 181650 - DNA, 412 bp, Glycine max
  unsure (1)..(412): unsure at all n locations
catatgattgatattccctattgttgaaagggattattgnatatcatatgataaccaggcggatcatgctgaggatatccttaaccaaatcaatttttgttcacttgtcaagttaaacaaaggccactccaatttaatctattccaactttcaagtatttaatcctaaattctaacagcttggtttatagcttacacacttcacataaaccaatcaaaaaaggggcagtattattttttgatataaaaatggtaaattctttacaattgctttactcactttctctcgatccctgttcaccaataaatcctgcgccttttggttcacttacaaccttgtccaactgaaattaaagcccaaaaaaaaaatttaatcttctattagtaacataaagcatatatgagcattatta

SEQ ID NO: 181651 - DNA, 347 bp, Glycine max
aactaaaatttattgagttccgaaaggcacacacggtgacaataaatatccaaatgccgcctcaatcgctttcaaaattaaacacattgacattatcaattattatcaacaacacccgtaagttttatattcacaaaattaaaaatagaaaacctaaaattataaagtagccacttccgattacaatgaatcgaaaaatattttattgagagatagagagagagagagaaaccttgtggtggaggaaggcgtttgttgaaaacggaggcgaaaaatttgtgagcactggaagcgatgagccttcgtgcgggatcgaccaactttgataaccaaccgttgtttccgtt

SEQ ID NO: 181652 - DNA, 144 bp, Glycine max
gaataacaccataactaaacgcgccgcgagggatccctatcgcaccacatccaaatctagaacgatgggtgaccaagacgagacacaggaacatatgaaacccgacatgtttgctctgaaagaacaaatggcctccatgatgga

SEQ ID NO: 181653 - DNA, 414 bp, Glycine max
  unsure (1)..(414): unsure at all n locations
ggcanagnatttcactatttcttgaagcatgttcctcattaccatggcatgcatacataagaaatccaaatgtagattatcttacaaatcctgtgtgctgtcttatattaataaagaacaaccaatgggaagcaacagtcaacaaagtttgacaaagtttttctcaaaaagatccctcaaaagcatagcatgcaattgcagggagtcaacagtcaacaaagcaagaattaacaaaaaaaaaacatanagtactagaaaaattatcagcagacattagtagtgctagtatggaattcctgaataacaaattacttgtgcaggatgactttgtatggtatccatgatgtatttctcatgtccccattcaaggtggcgtcttgcaccaataatcaatgacantccttctgaaacacg

SEQ ID NO: 181654 - DNA, 344 bp, Glycine max
tcatggctcaatgatcaaggggaaatgatagtcaataatcaagttcttatatcattttctataggagactactgtgatgaagctttatgttatataatccctatggaagcagggcacattttgttgggtagaccatggcaatttgacaagaaagtaatccacaatggtctcaccaatgaaataaccctcacccatggaagcaaaaagttctaacttgttcccttgacaccttcacaagtggctatggatcaagtacaaataaaactcaaataggatgaggaaaagaatagaaaaaaaaaagaagaacaaactttaatggagaaggaggagtgctaggaggtaag

SEQ ID NO: 181655 - DNA, 438 bp, Glycine max
agcttcggaaagtattgtttatcaccttatcgctaagccaatctgctggcttagcaagcgtccgctaagcgcaacactcctaggctaagcgcaaggaagaatccagaagaagatgagctatacatgtttgctgagcgcaccgctccaggtcatcaagcgcaccgcttcagctcatccgctaaacaagagaagcgtgctaagccaaaatccactaacgtgcgctaggcgcatgagcacgaataatgccacctatttaagcctgaaatcagattttgtgaagggagtttggattgggattcagagcttttcatgtctagggtttctagagagagaaaggtccaagttctagagactcttgagagatattgctatgctaagatctgcagagaccagagcttcgagcaggagccggtttgagagcttgagatgagtttgtga

SEQ ID NO: 181656 - DNA, 92 bp, Glycine max
aaattttttaaatgtgatccacactttttcttaccttaaacctaccaccttttccttcttcccattacccaataatttggtcaacaaacatt

SEQ ID NO: 181657 - DNA, 445 bp, Glycine max
  unsure (1)..(445): unsure at all n locations
agcttccttgctacggtaaaagttgtctatcaaaaatatttgagtgcgcaatctgactttnttttttatattaccgttagggttttatttcactttttgtctcaaaatatatatatttttattttcaagaatagtttttcacgtgacgattttattgttttctacgatttacagggataccattaaagatgaaaatgagttgagttaaagcggttctatttaaacttagtctaacctattttatatttttacacttgagtctggtatttgttaagagtctatttttttgatatgggactaatcttttatgtaagtttggcatgacttataaggcatgtttcatattaacaatcgtaaaacattatcgtatagtaaaattattacgtgtttaaatattagcatgtgaaccaataacatacatgttatttcaactttatctattgtt

SEQ ID NO: 181658 - DNA, 408 bp, Glycine max
actaagctatcgacttatagataagcccccagtgtttccctgttctgatgttgtggaagcaacccaagtgtgtcaaaagtacttatatgagagccttactgctgagtgcattatcttggcatcaatgagtccaaaactccagaggaaacatcaagacatggacccatatgagaacggtgaacatcttcttaagatgtacaatggtcaaagtatgatggctacatttcacttatctaaggcatcctcacttgctgtaaatgaaaagggtggaccccatgtgcttaagatgattgatctcatataacaacttgagaagttggggcgcactcttggctaagagctgtctcaagatttgattctgcaatcactatattattcattgcacaatagattgtgaatttctacatg

SEQ ID NO: 181659 - DNA, 410 bp, Glycine max
  unsure (1)..(410): unsure at all n locations
tggagtcatttgttgggttttgtttagtggaatggagctttacaagagcgantcaagactataacaagcagttattatagaggaggggataccaaagataccagtagatcatcagagaaaaattcaattgaagaagagattgaaacttaaactgctgaagcacaaatgtaagtttattatgcatataatttcagtaccatttttgttatatgattttggttcttgggtatgacagattttctagcaaaaaatggggaagaagagaaagcagtgagacaactcatgacgaggcacaaccccaaaaggaacaactcatgatgaggcacagccggaaaatanatttctttgacttgctttaatttgcccttttttttctaaatcatgcacacatcttggtttgattcgtgcct

SEQ ID NO: 181660 - DNA, 339 bp, Glycine max
  unsure (1)..(339): unsure at all n locations
atgctttgtaaactatttgttagtaaaacatgaaagtatttgtttatatacactaaatagtttgttggaactataagaaaattgaattaaagcaatgcaaacatctatgaaactacggttcaaaaaatgttgattgcgcgttatacgtcaatggtttgttatgaattgatcattaaaatgcaataaacgcatagttctttaaagagaactatgttggtaacttaatcttaatgtaaccattatatctatgtagntgtaattaacctaaggtaacttcctgaattcctttcattgatcatcctaaccccactcccatatatgaatgttctttaacaaaaa

SEQ ID NO: 181661 - DNA, 291 bp, Glycine max
atggaccttaatgagtacataatgcattgggcctgtggcttatcgccttcagttgccggtggattcaaggatacaccctgttttccacatgtctctcctaaaaccacaccacggcccacctccacccaatgatgacccctttcctcctacgcagatagatcatcaccctctcgtcgaacccttctcctttcttgactagaaatatgacaccaccattgacccaccatcgtgcactgtattggtccaatggcgtgggctagcaccagaggacacttcctggtagaactggga

SEQ ID NO: 181662 - DNA, 294 bp, Glycine max
  unsure (1)..(294): unsure at all n locations
cattatgacattttcacttaagaagtgaaccaaccatagttataccaccaatttcagaagatacataccagctcccagatgactggattttatttatcaccctctgtccaccatanagatgcttgtttatcttcaatcaaccagacttgagagctcagcaaattctacaatagtttacaagcaaactatgtaagagtaaattcagcagttcacacataatgactgatcaacggttcagaagatacagccatgaatcctaatactttccaacactggttacgaagatggtaatag

SEQ ID NO: 181663 - DNA, 386 bp, Glycine max
  unsure (1)..(386): unsure at all n locations
atggctttttgaacattttttgttgtccaacaacctcttggctttgatgatcacactcttccagactatgttttcaacttaaaaagggtatgtatgttctgaacatgcaccccatgcttggtatgacagactaatttcttttattttagaaattttttttatgataggcaaagtagacataactctctctataaaggaagttggcaaagatttcgttataattgaaatatatgtagatgatattatttttggatctaataatgactctttgttcaaggatttctatgatatgacgaacaatggatttgaaatgatcatgataagagaacttaagttcttttcctggctttagatcaagcaagacaatatangtgtatacattcatc

SEQ ID NO: 181664 - DNA, 283 bp, Glycine max
atattgaggattggtgtgcatatctaaagatcagtgggagtacggttatttttctaattctgtaagtcggtgatatcttgattacaactaatgatcttggtcttcttcatgaggcaataacttcttctttatacactttgaaatgaaagatatgggtgagacaagctatgtgataaggatagaaatattttgaaataaatcataaggattgttacgcttgtcttacaaaacatatatcaataaacgtctatagagatttaggatggaaaagtgctcaacatca

SEQ ID NO: 181665 - DNA, 424 bp, Glycine max
  unsure (1)..(424): unsure at all n locations
gcaacagaatttagtaatgatccactaacctagaattaaaataacttaatgccatttactctaggaattaaaaaaaacttaatggctgagtgtaactgaaactgtggcaaccaaaaatcacccccaacagccaacaagtcaaccaccatttggtctcccaaaaggctgatgcctaattgccaattgggcccttattacaacttgaactaaacctaactaaagcccttttagttgattaacccaaaacatatttttggtcagccaactttacaagcattgggccattatttagacaaactaaacactctaaaattgagacaaagtggtgtcatttagtcctnctccatttgggccatgatacaactcacaaccttggactntttccttgaaacttgggcttgtattcaaatagtatggacagcac

SEQ ID NO: 181666 - DNA, 166 bp, Glycine max
cgcaattttgcggtgaggaaatgtagcgactcgctgaaacaccgatttctcgcaccacattttttaaaaccctggcataggcttacgaagaagtttttgtgggtgctaaaaaatgactggtagtttggggtaacaattgttcgcgaaaataccccttgcaaaaaat

SEQ ID NO: 181667 - DNA, 396 bp, Glycine max
agtaaaaaaggtattgtccgttgaatttgctgagagcttcaacattcaatttcgagcgtctcgatgtattacgggactcaatcagacatccgagtaaaaagttattgccctttgaattagctctgaggttcacaattcaattttgagcgtcttaatagattacgggactcaatcagacattcgagcaaaaagttattgtcgtttgaattagctcaaagcttccgaattcaatttcgatcatctcgatatattacgggactcaatcagatatctgagtaaaaaagttattgtccgttgaatttgctgagagcttcaacattcaatttcgagcgtctcgatgttttacgggactcaatcagacatcggagtaaaaagttattgtcgtttgattatctc

SEQ ID NO: 181668 - DNA, 402 bp, Glycine max
  unsure (1)..(402): unsure at all n locations
gctcgcatcgattggtaccgtcgggcttccgtttttcagaatattactcccaanangcgactatgtccctaatggaagcctcgccaccatagatcacagtaagttcctctacaccatcaatatcattcgtattaatctcttgaacactttatttaattggttttagtatgggtttcaaaatataattagagtcagagtttcatctgctaaacttaatacaaatctttattgtatgaattagtaagatgaaactctaattatcgttaggagaaatgctcatggtactctctctaaccaattatagaaaaagtcttttggggagagtgtcaagagactaccgtctcatataatcagatattaaaattagaatttcacttgacaacttatgttgaactgtgatac

SEQ ID NO: 181669 - DNA, 395 bp, Glycine max
  unsure (1)..(395): unsure at all n locations
taataagttaacctcaagatgctaatgttgctanggaactttctttctcccaatccaaattcaaacaaaagcttatggagaagaggaggaaaagaaggaggtagaagatatcagtcatattatattcttagtattggtaaaataatgtttgagcagttgagtttgtactaacagaattagtacttgacctagtatatagtatgaataaaggtattaggttagacgttagagtattctattacatcctatcaaatatcaataatatgctcaatgctattactgtttgctaaacctataactcttaacaggaggcatcgtcatataccaaaagtcccagcagttcatatccatcatntgtagtcttaaaaattgaaaaatttggaatgacgtacctg

SEQ ID NO: 181670 - DNA, 401 bp, Glycine max
tgaagactgcatccttgttcagcaagttgctcaatggtctgtcaattttggagaagtctttgatgaacctctaatagagacctgcatgtccaaaaaaactcatgataccctctgcatttactggtggtggtaacttctcgataacatcaaattttgctttgtccacctcaatacctcaggctgaaattttgtggcccaatattatcccttcttgaaccataaagcgacacttctcccaattcaacaccggattcgcttcaacacatcttcacagcacaagctctagattattcaagcagtagtcaaaggagggcctgaagactgagaaatcgtccatgaagacctctatgcacttctctaccatgtcaacaaagatggctagcatgcacctctggaaagtg

SEQ ID NO: 181671 - DNA, 346 bp, Glycine max
gaagtagaggaaacactgcgatcctatatcccaccgcggccgacaaaagtgggcctcaacctgaaccgctcttattgttcatgcggaacgattctgcgctcactatccatgttcacatattatcgcagtttcgggttcctgagcctgaactactaccaataatatagatgttgttcatacaaatgacaacatcttacaagcttactccgcccattggtgggctcttgggaatgaaccaactattcctccttctaatgacgcatggacacttatccctgacccattacaattcctgcgaaggtcggccaaatcaacaatgataaggaatgagatgattgggtccaac

SEQ ID NO: 181672 - DNA, 425 bp, Glycine max
  unsure (1)..(425): unsure at all n locations
ntaaaatttgaattaaaatgttcagtaactgctggtaatttattaccatatatgtgtaatccattacacagtgcaaattttgaattcaaattttaatagctgttgtaaatcatntttggccactggtaatcgattacattctctggtaatcgattaccagagagtaaatctcttgaaaaaaaacttntttaatttaaatttcttggccaaaccttntgctacttcaattggaattcccttcctatttaatatacccttcctaagactctagagactgtcttgatcatccatcttgaatatctttaatttctttgtcttgaataaagctttgagaagcatgtgatccatgtgatcctttggcatcatcaaaacattcagcttgatcctttgtctacacatctntatctagatagcaagcagtgctc

SEQ ID NO: 181673 - DNA, 371 bp, Glycine max
ataccacttgttagacaagtggcctcagatatcttaagaacgggggggttgaattaacatattccaaactgtttcccctaattaaaaatctatttcactttttactcaagttatgaattcccttaatgacaatcttcttaaatattaattcaaaccacgcaacttgaatatgaatataaagcacaaataaataaaggagattaagggaagagaaaatgcaaactcatttttatactggttcggccacacccttgtgcctacgtccagtccccaagcaacccgcttgagaagttcactaacttgtaaattcttttacaagttctaaacacacaaggacaatcccttctttgtgtttagagatcctttacaac

SEQ ID NO: 181674 - DNA, 426 bp, Glycine max
  unsure (1)..(426): unsure at all n locations
tagagcctttcatgtctatgctgcagagtctaaaccagtgccaactcctgattatgcagagcttgcaagatgtggtcttgcaacgaccagttatgagcatggaggagtttctgcagaaggttgcctatccaggaatccagccttcttctttgggagggggtgaggcctctgcaacccatgagcctcagccggaccaagagggatgatgagaatcctgaaattggccaaatacaggctaaaagcccaagtggagaagggcgaaggcccaagtggagaaagataaagcccccgagtggagaaggatgaaggcccaagtggagaaggatgaangcccacaggcagagacactatcaagactattaattgttgctgaaggcccagattaatttgaaggcccaagttaaataaagtttaagttataattta

SEQ ID NO: 181675 - DNA, 440 bp, Glycine max
agcttcatgcttaagtatgtatggcaaaacttcattactattgttcaagacatacaagtgagcttgtaataaatcttctagacttggagtgatcacatgcagtcctcttgaacccttaccacccactctgtcatcatgccgagactcaggaaggccaataggtttagccttctcaatgtattctgaacaaaatttaatggcttcttctgcaatgtacctctcaataatagatgcttctggacgataaagattctttatatacccttttaagatcttcatgtatcgctcaaccgggtacatccacctcaaataaacaggaccataacatttgatttctctgaccagatgcacaatcaagtgaatcatgatgtcaaagaaagcaaggcgaaaatacatctccaactggcacagtataattgcggccttattttgcagcacaa

SEQ ID NO: 181676 - DNA, 325 bp, Glycine max
tataagatatgtatcaaatcatataacagcctgggaccaacccaagcctttctagcaagattcgtttaataagaccaagaacttcacatatggaaactactaatgccggaacagattaggatttttattaactcaaaattaccaaataggcctcaagcttctaatctacaggtacataaagttgtcggaactacatacacttggcagggttaatagatggataagaattttttacctacaaatcttctttaatatttgataagaccattaatcatggtgcagtcaaagactaagtaccttgcaacatagcactctggttcaaaac

SEQ ID NO: 181677 - DNA, 400 bp, Glycine max
ttgtgagttcattccattcattctcttccttggttgcttgtttgtacatgttgatgattgttatgtgttgttgctccccaaatgtcatttttacagcaattaagcattttgcttttcactaattcaacattttgtggtagcaatgctttccaagtttattttgatgatgccaaaaactcaagtcaagaatcaagagtcaagcaagtatcaagaatcaaagagtcgttcaattaaaattcaagattaaagagaagactgaagatatacaagaacttcaagacaaacatcaagataagtataaaaatattttctcaaaagataagattgaatagcacaatttgttcaagagaatctttcaaagaaaaatcttttaccaagagtgttagtctttggtaatcga

SEQ ID NO: 181678 - DNA, 436 bp, Glycine max
atcttatgctcctaattcgaaccaagactaactataaaattatgaagaggctcgctctcttattgtcaaatatatgcaagagctattccagtaaggtgatgtggtctactcgttgcatattgcactctgaatcacttgatgagtgtcacaaaagaatctatcgagtttttccatatgagagtataccaatggagcgttgccactttcaacgtggtaggaaacactcggcacatcaaagcatcctcattggtgaacaaattcatctgtgttacgagtgcatatacatgctcacccgggtttgagagtctgtcataacagtttgtgttcaccgtcttccacccggatagcaattatacttccatgattccatcttatagccatctgcatccactaattgtggtcaaaggagaagttttctcttcccccacaatggacg

SEQ ID NO: 181679 - DNA, 434 bp, Glycine max
  unsure (1)..(434): unsure at all n locations
ntggtggatattggttgttcttttacttccatatgcaatattgttgtaccccaacataattgttttagaagtaatataataactaaaaccagaacgatgtctagagacataataactaatgatacataaaccataaattttactatccaattatctacaaagtgtgatatttttggcaataaaatctttataaatagagtagatgttgtagacttgcaaccaaccaaagaaaaaatgattttaagacttgattttatcatatacgataacatatcagttagtattaccaaagattacttattaatttctacaaattcacaaatgtcactgataatagacgaactcacatcaaagttacgaacaaagcatggtgatacccccactaatgttagtgatcaatgtccttgtgacacacctggaagctataaaataaa

SEQ ID NO: 181680 - DNA, 356 bp, Glycine max
agctttataagtatgatttcgcttgctcttgcaccacagctagttggtatttgtatggtttgatacacatcacaactccaatttttgtacaaaattttggcataaattacgaaggacacttgtgttgtgtttcccaaggcagctaatccaaatcaggttagtcttaacatatgtttgtcacaataacttatcaccaatggtaagtagcatgatcaagtcaatggccatgatttattatgttaagtgcactgttgaaatggatttagctaggagagacctttaactcaatgggatgatgtctcattattaaccaaacaccatgccaattagcttcatttgaatttgttgatataata

SEQ ID NO: 181681 - DNA, 395 bp, Glycine max
accaatgattttatcaacgaagctggtccttagtggtgaattcttcttcagcttatcgattctccatggatcatggtgtcggtctgttcatcttcttcatctatccatattttatgtcttcctgtccctgaggtcttggaagggcaacaatggcggatcttgaatattcaatctggaatgaaccgaaccaagcgtccatggcttggatcgcctcacatagtaatcagaactttgaatccggagaacagattgaaattatatccatccagtacgcgtaggccaagctctatattttgacggtcccatataaatgaaagatgaacctgatttgatcatgcttcttgtgtgctctaatgtggtttaaataatcttgacatgcctcgatatcctatctt

SEQ ID NO: 181682 - DNA, 454 bp, Glycine max
  unsure (1)..(454): unsure at all n locations
tctgaaatatatgactntgatatagtgtcttatgcattatttatagtagtttatatcaanncattcgaaccaaccactcttcatgaagcaatttcttgttctaaagccaaagagtggacaatgactatgaatggaaatacgaaatccattcagaagaaccaaacttaagattaagttgagttacctgaaggtagatgtgtaacaccctagagaatattaccttttgtctccttatattactaaattataaaacttagtatataagtacatcagagtttaattaagtggaaattaaaacatagacttatacgaagctcttgccacttatgagccttacaaaacataataaagatacataagccaaaattgaaatcctatacattcggaaccacaaactatactagtcttccttcnagcaaacaactccaagatccaagctataaaacatgaaatc

SEQ ID NO: 181683 - DNA, 329 bp, Glycine max
  unsure (1)..(329): unsure at all n locations
acaaccgccgaaagaatatatggtcatctccaaacttcaccgtacaaacaacccaacaaccttgctgtaaactcacacaactggttcaggcatgtaatcaattaaacataacgactaaattcaaaataaatacaacgtcaataattcattataagaaacaaaatacagacatctaattaaaaatgttcaaatagtacatgaacttgcagaataatttaaccttttttccaacgatgtaagcgtatcggtgcacacaagataacaatatgatatgatataaagggatataaagttccatataaaacatataanttacaccgtgtattatc

SEQ ID NO: 181684 - DNA, 414 bp, Glycine max
tgtaagccttggatcttgttcatcaatgggagcctttgcttcttgaagattaatggttgcggaatggagatgggagaatactgattggaaatgccacttctaggagaagatgagtcaagaagaagctcaccaccataggaagccatggataagagcttgaagggtggagaaaataagaggagggagagggagagaaggaacacaaaattttgtgcctcaaaacaggtctgaactttgaagtgtaattctcaaatgatcaaagttgaaaaatgcacacacatgacctctatttatagcctaagtgtcacacaaaattggagggaaaattgaatttctattcaaatttcacttgaatttgaaattgaatttgtggagccaaaatttcattaattatgaatagtgaatttcagttat

SEQ ID NO: 181685 - DNA, 459 bp, Glycine max
  unsure (1)..(459): unsure at all n locations
ctattacggaccttagaatctaagctttactgaggcatgttgaaatctataaattcttatatatgcatgattccttctctcaagtatttctttttttttagaacacttaacctgaaagtctaagcaattaagatttaacatatcaacaatgggcttgaaatattgtagagtatactatttcttggagaaatttcagttataagagcaagggtaacatggatcaaacattttaatccatggctgactagtttttgattttataaaaacaaagtagttgatgttgaagtttataatattaagaaagaaaattttcaatggaagttactttgccttcaggagggaattgatcaatgtgagattatataaccattaagttacattgtcagcctttggttagcttagcctctgcatgctcgatcactttttcgttgctaanttgctgctttttctctgatatat

SEQ ID NO: 181686 - DNA, 454 bp, Glycine max
  unsure (1)..(454): unsure at all n locations
ggaaccagaaactaagctagggatgttgatagaaagccaattaagctgtggtgttatccttttcaggctcctttgattcccaggttactcccaacatccaaagcccatcccatgcagaaatctgcaacacttaagctgattttgttgtcaccattcaaatgaacatcctctatgagcttctcaagcatagttggcatggtgttttgcatagcatcacataacttgcctgcatccgtttggtcatcatcaggttctaaaccatcggggatagaaaccaactttagaagggattcgtcaagactatgttgttgctcgcccatggaagctaccactcgcttgtgtcaaagtccgtgttcacaaaaatgactttgcaaccatgctcaaccaacttttgtgagagggtcatcaatggattgacatgcncttgagctggatatgggtaaactagcacagt

SEQ ID NO: 181687 - DNA, 237 bp, Glycine max
aatactcgtgtagttcaacggatctaacaagcacactgattacaactcttctcacctaaccactacccgtgcgatctctatctaaaagccactcttacatatgagaaatcccgctcactccctctcaaacactcttccgtgtttacgaattagatcaagacacaccagagatcaactctgaacaaaagagatcaactccacacactagagatctactctacacacaagagatcaact

SEQ ID NO: 181688 - DNA, 444 bp, Glycine max
  unsure (1)..(444): unsure at all n locations
ntattaggacgactagagtgaagngtgttacttacaatttaactctgnngnatcaaggagtcctgtggccttaaaatcatacatgcaccgcccagcaagttcagacttgaggaaaaacgttagtgacactgaacacaatacaaataaaagaagtaggaaaagagagtatcgagatgatctaatttttagcactcaattagcaaaaggaggatggactgaaaaaaaaaggtccagaaaaaggaggcattaaatgttcagcctaacctggaggtgattaagtaacacttatttcccctggaaacaaccgtgcatacagattgtggaattgcagttgtaatctgcattaatggaaaaaaaacatttgccattaatattcgataaaactccaacctagaanaaagtatgcagcgatccctcaagacctagattcttggtctgaatctg

SEQ ID NO: 181689 - DNA, 231 bp, Glycine max
tatcgaggtttgacaagtatgcctacatccttgggagcagagtgacagtctctcatttcttattcataaacacatagggttacatcacattatataatatcacgcgtaccgtgagctttacctgaaccctcaacctgcttcgtaaccaaacaacacgtgactttttcgctcagctccaacattttgcccacccataaaatatgaatcatgcacaaccaatcttcacttggc

SEQ ID NO: 181690 - DNA, 442 bp, Glycine max
  unsure (1)..(442): unsure at all n locations
ntttctgaaggactcaaactcttgaaatgctgtataccttttttgtgaaaatgttggttccatgaatgcaagcgtcagttcaagtagtggagtatgaatcacaacaaagagagaaaaggttagcctgtctgaaagaaatcatgatgcggtaagccaacaactttgttttgtcctggtgagttgtgtgaaacttatttgtcttgtttttaatttcctgattttgcatcattcttatactgttagattaattacatgaggtggaaatgatcaaggccttgtttcttcttattttcagccacttagccaaaaagacaacctttgatgataatttatcccttgtaccttatttgagccaaaaatgatgatcatantttttttgtaanacccttaaacctactctaattatctcctaccttgtttgggggttaagagagcataagaa

SEQ ID NO: 181691 - DNA, 357 bp, Glycine max
  unsure (1)..(357): unsure at all n locations
ctctgcaagagtacttaagccatcgatccatctatcnaatgatataactgacaacctccatcctagactggatttctcattatttgattgttctatctacctctaataactaaaaagattccttgtttttctaatgagaggaaaccttgacaactgaacattcttcattcttgcttcaaaacttatcgactttcatcacgagggagagaggtctcttcaactcttgaaccttatgcttgctgtgaaacatccttgagcatgttttgaaaatatagcgcttgttgtcatgatgagactgtgcgctgaggcattttccttgatgtttttatgccgacaatgagttcttaggtgataaaa

SEQ ID NO: 181692 - DNA, 127 bp, Glycine max
agttgatcaggattggaggcccatctgttccaatcaagtgctcatcaaatgggtctgtatggccgcttttccatgttataaaatctctaactaccggattaggtggtctacaagaatttaccaggaa

SEQ ID NO: 181693 - DNA, 377 bp, Glycine max
  unsure (1)..(377): unsure at all n locations
catatttggcttctgcacccaccaatataattggacgcccaagccatttgggataattccaacattggcctttgaaaatttgatacatattatgaatctgtaaagtcctaacgaatttgtaattcgtatgggtcgatagcgaatttttgtttgttgctacttatttgagtgtgtataaaaataatttgtgcaaaggtatttaaaaataagttggaccaatgcttgacataaatatgacaccttgacattgttagaagaatacttgaattaattaaaaagcattttgatggtatcgcataatatggacgaaatgattattaacgcctattangtctgttagtaactatttgttgtacaacaagaaaatgtgggttttt

SEQ ID NO: 181694 - DNA, 334 bp, Glycine max
gccaaaaattccattgcatggtagaggaaccaacaaaatgcatgaattaatttgggcatatcgaagacatcacaccccacagatcaaacaaaagaaatatggtggaggggtagggatcaaaaaccatttattaagcttctgaaactttgccataaaaaagttctttacaccgagaaactgaaaaaatctgcgaaaataaagttgagtatttccattctgattttcacaattctcttggtcttattattcatgatttaagcctctccaacacgcttgtaattaactgaatggtacaaaatactacccttctacagcaatattaactgattgacta

SEQ ID NO: 181695 - DNA, 452 bp, Glycine max
  unsure (1)..(452): unsure at all n locations
attctcttgtggagctcaggatcagaagggggagtatatccggggttgatcattatgcanaatcataaaatggtgatggaacaagcggatgaggataatgtgaagggaacgtgggccgtccttggtgctgctgctgctgaagaagaagatgaagcgggggaggggcatgagggtgtaattgtggaagtggctgttgctgttgctgttgctgctgctgtanggcaggatgataatggaactgttgcataggggggggtgcacgaccacgaccaggaccaggacctgatggtataaaaggaggaccgtgccttgatgaaagaaattgctgatgctggggatgaaatcccaactgctgctgttgtgcatattancagcttgtcgctgttgctgagcatatgccatagcagatgcagctgcataatcatgaccctgacgtttcataacctcagcag

SEQ ID NO: 181696 - DNA, 410 bp, Glycine max
aaagaatatttacacacattatattatttcttacgttcaaaccttcctttgttgcacccggaggattctataataaggagtggtttgataagcttcttcaggttacaggtccaggcattgtcaatgtgctgactcatcacgtgtataatttgggcccaggtttgcctgtcacttacctaattctttctactatagtcaatcttagagaatattttacattctaacataactagataatgaatgtgaaagaaagcagtcatatggaaagtgttgtattctaatccttcttgggttactcttctaatttattttaagtagctttgcctggtctctatgtaattcgtgattatctttctaattttctaacttttccacagttgagaaactactgccaactgtatatatgcgtt

SEQ ID NO: 181697 - DNA, 459 bp, Glycine max
  unsure (1)..(459): unsure at all n locations
ctcaagcttctttggcaacgtggtgttccctcatcccgaaccttctttttctggcgattgattcatggcaggctacttactggtgagaagctatagaagcagggcatttatgatgtttctatgggtcctcattgtggattccaagctaaaacttctgagaatttgtttctttcttgtcccttttgttgaaatttgtaggtgagaaggtcagacatattcatatttggtaattntctattttagggtttgttcctttgacatatttacctaattgatgatatatttgaaataaatggaatatactacaagcgggttgaatattgtgtataactaaacttgaaaactttttctcnagattagaaaactaggtttgctctatattgtccaactttgaaaatgacatttcacacaagcctgaatttaacatatatcgtccaacaacttaaaataattttcaac

SEQ ID NO: 181698 - DNA, 402 bp, Glycine max
  unsure (1)..(402): unsure at all n locations
tctcaacaaaaagcataccgtgttgcagncctgaaaggtttttcttatgcctctcatgcttgctgngtagagaatcactgcttggcttccacctggtggatgtatctcttcaaaatctgttagagatgggtactcttcgatgccttgaattttttgatgcatgcttttactaggactagtagccactaagtttttctccttggaccctttggtgggtgtggctttaaattgcatttcttttaactcataatgtttatcatcttcacttcctttggggccaatctctagttcagccatgttgtggggcttgtgatcttgatcatcatanaatggtggattgagctgaaagactangccttgtttcaaggtggtaatggttggaatgagtttcaattttctatg

SEQ ID NO: 181699 - DNA, 457 bp, Glycine max
  unsure (1)..(457): unsure at all n locations
gacctataaaactcagctntaggttctcttttggctaacacgacactcttcttcttatgnnnnnnncacnaanaaccattacgagctgagaatctatgccgagggtgtctgcgcgttaagcgcaagtgattgagcactacgcgcaccttcacatgacttcagattcttcagactgcttctttgcgctaagcaaacctggtgcgctaagcgcgaatcctcatgtttcaacttctcttcctatccctttcctgcatttctataaaataaaaaccaccaaaatagaatgaattaacagttcaaggtacctactgcacaaaaactcaaaggatgtcagaattctaatgattcacacaaaaagaagcaataaaatgacagaacattgttaattcttatatgttntaattacataatctacttatgcatatcagttattattgagaaaaataaaatatacttc

SEQ ID NO: 181700 - DNA, 318 bp, Glycine max
ctgctacactacaacatatcacggtccgtttcaaaagcctgaaaaactcatccagttcttccagaatcaaaatatacggaaaccgcgtgacccggaaatatataacgaagtttcctggcgtatatcacccagccgaactacattgaactgagtagcaatgacttgtatggccacattctcccaaaactgggctaacgtgcactgggctcacaagccttatgacatccaccaacaatttatctggtggtatacccccacaactcgcgcggcacccaaatacaagtactagtcctgtctctaagtatctaacacgaaaat

SEQ ID NO: 181701 - DNA, 433 bp, Glycine max
  unsure (1)..(433): unsure at all n locations
tgagaaagnccttctgatttggttatatatttctgacttcatgacatgagatgaaangcaaagattggacctcctgttagttgttatcaataagttgcttaaacacttgtgcttaagtgagacagtaaccatgagactgtggtttgagctactttccttgaatttgtcttatgattaacctcatctaattgtattgttcacattttggtctcctctttgtctagctgcatattctgtgaaaacaagggataggtacacattgcttcatctttctcatcatgcaatcaatgaattttgatgcatacacccctgtcgcaacctacccttcngcgggagggcgacgcgagactcgcgggatgcgggttccacgaaaggaatacgcgcggagtcgccaccaacgtttatttgatgaaaacgtcgngaaaacccggaa

SEQ ID NO: 181702 - DNA, 323 bp, Glycine max
  unsure (1)..(323): unsure at all n locations
cacctcngcaccctctgggactattgggtcatatccggcctcaaccgctcgacgtgaagcccttcctaattaaattctggctcacaggagtcatgtctccagggctcaccatggcgcatctatatacttctctcatattctgatccttataaaatttgagaaaactgctcccaactgatgggacggcaccggcacatttttttaatcgtcccgactcatacggcttctccactgattgctaacctgaaattttctgaggtgggtctgaacatgaatgttctaaatactttaagtctccactctgagacttgacaagaatcaac

SEQ ID NO: 181703 - DNA, 353 bp, Glycine max
  unsure (1)..(353): unsure at all n locations
actacattattacaataaattcataatatcatatctntattctcaataataataataatttttcacaagaataaatggattcaagtaaatacaaatctaatttttttttggtcttgggttagagacacgagtgccccttaacccaccggatcaaagataaattatgtaacaccccacaattttgataacttaaaattaatgtttaatgtgattattatgttatttgattatttgattgatttgaatgagttgaggtgttttgtagattatctatgcatgatttcttgtatggatgttgagttatgtggagtcttattgacctangttgaaattatgagatttcaagtcttatg

SEQ ID NO: 181704 - DNA, 441 bp, Glycine max
  unsure (1)..(441): unsure at all n locations
gctgnnagtgtgaatagcccccaatttatcttccctacactttcttgcccaaccnccttttgcatctccatgagctactggttgagattttcttatttcctttttaattcagcaaccattccttgacctataacccaagggttctgattatgagataatggatgctctttgagtttaggatggcgcgcccaagcagtgacaatggctcttcgtattgcagccctcatgataccgatgttagttaaaaatgaagcgagtgcaaataggagggagccatcaataacgtgcttataaaactcatcatatccctcttacctcaagaagcacatctaccaatcgtngaatctgtaaatctttgctggactcaagatttgcaccatgtgcatatgattggatgtgtcttccttggcatactctgatgtggatgcaatacctgaagtt

SEQ ID NO: 181705 - DNA, 441 bp, Glycine max
  unsure (1)..(441): unsure at all n locations
ntataagcgcgggtctgggatacgaaggtctattggtcttcttatacgaagataatgttccaagtacattggatttggtacgaccttgccctcttgatttccagctggggaattggcgagtggaggaacgccccgacatttacgcagcgagcataatgtaaacctttacggttttaaaagctgtatagttgggcctaggctttagagtttttcttttggttaaggctntgtgtattttgttttttaaatttataatacaaggatctttcttcatttgttcctacgtctctacctattctcatccatttgcatgcttacttcttttctgaaacggcagatccgatgacgagtcccccgaaggtactaatacctgggacccacctatcaacttcgagcaagaaacgagtcaaacggaggatgaagggaacgaggatgtgggac

SEQ ID NO: 181706 - DNA, 437 bp, Glycine max
  unsure (1)..(437): unsure at all n locations
nggttntcaaatgattatataaagccttatattatgnttaccagcacaaaaataagtattnttgcactcataatcgattaccaagtattggaactgattatcagagacaaattgcataaaggctttttctaaaagggtttcgaaatttggattttaaatgttgtaatcgattagcacttgtctgtaatcgattaccagtaatgaaacttcagcagttaactttgaaaagtcatgacccttcaaaacataactgtgtaattgattaccaagaagctgtaatcgattaccagttagagaatttttgaaaaatattctgaaaagtcacatctcttcaaaagttttttaaaagccaccaagggcctataaatatgtgacctgtctatgaaaatctatagagttttccatcagaatctaagtgacatattctctcaaaaaca

SEQ ID NO: 181707 - DNA, 406 bp, Glycine max
ctttataaatgacagacgcgcgaattatcatccttccgcctttcttaataaataaatttgctttggtataacacattcccataaaaagattatcccttccaatgcttcaggtcatgaaacacttgaatatatatatatatatatatatatatatattaaaaatcatgttagataacctctcaagtactaaaagattttttttattattaaaaatagcctctaaacttttggttgtcattaagattatagactctcagtgatgtttcacattattcctatttctataagttctaatcttatccctccaaaaatatattccgggaatcaaactcagttaataatattattagttttgaacgatactcccgagagaataataatagagggatgattgtttgagttcatt

SEQ ID NO: 181708 - DNA, 439 bp, Glycine max
  unsure (1)..(439): unsure at all n locations
nggtggatgaattagtactatggggatgagaagaagaattttgtgccgagccaacgggaatttgcaattggagatgtgagcaagtgattgacgcgaattgttggaattcttgtaaggctgcgttgggaatttggtttcattttgggagagggcgaaagttgaggattgcagcctcttattgttggagatgcggagagaggaaggaggaagaagaagaagaaaagaagaacggagtagtgaatgtgggcgtggcaaggtatgtgggtgtgagtgagagtgcatttctacttccttcgctctgctgctgccttggnataagcccgcgccaccattcaccttatgatcttttccaaccactgatcgatcagtttctacagcatttgttgggcccaaactttacttcatctaacccttatagtttatttgggcttccgctttt

SEQ ID NO: 181709 - DNA, 208 bp, Glycine max
  unsure (1)..(208): unsure at all n locations
gggacagngagtttctattatctgtcaactttctcccgcttttcaatcaaaatgcggtttaatgatgacccacgtcatggaaacaaattattgttctcacataaattttgtatccattcgcttaatcaacaacattatcccttaagagcttataatggtgggcatcaaaaaccaatcttcttataaaagagaatgcccccattattcc

SEQ ID NO: 181710 - DNA, 395 bp, Glycine max
ctccaatcagagtggataacaacatccaccaaggagcatcagcttgaacttgacaagtatctgcatcatcaaaacaatgaagtaaatcaaaacccaactccaaaaggcatatagttgtaggaattacaattaaactcgcatacacaagctagaccagactgacaaatattatcaagagctagcaatatactctcactcacgtgtgtgtgatgagttgagacaaaaagaaaatggtcccatttgacagcataatcaagagctacatacccttaattatacatcagagggacaaaaagagtaagaggaggggaataattatctgcttcttttgcttgacacaaaatgacttttttctatgggagcttcaagtgagtctccctagttgttgcttcttt

SEQ ID NO: 181711 - DNA, 464 bp, Glycine max
  unsure (1)..(464): unsure at all n locations
ctaagcttccttatcacagattgaccattctaatataagngggattangtttttttagataannatgnatggatggaaatatcttgtagtaaaattaacttaatttaatttcttgcttatttattctgaaggtattttagatagagtagtaatatttagacacctcaattttaaaattcttattgacactcgtaatttattttctcacccttcttggtaaatcaattttctattacatttatcacttttctctattatatatattttctttctatcagcgtatattagcatatggatgtagaagaaacattttcctttacaataacaagttggttagaattttttttagtctgggtactgtgacagcctctaccccataaatatatgtactactaataaaagagataagaaatcaaacttaattaaaaaaaatttataacacatttaaatacaagtctttcaag

SEQ ID NO: 181712 - DNA, 146 bp, Glycine max
ccggagacgacaggaaaacagacggccaaaaacccccgcaaccacggaaacggaggcaggccgaaaaacaccgaaagcgagcggaacggcgcaaaccgagacaaaacgaacccggggcacaccgacaagaccagacgccccaggca

SEQ ID NO: 181713 - DNA, 354 bp, Glycine max
ggaaaacgagtgcttttcatcgcgcccatcacacacgaccgggccaaaaagaaagagccaaggaccaaccgcctgaaaacaaccggaggctcgcttccccccccgccaaaagaacaaaggacgaaccgcccgaaaacccgcgagggggccctgaccccagccaaaaaagtcaaaacaacacaacccgagaaggccggggaagacggccctacccaaacacaaaagtatacaaaggacaaaccgccagagaataccccggcatccccagccacaaagtatcaaaggcgcaaccgcccgagaaacacggcttaacacattggaggggacacccccgtgaaacaagaagagggacac

SEQ ID NO: 181714 - DNA, 394 bp, Glycine max
  unsure (1)..(394): unsure at all n locations
ctagaantctaacctngngccaggacctacgggctgggggacagtctcatgtaaacagtttctatggggcgtaggcttgtcatatggatgatgtatgatggtcatcatatgtgtgtgtgtgtgagtgtgtgtgtgtgtgcgtgtgtgtctacgtatttaagtattttgcgcatttgttggtgaatgatatcgcaaaaaattcaatcttgttttcataatcaaattaatggagttttcatttcaaatgtaaattatgcgctttagagtagtgatatcgtaccgacgagacgatgtcgtacatcaaccacctcaagcaaatggaatcaccacattatatggaagctcaaagtaaattctttatgtccttttattttcacccttttttattaccaac

SEQ ID NO: 181715 - DNA, 464 bp, Glycine max
tctaaactttatacaagagtgaagctctgataccacctgttgtcatttggcctcaaatatcataagaaggggggggtgaattaagatattacaaattatttcccccaattacaaattctactttgattccaatacaagtgccaagttcccttaaagatggatttctaaacaatgattcaaattacacaatctgaatataaatgtaaagcaataataaataaaagagtttaagggaagagaaagtgcaaactcagatttatactggttcggccacacccttgtgcctacgtccagtccacaagcaacctgcttgagagttccactatcttgtaaaatccctttacaagttctgaaccacacaaggacaacccttcattgtgttctgatttcttacaacaagagaccctcggtttcttaatcccttcttgagaattagagtgaagagaagaagacatctctcttga

SEQ ID NO: 181716 - DNA, 433 bp, Glycine max
  unsure (1)..(433): unsure at all n locations
agctntctataaatcatagatgacgtctttgttttttttcatactttccaagattntctttattgttaagaaaaaagcattcacatccaaagacatgaaagtaagagatgttcggctctccccttccacaacttatatggaatcttggtcaaaatgcttttgattgatgctttgttcacaatgtagcaagaagtatttatagcttatgtccaaaaatattttccaatgctaatcattcagaagtgttctgcccatttcttgtaaggtttgttttttttctttctactacaatgttttgttgaggagtactaggatacgagaagttgtgtgagatagcttgtttatcaaagaaagttctgaaatttaatttttgaactctcctcctgggtaactcctaacaaaaatgatgttagaacatttctcattttgtacc

SEQ ID NO: 181717 - DNA, 465 bp, Glycine max
ggcatttggaattgtgaaagccccactccatcattagttttatttcttgacatctcaaacaaacaaatcaaacataacaagacaattcttgttgctatttgaatacctcacccactcaagtgtatcacacaattatgacttttctctaatgaaaacactcttgccttttaccactctaattccccttgagttcttaggcaattcaagagattatggccacaataaagaacaattcaccaatatgtgtaaggtaaggctagagagacaaggaaaaggttaaccaagaaaaaggctaacaatgtttttaggcacgattcatggaaataaaattcagaatttaggaattcaagtaacaatccttcatacaaccaatatattaccttaaagagattttttttttaaaaaaaaaaaagttcttcaagcatgaaccattcagcccagttgtttttattttttttgcttata

SEQ ID NO: 181718 - DNA, 337 bp, Glycine max
aaatagggcaaggacgcacctacaagttctgccctgcaaaacaagacctcatgcccatggacccaatgaagtaggattaaaaatatagccactggcgcgcggatggatttctaccgagctggatccaaagacggagaaactacgcgatctttcaagacatacattagactacccaacaggcggtgcataaacgataaccatggacaacacatctccaaggaactcgaggctggtatctccatacgcatgcaaccatatcagacatgaggatggagcccaatggacactacggaaactattaaggagaaaaacaaagagcgtcaccgagggagaaacc

SEQ ID NO: 181719 - DNA, 392 bp, Glycine max
tacatgatgccgaagagggccaagaagaatctaacacggctgcttcaactgataagccttcgctgcaagaataattcaagattgctttaacaaacaaagccttgcttcaagattcactatagaccaacccttgccttataacaatgttttcaagacatgcaagactctggtaatcgattaccaggaagtgtcattgattaccagaagacaggcgggagaaacacctatcgaaaagggttttgaatgtgaatcctaaacatgtaatcgattaccatatgttggttatctattaccagcaacggaactttggacattcagattcgaaagtcataacccttcaattataactgggtaatcgattacaccaacattgtcatcgactaccagtggag

SEQ ID NO: 181720 - DNA, 380 bp, Glycine max
gcactcctacaacctgtaatagagaaaaaacccccccaatcagagtaaggaaaagaaaaacgaaaatcaaatatataatcaccagacaaaaacatgtttgactaaggagagaagattaaattataaaatatcacagatttccttaatagtgctttgatggaaggactaaaaaatatattgataaactttaagggactaaaaaatatattttttaatttgaaaaattaaaaaaatatctcatatttaaaggattaaaaatatatttaagttaattttaaataataataaacatatattaatgtaataattgatgtgaattttgttgatatttcatataatttgatctctctcctcttaagaaatactacattagtgatatt

SEQ ID NO: 181721 - DNA, 457 bp, Glycine max
  unsure (1)..(457): unsure at all n locations
acctatgaaactaagcttggttgtttcaaaaaatatgaagaactgttgagttgttttgtnggcatgcgcttctaagacttgcatgatcagtactttaatatagagaaacttctttgcataatgttcaaaatgtttgcagaatttagagtaacttgctaatttagttctacctatcacatgcaatgttaatattgctgccactcgatcggtttgtggttttctgatttgcagtgagaatagaaactaaacatttgattggaatttatttgggactcatttgtgggtgaaaaagaaattaaatgatgctagcttccttgttttctgattttgagtgaggaatagaaactaaaccaaggtctatctgattggcattaatttgtgactcatttgtgggtgaaaagggaatgatgctaagttccttgttgtctgtttttgagtgaggaataaaaactaaact

SEQ ID NO: 181722 - DNA, 451 bp, Glycine max
  unsure (1)..(451): unsure at all n locations
accttaagtcacctgcggcatgcaaactgtaactctgcaaagctttgtttgttttaatgcatgtggntccccattccccacttgctaaaaacaattgagtatttcacaagtctctgcttggtgtggtcgagctacaacacttggtgccccttgtcaggtgttggagaatttgatcttgaccacctctgtctgcattttttaatgaatatgtagtctgctgattatgagcgctcagcttttacttggtccatcgtacaaaactacaaataatttctctgtcacgactctttctctttctgtgagattaaattataattatatctttttacataaccagttatgacttatgagacaatcatttcatttcctgctcgagtaataagttgtattacagtaaagctattcgcacttccattgaatatctagaggagaaagtttactgcatttctgc

SEQ ID NO: 181723 - DNA, 402 bp, Glycine max
  unsure (1)..(402): unsure at all n locations
gacatcatattggacatccgataaaaaaaataaaatgatcattacaaacaatcccatactattgattagcattgaaaatgatagttcatgcaccccacgttaactggtaacagctagctgctaccggtttagggaaacattcctaaattatcaaatcccaattgtttaaaggacaatgatatttactacctttttgtgtaaattgtacatcatatcaattcttatatggattgaattatttttcttatcagaaagtacgcataatttgagcgggtcctttattacaaccttaaatgtcctgtgtaaaagacataaaataaaatgagtctaatgcctcgagaaagtatctagttcttatcttatttccatttatggctatctgcttctaatngtgtcacggag

SEQ ID NO: 181724 - DNA, 432 bp, Glycine max
  unsure (1)..(432): unsure at all n locations
agcttatgcgcatatatttttatttactttttttcgcacaagatattcttctaactaagaaaaatgcacccatgcacaatcaaggcactttcgttacctacattatttgtatgtacttccaaggtgtactacctacaccacatgcatttcctcggctaaaattacatacatgcatgctcaaagcctcttggctaccaaaagttgcacacatgcaaactttatgatgaatcttggctatctacacaataaggtgctacatttcatgatttattcaagtgtttgtactacctaaagccgcatgcaaattcaagtatattttcttttgccgactaaaatngtattcaaattaaaaggtgtttttgtaaggtattttctttacataacatgcaacatatctatatatttttgtgagacattttgactaccaaaaat

SEQ ID NO: 181725 - DNA, 396 bp, Glycine max
acaaactctttgggtaataagtaatgctgccaagtctgtaaagctctaaccaaagcatacaattccttatcataagtcgaatagttaagggcagcggctcctaacttttcactaaaatacgctatcaaatgtgcctcttgcgacaaaacagcccactacccacatttgacacatgacactcaatttcaaatgatgttgcgaaattaggcatagcaagaatgggagcattagttaacctatgtttgagggcagcaaaggcctcttcttatttcttatcccatttgaaacccacattcttcttaacaactgcagatagaggtgcaaccaatgtactaaaaaccttaacatatctcctatagaaacttgctaaaccatgaaatcccctcacctcactca

SEQ ID NO: 181726 - DNA, 371 bp, Glycine max
gggttcgacccatgcgggtgttgaagagaccgcatgggcatctccttccttcctttttgcccctggtgccccgattcttttggcgttcacgtttgggaggaaacggaatcaaactttcctctctacaatccaacctcgattctttccccggcaaacaccatatccgcaaagctggacggcatgtaacccactagcttctcatagtagaacactggcaaagtgtctaccatcatggtgatcatctctctctcaaccatgggcggagctacttgggcccccaaatccctccatcgctgcgcatattctttaaagggttcaccctctttcttgaacatattctgcagttgagtacggtcaggagccatatcaga

SEQ ID NO: 181727 - DNA, 430 bp, Glycine max
  unsure (1)..(430): unsure at all n locations
ctgcagctggataactggagcttaagtttattgttttttaaccctcgctgagagaaccactccaagcccagaaacttgggtattctcacatntttcactgcataaatcatcttatagtcattcttcttactctcgtatgtaaaccatgtatccagcttggtgagagcagcttgagaacactctccttgcttcctcttagaagacttggctttcttctgagctctggaggggttattctccatttttagaagaaaaacaaagggtttagaagtagaagaaaggttgggtttagaaatgggtgattagaggaggtgttggtgtgatttgtggatgggctaggttttccttttataaaaaggttgcgtcattctggttggttgaggttggtgggagaaattaaatgcagaaataatgatggttgatgaagtga

SEQ ID NO: 181728 - DNA, 431 bp, Glycine max
  unsure (1)..(431): unsure at all n locations
agcacattttggttttttttcttaccaaagancaaacgcgcatatattattcaccgnaagagccctcctaataattttctctaatgtccttgatctttctctcccccttttcataaggtcaagaaccatgaaatctactatacatacaggtgtttatagtgacctttgtgcatgcccaaaaccaccttaaccaattntatgtcattatgtctcaaccgatgtcgcgtcacaccaaatatcttaagtggctacacatatgacttaccaaatgtaatccacacaacacacagacttaaagttaaaatacttgagcatccagaattttctgagctaatgtaaacttttatcgacttttatgatacgtgatggggacatatggctatgctgcccctgaacacattgagacatgccatctgactgccaagagagat

SEQ ID NO: 181729 - DNA, 343 bp, Glycine max
ctggaaagagctatcagtgctatcaggaaactgagtaaagaacctgctgattggctattacataaagacataccaaagcatacatgggctaggcacacatttgaccctcaatgcaagagtgacaatgtaacaaacaacttctgcgaagtgtttaatgcttgggttgggacgataggaaatagactgtcctatcaaagatgtaatctataattggtagattaaagacactcttcgacaatacgagagacaaggctgcaacttaccaatttactattacccctagggtcaaaagtgtcttggataaaatcgaggaagatgggaggtattgtgttgtcacacatgg

SEQ ID NO: 181730 - DNA, 405 bp, Glycine max
tcatcaaagagggggagaatgtgaatgtatgtatacatgaatttgatgatgtcaaaagaagaatcaaacaaggctcattttgcttcaagattaatacaagattgtttcaacaaacaaagccttgattcaagatttcttcaagatcaagccttgcctcacaatgaaaggtttcaagtcattcaaggcacatgtaatcgattaccaatacatgtaatcgattaccaatggtttgaaagtgtgtaatcgattacacatcatatgtaatcgattaccagagactctgaacgttgggaattcaaattttaaatgaagggtcacaactgttcaagaaaaacaactgtgtaatcgattacactaattctgtaatcgattactagagagaattttcaaggaatatcgccaaca

SEQ ID NO: 181731 - DNA, 468 bp, Glycine max
  unsure (1)..(468): unsure at all n locations
aactaagctggacaatcggattctcctatccttccaagcactttgttcttctcaaatcagaagatngggggtttgattgcacaatgactaacattcttttgtcttattgacagatacacaaattcaacacttagtcttttttcttaagatgaataaagtattttgaaagcttttttaaactttacaagaatttacacaaagagctttttataaaaaagaaattgaattatgcgcactttagttctatttcatgtcttcaaagcttttggtatttataggccttcttcaatcaagtatcagttgtctctaaatggatatattttctctcttaagcttgcgtatgaagaatgtgcccattggggcattaaatgcatgtactttttcatgctggaaaaccactctctgttgccagcgtattgaacactacttgcagaaaccatttgcttttgtttcagagcagatctatgc

SEQ ID NO: 181732 - DNA, 248 bp, Glycine max
gaaaaccgcgcatccttaggagaaaaagaggcgaaggccataattgccaaaagaaaaagtaggccaagccaccaatggggcgaagcacatagccaccactaagtgcaacttcaaagcgctcagcgcaaaggagaagctggcagagcatcaacagcaaagccgcgcactaagcgcgagaacagggcgccaaccggagaaggggcgcacagccaggctaagcacgagactggcgcgaagcccaatttcac

SEQ ID NO: 181733 - DNA, 410 bp, Glycine max
  unsure (1)..(410): unsure at all n locations
ataacnaagcacacctctctgagaagcttccttgagaagattcctaaagaagctagagcttagctacacacacctctctaatagctaagctcacctccttgagatgagaaactagagcttatctacaccccccctataatagctaagctcacccccatgacaaaatacatgaaaatacaaaaaattccctactacaaagactactcaaaatgcctggaaatacaaggctaaaaccctatactactagaatggtcaaaatacaaggcccaaacgaaggaaaaacttattctaatatttacaaagataagcgggctcatacttagcccatgggctcgaaatctaccctaaggctcatgagaatcctagggctttcccttggatctctggcccaatttacttggagtcttcta

SEQ ID NO: 181734 - DNA, 397 bp, Glycine max
tacacgagctagaaatgtggggtgtaaaggctctgaagcaacatgggaagtatttgggccttctatctccctattcctctaagaaacaatcaagcaagggatcgccccatttggaaatttactggtgatggcaactattcctgaaaatccggatattttcaagctcttggcactaatacattctctctagtttcttgtagttctttctctggagacatctggaagaagctccggagaatcgcaactttaccaaaatgtgcaaatattggcctgcagagcttgccacaatgttctacctgtcatgtctaaacttggttaaaagaggtatgaatgtggattctgtttgtcctatatgcggtctgcctgaggaaattgttattcatgctttactgttatg

SEQ ID NO: 181735 - DNA, 412 bp, Glycine max
  unsure (1)..(412): unsure at all n locations
aaactaagcttattatttatttatctttgtcacaannntgtctgttttctttcttnnnaaaanagacagggcaaatgattgtgttttgctgtccttgatttgtgcaaatcaaatgcaccctatatttgtatgaatgatttgtatattttcctgtttttttcacatttccaaactactaataagaagaactgcattttcttattgaaacgaggatgaattatttaagagtgctgctggacacccagcnttttgctggtgcacccacaatttatgggaaaagactaaacccctcaaaattttttttaaaatactctcgcctttctctccgcgcctgcttttttcttcttctcgacggtctgctttgctttttatcttttattctttgttatttgcatttttgtcttttttttcc

SEQ ID NO: 181736 - DNA, 354 bp, Glycine max
ttatgttcctattatcctacttttgtgttatttgttattttaatttgtaattttattttattattggaattacaggcatgatcagagaagatctatcaataaaaatttctttgattcaagaaaggataaatagtgaattttcctataaggtttcatacagaaaagcatggatggccaaacaaaaggcgattgcaattgaatatggcgattgggaagagtcgtatgcgaaactctcgtcatggctaacacacatgcaaaatcattctcctggctcttatttcaaatactacatgacaatttattatgggaatagggaagtcgcgaacatcgccagtttatcgagtattttggaca

SEQ ID NO: 181737 - DNA, 470 bp, Glycine max
  unsure (1)..(470): unsure at all n locations
acacaagaaactaagcttgagggttaagtctcacgatgtcacgtgctttgtaatttngttagccgnggctatacgagacatcttgccaaacaaagtcaggttagctataactcgcctttgctttttcttccatgctatacgtagcaaagtcattgatcctgtcaagtttgatgagctggaaaatgaggccgcaattattctgtgccagttggagatgtattttcccccttctttctttgacatcatgattcacttgattgtgcatctggtcagagaaatcaaatgttgtggtcctgtttatctacggtggatgtacccggttgagcgatacatgaagatcttaaaagggtatacaaagaatctatatcgtccagaagcatctattgttgagaggtacattgcagaagaagccattgaattttgtttagaatacattcagaaggctaaacctgttggccttctaagtctcg

SEQ ID NO: 181738 - DNA, 373 bp, Glycine max
  unsure (1)..(373): unsure at all n locations
tcctctnanggaagaacgagacgcacatcgggcatgatatatacgggagacggccatacaactatgggcatagagctccctcagagaaagcaaaaagggactgggtttcaccatcgactcggccatagcagcaataaggggcgtttgcagctataggcaaccgcctaacatatgaaagtccaaccaaggaccgggccaatccatgaatatgaatccctcacatcaactgcaccatccagccttggcctccaaccactggctggccacgaagcgggaagggacacccacacttcctaagcctagaatctcttcaaacaaatactgtcaccctacccctagatacgccactcctgtcacagtcaaataacacaaa

SEQ ID NO: 181739 - DNA, 451 bp, Glycine max
  unsure (1)..(451): unsure at all n locations
gacacntaaaaactaagctgaactctgaaatcctttaaactaatttttattttgtttgactcncgaaagaatcttcagaaacaagtcacttgaagaattgtgacttttggaaataaatattttgaaaacagtcactggtaatcgattatcattaaggtgtaatcgattacacatcaacaaatgtgactcttcattttgaattctgaaaatcttaacgttttaaaacactggtaatcgattacagctttgtaaatcagtttgaaaaacaatgctggctactggtaatcgattactaccttctggtaatcgattaccagagagtaaaactctttggtaaaagattttgtgaaaacttcatgtgctactcaagtgtttgaaaaacttttttaatacttatcttgactgatgcttttctagattcttgaatctcgagtcttgaatcttgatcttg

SEQ ID NO: 181740 - DNA, 144 bp, Glycine max
cccaccacccgagcaaccaagagcacctaaacacccacaaaggccaccccgaaaacagccacaaaaccgggcagctgcacagccgataccaaacaccaccctgaacacgagccaaaacaccaaccagggaaggacatccccaaa

SEQ ID NO: 181741 - DNA, 380 bp, Glycine max
ttggagagttcggcttcggctcagctcgccgctcgcttcggtttccatcttcttgaaaactacgtcgtccatcatgaggctggctagtgagtctcggctgccgctgctgcaactgttaccagctgtcatttgatcgtaaagcgttatcctccgacgacctccttccattttccgggaaaatctactgagtgaattgatctccgggaattttctcggggaaatggagggagggttggtgagttagttaactgtgtgtttggtttggggaattatggaaggcgtattaaggagtggattgtgtcttaatggagaatttatggggtgaaacgtttaaagggaaagtttggtggatgaagcacaagaggtagggtgctatactt

SEQ ID NO: 181742 - DNA, 410 bp, Glycine max
tctccactaactgagccctttgcaaatttgttagagccttggtgtaacgctgcaacgagaccatttcacatagctgcaaaacaagaataaaatcatattgtaaactcttcccaaatagtaaaacgagtgtgaacaaataatatattattctggtatctaatcacaattgactgtgaatgatacgattcttagccattataataactactttaaaaatcataccaaagatgatttcttatttgtcgacaatataaattttttcagtaattaaactcaatagcacctctattggaaaataagacgggctgtttggtttgccaacattgatgcatggcatgtcagcaaaatagttcaggccaatcagtttttggcgtgtaaaagaatcatgaactgtgatttccctttcctgc

SEQ ID NO: 181743 - DNA, 467 bp, Glycine max
  unsure (1)..(467): unsure at all n locations
accatagaaactaagctgtaggtgcataactcctatgccaccgttttcttcngtcccatgnatgcnaccctttggttatcttcttcattgaacttctttgctagactagtcatagcttgagaagcagaagcagtcacttccttaattgttgcccttattgttgagtcaggcttggccttcttatcactctttcttccaacatcattgctaattttcccatttatttcccttcgcatctctccttcaaatgcggccaaccctttactttcttctttgccttcttttttgggggaatcatccaccacagccttctcaggtggctttcctgattccaaaggcttctcggaatggtctttagtttcttcctttccaagaaacctttgcttttccacattntcatcaatttccccttcaaacttttcctctccttgaagctnggcatntgttggtggtgtagcatttggggg

SEQ ID NO: 181744 - DNA, 194 bp, Glycine max
  unsure (1)..(194): unsure at all n locations
agcttctagccaaagggacttatcnttagnatttcctttgatagcccctctgagcctatgttcccctttcttggttttgaagctcattacaagccttaagtgaaaaaccatgatatcaccttacccttaaggaattttggagctttggaattgttttgggaataagtgtgtgtgtgtgtgtggggggggggggt

SEQ ID NO: 181745 - DNA, 452 bp, Glycine max
  unsure (1)..(452): unsure at all n locations
aactagctgatttcgctggccaaagagtaattttcaccttcatgncgagtctgaagccatctctaatgccggacgcttcctttttttttgtgctattcctcatcttgaaatccaagcctcacctgtcccatgttggggatcctattctgcttgtggatatctaatgctagaaggcttaatccttaatagccatagagtggcttacccttaaagacatccatgcaaacccctgaaagtctgtcttcttttaatgaatgccctaggccttcttcacttgcacaaccctccctaacagcctatgaatgtgtagtggaatcccgtaatgcgtcaccgaatttgatggcaggcacaattctggctagttctccgcactacttttttgcagttgaagactatcatgcctgtttaatgaaaaactggctggctctggctaccttgcggagcacacaaaa

SEQ ID NO: 181746 - DNA, 364 bp, Glycine max
gagaaagcggggcaacaaccactcccaaagggaatcaccacactaccatattcggctgcaaagcacagtatgggaaaatgcaagaaggcacggcaaccgaatgaagcctcaaatggaaaacgaaagcgaaaggaagagtgattggaagccgcaatacacaataccctccgctagtaagctatcacgtttgactcaaagaggagatgagaatcactgaagagagaaaggagggacaaccctcttcctgcaccaacggataagggaacgaagggaacgcattttctccctgcacacatttcaagctgcacccaaattcctgaccacaatgctaaaaagaaagccttggccccgaaaataaaacgga

SEQ ID NO: 181747 - DNA, 133 bp, Glycine max
  unsure (1)..(133): unsure at all n locations
gccaaaaggcaaanacacnccaaaaancacaagcccannggnnaggaaggagggcagaagagaaaccacnnnnggacanggcnggnagcacgaagccagnggngccaccanaancaacccaccacaccaacac

SEQ ID NO: 181748 - DNA, 474 bp, Glycine max
  unsure (1)..(474): unsure at all n locations
tactaagctcccgctgagacatctatgatagacctccacagccgataactttactttctcaaaataaccatgacctttgaagcatcatatacaatccatgttggaggaatcatccaaatctgagacggacaagccctacacaacaacaacagactgtacctcctttccagaatgccgctagtcaaagcaagccatatgttcctcctccaatacagtagcagcagcatcaacaaagacaacaagcaactgaggctcctcctcaaccttccttataagagtcagtgaggcaaatgaccatccagaatatgcaatttcagcaagagacaagagcctccattcacagtctgacaaatgagatgggacagatggctactcacatgaatcaagctcagtcccaaaattctgacaaattgccttcacctatagtgcataatccgaaanagatgagtgccatcaccttgatgtctggcaacc

SEQ ID NO: 181749 - DNA, 373 bp, Glycine max
  unsure (1)..(373): unsure at all n locations
acacacgagcacgagggaggagagaaagacacccacacgcacaagcacggaggcgagaaagacccaacancccnaccaacagcggacacncacacggacggagcaanggacagaaacagcacaaaagcggacgcgaaagncggcnggaaaacagcaaccanacaggggcncacaacaaggggncacgncgacacgaaacacaggcaaacaacagagccccgcgcgcgacacacagaggaaaccgcgcaaggngnaaacacgagacgagccgacgcgcgcgccggcaaaccggagcnccccngaaganaccngaacaaagaaaaagcggaacaaaaagcaaccgcaggggaaagccaacaacaagcaaacacaa

SEQ ID NO: 181750 - DNA, 480 bp, Glycine max
  unsure (1)..(480): unsure at all n locations
aatactaagcttcttacctctgtgtttctgcattctggttttatcctctttattanacttttggngttttcattaagctccaatgactgtcatgccaacccacaccacccgccaaaccacctcttttccattgcatcctctccacactaccctccatcagcaaccacctttgtcaggctcatcccttccatttcagcacacacctcgaatggcggatgccgaactttctgttgcttgcatggaccgccttgaggctgccatggccaaacttgctgcagctcaactttgcttcgccgcgacccaagcttccatggaatctaaactggatgtccttcttctaaaactgcctatcccgataaccagccaccactacccatcttcttccttcgtgcaatcaacaccgccgtctccgccgtccatagcgactctgccgcccatgccaattccgtttccatgtcccgcacccatgcaaccaagccc

SEQ ID NO: 181751 - DNA, 360 bp, Glycine max
gattttaaacgcacaaaacgaaaacaccaaagatttataacctatactaaacagaaaagacttaaattacgacaaaagaaccataaatggggagaggagatacaatgatgcatgctatacacacaaaaagagggcgtggccaccgactaacaaacagttagggaagtccgatgctgctgcgccgacacaacacaatagagcgggaagaaccctaaccaaacaagagaccaatggctacggagttaaggcaacagacagggcaccttgcaaagcactgataggcgccactgagccaaaagaaaacgtagtcaactgggtatggacgtcgcagaagagaccaaacaactaccgcaaaggaac

SEQ ID NO: 181752 - DNA, 417 bp, Glycine max
  unsure (1)..(417): unsure at all n locations
cacacaaaaaaccgaannagcgagacatnggagaacaacaaccgccaccaccntcttaactttgcaaagattgcataagcaaaaggccaatcctagaaggatgtttacttcagatgaatggttgaagtctaaggcagctaaagagcccaaggggaagcaagcaacagatgtgggtcttatgccatcatttcggaatgatagcgtttatgctttaaaggctatggggcctcttgtaagtgtagtgaggttgcgggataatgaaaaaaaacttgcaatgggtttcatttatgaagcaatggatagggccaaagaagcaattcaaagagctntcaataacaatgaagggaagataaggatatccttgcaatcattgattaaagatgggattgcaacctcatcacactttgcatgcagcgg

SEQ ID NO: 181753 - DNA, 395 bp, Glycine max
catctatgccattaatgagtttactttgaccagataatttttttttgaactatccttattctttctaaactttagcttaaaaactgaagagtttaaccatgctaatatcttatcttctaccattttaataatataaaaatactttccaatcacccaataaagaaataacactatctaccccaaacatatgaaaaattggaatgatacaatttgcatctccctctttgaaccatgtcaccctagttttttgttggagtagagattcatgcctcctagatttcctccaaaattcccctattaggatcctcctcctccaagccatcctcttcaccaattagatccataacattaattctttccaccaattcctttgcttgccaatgaacatccccaag

SEQ ID NO: 181754 - DNA, 330 bp, Glycine max
aataaccgtggcccttgcagcattatatacacaccagcttcgtcgaatgataccaatctgacactggcagaccgatcgcagctacaacggccggtacttggtctcggactagcgggtattcacctcaagccacaccctcttacatcctatgagatagctaacccgactacatgcttacaggacccggatgctgctatggttccacatatacaatagaatgtgaggcgaacaaccttatcggatgtgcgatactttgtatagaggggatactctatgcgtaggaaagcttataacatcatacatgatgggtcgacaatgaaacttcatgat

SEQ ID NO: 181755 - DNA, 396 bp, Glycine max
caatatttctatgagggactcaacaaaatggagaggagtatgattgatgctgccaatggtggagccctagttgatatgactcatgctgaggctaggaatttgattgagaaaatggcttccaactcccaacaattcagtgcaagaaaagatgctattgttcttagaggagaccatgaggtggccacagattcatcttcatctacagaaaataaaaagcttgagggaaaacttgatgccttggtcaacctagtaactcagcttgccatgaatcagaaatctacacttgttgcaaaagtttttggtctatgttcttctgcagatcaccatacagatctatgtccttctttgctgcaatctggaatcaatgagcaacctgaagcttatgctgcaaacatt

SEQ ID NO: 181756 - DNA, 450 bp, Glycine max
  unsure (1)..(450): unsure at all n locations
tataagatctggctgttaactcgaaatttatttattctattgntaggtctggagggtccattgaccactatacgacccatcctgccttggattttgatgattacaaaggtataatttactaatggactaatgagttattgttaagtgaacaagatacactatataaatgagctaaagtgttattcaatcattctctatagcttcaataagtatgcatccacccataagtagaaaactgctttattatgatatattaagcgtccaatgcgttgataaaatgattgtgtccacttaatgcaaaaaccagagattacacactgagttgtctttattcatgtgcattggacttaaatcacttatacacttcataatctaatccattacattgttcttgaaagatttccagcttttatgaagaacactgtaatcgatcgaaattatgatataata

SEQ ID NO: 181757 - DNA, 402 bp, Glycine max
  unsure (1)..(402): unsure at all n locations
ctaaaaactcagcttacagaaggctgcgaagtgngggaaccccttagttatcttcttagnatcaaacatacaaagggaaatggtaatattgtagctgacgctctctctcgacgtcatgcattactttctatgcttcaaacaaaattgattggtcttgaatgtttgaaaagcatgtatgaaaatgatgaaacttttggagaaatttttaaaaattgagaaaaattatcagaaaatggcttctttagacatgaaagctttcttttcaaagaaaacaaattgtgtgcctaaatgttctactagaaatttgcttgtttgtgaagcacatgaaggaggtttaatggggcattttggggtccaaaagactctagaaacattacaaaaacattnttattggcctcatat

SEQ ID NO: 181758 - DNA, 448 bp, Glycine max
  unsure (1)..(448): unsure at all n locations
gtgacctgcggcatgcaagctagacaaagagtgaccatctctttctttctttttataaactatataaatatttctgattctttttagatttttttaaacctttttattaaatgtaaaaaacacgtttcaagaatcactaaacgtatgaatcaactaacgtaaaattattttaacttaattagagggtccaaattcaagtcttaaatatacaattatgataaatatttgaagaaaaaaatttgatatttataatagtcctacctcaattcaaatatgattgttcccctgtggaccagacatgtgatttaaaaaaaaaacacggctcacgacttttttttggtgaagttnttttatattttattaattataatataacacggttcaagatgcaaaatcaaatggaacaacttttattgtccccattggccggaataaaacaccttagcat

SEQ ID NO: 181759 - DNA, 395 bp, Glycine max
  unsure (1)..(395): unsure at all n locations
tccatgccaaaatacagaattatattagattattttgaatttacgacttttgaatattgttattaagagtaaattaaactgagctgaggcagctgaagtttcgtgagtttacacatctctttttattttttcagcttttacatcaactttctctataggaaaacacgatgtaatatttttccaataatcaaagagactaatttaatgtataaagagtgtgaatgtaatatttttaaataattaaagaaattagtatagctgtaaaaaaaaagaagaaattttgcacaatctcatgaagtttcaagaggtctcaacaatataagtattctattattaaaatgaatctaaatggtttggaatcttatgacgtgattctccgaaaccacanatgacaa

SEQ ID NO: 181760 - DNA, 240 bp, Glycine max
  unsure (1)..(240): unsure at all n locations
caccccccncagncagggggaaaagacgaacaaacacanccggagggccacaaaggaaccgcacncngaangaaaagcacaaaaacacnaccaagagcagcaaacaanaagagacacagccagcggagacacgaaaccaaacaacgccaccggacaacaaccgaancgggaccagcaacncgaccgaccnnaacanaaagaaagaaagaacancncacagaacaaaagnggggaacagaa

SEQ ID NO: 181761 - DNA, 357 bp, Glycine max
gctgcacaaagcagggaattttctttttcaagacagggaaagccagtaatcaaacctagaaggaaaagacaacgccgacctaagggaaacataggcagaaaactacaacaaaaaaaatgcccaggagaagcctcgtgcgggcgagcacccgaggcacaaggtagttcaaaaagagggggagggggagtttacatcacccaaaacttccccccctcatcaaaaacgcggcgagtaccgggagggcctcgatatcagccctaaacaaccatgggtcgagttattcaggcccatggggcaccgacactcacccccaagaagcaagaaccgcatgcactggcgctctaactcaccatgggg

SEQ ID NO: 181762 - DNA, 362 bp, Glycine max
ggcagatccccaagaggatggtgccttctatcacctcttctcctctgggttccgatgcatctccatggtggaaaatcaccattgaaagagctcattgaagctcaaagacccaacctccatagaagctccacaagcaagcttccatcacgtggtatcagagcacaagagacttaagtacgtgcttcttaaacctccattaattatttgctttaccttttcttccgatgcggtgtctacattattttctccatgtatctcctcacatgtctagtgctcaatgatttgaacatgattctttacatgttcaccaattaaacttgctatagaagctagaattgatctctatggttcaaagtctcgtc

SEQ ID NO: 181763 - DNA, 337 bp, Glycine max
  unsure (1)..(337): unsure at all n locations
attactgattctgccataaccacaccttctctatgtcaggtgagatctcttcgaatgaacggctcctgcgctctgaatcttngaggaattgcatgtggaaggctggatgtatactttgaacttgactctggtgcgccttggtatgaatgaatatctccttctacattaatgtttggcaatgtgataatgtgattcacaaggcctctttccttttccagggatgtancaggtggtgctgacattgttaaagaagctggaggtgctgaatttgatccgcaaagaactttgcttagatatcccttatcttcacgaagggactaaagatttagttctaaat

SEQ ID NO: 181764 - DNA, 382 bp, Glycine max
  unsure (1)..(382): unsure at all n locations
taacatcanccttgctgagatatgctgcccaccactttctggccattctggcctatttatggcctttgtctgcctccactactgtgatcttagtaacaataatagcctttggaggcgtttcaaaactctcaacaaaagatcatggtgaaaaggctggtgaaggacttttgaattatgtatcatgaaaggcataacaaactcaagaggctcaaacacttctaaatgaatgaataaagggtgtaccaatttcaagcatagtttagatgggcttatagaacctttcaagtttaaactccatgttcctcaactcacaagaaaatgtatctctccatgtgctcacaattgtacagcatatgacgaaataaacagtctaacttctgaa

SEQ ID NO: 181765 - DNA, 451 bp, Glycine max
acctgcggcatgcaagctgggagctaagaattatatatattatatttgtgtatcatataaaataaagttaacggataaaatgttgaataattctaaataataaaaagttcattattgttttaaattattaaaaaatattaattactaaaatttattatctgtaaaaaaataagcataataatataaacctttgtcattattaaattatcattattattattatcattcaagaaacgtaatatctaccatacttctagctttcattgctcttgtgtaactaaatttaatttgttaggacattggtatataatccattatggatatagctaggctatgtcttataaaattagttgaaatattaactgaaaactaaatatatagctcattaggttgattgaattatacgtatttgataatattatctatttgaactatttataaaatataaaat

SEQ ID NO: 181766 - DNA, 465 bp, Glycine max
  unsure (1)..(465): unsure at all n locations
tgccaatcaaattgattntgatccattgtgcaaaactatatattattctttattcagattggagaattgagattgacaaatgaagaatgaaaatgaaaattgtgtgtagaatttttgtgtgtactgaagcaatttatagaatgttgttttagctaacattctgtataacaactaaacaagtctacaaattttacccattaacggtaaaattttgtaactaatgttcattgtgcacacctatgatttgacaaacaacattcttttttttacccttattgagactcttcctctctctcgtcaaatcaccctcgtcccatctcacccaccccttatttccctcatttttcttcttctctcctcagcacccacgcacctaccccctcatgttttccacgcttattattctctccttggcacccacccatcccccatctttcccacttcttctttntcttcttttcttct

SEQ ID NO: 181767 - DNA, 428 bp, Glycine max
aagtcacctgcggcatgcaagcttcaatatagagctgtggctgatagacttattggacttaatattcaaaccaccattcctccaaagggaacaaaccatatcccaaggcacaatcgctagcttcctttgggagtgatagctagaccatatgaaatttttgatatttttatccagcgagttcagcaatgcagtaggacacttataaatctgaaaacaataaaccatcataccttgaatcaccaatggaactaactgaactctccccatgatggacaacatcgcccccttccaagaagctaacttggtgaggattttatcaattatgccctgaagatgcacttttttaagtttccttttaaaaatggggaccgctgaatacgtaaatggtagcaaaccttggcgaaagcccaagaaatcttagatcctgg

SEQ ID NO: 181768 - DNA, 462 bp, Glycine max
tactaagcttccttgagaagctagagcttagctacacacacccctctaatatctatatctcacctccttgagaagagaagctagagcttagctacacacccctataatagctaagctcaccctcatgacaaaatacatgaaaatacaaaaaaaagtccctactacaaagactactcaaaatgccctgaaatacaaggctaaaaccctatactactagaatggccaaaatacaaggcccaaaagaagggaaaaacctattctaatatttacaaagaagagtggatccaccttgacccatgggctcaaaaatataccctaaggttcatgagaaccctagggccttctttagtagctctagcccaagcctcttggtgtcttctatccgatacctttggggggtaggattgcatcaccttcctcccttggaagacacacccgtgagccccgcatcgccctcccgtc

SEQ ID NO: 181769 - DNA, 251 bp, Glycine max
  unsure (1)..(251): unsure at all n locations
agcttacatgtaaggaaaagggtcaggggagggcgaattanattttgtttacncancaaacaagcgcggaaatagcgctaaactgcacgaagacaaacgcaattatatatctaccagacaaaacactgatttactaactgcgtttaatggttagctatgttaactaaccctgaaataattttattcttgccttgaaaactggggtgaatgaattccatgctgttaacctataacctgctcttgtcttggct

SEQ ID NO: 181770 - DNA, 442 bp, Glycine max
  unsure (1)..(442): unsure at all n locations
ctgcagctntgtcttgccaaaatcatattttctttttagtgggacatcggagaaggctgaggttcacaaaaaaaatntaagcttttgtattgtgagaaacaaagaaacaaacgaaacatagtcagagaatcaaattaaacaaacctgtttgagataaaaatcgaagctttttgtagataaaaatcacatctttagtgtcttcttccatcttctgtacatacaatagcgaaggtattgtgagaagtcagaaaacaaaataaaaaaaatttaaactttttgtagtgcgagaacttagaaaactaaataaagggagaacatccaaaaaaaatgaaagtttttgtcttgcaaaaaatcataaaacccaaaaaaagtgggacatcggagaaggctgaggttcacaaaaaaatttaagcttttgtattgtgagaaataaagaaacaaa

SEQ ID NO: 181771 - DNA, 456 bp, Glycine max
  unsure (1)..(456): unsure at all n locations
ttgaatctaagctgggctattcagttcattatataccttaagcttatttcnttttactccttcagctgggccatgtactctgcttcattgttgaaagagcaacaactgattgttgatttgctttccaactgattgttgtaccaaacaaagtaaacacatatcctgttaaagatttccttgtgtctacatttcctgcaaaatctgcatctacataacctgtgattgctgcctcatatgctgtcttcttgtaccttaatccaactttcgaagatccatttagataccttagtgtccacttcacaacttcccaatgtgcactgccaggatctcccatgaatctgcttataatacttacagcatgagctaagtcaggtctgctacaaaccattccatacattatgcttccaacaccactggcatagggtgtntgatccattttagacctttcttcagtta

SEQ ID NO: 181772 - DNA, 464 bp, Glycine max
  unsure (1)..(464): unsure at all n locations
tgttagaggacagttgtatcagtgaattcaatgagtgtttatatgaattttaggttatggaggttccttggctgggcagaaattttacttggtatagacctaatggcgcatctagaagcagacttgacaggttcctagtttctcatgaatggcttgctacatggcccaacagcattcaagctacacttgcaaggaattttccggatcattgtccaattgtgcttcgttctaaggagattgattggggcccaaaaccttttaggatcatggattgctagttacttgataggtcattcaaggaaactgttcatcattgttggacatccaatcagcaagcagggtagggaggatacatccttaaagaaaaaatcaagaaattgaagcacaacttgaagagatggaatagagaacattttggagatacctntacaaaggtcaaaaggattgaatctgaattaaacaaa

SEQ ID NO: 181773 - DNA, 352 bp, Glycine max
aagagcggcagacatacgtcccgacgaaagaaagacactcagagaggacgaaagaagaaaactaatgaacgaaatgaaaagagaaaaacacgcctcctatagtagccacaacccttgcgaaaacctctaggaaaaacttcgtgactattacgaaggaaggcacaggtcacatcttagacctcactcccatagaaaagaaaaggaaagaaagcctcgagaggctaacattaaactctcatacttccatgggaaggacaatgtacaggctaacttagattgggaaataagggtagagcaacaccttaaaaagaagtctacttcacaatcttatgactcccactcttatccaaag

SEQ ID NO: 181774 - DNA, 459 bp, Glycine max
  unsure (1)..(459): unsure at all n locations
gggtggtactatanctgcactaaattggtgctgtggataatatatgcagatgcaaagcagnagaagggggtaaagacaatatattactacaattatatgaaattgagaaggtaatactaagaatagaatattagtagcatgaccgaaaataaaatagccgctgtgtcaaataacataacaattatctcaaatacagggaaaaaaaatactccaacgccatcattagccgttttgacttattgctgtctttaaaaaaaatgttgcccatttctttcgaattgtggtgatgatgccgatgtccaacggtgtgtcattagcaaaccactgcaagtattcataattgtaagttagtactgcaaatataaaaattcagttccaattgtactgaagtttatgcataccatggaccaatcactctatatgtcgctggctatgatgttccagatccaatgcattatg

SEQ ID NO: 181775 - DNA, 434 bp, Glycine max
  unsure (1)..(434): unsure at all n locations
tgcagctgcaagctgcattgctggcggaaccattgttttgattngagcacaccaagggctcagnatacgtttcacagcatgatggcgattctagaaagactgggaaatattctaacgcgcaaggacttttttatttatgggggaccatagattgtgcaaaaacattaatgtaaaaagaaattagtattgcatttcttgaattttgacaaaataacacatcatattttgggtgggtttaaataatggttttttccctataaaattaagaattcctttgcactttaatacataaatattttttatatatattttagtgcttgtaattttaatatttgaatttattggtggctatcaactatcaataggttactgattatgtaagagtgatgttggaagttcattggcctgtcgacaatatcaatagcttgacatgc

SEQ ID NO: 181776 - DNA, 457 bp, Glycine max
  unsure (1)..(457): unsure at all n locations
tgaaggagtntgatgcatcagggaacaaanncactttttagngtgtcctaannnggaacctaattttcaacttacctatttggatgtgacatcatggcagataggtcccaactttccatcgtggattcagtcacaaaacaaacttcaatatgttggactgtctaacacggggattttagattctattcccacttggttctggaaagcacactctcaggttttgtatttaaacctctctcataatcatatccatggtgagctggtgactacaataaaaaatccaatatctatccaaactgttgatctaagcacaaatcacttatgtggtaaattaccctatctttcaaatgatgtgtatgagttagacctttcaaccaattcattctctgaatccatgcaagaatttgtatgtaacaatcaggacaagccaatgcaattagaatatctcaatcttgca

SEQ ID NO: 181777 - DNA, 347 bp, Glycine max
  unsure (1)..(347): unsure at all n locations
aaggagggcattntatgggtctgtgaattgcgtggctactattgggacttttttctttggnngggtgacttctttctatttgatttcgagggtatggggtttgggagaatgatgggtattttgctaggatttgctggtgatgatatttgaaaaacacttgttgaaagcttgttgaaattgccatgtttggatgagttaaacatacccattctgtgttagggcttttgtgatgatgtttgtgatgtgtatatgctgaaattgctgaaggaaaactattatagatgaagggtaaaattaacctagggttaaaaagtgagaatgtggtgtatgagtggaaaaggagtgaa

SEQ ID NO: 181778 - DNA, 470 bp, Glycine max
  unsure (1)..(470): unsure at all n locations
gacctataaaactcagctngaggatatggggacccatcacatgtggtttatttggtgtcnggcgagggcacaacaagttttttacatccacaatgcgcgcataaacccaccatcccctgttgcccacctccaactgagctcgcgtactcccacgtagcccatatcctcgtttctctcaacaccgggtccccatcaatcctctcaagcttccacaacatccaagcaaaacaacattcaaacagcacaagctatcacagccaagcaaaacagagcaaaggcagaaaactctgctcaacacatcaaccaaaatcacagtttttctcacgtaaagaccacagtaacaattctttcgatccaattcgttaaccgttggatcgactctcaaaatttactggaagtctatagtgtataagcctcgcatttcgaccgtggaatatactagcaaacatccagaactcattctgcactag

SEQ ID NO: 181779 - DNA, 420 bp, Glycine max
  unsure (1)..(420): unsure at all n locations
agctngtaggagtatgggggacccatcttatgtggtactangngacaancgggcgatgactcaaattaactctcccacatccacaaatcaaacatgaacccaccatcttcagttgcccaccttcaactgagctcatgtacccccacgtagcccttaacctcggtcctctcagcaccgggttcccatcaacccctccaagctttcacaatatccaaaaaattcaatatccaaacatcatgaactaccctaaaccaagaaaacagggcagaggcagaaaactctgcccaaaactcattccaataccacagctttccctactcaaataccccagtaacattctcttttttccgattcgttaaccattggatcgacgtcgaaaatttattggagggccctataacataagcctacattttgacc

SEQ ID NO: 181780 - DNA, 455 bp, Glycine max
ctaagcttctgctgttagatttttagagagaaattgttttttttctttagtttgagatttgctgtgcaagacctgcagaaaccgagcttgaagaagaagtcgtcctgagagcatgagatgagtttgtgagtgattgtgaggttctagaggtggaggagacatcctcaccgcttgtatttcttcaatccttcatttttattttctctttgttgtaaaggaagcttcctagttatagagagttaaatcctttgttggttcttccttgtaagtacttgatgtaaatacctgtatatttatttaatgatgttttgtgtgctatcagaacttcattctaccatgctttttccttgatcacatagatgcatgtgttgttagaatcattcaacagtagaaactggtctgattcttataacttgattggacggggctagtttatcgtattatcacgagagatc

SEQ ID NO: 181781 - DNA, 439 bp, Glycine max
acctgcggcatcaagcttgcttgggagcttctatggatgtctggatatttgagcttcaatgaggtcctttaatggtgattttccaccatggagatgcagcggaagacaaaggagaagaggtgagaggaggcgccatccactaaggaataagccatggaagaaggagcttcaccaccaagatgagccttggataagaagcttggagagaatgcttcaatggaggaaaagaaagagggagagaaagagagagggggggagcacgaaattgaaggaataaaagagggagagaagtggaactttgaagtatgtctcacaagactctcattcatcaaagttacaataagtgttacacatgtttctatttatagactaggtagcttcctttagaagctttcttgagaaaacttccttgagaagcttctttgagaaaactttcttg

SEQ ID NO: 181782 - DNA, 431 bp, Glycine max
  unsure (1)..(431): unsure at all n locations
tctcaaggaggtgagcttagttatgatatgtgtgtgttatttaagctctagcttctcaaggaagttttctcaaagaagcttctcaaggaagttttctcaagaaagcttctcaaggaagctacctagtatataaatagaagcatgtgtaacacttgttgtaactttgatgaatgaaagtcttatgagacacacttcaaagttccacttctctccctcttctattccttcaatttcgtgctccccccttctctctttcttttcctccattgaagcatcatctccaagcttcttatccaaggctcatcttggtggtgaagctccttcttccatggcttattccttaatggatggcgcctcctctcacctcttttcctttggcttccgctgcatctccatggtgtaaaattaccatngaaggacctcattgaagc

SEQ ID NO: 181783 - DNA, 383 bp, Glycine max
gattctaattgtacccgcctaattagactattaactggggacctcaagaaattgatgattgaagtatgttggtataaatttaccaatcacttttattagctttcattacttagttgtattttgcactcttgattggctacagattcgcttggaaattgttatagggtggtgaagatgacctaagactatatccaaaacacctagataacatgattggttgtacttcaacctttagggtaaagtatagcatcaagttcaacaatctttcctatatcaaggatggttgatgatctagaacttataaatttaattaacgaacaactcgattctgattaggtaatcctatattcaactatacaacttgggacaagttattatttttt

SEQ ID NO: 181784 - DNA, 471 bp, Glycine max
  unsure (1)..(471): unsure at all n locations
actcaagctcngaagttgaactctaatatatctcgaaaacgtgttaagtgtcttgtgattatgcaaaaaaccataatagggtaggggccactatacaaccccctactagtgaccttctgattcacttaaaaaaattgtcacacaaagaatgaccaaattaatttgttgctggtcatatcctaacttacacatcatggcttctaacaactcctaatcaactatgaatgccttgctaatatcaattttaaaagtaatctccccttacttcctacacgtcttacatgtcaaataatgaatgatctttgtagcaaccaaagagttatcaagatagatttatattctgtcaaagcatattactccttataaacacatctggagatgactattatgagcatactagctaaatcctttgattaagttttgtaaacaacattataaatagctataggtttcatatctttcattgaacta

SEQ ID NO: 181785 - DNA, 393 bp, Glycine max
atcggaagagcggtagacagactttctggtccatctagggatggcctttgtggataactgcgcggtgggtaaggagaacgttcgttattggctgagtaaagatattgctgggttggtgggaaattcggccgtacaggaatggcagccacaacatgggtttctccctctttctcaccctctttatttgccccagctttctcagtcgtcctagtaggatgatcaaatttgccttttttcggacccacattgatcctttcactggcgaagaccaaatctgcaaagctttgacggtgcgcagcccaccatctattcatactagagtacccataatgtgtctaccatcacgattatctgctcccttactgcacatgttctgtagttgcatcctatccg

SEQ ID NO: 181786 - DNA, 401 bp, Glycine max
ctcatgcactcctctaatgactatggcatcatttctggcgctaaactgctgggagttggaggccatcttctcaattaaattcctggtttcagcaggagtcatgtctccaagggctccaccactggcaacatctatcatacttctctccatattactgagtccttcataaaaatattggagaagaagctgttctgaaatctgatggtgggggcaactggcacatagtttcttaaatctctcccagtactcatacaggctctctccactgagttgtctaatacctgagatatccttcctgatggctgtggtcctggaagcagggaaaaatttctctaagaatactctcttaaggtcatcccacctcgtgatggaccttgtagcaaggtaatacaaccagtcct

SEQ ID NO: 181787 - DNA, 454 bp, Glycine max
  unsure (1)..(454): unsure at all n locations
atggaagctactaaatctgcacacttttgttttggtctctttctggatggccttgattttttcagggtgtacttggaccccatttctacaaaccacaaaccctaataaaactatattatctacataaagggtacacttctctatattggcatagagggtttttttcctaagaactgaaagaacttgcctgagatgtcctaagtgatcatctaggttcctactgtacactaaaatatcatcaaaataaacaactacaaatcccttaagacatgatgcataagcctcataaaggtgtttggtgcattagtgagcccaaaaggcatccctatccattcatacaaaccaaacttggtcttgaaagcggatttccactcatcactctcttcaatcctggnttggagatcaccacgtttaagatcaattcttgaacagatgttggcatcatgcaactcat

SEQ ID NO: 181788 - DNA, 345 bp, Glycine max
gccatgaggggatccacccgctcacaccaccgatttgagagctgcgaggtgcacccagtggaaacaaaggaacaagccgaatgagccgacgacgccaaaggaatacacgaataatatgcgcctcaaagaattactcaagacaaagtagagagagaaattcaagatggaggaacaagacaggcgatagagcctgagaaaggagattaaagaggaagggagatccaacggaaattgcaaaaggaggggccaaaaagtgtaagagaaaaaagtccgatcaacaaaggtactcgcgggaatcgagaccagaggagggaaacgacatcaggggccagaacggagaacaac

SEQ ID NO: 181789 - DNA, 448 bp, Glycine max
  unsure (1)..(448): unsure at all n locations
agaatagagaacacaatagctagagcgggtttaagtggtttggatngcatccttcattaattctcttgttgatcttgtgctctacacaataggcgactagtttctccaaaggattggatgtaatcttcgtactcttatatatctcttttgatattttatatatgaatcttttctactcatgaaattggatctcaagttagattagaaagtacacttcaaatgtggactcaatgaatatactctttacgttacattgtgttaggaatataatgtgacaccctctacccctcacatatatactaacaaaggctcacattcactatcttctacatcatattcaaactcgtccaaataaataataaagtcatctcggctcacacacggttgactgagacttcatacaattaatatcacaccgtataccccaatgccacatactatcaaagtg

SEQ ID NO: 181790 - DNA, 470 bp, Glycine max
  unsure (1)..(470): unsure at all n locations
ctaagctctacttgactatcttctccttgagagtgacagcttttttattttttttcttctcatttcctgccattgatattcaagaagcaaatgactcccttgattaagaagatcaaggcctacaagctccacatggagctacatcatgtggtatcaagagaatcttcatctagatgatgttcttttgctttctctatctttttgtttggtcaaatcactttaattccttggtcttcatcttattctccatgcatatcctccattgtcttgtggtttgatgctgtttagagtagattcaaaataataaatcgatcaaatcttatatctacacttgttcttgcatttcaatgggttcaaatttatagatctactcttgaatcatgtttttggggtgattttaagatctatcattnttcagttataatatttctgtgttgaacctttagatcataaatttcttccaaaatatt

SEQ ID NO: 181791 - DNA, 281 bp, Glycine max
  unsure (1)..(281): unsure at all n locations
acanacacacccgacacacaagcgacaaacaaagcaacangaaangcgcggcaccacacaaaacacagnaacgcaccacgggcgaaacaccaccgagaagcgacccacaacgagagaaaagcaaaagaagcccagnacgaccgcgacgatcaatgccccaagaaaccaccaaccactgaatcnccacccaacacaacactgagagaaatgaaaccaagcaccaacaaccaagtgaaagccgccaagagcccccaaccaacgacaacacaagacgggggaac

SEQ ID NO: 181792 - DNA, 327 bp, Glycine max
aacagagctcaccggcctgagaagcccctgggaaaagcccaagagaccaagagctcagcaactcgaaccttccaatagcaaagcccacctccttaaaagagaagctaaaacaaagcggcgcaccccctatgggagcgaagcacacccccatgacaaaaaccgtgaaaatacaaaaaacggcccttactacaaagacaactcaaaatcgccccaaaatacaaggctaaaaccctagactactaaaatggccaaaacacaaggcccaaacgaaggaagaccctattcgaatgttaacaaagaaaagcgtggtcatactagacccatggg

SEQ ID NO: 181793 - DNA, 224 bp, Glycine max
  unsure (1)..(224): unsure at all n locations
ccacagttcgcgccggcnnccaccgccacgccgncgccgagcggaaccagagcccctaacgacaacagggaacggtgcaccacgagaagcgcaacccaaccccacaactcgcatgaacaacaggagacccacgggccgacacgtgcctaagccggacatcaccaacctcgacgcgaggaggacacacgtcgaaacccgggaccaaagaacggacagaccaaagc

SEQ ID NO: 181794 - DNA, 438 bp, Glycine max
  unsure (1)..(438): unsure at all n locations
agcttatctatacctaaagaggtattgctttgttcntngtttactcttaagtaggaagcctgtctccaacactcaaatttaatttaatgggttctctttatttctcaatcaaaactatttcatttggcgacggatgtaaggatgccatggagctatatcataaacttaggccccttattaatactagcggaaacataggcgttatcgggtcttgcgcatctggatttctatttcactactgtgttttctttatattaagatttgtttttttatttccttttcttggaatatgagaatttttaaaatcataatttttacttttaaagaataaatgattttaaaattattttttattgttgattttaaaattataaaaagccatttttaaaattaggtttatagttatgtggcgtttccacagtgttattttttcctact

SEQ ID NO: 181795 - DNA, 463 bp, Glycine max
  unsure (1)..(463): unsure at all n locations
actaagcttggatacacaccaagactattgctggagctgaatttgtttcattnnncaggacggcttgataacctctgcatgtcattttgctcgctgaaggtttaacttttatacagattttttttcaagtcaagtttcaaacgcatctgtatggtatagatatgaactctgaaatataaccttgatttggaagtttaccactcaagatattgcatctaaaatctaaactggggcattctggactagagttattctatagtgcaaggaatagaaaaaatttctgaatatcaataatgtatgtttataacatcattataatttatgctctaatggaatgatttcagccaatgatctctgggtataattgcatcttctcccattctatgaacttgtgaaatgatagatcattaattcaaacccacatggtttttctatgtctttgttacaatatctattgatatct

SEQ ID NO: 181796 - DNA, 408 bp, Glycine max
aacaccacgacaagaggccggtcgtcttggaattctattgctccggatgcgattgttttcatttttagaggggaccaatatgcttaggtttatcccattgagagagagtagaggatcgactctctcctgggtgttggattagatgctcctttgaatcttatcaaaagtacccatacatctatcgggaatcctcacttggctgatcatcctactagagtgtggcgcgctcctttctatgtcctatttttgcagctgcttagccgtatgccttctgacaaacagtctcgacctgttggcgccattgatataccagatttatagttatgtgctactctctcttcttttaccgcaggttttatctcatgttgtgttccactcttgttacaagatgaccaacctcacggatga

SEQ ID NO: 181797 - DNA, 416 bp, Glycine max
  unsure (1)..(416): unsure at all n locations
tgcaagcttccgtgaggagagttctatttattctaaagctnagctacacacacctctctaatagctaaggccacctccttgagatgagaagctagagcttatctacacaccccctataatagctaagctcacccatatgccaaaaaacatgaaaatacaaaaaaagtccctactacaaagactactcaaaatgccccgaaatacaaggctaaaaccctatactactagaatggccaaaatacaaggcccaaacaaaggaaaaacctattctaatatatacaaagataagcgggcttatactttgcccatgggctcgaaatctaccctaagacttatgagaaccctagggccttcccttggatctctagcccaatgtacatggagccttttatccaatgcccttgcgggggaggatt

SEQ ID NO: 181798 - DNA, 384 bp, Glycine max
  unsure (1)..(384): unsure at all n locations
tagaaggagcacgttcatttctattataaaactcgcggataaagcataatagtacatgaaatgaataacccaccactagtacaaattcatcccatgaatatattgccaacccaaaacttttaacttcttgcttttgtttagggttaacctttccgaagcttacaattgttgtaacaaagacataaaaatgaatgcttctttctaaagcacaagcattctaagaaagaaaggagagaatcaacaaaacttactcttgagatactttgttgcatttggaaatgtnttgaatagctgaaaagtttcgaaacaaatattagggtgagactgactgtttacaaaagattgtacacaactctcaaatccttcctaacaattaaactgcta

SEQ ID NO: 181799 - DNA, 390 bp, Glycine max
agctatgagccagaatccttacttattttatttccttgcccaaggggagaatggcaatccttacccctggaagcaaataaaagaaggagaggagaattcctatcgaaggaagacaaaagaggagaggacatttcctatcctagataatgaaaagaagatgaaaggatattctccatcaaagagcgggataaggagaaaaaggacaacgaaaagtcccatcccaataatgggtgacaatgataactgattataatgataagtcccaacctaagaatgggagaaagtaaataaggaaggaaatatagtccctgatcaaataaacagaaaatatgtgcaggaaggtctcttgaccagacaatatctgaacaatacaaaattgtcccaaatgaa

SEQ ID NO: 181800 - DNA, 468 bp, Glycine max
  unsure (1)..(468): unsure at all n locations
actataaatactaagctatgcatggaaangtaattatgagattgattttcccttttaaacaccatttcctagttaaccatgcattatgtaccatgttcaattattttgtttttaagtgaaacgggtttatgatcccaacatggttggctcgtggtgcctaacacatggaactaagaatgtagtgtgaagtttcacgcttcccccttttttgtttttgttttgtagaggaaaacgcaaggatgagcaaacatgaaaacaaatggtatgcaattttgcagatcaaaaagtttggtgaacgcatatgcatgatgatgccatgactcatgcaaaatgtgaggccggaatatgataacggacaaatgcaggatatgtccattatgatgttatgaagagatgcttatgcgatgctatgatatgaatgcatttacggacacgagagctcggaatatatctcttctacttgtcatt

SEQ ID NO: 181801 - DNA, 375 bp, Glycine max
atgtacgtacttgttctttaagatgatatgttcaacgaattagatggattttctttcagttcacttgcatgtgtgaaacttttgatcttccattgactaactcatttgctcctctccaatggctcacaggattgacaataattcaggtctagctggagatgtgtccgtgccattcaaatagccgctgaagatgggatctttcaaatgtcagggcatgaaaaatttccggtgaccaattcagagaactctgtggcttcctgtgatgcttctagccttacaagagcaaaatcaactgatcatttgtgagtgagaagggtgtcattagggcgcctcccatctctgggtggaattggtatatgaaatcacaggacctat

SEQ ID NO: 181802 - DNA, 462 bp, Glycine max
  unsure (1)..(462): unsure at all n locations
ggtcgggttcagttntaattgagcgtcttgggcatttcatttattgttctaaaaggctcgggtcattaaaaggctacacatcttttaaggcacaaagcgaagatcggaacaatgaaacaccaatcccacgttctttaaaagattgtgacgaaaaaaatacagaggacaggaatccctgtgggaaaccccagaaaataaaacatgccgtgttggtgagcgcaatggcccctccggagaaagccctttttacgacgaaagccccttcgtagtttggggcccactttccctattgtcttttagggcttgggagactttcttcagtaacaggttcccttcgctgaacctgcatgggcgtacctttntgtcaaaagcattcttcacccgtttttggtacaaatgcccgtggctcatagcggccaaacgcttgccttctatgagattgagttgattgaaacatgcttg

SEQ ID NO: 181803 - DNA, 323 bp, Glycine max
cacatgcttggcctttcattgaccaacacacacacttgttcaaactcatgaaaaggaacacaaactccatcataatcatgcattcaattcaaaagagaagcatacaaccatttccacaaatcaagaaaagtgctgcactgccatatcattaaacaccaagttaaactgtgcaaaaagcttcaggaggagcaaatcaactaatcataaataaaactagcaggggatgtagacataaaggaaatactgtactaaaaccataattataataataaaaataataattggaaaagcaacaaaaaaaacaaaatcatgaggaatttaaa

SEQ ID NO: 181804 - DNA, 459 bp, Glycine max
  unsure (1)..(459): unsure at all n locations
tttcgattcattctatgtacccggggggtccacattgttttgntgttttttatcctcatttcatttactttttatacctccttttgacgtgcttaagccattttacttaagtcatttctcgcttaacttaaaaataaaataaatttccaccgaacgtttgaattgtattatccgttaacttcggttaaaatgaattccgaccgttcggtcgtgccgtaaccacgttggaaatcaaaaaagaggtaaaaaataatataataataaaaaaaacatcttttagtaaaataaagcggaaaatcaatcggacgttttctctttgggatttctcattcttaatcgaattgactaaacaactaaagtgaaactaaggctaaaatcaactcgcctagtcaagctcgtccataaaaataggtttttgacagttgtcatttcaatctcttactaagtaaaatggatcat

SEQ ID NO: 181805 - DNA, 310 bp, Glycine max
gagtcttgactttacagacataagtggacaccagcggagcatgtaaacagcagagtagactgcttcaacccacaatgtgttaggcaaccccttctccttgagcatcgagctagccatctccataactgtgcgagtctttctctcgaacactccattttggggaggagaatatgcgacaggaagttattgctcaaagcctccatccccacaaaagctttcaaacacgcgagaggtgtactctttgccacgaacacttcttaggacttttatccatggtccacattgatattcaacaagggcctggaacgct

SEQ ID NO: 181806 - DNA, 464 bp, Glycine max
  unsure (1)..(464): unsure at all n locations
ctaagctgcaaagagctagaggcacctcaggtagagtattanctcactttttacgaataactcaaaagagcttgtaagcttggacaatcttcaccttacaacccaatttagggtggtgaataggccctaaactcattttaaatagtatttagagcctatcttagatctatccattgttggcccacttacgttgctacgctctaggccaatagtcttgatctaccaaatagcattaacaagatcctaattgaaactccacttaggatgcaacagcagcaaaacgcaagaagaggcaaacaaccaacacaattattctgtttttcctttaatcttttgttagaaagccatcttaactacgggaacccctaagtccgtcttatttgcagactctttgtggctgacttgactgcaacctcaagggtggtgtttagtctcacaccgacaaaagatatgacttaaataga

SEQ ID NO: 181807 - DNA, 364 bp, Glycine max
  unsure (1)..(364): unsure at all n locations
cacaaaagtagcccagacacaccggaaagcccggaagatagagatggcactctttcctcacacaacttccgacaccacagaatcaaggccacgggcggatacacacccccaacaagcccccgcggaagagaggcggccccgcagagaggaagagcaaacaccaaggccaactccaaagcacgtgaagncgtgggcggcggagacctgcggagaccccgaggcagacgacatggcggagacagatagcgaagagctcggcgactcccaggtagagagcggcccaccgatggaacgcgccgagaggcccgagaagaaggggcccggcaatatgagcctcaaggggaaccgtcacacgccaaaagag

SEQ ID NO: 181808 - DNA, 478 bp, Glycine max
  unsure (1)..(478): unsure at all n locations
gacactaaaaactaagcttaagaataatggcctcatcaaacgactagtttccgtaggtctttcaanaataggcctcctatttttaatggagtgggttaccactattggaaaacccgcacgcaaatcttcatagaggctatagatttaaacatttgggaagccatagaaatagggctttatattcccaccatggttgctggaaatacaacaatagaaaagcctagggaagattggagtgaggaagaaagaagactagtacaatataacttaaaagccaaaaacataattacatctgccctaggaatggatgaatactttagggtatcaaactgtaaaagtgcaaaggatatgtgggataccctcaagtaacacatgaaggcacaacaaatgttaaaagatctaggataaacacacattaactcatgaatatgaactatttaggatgaatgcaaatganagtatacaagacatgcaaaag

SEQ ID NO: 181809 - DNA, 328 bp, Glycine max
aaaaagaatcaaatttacatttaaaattaatgtcctccctttttaaaatttgttctggcaaatgcaagtagacccgctaagcccgtggactatagaagatgagtgtgagctcaaaaaaaataagcttattaggaatgtacgcttcatgaagtacggcctttgtggttgcgggctttgcagggcacactaactcgtatacccaactctaatggctagatagcacttctctctctctctccacaagagagaaagaaagaggacaaaaactttagaaaaattatcccctatccatcttttataatcagattaaaaaatgaaaaattaagat

SEQ ID NO: 181810 - DNA, 461 bp, Glycine max
gggagaggatgcttcattggaggaaaagaaagagggttttaaagtgataggggggagcacaaaatcgaaggaagaaaaagggagagaagttgaactttgagttgtgtctcacaagactctcattcatcaaagttacaacaagtgttacacatgtttctatttatagactaggtagcttccttgagaagctttcttgagaaaacttccttgagaagcttctttgagaaaacttccttgagaagctagagcttagctacacacacccctctaataactaactcacctccttgagaagcttccttgaaaagattcttaaagaagctagagcttagctacacacacctctctaatagctaagctcacctccttgagatgagaagctagaacttatctacacaccccctataatagctaagctcacccgcatgacaaaatacatgcaaatacaaaaagaagtccct

SEQ ID NO: 181811 - DNA, 346 bp, Glycine max
ccatagatatgttctagcagatcatataagaagatattttgagagggagaaactccaaaaagaagaagtgaaaatcatagttaaccactgaactttgagttactactcagtattatataggcgtagatagttagttatgactaactaactgagaacataaaactaactcctgagagttcaggtgaatacggcaactctctgtataatactctaatactgggaggcaaaacatacaaaggactttcagatagtaatctgatcggaacaaagattggaagagagaaagaacaaagggattttattgactagtcggaaaatcgcggagaataggaaagagaactctcct

SEQ ID NO: 181812 - DNA, 460 bp, Glycine max
  unsure (1)..(460): unsure at all n locations
tcatacttaanacctttgtgtatctatgaaactttcattttanttttnccnnggaattacaatggaaaaccctaatggaaaaactctgtaaaacattatattccaccaggactcaaatatcgaataataattaaataatatccttaaagtataaaatctataaaaataattattagcaaaaagtatttcaagttaatataaataaaacaattataattgaccaatgcgtgttctttgttttcttgtttaccaagaaaaaatgatagggtggattatttttcaggaagcatagtcaaacttacgttatgccagtccctgatatatcaaattccaaatgtatgcaagaacggtcagactcaggtttgtgaagctccctctgtatagcaacattcgcccttcaaaaacaacaggtttaattntatagccttggttagtaagaaaaacagtatcagtatgtaca

SEQ ID NO: 181813 - DNA, 437 bp, Glycine max
  unsure (1)..(437): unsure at all n locations
agctntatctgatgatggggttcttattcttattaaaataaacgtcaacactttgtcagttaaaaacaaaaaaatgcagtaaagaataacacataaggatttataccgattcgtctctatcatcgagattatgtctagttattggtaattcctataaagttttcactatcttatcaaaagttataagtattcttcattgtcacttttgctcttaaaaagataagccctatcccatgtttgattttaacctagtattctttatcctatcaagtcactgttgactctaaacaaattaacaagatttgttggaagtttgcacaatgactaatatgtgatcatcttgtagacaaatatatcacttatcactttagccttttctctcaaggtttatataagtgtttgagagcttattatctataccgagatttacagaaagc

SEQ ID NO: 181814 - DNA, 440 bp, Glycine max
cccagctggccccggagagctagggggctttctcattttgttccgccttcaggagaacttccttgaaggcccaagtgggcctggttgctatttgcaccccctgtttactaaatacaccccttgcctttttttgctgattctttttccgtaatgttacggaaacttacgaattacgtaacgatacttgttttctttccgtaatgttacggaaccttacggattacgtaatcatcccttttttgccttccggaatgttacgaaaatttacggattgcgcactaacacttccttttgactttcggcatgtcacggaacttcacggattgtgcaacaatgttttcttttgactttcggcatgtcacggaacttcatgaattgcctaacgatgggtgccaagtacctcgaagtggtcaaacgagggttgcatcccaacaacggat

SEQ ID NO: 181815 - DNA, 381 bp, Glycine max
aaggcgcgccttggggccgagggatacaagcaatagaatggggtcgattatacataaattttccccaatagcagactgaacatcagataggtattgcatcggcaactcaaaactcttggccatttccagagaaatagcatatcagcattctagcatggatacttggaggaacaggtatttgttgaacaaccccctggctatatcaagattggacatgaacataaagcgccaaaattgaaaaaggcactctatggactaaaacaagccccaagggcttgatatagtcacattgaggcttatttaatgaaatctggctatataaaatgtccttatgagcacacattatttgccaagtatgaaaatgaaggaacaatgcttata

SEQ ID NO: 181816 - DNA, 455 bp, Glycine max
  unsure (1)..(455): unsure at all n locations
tataaaactacgctgttacccatgtngaattgctactattttcngttcatatcccactaatggnctcctttngaagttgtttatggtttaacccactaactcctctgatcttttgctaatgtttctgtttttagcataaagaaggtcaagcaaaggcggactatgtgaagaagcttcatgagagagtcaaagatcaaattgagaggaaaagtaaaagctatgctaaacaagccaacaaagggagaaaaaaggttgtcttcgaacccggagattgggtttgggtgcacatgagaaaagaaaggtttccggaacaaaggaaatcaaagcttcaaccaaggggagatggaccatttcaagtgctagaaagaatcaatgacaatgcttacaaagttgagctgcccggtgagtataatgttagntccaccttcaatgtctctgatttaatctcttttgat

SEQ ID NO: 181817 - DNA, 428 bp, Glycine max
agcttgcctcaaagaggttcatttggtcaaggcggccgaaggaactagttccgctccggagtacgacagtcaccgctttaggagcgctgtacaccagcagcgcttcgaggccatcaagggatggtcgtttctccgggagcgacgcgtccagctcagggacgatgaggatactgatttccaggaggaaatagggcgccggcggtgggcatcactggttactcccatggccaagttcgatccagaaatagtccttgagttttatgccaatgcttggccaacagaggagggcgtgcgtgacatgagatcctgggtaaggggtcagtggatcctgtttgatgccgacgctatcggtcagctcctgtgatatccgttggtgttgaagagggccaggaatgtgagtatggccaaaggaggaaccgggctgatgg

SEQ ID NO: 181818 - DNA, 456 bp, Glycine max
  unsure (1)..(456): unsure at all n locations
tctattgacagccactcatggcacatgtccttatgcttccttcctttgngagnnattgttgcaatgacatgtcggcatggcatccttacatcaaagttgtaaaatcagcacacaagtaggttaggaatgaaaaaaaaaaactataaagaacacaacctgttagttgccatactccacaagtgcatgtccattcacctaaattgacctcaaccttattcccccacatgtggacctcacatctcaggcccatgttatcaccacaccaaatgggagtccattgattagcaaaatgaaattctttttctagtcttttatactgcactggacataatggtccaggctttccagaaagtttaaccttgtgggcagccatggttctcatgatataacttctaatttcttcaagcattgtgataataggcttgcacctatactgcagaattctggaattgaata

SEQ ID NO: 181819 - DNA, 404 bp, Glycine max
ttatcaaaattacataattataatacttaacagatgataagtaaaattaatcatatttttttcatttgtaaaaaattaaactcacatattaaaagatttacaattttcaaatacagtgttcaattaataaagttaaacccgttaatgataattaagtgtagatagaatgatttcatatatttattctgtcaaaaagtctttatgaatataaaaatttataacataaggattatgtttcaaacaacttttttctcttttaaaatagtttcatactcttttactagttaaaaatgagtttattttttttatccaaacaaaattaatgaactcaagaccactttttaacaaacttactccgacaatgtttttttaattataatctattataacaataatatttcttt

SEQ ID NO: 181820 - DNA, 206 bp, Glycine max
  unsure (1)..(206): unsure at all n locations
ccgcacacaaagaacatcgccaaacagaacacgagagccctcgcaaanaacggaaaagagcgggacaccaccggcacgcgcacgcaagaccgccacagcaaaggacacgacagcnaaagcaggagaaaccccgccacacgagccacggccaacgcacaagaancaaaaaaaggacaaagaccacaccacaaacatagcaacacgca

SEQ ID NO: 181821 - DNA, 463 bp, Glycine max
  unsure (1)..(463): unsure at all n locations
tgtgcaaatggggtcatcaaataacaaacaaaattcaatangattaatacctcccaaacatcaatggtaagaagtggctgcaagaaattaagataaaatcacatcagaatttaccagggaaatgaactcattagacccaactatcattcatatttcaagataagtaaggaacaataatattattactacttacataatagcctccccaaacaagggggttcacagcattgggactcttgagcaccactagcttgttgtcctcatctggtgaaggaggatttgctgcattttccccatcaaatttgcttgctctatctatatttcatcaacaaaaaagtgaatgaacaagaaggatatgtaactctctgtctggataaatttcttgataagcacttataagtgaataacataaaaaaagttaaaataaaataaacttataagttaaaattgacttatgcataaa

SEQ ID NO: 181822 - DNA, 349 bp, Glycine max
attttaatatgccaaaaagatcccacagtcggctaaaaacacttgcagggctacagccaatttccagcctcaaagctcgacaaaaagatgaagatcctcaaagataatttttgagccggctattgactatgcatcctaacggtttaactggatgaatcactaacccatcttggtgactaatatttggtatgcatgcctattgtaatgcactactctaaaagagagctttggatgaaaactgggctctcaaatcatttaccccttctcttaaggcaaaaaacctttttcaatatgtaaatataaagtcacttacctaatcatgtctaattactaccgaaaaaactaagac

SEQ ID NO: 181823 - DNA, 407 bp, Glycine max
  unsure (1)..(407): unsure at all n locations
ctaactgactgattgttaattcgttaaaataacattgcttatgtttttaaactccaaatagntgaaactttatcaggtgaattaataaaatattttaataatattaataatctacaaatacaaatatgtactaaacacttgttataatggtgtggaatctatgtaattttaattttctacattttatataaacgagttattcacaaacttttacttttaatgtaagtttgtaaaacttggacttgctcgttaaataattgagtttgtttgtaaataaacaacaaacaaacttgtaaacattaacaacgagctaaataattacaaattttgttcatttacacctttattatttattaaattgaaggttgtaacatggtttattgacagcacacgtaataataataagc

SEQ ID NO: 181824 - DNA, 395 bp, Glycine max
gaccgggactaattctacaaaatctttctcttcacgctttgataacaattaaaagctcctccaaattgtgggattttctagggaaaatatgacttacccatttagcttagaaaaattggctctcttaacaaaggtttccttatctaaaaaaaataaacattcaccccctctaagaatctatctctaaaaaagctctcgtataaacagtttttagagaataatgtttacagatagaatcgtttaagagacaattgtttaaaaagagtatgttttttaggaacaattgtttaaaggcacaatcggatagatcagaaatattataacaattcctcaaaaatgatatgcagaaaatctacacatcacatagaagagacattgtttgcataccatggaga

SEQ ID NO: 181825 - DNA, 397 bp, Glycine max
ttgggagccaatccaatccttgtgttcggactctcagccacttatgatagccgccgatgatcccattactgcttcccctaagctctctgtcctttcttcacgccgcatcccatgccttgcgaactccttggagtaccctcgcgttgtggtcactgaaaccttgtgcgatgaaaggcgtgatgctttcgtctgatggtactcctctcatgggacagccaagctgtcttatggcgaggacgggattataattaatacaaccccttgttccatcaagggaacatttggacatccttcgcatgaagatagaatcctgattcttccttccttctagcgagggaaccaattaacagacgcccctccatgttagccaagagttggtcccaattcgcctttcctt

SEQ ID NO: 181826 - DNA, 464 bp, Glycine max
  unsure (1)..(464): unsure at all n locations
taagaaactcaagctttgcagagaacatgggaccacncnttttttttntttttagccgcancnagncaagggctgagagaccatacaagcnncctaacgatctctaattatgtgggccattaagtctatcatatgctgacaatagccgagaagcccatgaatctcttcggggacggagtaggtgtccgccatcgccttggccttggctaacaagcggggaagttcttgactcccgttcaaggtaagagcaaaccgatccatccacatggttgcctcttggggtaaagagtcgatcacccttcctctagcctctttttcctcgtatacttgcgcatactagtccgcgatcctatgctcgtaggccgtggctagacctaactcttcttggtacttggcgatgatagctagcatgttggtctccgtctcgcataaacgttgagacaagcttctattggaccttgaac

SEQ ID NO: 181827 - DNA, 433 bp, Glycine max
agcttgcctcaagaggtccaggttggactattctgccgaaggaactagttccgccccggagtacgacagtcaccgctttatgagcgttgtacaccatcagcgtttcgaagccatcaagggatggtcgtttctccgggagcgacgcttccatctcatggacgacgagtatactgatttccaggaggaaatatggcgccggcggtgggcaccactggttactcccatggccaagtttgatccagaaatagtccttgagttttacgccaatgcttggccaacagaggaaggcgtgcgtgacatgagatcctgggttaggggtcagtggatcccgttcgatgccgacgctatcagccagctcctgggatatccgatggtattggaagagggccaggaatgctagtatggccagaggaggaaccggtctgatgggttc

SEQ ID NO: 181828 - DNA, 453 bp, Glycine max
gaaactcaagctgcttactgcatttaagataaaggggattccttttgttttttaaaaacatgttcataagtgcatagatttctcttgaggatgagaggccctctcaaagagtcaacctcttgcattctcataaggtcgagccctttggtactagtacctattggcttgttttcataagactcaaagtcctctatcatttacattttcaaagactatcgtagactttcatcatgcggagacaattatggtcattcacacctttttttgccttctagagacaatcaagtccgttggcacgcggagacaaattatggtcatccgctttcttttccttccggagacaataaagttcgttggcacacggagacaaattatggtcatccactctccttagccttctagagacaatcaagtctgttggcatacagagaaaaatcatggtcatcggcacct

SEQ ID NO: 181829 - DNA, 447 bp, Glycine max
  unsure (1)..(447): unsure at all n locations
tggggtatgagtngatgatgactcttaccctcttgcataactnttatgncnaacaagnnntgcatagctcctgacaccatttggaatctatcatgcaataacaacaattgcaattaataactattttttcactgtagtctttggctagacacaacagaattgtgatttcattgtgtcataaaaaacataaaaaaaaaaaagcaatggatcacagttccattgggtgctcatttttttattttttatttacaaataaaatggaatagtgattttgttgtagacataactacaacaaaatgatttcgttgaacacaaaatcacaaaaaaaaagttagtaccttagagcatatacacgcaaaagggaaggagaagagttgggaaggaaaggagaatagaagagctctgaagggtttataagggaaggagaaaggaatgattgtggttggg

SEQ ID NO: 181830 - DNA, 450 bp, Glycine max
  unsure (1)..(450): unsure at all n locations
acctaagaaactaagctgcagcaacgctacgacaaaacattnattctgttttccanngagncccgaanatatcgagacgctcgaaattgaaaaccgaggctcgcagctaattctaacgacaataacatttcactcggaagtctgattgagtcccgtaatatatcgtgacgctcgaattataaaaccgaagcttgcagcaaatgctaacgacaataacatttcactcggaagtccgattgagtcccgtgatatatcgagacactcaaaatttaaaaccgaagctcgcagcaaatgctaacgacaataacatttcactcggaagtccgattgagttccggaatatatcgagacgctcgaaatttaaaaccgaagctcgtagcaaattcgaacgacaataacatttcactcggaagtccgattgagtcccgtaatatatcgagacgctcgaaa

SEQ ID NO: 181831 - DNA, 421 bp, Glycine max
ctccgcccggatttaagtcccgcggctgcagctgatatgagaatctctattttctattaaccttctcagtttgtgaggccaattcccttgataatgacattgttaaagcatgaaaccctgtcaaaaattaaaaaacaaacaccccatgtaaatacctagacaaaaaaatctaaaattaacgcactcatgtagatgtgaagcacacacgaaccctgtaacaatacattcttagactatgtttgaatggaggattttaaagagaagtagcacaaatgataaagggacactaagcgggtgtttatattagcttattgcgttgaaacaacttataatcaaaccacaatggaataaatagaaaatggtgaaatcattatgatccctataatcgatcgatctaacatctatgaacaacagagaggga

SEQ ID NO: 181832 - DNA, 415 bp, Glycine max
  unsure (1)..(415): unsure at all n locations
tatacagnnngacgcacagaagccgaatgctttctcattatatccccgcgnttctggagccaggggtgcgctactccacatactccacgattttccgcacgcacccggatcctcaggagctcactgccagactctggattccagggcatgggtttgctctgaatgctaaagaagaaccctggaagctcctgaggaaggatcttactactctcgcccagacctagagtatgctttcatactccaaccttgcccccacctctcatatgtccgatcttatcatggacacggtgaggattggttacgaactctctatgaagatggacatggacatgggctccattatttccggatagatttcccaggtggcccaatctaactcctcttggataggagcacctgcacttatcactgtctt

SEQ ID NO: 181833 - DNA, 298 bp, Glycine max
  unsure (1)..(298): unsure at all n locations
ctaagcttctcccccaatttctataaatagggggagaagngaagtgatttttgtgttcatccccttaggcacttctctctctttcgaatttgcttggaaaaatcgtttccgtgaagaaaatccaagccgaggcgcttccgaaacgtttccgtaacgtttccgtgaggaattttgcgaaggcttcgaccgttcttcgacgttcttcattcattcttcatcgttcttcgatcttcaacaggtaagtacctcgaaccaagcttctcgattcattctatgtacccgtggtggtccacattgc

SEQ ID NO: 181834 - DNA, 452 bp, Glycine max
  unsure (1)..(452): unsure at all n locations
taagctcagattcactntacaacaagtttgaaacaagaacttgttattatgacaacttgtatgtttgcaaatcagtttttctcttcccagataggatgccaacttgagacactagaataagaatgtgcataacgaagggtcttgtttatgcagcaaatagaaacacctttgaataagaatttgacaaacaagtcttaaaaaccaatgaagttttagttgctcaaggagaatgacctcaccaaaaaattttcaaaacctttttcttctttttggaccaaaaccaagctatatgaatatgcactttcagaaactagttaaaatagcatattcacatacaagctaattcaaacaaatagaaatgagagaagcattatatttatcataagataaactatattcttagcacccaaccctcatcaaacaagtaaatattcaagagatgttaagtttat

SEQ ID NO: 181835 - DNA, 403 bp, Glycine max
gaaggggggagcaccgaaatgaaggaataaagagggagagaagtggaactttaaagtgtatctcataagactttcattcatcaaagttacgataagtgtttcacatggcttctcttatagaaaggtagcttccctgagaagcttcttgagaaaacttccttgagaagcttctttgagaaaaactttcttgagaagctagagcttatctacacacacccctctaataactaagctcacctccttgagaagcttccctgagaagattcctaaaaaagctagagcttagctacacacacctctctaatagctaagctcacctgtggcgtccctaaataatgattggtttaatagtaataaatcaaatagcataaaccatgggaaattctttcttttctcttttttc

SEQ ID NO: 181836 - DNA, 462 bp, Glycine max
  unsure (1)..(462): unsure at all n locations
tgcgtaccccaccatttntccattgtgaaatattggttatgtgtccactatcattgttatcatttctttctccgtcattgagggaaccacttgacccgctagatccctctccctttgggcgtattctttgaaagatccgtgccccctcttgcatatgctctgtagttgcatcctatccagagtcatatcagaattgtactgatactgcctaacgaaggcaaccattaggtccttccaagaatggactcgggaaggttccaagttagtgtactaggtaacagctaccccagtaagactttcttggaagaaatgtatcagcagttcctcatcttttgtgtatgcccccatcttccgacaatacatctntggatggttcttggggcaaatagtccccttgtactcgtcaaagtctggcaccttgaacttgggaggggtgatgatatagggtactaggaacaactc

SEQ ID NO: 181837 - DNA, 192 bp, Glycine max
aaaaagccagatagcaaatttaaaaccgcgaaaaaaacccgacacccgcgggaaaacgggccgccaaccagcaccaaaaggggggactgacaaaagcgcgcggtcaagcgggaaaaggggaaaccaggaagggcgaaaaaaagaacaaaatagagccgaccgcggccccaaggaagacaaccaaaaaaggcc

SEQ ID NO: 181838 - DNA, 418 bp, Glycine max
  unsure (1)..(418): unsure at all n locations
gacctataaaactaagctttaattctatttctagataaaatttatttttattatctatgccattaatgagttgaccattatttgactatagaattttctctgaattatccttattttttctagactttagcttaaaaacttaagagcttaaccctactaaggtatcctatggtaatatttcattttctaccatttcaatagtctaaaaatactactcaatcacacaataaaacaataacattgtctactacacacacctgaaaaattgggatgttacagtttgcatgggaaaatttgatcgagaaagacaattcatgaagattttaatttagttatttttntataacagttactatctttgttttaattcattattttttaaaaagagagactatctcttgttttaattagttatttt

SEQ ID NO: 181839 - DNA, 450 bp, Glycine max
acctgcggcatgcaagcttatgcgcacattaccttactaacgtttatttgcacaagacatcctattaactaagaaaaatgcacccatatacaatcaaggtagcttcattacctagattatttacatgtacttccaaggtgtatttgttatttacatcacacacgcctccttggctgaatttacatacatgcatactcaaaacatattggggtaccaaaaactgcacatgcgctcatcttggtatttccaatacccatacatatacaaacttcacgatgaatcttgactacctacacaataaggtgctacatttcatgcttttttttcaagtttttgctacctaaagccacatgcaaattcaagcatattttcctttgctgactaaaattgtattcaaattagaaggtatatattttttcgtaatatgttttcttcacataacatgcaaca

SEQ ID NO: 181840 - DNA, 463 bp, Glycine max
tatgcgcatatttccttacatacgtactcttgcacatttattttaaccgaaaaagtgcacccatatacaatcaaggcggcttcgttacctagattatttacacgtactgccaaggtgtatttgttacttacatcacacacatcttcttggctgaatttacatacatgcatactcaaagtattttggggtaccaaaaattgcacatgtgcacatcttggtatttctaatacctatacatacacaaacttcatgatgaatcttgactatctacacaataaggcgctacatttcatcccttttttcaagtttttgctacctaaagccgcatgcaaattcaagcatattttcctttgcggactaaaattgtattcaaattaaaaggtatacattttttggtaatgtatcttctttacataacatgcaacatatatatgtatatctttttgtgagacatattgactac

SEQ ID NO: 181841 - DNA, 419 bp, Glycine max
  unsure (1)..(419): unsure at all n locations
agctacaaatatgtttaaatccntcttcttttgtaaatcaaatcaaatctagataagataagataagataagatctagatgaaataatatctagatgagatcaaatctaaataatatctagataagataagatctaattttatagaataaattagtctgccctcttcaagtccaagcccaattctagatccaagcccaatgctagattcaagcccaatgcttcattaattcctgaaattagattaaaaacatcaaattagctgaatggcccaaataataaaactgcctaattaattgacaattaagaccaatcaataattaaaatggtgcaaaaagggtttagaaaatagaagaaaatgatggcacatcagtccacatttggtttcatgtagttttattctcgttncatttacttttta

SEQ ID NO: 181842 - DNA, 464 bp, Glycine max
  unsure (1)..(464): unsure at all n locations
cgcttgagccaaaatcctgactcaccataaaccttgacccatggttataatgccaatccttaccctcggaagcaaaaaaagaatagaggggaaatttccgatcaaagaaaaagagaaggaaaatttccaatgaaagcaaaaaagaaatgaaggaaaattccccaatcaaagagtgggagaaagcaaaaaaaggaaaagaaggaaaattccccaatcaaagagtgggagaaagcaaaaagaaaagaaaggaaaattcccaatcaaagaatgggagaaagtaaaaaaggaagaagaagaaggaaagaaagctcctgatcaaggatcgaaagaaaccagaagaaatgtgcagagaggtctttggaccagacaatatctgaacagtacagaattgtcaccaaatgaacgaaaaaagaaggaaagggaaccacgacctanaatagtcttctccctttgattaccaacca

SEQ ID NO: 181843 - DNA, 343 bp, Glycine max
tatactcgatctgaatattctgcttaaatgtctggtctcaatgaaaattgtttataagggttaattacaaggattaacccctttatagattaaatgtaagcgtctaagggccggagttttattttgacacaataatttgtttctcgggactgccctttaaaaatgtaagaccctatacctaacctatagatgaaattatttgaaattgtgcacaaatgggctgacacacacactgatcagtgtactatatatggctttatgtgagcaagatatctaccccagctccttatttgcgcaattctttctccaattttcaacattgtgggattcacaccatgaacat

SEQ ID NO: 181844 - DNA, 464 bp, Glycine max
tgtgatagaggaaaattatatatttatcgtcaatacatttattattcttttaaaataaagtaaatataaaaaatatgactttaatacactactgcaggtgtattaatgcatcttctctgtaagttattcaatttaatgatttgaagctgatgcatttggttactcatttgaattttgtctttttcaatgaacatgttttgaaaacacatatggcacgcgcagattgcttgctattttcattccaagtataggtcgaagatatctagcacctataccgaaattggtaaatttggattagcatggcatacaattgaaaagttaaattaattgctttcttttcttaagtgcttccatatgttttgatatgcagaaatagaaacttatttgtttcaatgtacataaagtcgaatttgggaaaatatgaaattgggaaaatatgcaggaaataccttgcaaatccctta

SEQ ID NO: 181845 - DNA, 375 bp, Glycine max
  unsure (1)..(375): unsure at all n locations
agctcaaggaacacagaagacttatgtgttatntggaaatgnaataccgaccattgtgcctcacagatatgggacaccccatggcgaacctaggtaatgaagccaaattcggaggatgcggacattacagatggatgcatccaataaaagggaggaccattccaaactatgaggatcctagatgtccatttatagcaaaatccggaggatagatataatgtttattataaaaccacgggttattgggaaaattgaagccatatatgcataataaaacacaacttgaaggctcaataactaaaggttggctttctgaagagatgctaactttttgcacaaagtcatggcggaatgaaatcgaaacaagattcaatc

SEQ ID NO: 181846 - DNA, 411 bp, Glycine max
ggaccataaaactaagctttatccaggaaatctgggggaacttcttttcttggtattcctagggatgggcctcccttctttctcttttccttcgagcatctccatgggaaaatcaccattgaagtccccactgaagctaacgatccaacctccatagaaccccacaagcaagttccatcaagtggtatcagacacatgagcttcttgtgtcgagggaaggatcccatagatgaagaacctcggattagatcaaatctttgcagatggagaggatgatgcaatctacccccaaggtattggatagaaactccaagagctatgcttagctactaaaaagccctaggttctatgaacttcggtagcttttgacccagggcaaggtggataactattcttgtaatataaatactt

SEQ ID NO: 181847 - DNA, 313 bp, Glycine max
aggaagctacctattctataaatagaagcatgtgtaacacttgtgtgaactttgatgaatgagagtcttgtgagacacaactcaaagttcaatttctctccctttttcttccttcaatttggggctccccccttcttttttctctccctctttctgtcctccattgaagcatgctctccaagcttcttatccaaggctcatcttgggggtgaagctccttcttccatggcttattccctagtggatggcgcctcctctcacctcttctcctttgtcttccgctgcatctccatggtggaaaatcaccatttaa

SEQ ID NO: 181848 - DNA, 458 bp, Glycine max
  unsure (1)..(458): unsure at all n locations
cttttggagtagaaacatgggaccaactcattttattttttaaagaaagncgcatctagtcaagggctgagagaccatacaagtttcctaacgatttttaattatgtgggccattaagtctatcatatgctgacaatagccgagaagcccatgaatctcttcggggacggagtaggtgtctgccatcgccttggccttggctaacaagcggggaagttcttgactcccgttcaaggtaagagcaaaccgatccatccacatggttgcctcttggtgtaaagagtcgatcacccttcctctagcctctttttccgcgtatacttgagcatactcgtccgcgatcctatgctcgtgggccgtggctagacctaactcttcttggtacttggcgatgatagctagcatgttggtcttcgtctcgcataaacactgagacaagcttcttttggaccttgaac

SEQ ID NO: 181849 - DNA, 372 bp, Glycine max
acatagcacggacaaagaagaggagaaagcagctagctcaaggcccaaaaaaaacattgctcagcattaatgccagacacacaccaacagggcagccatcgcccgcaaggaccaataagaacgaaatctatccccggcccatgaacaccaaggggcaggcgaacacgcccaagtgtaccccggaaaggaggctaaaggaatagggtgagacgaacgagaaacccacgctgaatcggcgcccaacacggaaacgtcccaccacccaaacaatggcattactcatccaaaaacaacccttctccttacacaccacccagaaatccacaaagaccaaccctaaagcaaccacaaaacccaccttccacacaacca

SEQ ID NO: 181850 - DNA, 376 bp, Glycine max
  unsure (1)..(376): unsure at all n locations
ctattacggacctataaatctcaagctttgctgcaaaatacctttagatgttgtttttttttttttncnnanaannnaatncgaaactttttaggtttgtgctaaaggtggtcttcctcattggaagtgcggtaaacaggctttgtggttgatttagggatggcctttgtggataactgggtggtgggtaaggagaaaatttgttattggctgaataaagatattgttgggttggtgggaaatttggccgcacaggaatggcagtcacagcatgggtttctccctcattctcaccctccttatatgccccagttttctcaagcgtcctaaaaggatgagcaaatttgcctctttttggacccacattgattctttt

SEQ ID NO: 181851 - DNA, 440 bp, Glycine max
agcttgctggtggagcttctattgttgctagatctttgagcttcaatgaggtccttcaatagtgatttttcaccatggagatgcagcggaagacaaaggagaagaggagaggggagacaccatccactaggaaataagccatggaagaaggagcttcaccaccaagaatgtgccttggataagaagcttgaagaggatgcgttatagaggaaaagaaagagagagaaagagagagggaggagcacgaaattgaaggaggaaaagggggagagaagttgaactttgagttgtgtctcacaagactctctcattcatcaaagttacaacaagtgttacacatgcttctatttataaactaggtagcttccttgagaagctttcttgagaaaacttccttgagaagcttctttgagaaaactttcttgagaagctagagctta

SEQ ID NO: 181852 - DNA, 443 bp, Glycine max
taaaaaaacaagaaatgaattgaatgtctctgtttctaaaacttacccgttgaagaacgaagaacagatgaaaaccttcgcgaaatcactcacggaaacgttacggaaacgttacggaagcgcctcggcttggattttcttcacggaaacaattttcctaagcaaattcgaaagagagagaagtgcctaaggggctgaacccttttctacttcacttctccccctatttatagaaaattgggggagaagcttgccacccagctcgcccaggcgagctcagcttgcccaggtgagcagggttgcttcctccagaagcaacagccttctggaggaatcttctggagggcccaagtgggcttggttgctatttgcatccccaattttactaaatacacccccctggctttttttgtgattcttttttcgtaaaagtacgaaaactt

SEQ ID NO: 181853 - DNA, 250 bp, Glycine max
ccttggaaaaccccccctttcgtgagagacgatttttttcctccctttttggaaaaagcgaaaccacaaagggggaacgcgcgaaaaattccgaacgcccaaaacaccgtgagaacgccgaaacgaaaaaaaacaagatcggaaacccgggtcgcaccaaaaggggaaatgaaactcgagccccaacggccaagaccaaaaaacacgagcctgagagccccatgggagcacgcagaccagccacgcaaaa

SEQ ID NO: 181854 - DNA, 297 bp, Glycine max
cttgagagcatgacatgagtctgtgagtgattgtcaggctctcgaggtggaggagacatacccactacttgtatttcttcaatcctacattgttctcttccctttgctgccaaggaagctttccacatatggagagctaaatgctctattggctcttccttgtagggcctcgatgtacatacatgtatatctattaaatgatgctctatgtgttctctgcgctatcagtactacattccgtgcgcttttgccgcatcacgacgatcctgctatgtaggagcattaacactggaaact

SEQ ID NO: 181855 - DNA, 271 bp, Glycine max
cccccataatagctaagctcacccccatgacaaatacaaaaaaattcctactacaaagactaactaaaatgccttaaaataccatgctagaaccctggactactagaatgaccaaaatacaggcccaaacgaaggaaaaacctattctaatatttacagagataagcgggctcatacttagcccatgggctcgaaatcactctaaggtcatgagaaccctaaggccttccattggatctatggcccaatctacttggtggcttctattcaa

SEQ ID NO: 181856 - DNA, 296 bp, Glycine max
tgcttacatgggcaactacttcttagcagaattcaccccctaagggtgtggtgtgaatccacctagtagccatataagggaactcctatgcgatgctagactaacaggcaccataccgggcaatcacaaatattaatgtatttgaacttactgctttaagaattctcatgcgcccagccagttatcatatctatccgaatgaccacaagtcatgtcgagataccaacatcgtaccactatgcttgaaactataaaccaaggtaacaaatcaccacacatgattttcatcaagctac

SEQ ID NO: 181857 - DNA, 242 bp, Glycine max
cacaaaaagcttctaaacatagaaactagccatatagtaaagctaacattggggactaatgtttcttacatgggcaactcctcattcagaattaaccaccagtttatgggtttatacctctgtaacaattaagtaactcctatactatttagactaacagcacatcggggcttccaaaaataattattaacttacgctttaaattctcatgcccaccagttttcatcatatgatagtcatag

SEQ ID NO: 181858 - DNA, 301 bp, Glycine max
gacgctgtaaattgaatacagaagctctcagctacataaaacgacaataactttctacacggatgtccgattgggcaaggcaacatatcgactcgctcgatactgaatacaaaagctgagagcatattcaaacaacaatgactttcacctcggatatcccattgagtccactaatatatcgagacgttggaaattgattataggagctctgagaaaattctcacgaccataactcttgactcggaagatctatcgagacccgttatatatcgagacgctcgatattagaacgagaagctcg

SEQ ID NO: 181859 - DNA, 381 bp, Glycine max
ggatctttgaggctcaattatgtcctttaatggttgatttccaccgtggagatgcatcggaagacaaacgagaagacgtgagaggaggcgccatccacttaggaataagccatggaagaaagagcttcaccaccaaaataagccttagataaaaagcttggaaagatgcttcaatgggggaaaagaaagagggagagaaagaaagagggggggagcacgaaattgaaggaataaaagagggagagaagttgaactttgagttgtgtctcacaagactatcattcatcaaagttacaacaagtgttacacatgcttctatttatagactaagtagcttccttgagaagattcttgaaaacacttccttgagaagcttctttg

SEQ ID NO: 181860 - DNA, 317 bp, Glycine max
taaaaattcttgtttttaagaaataaaaataatgaaattcaatatttccttccctttattgtgaaatgtgggaactaaaaagtgagggaaacccttccttttctgttaccaaataggtggcaacacaatcacagttgaatctgaatattgatctatttcaaggaatatattcgacctccactctgcctgtcagcagtgtgcaaagaacagcctattcatttcaatttttgatccaatgtttccgataaatatttgtggggatagcaagcatgtattcatttgcacgggtagcaattgtatagaatatatattttaaa

SEQ ID NO: 181861 - DNA, 300 bp, Glycine max
cacattcccgaccacaaaccaaaaccaaagagagcacaactatatataaaaaagtgtatacatgagggttaaaggtacacatattttgggatgatttaccccatgtacatgtggatcccaattgctaacatgaagatgctcacgatagcaaagtagaggatagcatggatcaatattgataatccactggtctgaaagttaccaaactctatgaacctgcctcttccaagtatctggaccaagagccctgtactgaggagaatgaaaagcaccacagaaacaaaaactggcccccaatct

SEQ ID NO: 181862 - DNA, 237 bp, Glycine max
ggagtgagaggaaccctaggaggattatagtaaaataaaaaaaaaaaggaacagagggagaaaaagacaagaaaaaaaaaagaagaaaagatgagacgaagagaacaaggaagaaagaaagaaagcaaagaacgaggaaaaaggggagaagaaagaaaaaaaaagaaggaaaaaggaagaaaaaggaaaaagaagaggaaaaggggaaaaaaaaagggagaaaagagagaggaaaag

SEQ ID NO: 181863 - DNA, 375 bp, Glycine max
  unsure (1)..(375): unsure at all n locations
tttttctgaatccatcaaggttccagaatcaagattccagaataatcaagatcaagaatcaagactcaagattcaagaatcaagagaagactcaatcaagataagtactaaaaaagtttttcaaaacattgagtagcacaagaatttttcacaaaatcttttaccaaagagttttactctttggtgatcgattaccaaaaggtagtaatcgattaccagcagccaacattgttttcaaaactgatttacaaagctgtaatcgattaccataatcatgtaatcgattaccaatgttttanaacgttagatttcaaatttcaagagtcacaactagtgataaaacattttcaaatcattttaaacttgtgtaatcga

SEQ ID NO: 181864 - DNA, 122 bp, Glycine max
aggagggaagaagggggaaaaaggaaaagggaagagaaagggagggaaaaaggaggaaaaagaggggaaaaggaagaggaaggaaagggagagagaaaggagagagaaaaaggggaggaaaa

SEQ ID NO: 181865 - DNA, 319 bp, Glycine max
gagagcacgaaacgaagagccaatgggtgatacatggaccgagatgaaaaagatcatgaagaaacggtatgtgccggctagttactcaagggacttgaaaatcaagctccaaaaactaacccaatgcaacaaggggggtgaagagtatttcaaggaaatggatgtgctcatgaatcaagcaaatattgaagaagatgaagaggtaactatggctcgatttcttaatggtttgactaatgatatcccggatactgttgagctgcaggagtttgttgaaatggatgatttgcttacaaagcaatccagtggagaacaatta

SEQ ID NO: 181866 - DNA, 363 bp, Glycine max
gaacttatgttttcacaaaagagttatggattgtcattcactgattagcaaaacaataatttaaagagcagttcaatataaaacttgtgtgcaaagtggtgtgagtaataagccttaagaaatactcagagaaacttaaaaatagtaatagaaacacttagtttatactagttcactcaacttgagttatgtctaattctccttcacaaaactatgaagagttccactaatcaatatttgattacaagtattctaacttatcacttttggctttacaagtattctctaggtcactaccaactcaaccttttgactcttcctgaatctaagaacactcaagtattgctttgttactaagctact

SEQ ID NO: 181867 - DNA, 336 bp, Glycine max
aacttggcttatcgcaagagtgaaaaacagcactttgcccaagttgcctatgtaacctgaaattgagaggaaatgattattaaacgcacaaaacaaaagtataaattatctattacctatatgtaaaaaaaagtacttatagtattacaaaacaaccataaattgggaaagttttatacaatatacacaggttttatacacaaaagttagtcgtattcatcgactaacaactcccccaaatttactgttttgcttgtcctcgagcaaagagaatagctcacttgtcctcaagtggtaaaacatgcagtgtttatgtacaaaggtgtatgcattaaa

SEQ ID NO: 181868 - DNA, 374 bp, Glycine max
  unsure (1)..(374): unsure at all n locations
ttttttcttttctcatctaaancaattctttcatctgacatcattttccaataatggtcgattggaatgtccatttgtttttgtatcctggctgattgcaaatgtatttcgaccggaagtacagcatcatgcccataagtcagtcgaaatggggtagtattagttgattccttacgagaatttctacatgcccatagaacttgatctaacgttttattccaatttcttggttttttgggcaatgtgttttttaatcaagttaattacaatcttattggctgcttcgacctgaccatttgcttgcgcgtaatatggtgttgaggttaataatcgaaagccagtttctttggcaaattcttgcacttttcgtccag

SEQ ID NO: 181869 - DNA, 370 bp, Glycine max
  unsure (1)..(370): unsure at all n locations
tcgagctntgaccacagctcttacttcccgcgatgcatgcttttcatgtccgcctgagcgggcttatagcctaaaccatacttcccacgatctccttgggcatttatcaggctacttatgccaccgttgactttgtctaaacccattccgggttcataaccgttccccaacataactcgggccatcattactgttgcatcagacagacaaggctgcccacagaaggagtccacggaggaaatgctgaccacctcaaaagactggaaagtggtgtctaacgatacttctgcggcttccacataaggcatagaggaagggcagcttaccaagatgtctttctcgcctgacacgatgaccaagtgcccctcca

SEQ ID NO: 181870 - DNA, 329 bp, Glycine max
acacactcccaagtccattattattcctgtgtcgagcagcgtcatagtagtagtacctccaccattggccgggggcagcaatacccctctccatgttggaaagcccctcttagaaatatagaagaaggtagtgctcagacgtcggagggctgcggcatgggttattccttagtggatgggcctcctctactcgatctttggctacgtggtctcatggggaaacacataaagacctatgagctaagccacctctaaagctcaagcagctcctattgagttggtcacccatcaccaggaaaatgctcggcattcaagagagaagaccggcc

SEQ ID NO: 181871 - DNA, 358 bp, Glycine max
  unsure (1)..(358): unsure at all n locations
atttgaaagacataggatataancctaaactattgagagagaaaatctccgaaataattcttggatctattattattcttattagataccgaaggaaagagcaccttgtcataggaacacattaaataagggagaaaactaataagaatgacgaacaataaaatgaatgatgtgatatattgaaaaaaaaagtcaatgaatcaattgaaagaatgaagataaaaaaatagaatcaaagtttggagctgaaattaattatgaatgggaaacagattgatcgaaaactgaacattatttaaagaaatcatagatacgtacgtgtttaattcaattcatatttaatttataagactcgata

SEQ ID NO: 181872 - DNA, 354 bp, Glycine max
cctatgtggcactaattacacatgatgaacacgccattatatctacgttggcgttgtcgataacgagttttattcctttaaggtttaaccaagccctcattttactctataccctttcctctaccacccgtcataaaattcccatctcatggctcaactagaaatttacctctgcatgcatggcaattctcaaaccccaaatactgccaagatcatcagcccctcttctctacttaccggacaatagctagagataataaaaatacccaacatctattaatctagaagagaacctctatcttgcaaaaccaatggatcaatgagcaaatgaacgttgcattaccacccctgact

SEQ ID NO: 181873 - DNA, 446 bp, Glycine max
  unsure (1)..(446): unsure at all n locations
acactatatattactcacgctgtgtgacttaacctaatgcattatcagtgttagggatttgttgggctccatcatgagggtagcaccagcgtgggcttgccaacctctaacgcaagaagccacaacattctccccatttgctcgcgctctcactcgtattacatctctctcttctatgccaacacagcgtcactcttcaaaccctaccccaaccctcttctccgctatgaaacttgactatgcaagacctcctctctcaatcataatttgcttttatttcacctttgaactaactaatatacttcttgttcaagggagttgtccaagaagatttatccgacgaggatttcgacatgagacctcttatcctatccctaatgtgttttccaattcaacattnttaactagtgaaattaattcttgttttaggaagttgtccaagcata

SEQ ID NO: 181874 - DNA, 366 bp, Glycine max
acattgctgctaacattggctatctccctcggtactcttgctctccgaaatttaagcctccttggactacttatctcagtttgattttcaaccacttttcctcttctgaactttaattttatcatttggttgtcattgtctttggaatatacaaccccaccctttttgggcttgcctttcttctcagcagccaatgtctcctcattttcaatgcattcaagttcatggtttcctgaaaaagaatcctgctcaaattcactagttgtatattcagaattctcctggtctttttgggataaggatttagaaattgatgatactgaagactttggtgatcgacaaccgaagaaccgatgattcatcatc

SEQ ID NO: 181875 - DNA, 318 bp, Glycine max
  unsure (1)..(318): unsure at all n locations
ttcacctattccctatntacctaacaaacactttttcacaaccaccaaccttattgaattgctacacagttgcttttaactcttatttctcaatatttttatttttaacaaaacttgaaacataataccaaaaaatgtagttctggttttctgtgtgctgctatttatatccctgcaacaaaattacccaatacactccccgaaatttgggacagatttgccttgatccataataatgctctcttataacctaagacagggtgcacaacaacaacatttgcattcagctaactttcaatgaccaatttattcacattt

SEQ ID NO: 181876 - DNA, 322 bp, Glycine max
aataaatcatgtaagacacgacatataatatatcttatttttctatgagaaccttaccgaaattggtgattggaaatgtgtacgatacactccctgccagcctatatatcgatcgaaactggataaatgttgtgaattgagtcctgccataaaaacatgaatcaacaagatttcaatacaaaagcggaccatggcatatgacagacgaaggcgtaggcatggtcatatgacacctagcttcatccaatgtgaaagaaacatttcaaacgttgtcgccacatacataaaactgcccttgtgaaggctacatacaatagacgtc

SEQ ID NO: 181877 - DNA, 348 bp, Glycine max
attggaaaaacggaatattactttggataatgtttaaacaaccaatctatttttacaagaatacattgagccttatataactaatgctagtaaactgttacataattggatacaagagtctctaactaaactaataattaacttataactaactaatgctagtaacagtggtaatctatatctctaatactttcccgcaagctaaaaagggttgataacagcttccagcttggagaagataatacatctacattaaaggaaatgaaaataaagtatgacaaattggaatatagctaaacatgcttgatatacatcggccaaaataaaaattagaaactacataaaatg

SEQ ID NO: 181878 - DNA, 405 bp, Glycine max
tctcagcgcctatgcgagacggattataacatgctagctattatttctttgtttcaagaagagataggtctagccacgacccacgagcataggatcacggacgagtatgctcaagtatacgcggagaaagaggctagaggaagggtgatcgactctttacaccaagaggcaaccatgtggatggatcggtttgctcttaccttgaacgggagtcaagaacttccccgcttgttagccaaagccaaggcgatggcggacacctactccgcccccgaagagattcatgggcttctcggctattgtcagcatatgatagacttaatggcccacataattagaaatacgtaggagacttgtatggtctctcagacctctactagatacgacattctttttgaataaaat

SEQ ID NO: 181879 - DNA, 400 bp, Glycine max
  unsure (1)..(400): unsure at all n locations
ngagatgaggaagtatataatggtgaaacttcctgctnttattctttgaccacagagtggtacctggagatatgtctcgggggtcacgagaccttggggatgtcaggtggggtgctattgcccaaaaccaagcttgaccaatcccaacccaacccgggcatagtcggtcagtgagaatctgtgatgtacctaagcaagagagctcctggcagtcaacagataaaaggaacaaagaccacaaagcaagggggcttgtggtggctggccagctgtgaattttgtgtgatatatgggttgtggctctggtaatcgattaccaacgatgggtaatcgattacaacgcttaaaaatgaagacaggagactgagatggtctcttggtatctattaccaactgggtg

SEQ ID NO: 181880 - DNA, 367 bp, Glycine max
  unsure (1)..(367): unsure at all n locations
ccatcatanctcttcttaaccccataccacgaaatttaagagagaaagaaggcacccaaacctggattttcgaagtcccactcgtagccacgccacttcacgaccccgaaaatgccctcctttcgcgatttggagcagaaatgagcaccaaaagttggagctttgttggggtttcaatggagaatggaggagaaggaaaaagcaacgtgaggaagagggagagcttctgaattttctgctttggctgagtgaggagagagaaaagcgttttgggcttaaataaaaaggagtttctctttctctaattatttattcaagctctggcacatgtacctatttgattggagcacaaagggctcactctctc

SEQ ID NO: 181881 - DNA, 355 bp, Glycine max
accagcggagacactatgagaaatcaagatacttcaatgtcacagatagattcatgagcatgaagcaaaccacaccaatacaatatgaagacaaacacaccgccaatatgttgatagatctacataactacaataggaagactaagccctgcacatatgtatgatttatcaaaacttatatgaatccctctaactggtaaacatcatttagtactgagatactaaacattacaagctaattcaacaaaattaattatacacttcgatgcaccactgacatccatcatcattacagagccagagcatacaacatggacgaaattttgtcccatcaatcattttggtatcaattcta

SEQ ID NO: 181882 - DNA, 185 bp, Glycine max
  unsure (1)..(185): unsure at all n locations
attattgtaccatgaagcacacatgagaaatgcatatgataattagagacttgtcaacaccggatgcattatgagataccatcacctctaacgtacagtattactggttgagcaactactgggaagaagaagtntntnnaaatcgcaatttaaatactaattaatctcagaaactctgcatatta

SEQ ID NO: 181883 - DNA, 323 bp, Glycine max
  unsure (1)..(323): unsure at all n locations
aatttctaccaacaaaacataacatatcaaactcctttcagagaagctgtgcaaaaacaataactaaacgctttcaaagaacattctgggtggctataaactatcagttctttttttccatttaattatttgttaagagagaaattttgttgcattcagcactcgaacttncctaggcggacccggcatctcttcttcagatgattgtaagatgtcaggtgatgcacaaaatcctcaggcaacactatcctgcatcactggctgagccacaaatcattttgaatagaggtaatctgctatggaaaactctcaaaaactacccc

SEQ ID NO: 181884 - DNA, 420 bp, Glycine max
  unsure (1)..(420): unsure at all n locations
gctctattatggcccattttcttcccatactcaatttgttttttgttnngcattatcttcattaancctaaaataaaatcgaggctaaaaaaaagacaaatttatcaatatcatatgcaaaataatatatacatatacatatatatatatatatatataaatatgaaaaatagtaaagatagggtttctaagtggtgtagatataaaaagttatatataactaattgacataccttcaaaattgtttcaaagcaatcatcaaaataagctttaggtatgcttgaaggtcgagaccatctatcataatccataggaaataatttgcaatcagctgctagtgttccaagaaatcctgcaagcaaggcttgtgcttcaccaattgcttggccttggtcaacaaaattcacaatgatgcgtaac

SEQ ID NO: 181885 - DNA, 168 bp, Glycine max
tttttttattttttttttttttttttttttgtttttttatgttttttttttttttgtttaattttttttgtttcttttattttttattcttattttttttttgtttttttttctaatttttttttttttttttttctttttttattgttttttttttttttgtttttt

SEQ ID NO: 181886 - DNA, 362 bp, Glycine max
ttgaacctcatcttcttcttggggccaaaagctttccaaagatttctgggtttctaaaccctgaaaacttgcgctatacattcttattatctctatttcctttgccaaaaataattcaccaaggactaaccgcctaaactctttttgggtccctcttttccctttgtcaaacgaacaaagaactaaccgcctgaactcttttgtgtctcccttctcccttgtcaaagaattcaaaacgacaccagctgagaatacttttgataattccctttcccttatacaaaagaggtcaaaggacaaactgcctgagaattcttctcattcacacaagatcaaagggttaaccgtctgagacattgtct

SEQ ID NO: 181887 - DNA, 342 bp, Glycine max
  unsure (1)..(342): unsure at all n locations
actcccgngcaaagtaagagcaaatcggtccatccacattgtttcctcttgatgtaacgagtcgatcacccttcctctagcctccttttccgcatacactcgggcatactcgttcaccactttgtacttgtgggccgtggctagatttaattcttcttggtacttgctgacgatggctaacatgttggtctctgtctcgcataaacactgagacaagcttctcttggaccttgagcaagcagctaactcctcttttaagaccatgctatgtgctcgtgattggtctctctccccttcgaagcttgagctcattgttgctgccccacaaagctccacggaatt

SEQ ID NO: 181888 - DNA, 353 bp, Glycine max
gcgacagacatccggaaagagtgtgccggatcacaagaggaaaatgcggctactgcaagagccctcgaacgagatacctatagggctcgtaaggaagagcatggccgatataaattccaggagctttgtggggcaacaacaatgagctcatgctcccgagagaggaaagagaccacacatgactacatggcatggacttaaaggaggagtaagctgcttgctctagatccaagaggagtttggcccaacacttaaaagccacatagcaaagcatgatagccccaaagcaaagcatgatagctatactaagaagagataaaccactcgttgacctatgaacaaatactagtaaa

SEQ ID NO: 181889 - DNA, 334 bp, Glycine max
aaaaagaaaagaaagacaaaccccaccacacgaaagggaactcccaacaaaagggggagacagccaacagaaaagaaagaaaagtcccaaccacagaatgggagaaagaacacaagagcaagtacaaagaaaaagctcctggcaaagaaccacaagaaatgtgccgagaggtccctggaccagacgatatctgaacaatacagaattggcaccaaatgaacaacagagagaaaggaaaccacgacctcaaaagggcttcccgcttcaatagccaaccaaaaacttgtgcgctagcgactgtctcgccccgcactaaacacaaacagaaaaggaa

SEQ ID NO: 181890 - DNA, 170 bp, Glycine max
gaaagactgggtctaaaatatgaggaaaaaacatggggacactgaagaaattggacctatggggataaatacaaaattgcatcaaaggttgtaatggtggcataaagtatacaaaaggaaaaaattctataaacatttcattgtacaaagatgagatataaagaagctct

SEQ ID NO: 181891 - DNA, 406 bp, Glycine max
  unsure (1)..(406): unsure at all n locations
ttagcctgcgggagaagatttcttatttttactagagtttttctncatataccgcnctaatggcaaagcacacctccttgagatgagaaactagagcttatctactcaccccttataatagctaagctcacccctatgacaaaaaacatgaaaatacaaaaaatagtccttactacaaagactactcataatgccccaaaatacaaggttaaaaccctataatactataatggccaaaatacaacgcccagacgaaggaaaaacctattctaatatttacaaagataagcgggctcatacttagcccatgggctcgaaatctaccctaaggctcatgagaaccctagggtcttcccttgcggcgtaggattgcatcacttgggcccatctatgtccatcaagaagc

SEQ ID NO: 181892 - DNA, 404 bp, Glycine max
tatctaatcattcaatccaactcaattattttttgctcacctttatattctcaaacactcatttcatacaaaataatccactgtatatcaatttcaaccaattcactgttgaaacatgctttttgtacaaacaaacaactcaaagtagtgaaatttaaagaactgaaacatataactgaaatttaaatgactaaacataaatcataaaataactgaaataaactaaaatgttcaaaatgcacaaatttaaatgtcctactcctgtggttgctcctgtgcatgctcattaagatccaacacctgagcagctagtgaatcgtgagagataggctgctctaactcacatgctagtgcagatggtatggcatcattatgtatgggtgctggggatggctttgggatct

SEQ ID NO: 181893 - DNA, 348 bp, Glycine max
ccaccgctttaggagccggggacaccagcagcgcttcaaagccattaagggatggtcgtttctccgggagcgacgcgtccagctcaaggacgacgagtatactgatttccagaagaaaatggcgccggcggtgggcaccactggttactcccatggccaagtttgatccacaaatagtccttgagttttatgccaatgcttggccaacagaggagggcgtgcgtgacatgagatcctgcgttaggggtcagtggatcccgttcgatgccgacgctatcagccagctcctgcgatattcgatggtattggaagagggccaggaatgcgagtatggcctgaggaggaacc

SEQ ID NO: 181894 - DNA, 279 bp, Glycine max
accatcatcaattctaatgacatcatagtaaacattctacaagttgtcagcaataatcttttgcttgcaggtcattcttggatacgatattacaataatgttaaaattccacttgatattttaatatataagctgatgaagacatatatgagatcattatccttactcaaggctgccttaagggtgcgtattatatttgttgaaatgaaagttcaatcaatattctgtggctgctatgcatcctgtgggaatgaagaatttcaatctcattccatccct

SEQ ID NO: 181895 - DNA, 355 bp, Glycine max
  unsure (1)..(355): unsure at all n locations
gatatgtccgcggtcaggagaccttagggacgccaggtggggtgctattgcccaaatccaagcttgaccaatctcgaccctacccggacatattcggtcaatgagaacctgtgatgtacctaaacaggcgagctcttggctgtcaacagataaaaggaacaaagaccacaaagcaaggaggcttgtggtggctggccagctatgaactngctgatgtgtgagatatggcctctggtaatcgattaccaagggtgggtaatcgattacaaggcttaaaaatgagacaggagactaagatggtctctggtaatcgtataccacggggtgtaatcgttaccaagcttgaaaccaggta

SEQ ID NO: 181896 - DNA, 328 bp, Glycine max
ttattatcttttaaacttccttatagttcttcagttatttctaattaataaataagctttatattggggatttttcataatgattcttacttctcttaataatataagaaattactataatttatatataataaaataatttctgctccaaaattcttagttactgtgatcggatgagtaataggaaacgatgcttttctattataataaaaaagaatatcttatttatgtatattacattctatgagtagtgatacaaatcaaatattaattacatttaacgaatatatataggcgaaaatcatgttctatcaaatattaagataaa

SEQ ID NO: 181897 - DNA, 339 bp, Glycine max
  unsure (1)..(339): unsure at all n locations
cctggagacatgncgcggcggtcaagagacctttgggacgtcacgtggggtgctattgtccaaaaccaagcttgaccaatcccgacccaacccgggcatagacggtcagtgagaacctgtgatgtacctaaccaggcgagctcctggcagtcaacagataaaaggaaaacaagaccacaaagcaaggaggcttgtggtggctggccagctgtgaaactcgattgatatgtgagatatggtctctggtaatctattaccacaggtgggtaatcgattacaaggcttaataatgaagacagggggctaatatggtctctggtaattctatactcacggatg

SEQ ID NO: 181898 - DNA, 282 bp, Glycine max
aaaaagggaggatctcgaatcaaaaaagcatttagcctgttccataagtagagctatttctaatgcacatctatagagcgggtggtccgtggctgtacatgaggatctcatagcgccagctattatttgctccccgaacacaaagttaagatcatcacatgatcaatccaaacagtgaccgggagggttatacattgttactctaagagaaacacacactatgtaccataaaattactacatactcaattatttatcatttgtatcaacagacacgttcatc

SEQ ID NO: 181899 - DNA, 235 bp, Glycine max
cacaacaacagcaacaacaacaaccttatattcaaaaagttgctagcccaagcacaacaatacgtttctccaccaattcagcatcaacagctgctacacgcccagaaacaacaaatatcttaggctccctcgaaccttcccttgaagaacttgtgaggaaaatgactatgctatacatgcagtttcaacaagagacccgagccttcattcagagcttaactaatcagatgggaca

SEQ ID NO: 181900 - DNA, 243 bp, Glycine max
atgattgatactaccaatggtgaaaatcttggcgatatgactcttgctgaagctaggaatttgattgagaagaatggctttcaactcccaacaattcagcgcgagacagcatgctatcgtccttaaaagagtccatgatgtagccacaaattcatcttcatctactaaaaataaaagcctgaacgaaaacttgatgccttggttaacctatcaacccaccttgccctgaatcaaaaatctgca

SEQ ID NO: 181901 - DNA, 172 bp, Glycine max
acaacgagatatacatgcgattatttactgcccattaatattctaaccacaataagaatattagataaaaatacacaattattacagaatcgcaaatgctttgatggaaaatttaactaggaaaacaccatgccacatatgtgacatacacaacctgtgatgcagtctatta

SEQ ID NO: 181902 - DNA, 192 bp, Glycine max
ccacgcggcccaaaggggaagagaaccacaccaacaaaaccggcgcgaggaccacgcgcaaggcccaacccggagcacaacaaacaccccaacgcgagcctcaaaaaaaagaaaagaacgcccaaacgaggggggcaacagcacaagacacaacgacccaaaccaacaggtccccaaagtgcaaaccgaaaa

SEQ ID NO: 181903 - DNA, 367 bp, Glycine max
ctctcacctcttttttttttataaaagaagaaatatcaggacaaggttgtgggcctgtcaatctatccaagcttgaagcccaaagagttcttgcttgagcaggtgtgtatgtagatgtaatataaaaccattcatttgtcttcatctaacaaatgtagtctcttggaatagctagttcacaatattatctttctagttctaatagtggattcccatgatccaatggaagtttgacgcttggatccgtagcagtgtcaatgggcttggcatccaaaaatcctattccctcatgaatttcagaaacatactttgtgaaaggactatatcatccttggattgaaccacatctattcctataaagtatcaa

SEQ ID NO: 181904 - DNA, 338 bp, Glycine max
  unsure (1)..(338): unsure at all n locations
taagaatggagattcaagggttggaacattgtacctttgaaagtcctcacaaatccaaaatattataatggattgggcttcatagataccaagacaacaaacatatcactcttgggtaagttgatttggaaaaatattcatgatgttgaagaaccttgggttcgagttttataacagaaatactcgggtgccaattctatactcaccgtaaattcggcaaggggaccttctcaattttggaacaatattatcaaatatgtgggccatctttgttagggatttactatcaatntaggggaaggctcatcctctttcttctactcagattggatggggtc

SEQ ID NO: 181905 - DNA, 240 bp, Glycine max
aatagaaactcaggcccccaatgtcacatcctatcagagcaatgtgttccgacgtcctatagcacaagagacctcaaagccattcagctaaacatccggctccccgaacacaaagttgcacgatcatcataggatccaaacacaaacaacacacagggagcaagatatctcaaacccaactaacggagagaaacaagataacacgcaggtataaacatcagagcaacaaacaaaaactca

SEQ ID NO: 181906 - DNA, 322 bp, Glycine max
ctagattagacgtgatgcctaaaatcactttggacaaattaccactcaatgcttcccaattaaagccgagttcaatggtgggtcgtgcctttgacaggatccgccgaaaggttaggggagagatcgatctcccattacagatatgtcctcacacctgtcaagttacctttcaaataatggatattaacctcccctacagttgtctgttggggcgcccgtcgatccactcactatgagttgttcctctacactccaccaaagtgaaatttgcacggaagggctctggcatcgtatcagcgagaagacatttggtgagctgcca

SEQ ID NO: 181907 - DNA, 412 bp, Glycine max
  unsure (1)..(412): unsure at all n locations
agctgtaccagctcgcccagcgagctcagctcgcccaggtgatcaatgttgcttcctccagaagcaacagccttctggaggaaggatttggaaggcccaagtgggccacattgctatttgtacccccctttttactaaatgcacccccttctatttttttgtaattcttttttccgtaacgttacgaaactttacgaatttcataacgatacttattttccttccgcaaggttacgagtccttacagattatgtatttactctttttttgctttcgaagaagttacgaaaactcacggattgcgaaaaatacctcctttcgatttccgtcacatcacagaattatcacggattgcgtaagcctgctaccttctgattntcggcatgtctcgggacttcatttattgtgcaac

SEQ ID NO: 181908 - DNA, 461 bp, Glycine max
agcttgaagaaaaataataaagaatcccattaagtatattgtctcaaatacctcggcagctctggttgtagctctagaccaacgggaaatggcaggtctcatgttcctcaatcttgaagaaagatataaagttgtacttgagttcagaaaaatctaagagcttctacctatgtattaaaataaaaagataaaattaaaactcatggagagtttagtaaagacagacagaggttccaattcaaaatctttttgagctttgtaatcttttgataaaccattgtcaacctgcaatcacaaagaaatggtaaatcatctgcttacagcttcaaatttaaaagaataaacttggagaaaaataaaaaagaattcaaagaagcagaatgcgagaaataccttggcagttctggttgtagctctagaccaacaagaaatggcatctttcatgtttctcaatgctgaac

SEQ ID NO: 181909 - DNA, 414 bp, Glycine max
  unsure (1)..(414): unsure at all n locations
ccacattgcaacctatgttacagtcctaacatcacattaactacacagagactaacaatcatcagtagcaacacactcaaataatcaaaaagcaaacttctaatgtcctctaccctanggtttcaatacggaaattaacaaaagaaaagcgagaaaaacttacttggaattacagagttgagtgatgcaaatgcggagtagaatgtgaataatgagcagaacaaatgatgagcagaagaagaagtgaagtgcaaatatagtaattgagaatgtaactaccttagggcagttatgttttctttttgtagttacaatttgcttgctaagcacgagtgttgcgctaagcaagcactctgtgacgtttgagattttagaatttgaattcacatgcttagcgagacagactctctcaat

SEQ ID NO: 181910 - DNA, 363 bp, Glycine max
  unsure (1)..(363): unsure at all n locations
ctaatacatgtgctgcccacgtttcatggtcttacaggcgaagatcctcataagcatcttaaggagttccataattattgttctaccatgaagccccctgatgtccaccaagatcatatctttctaaaggctttttctcattttctagagggagtggcaaaagattggctatactaccttgctcacaggctcatttctcaactgggatgaccttaaaaaggtgttcttggagaaattctttcctgtatctangaccactgccatcataaaagacatttcangcatcaggaaacttattggagagagcttgtatgagtactgggaaagattcaagaaattgtgtgcaagctgtcctcaccacta

SEQ ID NO: 181911 - DNA, 436 bp, Glycine max
  unsure (1)..(436): unsure at all n locations
ntgagggtgcgtagcccaccatcttttatagtagagtatcgataatgtgtctaccatcacgattatcgtctccctttccatcattgggggtaccacttgggccgccagatccctccaccttttgggcgtgttctttgaaagatccgtccncctttttgcaaatgttctgtagttgcatcctatccagaaccatatcaaaattgtactaatactgcctaacaaaggcaaccattaggtccttccaagaatggactcgggaaggttccaagttagtgtaccaggtaacagctaccccagtaagactttcatggaaggaatgtatcaacaattcctcatcttttgcgtattcccccatcttctgacgatacatctctagatggttcttgggacaagtagtccncttgtactttgtcaagtccagcaccttgaacttggg

SEQ ID NO: 181912 - DNA, 236 bp, Glycine max
aacagccttttggaggaatcttctggagggcccaagtgggcctcaatgctatttgcactcccctttttactaaatgcacccccttctagtttgttggcaattctttttccgaactgttacgaaactttacgaatttcgtaacgatacttatttttcttccgcaaggctacgaatccttacggattatgtatttactctttcttaccttgcgaagaagctacggacacttacggact

SEQ ID NO: 181913 - DNA, 424 bp, Glycine max
  unsure (1)..(424): unsure at all n locations
ttgaggcttaaattaaattttcagagattgatcttttgtttactttaaataagagaattatatgttgagtctttttgtcaatcacttttttttgttttaaaaataattacaaatatttttttttatgagtctaaaatttgggggctcttgttagttacattttctttcattgatagataaaattctattttcctttttttccaagatatttcctgaatgctttttgattttcaaattaatttcctaatagtatatttccgaaaactagctcacttgttttctagactattggaaagaactaattaatttgaaaacaaaagagcatcgaagacaatatctttaaaaaagaggaaaaggaagatatatntataaatgaagaaagatgntattaacatgagtaaatttgagtctaattattttaacc

SEQ ID NO: 181914 - DNA, 431 bp, Glycine max
ctacagcttggccagtcatctgcctgagtataattatccaattggtaatttctcttatcaatagcatattatagcccatggtggaaagaccaaaatcagctatgccacatggcagaaagtgttaaaggcaaataggggaaacacaacattcaaaatcagtattgtcaaacaagttatggtggagcacatttgggtgtaactgtaaatatatttcaccatcaatggctctgtggttttcacgattgagctgttcatggccaaaaccaacataacaccatggccaatgacagcagtctatgctttctcagacatttcaagggccttttctttatgggagacaataatatttttttgggtcttagattatgcatataaatcccaaaaccctgtttaagaaatttgaccatctttatataattatacacatttgc

SEQ ID NO: 181915 - DNA, 441 bp, Glycine max
catcaacaatctgaatgttcttgaagtaacttttcttgttttaccctcctcagggaaatggccactccccatttgagtcgaggtgtgttggccgtcggactcagagttcacaacctctcccccccactcaatcattgacgcgctgtcagagaggtacgagaatagaggagccggccagtatcccataacatggtcattcccaaactgcatccaccagttaccctctttggggtcctacatacatattggttttccataatagacaacatcagatggcattgttccatattaataaattcatggaccctaaaaaataatgcagcattcacgtataatgaaatgttagcgtcagagattctcttgattataattaactagtgtgggctgcacaaaacagtggtgttaatatattaatggcgcattatggtagtgtttgtaagt

SEQ ID NO: 181916 - DNA, 415 bp, Glycine max
  unsure (1)..(415): unsure at all n locations
agcttgaacaacgaccggtttaaagcacaatctgtcttcttattcttcctttaccacttattaaccctagcttaagcttatcttccccccattgacgacaacnttctttctctctctctctgtctttccccttttcgtattcctcccccattgcacgctagggtttctgtgcgcattcgatgctgctcctgacgctcccaatgccttcgttcacgatgttacagtgctccgtgacttcctctccaacacgcgcagggacgacgccaccgtttatgtccccgtccncaaggttctgccgccgcttcttcctccgtccgacgctgtttctcttggccctgacgcgcttgatgagtccgcctccatgaaggccaagcgcattcccctctcacgcaagggcgccgccgccatgattgcc

SEQ ID NO: 181917 - DNA, 454 bp, Glycine max
  unsure (1)..(454): unsure at all n locations
gattgagacacttatgagagctcaagctcaagtccccttcattgcaccttcattcccaacctatgatagatgtgggattgtgcatgggctagaagaatgcactattgatgacaagctaggtgcaaccatggtgagatcaactttgttggaggaggaaaaattcttaaaatcaataccccaacaatttcaatcaaggacatggctttaggaagaattagggatgtataggcctcaacccatgcaaaatcagcgacctaaacaagaggagagacgactcactcttcaagagaccatgcttcaatatatgtcccataatgatataagaatgaaattggtggagtctcaactatccaacatacaatctttnttgtcacaaagatagctaggcaacctccctttccaacctaaaccaaatcctaagagggaggatgtcaatactgtgatgactagaagt

SEQ ID NO: 181918 - DNA, 437 bp, Glycine max
agcttatccttatggctggcctctggacttctctccccgtgccaccccggaagatttaagccaagcccctactttcgaggggcagctcccaccttatgacgactatcccgggcaagacgatgaggaaggagatacccatctcggtcccctcctccacctcaaagatccgtccccccatgaactaccccaaccaaacatagtccgccatattccgacttcatccacacccgtaaaagaatctgttcccttcggggaagataagggaaagattgaggcgcttgaaaagaggttgagagcagtcgagggcctcagcaattacccattctcggatctagcggacttacttgtgcccaacatcgtcatccctcccagactttgataagtacaaagggacgacatgtccaaaagggcatcttcggatgtattaccgaaaaatg

SEQ ID NO: 181919 - DNA, 415 bp, Glycine max
  unsure (1)..(415): unsure at all n locations
ttattgngcacatagatagaaatccttgcttattggatatgcgcttgtatacatgacaaaaagagctcgtaatatccctttcactaaataactatgtatgcttaaagaagggctatatcccacatgggaagatgaatctttaacattttccagccttcgtttcccatcttgaatctaacactgtgatggaaagttcattaactgagcacaaattgtgatctgcttcaaatgcaacatcgttttcagtgtaaaagccaacaacctttggttttggcgacattgtatcaccattcaacattaaaccctcgttttcatttcagttacaacagaataactccatagctaatgacatccgacttctatgagaagtgaccacgcataatatattcatgagacatgttaccacttgcaataa

SEQ ID NO: 181920 - DNA, 433 bp, Glycine max
  unsure (1)..(433): unsure at all n locations
agctnggacttgatcatgagcacatacccttattttttttattctgccggcccatctcaatntgctttgccctgcgttaccctatttgggtactcaaacacagaatttgaaaaaaattcagcatttcatccattatcaaaatcagatatttgaaaatccattgaaatacgtggaatttgtaaaattcttgatttgtcaacggaagagaaatgcatctcattctccatcgttcatttgtcacttacttttctccggtgaaccttccttgttagagtcgagacctgccatcaattgttgggctctcctccatggggtttgaatcgccgacagagagttgaactcagccactgacaaagagagaagattacccgcaaacttcgctttatcatcttcctgagattaaacatcatcactaactagaaatcaccatgga

SEQ ID NO: 181921 - DNA, 460 bp, Glycine max
  unsure (1)..(460): unsure at all n locations
ntagaagagaagaaaataagagctgttccaagtagttatttatagatataggaatctgatggactagacaactccgatggatccacaaatggtgaagtgaccctcatgtcttggaagttcaaatagatgatgaagaagggaaagtttcaacattcctctagacataaagattccatattcaaaaagaagaatcaggaggaaaacaatgagatcatttgctttgagtgtagaaagcctggactcatgaaggctaaatgtccccagcaaaagaagaggagatattctaggggaaagaagaagaaaagtctgatgatcacttgggatgacttagacagtgagaaaagcgacagtctagatgatgaacaagccaacatttgtctcatgatagatacaaatgatgaattacccttttctagaagtattcagtttcagcccgtagcatctcatgcttgatgtagta

SEQ ID NO: 181922 - DNA, 465 bp, Glycine max
  unsure (1)..(465): unsure at all n locations
agctntctcggagccattcctgcgaatgtttatatttggaaagntagttnttaccaagaaatgctacccttaaaacaaaaatggcatacaactccctccaataaatacaaacatcaatgtaaatttagagcaagcttatgcgcatactccttcacgaacgttcacttgcacaagacattcttataactaagaaaaatgcacccatatacaatcaaggcaccttcgttacctagattatttacatgtacttccaaggtgtatttgttacctatatcacacacatttcctttgctaaattcacatacatgcatactctaagcactttggctatcaaaaattgcatacgtgcacatcctggtatttctaatacctatacatacacaaacttcatgatgaatcttgactatctacacaataaggtgctacatttcatgctttntctttttcaagtgtntnttactacct

SEQ ID NO: 181923 - DNA, 183 bp, Glycine max
gtgatgtcgttgtctgctaccattgatggcggtccaagaaaaaaactgtcctcacccgactgtggacgcccaatgttctctttggattagtgctgatcttctcataatggcgtgcctttttcagctcattcacaaattgtggtacgcggtaccatactcgcatacacactttgacctaccagt

SEQ ID NO: 181924 - DNA, 288 bp, Glycine max
ttctacgtagtggcactgacttgtgcgatttatcatttacgaatgacgttcaatacttataaaataatagtcgtcgatagtaagaacgcatgaattatgacttctcgacagctagtcactcttagatatgacaatatgttacttccacaaaacataaaaatcatgcacggtgtaagcttttaccgctacggagataaagcattcaatgtgtgtttggacgaagaaaaactttaaatgttaagaattttaaatactttaactgtgattttttcattttcacaattttat

SEQ ID NO: 181925 - DNA, 464 bp, Glycine max
  unsure (1)..(464): unsure at all n locations
tgatttgtgagtngattctagccttagtttcactttggttattagtcaattcattcacggaaactttcatagaaaaacgttcgattgattcttcttgattattntattatttttttaaagatattntgattattttattattatttttctttttttggtttaaccgaggttatagcgtgaacgatcgattagattttgttttaatagtgattaaacgagattacaacacacatgatctgttgaaattcattttatcatttattaggtgagaaaacggcttaaataaatggtaaaaagctcgttaacgcggaagaaaagaaaactaaaagtaagcgaaattaaagtgaaagtacacaaaacaagtagggatcactaatggtgcatagaatgaattgaaagatntaattttgggaacttaccggttgaagactggagaacgacacagaacgaacgaagaacgatga

SEQ ID NO: 181926 - DNA, 429 bp, Glycine max
  unsure (1)..(429): unsure at all n locations
agctntgaccgatcgtttaatccgttttctctcctaataaangataaaaagaatttcaaccgatcatttgcattgtaatctcgtttaatcactcttaaaacaaaatctaactgatcgttcacgttgtaaccttggttaaaccaaaaaaggaaaaataataataaaataatcaaaatatctttaaataaaataatcaaaaaaatcgatcagacgtttttctttggaagtttccttgaatgaattgactaataaccaaagtgaaactaaggctaaatcaactcacaaatcaagttttgtccgcaaaaaatcactgaaaaccgttttaaggtccaacgcctttaacggtcctctttgcttttatcggttaacatggaccgttcaaaagcataaaatcaacacatcactttactgccttttgcagaactacgt

SEQ ID NO: 181927 - DNA, 453 bp, Glycine max
  unsure (1)..(453): unsure at all n locations
cgaaccaaaaccggttagagtgtgaatgtaaactgagtgtactactagttgtgagtaataatctttgcatcaatgcctgtattttagaataaaatgtataaatgaggacacgatgaagaccataattgtgcatacagaagccttttgaccaaaaagcttacttggaatgataactgtaccctttgcaccctttttgagctaatgattttgtcaataattgaaccctggacttaaatgattatctccagataccttgtttagattctatcagagcatatggttcaaggcaaatttaccccaaatttaggggagtggaactaattgggatgcaaagaanaagataaagcatcagcacacataacaaataagttgagtgttaaaaaaaagaaataaagaaaatgtgtgctgtgtgtataaggcaaaagcacatggaagtgaaagctagtgagcagc

SEQ ID NO: 181928 - DNA, 422 bp, Glycine max
  unsure (1)..(422): unsure at all n locations
ctacactnatactgaccgctcctttcacaaccaattaacacaaatgaactctttcctctactaccacaatgtgtgtcacacctcacagtgactgcaacaaatccgctctcattggcaaccgatcgagcccactacaaaacatcatcttgggtaccaaagacctacaacgcaaccctgacaatttattttttatacaaaacatacattcaaccaaatgactcaaactaatgaacatgattacctgagaagtattaaaagcatccgaacaatcaacatgtggttcattcataccacattcttgttcattttcataatctatatcaacttctttacacattgtattgtcatacatccatngatcttctgtcaccttaacaacaaatctacaaattataactcatacaaaagcgtcataatctttt

SEQ ID NO: 181929 - DNA, 359 bp, Glycine max
  unsure (1)..(359): unsure at all n locations
attaatgaatgttncaatgcgcaccttgttatactggaacaaaatgaccaacgaaattcataacatttattattgcccgatacgtgtcaaaattttaccctaatttagttgttagaaatataataaaacgtgacattcataaatcctgaatattttgtctttcttacaaccagattatgttagttttaaatgactaaaataaattaatattttattattacaaaatcaaaaaataaagtcagctgatatggaagcaaagtaatttttttctctgacatatactccttcatctgtactttctctaatcctatagaaccatttttatatgtctttatatcttaattccacagcaattacta

SEQ ID NO: 181930 - DNA, 447 bp, Glycine max
  unsure (1)..(447): unsure at all n locations
gagatgcccgaagatttaccatttcctagttaaccatgcattaggtaccatgttcaattattttgtttttaagtgaaacgggtttatgatcccaacatggttgacttgtgttgcctaacacatgaaactaagaatgtagtgtgaagtttcacgcttcccccttttttgtttttgttttgtagaggaaaacgcaaggatgagcaaacatgaaaacaaatggtatgcaattttgcagaccaaaaagtttgttgaacgcatatgcatgatgatgccatgactcatgcaaaatgtgaggctggaatatgataacggacaaatgcacgatatgtccattatgatgttatgaagagatgcttatgatatgaatgcattttacggacacgagagcccgganaattatctcttcttacttgcgcattttggggcgcagtgccccatgtgtacaat

SEQ ID NO: 181931 - DNA, 427 bp, Glycine max
  unsure (1)..(427): unsure at all n locations
agcttataagaacaaaattgcctcaatcattttnttattatgcatgttgtcataccctaatttcgtccggggacctttgcttgatgacatgcaacttttgtttggtcctcgtgaggtgcttggcacccatcattaggcaatttgtgaaattccgggacatgccggaaaacaaaagaaaatattgatgcacaatccgtaaggttccgtgacacaccggaaatcaaatggaagcatcgttgcacaattagtgaggttccgtaacattccgtaagtcaaaaaaggggatgattatgtaatccgcaaggttccgtaacattacggaaagaaaacaagtatcgttacaaaattcgtaagtctccgtaactttacgaaanaagaatcaccaaaaaaggcagggggtgtacttagtaaaaatgggggtgcaaat

SEQ ID NO: 181932 - DNA, 445 bp, Glycine max
  unsure (1)..(445): unsure at all n locations
tactaagctnaacttcacatcttcttccatctaatcaaagtttccagctattggcttttcagctattatccattcatgatcaataaacctcattccaagtttcttgagatgtctttcggtgatctcactagatgctttggtaaagtccatactctcattagagacatcaacattgaagtagtcaatgaatgttgaagcaagcacaacataaagaaattcataatccaccaggtgatgactctttagtataatgtccttaatcaacaatacccagttcatcttgatacccgatttcataccataaacaatatgtaaatcatcatctattactagagcatgattgcttgacctcgaagtgaaaatataggtaatggtggaaaccaacattctatcttttgtagtcagtccaccaactcctaagcgatcctcaagtcctagctgggtc

SEQ ID NO: 181933 - DNA, 428 bp, Glycine max
  unsure (1)..(428): unsure at all n locations
agcttgagaggatngatggggacccggtgtgatataatctaggatatgggctacgtgggagtacgtgagctcacatggaggtgggcaacaggggatggtgggtttatgcgcgcattgtggatgtggaaaacttgttgtgcaccatcgcccgaccgccacctagtaccacatgtgatgggtaccccataatcctacaagcttgagatgaggaagtgttgaagggtgaaacttcctacttttattgttgaccacagagtggtacctggagatatgtcgcgggggtcaggagaccttgcggacgtcaggtggggtgctattgcctaaaaccaagcttgaccaatcccgacccaacccgagcatagttggtcagtgagaacctgtgatgtacctaagcaggcgagctcctgtaagtcaacatataaaaggaa

SEQ ID NO: 181934 - DNA, 464 bp, Glycine max
  unsure (1)..(464): unsure at all n locations
tcgctgtgcaatactggtgaagaattgtggctcattataacttanataatcctccagggtactcttcttggctcttcagccatgattgggtcttcaacaggttctatgtgagagtgccctgcaataggaaaactagaagattcctcgaaagatcgaggttcttcttctggagttgctgctgcttctaaatcctgcaaaaaaattctgattctctctgaattacgccttctacaagtggcgttaatttccaaatcaatgggaatcaaatcacctgcagtagatcttctttgcatacaagaaaacagaacaacaattatccagttcaaaagaacaatgaatgcatgataactaaaatatgaacaaaaagaatcaatgaatcacagagaaaaatataaagcaatgtcgtaaaactgaactaaactcttcttgaatctagttccccggcaacgacgccatanatactt

SEQ ID NO: 181935 - DNA, 483 bp, Glycine max
  unsure (1)..(483): unsure at all n locations
ttaagtcacctgcggcatgcaagctntctgaagtnttctggttttctaattcttgtaaacttgngctattcatcttttcatctcttctccctttgccaaaaagaattcgccaaggactaaccgcctgaattctttttgtgtctcttttttcccttttccaaaagaacaaaggactaaccgcctgaattcttttgtgtctcccttctccattgtcaaagaattcaaaatgacacagtctgagaattcttttgattcttccctttccctaatacaaaagtgttcaaaggactaaccgcctgagaattcttttgtatccccattcacaaagtatcaaaggtttaaccgcctgagatctttgtcttaacacattggaggctacatcctttgtggtacaagtagagggtacatctacttgggtttgactgagaacaagagagggtacatctcttgtggatcatttctagtggagggtacatccactat

SEQ ID NO: 181936 - DNA, 456 bp, Glycine max
gctcctccgtttcctcatcctaaacttcaaccttctattctctctcatttcttcaccaaatcacgtaccgtaaagcccaatcttcctctttttcactcctctatcacttccaccgatcaaaatccagaaaaacttcatcaaatggcagagccatcaaagaagagaaagggatcatcttccaccgccaccgctgctgcccatcgccgtcacggcccatccggagcacccacagcacctattcctccttctttgtcatctccaagatcatcaacactgttttcatccgatgatcaacgtctacggtacctttctcagttttcttctagaataatcttagaccctaagtacctagacgtagagctctttaatgatgaaacggttgattgctatcaagtgtttcacaattctggtcttgtttatttcatgtcatttaaattgccatattatcctgaactt

SEQ ID NO: 181937 - DNA, 488 bp, Glycine max
cctgaggcatgcaagctcgccaattaacctgagatttagagtttatgtattttaaacacacacaatgaaaatactacgtatttattacctatacttaataaaaaatacttataacattacaaaataaacataaattgggagagtttgatacaatttatacaacgtttatacacaaaagttagtcgttttcaccgactaacaagcggcgcaaggattgtctgttcccacccgctctttatgtatggctggtctctcacctctttcgtcatgaaagtagacctgtctgtcccctacaaggtcaccgcatgtgtgtcgagaaggggaaagcaaattgggaacaactctcggctggtatggtaagggcactcgttaattggttccctcgatggaaggaaggaagggccagagttttgtctttatgtcaagggtttacaaacgtccccttgatgggaacgaagggttgtatcaattataatcatgtacttgcc

SEQ ID NO: 181938 - DNA, 475 bp, Glycine max
  unsure (1)..(475): unsure at all n locations
cggagttcanattgtggacctacagtgtgaccaggtgtgttataaagtctagccaccttgaaatagtgttgatggatggaaaggtatgttgtcatttaacttttgctttgtttgataatgtgattactgctcctctttaatcttttctcacattttgtcatttttcctatatcatttccatcttcatcctctatccagagtacttcttttctctactctttattctttttctttccctttccattttttagttttcttcttatgtttgttttttttcctccgcaagtgtggaaagggaaataataaataaatctaataatgaaaaaaacaaaaatccacgacaaaacatggggtctgtccaaatttatntttttgttctttaatattcacaaataaccactcatttaactttcgaacaacattntatttgatggtttaaatganatctcagaggactaataatatttatatacta

SEQ ID NO: 181939 - DNA, 460 bp, Glycine max
gtcacctgcggcatgcaagcttgtagattgttggcaatttctctattacgctttaaaaaccaatgacatacttacaaagaagtgaaagaactatatctagttcagagatggtgaagatcgaactaaacaagttttgattaacagtggctgtttttgttttaatagtattagagatatagattagttcagttaattacaagttaattattaagttagttaattagttacaaattagttatttttgtaaccaattatgtaacattactagcattagttatataaggatgaatgtattcatataaaaactgatttactcatttttagcattatccaaattaatattcagcttttcttttctcttttcatctttctatcttaactttatcaaatagtgattggaacacatgcctattgccagcagctagtgcattcatcttcagaattctgtgtcttctttgga

SEQ ID NO: 181940 - DNA, 457 bp, Glycine max
  unsure (1)..(457): unsure at all n locations
tagaanaaccctctatgaatctacggtagtatcctactaatccaagaaagctcttaatctcaaacactgacttatgactctcccaactcatcaccgcctctaccttggaaggatctactgttatccctcccttagatataatgtgccctaagaagctcacctcctctagccaaaaatcacacttggacaacttagcatacagtctattgtctttaagggtttgcaacacaactctcaaatgctcctcatgttcctctctagtcttagaatacactaagatatcatctatgaagaccactacaaaactatctatgcaggggtgaaaggtcctattcatataatccatgaacacaccangggcgttggtcacaccacaaggcataaccaagtactcataatgactgtaacgggtcctaaaggtagttttcggaacatcttcangcttcactctaatctg

SEQ ID NO: 181941 - DNA, 469 bp, Glycine max
  unsure (1)..(469): unsure at all n locations
agcttctaaacagggcatgtctcttattctttgcgattcttaaccagctgggcgtgaataatatattttcttgatatgataattaattttacgcgcatagcagcgtgtatgccaatntttattaattttttttacttaaaatcccatttacactaataacccacaacacatactaataatgtaataagtactttaattagcctttttcctctcttaatcaattcaaactattatcctttatccctatttctaaaagaaattttgatagtttttaaagaaaaatttaattaaaaataatcttttgttttataaacttgaaatacaattcatattttaaaaaatatttatgtttattatgaactttaattataatataagttatatattaataaaatatatattataaatataattatatgaagatgaacacttatttatattatttaatacactagttatcatgcaaaca

SEQ ID NO: 181942 - DNA, 419 bp, Glycine max
  unsure (1)..(419): unsure at all n locations
tgtacgcacatcgntcgcgtgtatgatatccactccacaatggntgaagtagaggagagcttcaaccctataacacaacgtggcagacaaaagtgggtagtaaacttgaatggtcgtcattgtcaatgcggaaggtattctgcgcttcactatccatgttcacacattattgctgcttgtggttacgtgagcatgaactactaccaatatatagattttgtttatacaaacgagcacatcttaaaagcttactccgcacaatggtggcctcttgggaatgaagcggctattcctccttctaatgacgcatggacacttatccctgacccaactacaattcgtgcgaaaggtcggccaaaatcaacaaggataagaaatgagatggattgggttgaaccatctgagcaccgaacaaaatg

SEQ ID NO: 181943 - DNA, 403 bp, Glycine max
tccaaattagtgtaccacactactgtggctccggctatttatcttgaaagaagtgtattaatagcttttcatctttagagtgggcgcccatcttacggcagtacatcttgagatggtttttgggacaagtcgtccctttatacttgtcgaagtccggcactttgaacttcgggggaataacaacatcgggtactaagcaaagatctgtcatgtctgcgaacggataatccccaaatccttctacggccctcaatctttcctcaaggagatcgagcttcctcctttcttcagttgctggaggcggcccttccgtggacaaaactattggtggtgctgcgatgttgggttgaggcaacgtgcctggtgccggcccttcggggaatcggggatagaactcgacatc

SEQ ID NO: 181944 - DNA, 464 bp, Glycine max
  unsure (1)..(464): unsure at all n locations
agcttaggctaaattagtctaaacttttatattctatttaagctgagtctattccaacaagagggatctgaggatgaagcttactttaagtaagtctaaacctaggagggctgtcgaaattaagcctagtccaacaagagggatctgaggatgaagcttggattgattcaatctaactagggatcgagatttagtaatttaggctacaggatagaacacaaaagcatgattgattagagaaacatctttatatacatcacccaatacctttacctactgctgtcaatcttacttacttgcatttttactgtttttagcctagacttagtttaattatgttctaaatcattaattatcaatgtttctttcaaaatgccttatttctgaatttaaacctgtctaagactagtctcttgagttcgatactcagattcatccattntaattntaaatacttgacgatc

SEQ ID NO: 181945 - DNA, 425 bp, Glycine max
  unsure (1)..(425): unsure at all n locations
tcttatccaaggctcatcttggtggtgaagcttcttcttccatggcttattccctaatggatggtgcctgctctcacctcttctcctttgtcttccgctgcatctccatggtggaaaatcaccattaaaggacctcattgaagctcaaagatccagcctccatagaagctccacaagcaagcttccatcaagtggtatcagagcacaagagcttcaagtaggtgctccttaaacctccattaattatttgctttaccttttcttccgttggtgtttcttcatttttttctccatgtatctcctcacatgtcttgtgctaaatgttnttaacatgattctttagattntccaccaattaaacttgctatagaagctagaattgattttctatgggtcaaaattcttggttctggtcttgaactttt

SEQ ID NO: 181946 - DNA, 452 bp, Glycine max
  unsure (1)..(452): unsure at all n locations
agctttgcttgtggattattcatctatttttctagagtcatagnngaatatgcctagtttattcttaatcctacgaattaaaataaacaagcgccaacccaaaggttaaacacaattttgcaaataattctagcaacaaaaaaaaatgcacagggttagctcgtctgggcgagcacccgttgcacaaggtagtttaaaaagagggggagggtgagttttcatcacccaaaacttcccccctcactcaaaaacgctgcagctacgggatttgcctctttttcagccctaaatcaccattgttcgcgtttttttgttccatgtggcatcgttactcacccccaataagtaagtacctcattctttggctctctagctttccatgggtgtattttgatgctccatttggtcattcttgctcaaatccatgaggcatcttatccttgaattgatgc

SEQ ID NO: 181947 - DNA, 460 bp, Glycine max
tatatgagttagcaactcctatctcacatgacacttctctttcatctcactcagcctttgacttggcacctgattcagcttcattcattacatgcaaataactaaaatcgttagtcgtggaatagactgaattggcccacttgttcatgcaatgattagttttagttgattaatgttccttattactgtaccaatcctttattgctccactttcccattgtcttgtttagtttagtacatggtgtgattagaatatgatgatccttcactacccttaaatggcatttgctagtactatgctagttgtatgtggcatttactcatcctctaatctatcatctatctacacaaccataggctgacaatttgagtagggaaccatatatagttcaaagttaactttatactaattactaaatttatttgactaattgaagaagacaattttggaatttattac

SEQ ID NO: 181948 - DNA, 467 bp, Glycine max
agcttccttgagaagagtcctaaagaagctagagcttaactacacacacctctctaatagctaagctcacctccttgagatgagaagctagagcttagctacacaccccctataatagctaagctcacccccatgacaaaatacatgaaaatacaaaaaagtccctactacaaagactactcaaaatgtctcgaaatacaaggctaaaaccctatactactagaatggccaaaatacaaggcccaaatgaaggaaaaccctattataatatttacaaagataagcgggctcatacttagcccaggggctcgaaatataccctaaggctcgtgagaaccctagggccttccctttgatctctggcccaatctacttggagtcttctatccaatacccttgcagggtaggattgcatcaaaacttgactactcttgctcaaacttggagtgtcttttctttttctaact

SEQ ID NO: 181949 - DNA, 422 bp, Glycine max
  unsure (1)..(422): unsure at all n locations
actcagcttgaacgaggaagtgtanaagggtgaaacttcttgcttttattcgttgaccacagagtggtacctggagatatgtcgcgggggtcaggagaccttgnggacgtcaggtggggtgctattgcccaaaaccaagcttgaccaatcccgacccaacccgggcatagttagtcaatgagaacctgtgatgtacctaagcaggcgagctcctggcagtcaacagataaaaggaacaaagaccacaaagcaaggaggcttgtgtggtggctggccagctgtgaatcttgtgtgatatatgggttatggcctctggtaatcgattaccaagggtgggtaatcgattacaaggcttaaaaatgaagacaggaggctaagatggtctctggtaatcgattaccaagggggtgtaatcgattacc

SEQ ID NO: 181950 - DNA, 474 bp, Glycine max
agcttctttgagaaaacttccttgagaagctagagctttctacacacacccttctcataactaagctcacctacttgagaaacttcattaagaagattcctaaagaagctagagcttagctacacatacctctctaatagctaagctcatctccttgagatgagaagctagaacttagctacacaccccctataatagctaagctcagccccatgacaaaaaacatgaaaatacaaaaaaaagtccttactacaaagactactcaaaatgccctgaaatacaaggctaaaacactatactactagaatggccaaaatacaaggcccagacaaaggaaatacctattctaatatttacaaagataagtgggctcatacttagcccatgggctcgaaatctaccctaaggctcatgagaaccctagggccttcccttggatctttgacccaatctacttggagtcttctatccaat

SEQ ID NO: 181951 - DNA, 432 bp, Glycine max
  unsure (1)..(432): unsure at all n locations
tgcttgagaagctagagcttanctacacacacccctgtaatatctaagctcgcctccttgagaagagaagctagagcttagctacacacccctataatagctaagctcaccctcatgacagaatacatgaaaataccaaaaaaagtccctactacaaagactactcaaaatgccctgaaatacaaggctaaaaccctatactactagaatgggcaaaatacaaggcccaaaagaagggaaaaacctattctaatatttacaaagaagagtggatccaccttgacccatgggctcaaaaatataccctaaggttcatgagaaccctagggccttctttagtagctctagcccaagcctcttggtgtcttgtatgcgatacctttggggggtaggattgcatcacctttctcccttggagacacacccgtgagc

SEQ ID NO: 181952 - DNA, 481 bp, Glycine max
  unsure (1)..(481): unsure at all n locations
ccttaagtnacctgaggctgcagcttaatataaagcgtttgctgagagatatttttacttaatatgcaaaccaccattcctccaaagggaacaaaccatatcccaaggcacaatctctagcttcctttgggagtgatagctagaccatatgaaatttttgatatttttatccagcgagtttagtaatgcagctggacacttataaatctgacaacaataaaccatcataccttgaatcaccaatggaactaactgaactctccccatgatggacaacatcccccccttccaagaaactaactcggtgaggattttatcaattatgccctgaagatgcacttttttaagtcttcttttaaaaatggggacccctgaatacctaaatggtagccaaccttggcgaaagcccaagaaattctagattatgcgttttctagaagccgtcatgtctcccacatagaactgacatttatccaacccc

SEQ ID NO: 181953 - DNA, 441 bp, Glycine max
  unsure (1)..(441): unsure at all n locations
ngacaggttcaggtgcgggtgctgctactggtggagggacttcaatttgcttgccagacctcaaggtgatggcactcacattcttcggattttgcaccatttgtgaaggcaatttgtcagaattttgggactgagcttggttcaactgagtagccatctgccccatctgatttatcagactctaaatagaggctcttgtctctttctgaaattgcatattctggatagtcatttgcctcactaactcctctaaggaaggttgagaaaagggcctcagttgcttgttgtctttgttgttgttgctgcattggaggaggaacatatggcctgcttggaccaacaacattctggaagggagggacaggctgttgttgctgctgttgttgttgtggaggatttgcccatctcagaattggatgattcctccaacctggattacat

SEQ ID NO: 181954 - DNA, 469 bp, Glycine max
  unsure (1)..(469): unsure at all n locations
agctngaaatgaggaagtgtagaagggtgttacttcttgctnttattcgttgaccacagagtggtacctggagatatgtcgcgggggtcaggagaccttggggacgtcaggtggggtgctattgcccaaaaccaagcttgagcaatcccgacccaacccgggcatagtcagtcagtgagaacctgtgatgtacctaagcaggcgagctcctggctgtcaacagataaaaggaactaagaccacaaagcaaggaggcttgtgtggtggctggccacctgtgaactgtgaatgatatatgggatatggcctctggtaatcgattaccaagggtgggtaatcgattacaaggcttaaaaatgaagacaggaggctaagatggtctctggtaatccattaccaagggggtgtaatcaattaccaggcttgaaaacgaggtcaggaagctaggagggcttctggtaatctatta

SEQ ID NO: 181955 - DNA, 381 bp, Glycine max
  unsure (1)..(381): unsure at all n locations
gctcacctcttactgtcttcagtctgaaaagaacaacgtctcttgaataaccttaaattatctataactcaagagagaaaaacacacgactaattcgatcaacactaacatcatcgcgatagaagagaacaaccaaaccaatatttaaacagtttcgctttcaaaatataatcggacccatactaaacaaacatatcgtaaatgccatgaagaggaggcacacaatgtgcacggtacatcaatattcgactntaaatatatagcacactcgaccccactctcgaggattattcatccacaagaataacatccacagcgacggtcgagacgtactgtctctgatagcgcccatgcacaaggagctctccacacagttctttc

SEQ ID NO: 181956 - DNA, 464 bp, Glycine max
tatatacgacgttgattttagaggagcatttttcttgaggctcgttgaaaatacaatctaccgaccgtaaatctgaataaattcagtacggagtagaaatggaatggcagtcgtgaccacccagagagcaatcttgactgaccaccatccagagtgccatgtatctctcaaattgttcagtttagaagtgcgagcagttgacaaaaacattatgatataaaatatctgaactcagattaaggttcactttaaatattataggactaatccaaacctaggattaagtggcatacttatgatataaaattcattggtagattatttcttccacccatcataaacaaacataaactactgattaatcaaattactaattggttcttttctacaaaccttatacatagtggttaccaactattgtcatgtatataaatgagaaggatacaaagcaacccaagctcaca

SEQ ID NO: 181957 - DNA, 427 bp, Glycine max
caaaacgtcaaatataggtgggagtaattgcctttaagttcaaactaattcaataccgaaaaatttgagcattcaacctgtccagatatatatgaggtcgtcgggaacaataatgaacacgaacagaacggatctttctctcctcacaagcactaatcaaatgcctcattaagactaataagaaaacagttcaacccctgaaaagaaaattaaccaatcgaattatcttccacaagattgtacgtaatctttactttgtttttgattagctgaaaaagctacttagctggcggtgatcaagataacgattctaggagctcttgatgctttcttaagcattacctcgaaaaaatactttattgaacattaacatctaaacgctaactctctcatattatatccaatctccgattgacatcatctcatt

SEQ ID NO: 181958 - DNA, 454 bp, Glycine max
  unsure (1)..(454): unsure at all n locations
ntcaactgaatntacaacgttccaattgatttcaaaatgttgttatctattacaatgattnggtaatcgattaccagtatgtttgaacgttggaattcaaatttagatgtgaagagtcacatcctttcacaaaaaagctttgtgtaatcgattacactgatttggtaatctattaccagtgatagtttctgaacaaaatcaaaagatgtaactcttccaatagttntcaagtttttctaaaagtcataacttttccaaatggtttttaagtttttctaaaggttataactcttctattggtctcttgactagacttgaagagtctataaaagtaaggttttgatttttcattttattcaattcattctttagacaacaaacttttgctaattgatttctgaatctctntgaactccttcttcttcctttgccaaaagctttctataagtttttg

SEQ ID NO: 181959 - DNA, 448 bp, Glycine max
agctttataagtgcgggtctgggatacgttggtctagtggtcgcgatatgtgaagatgatgttccaagtactttggatttggtccgaccatgccctcctgatttccagctgggaaattggcgggtggaggaacgccccggcatttacgcaacaagcataatgtaaacctttacggttttaaaagctctatagttgggcctaggctttagagttttctttttgttaaggctttgtgtcttttgtttttgaatttataatacaaggatctttcttcatctgttcctgggctctacccattctcattcatttgcatgtttacttctttttctgaaacggcagattcgatgacgagtcctccgaaggtactaatacctgggacccgtctatcaacttcgagcaagaaatgaatcaaacggaagatgaaggagatgaggatgtgggacttcct

SEQ ID NO: 181960 - DNA, 254 bp, Glycine max
tatcgagacgctcaaattcagacagaagctctaagaattcaccggcttaaccgcaacatgcaagatcctgcaccgacatgatatatcaatacactccagattgactaatggaagctctccagaattcacctggacgtcactgttatcttcgacgtccgattaatgcgcataacatattgtgattcttgaaaatcagccgtgggagtgttcaacacactcaaatggtcattactcttcagtactgatgtcccatt

SEQ ID NO: 181961 - DNA, 406 bp, Glycine max
gcacaacaagtattccacatccacaatgcgcgcataaacccaccatgccttgttgcccacctccaactaagctcacgcactcccacgtagcccatattctcgtttctctcaacaccgggtccccatcaatcctcccaagctttcccaacatcaaagttatacaacattcaaacagcacaatctatcacagccaagcaaaacagggcaaaggcagaaaactctgcccaaaacaccaaccaaatcacagcttttctcacttaaagaccctcagaacaattttttcgttccggttcattaaccgctggatcaactccaaaattttactggaagtctctagtacataagactacatcttgacgcgtgggatttactagcaaacatccagaactcattctgcactactctt

SEQ ID NO: 181962 - DNA, 411 bp, Glycine max
  unsure (1)..(411): unsure at all n locations
tgcgtagcccaccatattccatagtagaatacgtgattgtgtctactatcattgtcatcgnttttttttttcattgaggtgccactttgagctgcaaggttctccacctttgggcgtattctttgaaagattagtgccccctttttgcacatgttctgtagttgcatcctatccgaagacattatactgacactgcctaacgaaggcaaccgctaggtccttccaagaatggactcgggaaggttccaagttagtgtaccaggtaacagctacccagtaagtctttctttgaaggaatgtatcagtaattccttatcntttgcgcatgcccccatcttccgataagacatctctagatggttcttggggcaagtagtccccttgtacttgtcaaagtccagcaccttgaac

SEQ ID NO: 181963 - DNA, 367 bp, Glycine max
attctttgatggccttgatattctcaggcgccacttggaccccatttttaccaactacaaaccctaagaaaactatattatctacacaaaaggtaccctcttctatatttgcatagagggtgtttttcctaaggactgaaacaacttgcctgagatgtcctaagtgatcatctacgctcctactctacactaaaatatcatcaaaataaataactacaaacctacctatgaaatcccttatgacatgatgcataagcctcataaaggtgcttggcgcattactgagcccaaaaggcatcactatcattcatacaaaccaatcttggtcttgagagcgcgtttccactcatcaccctctttcatcctg

SEQ ID NO: 181964 - DNA, 283 bp, Glycine max
gacctactatgtataagaaatactcactattaaaatattctttatgtgaatgcgtgacctcattactaatattttcatcaaaatgagactttctatgaattccccgtttctacgaaatttctactctatatccatctccatagccattttttctgtggattctaaagacaatgcaaacccgtctttcctataatgttctaaataagtgataagaccttttaactgatctataaccacatctatatgcatatctcttgattgttgaaccttgctcaccgaattg

SEQ ID NO: 181965 - DNA, 460 bp, Glycine max
tcttatgccaaagaactggcctctgcagctgctgttgtgttttaaaatttggctggggaagtgacaaaactttcattgcagaatgcaaagttagaaaaagaattgatggccgcgcgagacctggtcaactctcgtagtgctgtcatgcaaacggttaatggtgtcaaccgcaagtacaacgatccaagagctggaaggaaggggaggatttctagccgtgctagtgaaatttcaggagctggtgtagatgattttgagtcatggagtcttgttgctgatgatttgaagatggaactacaggcaaggaaacaacgagaggcagctctggaagctgcattatccgagaaggaatttgtggaagaacagtaccggaaaaaagctgaagaggccaagaaaagagaagaagccttatagaacgatttagcaaatatgtgggtcctttgtgcttacgtaaaaaaag

SEQ ID NO: 181966 - DNA, 393 bp, Glycine max
agcttatgaatgtcattacgctgatgatttattcaaaactcaaacgcctgcgctgcacgtgttgggaaaaaagataaagacaaagaagatgtctgtgttcctgttatgtggacaaactaattactatcttatcttaacatacagtttattaataatttttcttcactgtgaaagacagatgagatgtgaaaataaataacacattatataattcaattacaactaatataatcccatttttttctcacttcaaggagattatgctaacgcataagtttcattcaaatatgaccatctatcattatgtatgactaaaaatataaacctcaaagactccacgtgtcaattagtaacacgccccaattaccagaaataaaattcttacgctagatt

SEQ ID NO: 181967 - DNA, 390 bp, Glycine max
  unsure (1)..(390): unsure at all n locations
ctcagctgtgaatatgacaaaacttggcagtacgtgcaagataagtgcattatatgactttggngaagactagtgttgctaaaatatagcagagagaacataaagtttttctgtgagccttatggttttatgcatttccagtcttaacagagggatgcctcttcttgtacagagcttggccttcatattttcttatctaaagttttgagttcctatcaaattccttcctttttgaagtttcatctccaaactgttgttagatgctgagccttaagggccctgtcactctctctgtcctgattggatcttgaatcaatgacgcgctcttattttcatgtatatctagatattagtgcttcatatgtcgcccgattgaagatgtgaacattt

SEQ ID NO: 181968 - DNA, 404 bp, Glycine max
agcttggaagcaggacacaccaaacctgttttattatttggaaatggcgagcaagttctttgaacaccaagtgagtggcctccacttgatctcaacacttgagctcttcatcctcttcccactactactactattaggctccttagaaagatcaaagcttgcccctttcatccctaactcctgaatgcaccttgtcacagccctcccatcattcctctctctttgcaagtgcccccacaccttccaatacctatgcaccttcacctgcaaagggagatatataaagttggcctagtggcgaaggaagaactaaaggggagacgaattccacgccccacatcctcttgctccaaaaactaaaaatactaacccctaacagttggccgcataacaaaacaaaaata

SEQ ID NO: 181969 - DNA, 333 bp, Glycine max
acgcaagagaaatacgtgtataatatcgctctgggttgaatatataggtacaacgagataatattatatgaaaaattgaaaaaaatatacaatgtatgacatgtgaaggtggtaacatataatcactccaacactatctgaaatgacacaaagacaacacacgggatagagaaaaatacaaaatcaatttcttctactatttgtctaggacggaaagatgaaagaaagctaatcttgcgtagtaaaaaaaagcaatatctggacactaagcattgcctagatgttaactccaaatattagttacattgcctatacagatgttctacagtgaaa

SEQ ID NO: 181970 - DNA, 410 bp, Glycine max
  unsure (1)..(410): unsure at all n locations
gcgtggaagagtcagtcttcctactnttatttgtttatcacagagtggtacctggagatatgtcgcgggggtcaggagaccttgtggacgtcaagtggggtgctattgcccaaaaaaaagcttggctaatcccgacccaacccgggcatagtcagtcagtgagaacctgtgacgtacctaaacaggcgagctcctggcagtcaaccaataaaagaacaaagtccacgaagcaaggaggcttgtgtggtgactggccagctatttatcttgggtgttatatgaaaattaccctctggtaatcgattaccattcgtgggtaatcgattacagggtttaaaaatggagacaggatgttaagtancttctggtaatccattaccaattgtgtgtaatcgattacactgtatgat

SEQ ID NO: 181971 - DNA, 456 bp, Glycine max
agcttcctcgggccatttcctgcgaaggtaaatatttgtagagttagtttaccaagaaatgctattcttaaaacgaagatggcatacaacctcccccaatacacaaacatcaatgtaaatttagagcgaactcatgcacatacttcctttcgaacattcactcgcacaagatattcttctaactaagaaaaatgcactgaggcacaatcaaggcaccttcgttacctagatcacttatatgtccttccaaggtgtatttgctacctacatcacatgcacttcctttgctaaatttacatacatgcatactcaaagcattttggctaccaaaaatggcatacgtgcacattctggtatttctaatacctatacatatacaaactttgtgatgaatcttggctatctacacaataaggggctacatttcatgctttattcaagcgttgttgctaccta

SEQ ID NO: 181972 - DNA, 366 bp, Glycine max
tttacaacgccaccgccgcagatgggcgcacaaggtgaaactcatacctaatggcactgcggatcaccacaaacccagattggaagctaagggcgacacaaaatacgctatcaacacaccctctgatactatcatccccgccgctaaacctacaccaatcacagcactttaggccgccgcagccactaaaaacagagccatcttacaacacgagccggacaaagcactccttaaaggcgatctatccgaggaacgcaatatggaactaaccgaagggaccaataccggtgaccaaactccagggcgccgacccaaaaaaccgtcatggcctagacaaccttaaaacaaggccagtaacacccacaa

SEQ ID NO: 181973 - DNA, 386 bp, Glycine max
gcttaaagatggctagatttgttaaacataagccttaacaatgttgaaagctggagttgctgcacaggatgtccaacgttatgtcaaagaataagatcgggctgcacaatgcacaaggcaagataaagtgtcaaatgaagaattgaagctgcaggattcacgatgtcggatacaatgtccaggacatcctgcctgaaaatactggaattgctaaaagcattgaagctgcaggatccacgatgtcggatacaatgtccaggacatcctgcccgaaaatactggagttgctaaaagcattgaagttgcaggatccacgatgtcggatacgatgtccaggacatcttgcccgaaaatactggacatataaatctgttatatctttaaca

SEQ ID NO: 181974 - DNA, 412 bp, Glycine max
ttgttcgtgctcgtgcacttaacgcacgttagtgatttttggcttagcgcgcctttctcgcttaacgaatgaactgaagcagtgcgcttaaagagatgaagcggtgcgcttagcgaatttgtacaactcatcttcttctagattctttctagcgcttaccccaagagtgttgcacttagcgcatgctcgctaagccagcatattgacttagcgagaaggttaaaaacaacactttccaaagcttgcctaattaacctgaaattgagagaaaatgattattaaacacacaaaatgaaaatactaagtatttaatacctatacttaacagagaatacttataacattacaaataaccataaattgggagagtttggcacaatttataccagttttatacacaaaagttagtcgt

SEQ ID NO: 181975 - DNA, 451 bp, Glycine max
ggaccttgaatactcagcttaacattcaacttcgagcatctcgttatattatacgactcaattagacatccgagtaaaaagttattgtcgtttgaatttgctcagagcttcaacattcaatttcgagcgtctcgatatatgacgggactcaatcagacatctgagtaaaaagatattgtcgtcataattggctgagagcttctacattcaatttcgagcgtctcgatatatgacgggactcaatcaggcatccgtgtaaaaagttattgtcgtttgaattggctgagagcttcaacattcaattttgagcgtctcgatatgttacgggactcaatcagacatccgagtaaaaagttattgtcgtttgagttggctcagagcttcaacattcaatttcaagcgtctcgatatatgacgggactcaatcagacatccgagtaaaaagttattg

SEQ ID NO: 181976 - DNA, 469 bp, Glycine max
  unsure (1)..(469): unsure at all n locations
agcttctatataagctgaaccatttttctatatacacaagtngagtnttattcagaaaattagagtttatctcttttatcttagtgagagtgattctcctaaattcttgagtgattcaagaacaccttggctgtatcaaaggactttcacaacctttgtgtgttgccctcgctggaaagagagattctttccttccattntatgccataacttccattttccatcatcacccttgttctttcaaaccacaattccagaaaatccacctctgcccagaattatctcgtggccataacttccattttacgcactcaaattaagtgattcttgagcctaaattgaatttcaaaacgagacctttcacctcgttttggaatcacctcatttaaagccctgtagcttcagttattgccatttctatatttctgtccagccaccacttaacctacgttntaccatctcattcatc

SEQ ID NO: 181977 - DNA, 473 bp, Glycine max
  unsure (1)..(473): unsure at all n locations
tatttcaatcagttttacatgaaagcttatgagaacaagtcttttttagtttattccattgagcttctcgacaaaccgtatggataatctctcatgtcatttattggatgagagtttaattaaatcttttgtctaggcactgtcaaaattcatcatcagtgttcttcaaattatgttcaattacttatgtatacattagtctgatttatcctagccttttatttgtgtgaattgcatcaaataaatgctgattatacaccaaatttggcagaggacttttgttttatgttgcttcatcaagaaacctgngaaagcaactgaagatggaactgatgcactgatctatgatgaaagggagcccagtaaaagcatggtttctgactatganagttaggcaacagcagaaggaattccatttgtaagttgaagcatntttcatggacatnattacactcntgcatgtgaaacatgct

SEQ ID NO: 181978 - DNA, 470 bp, Glycine max
  unsure (1)..(470): unsure at all n locations
agctnttgaattatgtgccccttctctatctctctaatcatatgaagacactcgacgccacatcgtgccgccacaatgttttattcagttaagggtgatggttttccatagcagaacttagtacacaactcagatgcctccatcccaccatggaactcaaggagttggcttatttggtgctaagaagatgaatgcaacaaattttgaacatagcttttgtagcctcaaacatttggacaacaaggcaaactaaacaacatcaccatgaacttcaaaataagtactaacaacaaactaaacaacatagaacaatttctattattaacaatttcacttctgaagaagatatctaattcccttaacttgaattatgaggccactagaaactttagaagagactcacgtgtatacaaaacagaagaagatatattatattcattaacctacaagaanaaacatatacataatct

SEQ ID NO: 181979 - DNA, 418 bp, Glycine max
gcaaaatctcctgaacaacatatgaaggagatgattttctttataattaaacaaagatactactactactatgtttctattgatgcttgtatctgagtactaataagaaagcgtgttataatgattcaaaggcataacaataaataacttaacaataaaccatgaactatagcataaaagtattgcagagatagtcatgaagacaataatactcatgattagagatagtggatatcgtaatttttaggcgacaatagattaaataacttaagaaatctctcaattgtttgtcttacagaagaagaaaaagacttataattgaataaagccaataaaccaaaatgtgtggatgtaactaagtaagcaatgacctgaaaagtagagagctactaagctagagtgagctacatgttataat

SEQ ID NO: 181980 - DNA, 418 bp, Glycine max
acagggagcgaacattgctgagaaaccctatcctctgcacacaagtctctagggacagtacaccaccgagatggacaagacaatccgcagtattgtgagtagcattttgaaagacgcctctgttcctgatgctgagaaagatgtccaacttctccacccacatgtggctgtctctgaagctgatgaagatgttccaacatcttccaccccgaatgtttccgtgcctgatgttgagaaagacgttccaacatcttccggccaaatgctgaagtactctcttcccccagcaaagacagatcaacacaggaagatgatcaagccacagaggagacctctcgaccacgggcaccagaacctgcttcaggtgatctcatcgatctacaagaggtgcatcctatgaggaacccattgccaacaa

SEQ ID NO: 181981 - DNA, 468 bp, Glycine max
  unsure (1)..(468): unsure at all n locations
ctcagttgacacctaagatggaggtcatctgttgccgcatcttctgttggcacctgagttgtaagtcttccccacccagcctttgttatttntctatttgttagttaagcctagtattaatgatgattatgtctataagatgtgacttttgagaagtaatgatgaatataggaagttttttttagtaattcttgagtatgtattatgtgtattgggaattatatgatttctatctgctatcattagggtagcagctgttttacaatccactaaactgctagcattattggggttgaaaactcaacatcactacccaagattaaccatttcactactagctacaagttaatgaagttatgcacgactgtgctcacaatttccttggaaatacttggtacttggcagttatgtggagtatacatctaatttaaaggcttgaagtagaacacacctgtgtttgattgattt

SEQ ID NO: 181982 - DNA, 454 bp, Glycine max
  unsure (1)..(454): unsure at all n locations
agctttatctgcatgcgcaagataacatatttcaggtatataacctttagaacaaancaccaaagaccctaagatctacaatatgtttaattattaagcattagataaaacacctggattcgcaattggttcttgatcaaagcgttcttcaacagttgttgaatcactaacaatcgatggtcttatgattttttctcaaccagaacctctttattcctcaatgagacatgctctaactcaagaagagaaactatgagtgacaactcggtatattgggaaccataatcttcttatcttatcacgtgttaacctactagggttcacattatcacctaatgagtcaatactgataactcatctaagtccatatcatctttttgatcgcataaaataaaatctactactaataaacaattaatataatcaccttatgatatcaatccacattaattat

SEQ ID NO: 181983 - DNA, 470 bp, Glycine max
  unsure (1)..(470): unsure at all n locations
ntatcgccaacaccgttagcagcttccatgcaaaacgaacccttttcgtaattacttttaaaagagacccctttacgtaaatagtttttaaaggtgacccctttacataaatttgcctcacatttctcaccatatgattcacacctctcaaaatcaaaatcaacgaaaactgaaatagtaattgcaataaaacaaaatcaaagtcatgaaactctaagaccaactccaaactaaaaaacctagcaaaagagagagcaagagagaaagcttcgaagcaaagctccgcgtttgcgtctgcgagagagattgagcgagagtccaccaccgtgtttgccagagcgagtgaaatatcccacagattgcctgctctctacggaaatccatgtgtggacggcgtggtggtagtctgcatctcgatgcacgtcttccctgaacacacacgcaagcgttgttgttacgcacgatgcaca

SEQ ID NO: 181984 - DNA, 432 bp, Glycine max
cccggatcctctaagcaccgcggctgcaactcatgctgagatgatggaaaattttttactgttgtacaacacatacaagtgagcttgtaacaaatcttctatagttggagtgataacatgcaatcctcttgaacccttaccgcccactctgtcatcacggcaagactcaggaaggccaacaggtttagccttttcaatgtactctgaacaaaattcaatggcttcttctgcaatgtaccttttaacaataaatgcttccggatgatgtagattcttggtataccctgttggatcaagtggccttggaataattaagaaggggggggggtggaattaattattaatgaacctttactaattaaaaatctatccttcttaatgctactacattcaattaggcatttacgataatgttaacaaagtaaagaacag

SEQ ID NO: 181985 - DNA, 454 bp, Glycine max
  unsure (1)..(454): unsure at all n locations
taagctnatgtcttttaagtataacccacagattaacgcggtattgtaaaatcctattgtgttcatataagtagtaaaaataatctatttaatgcgagtaaaattaattgttggcctactagttaaagcacaatcgtgatttcttactaaaaaaaaagcataacatttacactgctctggagtttgtacccctgttgtaagaaagagaacatgttaagccattcttctgcggtagaatttcattttcaatcataatcattgtttggacgaaggaacataataatgaggtctacctgcagttaaatctccaatattggcatttctttccttttcatgttgtgaaatctagttaatttttgagttgttactttaattatctacatagatagagctcctgcttgattctttgatgcgcgtagntacacttatgagaaattaattgatgagtacttgc

SEQ ID NO: 181986 - DNA, 463 bp, Glycine max
  unsure (1)..(463): unsure at all n locations
agctntaacctcattggctctcacagtctttatatttgggagccaatccaatccttgtgtccggactctcagccacttatgatagccgccgatgatcccattactgcttcccctaagctctctgtcctttcttcatgccgcatcccatgccttgcgaactccttggagtaccctcgcgttgtggtcactgaaaccccgtgcaatgaaaggcatgatgctttcgtctgatggcactcctctcatggggtagccaagctgtcttatggcgaggacgggattataattaatacaacctcttgttcccatcaagggaacatttggacatccttcgcatgaagatagaatcctgattctctcttccatctagcgagggaaccaattaacagacgcccctccatgctagccaagagttggtcccaattcacctttcctctttcgacgcacgagcggtgaccttgtagca

SEQ ID NO: 181987 - DNA, 436 bp, Glycine max
  unsure (1)..(436): unsure at all n locations
tgtgagctaatttaacactgaagagaatgcaatttactttattattgttgnnttgaagtttgaaatccacttcattttgaggcagaacctangagtatgcatatagcaacaagaatgctatatgttagcttcgtaattgaagtttcatactttgatgacatttctttgtttcatgacttttgagtagcaaagctgatgcttacggacagagctgaataagtgaaaacattgcaatattctactatttatcttttttggagattaattaaagtagttccaaatatcattgcagttcaagtagtacataatgcccaccaagcttcaatcaggtttttcatttcatgattaattagttcaagtagtacataatgcccaacaagcttctagatgagaaaactactgttattacataaactttacttgatgcatgtaatgc

SEQ ID NO: 181988 - DNA, 388 bp, Glycine max
agcttgtaagtaactacaccaatacttcttttgccttgctgaacaaaaccgcagcagtaggcacattctgagcttctttccccattccaacagcttgagcaccctgcaatcacagaaacaatacattcacaaaaacttgcgtttgtgtgtgtttttttttcttcattaattcgaaattccaaacgatgtccttttgaggaagggggagtttacctgtccggggaagaggaatgaagtggaggccttgtaatcggcgaacacagcgtcgcggagagaaggctgatatccggcggagacggtcatggaaagcctatatcgagtgagagggagggttcttgtccatgggcgaagaacggagtggaaggaacaacgagagacgacaacatgg

SEQ ID NO: 181989 - DNA, 473 bp, Glycine max
  unsure (1)..(473): unsure at all n locations
ggctctgaatgtgaccactgaacaaggaaagacattgaatgatgcccaaggagatgtattntgtggtttaggttggtatttctattatgttgcttgagaagatgttgtaatgtgataatagctatgctcataattntttataatgcaattctctgaatatttatctttgtcatttagaggtggtggaacatgcttgtgggatggcaactctgcaaatgggggagtatgtttccaatgtatcgcatgggattgatacttacagcattagagaaccacttggtgtttgtgttggtatttgtcctttcaactttccagcaatgattccctagtgggtaagcagtcttgtatcttttggatgggtgtttttgctaactaattcaatattcacattcagctccattacttggttggtcatcgtttgtgtcagcaagcatgagatagaaaaagtctactttgtagaatgatccagaaat

SEQ ID NO: 181990 - DNA, 410 bp, Glycine max
gcttctcttatgtggagggcgggctcttctttcttttttgtctccaacccagctctgaccactgttcttccttcccgcgatgcttcttttcatgtccgcctgagtgggcttatagcctaaaccatactccccacgatttccttgggtttttatcaggctagttatgccgccattgcctttgtctaaacccatccgggttcataaccgttccccaacataactcgggccattattaccgccgcatcggacagacaaggttgcccaaagagggagttcacggaggaaatgcttaccacctcacaagactggaaagcggtttctaacgattcttctgcggcttccacatcaggcatggaggatgggcagcttaccaagatatctttctcgcctgaacgatgaccaaatgcccc

SEQ ID NO: 181991 - DNA, 248 bp, Glycine max
  unsure (1)..(248): unsure at all n locations
gaaagagagaaagagagagagggggtttttgtgatcacnacaccacacgangcagagagggatataatcgaactttgatctgtgtctcacaagactctcactcatcatagcttacaacaaggtttacacttgcctttattcttcgcctaagtaactcccttaaacaaatttctgacaagcttcctgagaactttcctgataaacttccttgagaaacttccttgagaagcctccttgagaaactcctt

SEQ ID NO: 181992 - DNA, 380 bp, Glycine max
ctaagagttgatgttaagaaattgtacttggttgttgtacctctccattcttttcttactacattcattatgaatgtttctagtgttatatgatacaaatatcctttgattaacaaatctgctaaatgaggaaattatgaaatagagaaataatattaaatgtatattaatcacataatcaactgatatagaaccattcgtgtcattgcacagcttaagtttttggtgaaagatgtaacttttgatatcataaagtggcctcatttattctcaggatctcttgccagatgaaaagccacgcatgatcagtgggcttggactcctcggtacacatggactaactatctaatatttgtattcattggcatactgctttgctc

SEQ ID NO: 181993 - DNA, 446 bp, Glycine max
ctcagcttgagtggcaggtggatggtagcatagtcagttgaaatattctaatttggtttgaaatttgaaccaaggcttcctatcaaaggacaatgcttagttgacttcatggttgagctccctcccaatgaagaaaccaatgaaggataatggaccttatatgtcaatggagtctcaatagaacaatcattggaaagattcaaacaatcagaccaaatacaaagccctcattttgggtctgaaggcagcaagagaagttggagtaaaaaatttgaattgcatgagtgattccaaacttgtcactgaatagatcaacaaatttttccaagtcagggaaacacaaatgcaaaaatactatcatttggtcaaaaggttgttggaacactttgaaaattatgagcttatacatgttgacacggagaagaatgaccaagctaatgccttat

SEQ ID NO: 181994 - DNA, 462 bp, Glycine max
atgccctctcgggtcatctggccctagaaacactttgtctatttggccgtgtttctcaacagaacatggtcatcctcatcgacggaggaagcacgcaaaatttcatgcaggaacgactggttcgttccctcggtctcaaggcacagctcacgcatctgcttcgggtcgtggtgggaaatggcaacgagttagcttgtcatcaactttgctccggtgtcatgattagcattcagggccaaacgttctcggttgaccttcatgtccttcccctttgcggagtggacttggttctcggtgttcagtggctgaaatcccttggccctgttcttaccgactataaggatcttacattgaaaatcattcatgatggaaaaataatagaattataagggaatatggacgatgctcttcaccccgtcactcctacccagttactatgaatagtacaaatggacagtgcta

SEQ ID NO: 181995 - DNA, 454 bp, Glycine max
  unsure (1)..(454): unsure at all n locations
tgttcgcaccatcaganatggcagcgagtccttcatattgatcatgattaaagtcattcagggcagcagtaagatattcaccagcaggggtagtcttaactttctcggaatcagacttaactaaagcaacagtgccatcattcttatctgtcatcaaagaagaaggaagaacatccagagaacgagctctcgcagtggtgctggtgccattcctgtttgaatataacgagaataaagccaatatccatatgcttaaaaacaaaatataacagcagagagctctagataccatgtagaaactctagagaggaaaaaagagatttgtatattgaccttagaaaatattacaaaggctactgagatctcttacaagaacaatatntatactgctgagaatcagttgtaactgaagactaactaaagctaactgtcaactgactacagtttaaaaact

SEQ ID NO: 181996 - DNA, 457 bp, Glycine max
  unsure (1)..(457): unsure at all n locations
ancttcacaacatccaaacataggaagtttttttttctcataccattcaggcattcacattgctgaacatacagcattatccacctcaaaaattataaagataaaaaaaacacactccctagagacatgaatttttccacacgcattcaagtccaaccataaaattttcaaaccatccaaaactagcattctaaaacatagactgacaaaaaaaaccaaacaaatcaagtgtgaaaaagaagaacacaaactaaccaatccccggattttctttgagcccgcacttcaatcccaacggtccctgccaccctccatcaccaacctcctgcgcttgtggaaacacattgaccttaacactcccatttccctcctcccgctccttttcctcattcacaggagcaactgcagacactccatgcncattcccattnccattgaaaccaactttccctcacca

SEQ ID NO: 181997 - DNA, 344 bp, Glycine max
  unsure (1)..(344): unsure at all n locations
ctcaagcttcttgnccttggacattgcaatagatgataaaatttctcttatatagccnctaattataaggttcaacgatccaaattaagctaacgagaccatctactcctaatgttagttcttttactatcattacaatgaaaaactgtttatcacgttacgtccatatttgttgaatgtgagctacactattatcaattatcactattgcaataatccctgagctgcagtgagtccaaactcacaacggcttcaacgaatcatgaattatatgaatcctcaaagtgtaggcattattactactgtattgatcaacccgattgccactgcctctctactcaaat

SEQ ID NO: 181998 - DNA, 449 bp, Glycine max
  unsure (1)..(449): unsure at all n locations
ctaagcttcctngcatgcttatcattcatccatggcagacatgagttctatgagcttgtgctgntaacaatcacagntgattaatatgcatcaaaatagttccttttttctatggttctttcccactcaaaatgatggtagttccttttaaactaccatgagcaattgagcaccacttagttgccgttagaatatcaattgttctgttaataattcggttatcgagaatacaggtataaagctagattcatctcttacacacacttggttgatctctattaagccatatcaactgtatgtgaatgtggatatcggaattcatttattgtctactcttgctccttctctttacgtcattctgatacgtacctttgtctctaaaagaaacaacatnactttctttntcctcttattctntctttctattttttttctttagcagcagtatc

SEQ ID NO: 181999 - DNA, 489 bp, Glycine max
  unsure (1)..(489): unsure at all n locations
atccttaaagcacctgagctgcaacttatggttctttttaaaaaatatttatttatctatagntcttctttaattgggcctacatatattgagttgacttctattacaagtactttttcagctaggatggctcaagaacttgaaaggcttaaaataaatttaagaatgatgtcttttatatactcataaaatagtttattaaaattatcattgttttatttaaaattaattctttgaattttttgtaatacaaaattattgattaaattgtcataattaatttcattttttagactttttgtgatacaaaattattgattaaagagaataaaaataaaagaaaaatctttggacttttttagctattaattattaaatttcttttttttaaacaaagttataatattagtgaagaattgttgctcattaattattacttacgataccaataaaaaaattaacagttacttataatatttaattaaaatt

SEQ ID NO: 182000 - DNA, 438 bp, Glycine max
tattgataatagaatattgacggaggcaaaagacatggttgatagaggagaaagttctggaattaagggaaattaaatggtgcggtgaaatccgacaattagacagcgacacgtatgacttggtggtactaaaaaaaattttagcatgtgaggaaggtgtgagcactgagcaaaataaataaataaataaataaaattaaaaaaatgacattgtaggacatgtgggttgaagtgagaaaagaaggattggagaatttattatttttttattggacaaaattaattgacaaaaattaattggcaagtacctatcaatgaaaaggttttttcccaaatattacactaagtaacataatattatcatcatcttcatatcctaatggaatagtctcattaatttgaagaacatgaccattgtcatactcccacaaaatattt

SEQ ID NO: 182001 - DNA, 476 bp, Glycine max
  unsure (1)..(476): unsure at all n locations
agctctgcacaattcttagggtgtccagattttatccaaatctatttcaatttcttcccggacacagaattcaccatcgacatactctagtaccccattttcattttgtatgaatttaccattgtggtgcaaaataagactgatttcatcagacatcctacagagaaacataacaaacattaagtgtatattcacaaaaagagaacataaaatgttccataatagagaagagaagaagtttgggaataaagaagagaacacacgagaagaggtttgacgatagaagccagatggacgatgaccaccacgaaaacgcgatggcaatggcgtcgttacggtcattgttgaaaccccaaaacaaccgtctgtcgacgacgatggcactggccgatgacggtaccattaccaccaaccaataaaagccatatgcgtagaanaaaataanaaaagcatacacaaacgacacaacatatgat

SEQ ID NO: 182002 - DNA, 432 bp, Glycine max
  unsure (1)..(432): unsure at all n locations
tgtgactcacagncgtgctaagccatattcttcccctcttcggaaatatggaaaccattctaggggacaaaggactagtggaggacatcacctagctggtgggagttctcaaccagttaacagagtgcctcaacctactantagaggtggtggtggtgctcctgctacacctgctatgccaacccggtgtgctaagtgtggtaagatgggttattttgctcgtgagtgcccagatagtgacgtgacttgtttcaactgttgaagtaagggccacctcagtaccagttgcccatatctgaggagggagaagatgagtgggagttataacaaccagagtggacgaccaaggactacacggagagtgtttgctcttagtggtgctgatgccgcagagtatgatgatctcattcaacgtatgtgtttcataaatca

SEQ ID NO: 182003 - DNA, 467 bp, Glycine max
  unsure (1)..(467): unsure at all n locations
ntgcctcttataattatatatgtgacatcaacaatagtctgaatatatntttcactccaataatacaaaaaaaattatccaaataatatagtccaaaaattatttatacaaattactatttaacgtaagaaattagtttctcccaaaccaatttctcaccttcttttttcttaatttttatcttagaaattacgtagttatttgttttaattagtatcggcttagtcgatgttaaacagtatcatgctcaccaatgaatattacctattagattataaaaaaaataaaaaaactacttatttaattaaaaaaatgcttttaaaaacataacatgcatttagcatcagtttgacccttaagtaatcgatttctcaccttaaatactaatttggattatntatataaataaatttttcggtatattatttggataaattttaaatttctttgtattattgggaagaaaa

SEQ ID NO: 182004 - DNA, 464 bp, Glycine max
  unsure (1)..(464): unsure at all n locations
agctngaaatcagattatagagaggttgttgtactgggattcaaagcttcgcatgtctagggtttctagagagagaaagtttcaagttccagagagntttgagagattttgctatgtgaagatctgtagagactagagcctgaagcaggagccagtttgagagcttgagatgagtttgtgagtgattgtgagatcctagaggtgaaggagacatcctcaccacttgtatttttgcaatatttcatcttgttcttctctttgttgtaaagaaggcttcctggtatggaaagctaaatcctctgttggatcttccctataggtaccagatgtaaatatatttttatctatttaatgatgttttgtgtgttctctatgctatctgcttttcactccagtatgcctctaccttgatcacgtagatgcatgcttttgtagggtctattcacagtggaaattggtttgac

SEQ ID NO: 182005 - DNA, 301 bp, Glycine max
tttttttctctgcaactggggggttatcattagccccccgcccatttgtcatttacagtatagacatcaagctccctgttttaaggctcagatcagtaagctatttctcacgatgcaacccttgctacgaccgcttgggttgagtaagaagtgagagggggctagcctgggccctccatattttgcctgtcgacaagattcaatatgctcattttagagactgacatagaatcgaaaagccatcttttctatccaatagtttttatgattaactctctttgcttcttaataaggctctccc

SEQ ID NO: 182006 - DNA, 259 bp, Glycine max
aactagaaatcaccattgccaccccaagagcaccgagaaaaatgaaccggacatacaattgcttgcgagcccacttggactcttgctcaagggcgcaagcggcaattgcacgcagtacccgtaacccggcacactccttccgaacacgtgtagcggccaactagaacatctcctaggcaagagtggccaatactaactcgctaacaagagagaggacagcatcgtcttctgacggagcctaaaaacactctacgctgac

SEQ ID NO: 182007 - DNA, 470 bp, Glycine max
gggtaacaatcagagatgaaagggagaggattctttcgttgacatccacatccaggtacacatcaacaaacctatcaggaaacaagacctaaaaattggccaaggtcatgagaagttgtaggcaaggctttaaaaaacgatccgcaattagcaattgtccgcaatttaaaactttggctggcttattagtttcagcaaatacaataaaaaacaaaaacactaaaccagctccaagctttcttttctttacaatttccaaataccataaatcatattctcaacgggatcaacagtcatcatataaaagaggcaaaaaaacaaaagcagaagaggcaaaaaaacaaaagcagttcaaaaaccaaagcaattcaacgggaatgagaatttcttccattttcaagaattttttttttcatatttatgatttatgaggacttctacaaagttcaaagtggatagaacaccataag

SEQ ID NO: 182008 - DNA, 336 bp, Glycine max
atttaacaaatccaatcatatagccattgccttgtcgcttaatccacacaaaacttttatatgatatagtttgaatataaatcctaattttgcgtacttgctctcttcatacaaggtttggctctcatcatttagaagctcataaaaaccattatgatcttttcttggctcatcatttactatctcatcttcatttaatgggtgtgatgcacctacattagggtcatgttgcctatcttgttcaatgcgtcattgatcatcattttcattgggttctgaggctgaacaccactatcttgaaaacatcttccacttgacaagattctaatgcttgct

SEQ ID NO: 182009 - DNA, 444 bp, Glycine max
tctggacgatgatgtgtggagaaagtttttttcctactagagactggttttctcccatgtttcatttgtgtgtaacttgtattttcttcacagatggggcatgcatgatgacccttaacactgcaaccgctgaaattcccatatgctgggaagtcattaatggtacaaaaaagcattgcacgcatttcaaatgtctccttgcgaaacgcatgatacactacaaccccctcgtcccacaactttctcagatcttctaccaacggacttatataaacatcaatgtcatttcctggctgtcttgtgcccgacatcatcatagacaacatcatgtattttcgcttcatgcaccaccaatgacgccaattgtagattacttgcaaactggcatgaactgtgtgagtgcttaagtgccatatggattcattcctactggctagtcaagtc

SEQ ID NO: 182010 - DNA, 466 bp, Glycine max
actcagcttttatccaggcactctcttggtggagaagctccttcatctctggcttattccctagaggatggcgcctcctctcctcttgtcctttgtcttatgctgcatctccatggtgaaaaatcaccattgaaggacatcattgaagctcaaagatctagcctccatagaagctccacaagcagacttccatcaataaccctaagcttgtctatttaataggctttggtcaagaggtcatacacacgattatcattcttatcttttttgacatcctatccttatagagaggtagggagaaagctaaagggtactctcaagagagtgtgtgttcatatggaagaccaacttgcataactctaaaaagcgattggtcatcttgaattcaaatacgttttcgctctgatgtcttaatgattaacatgattgatttcggattgatagatttagttccaatagcttggac

SEQ ID NO: 182011 - DNA, 395 bp, Glycine max
  unsure (1)..(395): unsure at all n locations
cgccacaaagcggatacattgctgacaatacggctacaaatgattttaagccctgtagaagatatggccccctattacagcatgtttaaatgaggaaagtaataggggtactgtggtcaaatcccaccatgaggtttcaagcctataacatattaaacaattacctttctatcttgctatccagcaagcctgtgagcacatgaagtaagccagaaaataaatgtaaggtgaaaatctccatcttttacacaaagacactgataacatctgctngaacctgcattaagttgatatcattgtcaagactatatatttcataataaaaccctacgtttaagtttgaatgtgctatatacaacacatatatacccaccagtggttactactactttata

SEQ ID NO: 182012 - DNA, 470 bp, Glycine max
tctggtgggacatcttgacttgctgtccaatctgacattctcacagattctgccttcttctattttcagattgggaatgcctctaacagcacctttgtcaatgattttcttcatgcctcttaagtgcagatgtccaaatctttgatgccatattttgacttcatcttctttggagaatagacatgtggaggagtaactggtttcttgaggtgtccacaggtaacagttgtcctttgatctgctgcccttcattagaacttcactcttctcatttgtcaccaagcattctgactttgtgaagtttacattgaatccttcatcacacaactgactgatgctgatcaagtttgcagtcagtcccttcaccagcagtactttgttcagactaagaagtccatcatggactatctttcccattccagtgatctttcctttagagccatctccaaatgtcacatagctagtggagc

SEQ ID NO: 182013 - DNA, 434 bp, Glycine max
  unsure (1)..(434): unsure at all n locations
agcttaccgttatctgcgtgtgttattgttttaatgttatgcatgtatggaaatatatatacgatataggagatgacaattgctaatacttgataaaataaatttacatatttgataattttataataattatttttagtttaaatatgtttttgttctatgtgatgtatatagttttgttggctctgacctttataattatttttaaattgtttttgtaaagctttttttaatctttattagttgtttcaatatttataatttattatattaaccaagtggtctcaataactcaaggggagggtgtctttcaaaaaaaaaaaaaaaactcaatcccaaaggaattaattattncaattatagagaaagagagatacattaccctaaccctagccccacacaattaacatataaaaagcaataaggcttattaa

SEQ ID NO: 182014 - DNA, 400 bp, Glycine max
tatccttatggctagcctccggacttcaccccccgtgcctcccttgaagatttaagccaagcccctactttcgaggggcaactcccaccttatgacgactatcccgggcaagacgatgaggaaggagatacccatcttggccccctgctccacctcaaagattcgtcctcccatgaactaccccaaccaaacatagtccgccatataccggcttcatccacacccgtaaaagaatttgttcccttcgcggaagataaggggaagatggaggcgcttgaagagaggttaatagcagtcgagggccttggcaattacccattctcggatttggcggatttatgtgttgtgcccaacatcgtcatccctcccaaattcgaagaccatactttgataagtatta

SEQ ID NO: 182015 - DNA, 486 bp, Glycine max
  unsure (1)..(486): unsure at all n locations
cttaagcaccgcggctgcaagctaccatgacacctgcctagtatgccttattntgcataaaaccccatgactactttaggatcatatgtagccatgggctctgccatctgcgtccaatgcctccttgcaattttcgcctgaaattatgtatactcaccctcagctagctagaccagcctttccttgagaaaacaccaatctttaatcacttcaaagcggcattgatgctcctcacttggtgcccatcaaactcgatgtctaaaggtggagctgtactagattcctctcctgtagtggccttcctagctcttttagcagggagtttcttcggggccatctgggacaaaggcaagttgaaactacaatcttatcaacaatttattttttaaagaagctaatatgcgcacaagtttccgaatagccttaaaacacaaatcgaaaacaacattaagcacagattcactccacctagctgcataattttaa

SEQ ID NO: 182016 - DNA, 442 bp, Glycine max
  unsure (1)..(442): unsure at all n locations
nttgctcgatgatgatctcaccactcttgccttntacctctcattcttcctttggaagttcttaagagagaaccttattaatgattctttttcaagacaacaaaggaatagtcaagtgacttagaatttagagaacaaagggctaacaaggaatatgataagaacaagatgaatgatagacacaacaaagacaaagaacaaagaaaccacaagatcaaattacaaaaagagaatatattgagtcctttcaattcctgataaactttgctttccttttttttcattnttttaaagaaactaaattgtgtaatagtttatggttgcactcttgaacttttcaggaattattgttttcacaacttntttnttcattctcttttttggatcaaaaactttatttttctgtacaaatttctctcctttnttgtattttttaaaatag

SEQ ID NO: 182017 - DNA, 492 bp, Glycine max
  unsure (1)..(492): unsure at all n locations
gatccttnagtcacctgcagctgcagctttgaaatctactaatgaattcttattttcactttgaaaaagcaacttatgcttagaaagaaaatgaaaagctcacaatgaataataaaaatattttaaagagaaaccattgtttgtaggtttttgatttcaaactttttgaacagtaaagactgagaagaaagactactacaaaaggagttatctttttttttatatcaaacttaactttaaaatgaaaagaaggttttgaaagaaaaagttcagaaattgtcaaaagatttagctaactatgtagcaggcacaaaaaacttggataagtttattagaatccagaaaggcttttgtgataaaactggattaggtttcaattagaacgccaagaaagtctttcaaaagcctattatgaacaagaaggccaaaaggaaatgttctaactgtaacatacatcaacacccaacctcagaatttatagaaagagggcat

SEQ ID NO: 182018 - DNA, 119 bp, Glycine max
  unsure (1)..(119): unsure at all n locations
tcttccggaaacattccggatgacgttcttccggaaanagtcngtgagtatttccggaagacacaaattaatcttccggaagaagcgncccctatctctgaagctcccgatctggacct

SEQ ID NO: 182019 - DNA, 302 bp, Glycine max
cttacaatatattgagacgctcgaaattaaacatcggaagctcttgatacatttacatggccataacttttcacacggatgcccgattcatgtgcattacatatacagacgcttgacattgaacaaccaaagttctctagaaatccaaatggccataacttttcacactgatgtcccatgcacgctataacatatctcggcggctcgaaattgaacaacggcacctctcgagaaactcaaacggccatactctcttcctcggacgtgccgttcgcgggcatcactactcgacaccgttcaaa

SEQ ID NO: 182020 - DNA, 469 bp, Glycine max
  unsure (1)..(469): unsure at all n locations
tccctcatcaacccagtgagtccctctgcanaaatattaatgaggaatgaagcaagagggtctccttggcgcaaaccttcagacaccgaaaattccttcgtcgggctaccattgactagaatcaaaagtctgctactaatcaggcacccatcaatccactttatctatgttttgcagaagcccaatctaaacatcatgtatagaagaaagttccaatcaacaaaatcgtacacgcgcgttctcaaaatcaactttaaagaataaacaacttttcttcttcttaacttcatcaattgcctcattaacctcactgacccaagaaccgtttttagtctgttggataaaacctttgtcactatcttgtacatgcatccaaccagcgagataggcctatattgttccaatccttgtgggtcatgaactttcggaatgagcgaaataaatgaagaattcgctctcttgggaacac

SEQ ID NO: 182021 - DNA, 468 bp, Glycine max
  unsure (1)..(468): unsure at all n locations
agcttatcattattacttatgtaactaatatatcttaaatagttattttcatataaaattntaaattttaatatataccaattcatacgtttaaaccagtgacccatcaacccagtgccccaactgactcagaccggtttggttccgataacacggattctagtgaaagtgagcagaatggtgacaatgataaatgtattcttccaattttcccttatttcaaaaaccattttttttcttatattattactattttatttttgtgtagtattgaataagtatcactaaaacaaaaaatagatatatctgtttttcaaataaatgcctatgtcacaagttgggaagcagttgtgcactgcaaatgcaaatagatatatatcttcctgttgtactttcgtttatgaacgactagggggttgctttatctcatagagaatgacaatntgaatttctttcatgctctgtctt

SEQ ID NO: 182022 - DNA, 455 bp, Glycine max
  unsure (1)..(455): unsure at all n locations
ntatctatngaagaatactataaagagaaaagaacatatgtaataatgtattaatagntaaattctttttacactgttttcaattgcagttatttaaacttttttatattatcaattactgttcaattttattactattagaaaataatatgttaaccttttataaaaaacatttacactaacaataattatcttaaaagtcttataaaatgatttctaattaattaataatataaaaatatttacactaacaatgattttttattattatcagcaaatataaatttaactcatggacaccaccaccgtaatgttcattacattgataatgtatacatattgaactttaaataaattaaattattttagaaaaatatttcttaaaattcgttataaacttgcataaatgttagacagttaactataaataatagtaaatgaaagaaaacatcaca

SEQ ID NO: 182023 - DNA, 476 bp, Glycine max
gtcacctgcggcatgcaagcttatctaattctatttcatagaaagtgttgggtgtggccacacatgaaaaatgagttccaataataaagggtaagtgtgtagaacacctccccaatcttattaaagaagactatcttcctcaaatcttttctctgtaagttgacaacttcattctcaattcaggtccatagtcagttttctcccattctgaaaaccttggactatattaaggaacctccaaagtgatgtctatcagttgaaaagtttcttcaatctttgttctatcctaaggaagaactacatttatcacatacatcaaactaaaaagttgttggaggtctggtggagtggagaaaggcatctcacaaggttatgctttcctacttctctataaggtggcaacaatgggataaacctctcttgcagttggtctatgctcaaagatcaagctgtttaggttgggagcaacaaatatg

SEQ ID NO: 182024 - DNA, 414 bp, Glycine max
  unsure (1)..(414): unsure at all n locations
ctccccaatnttctataaatagggggagaagtgaagtagtattttggttcagccccttaggcacttctctctctctcgaaatagctgaggaaaattagttccgtgaagaaaatccaagccgaggcgcttccgtaacgtttccgtgagtaattacgcgaagatcctcgaccgttcttcaagattcatcgttcgttcttcgttttcttcagtcttcaacgggtaagtacctcaaaccaagcttttcaattcattctatgtacccgtggtggtccacattttgtttcatgtatttttattatcgntttcatttactttttatacccccttttgacatgcttaagccatttatttaagtcatttctcgcttaatctaaaaataaaataaatttccaccgatcgtttgaattgtatcat

SEQ ID NO: 182025 - DNA, 414 bp, Glycine max
  unsure (1)..(414): unsure at all n locations
caagcacctgaggcatgcaagcttgagatgaggaagtgttgaagggtgatacttcctgttnttattgncgaccacagagtggtacctgcagatatgtcgcgggggtcacgagaccttggggacgtcaggtggggtgctattgcccaaaaccaagcttgaccaatcccgacccaacccgggcatattctgtcagtgagaacctgtgatgtacctaaccaggcgagctccttgcagtcaaccgataaaaggaaaacaaagaccacaaagcaaggaggcttgtggtggctgaccacctgtgaatttgtgtgatatgtggagtatagtctctggtaatcgattaccaagggtgggtaatagattacaaggcttaaaaatgaagacaggaggctaagatggtctctggtaatccattac

SEQ ID NO: 182026 - DNA, 427 bp, Glycine max
cttgatactcagcttcaacattcaatttgagcgtctcgtaatattacgggactcattcttacatccgagtaaaaatttattgtcgtttggattggctgagagattcaacattcaatttcgagcgtctcaatatattacgggactcattcagacatccgagtaaaaagttattgtcgtttgaattagcttagagcttcaacaatcaatttcgagcgtctcgatatatcacgggactcaatcagacatccgagtaaaaagttattgtcgtttgaattggctcagagcttccacattcaatttcgagcgtctcaatatattacgggcctcaatcagacatccgagtaaaaagttattgtcgtttgaattggctcagagcttcaacattcaatttcgagcgtctcgatatattacaggactcaatcagaca

SEQ ID NO: 182027 - DNA, 438 bp, Glycine max
  unsure (1)..(438): unsure at all n locations
caaacgacaataacttttttcttgatgnctgattgagtcccgccatatatcgagacgctcgaaattgaatgttgaagctctgaaccaattcaaacgacaataactttttactcggatgtctgattgaggcccgtcatatatccagacgctcgaaattgaatgttgaagctctgagccaattcaaacgacaataacattttactcggatgtctgattgaggcccgtaatatatcgagacgctcgaaattgaatgtggaagctctgagccaattcaaacgacaataactttttactcggatgcctgattgaggcccgctatatatccagacgctcgaaactgaatgttgaagctctgagccaattcaaacgacaataacctcttactccgatgtctgattgaggcccgtaatatatcgagacgctccgaaatgaatggtg

SEQ ID NO: 182028 - DNA, 448 bp, Glycine max
  unsure (1)..(448): unsure at all n locations
cttctgcaatntcactttntnttttgtgtcccctccaattgttgtttatttatgcctaaactcacattctaaggatctaagagcttcttcatcaacctattggaaaaagatttacaggtagtgggtctctacaaacaaggttttataacagaacaaatatttttggagggactatttttttttaaaaatntagtagtactaattatcccattctgtattagactattaatgaatgtttcccttcaaacattttgtgaataatcaactcgtcagtagccaaacaaatggattattggaaattaatacttgtcgcgtaaacatagaggtatgatgtagcattcagtcaatgattcgtctgaaatctagatgatgtccactctatgacagaatggttctcataatgaaaggccaatgcataagtctgatgatgaaagttcttttggctctg

SEQ ID NO: 182029 - DNA, 332 bp, Glycine max
  unsure (1)..(332): unsure at all n locations
cagcaataatagagactgaagctcttggataaacaccacctngaagacaacccaatccataattgcaaaaaaggacaatgtagccatttctcgtaaataaaaccttactcactcgaaaaactgggattccacatttttccttgggaacaatcttgcgatacagcggattaaaattgacgccttgaaaccataacttgcgggaggtttcaattaattacatatcaaacgcgagaatcagagctttccaacataagagtcctaaacaaagcaaaaaaaattcggctatcaaatacctcttaacgaaaaagatttttcattcctacgaattataa

SEQ ID NO: 182030 - DNA, 379 bp, Glycine max
ctttattatattatgtgaagcccaatcttaattcctaaagaatcttgatttctaattctccataattattaattgatctggttgctaactgacatagacaaaagagctatattgataaaaccaacatgggagacaacctcgaattattctttcctatgggtatgtctcttacttctctgacagtttgtttatgttttatacaacgataggtaatccataaaattaatattgttgattttgacatgtattgattaggtgaataattattaaaaaattcatttttaagtgtttagtcgtttatcaagctgcgtggagttcacagtaaagaaatcgatgtcaatgtttttctattttatcttgacactaatattttacaatg

SEQ ID NO: 182031 - DNA, 318 bp, Glycine max
tcctcgccctcctcggactcacctcctgccttcataccgattccctgcacccaacttcaagaactcagtcgatcaactctccaaggatgacggatggcgaccccgctgaagctaaacataccattgccgatggagctgtctgccgccactgctgctgccactcaccgatcaaagtgtgctacggcttccgtttggggtcagatgaatttatttgacaaactttctcccgggctttcaggcatttagccccttctaatacccagaagaggaaataaaaaacggactctactcgggtcacatccaccacccgtttactga

SEQ ID NO: 182032 - DNA, 379 bp, Glycine max
catgcacaaaatccgaatatactaaccaccaagtctgtatcacctgctatgagatttatccaggcttagtaataatcgattgtaagtttgagtttacttagactataaatatttatcaattgaggcaaccttccgaacactttaggcttgggacaaatatctcccaaatgtgatttaattgaccctgacttcaacatactgttagggaatgtcaaacttctgcattgctatccacggaatatcttatgttacaaccactctttgtgctcgctgtttcctaaatagaaaaggagtgaattgttgaatttgtcccttaaagttagagaccccaatcaattgtgctcctataaatcttaagattcaaattaatttctaaagg

SEQ ID NO: 182033 - DNA, 467 bp, Glycine max
agcttgaacccataccggtgagagtgtgattctttattgcgagcgaacgactagctgcgagtgataatctttgcatgaatctttgaattttagaaagaaatgtataaatgaggccatgatgaaggccatgattgtacatacacaagctcttttgaccaaacatcttaccttaaatgataattgcatcctttgctccctttttgacctgaatgatattgtaaaatctgataccttgtttagattctaggagagcatatggttcaaggcaaatttactctaaatttgggggagggaagtcaattccaatgaaaagaaaaaggttaagcatcagcacacacaacaaataagttgtatgttaaaaaacaagaataaattatgttgttacaataaggtcaaaagcaatttgaaaggaaaagatagtgagacagctactggtataatacaagaccattgtgataagtcaagga

SEQ ID NO: 182034 - DNA, 416 bp, Glycine max
  unsure (1)..(416): unsure at all n locations
cttgatcattgaagcatntaatgcttgcagtaaatgtactcctcattcatgctananaaccactctctgtagctattgtgttgaacacttcagtagaaaatcactttctttgtgtcaaactaggtttgttactatagagcatgtgttttgatgttgtatggtaacctcaaagagattccacttcatttattcttcataggatttgacagatcctaggagaatatcttataagacatttcctgtgaaatgaatctcagatgcagaacattaaatgaagtcttaaatgtattctttaatgttgtatcagatcatgaaatacatctactttccgttggaattctagacgtagagcatgaagcatggtctaatattgcataagacgtaacttttaacctttgtatttatttgcatctaat

SEQ ID NO: 182035 - DNA, 393 bp, Glycine max
ctatgagaagttgagatgcatgagttgattctaagtcttaacatctgggataccctttactcattttatctcgttaattctttcttattttcctcttacccaagtactggttgagaagataatgcaaactagtgctgtgcttttcggttaatgattgtcgggtgatcaacccttatctagaggatatttgctaaaattattatttgcaatggcgaaaaataggttccctgtttgagctacatttcaaccttactcggcttttgccctttactatgtgacctaagtgcgatgctgccaaacaactcatataatgtatttgacttttgcggtaaaacaagaatactacaagatgtctccaccaaaatcgtctagcctctgggagcactataaact

SEQ ID NO: 182036 - DNA, 467 bp, Glycine max
  unsure (1)..(467): unsure at all n locations
tctagccaaatggacttaccttgaattaattcctttgatattcttttngagccttgtttccctttccttgttttgaagctcactacaagccttaagtgaaaaaccatgatatcaccatatccttaaggaattttggagctttggaattgttttgggaataagtatggggggtttttgtttcattggacaacttgttttgttggctatgcttcatgatgtattttgggccatacttgatgtacattgtatattggttaaatgttggacatgttgaatgaaatgttgtttctcaaaggctatagagtaaaaaaatatatattcgaaaaaataaaaaaataaaaaaattcgaacaaagaaaaagaaaagcaataaagttgagtgaataagatcttaaatggcacaagaatgatgaaactcttggntctactcttcatggttaaattttatccttacttctttttattttc

SEQ ID NO: 182037 - DNA, 470 bp, Glycine max
agcttcaaaccacagcaacacacatattatgtgtcaaaacccctcaattcaatggctgttctaggtttgaaaggtggaatttacaatgaggtaaatttggagcaaattctcacctcacacaagtctataacatcaatctaaacttgctcaaactggatttacacctaaatttccaccgaatcaaaatttgactcctcaacacccaattttgccctagaaatggctcttggttcactttggtcatttgtttttctctctagctcagcctaacctttctcacatgtcctaaatgacatttcaagctagtattaactcactttaacctccatttaccacagaattcagacttagccttccaactctcaaagtctcactatttttccactcataacatcacattctcactgtctaaccctaggttagttctaccctttgtctctaacagaattctatcagcaatctcagcatat

SEQ ID NO: 182038 - DNA, 446 bp, Glycine max
  unsure (1)..(446): unsure at all n locations
ctttgcatccaacatacaatggcgtgtgcgcatctgtttgtgatcatcgtanatatctgcatgacattcctgaaagccttcttgcccaagatcacgtatcatgtcttccatgagatctccgctttgtagctcaaccggatgaggtggacatgttgctgtatgaccaaccaactcaccatgccatatccactttgtgtacgttgggctaaagccatcacatatcagatgcgatctaatgtcatccaacaaatgacgcctcccattgacacatttaacacaagggcagaaaaagctgccatctgtggttgctgaatgtatttcggcaaatgacaaaaactcttcaaccccatgttgataagcttctcttatgcgaagcgctgtaatccaagatcggtccatgctcaatgttgtctaatacaaagcatgatgactggaggcagaacaac

SEQ ID NO: 182039 - DNA, 436 bp, Glycine max
  unsure (1)..(436): unsure at all n locations
gggatccctaagtcacctgcggcatcaagcttatgatacagccatattttgtttcttctcctacgnncgccggccttcaacgttggcaaacacaaattttgtagtcaaggaggacttatattgtcgccatctcgtcgcaaccgttgacataaccttcatcttcacctttggagcttctgcgataataaactttgcctgcataaatacattagttaaaataataagactagtatttgttgacagaaaagtttatatcagaagtttgttataaatgtttttaacacaaaaattggttggcatcatatgagaagacaagtatttgttatcaacgacttagtacaatgtcattccacactatcaagatgttctaatttagttatgaaggacttactagaataacaagtatttggtatcaactcctatatagtcgcaaatg

SEQ ID NO: 182040 - DNA, 417 bp, Glycine max
  unsure (1)..(417): unsure at all n locations
ntatatatatatataacactcaggataagggtgtctattctgtatcatcaacaaagcacgggtgaatttgctcgatttgttgctgataaaaagagcctcaaaagcctcaagatggaagattgttctaacctcggagggtttgttctttgttcgtctagtctttttaccctctggctgtctgatttatactctttggtaattaacttttcagaagaaccatatatagatggtgaaactctttaaataataaatattggagttcaatccatataattaaatataagaggtttggtgcttgtaacctcctgatctcgctcagtatttagtcaactgagttatcttactaataaggcaatgctgttttatgttttagagttatgatgataaaaggcctgccatataagctgtcgtctggta

SEQ ID NO: 182041 - DNA, 347 bp, Glycine max
ggaaagagcttgattataacttatgaggacaataggaagcttaattaagaactatgtccttggcaagtaaggcttgtcttcttccaagctcatacatatattatttggtaaatagtcactcttgcctctaaatgtgtaattcgcctgccactgcgttttttaaagataaataatcacaatttatttctccaaagtgaaaaaagtgcaataaatattatccactgttaactcgtctgctaccattaaaaacaaaacctacgtgacatatcggaacgaatttatcactgaaatggctcgtaacatggccatctgtaatcaccaacataaggatatatttgtcatatcat

SEQ ID NO: 182042 - DNA, 431 bp, Glycine max
  unsure (1)..(431): unsure at all n locations
atgagcanattcaaacaacaataactgtagacctgtatgttcgattgagtatcgtaatatatcgagacgctcgtaattgaaaactgaagctctgagcaaattcaaacgacaataaattttgactcggatgtccaattgactcctgtaacaaatcgagacgctcgaaattgaaaaccgaagctatgaccaatttcaaacgacaataagtttttactcagatgttctaatgaattccgtaatatatcgagacgctcataactgaaaacggaagctctgagcaaattctaacgacaataagtttttactcggatgtccgattgagtcccgtaatatatcgagacgctcgtaatataaaacagaatcttgtagaaaattcaaaccataataacctttaactcagatgtctgattgagttctataatatattgaga

SEQ ID NO: 182043 - DNA, 446 bp, Glycine max
  unsure (1)..(446): unsure at all n locations
agctntaaccgatcgtttaagccgttttctcacctaataaacgataaaatgaatttcaaccgatcatttacgttgtaatctcgcttaatcactgttaaaacaaaatctaaccgatcattcacgctgtaatctcggttaaacaaaaaaaaagcaaaataataataaaataaccaaatatcttgaaaaataataataaaataatcaaaatatctttgaataaaataatcaaaataatcaatcggacgcttttctttggaaatttccttggatcaattgactaataaccaaagtgaaactaaggctaaaatcaactcacaaatcaagctttgtctgcaaaaaatcactaaaaaccgttttaaggtccaacgccttacatgatcctctttgcttttatcgattaacatggatcgctcacaagcataaaatcaacatgtaactttacaatt

SEQ ID NO: 182044 - DNA, 427 bp, Glycine max
tcacatatgtactgtgtgatgtctacctttctgttttatcatagtttattggggctaaaatatgcgcctggttattggtatttttttaaatgagaactggtttggcagagactatttcagcatcagcctacacagtatccaacatcagacgagttgagtattgtgaggatcaactttaaaagcttttgacccctgtggtcaccagattgcaccatgagccttcaaagattactatgctaaggtctttctctcttgatcctctgctaacacatacacacagtgcgtgcatatctttctacctgattgcactccacctagatgactctctcatctctgttttacaccctgacacattctcttgacggaacttggctatattcctgttatatctgctcggactttacgattacaccttcctctcaacact

SEQ ID NO: 182045 - DNA, 462 bp, Glycine max
tatgctgcaaacatctacaatagacgccctgaacctcagttttttattcagccacaaaagaacaactatgacctctctagaaataagtacaatcccgggtggaggaatcatcccaaccttagatggtcaaatcattcacaacagcaacagcaacaacaacaacagcaacaaccccagaaacaacaaatagttgaggcttctccgcaaccttcccttgaagaacttgtgaggcaaatgactatgcaaaacatgcagtttcaacaagagaccagagcctccattcaaagcttaactaatcaaatgggacaattggctacacagttaaatcaacagcagccccagaattctgacagattaccttctcaatctgtctagaataccaaaaatgggagttccattacattgagatcgcgaatagcatgttcaggacctcaaccagcaacatctttctcatctgaaatg

SEQ ID NO: 182046 - DNA, 473 bp, Glycine max
  unsure (1)..(473): unsure at all n locations
gtcacctgcggcatgcaagcttggagaggatgcttcaatggaggatttcatttatggagagaaagagagaggggggagcacacaattgacagacgacaacgagagagaagttgaactttgagttgtgtctcacaagactctcattcatcaaagttacaacaagtgttaccacattcttctatttatagactaggtagcttccttgagaagctctcttaagaaaacttccttgagaagcttctttgagaaatcttccttgagaagccagagcttagctacacacacccctctaataactaagctcacctccttgagaagcttccttgagaagattcctaaagaagctagagcttagctacacacacctctctaatagctaagctcaccctcttgagatgagaaactagagcttagctgcacacccctataatagctaagctcacccccatttcacanatacatgagaatacaaa

SEQ ID NO: 182047 - DNA, 474 bp, Glycine max
  unsure (1)..(474): unsure at all n locations
tactaaggcacctgttctagctcttcctgacttttctaaaacttttgagctacaatgggacgcctctggagtgggagttggagctgtattgttacaacgtgggcaccctattgcttattttagtgaaaaacttcatagtgccaccctcaactaccccacctatgataaagagctttatgccttaataagagccctccaaacttgggaacattaccttgtttccaaggaatttgtcattcattgtgatcatcaatcacttaagtacattagagggcaaagcaagttaaacaagaggcatgcaaaatgggtagagtacctatagcaatctccatatgttatcaaatacaaaaagggaaaaacaaatgtggtagctgatgccccctctaagagacacacattgttttgctccctangaggctcgaatttaggattctgatatattagggacttgtatgctttagatgaacatttctc

SEQ ID NO: 182048 - DNA, 168 bp, Glycine max
gtcacctgcaggctgcaagcttgtccataagctcaatctcatagtattaggtgatgtgtgatccaatcctacccctcaagggcatcggatagaagactccaacaacactcggccccagatgcacgagaaggccctacggttctcatgacccttacggcggatttccgg

SEQ ID NO: 182049 - DNA, 433 bp, Glycine max
atatttcatattgcacgtagagtcatgtacaagctttatggtatgagggtggatattatgtcatgcattggatgtggtgcatagtcagcgtcggactgaagaatgaatggaacactgtatgcatactattaaaataactattgaatttgtttgtatgaaatttaacctcaatgtttcatgtacttaccttatatattttttacaaatttgtagtggttttatgatggatcgccattagacggtgacaccatgatgaccttatgcaagaaatgggcagcctattttctacaagtttcaaagctggatgtaaattatactaatttatatgacataggaacattgttctttagaacaaaacattttcattgtttatgtttcatggataattaagatcatgactttcaattcagtgtcattatataaatgtgtcgac

SEQ ID NO: 182050 - DNA, 500 bp, Glycine max
ttcccggatcttaagtcaccgcggctgcagcttatatgggcttttcttattgtaatataatggaatagcagaaagatcaagatccattacaccgagatgaaattggactttctcattccacttagagaaattaagcctattaaaaattggcataaatgatacatgagaattcagttaataggaaacatgtactgcataataaaattcacataaacattttcagatatgaaatacatgttatacatataattcattcagataacaatcaatgtatattgaaattcttctttgggtgatacaccaacacacaagatacaaacatgatgatgctaataaaacttaacattatttgaaaattaaatatgcatcaaatagtaatacctactacctttgggtatataaataaaattaatgatacacacaaatcacctacaatatattaattaattataagaacaattaatcaacctttgggttatccataaatatcttataacaat

SEQ ID NO: 182051 - DNA, 489 bp, Glycine max
  unsure (1)..(489): unsure at all n locations
ttacggacctatgaaactcagctttaattatttttggataaagaatttctctgttttattttattntatatcattcatcactgtcaaaccccgtcaacatctctaagactgaaacatcctgttctactgaaaatgaacaaatctcttgaatgtgtaacaaacacagagattttacaattctccttcaacatatcatcacgcgtgcaaaattggaaattgaacaactcaatttgacttattattttctagtcatcctacaactcaattttcatgattctaagcaaaaagaacataaccaaattttttgatatatttttttgttttattatgtgaactcatccccattttttgtttaatttctgtttttttttaattcatcaatcatctccggtccctaccggccaccaccaccaggctcttctctgctcaactggattctacctttgtttaccaccaagaaatgcgtctacgacaactgaattctatctt

SEQ ID NO: 182052 - DNA, 468 bp, Glycine max
  unsure (1)..(468): unsure at all n locations
agcttatgttcaactcagtcttcaattattgtatgctccacacacatcaacacatctgtaatatgtaataatacatattagacaacagaaggagcccatataggagcaaatatatgtgtgtatttatgtgcacaggtctacacacacaagcatgttagtatgtatgtgtagcattactacaactctataatttgagttaggcctaactaaaccacaaaagtcagcttataagatgagaattgcccatgcctttataagttatctttagctatatctataattgatgtgggaactcaacacacatccctcacacccaggatttaatatctgaagcgtagagatttgcactaggaaagccatgggaccaagtagatttttgagcagttaggggtggccaatatcatatctatgataggctatgataccatcttaaatatgggctacgtctaactcaactncaaaagctag

SEQ ID NO: 182053 - DNA, 446 bp, Glycine max
  unsure (1)..(446): unsure at all n locations
ttatctaatcattccaatccactcaaatatacaattgctcattcaaataattatcaaacactcatttcataccaaacaatccattgcatatcattttcaatcaattcattgttcaaacacgcttttggtacaagcaaacaactcanagtgctgaaatttaaaataactaaaatataaagcaaactaaatactaataaactaaaatgttcatgctttgcagaaattaaactaaacacaatttaaacatcctgctcatcttgtggctgatcttcattatgatctagtgttggagctgctgatgaatcctggataggctgctctggctccgtgactggtgtagatggctgggtctcctcaggaactggtgcaggagatggcttaagtatttgatctatggaagtcccctccttctgagccatgtgtgcatctgcatcanaataaaatgg

SEQ ID NO: 182054 - DNA, 472 bp, Glycine max
  unsure (1)..(472): unsure at all n locations
taagcgactgcggcatcaagcttacccttatcggaggaatattttatctcatttcttccctaaggaaaccctatccctctttccttcttctcttcttggaaacccttgccattgtagaatcttcaaagggatcgttgcactcaaagcccatcaaaaccaacagtcacagttgggaacagcgcctcttcctagcatgcttgcattttcaaggtaagaagggagtgagacatcttttcttgcatgatggatagaacaatttctcttatatcacaattaatagtatattcgagtttctatatactatctaattgtcgcaacgtgcacttcgtgggcgagcgagggcgatgctcaccgctgcgctttccaaaggaggaaagatgcgcggagtcgccaccgacctttatttgtggaaaacgtcggaataaccgaaggagactggccaaacantattctaagctcgggagttatatta

SEQ ID NO: 182055 - DNA, 469 bp, Glycine max
  unsure (1)..(469): unsure at all n locations
ctagctgaattcagagcgaatcgaagttagcttagctcatccttggccaaatttgtggaccaaatcagcctcagatgcaagggttgggcgctaagcgcttaagactcgcagcttagcgcatgaaaaaagatgcgctaagcgtgaggcttgcgcttagcgaaaggactattttttagaaaatattttctaagttatttttcagtcctttttccatgaaattgaaacccttatgttaagcattcaaagattgactgatatactcctatgtacagattacatagcaagttccaaatgatttaaatgcataaaacaaaacaaaaataacagaatttaaaactgggttgcctcccaggaagtgcttctttaacgtcattagcttaacgcctttacctcctaccttcaaaacctcttgacctccttccattacctgtnagcaaacatgtgttatggagcaggctcgtcttcaaca

SEQ ID NO: 182056 - DNA, 471 bp, Glycine max
  unsure (1)..(471): unsure at all n locations
agcttgatcaaaacaattatctaatcattctattccactcaaatcatataattgctcattcaaatcattcccagacactcatttcatacaaagcaatccattgcatatcattttcaatcaattcactgttcaaacacgcttttggtacaagcaaacaactcaaagtgttgaaatttaaaataactaaaacataaaaatagaaattaaaataactgaacataaatcataaaataactgaaaataaactaaaatattcaagatgcacaaatttcaatgtcctgctcatcttgcggttgctcctgtgcatgctcattaaggtccaacacttgagcagctggtgaatcctaagagataggctgctctaactcaagtgctggtgcagatggtgtggcatcatcacgtatgggtgttgggatggctctgggatatggtctatacaaccatnctccttctgagccatgtgtatacctg

SEQ ID NO: 182057 - DNA, 426 bp, Glycine max
  unsure (1)..(426): unsure at all n locations
tgacangatttcgatgctgaagttgggagatcaaaatgttctcattcttgaactcctgcaggccttgtccagaattctctgacagcctcttcacagctatttcctgtcctgatggaagttgaccctacaaaatccaacagagccaagatattatcattgttgttgtaaaactgagatggaaaatagcttttcttgcaggagaacagaatcgacaagcttgtttgcttggtaaatggaaagtttgacggtcactctgaatatttggactgatctactattagaagatgacaatgagttttatcagaaaagttaacttttattgaaagaacataatactattttgaagagcatttagatatctcagatggtgaagctatatataccgaagaaatgaaagttcattgtttaaatgggttaacacttgaa

SEQ ID NO: 182058 - DNA, 465 bp, Glycine max
  unsure (1)..(465): unsure at all n locations
actgagcatgcagctttcctatttatgtttataaatatttggaaagncctcccgcgcacattaaatcattgactttttctgctttgaaaagtcactacctaaaaaaaaaatatttgacatgttaatgactgaaacttttgacttataaagggaaagttacaccatattatatctttcaattgcgtccatgttaaatcaaaaagacaataatattctttattcttctctaattaatgccgatattttctataaattacatgtgaatactcaatttatttactttacttactaataataaatttatttcattttcaattattatacatacagaccaatatatacctaaccatgtttttcaatgctattttatgtgtttgatcgtaaactctccaactttagcttaaaactcttcattgctcacatcttatacactttcacacaatttgccgatccctaacttttttc

SEQ ID NO: 182059 - DNA, 310 bp, Glycine max
gttggcgatggctgcctgagacagcgagactttgtttgttattaaagatacggtccgtgctaacggcgtccactgccttattatgagaaataccgggcatttgatctccatgcacgatttttgtatgaagctagatgctcaacacattgctacccctccttatggtcgcacatgttgtcggcaaacacggtagtgttgacgtttaggaaactgtgattacaccactggatcgattatcaccggctttccctgtctcagacaagaaactgtcgtgtgatagcggactaattctagcacttctagtaccttg

SEQ ID NO: 182060 - DNA, 291 bp, Glycine max
gacatttttctgaacgatctactgatccttcgtttgtttttaactaatggagcccgctaaagagttccatagaagacatggttttgaggtatccagtgctgacaagatggctccatgatgcatggtttattctgaaaagcatctatccctaaggacaaacattaccacacaaacttttaatggtacttatagtatcctacacgaaactttttgtgaccacgtctattgtctttctgtttgagtaactggacatgcctgtacaataacttgttgttgaacatgaccatggac

SEQ ID NO: 182061 - DNA, 306 bp, Glycine max
  unsure (1)..(306): unsure at all n locations
ntacagcagaatttagaatgacccactcacctataattataataacttaatgccattaacctagggaattaaataaacttaatggctgagtgtaactgagattgtggcaaccataagtcaccccaacaagccacatgtcagccaccatttgtctcccaacaagctgatgcctaggttgccaattgggcccttatacaacttgaacttaacctaactaaagccctttagttgattaacccaaacatatttntggtcaaccactttacaaggaatggccattattaaacaacttaacactctaaaatg

SEQ ID NO: 182062 - DNA, 390 bp, Glycine max
agcttcttagtttcagatgatgcagatggttttgtagctacctcatgcactcctctaatgactatggcatcatttctggcgctaaactgctgggagttggaggccatcttctcaattaaatttctggcttcagcaggggtcatgtcctcaagggctccaccactggcagcatctatcatacttctctccatattattgagtccttcataaaaatattggaaaagaagctgttctgaaatctgatggtgggggcaactggcacatagtttcttaaatctctcccagtactcatacaggctctctccactgagttgtctaatacctgacatatccttcctgatggctgtgcgcctgcaaccacggaaaattctttctaacaatactctctta

SEQ ID NO: 182063 - DNA, 412 bp, Glycine max
  unsure (1)..(412): unsure at all n locations
ntgcgccggtcatgtttccacctacgtccagcacaatctctatattcattggcgcattacaacggtggcgctttgctccaagaaagaggtggtggcggtctgactctacgatttgatggctaaggaagagaaggagctattttaaaaaaaaaaaattaacctaaatccaaacgtcgtaattactttttaaaattaaaaaaaaaaagtatacgtgtaatcccacttatgcaatgaatacatgtgacaccacatgtcgcatgtcaatgtgtccacttaaccgctatgtaagcagttaacggatcccgattaaccggtgggacctcatataaaacttttcaaatattccggaccctattccaagaaaaattatcaggagccatgcaaagtacgtatatctacagacccaaacatt

SEQ ID NO: 182064 - DNA, 262 bp, Glycine max
atctctaagtcacctgcggcatgcaacttaacatcagaccactttcagtgtgctggaactacttcacatggacttgatggggcctacgcaagttgaaagccttggaggaaagaggtatgcctatgttgctgtggatgatttctccacgattacctgcgtcatctttactccagaaaaatcacacacctttgaagtattcaaggacctgagtctaagactttatacagaaaaagactgtgccctcaacacaatcatgattgac

SEQ ID NO: 182065 - DNA, 430 bp, Glycine max
  unsure (1)..(430): unsure at all n locations
aatcatagtataggacattagaacacctttacctcatcttttttgaccttnttctttntgttacataaatcttttggctttttcaactccatttacttctgctcgttcctttaatgatgacttcagttatttcatacctttttgttgtctgactatgtgcctgatcggaacacataatttgttggcactcactattgtggattaggattaaaggtgtaaggatgtggaataaaatttttggttatttaattattaattgatcagaaacgacttttagttaaccccggcctgtaagtttaaaaaattggtattttgtatgtttatacgtatcaaagtttccaggcttaacctaatattcaaataattggataataaagtaatgggtaaggaaaaggacctttaacaaatgtttatntttttttgtctcatt

SEQ ID NO: 182066 - DNA, 465 bp, Glycine max
  unsure (1)..(465): unsure at all n locations
agcttcgatttttgataatgtcgggagcatanagacttcaaatttataatcaactacaaactaccctcttatatcaataatccaattttagtggcttaactgagttaatttttgttcgtttattatttttatgatagttcaagaagcttcgtattcatgcatgtgacaataaacgtggagaacatgaaagtggaatggggaaagggaatacaaaaaagacccgccaagtttcatccaatccaactttaagctactttgatgaaaatatggaatatgaaacacaaatagttattaagaattgcttgaaagattgagcacatcacatcaccatagatagacaatcttccaattccaagcgttgaatgcattaaacgattctgcagggcaagcctgctaccagaaattaaaaaaaaaaaaaacaaaaaaggtgaaacatcctgagttaatttcttcaattagcgcctg

SEQ ID NO: 182067 - DNA, 403 bp, Glycine max
gcagcatgaagctagagagaggaagagtagacgggatttcttccgactttatcggctgaccacagagcggtacctggagaatcgtccgggggtcaggataccttggggacgacaggaggggtgctattgccacaaaccaagctagaccaatcccgacccaacccgggcatagacggacagcgagaaccggagatgaacctaagcaggcgagctcctggcaggcaacagataaaaggaacaacgaccaccaagcaaggaagctagaggtggctggccagcctggaaacttgaatgatatgggaggaatggcctccaggaatcgaccaccaagggtgggacatccgatacaaggctcaacatagaagacagggggctaacaagggccctcggaaacggagaccag

SEQ ID NO: 182068 - DNA, 431 bp, Glycine max
  unsure (1)..(431): unsure at all n locations
gctttatcacattagtactttaaatatgctttatatagtatagnttgcaataattntagtattcaagtggcttattagtttcctatgcttttgcaggctgtccgggtcaatcttttcagaggattcaagtaagctacactcctctatctataacattggctattattccattatgttgatttttcttacaaatattggatttgattctgcagattctcactttcatggtgggcctacacttttccaatgactgctgcagcaattgctaccataacctatacaaatcaagtcacaaatgtactaactcaagctttgagtgtaatattgagtctcattgctacattcacagtaacagcagtgcttgtctcgactatagtgcatgcctttgtcctacgagacctctttcccaatgaccttgccattgccacaag

SEQ ID NO: 182069 - DNA, 188 bp, Glycine max
ttttatgtaacaagagaatatttttttttttattactaacaagcatggaaaagcagggaaacgtggcatggctttattctgtgcacgactgtgcgacgtgcatgatgctaactcttaaaagatgaaagcaagataatttcacagaatatatatatgacatctgcttaccatgcatggcaacacaacca

SEQ ID NO: 182070 - DNA, 424 bp, Glycine max
  unsure (1)..(424): unsure at all n locations
tagacctttctcttttccctttctttcatctcatctntagagaatattcgtcatatttaatcatcatccaagggttatgtgaaaaacataagacagtagcatgtttattgacactgatatatcataatatatcaaacaaaaaagctttgcatgaaacaaaacaaaatatgtccactgaacgaacataaattaaagaatagactgctaaataaaaatctaaaaaagatcaaagaacacaacaatcatgtctgaataacaataattaaaaaatcacttaaaagaaaatacaacagaatatagttttaccgtaaaaaatataagagagctttcgagcatccaccagagtaacagatagttcacccacagaatccttgtttccttcttgcgtttctccagatttaacaccaacagctactggaccaac

SEQ ID NO: 182071 - DNA, 429 bp, Glycine max
cgagaaggaaccgacgtgtgcacgtggatggtggtcatatactgcttcaacggaagagtcaggaaactagttctggaacactccaatataacaggtcctctggattccaagatcttgggccgtttggaccagctccgagtcctcagtttcaaaggaaactcactctccggcgaaatccccaatctctccgccttggtcaacctcaaatcgattttcctcaacgaaaacaacttctccggcgagtatcccgcctcggtcgcgttcctccaccgcgtgaaggtcattgttctgtcgcagaaccatatctccggcgacattacggcgtcgctgctgaatctgcggcgactgtacgttctctacttgcaagacaacgcgttcaccggacgcattccctgtttcaaccatagcagcctcatgtatttaaatgtg

SEQ ID NO: 182072 - DNA, 441 bp, Glycine max
  unsure (1)..(441): unsure at all n locations
agagtgaccagcggcatgcaagcttctataggaatcttcttaagaagctcttattgtgtgagcttanntntgagaggggtgtgtgtagctaagctctagcttctcaaggaagttttctcaaagaagcttctcaagatagcttctcaagtaagctacctagtctataaatagaagcatgtgtaacacttattgcaactttgatgaatgacagtcttgtgagacacaactcanagttcaacttctctcccttgttattccttcaatttaatgctcccccctctctttctctccctctgtcttttcctccattgaagcatcctctccaagcttcttatccaaggctcatcttgatggtgaagctccttcttccatggcttattccttaatggatggcgcctcctatcacctcttttactttgtctttcgctgcatttccatggt

SEQ ID NO: 182073 - DNA, 402 bp, Glycine max
cttctaactctgataagttagcgaaaagtcggtgattatcaagaattggacatagtcttaggtttgagacgaatcagtataattccctccgtgcttctctcttttgctttaactgacaatgggtttgaatctattattagattttatatctcatttctttataaagaaaattatttttatcatcatatgacttagtctgatcgctaagtcttttaggccttttattttagacgataaaagtgctatctgttttagaaaagtgtgtaaatttctaaacacataattcaccccccccccctcttgtaaaaccccagttgttgataaataaaaatagactgatatctattaagtatgtattctgagtctctataattaattgaattaagtaaatacttacggtga

SEQ ID NO: 182074 - DNA, 424 bp, Glycine max
  unsure (1)..(424): unsure at all n locations
agcttctaaaaattcttctcttcaatctttttatactttgntctttctatcattattgataatgttttgaaacttctgatgtactgcattgtttttagtatctatcattttattttattttgtacgctgtagtgaatgtgtttttagactaagtatgacttgtacctctggagtgtgttttaagtcttgtaattaagtggggcagttgactcttaagctgataggtagtagaacctactgttttgttctctaagtcaatatatgtattagaaactaaagcatactgttgttgaatgaatacatcagatttcatgtgatgcaatcctaccccctaagggcattgaatagaagactccaagatgatngggtcagagatgcaagaaaaggccttagggttctcatgagccttatangatacgatttg

SEQ ID NO: 182075 - DNA, 439 bp, Glycine max
  unsure (1)..(439): unsure at all n locations
ttttgaacgtttaanatagcctttagaaanttgaatatagatttcgaagtctgtaatcgattacagagtgtatgtaatcgattaccagagttaaaattcaaatttcaaatgtgaagagtcacaactcttcagaaaacaactgtgtaatcgattacaccattttggtaatccattaccagtgaggaattttcgaaaataactcccaacagtcacatcttttctaatgtttttgaatgaccatcaaagacctatatataggtgacttgggacactcctcagagtttttactgaacaaaanagttttatcctctcaaaaatcaaattgtcttattctctaaaatattctttggtcaaaacacttgcaaattcaataaggaatcattaagtgatcttcattgtattatctttctcttaaaagagagaaatcttcttcttcctc

SEQ ID NO: 182076 - DNA, 431 bp, Glycine max
agcttatagaatatataataaaagaacattttctattgaagagtctatacatgtttcctttgatgagtctaatgccattcttccaaggaaggattttttagatgatatttcagattccttagaagatacacatattcatggaaatgactctaaagaaaaagatgaaggaagcaatgaggattctcaagataatggagttagagaaaataatgaacttccaagagaatggaaagcctcaagagatcatcccctcgacaacattattggtgatatatcaaaaggggtaacaactagacattctcttaaagatttatgcaataatatggctttcgtatctatgattgaacctaaaaatataaaagaagccatagtagatgataactggatcattgtcatgcaagaagaactgaatcaatttgaaagaaacaatg

SEQ ID NO: 182077 - DNA, 449 bp, Glycine max
  unsure (1)..(449): unsure at all n locations
ngcttctacatgtgtgtctcttganttntgaagttgccatcatcaaaaacggggaaattgtagaagcaagcttcatcatgaatcaagattgattcaaagagttttgatgataacaaagatgatgacaaaaagctcaaaagtcaagaacgcttcatgataacaaagatgatgatctcaagaatcaaagaatgagttcaagattgaatcaagtacacttcaaggatcaagaggaaagttgaattaaagaatcaagaatcaagtttcaagattcaagttccaagaatcaagatcaagattcaagactcaagattcaagaatcaagagaagacccaatcaagataagtattaaaaaaaatttcaaaaactgagtagcacatgaatttttctcataaaaatttaccacagagttnttactctctgttaattgtggcgtccctaaattaatgact

SEQ ID NO: 182078 - DNA, 432 bp, Glycine max
agcttgaagtttcaattggtaacaactcattcttattcttcttttcttacgatgtgccagtggcaaggtttgatttttcatggggtgatcctgaataccaccaagagacgttggaaaatttaagggctgctatcaaaagtaccaagaaactttgtgcggtaaaatagtcatattttttgtgtttgtatatatgatttttttttaaacactcaggctctaatggcctatcttcctgttcctgcctatcttctaatgtgaggtctgctaacacacttaaatacaaaagagaacactacaacacctgaaaataattaatccaagcccaataagcccaaaagctaataaaaagttgtcaaaaatattcttagatgcccctaagtgtagaactgtgaaattaagctaaattaacaacttactaacattactataact

SEQ ID NO: 182079 - DNA, 432 bp, Glycine max
tactcaagcttctacttatgtggcagggcgggcttacttcactttcttgtcccaacgcgagctctgaccactgttcttccttcccgcgatgcttattatcatgtccgcctgagtgggcttatagcctaaaccatacttcccacgatttccttgggtttttatcaggctagttatgccgccattgtctttgcctaaacccatcccgggttcataaccgttccccaacataactctggccatcattaccgccgcatcggacagacaaggttgcccatagagggagtctacggaggaaatgctgaccacctcacaagactggagagcggtttctaacgattcttctgcggcttccacataaggcatggaggatgggcagcttaccaagatatacttctcgtctgacacgatgaccaagtgcccctccactacgaa

SEQ ID NO: 182080 - DNA, 427 bp, Glycine max
  unsure (1)..(427): unsure at all n locations
agcttctacttatgtggcagggcgggctttcnntactttcttgtctccaacgcgagctttgaccactgttcttccttcccgcgatgcttcttttcatgtccgcctgagtgggcttatagcctaaaccatacttcccacgatttccttgggtatttatcaggctagttatgccgccgttgtttttgcctaaacccatctcgggttcataaccgttccccaacataactcgggccatcattaccgctgcatcggacagacaaggctgcccaaagagggagtccacggaggaaatgctgaccacctcaaacgactggaaagcagtttctaacgattcttctgcggcttccacataaggcatggaggatgggcagcttaccaagatatcttcctcgcctgacacgatgaccaagtgcccctccactatgaa

SEQ ID NO: 182081 - DNA, 379 bp, Glycine max
tctcggctcatactgggaatacctctagttcaacattctttctacctaaggcacccacccagagggaagctccctcagttccaactccgaacaccactcgaccggccggtaattccaacacgacaaggaactttcctccgaggccatttccagaattcaccccactcccaatgacgtacgaagatcttctgccatccctcatcgccaatcatttggccgtggtaactcccggaagggtcctcgaaccccctttcccaaagtggtatgaccctaacgcaacttgcaagtaccatgggggtgtcccggggcattccgtcgaaaaatgcttggcccttaaatacaaggtccaacatttaatggatgctggatggctgacttt

SEQ ID NO: 182082 - DNA, 230 bp, Glycine max
agacagcaaagggaagagcaacccaccgcacgcgaacgaacaaaagaacacccaaacagcacccaccagcactgcaaagactccacagagggcacacacacacacaggagaacgaagaatgccgcgagacgccgaacgcggcccactacacaccaagaaggctaaaacccccaacggccaccaacagaaaccggcgaccacggagaaaacacgagccacacacacaaagc

SEQ ID NO: 182083 - DNA, 419 bp, Glycine max
tactaacccttcttgtgttttatgaactttcaatatttcttccctctctctttcatcttggtgatacaacagtgacctattggaacaattgcaaattgtcatgtcttataattttgttgaatttttaataactactaactagcttaaaagccatacctaccaactgattgatcgatcgtgcaaaactttttatactactagcatattataataaaattcattgtcttatatgttaaaatttgtttatttctatagtaattactttaagagctatatgtattctaaattctgattggttaatgatttacaacaacactgcatggaaattaaactgataaataataatgatatatgcattggcagggttaattattaaggattctaaagttgcaagtaacataactgtctaatcaaccttc

SEQ ID NO: 182084 - DNA, 429 bp, Glycine max
agcctttaagtctctccagatgaggatgattttttggttcatgcactcctctaatgacaatagcatcacttctggcactaaattgctgggagttggaagccatcttctcaattaaatttctggcttcagtaggggtcatgtctccaagggctccaccactggcaacatctatcatacttctctccatgttgctgagtccttcataaaaatattggaggagaagctgctcagaaatctggtggtgagggcaactagcacataattttttaaatctctcccagtattcatataagttctctccactgagttgcctaatgcctgaaatatcctttctgatggacgtggtcctggaagcagggaaattttttttataagaatactctcttgaggtcatcccagctcgtgatggaccttggagcaaggtaatat

SEQ ID NO: 182085 - DNA, 415 bp, Glycine max
  unsure (1)..(415): unsure at all n locations
tgatataaaaaggagatgaagatgcacaaaacaagaaagaggacccctaaggatgcatagatcgcattcaactccttaaaacaaaaactaaccagatgatgaacgaagaacgatgtagcacctcagacttggtttcttttctttctttttcttctctctgatttctctcaatttctcgcaatgcctatttatagcaaaagatggcattaatggccatggcagctcgcccaggcaagcagttgcttcaacctgaagtaaccttgctcgcccaggagaagaatcatacttcttgccatatccttaagattccggtttgttcattccacaactctgttcatgctaagttttcccaacatcgtataatgcataacaatntcatacttactaaagaaaatgtgcaaaacgctctatactt

SEQ ID NO: 182086 - DNA, 388 bp, Glycine max
  unsure (1)..(388): unsure at all n locations
ttaaaacatctntaacggtagattcttcatagatcttggcataaaagattccaactttccatgtttggtcattggacccccaatggagatatccatgttggatgatatgttctttagtaaaatccctaaagaatgggatggtatgaattaaaaaatatttaattgtaaaagtaagaatggttgaaaaataaccaagaaaaaagaccatagatgaagaacaacaacaaatgagagcctcgtggaagaataaattaaaccaaacaaaaattaaaagttaaagaagaatctcaaaatcaaaccacaaatcaacaattaactatgatcaaactcaaagttaaatatcaatcaacaatgaatttcaaattttaatcccaaaatcaacaatgaa

SEQ ID NO: 182087 - DNA, 350 bp, Glycine max
  unsure (1)..(350): unsure at all n locations
tcaaaagatgtaactcttcaaaaagggtttgactttttcaaatgggttttaagtttttctaaaagttataactcttcttaatggtcttcttgaccagacgtggagagtctataaaagcaaggctgtgttttacatttcaataatcttgaacacttatttcatacaatcctttacaagccttgaatctctttgaacttcttcttcttctttgtaccaaaagctttctaaagatttttggttttctaaaccttgaaaacttgtgctattcatcttttcattctcttctccctttgccaaaaagaatttgtaatgactaaccgcctaaattctttntgtgtctctcttctccc

SEQ ID NO: 182088 - DNA, 416 bp, Glycine max
acctcatcgtctctcacagtctttattttgtgagccaatccagtccttgtgttcggactctcagccacttatgatagccgccgatgatcccattactgcttcccctaagctctctgtcctttcttcacgccgcatcccatgccttgcgaactccttggagtaccctcgcgttgtggtcactgaaacctcgtgcgatgaaaggcgtgatgctttcgtctgatggcactcctctcatgggacatccttcgcatgaagatagaatcctgattcttccttccttctagcgagggaaccatttaacagacgcccctccatgctagccaaaagttggtgcacaacaaacaattcttgcgccgctcttttcacatccccggtcgaacgtgtcatacatggccaatatggcgacgaccgggctt

SEQ ID NO: 182089 - DNA, 462 bp, Glycine max
aagctttcttgtggttgtgaactctgcgagcagaaggttgatcttggctacaattctcaatagctcattgccgcttcagggtctttagcttatttttccccctgctgaagcatctagcagttgcttggtttgtggtctcaacccatctataaacatattcaattgaattggcttatagaactcatgggtgggagtctttctcaataaacctttaaacttctccaacgcttcactcaaggactcgtcagggaactgatgaaatgaaaagattgcagctttcccttccacggtctttgactctgggaaatatttcttcagaaacttttcaacaacttcttcctaggttttcagactattacccttaaatgagtggagccacctctcggcttctcctaccaacgaaaatgaaaatagactaagtctaatggctgcacctggcacgcctgtaatcttacagtgtac

SEQ ID NO: 182090 - DNA, 393 bp, Glycine max
gctattaagctcccgacttgtacaatattttattttcccaaacaaaaacataaaacttgagctccactaaaaatgacaatagtttgaaagacaactcatgggtgttggtgaagtcgggcaatattgctagaaagagaggcctataatatccatcagcctaagaaaagcaaattctgacttaaaaaacaacatttggaagcttcaaacaatatttttgaagacaactcaaggatcttggtgaaatcggggaatatcgcttgaaaaagagagctggagtatcctacacatcagcctaagaaaattcaaagcaagttccgactttcttaaaaccaaaatttggaaatttcaaaccaacaatagtggaggcccatagttatttaaaacttgaacaac

SEQ ID NO: 182091 - DNA, 399 bp, Glycine max
ctttttcaagatagcttggccggagccgtttgttttttgtacactaatttggaagcttcccgtatccgtacttggaaggatctgattactgccttcctaaggcaatatcagtataactccgatatggctcccgatcgcactcagctgcagaatatgttcaagaaagagggcgaaacctttaaagaatacgcacaacggtggagagacctggcggcacaagtggctcctcccatggttgagagagagatgatcaccatgatggtagacactctgccagtgttctactatgagaagctagtaggttacatgccgtccagcttcgcggacctaatgttcgtcgcggaaagaatctacgtatgatcgaaaagaagaaagtttgattacgttttcccacgagtg

SEQ ID NO: 182092 - DNA, 343 bp, Glycine max
accctacaacgccgatgaacaactagatgtccctcattcatcatcaacaccgctcaattctcttccaaatctaatttcagcttatcctgaatgtaccactcatgtactcatgcatatggaaaacaatgtaatgccatatgagtgctccgacccttcttcttccacttcaaccaactattaaatgtggggaaatcacatgtaatatcgacgtaagcgacgcctactcgtcaagatcttcatacacaaacaacctctatgataatatcatagcactgtttatctttaacacatacacatgtggacatgttaatatactcttataacactagtcatgtatcgcaca

SEQ ID NO: 182093 - DNA, 423 bp, Glycine max
agcttgtaggattcaccccaaattccggtgtatatgctaacttgctcccatatctacttaataaagcaatggtagccagggttcctcaacctctattttttcgaggatacgactcgaacgcaacatgtgcatatcatggaggagtttcgggacattccattgagtactgtataacctcgaagcgtaaggtgaaaagtctaattgatgcgggctggctgaaatttgaggagaatcgcttatgaatcctaaacattgacaagcgacaccacacatgggacaattttgaaagctgttgttagatgtctctaatgactcatcaagaatttcaagtttataccattatcgtaaaccacagttacaatgctaaataaaatggataaatttgacatctttgtccctcatcctctcgtaattacatctttt

SEQ ID NO: 182094 - DNA, 439 bp, Glycine max
  unsure (1)..(439): unsure at all n locations
tgtaatggatagataattggatcgaattaatgaattcattatctaatgttacacttgcatatatgcatatgtatatttttgaactaaaaaatagtagtaatgtataagatcatagggcagagtaattggtgtgttgggttggagttagctggagctgggtttcttgtgtggtgtgttggtgttatggctgagggatgaagaaagataaggtgtctctccgactccgaataatgggaagaagctaaaggacgaaagcgattnttgacggtttgcattaattctactttccttcttttttttccattaaaaaatagtcaatgatcctgctaaagaaaataaataaataaacagtccataattagtcattttagttccttcggaatctataatagaagttaattaatgacttctttaaacaatattattttgatgatcttat

SEQ ID NO: 182095 - DNA, 397 bp, Glycine max
ttttataatctgtgcgaactaaaccaaaatcttacccccgaagctcattttaatcgattatagaacaatataattgacaaaaatgattcaaagaagccaagaatactaattttctcacaatagctctatttttctcatatctgataccattccatactatgcgaaccttattataacaaattcaatcgtacacaagacatttccaatcattaaatcttgtttatattcattcatataatcaaaccaatacaatatcaaaatcacatatctaaacatcaaaataccaacacaatacataataaccattccaatatgtcacaaaacaagaaaaaaggtcatcttcccttacctattgaaatccaaaagataactttgtgaaaggggaaaataatgagct

SEQ ID NO: 182096 - DNA, 365 bp, Glycine max
  unsure (1)..(365): unsure at all n locations
tctctctttacttgaggtatgtaagagaaacattgtctccaaatgtcttcagattggttagctttggtttgtagtcgtgccatgcttcaaatggagtctttttctacaaagcttttgttggtaacctattcagcaaaaaaactgttgtgtgtgcagcctctgcccaaaattcctttggtagccctttgtcttgaagtaagaaccttgtcatctccataatggttcggtttttcctctcgacaataccattctgttgcggagtgtatggtgctgtcaattgatgttcaatgcctgcatctacacaaaacttgttaaaatnttcagaggtatattcaggtccataatcggacctgatcacctgcatc

SEQ ID NO: 182097 - DNA, 300 bp, Glycine max
gccatgcaacaatagggagccgagactaaacaagacatctcgccaaacaaagacaggctcaccataactcgccggtgcgttttcttccatgctagatgtagcaaagggagagacccaataacggtcgacgagcaggaaaatgaggccgacattataccgcgccagaaggagatggatgttccccctgctttctttgacaccatgaaacactagatagggcacctggacaaagaaaacaacaggtgagacctgtaaaccacgggggagggacccggttgagcgatacatgaagatctcaaa

SEQ ID NO: 182098 - DNA, 341 bp, Glycine max
  unsure (1)..(341): unsure at all n locations
tatgctcgagttatgctatggatatcctctgagttgattcctcttggttcatcaataatctctttattcttccttttcctctttgttgcagaaggggaatcagttaatgatgagtatttattcaattntctttaatttccttctctctggaatcccttttccgatcttgagatttggagagagaaaagccacccagacaatatcacggagaagcttcatagatgcattagaaaatatgattataatatttttctgttcactntaacgatcgacgagtcaactaanaaaataaacctattcgactcaccatcagctcaccaaaattaatatttggaaagaga

SEQ ID NO: 182099 - DNA, 432 bp, Glycine max
  unsure (1)..(432): unsure at all n locations
agctngccacccagctcgcccaggcgagcatggttgcttcctccagaagcaacaaccttctggagggcccaagtgggcctggttgctatttgcacccccatttttactaagtacaccccttgccttttttgggtgattcttttttcgtaaagttacggaaacttgcgaatttcgtaacgatacttgttttctttccgtaatgttacggaaccttgcggattacataatcatcccctttttgacttacggaatgttacggaacctcactaattgtgcaatgatgcttccatttgatttccggtgtgtcacggaaccttacggattgtgcatcattattttcttttgttttccagcacgtcctagaatttcacaaattgcttaatgatgggtgccaagcaccttacaaggaccaaacaaaagtcgcatgtcatc

SEQ ID NO: 182100 - DNA, 140 bp, Glycine max
ctacccttcctcatatggggcttctttctacatggcccttgtgaagcatcccttaaagaggtacactgatgacagtgcagcctaaggaactaattcctctccggagtctgacagtcaccgctttacgagcgctgtacacc

SEQ ID NO: 182101 - DNA, 429 bp, Glycine max
  unsure (1)..(429): unsure at all n locations
gcttcttatccaaggctcatcttggtggtgtttctccttcttccatggcttattccctagtggatggcgcctcctctcacctcttctcctttgtcttccgctacatctccatggtggaaaatcaccattaaaggaccccattgaagctcaaagatccagcctccatagaagctccacaagcaagcttccatcaagtggtaatcagagcacaagagcttcaagtaggtgctccttaaaccaccattaattttttgctttaccttttcttccattgttgtttcttcatttttctccatgtatctcctcacatgtcttgtgataaatgtttntaacatgattctttagagtttccaccgattaaacttgctatagaagctagattttattttctatggttcaaatttcttgttcttggtctcgaaccatgaa

SEQ ID NO: 182102 - DNA, 380 bp, Glycine max
gttttgactttcctcacttggatataagattttctgaaagggataactctctctcaatgggcttcttggccagacatgaagagtctataaaagccacgctgtgattcgcttttcaatacacttttacacttattcaatcaatctcttacaagcattgaatctctttgaatttcttcttcttctgtgtaccaaaagctctctgaagatttctggttttccaaaccttgaaaacttgtgctattcattcttttcattctcttctccctttgccacaaagaattcgccaaggactaaccgactgaattctttttgtgtctctcttctccctcttccaaaagaacacagaactaaccgcctgaattcttttgtgtctcccttct

SEQ ID NO: 182103 - DNA, 389 bp, Glycine max
  unsure (1)..(389): unsure at all n locations
cctgccgcatgcaagnctgttaaagaacttagagaaaatcaatttctatcttcttcacacatcgttcgtgtgtatgatatccactccacaaggtttgaagttgaggagaccttcaatcctattatgcaacgtggcggacaaaagtgggttgttaacttgaatggtcattattgttaatgcggaaggtattctgcacttcactatccatgttcacacattattgcagcttgtggttacgtgagcatgaactactaccaatatatagatgttgtttacacaaatgaacacatcttaaaagcttactccgcacaatggtggcctcttgggaatgaagcagctattccttcttctaatgacgcatggacactttttctgacccaactacattt

SEQ ID NO: 182104 - DNA, 341 bp, Glycine max
cacgacgaagaatatcaaatgtttgtggccacatccttatcagcaaggaggagattaaaacgctagctgattgacagaggttgtacaaaccacatgacatatgacaaaacactcttcaaggatttgaagcctactaaagtctcataagtcagaattaggaacagtggcctatatttagcaaaaggaaatggaaccatcataatctcaacacatttaggtataaagacaatctcaaattttctttatgtactcgatattgaccaacatgttcttagcataagctagttgatagagaaaggatttaaaatatcctctgaaatcaacattgccatatctttgac

SEQ ID NO: 182105 - DNA, 213 bp, Glycine max
aaaaccaccaaaaccaaaagagaagaagagagttttataccgacggaagacagcgccacaaaaaagaaccaaccccccacaaacagggcagagaaccacaaaaaacacgccgccaaaaaaaagaacaaagacccacaaccacacgaaccaaagacgaaggagaacacaaaccaaccagacgcaggaaaaaagccaaaaacagaccagcgaacc

SEQ ID NO: 182106 - DNA, 428 bp, Glycine max
agctacaaccccttcttctcctatcacaatatttgtttggcagcctacaaagcaaacatgataataatgtcccattcccacttgctgctcatatggttgtcctgtgttattttgcaaattaaagtattattatatttttaaaaagaataaaatgtcgagaaattagatcatattatgtatgttacaaagttacgtaagtgaatattatatgatcaatgatattggcttcacctttcatggaactcaaaaactgttgtgctgaaattgaagatttgtgcaactctttaccaatcagtttctcccaaatttgcacaacctctttctgggataatatgttttcaggaggccttatgtaaactcgtttgttccgagtactggggtcatctatggttttgatagtggacataactatatcatcttcatccaca

SEQ ID NO: 182107 - DNA, 475 bp, Glycine max
gatacagacttttacaggattatgtattatatactcctgtgccaagtaatgaactggcaaatgccatgtagcactgaacataaccatttgacgatctgcagataagtatactctctctaataaaaaaaaaaataagctgggaaaatttgagtaagcaaaatacatctatgtaggctccttggagaatcagaaggttcagtgtagttcaactataacaaatttaagccaacatttaaaaaaaaactataacaagaaattaagtggaataagttaatgaccagtaatagtggaaacagttgaagaaaaatgcatcataccagaacatgtctgacccagtatagagcgaactatttgttaaaacccatatcaagcatccgatctgcttcatcaagtacctaggacaaataaagttaacatttgcaaaaggctcggtatatgttacttaataaacgcatctacttctacttcacattgg

SEQ ID NO: 182108 - DNA, 428 bp, Glycine max
agcttaaaaggaaatggagagaaatattgttatatatctagaagaatggcaaatcaaagacatgaatgattctttatgagtgtattattgcttatttagacttttaaaggttaaattcacacttatattttcttataaaaaaatgtcacgttaacaaattcaaagatgaaacttactgatcttgaaacgatatttgggggggatccgtttggccgaaatatatatgcaccagaagcctatagcagaaatcacatcacaccattgaagcatacattgtaattgtactaatttaatgttattggaattagttgtatgtgcaaagaaattacacacctgaggatcactatcgccctcactagatccataccaaaggtagctctgctgaatatgtatatcaacctgcgaaaatttaataatcatggaatact

SEQ ID NO: 182109 - DNA, 465 bp, Glycine max
  unsure (1)..(465): unsure at all n locations
tcccagctgattctctctgaaataatattcagatatgttttcattcttatgtgaccaaagcacagctgcatattngaccactntagatgtatcacacaatcaaataaaggggcaactcccagaatgttggaaatcagtaaagcaattagtgattcttgatttaagcagcaataaattgtcagggaagattcctatgtccatgggcgccctaattaatatgaatgccttggttttacgaaacaatggtttaatgggtgagttgccttcttctttgaagaattgcagcagtttatttatgctggacctgagtgaaaatatgttgtcgggtccaataccatcatggattggagaaagtatgcatcaattgataatctngaacatgcgaggaaatcacctctcacgaaatctacccatacatctcttgtatttgaagcgtattcaattgttggatctttcatcgaataa

SEQ ID NO: 182110 - DNA, 429 bp, Glycine max
  unsure (1)..(429): unsure at all n locations
catgcaagcctttcatccaaggcactcactcattgttgtatctcctnnccccatggctaattccctaatgggtggcgcctactttcacctcttctcctctaatttatgctgcatctccatggcagaaaatcaccattgaatgacctcattgatgctcaaaaaaccagcccccataaaagcttcacaagccagcttccatcaagtggtaatcagatcacaagagcttcaagtaggtactccttaaacctccattaattttcagctttacctcatcctccattgatgtttcctcctcttttctccatgtatcaacacacatgtcttgtgttaaatgctgttaacatgactctttaaaatattcaccgaataaacctgctataaaatctaaattagatttccatggtacaattttttgttctgaaccataat

SEQ ID NO: 182111 - DNA, 448 bp, Glycine max
  unsure (1)..(448): unsure at all n locations
tatgtcagcccanactgatgaagatcaggatgatgtttttatcttagttgtggggaaggtcaaggcccctagcaaagttgtgttctttgcgtggagactaatcagggacagattaccaacaaaaatgaacttgcgcaggagaaatatggaaataaatgatcccacatgtccattctgcaaatataaagatgaggatgcaacacatctcttctttagttgcagcaaaataatgctaagtaaactgacatgtcagttcacttctttagttgcaacacatctcttctttgctggacttggcaaanaaatcagaataaagactttgacatgtcgttacattactggtccagcaatatgaaggaggcatttatgtgactagggtgggactctatatgtatttagggtagctgtgggccaagtaaactgacagaattatggtttcctaaatcac

SEQ ID NO: 182112 - DNA, 349 bp, Glycine max
  unsure (1)..(349): unsure at all n locations
agcnnagcgagagaagcaggggcnatgatttgcttaatttgccaagcaccccttgggtgcgctgagaccaactatataaaaaagacatccacacgctgaatttcaaacttgggctaagcacgcagtactgctaagagaacctctatgagaaaccaaacgtctctctggctcgcttagcgctgcggatcactaaacaagaggggcgaaaattgcttaagagaagtggaacatcagaaacactcacatttgcctaaaatgttcagaacactgcctgcatcctctctctcaccaaatgcgcgcaatctagcatacatactttctgcagcttctacacatctttaggacacaa

SEQ ID NO: 182113 - DNA, 432 bp, Glycine max
  unsure (1)..(432): unsure at all n locations
tcttcttgtttctctccccattaaaaccaacatttttcttgttctcttcattaagaggcgctgccgatgtgctaaaatccttcacaaattgtctataaaagcttgctaagccatgaaaactcctcaccttggtcacagacttatgtgtaggccattcttgaatagccctaaccttctccttatcaacttgcactccttttgaacatacaacaaatccaagaaacacaacatggttagtacaatagatgcatctttcaagattggcatacaattgttcttctctaagcacacacaagacaaattctaaatgatcaatatgcaaatcaagtgaagtgctatagataagaatatcatcnaagtacaccacaatgaacttttctatgaactctctaagatatggttcataaatctcatgaaaatgcttggagcatt

SEQ ID NO: 182114 - DNA, 425 bp, Glycine max
agcttatgcgcatatttccttacgatcgttctcttgcacaagacattcttttaactaagaaaaatgcacccatatacaatcaaggcagcttcgttacctagattatttacatgtacttccaaggtgtatttattacttacatcacacacatctccttggctaaatttacatacatgcatactcaaagcattttggggtaccaaaaattgcacatgtgcacatcttggtatttctaatacctatacatacacaaacttcatgatgaatatcgactatctacacaataaagtgctacatttcatgctcttttcaagtttttgctacctaaagccgcatgcaaattcaagtatattttcctttgctgactaaaattgtagtaaaaggtatatattctttctgtaatgtattttctttacataacatgc

SEQ ID NO: 182115 - DNA, 415 bp, Glycine max
actcagctgagataggaagtgtgaaggggaaacttcctactttattctttgaccacagagtggtacctggagatatgtcgcggtggtcaagagaccttggggacgtcatgtggggtgctattgcccaaaaccaagcttgaccaatcccgacccaacccgggcatagtcggtcagtgagaacctgtgatgtacctaaacaggcgagctcctggcagtcaacagataaaaggaacaaagaccacaaagcaaggaggcttgtggtggctggccagctgtgaattttgtgtgatatgtggattatggcccctggtaatcgattaccaacggtaggtaatcgattaccaacggtaggtaatcgattacaaggcttaaaagtgaagacaagaggctaagatggtctctggtaatcgattac

SEQ ID NO: 182116 - DNA, 383 bp, Glycine max
tggtttgaagttcataccataaggcctgtcaaagggaagctcttagttgacctcattgtcgaattccctcctagtgaaagcaacaacgaagggtggggattttttacgtagatgaagcttcaaacaacaaaagtagtgatgttggagttactttggaaggaacaaatgacatctcaacaaaacagtcattgaagtttgattggaaagattcaaacaatcggcagactatgaagcacttatagcaagactgaagttagcaatagaggtcagtgtcaagaaaataaagtgcagaaacgactccaaactcatcaccgagcaagtcaacgaagtcttccaagctagagaaacacaaatgcaaaatattatcgtttggtcaagaaact

SEQ ID NO: 182117 - DNA, 424 bp, Glycine max
  unsure (1)..(424): unsure at all n locations
tgtagggttaaagtctcacgaatgtcacgtgctcatgcatcaattgttagccgtggctatacgagacatcttgccaaacaaagtcaggttaacaataactcgcctgtgctttttcttccatgctatatgtagcaaagtcattgatccagtcatgtttgatgagttggaaaatgaggccgcaattatattgtgccagttggagatgtattttccccctgctttctttgacatcatgattcacttgattgtgcatctggtcagagaaatcaaatgttgtggtcctgtttatctacggtggatgtacccggttgagcgatacatgaagatcttaaaaggatatacaaagaatctatatcgtccagaagcatctatntgtgagaggtacattgcagaagaagccatttgaatttgttcagaatactta

SEQ ID NO: 182118 - DNA, 246 bp, Glycine max
gacggcacggaaaccagaacttaacacagagacaaggaaacccgccggcccaccaaagacaacacgaacatgcgcatcagacccacgaacgcccacgggaagcaaagcaacggcaggaacagtcaagggaaaaaaaaacactccggcccagacgggaaaccaaacaccaagaacgaccaagagcgacggaacgcagtatcacctggcacccaacaacgcagacccgggagaaaaatcaaccaaacg

SEQ ID NO: 182119 - DNA, 435 bp, Glycine max
  unsure (1)..(435): unsure at all n locations
agctntattcaagacaaagaaattaaagatattctagatggatgatcaagacagtctctagagtcttaggaagggtatattaaataggaagggaattcctaattgaagtagcaaaaggtttggccaagaaatgcaagttaaaaagtctttttcaagagatttactctatggtaatcgattaccagaggatgtaatcgattaccagtggccaaaaatgatttacaacagctattaaaatttgaattcaaaatttgcattgtgtaatcgattacacatatatggttctcgattaccagcagttattgaactttttaattcaaattttaaagcttgtaatcgattacacacatactgtaatcgattaccagaggagatnttcagaaaatattcttagcagtcacatcttttcatttggttcttgaatggccatcaaag

SEQ ID NO: 182120 - DNA, 372 bp, Glycine max
gaaattatattgtagtgattcaaaagatccttccaccgaagcataaagaccctgtgagtgtaaccattccttgttcaattggagaagtcactgtgggaaaagctcttattgacctgggagccagtattaacttaatgccactctccatgtgcataacggtgtgagagttggagatcatgtccactaggatgactttacaacttgttgaacgctctattaccagaccatatggagtaattgaagatgtgctggtcagagtaaaacattctatcttctcagcagactttgtggtaatggatatatgtgaagatactgacattcctgtaatattgggaagtcattcatgttaactgctagctgcatatttgatat

SEQ ID NO: 182121 - DNA, 433 bp, Glycine max
gctttgatgatgccaaggttaaaagctatttttattgatcaaagtcaagaatcaagaattcaagagaaacgatgaataattagttcatagtatgttaaaagaattccttaaaagagattgcacaggtaaacccccccatacttagtcttttgcactcctgggcaaaatgaaacaaagaacaaaatccaaggatatcaaagggagacaaacaaaagcattcacatatttctcaatgaacatcaaggaatgaaaggaatgggtaacatctaacataaggatatccaaaaagtcaagacattcatgaaaatcatccaagcaacccaatcatggcaaaatagttaatcagctcaagaatgaaaagtgataaagcctcacaagatatacactctatctctcaagtgtctaggctactatttaccctcaaagcacccat

SEQ ID NO: 182122 - DNA, 421 bp, Glycine max
ctatttgaaaaggatcgatacaatcatagattcaaaggtactatgttgcctcctagtagcgcttctttaacgtctttagctggacgccttatgacttgttggtcacggacctagtacttcgcttacctttggctttggacttggtcgcctactggtcggccatgtgtcgtatgcaacactctaacctttttatggatgagctaaggtgaactttataggtggtggcggtgtgtctattgcccgctaccggccataccaatgctgctgtggtgtttcgacctgcgcctgcctgtggacgcactacttcttgatgaaagctcgatcagtatggggcctgatgcccttgctggaggttacacgtactccgtataatgacagagacccgtaattatagcttgacaactccaagaccctgttggac

SEQ ID NO: 182123 - DNA, 374 bp, Glycine max
  unsure (1)..(374): unsure at all n locations
agcttctatggaggcttctatgaagcttcttgtttattttccaccaaggagatgcagnggaagataaaggagaagaggtgagaagaggcgccatccactagggaataagccatggaagaaggagcttcaccaccaagagagtgccttggataagaaacttagaaaggaaacttcaatggagaaaaagaaagagagagagaaagagaaggggggagcatgaaattgaaggaggaaaagagagagaaaagttgaactttgaagtgtgtctcacaagactctcattcatcaaagttataacaagtgttacacatgtttctatttatagcctaggtagtttccttgagaaacttccttaagaagcttccttgagaaac

SEQ ID NO: 182124 - DNA, 459 bp, Glycine max
  unsure (1)..(459): unsure at all n locations
accatatggacatatgggctttttctttaataatatccctagcatgctatctaccaaatagatgatccttgttttaacaatccccccacttataattatgttattcttaaatcctcaccatggtggaatcaagttaatgatatatttcttccccttttttcgtgcttctcagaagggcattcattgtttcaaaacattgtaaaactaatgttgtcacacaataacattataaacacaagtatcataacaaatacatctattcattaatttaatctacaatctcttcattatacctctccaagtgttcagctttatgtttaaagatgtcaaatcatggtttacatcaagacttctatctntttattaatccttcanaagtttaaaatactttctctaataccaaattaatctcttaaaatacaaaatactcaccaacttcatcctgaagtatacccattt

SEQ ID NO: 182125 - DNA, 402 bp, Glycine max
  unsure (1)..(402): unsure at all n locations
ttgaatgacgctgaagaagctgntgttcttcttttataagggccggaggagattaatttatctcaacctagtttgtcacaagatagtgacatggagttcatgggaaatattctgttatcctaaaacaaaccacattcgtatatataatacaagcggtattaatgttaggccatcgcatgtacggccctgcatctatcgcgtatgttccaccacgagaaaggtataagctaaacataagaagacccaaacaaaagaacatttcagacacttctacagcagacgcacctactttggatggcccaccaacaacacccttactattcatgccaacaccaaagtttactagaaggacggctgataaaaaaccaccatcaaaatgaagaaaaatgcaaacccacttct

SEQ ID NO: 182126 - DNA, 294 bp, Glycine max
tgaatcagaacatgatcttgtactggtccatggttgattcaattatcaatatgttaacttgtatttaggtctcacgacaagaaaccaatggaatcagaaaccaacaatattgacagaataattgcaaatctcatgttcaagagcatggagttcaacatacatcattctccaattacatcatcaacaaactccgttcaacaagttattggaagtaataatggtccacgtggaaacaactcaaaagccatgaatatggaagacaaatcttgctacttccacccacaaaaattacta

SEQ ID NO: 182127 - DNA, 113 bp, Glycine max
aaacgcgagaacacagaaacaaaaacattttaaaatcacaaaaaggaaccgaaaccagaaccccccgcgggaagcaaacccccgaaaggggccaaaaaaaccagcgaaaggaa

SEQ ID NO: 182128 - DNA, 428 bp, Glycine max
agcttccctaaattaatcacatacattgctttttctctcacacacacacacacacatattaagcacaaaaatgattattaaaacatataatcactgcaagtaaatacatacatgcacaaatgacacaacacatagttttctctatcagtctgagttgtaattcttgtcagggtgtcacaaattgcatcatgttgactcattctatggactatgttatctctcatatttattgggaaggaaataagtgtgcggattgtttggcaaatgtgggtctcaatattgttggattctcctggtgggatgaaactctttatttctttagacaaacctatgttatggataggattagacttcctaattatagattttcgtaacaatgttgttgctctatcgagggttgtggtctaatcttcatggtcttcgtgtta

SEQ ID NO: 182129 - DNA, 450 bp, Glycine max
tcttaagagagcttctcaaggatgtctctctttctataaatagaagcatgtgtgacacttgttgtaactttgatgaatgaaagtcttatgagacacacttcaaagttccacttctctccctcttttattccttcaatttcgtgctccccccttctctctttcttttcctccattaaagcatcctcttcaagcttcttatccaaggcaattcttggtggtgaagctccttcttccttggcttattccctagtggatggtgcctcccctctccttttctcctttgccttccgctgcatctccatggtgtaaaatcaccattgaaggacctcattgaagctcaaagatccagcctccatagaagctccacaagcaagctttcatcatcagagatctggcagctcatataatgcctccgatgatagagagagagatgatgataatgatatggac

SEQ ID NO: 182130 - DNA, 398 bp, Glycine max
  unsure (1)..(398): unsure at all n locations
gctnggatatctggcagcagaatatccagtagttgataactaagaagaaggaaatggcttcctcaatgatctcctccccagctgttaccaccgtcaaccgtgccggtgccggcatggttgctccattcaccggcctcaaatccatggctggcttccccacgaggaagaccaacaatgacattacctccattgctagcaacggtggaagagtacaatgcatgcaggtaagacaactccacacatatatacacacaagaggcaccaaaaagtttaaaattcatcttacacatttatatatgctccaaaatgttacttaatttaacatgttagtcataggttacttaaattaacatgttagtcatacgaaaatgtgcacatgtgcatgtttgttaactaac

SEQ ID NO: 182131 - DNA, 430 bp, Glycine max
  unsure (1)..(430): unsure at all n locations
ntaggttaagtgtgtgnggaagttgatcactctcacactctttctctgtactatatatatatatgttaatataaaggctttgagtggctgagaaataaaaactaagcacctttctaaaatccttcagcaatgtagtcctatattttttacatggtatcagagcgggtatgatcccgttctgtctgtccgctgccgctgtctgccgccgtcgccaccatcagtcgccagccgccgtcatctccgaccgccactttctccggcgagactagggttaggttcgccttgaaaagcgcgacccacccctggaagtcgcaccaccacgcgccatcaccatctctcgctagttccggcgcgtgaagtccacgcgccgccctccagccaccggaaactngccggaccagtttcaaacgtctcgttcttttctatgcat

SEQ ID NO: 182132 - DNA, 371 bp, Glycine max
  unsure (1)..(371): unsure at all n locations
agcttcatgatgttgaatcaagttgattctttatttnttgataatgacaaagatgatgacaaaaagcccaaagaatgatttcaagattaaatctttatctattcatgaatcaagagnaagttggattcaagattcaagaaaagatgaatccaagtttcaagagaagaattcaagaagacttcacaaggggaagtattgaaaagatttttcaaaaaacaagtatagcacaattttgtttttcaaaaagagttttcacaaaattntctaagttaccagagtttttactctctggtaatcgattaccagtttcctgtaatcgattaccagtggcaaagtttgttttaaaaaagctttcaactgaatntacaacg

SEQ ID NO: 182133 - DNA, 459 bp, Glycine max
  unsure (1)..(459): unsure at all n locations
tcaagccaaatggacttaccttgaattaattcctttgttttccgctctgagcctatgttcccctgtctttgttctgaagctcattacaagccttaagtgataaaccatgataacaccttacccttaaagaattttggagctgtggaattgttttgggaataagtgtgggggggtatgtttcattggaagatatgatttttggccatgattaatgttctattttggccatggttgatgtatatatatattgcctagatcttgctgtaatcttcaaattcgtactgtctaaaaaaaagagaaaaaaaatgaaaaaaaaaatcaattgctgcaaattctgcagattcttactggttataaaaatctaaaagagaagaagataagaagcgaggttgaataaatgatgtcttgttatgacgacttgatatgatttattgatattggacggnttgggttactact

SEQ ID NO: 182134 - DNA, 427 bp, Glycine max
  unsure (1)..(427): unsure at all n locations
agcttgagatgaggaagtgtataatggtgttacttcctgcttttattcgttgaccacagagtggtacctggagatatgtcgctggggtcaggagaccttggggacgtcaggtggggtgctattgcccaaaaccaagcttgaccaatcccgacccaacctgtgcatagtcagtcagtgaaaacctgtgatgtacctaaacaggcgagctcctggcagtcaacagataaaaggaacaaggaccacaaagcaaggaggcttgtggtggctggccagctatgaacttgattgatatatgagatatggcctctggtaatcgattaccaagggtgggtaatcgattacaaggcttaaaaatgaagacaggaggctangatagtctctaataatcgattacccagggggtgtaatcgattaccaagcttgaaaa

SEQ ID NO: 182135 - DNA, 473 bp, Glycine max
  unsure (1)..(473): unsure at all n locations
ctactcttaccagaaaattctcagatcattgtctctttctacttcgatctaaggctattgattgtggtcctaaaccttttagggttttggactgttggctatcagacaattccttcaaggaactcgttcatcaatgttggacatctcatcagcaatcaggttagggaggatttgtgctcaaagataaatttaagagattaaaacaaaggatgaagagttgaaacaaggaacagtatggtgataccttcaaaaaggtcaaaaagattgagtctgaactaaataaactagaggaagacacaattcagaggcagctatctttacaagaaggcatgaagaggagacaattacaggaagccctatgggtagcggcccaagctcatgaatctatgtngaggcaaaaagcaagatcaagatggatccaagagagtgattgcaattcacgctacttccacctgttgattagtgctaacccg

SEQ ID NO: 182136 - DNA, 399 bp, Glycine max
  unsure (1)..(399): unsure at all n locations
agcttcttcggagccatatcttgctatgttatattngnaaatntagttnacaggaaatatcaatttatcacaataaaggccaatcaaactttattggtgcacacttgcacacttctttctaacaacgcgaacgtcaacgtgtacttaaaaaaaaacttacgcgttgatgtgtgccatcttatgattcacatctatatacatgcacattcatacatcttggtgaaaggaattttatgacatacctacattttttaaaagaatttttggtgctacatacccacatacatacgcacactttatttggcantttcatgatacctgtttatatacatatacatttttgcaaggcattttcatgattcacatatgtcgcgacttacccttctgtggagggcgaca

SEQ ID NO: 182137 - DNA, 471 bp, Glycine max
  unsure (1)..(471): unsure at all n locations
tcattctacaccaganaaagaggatgagatagttgcacttaagagaaagcttcctaacaaaaattttcatgcaggtggaccttcttctagtaattctgacataccgcagcctcctatccttctcccattcccacctagagcaattccaaacaaaaagttggaagaagcggaaaaggagatcttggagaccttctggaaagtagaggtgaccatacctcttatagatgccattaagaagattccaagatatgccaagtttctaaaggagttatgcacccataaaaggaagctcaaaggcaatgaaaggataagcatgggcagaaatgtgtcagcattgataggtaaatatgttcctcatattcctgagaaatgtaaggacccaagtactttctgtataccttgcattattaggaacagttaatntgagaatgccatgctagatctatgagcatcagttagtgtcatgcctct

SEQ ID NO: 182138 - DNA, 429 bp, Glycine max
  unsure (1)..(429): unsure at all n locations
gcttgttgaagcaagaaatcttacttatgcgtgctngaattgtttctaagtttgtctatgttcgaacaaaaaagatactgaaaacctaggaaaaaaaggttacacaattggtaggctaatgagtttcctttcccataaggagatgtgccaaaccaattaggcaatggactgatattatcagaactccactacaataccattagcttaaatcaaaaagtaatctacataaccatatcttatcctcatgactcacaggtgattattttatacatatacaaataaaataaaatgaattatacacttactacatcagaaaaaatcaattattctgcattaaccatttacatttgacatgtttctcttagttcttttaactcggaaattttatatctcattaactacatttcctttgttttttagattaaagac

SEQ ID NO: 182139 - DNA, 396 bp, Glycine max
gttaatgctccagttgctgcatggaggttttttgttttttggcgggcagcacaagagcacataccacaaacccttgcgacacgtacatatatcttaatcaaggccagctgggttaccaagttaaccaatgcttccatgttttctttcaacttcttagtttcatatgatgcagattggtttgtatctacctcatgcactcctctaatgactatggcatcatatttggcgctaaactgctgggagttggaagccatcttctaatttaattttggcttctcaagagtcatgtcttaatggctcaccactggcacattatatactttttccatatattgagtcttaataaaaattggaaaaagctatttgaatatgaggggggtcctgcacataattcta

SEQ ID NO: 182140 - DNA, 420 bp, Glycine max
  unsure (1)..(420): unsure at all n locations
aatcttcttcatcaatggagtcctttgattcttaaagatcaatggcagtggaatggagaaggaagaaagatgattggagatgccacttcaaggaaaagatgagtcaagaacaagcccaccaccataggaagccatggataaaagtttgaagataggagaagatgagtggagggagagggagagaaggagcacgaaattttgtgcctcaaatgaggtctgaactttgaagtgaaattctcaaatgatcaaagttgaaaaaatgcacacacatggcctctatttatagcataagtgtcacacaaaattagagggaaatttgaatttctattcaaatttcacttgaatntgaaattgaatttgtggagccaaattgatttagtgaatttagctatggttcaacccactaatccaagatcaagt

SEQ ID NO: 182141 - DNA, 443 bp, Glycine max
  unsure (1)..(443): unsure at all n locations
tctctcaactctctgtgactngacctttctctctctataactctcaagacatgtagaagcttaaagaaaaggccaaactcccctccaaaatctgatttctggcttaaataggtggctttgttcgtgctcatgtgcttagcgcaattctgaaatgcttagtgcgcattagtgaatttcggcttatcgcggcttttctcgctcagcgaatggaccgaagcagtgcgcttagcgggatggcccttcgcttagcgaacaagcacatttcatccttcttgcagattcttctttgcgcttagtcgaggatngttgcgctcagcgaatagctcgctaagccagcagattggcttagcgagagggtgaaaatcaacacttcaaaacttgcctaattatcctgaaattgagagaaaatgattattaaatacacaaaatgggagtactacgta

SEQ ID NO: 182142 - DNA, 343 bp, Glycine max
ctgcagctaaccatcaagggacaatgctcttttttttcacaacgtcccagaatctaacaagctgctttgaagctgccaaatccatatatgtcgtgcctttattgaggcgggaaagcgtgtcaagacctaacccatagcaccttcctatctgcaatgaacctgccaacttactctaaccaaaaaaagtaatgacaaagattacctaacatttctgtgcggtgaatcttccctggcattctgattgcgaagcagcacattcctccacttgcttcctccaaagcagttccaacaaaaatggaagagtagagaaaagatctggaaactttagaaaatagagtaaata

SEQ ID NO: 182143 - DNA, 423 bp, Glycine max
  unsure (1)..(423): unsure at all n locations
ctttgatatcatcattaataaacaggtaaacctttggtaaagtagcttgtatatacaaggaattgggcttagcacaagtgcgccacgcttagcaaataagcatgatgcgcttggcaagtgtattctcacttagcctaattcagatcaatatgaattgggctaagctcgcccatggccagcttagcgagccaatcaccttgagatgtatgagtttgggcgcttagtgcacgcgaaataaagagatgcactcagtgcacgatacgcgcttagcgagtggactgtttccttgaaaatgtttataagttatattcagtccactttctcaaaatatgtagaacaaccccccaatatctctgactcattataagctgatatcccncttttcaatgattaaaaagcanattccaacatatgcaatgcatg

SEQ ID NO: 182144 - DNA, 431 bp, Glycine max
  unsure (1)..(431): unsure at all n locations
agctntagtcaaacagaataatccaaaaatgttttataattgggtgttgaaaaagcataacaagactttctgtgattggtttaaagatacaatctttgcagatgaaaatgcttcagaaactttaagaaagctagcaaatgggcctcaaagaaatgttataacttggcaaggatatgacataaacaagtattcattttacacaaaagcacaagacgacaaaagtacaatgcaaaacagcaaggtcaccctaagggctgaatctcaacacttcgcaagtgtgcatgacgctaatccttgtgtagcttccatcccttactttgggttcattgatgaaatttgggagcttaactatgtgaaatttacttgttctgttttcaaatgtaaatgggttgacagcaacaccggtgtgcataccgatgatataggattta

SEQ ID NO: 182145 - DNA, 412 bp, Glycine max
gagtgatgatgatgatcaagttagcaatgatcatgggtaaataattgataaagcttgaagatgttgtgatcttcacattaaaggtatattcaattcaattcatatttctttgtaggttttaatcatggttagggttaccaagggattttgagttgatagggtttcaacatttggaatttctcttgtagggtttaagggaaaagtagatagttaggaaattgcttgtgcatagtctttgcactttggttctctaatagtggaatgttctaaggactcttagaacaactagatgtatgccttcttgaagagtaaccaatataaattatgtgtgtgatattttctttctctaacccgtggtattggaatcaatcttgatattggaattgatatgtgtgggccataaaactatgtt

SEQ ID NO: 182146 - DNA, 280 bp, Glycine max
acaaacacgcccgggcctttatatggctgaacgccctcaccaacacaggacgacacgcccgcgctgccgcaccgtgcccctatgcgggcgagcgacgcgaggcacacaggtgcgctatccaaaggaggaaagacgcgcggagacaccaccaatgataaatacgcggaaaacggccggaaaaccgaacgaaaccgcgcaaaaagaaaaagccaagtacgggagcagaactcacgccgaggaaggcataagcacctcgcacgctgtcacaaaggacaacagc

SEQ ID NO: 182147 - DNA, 452 bp, Glycine max
  unsure (1)..(452): unsure at all n locations
tgcatgcttgtggtttgatcacccatggtgttttttgtttgaactttancattgacaaatgtcctgtttacttggaacttgataaagcacggctagataactgtagtgctagacatagagtgtagggttctagtttttattatgttgtgcttataatgctgtttaaattatgctaagttcaacaagagacatctgcgaacaaagcttagtttaaattagtccacactcacgagacatcggtgttggtatttttgtcctcagcatagaacacatgaataatttcaaatagagaaaaaccctaattgcatcaactatctctgtggaaggacccaacactttgacttatttgtgttcacactcaatatgtcatgtctactatatctttaacacaatataatatacctctgttcaaattctgatacttaattcttttacaacaggtgcatttaatg

SEQ ID NO: 182148 - DNA, 457 bp, Glycine max
tactatttgcatgaagtgatcaggtgaagaaactgattcatatacactcacaactataagtggggatagaaagatcatatgagaagcaatggtgaagtacagtaagacataataattgatgcaagctccatacaagggctgaaaaatcctatatttctagggtaccctacctacaatatagaaccctatatacaaggaccaaatataatgacatcctattctaatatgtacaaagataattggacccaaccttggcccatgggctcataaatctaccctaaggttcatgagaatactagggccttcttcagcagctctagcccaatcttcttggagcctctcgctcatggttctagtgattgcgcccttcctagggaggattgcttcaataatatctacataaatcatcatgctccaccggatattacccctatatattttcctacaatctagtatc

SEQ ID NO: 182149 - DNA, 356 bp, Glycine max
  unsure (1)..(356): unsure at all n locations
cagctaatgttgatagatcggncaatatactatttgtttccacctatgaagataacataggctttattttgtacctttccagatctatccatttcttattacgttatgcaaatgtgttttgtaatgaactaacgtttaggttgggtcacagtgagaggaattatctaataaagtggtcgacttttggagtgcgaataaaatttacccttctttagtctgcagtgaaagaaaactgtacaaatataatgaaataaatattaaatatgagatgaaattcatatgtttacccttcattctacttgaaaattttcattttaattaactttgttttttccatttcattatacagaatggac

SEQ ID NO: 182150 - DNA, 423 bp, Glycine max
  unsure (1)..(423): unsure at all n locations
tgattgggtacttttgagaagctntattattatatatgatggcttcttgtgattgggtacttttctagatgttggctttctaagtctcatttccaagatattatttcttccctttttactttttggagataccctgcatgatggtctgctttactgtaattatgtcaaattgagtgaatgtgatattaaattaatattttggatggatacaaacttgggtagctgtactcatttacattaagtcttgatagaatgtctgcaagacttgttagattgctaatattgttacctagttggtgctctgaagtgggccatgctcgagctctgccctgtgtgacctttgtctttcttccattaggctaagtgctattgctgtatgtttccctatcagtagcttggtttccgactntagtttttcatgta

SEQ ID NO: 182151 - DNA, 153 bp, Glycine max
cccccccgcccccgacaccccccaaaacccaacccccccccccgccgaccggcccgagcgcccccccccccccaccccccacgccgccccccccgccacgccccccgccccacacccccacccccagcaccccaaccaccgcaccccccccca

SEQ ID NO: 182152 - DNA, 418 bp, Glycine max
  unsure (1)..(418): unsure at all n locations
agctngcctgtccgatgcagcagtaatgattgcccgagttatgttggggaacggttacgaacccggaatgggtttaggcaaagacaacggctgcataactagcctgataaatgccaaaggaaatcgtgggaagtatggtttaggctataagcccactcaggcagatgtaaagagaagcatcgcgggaaggaagggcggtggtcaaagctcgcggttgagacaagaaagtgaaggaagcccgccctgccacataagtagaagctttataagcgcgagtctgggagacgaaggtcaagtggtcgcaatataagaagatgatgttccgagtacattgganttggtacgaccttgccctcctgatttccagctggggaattggcgagtggaggaacgccccggcatttacgcagcgagcata

SEQ ID NO: 182153 - DNA, 431 bp, Glycine max
cttgatgatatggtcttcaccgacgaaaggatcattgttagtctaataagaggcaaatatgatcatcatactttgataaatgccaaaaaaactaaggcaaatgaagagggtgagaatgagggagaagcccaggctgtgactgccattcctatatgaccaagtttcccgccaacccaacaatgtcattactcagccaataacaactcatctccttacctaccacccaattatccacaaaggccatccctaaaatcaaccacaaagcctacctaccgcacttccaatgacaaacaccacctttagcgtaaaccaaaacaccaaccaagaaatgaattttgcagcgagaaagccttataattcaccccaattccaatgtcctatgctgacttgctcccatatctacttgataattcaatggtagccataaccct

SEQ ID NO: 182154 - DNA, 415 bp, Glycine max
  unsure (1)..(415): unsure at all n locations
agcttcaaagtaccatgaatactcactctttggtcaacctaagaattaataatgagtattatcatttactccacctgcttcttaggttatgtgaataaaataactggtgcacaaataagccattntccagtcccattatgcctcacagaagtcaccaataccaagacttgtactacacagggaataccatatatgttggacatataaatccaaaccactgggtttgacagagaaccacacacacacaccccgagtccccccgaaaccatcttaggaccttagaaccattatataaccttaaaataagcataacataattttaatatacggtataggagaacccatgatggacatttcattaaaaaatactgaaaattattaattatttattgaatggaaaataaatatttgtggt

SEQ ID NO: 182155 - DNA, 496 bp, Glycine max
  unsure (1)..(496): unsure at all n locations
gatatacgcgacactatagagatctgaagcttgttctgccacgatgaaaggagcatagcggataccatgtttattatggtttaccaacgcatatactatataatcggtgcgcacaccggtgctgctatgcacccatttacattagaaaacacatgcactcaatgtggcatacataagctgccaaatacagatgggaccacatagatatggatcgaagctacacgatgatagccttcatttacacttgcaaagtgacgatattaactccttagggacacactgctgggccgcacagtacttctgacataccgtgcttaagagtaaaaagaatactgggctatggcgtgtccttgcgcagatagaacataatttttaggcccatccggcatccatcttaatgtctctgaaacattctcatctgctaagatcgtatgtataaactgatcacacacatgctatgttgtgcttnttcaacaccacaatggtctgacatcac

SEQ ID NO: 182156 - DNA, 321 bp, Glycine max
tttcattgccagtaacactgctacctctcagaactctattttgatctgagggagaatcaatacctgaaatcattttatgcaaaaggaacttaatataagacgcatcagtgacatgtttccaagttcaagttttgttaaagatattgatttgcgcattggaagagaagattctataagtgaatgctgattacacaaattatttcttggttctagaaacagaggactcttcacttattaaatgttcttttacaattttgtcaatggtcatgcacaatcaattatctttcccaccttcctccgatcaatctatttaattttcac

SEQ ID NO: 182157 - DNA, 73 bp, Glycine max
  unsure (1)..(73): unsure at all n locations
gggttttttttttaanacgaccatgggcggttttttgttcagtacaacctccttttattttaaatcttttaat

SEQ ID NO: 182158 - DNA, 385 bp, Glycine max
  unsure (1)..(385): unsure at all n locations
agccccnnacaacatcataatggcgaggctatatgtactttccanacctgaatctacaaaagaagaaccaaaaagaagcccgtaggccttctggtagaaaaaaggtatgcacgggttctgggtctattataaccagaaagggggagaacagattttgggacgtgtctgtcccacaatttagtgaaatgtaagaccacctacataacctagcccaaaagagtgtaagcgagggattaaaaacctagctgatcacttataaagtcaagtagaaaatattattctattttgattcccaacacgcacaagtacaaaaccaattaacatagcaactagagtgagtagatggaacctgatgatcttcgaggccaaagggagctaaagagga

SEQ ID NO: 182159 - DNA, 405 bp, Glycine max
cagcaagctaaaatacttagcaagatcaaatttttttacctgaggactaagagggggtgggcaaaagttgggcatctgcctctgaaactgaaaacataactgaggaagaaagcgatgaaacgcacatgatgctcaagtgcttggaagcaaagccacctacatcttcaaacacatagtggtgtcccggtgaaagccaacacggagactctgcgactgacttacacgcgtacgataccgacgagacatggaaacctcgtaacatacagggcactcccatcaactacaacatacattagggaaaccacgccgtctaattaaaccggtagagacaagcacaaatagcaagtacgtaaaggactagcgcaccaagaataataaaaaaaacaacaatcgaccaataataac

SEQ ID NO: 182160 - DNA, 347 bp, Glycine max
ataacagaatctgctagaaaaaacatttagttctggcgatatctttgcattccttttgtccattgtcatcattacaacagaatttcctcacagattcttatctaatcttgcgtgcctgctttccctccgtgtccatgttataggtaaaatctagacttattttataactcttcattaaccttatacacgaaaaatacaatcatttgaaataggctcttgagctaaattactatgcctggtgctgcatatcaatacaaaacttttacatcactgttttgaccatgctattgatcgaatcttaagctttatcaacaaacatctacaaacattggaccaattctacattt

SEQ ID NO: 182161 - DNA, 423 bp, Glycine max
  unsure (1)..(423): unsure at all n locations
agcttctgcggagtgtattataagaaaangtcctcttcagtgaacgcgtaagcttaagcttcgtgttgatgaggatggcattgatattaacaataacaatcttagtcagcaaggtaaaaacgaaacggaaaattcatgctccgtgacacgaaaatgaggaaaaaggaaacacagattccattcgtagcgtgatgcgtcttgtcgttatttatggcactttacttctctactgggactcctatgttctctctataccttctttctcttttttattgtgaaagaaaggagggattaaaatccacacaaaaaaaaaatggaaaggaaaagaaatggtagtaatatctttgaatgtttaagtagatgggcttatataatagacagcaagtctccgttgagacttcacaagatacaaatcttgttgtc

SEQ ID NO: 182162 - DNA, 454 bp, Glycine max
  unsure (1)..(454): unsure at all n locations
ctcccaacataatcgctattgcatatatcctttatttttatatataancatatatatttgagttttataactaacaaaatgaagttgggtagttaacagaaggacacatatttatcaaatgtttacgcgtcaataaatatgtactacggatactgatatgtgaaggaaatgcacaattacacatacccatgtttaagttccaataaactttcttatgagggaatatttttcaaataaattaaatgaatattgaaatgaacttatatacattaaatttcgtaaaaatttctttcattaactctttcaaagttgagattcatttaattataaaagaaattgattaatttttcatttcttttctataacacttatgagaacatggaaaagaactgaattcagactgttattaattttaaaaaattaatgcggagtgccatttattcctactacattt

SEQ ID NO: 182163 - DNA, 430 bp, Glycine max
agcttcatcctataggagacagaccttttttattgttggagaagatcaacgaatatgcctactagattgacatgcctagtgagtattatgtaagtgccactttcaatgtgtctgatctatttctttttgatgcaaatggaggagccttggatttgaggacaaatccttttcaacaaggagggagtcatgaagacacaactaatggcaaggaccatgaagcacttgaagggcccatgaccagaggcatacttaaaaaggcccaacacagtgatgaggacacaactaagggcaaggaccatgaatcacttgaagggcccatgaccagatgcatacttaaacaggcccgacacgttatagagacaaggcatgtcatttgtttaacttgccattgatgatgattgaacgcccacgtctccataatttttatttt

SEQ ID NO: 182164 - DNA, 389 bp, Glycine max
  unsure (1)..(389): unsure at all n locations
agcttcccctaccccaaaatgggtttttcttataaatatccatgttggtggaggggtctagggggttcanaagttgggaaaaagaaagagaaagagagaaagaagaggaagaaggaagaaaagcaaagtcgaggcgttaccgaatcgcaaccatgctcattccctacatcgttctcttgttttgtgtcccccgtgcaacagtcggttagtttttttcaagagttgaatgtgatctatgtaaccttaggagtcccctttgctattatgtgcatactncatcttctccattatcatcggtgatctcatttttatttgtaaagtttaatcctaactgatcactagtgccgtagaaatttttttaaaaagagattgaaagttaataaacaaaa

SEQ ID NO: 182165 - DNA, 475 bp, Glycine max
  unsure (1)..(475): unsure at all n locations
tccatcacatgtaaagcatgaaggacattcataaagtgttactatatgatgtggcaatggggtgtagcgagcaaatgctcacctctccctctaaaatttaattggatcaggcttctcccaattcaattaaatttatttcccaacacacacatcaaatattcacttaatgcatgtgaaattacaaaactacccctaatacaaaaactagtctaggtgccctaaaatacaagggctgaaaaatccaacatttctagggtaccttacctacattatggagccctaaatataagacccaaaaataatgaaaccttaatctaatatgtacaaagataagtgggctcatacttagcccatggatgcgaaatctatcctaaggctcatgagaaccttanggtcttctcttgcatctctgactcaatcttcttggagtcntttatccaatgcccttgacgggtaggatngcatcacaataacc

SEQ ID NO: 182166 - DNA, 422 bp, Glycine max
agcttattcgcttgtgggctctatttgttttgttcagctctctcgctctcacacaatcacattgaccacgctcgccctatatgcctcggccttgctccaaaccattttggttctccacgcgttgtcatcatcgtccagcctcgacgtccagatcgcggcgttcggcgctaccatcggcatgatccgcttgttcttcatgtcctcgatgttccacgagctcctccatgcagtcatgattggcgtcttgacgctcttgcatggctttgaaggaagctacttcagaagcacgtttgcatagttgataaatctagtttctcatgaccacagcgtctgaaaccgtacatcaacgacatggttctcgacatgctttagattgccgagagcggtggctagagtgacaaaggttagtgtaaataggattg

SEQ ID NO: 182167 - DNA, 453 bp, Glycine max
  unsure (1)..(453): unsure at all n locations
acatatttctaattgtacagttatatgttatatatatcccttcacaaaatagctacattcttgaggtcatctttcttcaactatgtcataagatgaactggcattgagttttgttatttgcatggttcattaatattttttgcagtatttttgtttcaaatttaacatatactattatatgctattacgttatgattgtatccgttattggcatgcacagctaaatatgatccaaaaagtgatttattggatcacgagttcatgctaaaagggaaatggtttcaacagaaggacatggaggtatagttaataattctgttggtaaaatcattgaatccagatgattgattttatcttatttcatagtcaataactaaatttccagccacatgctacanaaggattctacttttgaagccataacctttaccctgagagaagatcagattcata

SEQ ID NO: 182168 - DNA, 425 bp, Glycine max
  unsure (1)..(425): unsure at all n locations
agcttgttaaaaccaatattctntttcttttctagccattactgagtctaacaaaaataagaagatttgttggtttgattacacaatgactgacactctatcgtcttacaaacgaataagaaaattcaacacgtagtgttttctcttgatatgaacaaagtttttagacagactntctaaactttacaagaatttacaaagagagttttttatgcaaataatgaaatagtgaacacttcaaatcaaacttcatgtcttcaaatcttctagtatttatttgcctctttcaatcaattatatgtagtctctaaactgacatatttcctctctttaagcttgcatttgaagaaatggccattggggtattcaacaagtgtattaaatgcatgtacttcttcatgttgagaaaccactcttcgtcgctg

SEQ ID NO: 182169 - DNA, 426 bp, Glycine max
  unsure (1)..(426): unsure at all n locations
agcttctaaagaagcttctcaggaagctgcattttgttttgacctaagctataaatagaagcatgtgtaacactagtcataactntgatgaatgtgaaacttatgagacacacttcanagtttaacttctctccctctttttctccttcaatttcgtcccatcctctctctctctctctctcattcttttcctccattgaagaaccctctctaagcttcttatccaaggcactctcttggtggtgaagctccttcttccatggcttattccctagtggatagttcctcctctcacctcttctcctttatcttctgctgcatctccatggttgaaaatcaccattgaaggacctcattgaagctcanagatctagcctccatagaagcttctcaagcaagcttccatcaagtggtatcagagcacaa

SEQ ID NO: 182170 - DNA, 418 bp, Glycine max
  unsure (1)..(418): unsure at all n locations
agctaaaataantaaaaagcntcatttattttgcattgnaaatctacaagaagattaaatcatgaattattagaacaattgaaagactaagcgcgtaaatgttctgtcattgccaaaatgaaaattatggttgagacttgagagatgatcaccgtttttactgaaagtccgcagtatacagtgtgtcccgtttttttcttgaaacgtttgttccttcgcgtatgctcgggggtaagaacataacatgcttgcttttttatttccatctctagggtcacttttattttattgtgtgttgcttactcctttttagaacacaattatattcaactgacaccaaaaaaataaaaattaatacatttttgatgtttgttttactcaacactaaattatcactcattatttgccttattattct

SEQ ID NO: 182171 - DNA, 473 bp, Glycine max
  unsure (1)..(473): unsure at all n locations
cttgcaagaagaaagcgtaagtactatgatatgtcctcaattttgttccctttttattgtctctgggtttttgcacgtatagcagctgaattggtcataagttgctatgtaaattctgcattgttttgtatttagtctctaatgtttggtgactttagagtgcattgcataactgtcttttatctgacttttttctttaatattgctgcttctgtttgggcactgctaaaaggaatcttaatagttttgaatctagattcatatatggtattgaagtgtctaatgttcatgacaaggaaaatggtgaaaaatttaaggttggaattgcaataagagaaccatgatatcacaatctntaaaaattaagatcaattgaagcctcgatctttgtaatggtggtttatagatcgactccattatctgtcatataatgaaatgagaataaaactcaatgaatgtaattcaattgatga

SEQ ID NO: 182172 - DNA, 401 bp, Glycine max
  unsure (1)..(401): unsure at all n locations
aaaaaaaaagtattaattcagctttgaaggatgatgaataaggaaaaaggtattgaaagcaaatcaaagccttgcatntatagactcttcatgtctcgccaagaggaccatttagaagagttataacttttagaaaaacttaaaaccaatttgaaaaagtcaaaaaccttgtgaagagtaacatcttttgaattattcaaaaacaggcactgggaatcgattacactaatatggtaatcgattacacaaggcttttatgtgaaaggatgtgactcttcacatttgaatttgaaatacaacgttcaaaggcactgggaatcgattaccaaaacaatggaatcgaatacagctttatgaaaataaattgaacaatggaaattcaaagtgaaatttgttcaaaa

SEQ ID NO: 182173 - DNA, 254 bp, Glycine max
agaacactagagaataagatcatcagaacctgcagagttcagatatatcagagaattggactcaaagaagtttggacagatcagataaggtcagactcagatcagacaggtcagactatgataggtgaagaaactatcaaaagataaaaggtttaacttgaatgcaggtctgacaactttacgagtttctcggcacgatcaatgtgaatcatacgacaaatgttgaaagttaaagatacagaccattttcaagg

SEQ ID NO: 182174 - DNA, 307 bp, Glycine max
gcatgcattaaagaaaacaactacagcgcaagatagcaaggataaagaactcattataaaacacagcaaaaacaaagaacgagcaaagaaaaaccgagacctagaacaaacaaacaaaacaaaaaacaaaaagcgaaagaataaaaccggagaggcccaaaactggaatatccaaatcagcaagtaccaagacaaaagtacccagcaataacgccaaaaacttgcaaactgagcgactagtgcaccaactcatacaagtagcaaagcaaaacggaaggtcgagtgacgagtctacagggaccacgca

SEQ ID NO: 182175 - DNA, 394 bp, Glycine max
  unsure (1)..(394): unsure at all n locations
agctngaaggggatggcgctctacaaaagtttcttctgatgtacttacacttaatcaagaaattggtcttttaagagagactttgtccaaattcgttggaagcactataaaactcgacaagtggtttagatatactaaatgcccaactgataatattggacatgtatattaatgacaaaattatgttcataataatggaaccataatatgctacttctgtggaaagattggatatatgacattcaagtgtagacatctaccaaaaaccgaatcatccagtgctntcacatctaacaagaaaagacctaaaaaggtttgagtacctaacagaaaagctttttgttccaatatcttcaaccaccacatagacacaccattcttgttccggacaagg

SEQ ID NO: 182176 - DNA, 244 bp, Glycine max
  unsure (1)..(244): unsure at all n locations
gaataagccatggaaaaaagagcttcaccaccaaaatgagccttggataagaagcctagacggaagcttcaatggangaaaatatagatggagagacagagagagggggggggggggatcactatattgatcgatataaaaagggagagaattggtactttgatgttgtctcacaagactctcattactacagttccacaagtgataccattgcgtctcattatttactacgtactcccttggg

SEQ ID NO: 182177 - DNA, 428 bp, Glycine max
  unsure (1)..(428): unsure at all n locations
agctnttctttcacaatcaatctgnctactgacttataattctaattgcaagttcacattcttgttctttctttgtctaacatacacacttgctcaaactcatgaaaaggaacacaaactccatcaaaatcatgcactcaattcaaaataatgacatacacccatttttcacaaaaagataaaagtgttttactgccatgtcatcaaaaaaaagtcaaactgttcaaaatgcttcaggatgagcaaactaactacccataaataaaactagcagtgtacgtagatggcgccagtatacataaaggaaatactgtactgaaaccataattataataataagccaaaaagaaaaaagtatcatcaagaatcaacaatgtcaacagcgtntaaactgtggaattagtaagagcaacaacttcttcagatga

SEQ ID NO: 182178 - DNA, 463 bp, Glycine max
  unsure (1)..(463): unsure at all n locations
tcacatacctctctaatagctaagctcacctccttgttatgagaagctagagcttagctacacaccccctataatagctaagctcacccccatgacaaaatacatgataatacaaagactactcaaaatgccacgaaatacaaggctaaaaccctatactactagtatggccaaaaatacaaggcccaaatgaaggaaaaacctattctatatattacaaagatgagcgggctcatacttagcccatgggctcaaaatctaccctaaggctcataagaaccctatggccttcccttggatccctaacccaatctacttggagtcttctatccaatccccttgcggggtatgattgcatcattccctccaccttggaaaggatttgacctcaaatcttaaggttctccatactctatgctccttccctcaacacttgtaaaaagaaannaacatatgtattagt

SEQ ID NO: 182179 - DNA, 441 bp, Glycine max
  unsure (1)..(441): unsure at all n locations
aaattgaagatattttctcatctttctatggactactcacacgatcacattggagttctatagtatcctctaggcccgcacaaggcagataagtcaagtaagcacaaaatctaaaatttagctacaattctcaattaagctcgatcatttgccttagatcaaaactgagttaagaagaaaaaataagggtgaaagagatgtcaattgagctaaaaagaatagaaaaatattaaactaaaaatgctcaatcagtgtccacgtgacactctcacttatgaagaatatgcagcaagtgtcgaggtcaccctatcatgccagacaanctccccncnccncttcctatggtcagcctaaatctcaaggaagttccaaatcgagtgacatgccctcaagtacaaagtatttcccttatgagaaactacaattacttactgacaaagt

SEQ ID NO: 182180 - DNA, 350 bp, Glycine max
gtaaaaagtgtattgaacagcaaatcaaagcccggcatatatagactcatcatgtctcgccaagaggaccatctagaagagttataactttgagaaaaacacaaaaccaatgtgaaaaaggcaaaaacactttgaagagtgacatcttctgaattaggcagaaacagtcactggtaatcgattacactaattcggtaatcgagtacacaaggccccgatgagaaaggatgagacacttcacattcgaatatgaactacaacgatcaaaggcactggtaatacgaaaccaaaacataggaatcgaatacagcttattgaaaggaaccggaacatcgcaaatacaatatgaa

SEQ ID NO: 182181 - DNA, 424 bp, Glycine max
agcttgtaaaggatggatcaaatgaatgtttatttatattgaaaatcaaatcaaagccttacttttatagactcttcatgtctggccaagaagaccatttagaagagttataacttttagaaaaacttaaaaccaatttgaaaaagtcaaaaaccttttgaagagttacatattttttatttattcagagacaaacactggtaatcgattaccaaattagtgtaatcgattacacaaagcttttgtgtgaaaagatgtgactcttcatatttgaatttgaaattcaacgttcaaaggcactggtaatcgattaccaaaacattgtaattgattacagctctttgaaaataattggaacgttgtaaattcaatttgaaaactttttcaaaaccattttgctactggtaatcgattacaacaatct

SEQ ID NO: 182182 - DNA, 358 bp, Glycine max
tgcggatcaagttgattcgcaagcttcgtgcatatattttgatccgcattaagcttgcggatcaagttgatctgtgtgaagtgcgcctgaatcctaccaaatgcggatcaattgaaacctaccctatgactactgcggatcaagtacaatgcaaacgcggatcagccaaatgcatacgcagatcaactaccctaagcactacacaaaaacaccacaatggaaacgcatacgacatcgagggagaagagtgcatacctcgacaattttgacacgctgaagaagaagaagaagaacaaagcaacgggccaagaagcggaggagaaaacgacgctgtagaacaaagctgggtggaagaaga

SEQ ID NO: 182183 - DNA, 420 bp, Glycine max
agcttcaaaccacagcaacacaaaatctttgtgtccaaaacccctcaattcaatggcttttctaggcttgaaaggtggaatttaaaatgaggtaatattggagcaaactctcacctcacacaagtctataacatcaatctaaacttgctcaaactggatttacacctaaatttccaccgaatcaaaatttgactcctcaacacccaattttgccctagaaatggctcttggttcactttggtcatttgtttttctctctagctcagcctaacctttctcacatgtcctaaatgacatttcaagctattattaactcactttaacctccatttaccacagaattcagacttagccttccaactctcaaagtctcactctttttttgccactcataacatcacattctcactttctaaccct

SEQ ID NO: 182184 - DNA, 471 bp, Glycine max
  unsure (1)..(471): unsure at all n locations
ntactntagaaacttgttcatttactatgatttctttctaattcaacatttcattcatatgtaacttaaacatcaaatctctttagtagtgttgattacatcaaatatcaaattgaaccaacacttatatgtcaaacccaatacacacttaaagaaaatacaaaacacaaaaaacaataaagaacatgaacaacaaacaaattggttgtgtttgagtctgcttcattcttttcttcttctttttcttcttcttcttctgaaaaaagttacgactctctaacaatctcctcatccactacatcacagttcacatcaaccttttacaatcaaaatttgtaagcaacacggtaacttggcattaagcctttttgaaaccttctcaatgattaacaacaatctntggcattaagcctttttctctaacttgtaacaagatcaaaattaaccttntctttgtttaacaactcaccc

SEQ ID NO: 182185 - DNA, 424 bp, Glycine max
agctttgaccaaaccccagcagtagttgttttcttatagacttacctcaacacctggtctccgagactgaggataattgcactgtgtgccttctacagtagtgttttcttatccccatcagccatcatcttttttgagtttggcttctccatcaagtgcttctaccaggccctgttgaacaagaagggctttcatcttcaattgccatagcccaaaatcattttgccctgtgaatttttcaacctcatacttggtcgagcccaaaatcatccacgctcaccgcaccagtttgttgtgccaagatcatatttactcacaagatatatgtagttcttgtttgaacaataataagcaaaatgcagaatagggatgaacacaggataacttcatagaaatatgacttgactagagtaacaattcaact

SEQ ID NO: 182186 - DNA, 475 bp, Glycine max
  unsure (1)..(475): unsure at all n locations
acacttgaaactcagctttagttttcaataatacttttgttgtctaatcctgtatattgtcctaaggacactccttaacatttgcctttttgttaccatagcatgtagtaattgaatctatgcttatgctataactgcatataatcctgtttggataaatttctccgtaaatacttacaagagaagacaaaatgaattgagtttcttctgtaagctaaaatcaatttatgcactttacttttataaaagttctctcatttaatttctccagaagctgaagtgcacaagtttatgttagtttgtgaaaagaagtttaattcattttatcttgttaatttctttttctataagtacttatggagaagtttatcccaacaggacacgtttccaatgatnatggcattcacactgaagaatataaattacatttcttttgtgataatagctatattttccacaagcatgaggaacaatt

SEQ ID NO: 182187 - DNA, 401 bp, Glycine max
agcttctatataagctgaaccattttatttataacacaagttgagttttattcagaaaattagagtttatctcttttatcttagtgagagtgattctcctaaattcttgagtgattcaagaacaccctgtctgtatcaaaggactttcacaacctttgtgtgttgccctcgctggaaagagtgattctttcctttctatcatctccacccttgttctttcaaaccacaattccagaaaatccacctctgcccaaaattatctcgtgaccataactcccatttcacacactcaaattaagtgattcttgatcctaaattgaatttcaaaacgagatctttcacctcgttttggaatcacctcatttggagccctgtagcttccgtcatttccatttctatat

SEQ ID NO: 182188 - DNA, 417 bp, Glycine max
cgcttgatgcaacatttggagaggttaatgaaacatctttattatgcgctccatgagaggatggatcaaatggagaatatagatcataatgaagaagaaaggaggagaagagggaatgatggtgttcctatacaaaaccgaattgatggtattaaactcaacattcctccatttaaaggaaagaatgatccggaggcctacttggagtgggagatgaaaatagagcatgttttctcatgcaacaactatgaggaggaccagaaggtgaagcttgccgccacggagttttccgactatgctcttgtgtggtggaagaagctactaaaggagagagcaagaaatgaagagccaatggttgatacatggacggagatgaaaaagatcatgaagaagcggtatgtgccggctagttactca

SEQ ID NO: 182189 - DNA, 426 bp, Glycine max
  unsure (1)..(426): unsure at all n locations
agcttnctgagatgccttttgataatctcactagatgccttggtaaaatccacaatctcattagagccatcaacattcaaatagtcaatgaatcttgaggcaagtacagcataatgaaattcataatctaccagataaagactcttcaacataatgtcttcaatcaactatacccaattcatcttaatacctgatttcagaccatcaacaatctgcagatcatcacctgttacccgagcatcattacttgacctcggagtgtgaatgtaggtaatgaggtatactagtattatgtcctctatagtcaatccaccaacttctaagtgattcctcaagttcattgttggatcaagaagctntcctctataggtctgcatcttgctgtacccattagtcatttcatcgaacttgcagactccacccatg

SEQ ID NO: 182190 - DNA, 364 bp, Glycine max
  unsure (1)..(364): unsure at all n locations
agaccatatattactacaattatatgaaattgagtaggtaatactaacaacagaatattagtagcatgaccgaaaataaaatagccgctgtgtcaaataacataacaattgtctcaaatacaggaaaaaaaaatactcctacgccatcattagccgttttgacttattgatgtctttaaaaaaaatgttgcccatttctttcgaattgtggtgatgatgtcgatgtcgaacggtgtgtcattagcaaaccactgcaagtattcataattgtaagttagtactgcanatataaaaattcagttccaatggtacttgagtttatgcataccatgaaccagtcactctttatgtcgctgggtatgat

SEQ ID NO: 182191 - DNA, 417 bp, Glycine max
  unsure (1)..(417): unsure at all n locations
agcttaagtatactatctctcttaattattgatatggaagtcaagcggtatatttcaatggtagttttttttggtattagtcgacaagtcaatcaagaccatccaattacaaatttgatctttagtaatattttttttatcaaacacttaatagaaatgttattaaaaacttttgacgacattcggaaaatgtggcaaaattatgaataaatgttactaacatgttttacaaaatttatcaaatgtcttatatagttcatgttgttaaagtctttttgtaatatttttaggctttaacaacataaactatatacaacattagataaaatgtcataaaaacatattagtaacatttatgtataatttgataacatcttttaaattctaccaaatatttntagtaatatttttattaag

SEQ ID NO: 182192 - DNA, 419 bp, Glycine max
  unsure (1)..(419): unsure at all n locations
actaagcttctggtgaatanaggtgattcaaggtgtnttgatgataacaattatgatgacaaaagatgatgacaaaggtgacgacaaatagctcaaagatcaatctaagaacaactcaagtgaatcaaagatcaatcaaagagcgactcaagtgaatcaaagatcaatcaaagagcaactcaagtaaatcaaagatcaatcaagaacaattcataatcaagaagaattcaagactcaagaagaaagtctagagacaagaatcaagattcaagatctcaagaatcaagatcaagattcaagaatgaagagaagactcaatcgagataagtattaaaacagttttcacaactctgaatagcacatgagttnttgacaaaaccttttaccaaagaagttttactctctggtaatcgattacc

SEQ ID NO: 182193 - DNA, 359 bp, Glycine max
acacgatgactgtataaaacgaagaacgaacgacggagctcgaagaacgaacgaaaagctccacgcaatcacccacggaaatgttacggaaacagtacggaagcgcctcggcaaggaagtcaacaccgaaaaattggccgcatcagatacgaaagagagaaaagggcctaaggggccgaaccaccttctacggcactgctccccctagtcagagcaaaataggggagaagctagccgcccaacaaccttctggagggaatcacaggagggcccaagggggcccggtaggaagagcacccccaaatatgcgaaagaacgccgggccagaacaaggaagacacttacagacgggacgaaac

SEQ ID NO: 182194 - DNA, 284 bp, Glycine max
aaaagaaaaagagaggttataacacacacaaacggggggggaaaaaaaacacacaaacccacaggcaacgcaaagcgcacccagacgaaagcgacaaagaaagacgcgagcagagaacgaccgaacaagcgacaagagaacacaaagccgcacggcatgcaaaaggaacagaagaccagcaaagacagaaagaagacaaaacaccggaaacggcacacaacgacggacgagcccacaacacaacaatgaagggcgggcagaacacagaagaaaagcagacaaga

SEQ ID NO: 182195 - DNA, 429 bp, Glycine max
  unsure (1)..(429): unsure at all n locations
tgcaagcttcanncactattggaacaataggcatgttttttgttcttctagcagtgcgagagctcttatgtggtctctgccaagggacaacaggtggggaaaatgaccgtgctgaagctacacgtctacgattgttagtaccaccagcagcagggggcttagtggtaaagtgagacaagtcccaatcattataaacacctgctctatggacaactggtgacaacttgggggcaactccagaacctgatcgtggagcccgaatagcagtgttaatttcggcactcgaggtaaggctaactgaattaaaatcatcacgtgcagttgccctggtcatagaacataacacagatactgaatcaaacatcaaatgcagaagaaatatcacaaagatgaagagatatatgaactataatcacaacgctccatagc

SEQ ID NO: 182196 - DNA, 384 bp, Glycine max
tatcacttaaatcacattcaataccctgcgaattgagaggcattaagaaaccaaacttgcattcctctaatacccaaattctcaaattatctgaattacactaagagagttctctgaccaacacaacaacaatgctaaatttaagttagcgtctattttgaccgatactaattgttggttgtaaaacaatttaaaaatatatcttgtgtcggcttcaccaacactattaacgttggttcagagttaacactacaatctgaacgccatttccatattttcttgttgtgaaaaaaatgaaaaatggaagtaacaattcctaataaaataattatatatagatccgctagagaatcgacatttctaataaaatatgtattgtatgat

SEQ ID NO: 182197 - DNA, 390 bp, Glycine max
ctcgcttatgcgaggagctgttatccattatcggtctatgcttagtgttgtctaatacagagcatgatgatgggaggcataacaacaaatgttgtatataagataagaagctgcaattcgtcctttgcaatcacagctttctctaaccaaatgaacaatcaaacaatgaaatttaacaaatggagaaaaagtttaagaataacaatgtccaagcagatgtttggacttattggaaaagaacatggtagggaagaatgaacatataataggggaatgaggtccatagcatcaacttcatatcagatgaatagaagagagggacgggggaaatttaatccacaaacgagatagagaagaaatggattctaccatattacatttggtaatgga

SEQ ID NO: 182198 - DNA, 370 bp, Glycine max
caccaacatagcctagtccttatgtagcaacttcaacattctaagatatactactagcacatgaagtgaactatattcaataaatgcggcaattgctagctacaagttagccaaagtagagtgtcgatagttaactataataatcactaagttagttcgtatgctagagaaacggggaacactcaaacttatataggcaaggcaacgaggcgattctggggcgagattatcatatcccgcctataacagcacatacccccccacactcccgtcaacgaaacccaatgggggtgtagatgtacccctcatccgtcgccccgacagggttgagattgtctcatcccgctccacacatgcttataaaaattct

SEQ ID NO: 182199 - DNA, 432 bp, Glycine max
gcatgcaagcttgccacccagctcgcccaagtgggcttggttgctatttgcacccccatttttactaaatacatcccccctgcctttttttggtgattcttttttcgtaaagttacggaaacttacgaatttcgtaacgatacttgttttctttccgtaatgttacggaaccttgcggattacataatcatcccctttttgacttacggaatgttacggaacctcactatttgtgcaacgatgcttccttttgatttccggtgtgtcacggaatttttacggattgtgcatcaatattttcttttgatttctggcacgtcacgaaactccacaaattgcctaatgatgggtgccaagcaccccaaaatgaccaaacacaagttgcatgccactaagcacatgtccccggacgaaattagggtatgacagttg

SEQ ID NO: 182200 - DNA, 414 bp, Glycine max
  unsure (1)..(414): unsure at all n locations
attagagctcatctcttttatcttattgagagtgattctcctaaattcttgagtggatcaagaacaccctgactgtatcaaaggactttcacaacctttgtgtgttgctctcgctggaaagagtgattctttccttcctttcatcttcacccttgttctttcaaaccacaattccagaaaatccacctctgcccagaattatctcgtggccataactcccattttacgcactcaaatgaagtgattcttgagcctaaatngactntcaaaacgagacctttcacctcgttntggaatcacctcatttggagccctgtagcttcaattattgccatntctatatttctgtccagccaccacttaacctacattttaccatcccattcatccattttatgccaagaaccaccttat

SEQ ID NO: 182201 - DNA, 414 bp, Glycine max
  unsure (1)..(414): unsure at all n locations
agcttctggggggacatcatgtcangtttacctatcngacactcaccacagatgctgccttcttctattttcagatagggaatgcctctaacagcacctttgtcaatgattttcttcatgccttttaagtgcagatgtccaaatctttgatgccatattttgacttcatctcctttggaggatagacatgtggaggagtaactggtttcttgaagtgtccatacgtaacagatgtcctttgatctgctgcccttcattagaacttcactcttctcatttgtcaccaagcattctgactttgtgaagtctacattgaatccttcatcacacaactgactgatgctgatcaagtatgcaatcagttccttaaccacagtactctgtcaaactagaagccatcattgacttactttc

SEQ ID NO: 182202 - DNA, 404 bp, Glycine max
  unsure (1)..(404): unsure at all n locations
caactatgaaatcgtcatgtcgtacttgaaaatatgatccacgagaatgattttgcatgtgtgttagtcacgacgaaagtttcgcatatgactcaatccaatcgtcatattcaattgcaatggttttctgcttcgccaaccaagcttttttgtatgacaccttgtacacaaaatcactgttaatcctctcttgaatcaaagaagattttattgatggatcttctctgatcatgtctgtcaataacataacaatatttaaatgacagtgtacaaatgatgaacatactatgaacataaaatacatacatactacacacgngacattaaaaccggatcacgtttctcgtgaccttgtgcattggcatattcaaacatgtgtggcgtccacaccactcgtggacttt

SEQ ID NO: 182203 - DNA, 420 bp, Glycine max
  unsure (1)..(420): unsure at all n locations
agcttttgtttnggggttgcctaaattaattactacgtacgacggctaggtttttcagtgcgagctcaaccgagggttcgttcctaccgacactggcatgntgttcttctcatttaggaggataagaaaacttttgcccaccccggaaaaaacaaaataaaacattattcacggaaattgatcgaaaaaaatgattgctgacgtcatcatggagagatgaccgatcgaggtctaaaaaagaagcatcaccggatgatgccgatcaaacatttcctaatcgacatcttgcaaattttattcatgaattgaatagaaaactcaatatccgacatcggtcgtgaaatggccccgactaatattctttagcccacattgcgcatattttttaaaaaaaaacactcctggccgatttgttttttc

SEQ ID NO: 182204 - DNA, 390 bp, Glycine max
  unsure (1)..(390): unsure at all n locations
tgccaaacgaagagactgagtatggttattatttcaaagctagaacagggctctgggtcaaacacccacatcactacatgaaagagctgagagtatttctggttttacaaaggaacgtaatttggaaattccgaccacgccaatgtgaccggggttcagtgtatgttacgaaaataacatgcatttcatgaaaggataatgtttacaaagtctctttctctaaggtttttcanaggaagcataagacaagcaatggcagttccaaagtcagaaaagatgctaagacaatatgaaactaacaagatacaatcatataaccatgattacctctaaagaaaccaaagacagattacggtttcgttctctaccaaaccgcagccaagttggaat

SEQ ID NO: 182205 - DNA, 426 bp, Glycine max
agcttgccgttggagctgacccatatactttctttcttctttagactggtggtccctaagctcttgaccttaacttgatagaacctctttttaagtgaaggcatttgacttgatcccattgtttactaaagtgaacaaaaatcggcgcgaatcaaaactccaacatctatcatgggtggaatggatgaatgcatgaagaaatgcatatgacacagatgcaatttacgaatacgggagcccgagaaattgtttccttcttggatacaacgttaagggacctataagggagagagctaactaggctgttagtgataacccccaaggtagtcatatctctcttgatggcctctagaggtatcatcccctccgaagaacatactgcagcagtatggactactagcaacaatatgttatcaacgagaaaaa

SEQ ID NO: 182206 - DNA, 459 bp, Glycine max
  unsure (1)..(459): unsure at all n locations
agatcaagtgatcatcaattccaaaacataggggtgtgtgtcatccaatttatatatatacatcgcttgcttgtatcttgatttcacgacttatattgtcatcataaaaaagggggagaatgtagaagcaaatgactttggtgttttgatgatgatcatgatgatttgatgcaaatgggtttttcaagtgtaaattcaagacaatgattcaagaatacaagccacaacatcaagatgatcattattattttaggaagggaattcctaattgatatagcaaaaggtttggccaagtaatttaagttaaaaagtgtttttcaagagatttactctctggtaatcgattaccagaggatgtaatctattaccaatggccanaaatgatatacaacagctactaaatatttgaattcaaattttacacagtgtgatcgatacacaatattggtaatcgattac

SEQ ID NO: 182207 - DNA, 410 bp, Glycine max
  unsure (1)..(410): unsure at all n locations
agctnggacttcctgtgttttgggaatctcttcttcctcaggtgtacccaaacccagtcacctggttcaagcacgactttctttctgcttttgttggcttgccttgcatagctcgcatttttcttttcaatttgaaccttcacttgctcatgcaacttcttcacatactcagctatagcctgtgcatccttatgcttaaacatagcaatgttaggcataggcaacaaatcaagaggagtcaaaggattaaatccatacactatctcaaatggtgaacaattagttgtgctatggacagcccgattataagcaaactcaacatgaggcaaacaggcttcccaagatttaagatttttctttaaaacagtcctaagcagtgtgcctaaagtcctattgactacctcatttga

SEQ ID NO: 182208 - DNA, 440 bp, Glycine max
ctgactgtggtttatacatgtatgatacatgatttgtgacttgtatgatttgatttgggcaagaatggatgaggggaactgtggttttcgaaatctgcactttgtgcagaattttgttgtgaaattatgcagcagaattttgcacaagtgcagaaaaatgctatgcatttgctggttgtggaaagagcagtgcagaatgagttctggacgtttgctagtagatcccaatggtcaaaatgtaggcttatgtactacggacttccagtaaaattttggagtcgatccgatggttaatgaattggaacgaatgaattgttactggcgtctttaagtgagaaaatgtgtgattatggttggtgtattgggcagagttttctgcctttgccctgttttcttggctgtgatagattgtgctgtatgaatgttgttatacttggatg

SEQ ID NO: 182209 - DNA, 428 bp, Glycine max
  unsure (1)..(428): unsure at all n locations
agctntgacaatgagctagctctattttcttactttattattacatnaagtaaataacacaagttaaataaatatattaattttattaagtatatagttatacacaagttaaatactatattttgtaaaataattttattgtgagttttatctttcaaatattttcttactaaatattacttaattgttcagattattaaatatataaaaaaatatttaatatacaattgtgatattaattaaaaatattaaataagagctgttatattctttgacagacttttatgctcatatttacaattgaataaaaaagtaaaatcaaaataaaaccatcaaaccttctagttacctgtcaaaaatctaggagagacaaataatataattctttccctttatttctctccttggtactcaaagtcccacgactg

SEQ ID NO: 182210 - DNA, 464 bp, Glycine max
  unsure (1)..(464): unsure at all n locations
tttacttatttagttcatttataatttaattatttttataaaccctaaactcaaaccttaagattccatttccaaatttctaccattattcttcatttgtggtcaaagattgatgtcaagggcatttgttcttgtcgagtttgaacatggggccgaattgaataatagggattctggcattgtgggaaaggcagtgaaactcaccacatgaatggatgaaaacccaggaaatgctcttacaataccaaatatgaatggaaaaatttgttcaaattgaactatntttcttgttcaaggacttacctatcttctnttaatatgtttgatttgtttatgtgcagaaggactgggttgttgtataaaagaagctcgagtatgagtggcttattgtagaaaagaagttcgacgtgggttaagaattgcaaaatgtcgaaaactcaataaaaatgaattntgaagcttaa

SEQ ID NO: 182211 - DNA, 379 bp, Glycine max
agcttggagttgcaatagtgctattgttcttggtcttacttactccatattgtcgacaattaacttgtggtcctgtcttgattatttataacgctcttgtgctatgttgttccaagtttgggctttgtgcaagtgtgtacatagatattcatgacccgctgattagtaggaaatatttaacacctatatgatatgaacagactttaggtgaattgttgaattgctgatctctgtatatgaagcaaggctaacacataagatgtcacttccataaaaaaggtccaatcttattagtacttcctataactatatatattctggttgcccatacctctactggaaaactgagctggcaattctttatatgcatgctataaat

SEQ ID NO: 182212 - DNA, 399 bp, Glycine max
  unsure (1)..(399): unsure at all n locations
tactcncactattacccacaaccacccaccaaacttatctatgtgtagaaaatgacatcggcagaaatgcagttgagaagagaaaggggcctatgctttacttgtgatgacaagttttcccctagccatcgttgtcctaataagcaatattttgttccacagtgggaagaagaggatgaacctgcattacaaccagatccaccatacgaggttgagacagctggtgaccccagtttgcaagatcatcatttgtcttataatgctttaaaaggctcatcatgtcttgggacaatgaagtttcaaggatcaataaatggattgcgagtgtagattctactagatagtgggagttcatataacttcctctagcctagactagctcaatgcctgaagttacct

SEQ ID NO: 182213 - DNA, 419 bp, Glycine max
agcctttatccatggtctcctatggtggttatgttcttctagaatcatcttctccttgaagtggcatctcctctctctcttccttctccttccgctgccattcatctttcaagaagcaaaggaatccattgatgaagaagatcctaggccttcaagcaccaatggagcttacatcaatcataattcaagtcaaattcaacttatccttgtggtagtctctacaaacattcaacggttaatgattgtctaaatgccttgttgaatagtgaatgccatccaatgtaattgattttatatgaactatagagcaaagctagttgaaatttactatacactctctgaattttggcaatgatcatgatattatgatatatgaaaactacctctaagtaaaggggtcatgttagatctcatgtcat

SEQ ID NO: 182214 - DNA, 382 bp, Glycine max
  unsure (1)..(382): unsure at all n locations
gttctggtcactgccacagcttatanatctgtgctattgattttcttatgacaataggaccaaaaatttaaaaataggatttacattatgcttgtcaacagtgaattatcaagagatttaaaccacactaaagaaaaaaattattccaggtgtctatacaggtgtctatacagttctctaactgtatagacacctagaataatatgtaagttcaaatatattgtacaattccaatcatgttagaaacattattaactcatcttctctagctagtatattcaacctttattttgtctatggccattcactcataccatgctcgccattatttgggtactttattattgggaaaattaaacattggaatatttcaagacatata

SEQ ID NO: 182215 - DNA, 412 bp, Glycine max
  unsure (1)..(412): unsure at all n locations
agctattacatacgacacaaatactatgcttttntcataacaacgggaatctaaagacagttttttatcaatttcatcgtgataagtaatagcaagacagttgtgtgctttcaattacaaggaatataggatggccagcaattgctttacttctttactttccttttattgatgatgatgaggctgattgttttttaataatatcacttccatcctaaaataaatgccacatctcgaaaaaaacagttgttttaaaataagtgacacatctcattttttaatataacattaatcaaatctttgtatacataccttctaataaataataattttagtgttcgaaactgaaaataatgttatttctatttatctaataaagttaattctatcaaaatttaattcatttcaccta

SEQ ID NO: 182216 - DNA, 248 bp, Glycine max
atcgcatcgttgaatacaagacatccggttgatggttcaaataccaatcttctctgcagagtctggtttttcggaaggcataaatagctgaagctttaggccctgagcttatgaactcaacactctcttcaatcttcttcacctgctaaagccacgacaatacaaataaaacttcacttgccacattcccggactattaatgagacactaaaggtcaaatatttttttgttgcatcttactgtgataa

SEQ ID NO: 182217 - DNA, 420 bp, Glycine max
agcttgacaagttagtgggatttctcgagaattcttgagttaataatgattgatgattcacaccttataaacaagggtaaaaaacccccccttaaaattagctcaataacagaagaagtatattagcttttccaattgactctaaaggcttaggatttttcagaggaatttgataactctgaagatgaaaatggaaaaattattgaagttgtacgtattatcaaacaaattaacataccaagatgtgacaaaaaaaacagaaagaatgaaaaataagaatgactcaaaaatatttttttcatccttataaaataggtaacatttgaattctatttatacaattttttttttcattttcataaaactataatgtgtcatattttgatatgagataagatttcaataaatctgaatctacct

SEQ ID NO: 182218 - DNA, 378 bp, Glycine max
aggaatcttccatagagataaagggccttctaatatgctacaaaatccaccttaatagtctctaaaagatccttattaacctaatgttcaacccatgtggcctaagacttttggagttttctcattccaaactacttctatgatttcttccttcatgaaaggtacaataagactaacttttgccccatcttacaatctcttgaattacatatcttacaactttatcccatgcaactgacactgttggaaatgctttatctagtacccacagattagaatccgtcatgctttgagctgtcttgaacctcttaccctttatcttacacataacatcatattgcatctcaatctcatgtataacaactacgaaagaacttg

SEQ ID NO: 182219 - DNA, 411 bp, Glycine max
actctggcatgattgatggggacccggtgtttttataaactattatatgggctacgtgggagtacgtgagctcagttggaggtgggcaacaggggatggtgggtttatgcgcgcattgtggatgtggaaagcttgttgtgcaccatcgcccgaccgccacctagtaccacatgtgatgggtaccccataattctacaagcttgagatgaggaagtgttgaagggtgaaacttcctgcttttattgttgaccacagagtggtacctgtagatatgtcgcgggggtcaggagaccttggggacgtcaggtggggtgctattgcccaaaaccaagcttgaccaatcccgacccaacccgggcatagtcggtcagtgagaacctgtgatgtacctaaacaggcgagcttctggca

SEQ ID NO: 182220 - DNA, 397 bp, Glycine max
  unsure (1)..(397): unsure at all n locations
tcctgacaaggctgggcatcaagtacttagtcacctatgtngaacatcctcaaactaatggacaggcagaggcagctaacagagttattctcagggccctgcgtacctgactcgataagtctaagggcttatggaaagaagaactctacaacatactctgggcgtaccactgtacatcctagaaaacaactaataaaactccttactgactcacatatggcatagttgccatgatcctcattgaagtcggggaaccgttggcaaggagactactgttccagcaacaacaaaatgaagaatatatgagggtagaactagataccaccgaagtagtccgagttatggcgaatggtaaagaagaagctaccatacttcgagtagccagagatacaataca

SEQ ID NO: 182221 - DNA, 416 bp, Glycine max
  unsure (1)..(416): unsure at all n locations
agcttgttcgaacatcgttcgcgtgtatgatatccactcaacattgtttgaagtanaagagaccttcaatcctataacgcaacgtggcagacaaaagtgggcagttaacttgaatgaccattattgtcaatgcggaaagtattctgtgcctcactatccatgttcacacattattgcatcttgtggttacgtgagcatgaactactaccaatatatagatgttgtttacacaaatgatcacatcttaaaagcttactccgcacaatggtggcctcttgggaatgaagcggcaattcctccttccgatgacacatggacacttatccctgacccaactacaattcatgtgaaaggtcagccaaaatcaacaaggataaggaatgagatggattggcatgaaccatctgagcaccgac

SEQ ID NO: 182222 - DNA, 470 bp, Glycine max
  unsure (1)..(470): unsure at all n locations
cctganactatctgagatccctttgtcgttgccttcctacgatggtgaagcttaaggagaacccaatctcctatctggtagttcacttcgcgacgtttcccatcagcttggcttttcatagcagcttgttccttagaagcttatttcgaatagcttggaaagtgatatccctgtcagttaacatctcttcaacggcctcaatgttcgaagaccctgtaatatattctggatagttaaaggttttcggctaaaggtaacaccatacgtagtggctccagttcccacattccatgaagtattatgggatcattcgacccacgagaggagctttccncacaagcttggccgaggatggatgaaggctcgcaaatattgttcaattatgcgattcataacctctgtctgtccatcaatttgtgggtgatacgagaagctcattcgcaatagtgtcccactcaaacggaagagtc

SEQ ID NO: 182223 - DNA, 419 bp, Glycine max
  unsure (1)..(419): unsure at all n locations
ctgcacgcatgcaagcttctatagaagggtcgctcctaatttctctacaanngcatctcttctcaatgagctagcgaagaagaaggcggcttttacctggggtgaaaaacaagagcaagcctttgctttgcttaaagaaaagcttactaaggcacctgtactagttcttcctgacttttctaaaacttctgagctagaatgtgatgcctctggagtgggagttggagctgttttgttacaaggtgggaaccctattgcttatttcagtgaaaaaattcatggtgccacccttaactaccccacctatgataaagagctttatgccttaataagagcactctgaacttgggaacattaccttgtttccaaggaatttgtcattcatagggatcattaatcacttatagtcattagagggc

SEQ ID NO: 182224 - DNA, 435 bp, Glycine max
atacatatgcggaagtatccatgttcatatcctggatataaaaatttataaagggcaaattaagagagatcgaatacctttcagatacgtccagaagtatcctagaaaaaatatataaaaattaaataaaataagattggatagatttgggatatgcatccggaaatatccgatgagtattgatgcccaaccatttttagagtatccgggcttcatagatatgtattattcctagcttggaagttagcttttcaaattcgtttcttggttgagaaaatcaactgtatgaagacttgggagtgtatatcacgttaatgattccttcttcaatcttctattgtttgggcctgtcataataaactgtattcttagcagtgtctattgaagcctgattgcaaaagtatctatttgcccttcattcataagtaattttta

SEQ ID NO: 182225 - DNA, 406 bp, Glycine max
agctggagcctcatcggctctcacagtctttatatatgggagccaatccaatccttgtgttcggactctcagccacttatgatagccgccgatgatcccattactgcttcccctaagctctctgtcctttcttcacgccgcatcccatgccttgcgaactccttggagtaccctcgcgttgtggtcactaaaaccccgtgcgatgaaaggcgtgaggctctcgtctaatggcgctcctctcatggggtagccaagctgtcttatggcgagaacgggattataattaatacaaccccttgttcccatcaagggaacatttggacatccttcgcatgaagatagaatcttgattcttccttccttctagcgagggaaccaattaacagacacccccccatgctagcca

SEQ ID NO: 182226 - DNA, 324 bp, Glycine max
  unsure (1)..(324): unsure at all n locations
actactgtacacacacaactacatatngtgttccctctctgaattggcggagtaatagtcccttgactactcttctaatttcttttcctctaatcctaaaggatggactctacactttntgggatatcttttacctacgctccattggtgaatatatttacctgcactcttttagaattgaatctactaactccacctagagcggtttggctatagaaattccttctaataaagggttaaatatctcacttgacattaccctcactctttggcacttattccttgcaaattctccttcaaattgaacaactttatagtgatatg

SEQ ID NO: 182227 - DNA, 263 bp, Glycine max
attgatatggcctcattaaacatcttttaagtctgatgaaaaagttttgtaagtctgatgggccccttaatatgctgaaatatcttcctttgctccagacttgccatcatagcctcatagataaacactttaatactccatatgcttccttcattcttctaagtttgaattcatgcatgacattaggctgtgcaacatcgatcatttgttcatcaactttaaacactagctttggataagaacattttgcactaggatctgtt

SEQ ID NO: 182228 - DNA, 380 bp, Glycine max
  unsure (1)..(380): unsure at all n locations
tgggcaatggtcagaatttatttgaaagagatatgtgttntggatgattcttataaaatgcgtgccaaggtcttgcttttatagactnttcatgtttggtcaaaaaaccattggaagagttatgacttttgagaaaatcatgttaagagttataactcttaactttttcttcaaaactattcactggtaatcaattaccacaatggtgtaatcgattacataatgtattttatgaaaagttgtgacttcacaattggatttgaattccaacatttagattcacttgtaatcgattactaatatagtgtaatcgattatactatntgaaaantaatttggaacgttacanatcatttgaaaaccattttaaaaccaatctg

SEQ ID NO: 182229 - DNA, 406 bp, Glycine max
agctttcctacccctaacagacttcccacaattctttttagtttcacctccctgctgattctcaatcatttccctctgattctctcctcagaatttgccagctgtccttgtgtaacaaatttctcttttggttcattccttcttatggtcatttctccattttccctatcctttctgttatgcccattctttcccagtccatgtctctttctcctacatacttgggccaaaggtgtatcagttgatcaaatgtatttagtaaaatgtaggttccgttgcccatgagactttccgtggaagattgtgtaaggttaacttgaggaggtttaaccatatatgtgattttatattcttcatttcctttagatgcatggatttaattgattatatatctatttcatgcatt

SEQ ID NO: 182230 - DNA, 426 bp, Glycine max
  unsure (1)..(426): unsure at all n locations
ngcagtagtccataaccacatgtcactgcacttacaacaatgcatttcaaatctttacaaccttggtattgatgtcaacttcacattcataattgattcactagcttcttttcagttgtgtcaaacaacccatggacaaatgttgcaaataagaaactaaataacatgccttctgcaaactacaacccatgtggcacttattatcttctgaaagctataacctttataacaagtgacaacatgccttttctccacaaaatggtacggcaattgcaacgtattgtggctctgaagttgttatttatttataaggaaaaaaggagactggattaacagaagacaaatattgatttggagaaaatgtgatctatntcacaaaggatagttaatgcanagcaatttaacgatgctagctaaaatatgtag

SEQ ID NO: 182231 - DNA, 405 bp, Glycine max
  unsure (1)..(405): unsure at all n locations
agcttcaggctgctcaattgctccaggttgttttatggaatgtcaaaggtctgtatggtggtcagcagaggagcacaaaccacaaacccttgcgacaggtacaaatttctgattcaaggccagctgggttaccaagttaaccaatgcatccagtttgccttcaagcttcttagtttcagatgatgcagatgggtttgtagctacctcatgcactcctctaatgactatggcatcatttctggcgctaaactactgggagttggaagccatcttctcaattaaatttctggcttcagtaggagtcatgtctccaagggctccaccactggcagcatctatcatacttctctccatattactgagtccttcataaaaatattggagaagaagttgntctgaaatctg

SEQ ID NO: 182232 - DNA, 447 bp, Glycine max
  unsure (1)..(447): unsure at all n locations
actaagcttttatccaggcactctctnggtggtgaagcttctccttccatggcttattctctagtggatggtgcctcttctcacctcttctcttttatcttccgctgcaactccatggctgaaaatcaccattgaaggactttattgaagctcaaagatctagcctccataaaagcttctcaagcaagtttccatcatctctgagcctaacatgactagatttatttntgaaccctaagcctccatagaagcttctcaagcaagtctccatggctgaaatgattgctttgcacaccttgtcttatgttgtaggagagcattgtcctacaaaagaatgttggttcaaatttggggaagtgcttaaaaatatttatgtgtaaggattgtaacaacatcacacagtcaatgtaaattgcaaaatgtggcacattgccattgttgtgtcat

SEQ ID NO: 182233 - DNA, 405 bp, Glycine max
agcttatgctgaattgttgacaaaactcattactgttattcaacacatacaagtgagcttgtaacaaatcttctacacttggagtgataacatgcagtccttttgaacccttaccgcccactctgtcgtcatggcgagactcaggaaggccaataggtttagccttttcaatgtactctgaataaaattcaatggcttcttctgcaatgtacctttcaacaatagatgcttccagacgatgtagattcttggtatacccttttaagatcttcatgtattgctcaaccaggtacatctaacgcaaataaataggaccacaacatttaatttctctgacctgatgaacaattaagtgaatcatggtgtcaaagaaagtaggaggaaaatacatctccagttgacaca

SEQ ID NO: 182234 - DNA, 439 bp, Glycine max
  unsure (1)..(439): unsure at all n locations
cttgatggtgtcgagaagaaatcacatgtttgtcatcatctaaaagggggagaatgtgaatgtatgtatacatgattntgatgatgtcaaagaagaatctaacaaggctgcttcaaatgataagcatttgcttcaagaataattcaagattgcttcaacaaacaaagccttgtttcaagattcactaaagaccaagccttgccttaaaacaaagtgctttcaagacatgcaaggctctggtaatcgattaccaggaagtgtaatcgattacccgaagacagggttgagaaatagctgttgaaaaatgttttgaatttgaattttcaacatgtaatcgattaccatatgtctgtaatcgattaccagcaacgaaactttggaaattcaaattcaaaagtcataacccttcaaattataactgtgtaatcgattacacaaa

SEQ ID NO: 182235 - DNA, 397 bp, Glycine max
  unsure (1)..(397): unsure at all n locations
agcttaatttatattttagttaaaattcacttttcttaaataaatttcttaattatttatctatccaaaaatatatttattttttaaaagacgttaaattataagaaaaaaataacttctctcattttttttttttatatacaacacttccctcagtgagaccatcgcgggctgggcgtgggtaagaggacactgtcacgaagcactggcaaggcaaacaacgttacagtgggtccaacttatacgtgtaatgtcatgtttaacgntaaacgtgggaactatttttgaacatatattattattattcataaattacattataatatatttaattaaattagtaacaaaagttgttatttatttattttagaaggcaactttacttcatgatactaat

SEQ ID NO: 182236 - DNA, 323 bp, Glycine max
  unsure (1)..(323): unsure at all n locations
gaagatcatatcaaaataccatcattattgttaagaaaaatgagtttaacagtgtttaaacaacataacaattaacaatttataattcctatgtgtaatcttaggttatttgcaaattttgctaagtgctaacaaggtcagaacagggcanaaatagtaacaaaagttaagcccgtgacaacagcaccaaaccaaaatgtatcatactatcatttaaatatttaatggagaagagaatatgtgttctcttctctctgcctttattctctctatccatgacaacagctgattaacaattctgatgatgcaatttgcattaaaat

SEQ ID NO: 182237 - DNA, 373 bp, Glycine max
  unsure (1)..(373): unsure at all n locations
agctagatttctatcctatttttccactgnatantcctcnncctannaggcttatctgatttccgtgcaattcctccttttcgcactggcaacatagaattggaatcactctcatcttctctattgctatgatcttcaacctttctgccctctaaagaagccactgtcagagtcacagtcacagccataggcttgctaatgcagccattaatatccttggatgactatttagtatccatcaataataacaacactctttatgctctctctctctctctctggaacgatttccgtggcagaccgaagtagaaaaaacgaaaattcagggaaattaatgaacttggaagaaacccatnttacccattgacctgaa

SEQ ID NO: 182238 - DNA, 346 bp, Glycine max
  unsure (1)..(346): unsure at all n locations
atatcaaactttggatatccctattgtccttcaagtagctaggtacagtggatttcaaacatcacagacttattctagaatgtgactctagagttgctgatctaattggttgttggaacctgaatattcggccatcatccttactagactatgatttccatcatcaaatattagctcaatcnttaatttnttggtgcactcagatccttgctcaattgcgatgggttgtaatattttcatgtgtaagggaacaaatgttgtactgattgcttgtaactgagcctgcttaaaattgggttgttgattgtttaaccccaagggagtctactctcttgatgagtgttga

SEQ ID NO: 182239 - DNA, 421 bp, Glycine max
  unsure (1)..(421): unsure at all n locations
agcttcaagaaaaagatggcctcagcaaatttcttatttccagaagggaattctatcaatagacctccaatctttaatggagagggttaccactactggaaaacccgaatgcaaatttttattgaggcaatagatctaaatatctgggaagccatagaaatagggccttatatacccaccacagtagaaagagtttcaatagatggtagttcatcaagtgaaagcataactatagaaaaacctagagatagatggtctgaagaggatagaaaacgagtacaatacaacttaaaagccaaaaacataataacatctgccctgngaatggatgaatatttcagggtttcaaattgtaagagtgctaagaaaatgtgggacactcttcgattaacacatgaaggaactgcagatgttaaaagat

SEQ ID NO: 182240 - DNA, 430 bp, Glycine max
  unsure (1)..(430): unsure at all n locations
ttacgaacgttcactngcacaagacatcctatcaactaagaaaaatgcacccatatacaatcaaggtagcttcattacctagattatttacatgtacttccaaggtgtatttgttatttacatcacacacgcctccttggctgaatttacatacatgcatactcaaagcantttgnggtaccaaaaactgcacatgcgctcatcttggtatttctaatacccctacatatacaaacttcacgatgaatcttgactacctacacaataaggtgctacatttcatgctnttttttttcaagtttttgctacctaaagccacatgcaaattcaagcatattttcctttgctgaactaaaatgtattcaaattagaaggcatatanttttttgtaatatgttttcttcacataacatgcaacatatntatatat

SEQ ID NO: 182241 - DNA, 420 bp, Glycine max
catgcaagcttatgtatgtgtatatataagcccaacttattcaacagtgtcattttttagatgcagagccacaaattcgaagctttaagggataaggttttatctactaggtccacgcttggttaccaaccgatttatctggttcgtcacatatgaaccattggtttaccaacggatagaaaaggctccaaagatatatttaataattcccatatatttattcttgaatcttccacttataattaatggcaaaattgtgaatctacctcaatcattttttttatcgttttgtcaattttggcattcgatttttgaatgctacacgcatttataaatcttagacagtacaataatacttgcataaaaaaataaaaatatacaataagttagaattatgtcaaattaatcatatcataatga

SEQ ID NO: 182242 - DNA, 404 bp, Glycine max
  unsure (1)..(404): unsure at all n locations
gtaaagcaatcttagcagacttcaaaccttcctgaataataaggtttaaaatgtgagcacaacaacatcggacatgaaaatatttcccaccacataacaaaccattattgctatttaaaagtctatctttcaacagccttgagtgtgtttcatttgaggatgcattatccaaagttaaggaaaaaaantttgctcaatctcccaatcttccaaaaattcatatatggccttagccatttcagccccaaagtgtggaggagggagatgacaaatataagaaatttgctttgaagcttcaattttcatcaacataatgtgcagntaaataaatataaccctctgtggcaaaagaagtcacaaatcanatgtcnaggatattctactanggactttggacaacacac

SEQ ID NO: 182243 - DNA, 418 bp, Glycine max
  unsure (1)..(418): unsure at all n locations
agctttgaaaaaagatttctatacaaaagttagtcgtataaagttactaatatgtttgcaccttctaagcccaaagatgataagggaaagaatagaaaaagaaaaaagagcaacctttaatggttaaggaggagtgtaatgaggtaagtgtctcctccaagaggttagctaagaaggaaagtcattttgcaataaagacaaacattaaagaaacttcccgtcttagacaacctccacatcttcttctttgtaaaagaacacttgttagcactgctatacctcttgagcttgtggttattccttaagtaaaggagttgttgggtgagggtttagttcataagagcttaaatccttgtgcnttgttggtacccaaaataggtattatgaggcacccaatccctatgataggtgatatgat

SEQ ID NO: 182244 - DNA, 465 bp, Glycine max
  unsure (1)..(465): unsure at all n locations
gtgcttcgatgggggtatattgccctatccatgcacctttctaataaattctgggccaaatctggctntggttaagagaccaagttgtttggtgttcataagtgccatttgataaccttaattaacagtgaaaatgtaagactagaaaatgagaggaggtaaatactaattatatgtagatgcatttgtaacttatttttgtctacatgcatattgaagcatctgattaggagttcgattctcgagtttgtgtatgaaaaaacatatttgagaaatcaggcccttgtttggatccccatacctcaagaaatttgtctctaattcttggccaggagatacactaggcagtaggcacccaaccagtgtatgaatatcacttttcaattcattctcttgatggattgtactagaacagccaatgaccaacaaagccaaacttgtcaaatgaaacaccataccttacat

SEQ ID NO: 182245 - DNA, 417 bp, Glycine max
  unsure (1)..(417): unsure at all n locations
agctttaatgctgctccagaagaatggtttatgaaagaagaattcttctatttctgttgntgctacactgtttggagatggggaagatgttgcatggcttgagaaaaatcaattggttgactgggcagaagaaaatttggatgcaagattaggaaatgaaacctttgatgattctcagcagagagcaattgcaatgggtttgaataaaaagagacctgtattggttatccaaggccctcctggtacaggcaagactggtttgctcaagcaacttatagtatgtgctgttcagcaaggtgaaagggttcttgttacagcacctactaatgcagctgttgataacatggttgaaaagctttcaaatgttggattaaatattgtgcgggttggaaatccagctcgtatatcaaaaacagt

SEQ ID NO: 182246 - DNA, 455 bp, Glycine max
  unsure (1)..(455): unsure at all n locations
ctcaccctctctttcatcctncaatctctgtctcaattccactgtctaaagagccatatggacaaacctgcttcgcattcccactctccggtttgaaccacaaccctcttcttcggaactggaggatgccgagaagctcaatacaaagatctttgctcaccagagcctcacggataactntgtcggtctctacgactcgcaatctctccaagatgcccaaatgcgtgtccttcgccttcttgctaatgctagagcgaatggtgtcacgcaaactcagcttgccaaacagttgcacattgatcccaataacttccattatgtgttgaggagtcttgagtgtcaaggcttgattgtcaagcgctcggcaattgagaaaaagaaacanatctccagtcatggtgaaatccaaaaatatccgtgtgtagctacccatttaatatacttgcatcgctatg

SEQ ID NO: 182247 - DNA, 432 bp, Glycine max
ctgcacgcatgcaagcttcgtcttcagatccctgtggtgggactttgctcaatttatacagccctcttatgtttagactaacttaaactaagcttcgtccttagatccctcttgttggactagacttagcttaaatagcttacgaaagtttagactaatttagcctaagctttgtccttagatccctcttgtcggactagacatagaccaaacaacattattgttacaacatatttaaaaccaaaacttaatccgcaatccctcatttaagactaagtttcaattctgcttcattcaacttctaaggaaacaatacatttcccaatgctaaagtcacctaactaggcacacaaacggatgatcagaccaaaaacatacaaaatttaagcactgagaaaagcattgaacacaagatacacaatctattagata

SEQ ID NO: 182248 - DNA, 422 bp, Glycine max
gcttataagcacgggtctgggagacataggtcaagtggtcgcaatatgcgaagatgatgttccgagtacattggatttggtacgaccatgccctcctgatttctagctgggaaattggcgagtggaggaacgccccggcatttacgcaacgagcataatgtaaacctttacggatttaaaagctctataattgggcctatgctctagagcttttccttttgttaaggctttgtgtcttttgtttttgaatttataatacaaggatctttcttcatctgttcctacgtctctacccattctcattattttgcatgttcacttctttttctgaaacggcagatccgatgacgagtcccccgaatgtactaatacctgggacccgcctatcgacgtctagcaagaaatgaatcacacggaagatg

SEQ ID NO: 182249 - DNA, 409 bp, Glycine max
agctttcatcaattagtctattataaaacactacttctgaccctacaatgttggagttggatcaatcttgttactgaaattcaaaagaattatactttacatatgtgaggagatggaaaatgaaaaagaaaagataaaatgaaactttaataacaccaagaaaaggtataatttctaaactttctcaaatttaaaatttgcttgtgtattatattaagttttaagcttttgatctagataatttaattttcgtggaacctaatgatgatgcacaatctaaggaagaccttgatgatgatgatggagatggagatggtgatgaaagtgatgatattcatggagatgatccaattagaggattggacatgcttctttgataacattcgtgctttctttaattatttaaatg

SEQ ID NO: 182250 - DNA, 410 bp, Glycine max
agctttgaagggaagagagagaccgatcactatcacatagcatggttttaaaagaagagttagccgtttgctcaaggtccaaaagaaacttgtcacagtgtttatgcgagacagagaccaacatgttagctatcatcaccaagtaccaagaagaactaagtctagccaatgcccacgagcatagggtggcggacgagtatgcccaagtgtacgcggaaaaggaggctagaggaagggtgatcgactcgttacaccaagaggcaaccatgtggatggaccgattttctcttaccttgaatgggagtcaagaacttccccgattgctagccaaggccaaagcaatggcggacacctacttcgcccccgaggagatccacggactcctcgactattgtcagaatatgatagat

SEQ ID NO: 182251 - DNA, 387 bp, Glycine max
  unsure (1)..(387): unsure at all n locations
agtcctaaatgacatagcatgctatgatcaactcagtgcaacctccatagaccacagaaggcagatcttaccttacaactatgaaagcctcactctatgtccactcatgacaccacattctccctttgtaacgctatgttaatgccacccttgatctctaacagtgttccatgagcgatttcagcacataaacatcacaagcatcatcataaaaaccctaaaactgaatgggtaagcttaactcatccaaacatggcgagttcaacatgctntcaacaagttccttcacaaataatcatcatgaagcagaaaactagcgaaactacccatcatatcttccaaaaccccatactcacgaaaatcaagagaggaagaagtctagcccaa

SEQ ID NO: 182252 - DNA, 395 bp, Glycine max
  unsure (1)..(395): unsure at all n locations
agctagagactttgccactatgtaagnngattantcttgaaagcatcaaccttacgcaaggttaatgtcttgtgagtattcctcaaatattaggaacgatggataacacaacgcatctttctttggagctcactgccataagtaaattaccaaatgcaattacgagaacttgtccgactgtacagtttacaactgcccaactggggaatggttcagttaccgagtagcattgtcactttgccagaacctgatgtgttgagtatttgccaatgtgaagggttgcgttttcaatacatgacgagtacgtgaataatgatagcttactgatgccctctcatattcgacaccatacatttatggtcctgcgctaatctgaaaatccattgttctagact

SEQ ID NO: 182253 - DNA, 406 bp, Glycine max
  unsure (1)..(406): unsure at all n locations
agctctgagcacaaacaaatgatgaaattcttttctcaactttattatcccacacncaaaggcgggatgccaaccatatacaacttgaacaaaatgcaaaaaatatcatcatttgtattaactgttgtgggcacataacttttaaaatacaattatatgaatcacttcgttcaatctgttagactatgctatacactatttgtggtccctgctataataaacaacttgaaatgtattttacacatacaacttgttcttataaatagaaccagaagtaacatattactttgttgaattacgggaacttgatgaatttgaaaaaccaaatcaaaccaactaaatgattttttgttggattgaaatattggattaaattgattctaactcaccttgaagaaaaaccacc

SEQ ID NO: 182254 - DNA, 402 bp, Glycine max
  unsure (1)..(402): unsure at all n locations
ggccgcaacaatcatgccgggtcactgtgcctcactcttgttccaccgtgacaacgcttncctctattgcctggccagtattcaactttaatcagctttgctttaatgggtggcagctaggggtaggtgagcaatagtattgatgttattaaatcaattgctcatgttcttagggagagattgttcgactttcgataacctaatctctagctctgggtggaaaaatgtgatcgggtgatagattccatttggcttgacttgatcacctactcgaacaagaagattaatttgtaatccgccggatgacaatgataagacactagaaattagaatcatctatttgaatttaggggatgatgaacacatgtctatactacttgcagaataggaaagagaagaaaa

SEQ ID NO: 182255 - DNA, 385 bp, Glycine max
agctttgatgtgtggaagtttgtcactttattatagtaatgaaaatccgtagtatttgtatgataccttccttcaggaaaagttgtttactcatttcttatacaaaattttgaatgcaggaaataaagtgaaataaggtgacattattataattatcgtgaaaaataaaatctgttttgttttgaaccaaacaggtgcttatagtccaaactgtctcttagtctaaagatgattagcataagatcgcttatttgtttgtgttatgcctgggtacttattaggcaacatttgtcctgtgatgacttttaattacttacatcattgattttattctttttataatgtgatgttgcagtttcgtaatgaactgaagcatataaagtgg

SEQ ID NO: 182256 - DNA, 399 bp, Glycine max
  unsure (1)..(399): unsure at all n locations
tcttgcgtagccgctctnggtgctcatataatcccaaattctaatccctcttattactagctattgtgaattctctagttcctgaatgtacaactttcaaattgttgttcgttcccctctttgttttatgcaaaaaatgaaatcaatatcaaacaaaacatgcatacaattgtcatcgttattgctacttgaaccataaggaataccatctaaagaagtacttcaaaacgtttatttattntttttggtattttttgaattacaatttgacttcaatatctaattttttaatgtacttaggtggaggatgttgacgaagagaacgagaangaagaaagtaatttaaagaagattaaggaagtgtcacatatttttttcctcancaaagaagtgtcacat

SEQ ID NO: 182257 - DNA, 401 bp, Glycine max
  unsure (1)..(401): unsure at all n locations
agcttcatataattnaaatattatctatattttaagggcacatcctatcagagcgttgtgttccagtgtcctcaagcatgaggttcttcatagtcatccacctattcatatgctcccccgaacacaaagtttaagatcatcacaggatccaaacacaagcagcaaaccaggagtgggctatcacattcctaactactaaagagaaacaagacaacatatagtagccaaatacaatttacttagcatatctcacattatttcatcactttgtcattcaaaattcacttttcaatcatcaatcacaatacacaagaatcacgcactccgatcaagacataataacacatcaatttcataataaacaattagcaagcgtatgcaacagttatgctaagactcaa

SEQ ID NO: 182258 - DNA, 371 bp, Glycine max
  unsure (1)..(371): unsure at all n locations
tgtctctcattatatatatatatatatatacatacatattctcacacangtgctgtcatgtacctgtgagaagttaacaataactgggagtatatatgcaacacaatcttgcggcttcaacagcttgccaagagcagcacaaccctccatagccaacaatctgatgtaatcttgatctgttccaagattacaattgcatattaaaagagtaaagtacattcacgagactctacaacatgctcacacatgttaatatttaacagacaaatgacanacactttccatctacaaagaacaagaaatatgtattcaattaccatcttgagtaagatcataaaacattgacatgacatgagtcttaaatgagaata

SEQ ID NO: 182259 - DNA, 396 bp, Glycine max
agcttgttatgaaaacctttgtatgcatttttatgctcagaacattctaatgcagatgcaatattttatacagtaaataacataatgtaaaagaggaaggaaaaagaagattcagcatagagattgttactatttcacccaacctcgggctacatctagtctttacctaaactaatgagatttccattaacacaactagcaacatgttggacaaaccaactgttggattcttacaatttccatccacttgctggacttccaaactggattttcaccttgtcaaccaactattggacttttagtgtctcctcaccacactaggtcttggattagtgatcacccactcaaccacaacacccactttgtcatgggagaggcaatacaagtatttattta

SEQ ID NO: 182260 - DNA, 454 bp, Glycine max
  unsure (1)..(454): unsure at all n locations
tgtaagaaaataaaaaagaatccaaagaagcagaatgttttaaataccttggcagctctggttgtagctctagaccaacgggaaatggcaggtttcatgttcctcaatcttgaagaaagatataaagttgtacttgagttcagaaaaatctaagagcttctacctatgtattaaaataaaaagataaaattaaaactcatggagagtttagtaaagacagacagaggttcanattcaaaatctttttgagctntgtaatcttttgataaaccattgtcaacctgcaatcacaaagaaatggtaaatcatttgcttacagcttcaaatntaaaagaataaacttggagaagaataaaaaagaattcaaagaagcagaatgcgagaaataccttggcagttctggttgtagctctataccaacaggaaatggcatctctcatgtttctcaatgctg

SEQ ID NO: 182261 - DNA, 419 bp, Glycine max
agcttttctcttgtggagaatctttcaccacttatgccaatagaccacaatctttgaaaaaagcaatgtcatataatctcaatgtgtagtctctgtggaggtcattatgaaaccactcagcatttgtttcttgattgtggctatgcaaagctttgggactggcttggagatgtacttaactctcccataggcaaatcttccttctctaatgttatgaaaattttctctaagaattggtctcaataaatgcatgatctcatagcagctatcatcaacatcttataggtcatatgacattgcaggaacaagatcaaatttgagaatttatcgattccgcttatgtcttccatcagcttagtgacaaccaatgtttgcttgttggccaatgcttctaaatgtaaaatttcttctttgatgac

SEQ ID NO: 182262 - DNA, 419 bp, Glycine max
  unsure (1)..(419): unsure at all n locations
ctcacattattatagaagcatatgttcatttataacaaataagtcataagtcatcaaaacataaatcatttgtctaagtcacttgcatctagaagtcctaattctcttctaatggtgtagaaagaatctttggttagtggttttgtgaagatgtctgcaagttggtttttagtatctacgaattttaaaaatatagtcacctttttcctaaaaataagtgctaattgactaccaacacttaccaagatgaatttttattaacatagaaggttctatcatatcaaaataattttatttggaatacaatatatataatttgaaaagcaaaaaaaaaaatattttgatcaatcaatcaagtaattcanacatatcaaacaagaattatgcaaggatngaaagatatagatcacaggcattat

SEQ ID NO: 182263 - DNA, 417 bp, Glycine max
  unsure (1)..(417): unsure at all n locations
agcttcgttgcaagccaacggttggaggaattttctggatggtgtaagttgattngnggagtgcataatcatgaattggtcaagtcattagttggacatccatatgcgggacgattgactaaagctgaaaaaacacttattgctgatatgacgaagtccatggtgaagccaagaaacattctgctaactctgaaggaacacaatgccaatagctgtacgaccattaaacagatatacaatgcaagaagtgcattccattcttccataagaggaagcaatcttgaaatgcaacatctgatgaagcttcttgaacatgatcagtatattcattgacacagaataaaggatgaagacgtggttcgtgatatcttttggtgtcaccctgattcagtgaagttagtcaacgcatgtaatttg

SEQ ID NO: 182264 - DNA, 401 bp, Glycine max
cactaacctgttattaccttcttattgattgaatgttgatatatgttttgttactcatcagcctatatgtaagattgtcaaaacattgaattatgaaacactaaaatgttccagaattacatatagggccatgattagttacactcatgatggtcaaaattcttgtataaatataataggacaatacatgtatactagcttattgacaatcatctagaaaacaaaaacctttattttctggtgtatttagtttatataacttttgatgtgattttttttttatgttgctttgcttgcgggtatttcaagggatttctgtttcggatgctgaaattgggaggcattattactcttacatgcaaggaactctgtttatatgatactagtggtgcaccaatttg

SEQ ID NO: 182265 - DNA, 405 bp, Glycine max
agcttctcccccaattttctataaatagggggataagtgaagtgtaaaagggtttttccctttaggcacttctctctctttcgaatttgcttagaaaaattgtttccatgaagaagatccaagcagaggcgcttccgtaacgtttccatgagtgatttcgcgaaggttttcgactgttcttcggtgttcttcattcgttctacatcattcttcagtcctcaacaggtaagtacctcaaaccaagctttcaattcattctatgtacccgtagtggtccacacttggttttatgtatttttattctcgttttcatttactttttataccccctgttgacgtgcttaagccattttatttaagtcatttctcgcttaacctaataataaaataaattatcaccgatcg

SEQ ID NO: 182266 - DNA, 390 bp, Glycine max
cttacgaccatcaaaattgctcatgaacatacattattcacctacgagcgtcatgatatatcatgggcctcaatcgtacacccatgtcgaaagttatgggcgtatgaattggaccaaagctatcgtgtgcaccttcgagtgacactatatatataggtcctgaatacgacattctagtgaaaagctatgatcatttgaatttcatgagagcatacgttattcactctttagcatctcgatacatcatgggcctcactcatacaaccatgtcaaaagttatggcgcgttgaattggagcagagctttattattcaccttcgaacgtcttgatatgttatgtgctgaaactaacatccgagtgaaagattttaccagttaaatttctagaga

SEQ ID NO: 182267 - DNA, 419 bp, Glycine max
agcttcaacgttggatgtgcgataagaacagatacccttgagttctaatcgaaacccccaacataaaacataagctgatattcacagggattagaaccaaagttgaagacaacatctgaaattgattacagatcttgttttagctaacctgttggtgaccggagatcagtagcacactagtggcagctgcaaaagaaaaagacaagaacaataaaggctttcctctgttttgttagtggggaaccaaaatcaaagctttcttttatcttccctgacttacaaaaaactaaaacaatgaactttgttttttgtcatcagaacaacaaaggcgcagggcacaaggcccaaacggaaaagctccctcccacacgagtgggccgcagttaaaacccagcccataccaccttaggcccatcatt

SEQ ID NO: 182268 - DNA, 447 bp, Glycine max
  unsure (1)..(447): unsure at all n locations
tctctangaacagaagccttctgcttattatacgccttttgggtgcaaattattggcaaacactgttccattagagccatcaacccagtttctaaccctgagttaatgtcaataagcgatggtgtccatcttggtgatttcagcaagataatcaccggttttcactattccaatggatatgcttgtggaaaagtagaggttcaggataattcagntgtggggagtcaaagcctaatcctcccaggttctgttgtagaaaagaatgtcattctaggtgcactctcagttgctccaatgaattctatcctccatgagggtagcgtgtatatcggatctcacacccgagttcaaccagatactcttcgtttatttatataaatgataacgagatggcatggattcaaaaagtattgcaacatggctgcaattagccgcactctattatgt

SEQ ID NO: 182269 - DNA, 435 bp, Glycine max
  unsure (1)..(435): unsure at all n locations
tatctgcacgcatgcaagctntactatgcagagaatatccaaggaaattaccttcatctttcttagcatttatttttcctaagttatcttttccattattcaatacaaaacatttacaaccaaagatatgaagatgtgagatgtttggttttttgccattgaacaattcatatggagttttctttaaaatgggtcttattaaagccctatttaaaatgtagcatgcagtgttaacggcttcagcccaaaagtattttggaagaggagtatcatttaataaagttctagcaatctcttccaaagatctatttttcctttcaacaacaccattttgttgaggggttcttggtgcataaaagttatgctcaatcccatgcttatcagaaaataattcatattctttattttcaactcacccccatgatcactcctaat

SEQ ID NO: 182270 - DNA, 413 bp, Glycine max
ctcagcttcagaggctggatatctccccattgcgatagacttgggaagccctatctaggtggtaccaaagaaagggggcatgacaatcattcagaatgaaaagaatgacctaatcccaacaaggactttcactgactggagaatatgcatcgattaccacaagctcaacgaagccacgaggaaagaccactttctttttcctttcatggaccaaatgttggataggcttgcgggacgggcttattactacttcttgtatggatactttggatataatcaaattacggtggaccccaaggatcaggagaagacgaccttcacatgtcctttggtgtctttgctttagaggtggcatgtttgccattttgcagatatggtggagaaaagtatcgaggtattcatagatgacttct

SEQ ID NO: 182271 - DNA, 410 bp, Glycine max
agcttagtggagaaaattattctcaagtactagggttgggcgctaagcgctcgaaactcgtggcttatcgcatgaaatattatgcgcttagcaagaagcaggcgcttagcgaaaagactaattttcaaaaataagttttaaacttagtcctttcctaagaaattgaaacccttaagtttaccattcaaagggaggctgataggctccaatattcagattatatagcaagttcccaatgatcaaatggacgaaaaaccaaaaataacacaaattgaaactgggttgcctcccagggagcgcttctttaatgtcattagcttgacgcttttaccttgctgggcgatcattacgtttggttctcaccttgagaacctcttgaccttctctcattacctgcaagcaaacattgt

SEQ ID NO: 182272 - DNA, 455 bp, Glycine max
  unsure (1)..(455): unsure at all n locations
tataagaacanaattgcctcaatcatttttcaatatgcatgtgaattangaagcatcaacaagaatcaagccaaggctattgtgcaagcaatcaatggggcaaaacacaccaaatgattatgatgatggatggctcaaattctcacaaaggtaaactcatcactttcaaattgagctttcaaaactatcatgacatgtagaggagaatcaaagatttcaagtcacaaaatgtcaaaaacttttattttcaaaacaattacccatttcttgaacatatcctataattcaaagaanaacatgcaaagtagtacatgcgcacggaattggcccaaaatattaaactaanaatccgacgaaactaacaacattaacaaattaacacaactgacaaattaacaaaaccaaccaaactagcagaaccaaagaacactcncccccatacttaaacaacacat

SEQ ID NO: 182273 - DNA, 403 bp, Glycine max
  unsure (1)..(403): unsure at all n locations
agcttggacctcctgttagttgttatcaatgtttagcttaatcacttgtgcttgagtgaaacagtagccgtgagactgtgctttgagctactttccttgatatttgtcttatgattaacttcatctaactgtatagttcacattatgttctcctatttgtctggctgcgtattctgtgaaaacaagtgattggtacacattgcttcatctttctcatcatgcaatcaataaattttgatgcatacacctttgtacataaacactgcatgctttaccacttgaggacaagtaagttgttctcttttgcttgaggacaagcaaaactgtaaatttgggggagttgttagtcagtgaaaacgactaactnttgtgtataaaacttgtgtatagtgtatcaaacttc

SEQ ID NO: 182274 - DNA, 439 bp, Glycine max
  unsure (1)..(439): unsure at all n locations
ctttacatgttatatgttatgctggtatatctcttaatagtgctcaagaatcacctgaccaattcccatcccantttgtgatatacagcatatcttgttttattctgttattaacttacaaattgggacattaattgtgtagtgattatttcttttgtggctcttattttttggaaattggaaccaagaaatgataagtgtttattttgacaagagcaacaattggacaaaaacacgaagtttccattattgcaggcaatgaacagggtcaaagaatcacaagttaataatattaatgtctcattgagacatttataaagttaggaaaaagaatgtcacaatcatgttgctacatatntgtgacctgtttaaatatgtgaacgtgtgtgtgcaaatntattcaactttgactgcanatactgtatgaacataatggtga

SEQ ID NO: 182275 - DNA, 403 bp, Glycine max
agcttgcttctacacttccttgttcaataatttccatcttaatatattttgggacttaatcaaacaattgagtcaaaagttatggtagtttgaattttccaggggcttccttgttgaattttcagtgtctcgatatattatgggcctcaattggacatctgagtcaaaagttgtggccgtttgaatttgcaatagggttcctagttcaattacaagtgtctcgatatattatgggcctcaattggacatccgagtcaaaacctgtggccgtttaaattggccataggcttccttgtccaattacgagcttctcgatatattatgagcctcaattggaaatccaaatcaaaacttgtgaccatttgaatttgtcaagggcttccatgttcaattacaagcgtgt

SEQ ID NO: 182276 - DNA, 398 bp, Glycine max
  unsure (1)..(398): unsure at all n locations
ntgatgcaacatctggagaggttaatgatacaacgagatgttgcgctccatgagagggtggatcaaatggagaatagagatcataatgaagaagaaaggaggagaagagggaatgatggtgttcctagacaaaaccgaattgatggtattaaactcaacattccttcatttaaaggaaagaatgatccggaggcctacttggagtgggagatgaaaatagagcatgttttctcatgccacaactatgaggaggaccaaaatgtgaagcttgccgccacggagttttccgactatgctcttgtgtggtggaacaagctacaaaaggagagagcaagaaatgaagagccaatggttgatacatggactgagatgaaaaagatcatgatgaagcggtatgt

SEQ ID NO: 182277 - DNA, 406 bp, Glycine max
  unsure (1)..(406): unsure at all n locations
agcttactggaacgagaggtgtgcgtgaacatatcatgcgcttaagggacatagtggctcaattgaaaaccttggaagttaccatgtctgaatccttcctggtacatttcattttgtgcaccctacctcaacagtatacacccttcaaaatctcctacaacacacataaggataaatggtctattaatgaattgatgaccatgtgtgttcaagaagaggagagattgataatggaagagggtgagaaggtaaatttgactacttctaattctggaaaggataggaagaagtctgtaggcaccaataaaggaaagattctgactcaaccaacaattaaaaaggagtcaaagtgtttcttctgtaaaaagaaaggacacatgaagaaggactgccccacatntaaaag

SEQ ID NO: 182278 - DNA, 436 bp, Glycine max
  unsure (1)..(436): unsure at all n locations
ntaggagaaaccattaanactaaagtagttcctaaacaataatcaattgatggagcctcgccaagtgtccccatcgaaattgaaaaacctttattcaaacctttcaaagttagtgagaaggctaaacggaaaattatggaacttagaaaaactaaatccttaactgaaggcgtaggtgacaatcatagtgaattactaaacaagattggtagtttacttaaggtcattccagatactccccaagcctcggaaaatacttctaaaatggtaacaagaagtacctccaaattaattaatgttattaatgaagatagtgaccaaaactcagataacacaactgagataggatcagtatcagagaagaatataaatccaattaattccaaaaactggaaaacacccttcaaattatattatcaacgtccaactggccctg

SEQ ID NO: 182279 - DNA, 413 bp, Glycine max
agcttcctcaacagttgcatacagtgcaacctgttcattcttcagtcatgaaaattgggggtgcaacatatatggtggggcccatgagtcaagcatatgcatggcccaagatgattcatccaaagaagtcaactacatggctaatcccaatcatcaagggttccatcaaggaggacctcctggatacaatcagggaggaaatttttctcaaggccaaggctggagatctcatcttgggaacaatgagagcatcatggtggaaggtaattgcagtgttgtgatccaaaggattctaccatagacgtttaaagacccagggagtataaccatcccatgttctactggggaggtgtcagtgggtaaagctcttcttgatttgtgggcaagcatcaatctgatgcccctatttatgt

SEQ ID NO: 182280 - DNA, 380 bp, Glycine max
  unsure (1)..(380): unsure at all n locations
taacatcaatctgcaggacacatggacatggagagttgtctctaatgggaatttatctactaaaattgcatatcaagttatcaaatctgagcaattntatgaaggccagcacctgngttttcagcaactttgggagattaaaattcctcctaaagccttaacttttgcttggagattgttatgggatagactccctactaaggacaatttaattaagagacaaatcctcattgacaatggcctttgtcccttctggcatagccaacctgaatccgcttctcatttgttcttctcatgtgctaaggttctgcctctctggtgggatttcttttcttgggtgaaggaagatanggtcattcattgtatgcccatcgataact

SEQ ID NO: 182281 - DNA, 396 bp, Glycine max
agcttctattatgtggcatggagggcttccttcactttcttgtctccaacgcgagctgtgaccactgttcttccttcccgcgatgcttcttttcatgtccgcctgagtgagcttatagcctaaaccatacttcccacgatttccttgggtatttatcaggctagttatgccgccgttgtttttgcctaaacccatcccgggttcataaccgttccccaacataacccgggccatcattaccgctgcatcggacagacaaggctgcccaaagagggagtccacggaggagatgctgaccacctcaaaagactggaaagcagtttctaacgattcttctgcggcttccacataaggcatggaggatgggcagcttaccaagatatcttcctcgcctga

SEQ ID NO: 182282 - DNA, 464 bp, Glycine max
  unsure (1)..(464): unsure at all n locations
tgcttctcaccacttcattgagaagatgtgtcaagattatgctcgccaccatatgaagccatggataagagcttgaaggtaggagaagatgagtggagggagagggagagaagaagcacagaantttgtgcctcatatgaggtctgaactttgaagtgtaattctcaaatgatcaaagttgaaaaaatgcacacacatggcctctatttatagcctaagtgtcacacaaaattggagggaaatttgaatttcaaatntcactcgaatttgtggagccaaattttggagccaaaatttcactaattatgattagtcanatttatctatggttcagcccactaatccaagatcaactccaagattcttcactttgtgtgcttaggtgtcatgagccatgtaaagcatgaaggacatgcacacagtgtgactatatgatgtgtgtatgggggtgagcaagcaaatgc

SEQ ID NO: 182283 - DNA, 393 bp, Glycine max
agctattcctctcttcccacgttgcttttcttcttccttcttctccaccattgttgtccattaaagcttcaaaattcctcctcatttctactccaaattgcaaagagaagccattttcggagtcttggagcacacctctacattgtggggcttcaaatttcaggtatgggtggacttcttctcacatgaaattcgtgggtgttgggtttttgggagatatgatgggtagttctactagattattgccttaggatagtcatttgtgaaggaatttgttgaaatcatgttaaacttgacatgtttgatgtgagtaaaattacccatgctgatttagggttatatgatgatgttttgtgatatttgtatgctgaaattgttgatagaaaactggta

SEQ ID NO: 182284 - DNA, 395 bp, Glycine max
tgcaccaacattcattagtccaatacacactcaacatattgtcatcatccatccataattccaatcattcatgctcaatatgatgcatgcacctgacctcaactctcatatgcaatgtggtatcatccccaaggaaatagcctaagcgtgtccacacgacactctcacttaagaaaactaggcagtaagtgtcgaggtcaccatgtcatgcacaggcaactccccccccccccccggtgatcagcctgagtcttaagggagttccaaaccgagtggcatgcccccaggtacaagtattcctcctcacgagagactacaagtacttatagacaaagtttatactatttccatgtcatatgaagtatgaaacatggacaccatcaaatgcactgacc

SEQ ID NO: 182285 - DNA, 415 bp, Glycine max
agcttgtgcgaatcaaatcactcctgcattttatctctaccatgcattctttctttctttacccactcctcacgtttggttttttagggaaaaacaccataactaaacgcgccacaaggcatccctatcgcaccagatccaaatctagaacgatgggtgattaagaggagacacaggaacagatgaaagccgacatgttggctctgaaagaacaaatggcctccatgatggaggccatgttcggtatgaggcagctcatggaaaagaacgtggccaccgctgccgctgtcagttcggctgccgaagcagacccaactctcttggcaactgcgcaccatcctcccttaaacatagtaggacggggaagggacacactggggcacgatggcagccctcacctgtgatacaaccgagc

SEQ ID NO: 182286 - DNA, 476 bp, Glycine max
  unsure (1)..(476): unsure at all n locations
ngcatgattntacatctcccctttctcaagaaaattcttcttgatatcatcaaaatcttcatgatttacatttacagtcattttccatggtgagccagtaataccctaccctcagaatcttccaggccatggcatgtccattggcatgtgtcccaaaggccccctcatgcacctccatgagtatctgctcggcctctttggcgtccatgcatcggagcaagaccatatcatgatttcgcttttacaggatatccctgcttaaaaagaagccagctgctaatcttagaaatatcctcttgtcgttgtcgaaagcctcaaataggtactccctgtcctcgatgtatcacttaatgtcaaagtaccacagtttaccgtcttgctcctcttatatcaagcagcaatgtgcgggctntccgcaacatttgaactcaatgtacgacaagtctccatgcgaggtcagttgaaacatgaatgct

SEQ ID NO: 182287 - DNA, 418 bp, Glycine max
agcttactccaaatcgtccaaatgttggtttatattggctaacatgactaccacatcatcaatatatactttcatattcttcccaatggtatcatgaaatatgagattcatggccctttgataagttgcaccaacaatttttaatccaaatggcattaccaaccattcatatatcccaagagatccaggataatgccatcttgtacatgtcctcaacaaccataaaaatttggtcataaccagaatgcccatccatgaaggtaaggacaccatgcttagctgttgcatcaactaacatatcgactatgggcatgacatactcatccttaagcgtcactagatttaaatccctaaaatcaatacatacatatacttgccaattcttctttatgattagcacaatacttgacaaccatgc

SEQ ID NO: 182288 - DNA, 468 bp, Glycine max
  unsure (1)..(468): unsure at all n locations
cgctctattgtgcgccctctctgaggaagaatatttttatgtccacagctacaaaagtgcaaaacaaatgtgggacacattagctntaacgtatgaaggatcatcataggtaaaacgcaacaagcttagcttgttgacacgtaagtgtgaactcttcactatggaagatggtgaagatatacaaagccatgtttggacgcttccaaactattttaaatgcattatgttatcttaacaaagcttttgataactatgataatattgacaaaatttaaagaagcttgtccagaaagtggagaccgcaagtaacaacttataggattatgaagaacctgaaatctgtgtccattgcaaagctgattgggaccttcaaggttcatgagcagaanattcaacaagtggaaggattcataagggaaaatacttggctctaacaacacanaanaaaaacatattcaacttgcaaag

SEQ ID NO: 182289 - DNA, 417 bp, Glycine max
  unsure (1)..(417): unsure at all n locations
agctntagcctttaggttgttcaccatgttgttcatgttgatcactctatctctatcaacattggcaaggttcatggccaagtcagccgaaagagccttgtctttttcaaaattctaaaataagacaaaaggtttaactggatgaaggaatgtgaaactgcttttcaaaatttaaaaaacattatccacttcaccaatattgacaaagctggatctaagagaaacattgtacctatacttggtcatagctgaagaagcaattagtttagcactagttaaagatgacaataaggttcaaaagttgatatactgaattgcctcaattaggcgggaaggatggtaacttgggcgattgaattgtcagaatatggtttgcaatatcagctaagacacacgctcaaggcccaatgtctggtc

SEQ ID NO: 182290 - DNA, 482 bp, Glycine max
  unsure (1)..(482): unsure at all n locations
cgtgaaatanaagtgtcaatatgtgtacgtgtatatagttctacataaaatatcttagataataaatagaaaaagaaatcaacaagattaaaaggtcaatatatcaagtataaaaaaaatcattgccacacaataaagaatctcaatttctaggacacacactcaatacatgaacatatcaatttcacaaaaaaaatcgtatcggaacacctattggtctatcaaacacagtcaatttgcgataaaagcataaaaacataattgaatntcataaaacaacccaaaataacccaaaaattgatcctctaggaattcctacacatgttgattctaatcctcaagcatgagtaactcatcccttacctcgaggtagtttctcaagtgttcttcgttagcaatgatgagcattctggtgctctctagagctcctcctctaaattctctgttanggttcttaagagtcaaagaanaaggaacataaa

SEQ ID NO: 182291 - DNA, 412 bp, Glycine max
agcttcttcgtcttctctgcgacaccgcaagtcaagcttcttcttcttctccgcgacaccacgagccaagcttcttcttcttctccgcgacaccgcgagccaagcttgttcttcttctccgcgaagagccttcgaggttagtctccctaactctccattgcttttaatatccagtattgattcagcagtggaaccttaggatagtaaccttagggtagtggaaccttagggtaaaagatgagagtagaagacgccggaaaaaatgcggaaagggggcttccggaactttcgaaagatgttccgaaaacatctcggaagaagtgtccttccggaagcaaccaaatgtcttccggaagaactacttcttctggaagtctcccggaacacctcttccggaaactttccggaagaa

SEQ ID NO: 182292 - DNA, 467 bp, Glycine max
tctagattagtgtaccagatgaatgctgccccggccaatctatcttgaaagatatgcatcaataacttctcgtccctggaatatgcacccatcttacgacagtacatttttaggtgattcttatgacaagtcgtccctttgtacctatcgaagtcaagtacctttaacttcgaagggatgacgatgtctggcaccaggcataggtcggtcatgtctataaacggataatcgccgaacccttcaacaaccctcaatctctctttgatgagatcgagtttcccctttcctttcgctgccgggggtggccctcccacggatagaaacattggctgtgttgggtggctttgaggttctcccgtgatgttgggttaaagtagtgcgttgggcgctggcctctcaacgtgaaatggggagtaggagtctacgtctccttgagcatgctctcgaggattctcgtggaccctgtc

SEQ ID NO: 182293 - DNA, 419 bp, Glycine max
  unsure (1)..(419): unsure at all n locations
agctntattttattgtattttatttatttaattgaggccaaagccactacataactatgaacctaggagttgcaactcctataaagtcttcccaaagaagggatacacaccccacactgggactatgcagaatcaaaggtgattcatgaccatgatgagcccagttagccaaccaatccgcaacacgattgccctttttatgggcatgagaaattttatggaaagctcttcacaataagtntccaaccgatgacaacttgtggaaaaggggcattcattttgtttctgtttgcaccaactttggtcatgattctgaaactgttgatcacttctttttataccgtccttttacccgccaaaattgaaattggaacttctctatgctcaactgtngttctgatctttcctccatccataat

SEQ ID NO: 182294 - DNA, 438 bp, Glycine max
  unsure (1)..(438): unsure at all n locations
tcgattctatctcgtcaatatttgttagttcgctaacattccattatgaacaggctagagttattaagtatcaagaataaattaaaggatcaaacgtttagcaaaatatgccaagtcctgcctacataattgatccgccaaaaataaggtggggttacctatattgacaaagtgggtcgaaactnctaattcactccctttagtggcagattagtatcaactcattaaaaataaaagaaaaattaaaactcatacatataaacatattatctaaaatatttctaataaaattcatacacaccatagaggaaatcactaaaatcttcatcattggcatgtaaaagtgtattatcaacttattatgacaaccaaacgcatatatattaantgttctattaataaatactaccccatttcatgttagacccataatattga

SEQ ID NO: 182295 - DNA, 409 bp, Glycine max
agcttgtccattggcaaagttacagaaggcctttttaaaaaattgatctattcagtcaattattcttcaccatcatttttaattatctaagtttcattgtttgattttaacattagcaattagtcagtcaagttcaagaggacttatttacatgtgttaaggaatatgtatcttttttctcccagaaaaaaaataagtcccttgatgcatttcataagttaatggaaaataaaaggtgtagaagaaatgcatttaaaggtgataagccatagcaagtgtttgcagtttaccgcttgaactcaggtgactgcttatatttgtcaaactcttgcaaccattcttcatccgagaaaggagggagagtaccggtgaatttccaatcagtcattgaaagaccagatcgggtgag

SEQ ID NO: 182296 - DNA, 472 bp, Glycine max
  unsure (1)..(472): unsure at all n locations
ntactatatcgggatattagcttcctatctgatattagtgcagnncttctttagaccagtccttactgaacatgcagggaaacgagtagggatgtgtgtgctttaatgcttgcagagtattattggctgaggcacttataatttgccagttagcgtattctgtacatataagaaaccttagccacagaatattcaaattaaacattttaacactttgtttaggtaggaattgatgtaaccttntacaattaaatgtaaagcttttgtgttccttgaactcgctagttagtcttgcctgaactttcgagttgaaacactttcatataagagaatgcagcacctacaaagagtctcttacccatgttgagaacagaanatggaatcatctagcacctgattgataattacgtttccanaatgaatagaacataccacctaatgcaaagataatcatctagccgcaagttttgtc

SEQ ID NO: 182297 - DNA, 395 bp, Glycine max
agctttatgatgaaccatgaatcttactgtattttctcgtttttctcaaactgctgttttcatggggtgtaacaagggaaaaattgaacttgagttcttagatatgtcccaagtaagctagctaccaactatatataatatctatcacattaaaacactttatgtcaatatcattaaccaaaagacgaatcaacattgcaaatagaaatctgatttcccatttctttttaatatacaggttgacattcaaacagcacttatgaggttgtttcctgaagaattttccactagagtacagtcccagcaaattgatcaaaaccctgctacatcatctacatcctctatgagatcaatattcacaggtagccctgaatacttcatacttatattcagta

SEQ ID NO: 182298 - DNA, 349 bp, Glycine max
  unsure (1)..(349): unsure at all n locations
cactcttcagcatctctatatataatcatcaatcattcacctttcaatcttctctgaacatcattaaatatctttcaactctttctacagaatattctgattcatttctcttcatctttctaaaaaaattttatcaacactatctctttcaagaaatagttctnttgttcaaaaaactcatgctattaatctttttcattctcttcttcctttgccaaaagaatgaaggactaaccacctgaattattttgtgtctctcctctcccttacaaaagaatcataggactaaccgtctgagaattctcttgaatcttccctttcccttaagcanaagaattcacaggactaa

SEQ ID NO: 182299 - DNA, 406 bp, Glycine max
  unsure (1)..(406): unsure at all n locations
agcttgtttntttgtgttgattntaactttgtttttcacttatttactttgaaactcattaaaagatgacttgcaaagtaaacgaacggtttgaactttattttacattgataaaccgaggttacgacacaaacgatcggttgaaactttattttacattgattaagtgagattatggcacaagtgattggttgaaactcgcttcatacaaagaaatgagatcgctgatggtcgaagaatgaagatgaaggtgcgaaaagcaagaggggacccctaagggtgcatagaatgaattcaaagctccaaaataaaaactattcggtcgatgaacaaagaacggatgaagaacgaacgaagaacggatgaagaacgatgtaggaatcgatcacggaagcgattcggaagc

SEQ ID NO: 182300 - DNA, 475 bp, Glycine max
  unsure (1)..(475): unsure at all n locations
tcatgatgatgaatcaagtagttgtgatgatgagaaaatatgcccacaagaatgatttcaagattgagtcaacacgttcaagatcaagtttaatttcaagattcattagaagaaatcaagaagattcaagattcaagaaaagttgatttcaagattcaagataagacatcaagaagaatgaagattcaagagaagatgaattcaagattcaagagaagaaatcaagaagcaacaagtcaagatttcacaagggaaatattgaaaagggattttcaaaaaccaaacatagcacaattttgttgtacaaaagagttgtctcagaattttctaagttaccagagtatttactctctggtaatcgattaccagtttcctgttatggattaccagtgataaaatttgatttcacaaagtttttaactgaatttgcaacgttccagatgatntntaaatggtggtatcgactacaatatat

SEQ ID NO: 182301 - DNA, 404 bp, Glycine max
  unsure (1)..(404): unsure at all n locations
agctagtttgggcacaatcctgacatctgtgtttcctcaagctcttttgncacctgctcagcttgaagaccttcctcttttctctattggtcataggttggtggtttgtttgatgcttactatcattcttactggaattaatgtgatgaaaagaaatatatttcttgtttgttgaaatctgtagcaatggggcacttcttcaagtactcacaggaagcttattttctgagaaaatacctaaggtttggttatttttcttgctgctgcagcataagattatatttataaactccgtaccccattgctcagaagctcttctctatgcgaaggtatgggggagggatattgtacacagccttacccttgcatatgcaaagaggctgtttccggattcgaacccatga

SEQ ID NO: 182302 - DNA, 426 bp, Glycine max
  unsure (1)..(426): unsure at all n locations
cgttacanatgtggtcaatncgatagattctaaagtctatttgagtcgtgtggctgagctggataaacatggctcaacaacgaccaacgaatgctcacagtggcgatagagaccattgtgacgctcgttggagatgtgtttgcgtcatatgcatgaacttcatgtgtatggtgttgcgggcagtgatatattgagttggttgcacacatggataatgtggcaatattcgacgatgacaatgggtactattgacccgtgaaaaaagcaaaaagatccatcaaggatgccttgaggtagaggtagcgaatatcagtgtgacactggacggagatgcatctcatgttgtgtgcgcaagttcacatgccacgaccttacattgggtcccatgcgatggtgtttcgtagtgattgcgcacgtgaaagacat

SEQ ID NO: 182303 - DNA, 384 bp, Glycine max
agcttatctttcctttgttctaacatagcacttaaggcaaatcaaaaaaccgctttcatcacataagttcaatgattaatttctcttttagtgtcttaaatgcatgcaaaaacgcatcattaaagttaaaattggcatcattttgaaaaaaccactagcctcacacatgatttcagtgattaatttctctttcagcaagtaaaatgcattcaaacacatctttaaagttaaacatgacatctttattcaaaagaccatacaagggtttagagattttacaaaagtcctttacaaatcttttattaaaacctaacatgtccaagaaaactctgtattccctttgcatttactagtaatttaaggttttctatgacttcaatcatg

SEQ ID NO: 182304 - DNA, 197 bp, Glycine max
cttttataaagaggtgtttatttatattattaatatattgaaggttagatgattcaaatattatgtgggttgaatatttggtaattgataacatggttgtgcctttaattcatagatgtataatgtgatggatttaatctaatggactattcatgaatataatggtacctgtgtcttatattgtagttaatatcatc

SEQ ID NO: 182305 - DNA, 391 bp, Glycine max
  unsure (1)..(391): unsure at all n locations
agcttatgcaagataagaatatgntctntttattaactaaaatcatgatttacaaattataatggaaatacagtcttacatttagttacttccttcatctttaattataagactttctttaaaaaaatatctatccttttttataagatatttttttaattttttagatgtattaattatttttttcttacatactcatacttaattattttctctttaatgagaaataaataaatgaatagaaaaaaaaataaaatgataattttgaaataataatataaacaattaacaaaattaatataataaataaattaattgaaacaatctctcttataataagtagggagtaattatacgtcaatttggttgccaaaaaaaagtggcattggac

SEQ ID NO: 182306 - DNA, 451 bp, Glycine max
  unsure (1)..(451): unsure at all n locations
cgatggcacattcatgactttcttcacgttaatatcttgtaaccgagaaaagatctccatatctctgaccaccccaaaatatccatgcacttctttctcgaaacttagcatatttatcgttacgacttacaatcaagatgaatagtcagtgacgtgcattttacctgcttgcagatgcaattggttgttgttgtgtatataatctttggcgtctcttaatttatgccaacattctttgccctttagtgtgtattttggttgggctgtcacaaggcccccggatgtgattcatgctgaagcaactcatactctcttttgtgttatttgagagattctaatgtgaatttggaggcacatcgttagttccatgcgtctactgtgagctggcctatntgaagaacaaagttccacattagagattactgctgtgtcttgaattgttccgtgagga

SEQ ID NO: 182307 - DNA, 397 bp, Glycine max
  unsure (1)..(397): unsure at all n locations
agcttcaggtttggtttatatcattgagttttttattgattgactgccttctgtctttgcatttctataattgtttgaaagtactaatccctcgaggtacacagatccatttaagggtctaacctctcccaactgatgtttttccatattcacggatcagggatcaaactcctgaccacatgtttaaaagacaaggttatcttccaaccatgccacaccatgttgggatattcatttagtagcattttataaccaattgctacatagcagaagtcaaaacccctatgttcataaaaaacttgttccccaagctcttggttgatgaattgtgtatccatattntgcatcttgtctctggttaccttataactattgtcaagataactatgctaacaag

SEQ ID NO: 182308 - DNA, 272 bp, Glycine max
ctttcggccttaaactgctttgtaaaattcgtgacctatgttattaactactgatatgatctgaggatcgtaatgttgctaacatcactgctaactcatttaagtattaaaatgtttaaagttcacttgctattagattaccttttgcgtttcaaacttatcacttggaatattcttttttgacccatgcaactttgaatgaagtatcaatctgggtcactattacagaatgattgttatattatcaatgtaaaatgactttaggatattct

SEQ ID NO: 182309 - DNA, 415 bp, Glycine max
agcttgcggatttggtcttcgctagcaaaatgatcgatgtggtttcgaaaagttgcaaatttaatcatcctgcttggacgaatgagaaaactagggcaaatgaagagggtgagaatgagagagaaacccatgctgtgactgccattcctatacgaccaagtttcccaccaacccaacaatgtcattactcagccaataacaacccatctccttacccaccacccagttatccacaaaggccatctctaaatcaaccataaaacccacctaccacacaaccaatgctaaacaccacttttagcacgaaccaaaacaccaaccaagaaggaattttgcagcaaaaagcctatagaattcaccccaattctggtgtcctatgctaacttgctcccttatctacttgataatgcaatgg

SEQ ID NO: 182310 - DNA, 415 bp, Glycine max
  unsure (1)..(415): unsure at all n locations
tatctataaatctcgccagatgacgatctttntctttcttggaaggtaccacatgatacggtacttccacaccttcatccacaactttttcactcctattcttctntgctgtcatattatttttttcttctttttctttttttcattttctatttctttntatttttcttggtccttcaattctttattcttgaccatatattgttcctctttttcttgattactttcacctctcacctcatttttcttgccatcagtacttttcttatcaacagttntcttctcatgcacaacactatcctcatccttaacctccacaaacactttactccttgtcatcatagttntgtattcctccttgggattttgttctgtattttccacanaaatgttggatgacttgtcagctatctgc

SEQ ID NO: 182311 - DNA, 305 bp, Glycine max
  unsure (1)..(305): unsure at all n locations
actgctgtgcctgcgcatggtgtttatgcaagtttctggctaanggctgcttagcctcaagcacctacacacatgccaactctggctttatttgggtctacactaactgcctgcatgctgacggtaactccattttaaatttcaacctatgtgtggtaaattctacaaaattaaccaaacactggaatcatactttacttcttggataaactcaaaaactattttattttaataaaaagcttaagacaaattaaatgcttgtattattgacaaatagatctacataaaggtcccctaactcacaa

SEQ ID NO: 182312 - DNA, 326 bp, Glycine max
tcagattttactgcttttgtttcttatatataaatataaataatataaggctatgccatagggacatggtcatatttacccctaacaatcttagaagtaaatatataccatgtgtttacggaatacccttataccatttatatttacatattagcaaaaagaaacagtaaaatcttaaggacaaatagttaagaatatggaactgatagagctaagataaaagctggaagcatattggaactcttgcagcgaatggaaggagttgataatctccagagttcatagtctcagtaaagatacaaagatacaatcccaacttaagggaa

SEQ ID NO: 182313 - DNA, 397 bp, Glycine max
  unsure (1)..(397): unsure at all n locations
gcttagaacaagaatcaatgagagncctatttgttcatcctatttatngccatttcgagaaagctgaagaagtttgcatgcattaacttgcaatctattcggatgtctttgcatatagctctcttcaaaggatattgtgtcaagaatttcatcacataatgtaatctatatgacagttgtggcatgattattggagtcacatgagcaagaaatcttccttgtgctaacctattttctccaactaaaaggagaaaatttggatcccggttccatgcagtcggaaaaagctcacttcagaccgctcaaatatcatatcacataattcaactcgcaaaaatgatttaaaatatcaatagtctagaagttcaaattcctgactggctcattatgtgaatgc

SEQ ID NO: 182314 - DNA, 452 bp, Glycine max
  unsure (1)..(452): unsure at all n locations
cactcaaccctcgctctntatataaatagtntacacttatggatncagatttacattgttattctactcattaaaggcggcctcttactattttgaaaggagaaatattttagttctatgatttggcatcaaatatgttcgtgacattgtgaaccaaaaactacattaatgaatgagcttagactttgctgctgcttgtaatttatcttgacacacgataagttagaggaaaattgtgaacgggcttggatgataaattctattctaggggtgaaagttaaaattaaagagtcttaaaatttgtgggggattacccctgagcatcaaaagaccacctttttctcagagaactcgattgcattttgataggattcttaattcttaattgtcgggatgttataataatgtaatttccatattttaagttattgaattgtcaataattacttata

SEQ ID NO: 182315 - DNA, 418 bp, Glycine max
  unsure (1)..(418): unsure at all n locations
agctttaggcagtcaaccttggaagcttggttttttgtctagttttccttanngnggatgcgctataagaatctggtggtggacaggatctcgagggtgttgtcatggttgcatacaaaaagaaaaataaatcaagccaagttaattatcccaacatacaagtatgaaattctaatgaaagacagataataagaaatcgaaaatgataatggacagcgtaaacaaaatttgggttatataccacattcaagtagcaatatcttcccataaaccttcatcatgatcgatacgatttgcatatacatcatcctcctcattttcagcatttatggaaggcatttctgtggaaaacaccgacatgtcattaacatcaagggttgaagcatcaatatcgggagggataccagatgttttcccc

SEQ ID NO: 182316 - DNA, 343 bp, Glycine max
gtgataggagccagtcgatgacagtggtagcattggtggtggtggtgatgatagtggtggagcttgtatcggtggtggtggtaagtgtgccatcggctgtggcatgacaatgatgatggtggcgacatcgaaaaatgtcattgtcaaatataggaaatgtgtatttctttaaactatacatcaaatcttcaaaacttattctattaattttgaaaataaatataaaaatgagttaaaaataatgtcagcttcatttttaccaaactcattttgcttctaaactctctctaacacttaaaataaatactcattatcactccacacaacaccttatcttttgagt

SEQ ID NO: 182317 - DNA, 424 bp, Glycine max
  unsure (1)..(424): unsure at all n locations
acctgcagcatgcaagctgagtctactttatataattttgttttcgaaggagttgtttataaaaggtatcattagttttctcaaaaattaagaagaatgcggggcatattttcttactaaactgtgtaaattaagtttggtgcaagtttttaattatgccaaaacaaagtttagtgaaacttttctctagaatcattgttcaanttgtaatgcttacgtgcctcactcaaatagtccaatattattattacatttcaaagggaaaagggttacgtatgggaaaagatgggcaataacaaggcccgtgtatatatcattttattttataaaaaaagattttttttttaacttgggaatatccttggtctaaaagtaaaagattaatttaataaaacattaagatagaacgggttgagaagtgaga

SEQ ID NO: 182318 - DNA, 390 bp, Glycine max
  unsure (1)..(390): unsure at all n locations
cattccactntaatgcactgattaacaagaatctatgttccgagttatgcatcatcatattctcattagttattggaacataatctcaaattataaaagattcattcatgtctaagaagctccttcgaagtcttttatatgtttacaactcttagactttggtttccaaatgggatgtatgttataacttacatcaattccagatgagcttatcaagaatgccaagtacatagccacacctgggaagggcatcttggcagcagatgagagcactggcaccattgggaagcgcctatcgagcattaacgttgagaacattgaggccaaccggcaagctcttcgcgagcttctcttcaccgctccagatgcccttcaatacctctctggtgt

SEQ ID NO: 182319 - DNA, 404 bp, Glycine max
agcttgtgtgagcgtttatgcgagacagtattatcttgttagctatcatcgccaagtaccaagaagagttaggtctagccacggcccacgagcatagaatcgcggatgagtatgcccaagtatacgcggaaaaagaggctagaggaagggtgatcgactctttacaccaagaggcaaccatgtggatggatcggtttgctcttaccttgaacgggagtcaagaacttccccgattgttagccaaggccaaggcgatggcagacacctactccgcccccgaagagattcatgggcttctcggctattgtcagcatatgatagacttaatggcccacataattagaaatcgttaggaaacttgtatggtctctcagaccttgactagatatgacttcctttatgaa

SEQ ID NO: 182320 - DNA, 426 bp, Glycine max
  unsure (1)..(426): unsure at all n locations
tactcagctgttcaactcgatggntcatattatgttgctaactttgatgaagcctaagcctaacttagtgtttccagtctcatttatgttccttattactcactggtttctattgactcaaaatggcaatgctaagaattccacatggacaattccctttttcctcatgtnttcacaacccatgatgattggtttgaatccaccatctattccataaaatcagaaaaatagttgatcactcatctaagaaatgataaaaacttgtgtactcctataacctgtgtactcaaattgattgaagctagatatgtcaacaagagtgccattacagcaagttccaaggttaaaatcaacatatactcaactagagacacctaaggtcatggaactcacatgtcttccacagttgcgacccactatgctaac

SEQ ID NO: 182321 - DNA, 399 bp, Glycine max
agcttctttccacggatgaagtcacaacctttctgtagatatcttgtcgaacacaacatcaaggaaagcagagaggaatgcaccaccaactgtctcagccataatgtcaagaacaaaggaaaggaattggttgcaataaactgggttggtttttgacaaggttaactggtgtgatgagattttattctaatcaactctcttcacttttaactcgctctgctctagtacctaccatcaaaattaaccgttaaatatattaattataaattcaatggtttagattgaagtctggctactttaaaaagtgtagtggtagtaggtttcttgtcctctttggaagacaatgttcttggttggatgctttttgatcgtggaatctgggggaagtacctaccatca

SEQ ID NO: 182322 - DNA, 476 bp, Glycine max
  unsure (1)..(476): unsure at all n locations
gacactatgatactaagctgtacaaacttagaaaataagacaagctgttctccatcgttcgcgtgtatgatattcactcgacaaggtttgaagtagaggagaccttcaatcctataacgcaacgtggcggacaaaaatgggcagttaacttgaatggccattactgtcaatgcggaaggtattctgcgcttcactatccatgttcacacattattgcagcttgtggttacgtgagcatgaactactaccaatatatagatgttgtttacaccaatgagcacatcttanaagcatactccgcacagtggtggcctcttgggaatgaagcggcaattcctccttctgatgaggcatggacactaatccctgacccaactacaattcgtgcgaaaggtcggccaaaatcaacaaggataaggaatgagatggattgngtcgaaccatctgaccaccgacatanatgtattatatgtgga

SEQ ID NO: 182323 - DNA, 408 bp, Glycine max
agcttatgctgcaaacatttactataaaccttctcaacctcagcagcaaaatcaaccacaatagaacaattatgacctctccagcaacagatacaatcccagatggaggaatcacccaaatctcagatggtctagccctgaacaacaacaacaacagcctgctccttccttccaaaatgctgctggaccaagcaagccatacgttcctcctccaatgcaacaacaacaacaacaacagccacaacaacaacaacaacagagacaacaatcaactgagaccccttctcaaccttccttagaggagttagtaaggcaaatgacaatacataatatgcagtttcagcaagagacaagagcctccattcagagtatgaccaatcagatggggcagatggccactgagttgaa

SEQ ID NO: 182324 - DNA, 419 bp, Glycine max
tctactaatgtggcagggcagggccccttcggcttggtgttctaactgcgggccttggcctttgttcttcctttcttagatacttttccttatgtcagcttgcgtaggtttatagcctaacccaaacttcccgcggtttcctctggtgcttactatgctggttcttccgctgttgttcttgcccaaacccattccgggctcgtagccgtaccccaacatcacccaggccaccatcattgccatatcggacaagcaaggttgcccagagagggaatttacagaggcaatgcttactacctcaaaagattggaaagacgtttccaatgactcctctacagcttccacatatggcatagaggaagggcaacttaccaagacgtcttcctcacccgatactatgaccaaatgtccctccacta

SEQ ID NO: 182325 - DNA, 411 bp, Glycine max
agctttcttgagaaaactttcttgagaagcttctttgagatttcttccttgagaagctagagcttagctacacatacccctctcataactaagctcacctccttgagaaacttccttaagaagattcctaaagaagctagagcttagctacacatacctctctaatagctaagctcacctccttgagatgggaagctagagcttagctatacacaccctataatagctaagctcacccccatgaaaaaaaacatgaaaatacaaaaaaaaaagtccttactacaaagactactcaaaatgccccaaaatacaaggctaaaaccctatactactagaatggccaatatacaaagcccagacgaaggaaaaacctattctaatatatacaaagataagcgggctcatacttag

SEQ ID NO: 182326 - DNA, 392 bp, Glycine max
  unsure (1)..(392): unsure at all n locations
tgtctcagcgtntatgcgagacggagaccaacatgctttcttcatcttcaagtaccaagaagagttaggtctagccacggcccacgagcatagaatcgcggatgagtatgcccaagtatacgcggaaaaagaggctagaggaagggtgatcgactctttacaccaagaggcaaccatgtggatggatcggttngcccttaccttgaacgggagtcaagaacttccccgattgttagccaatgccaaagcgatggcagacacctactccgcccccgaagagattcatgggcttctcggctattgtcagcatatgatagacttaatggcccacataattagaaatctgcaggaaacttgtatggtctctcagaccttgactagatatgacttcc

SEQ ID NO: 182327 - DNA, 391 bp, Glycine max
  unsure (1)..(391): unsure at all n locations
agcttctagccaaatggacttaccttgaatttttcctttgtttgccctttngagccttggttccctttccttgttttgaagctcactacaagccttaagtgaaaaaccatgatattaccatatccttaaggaattttggagctttggaattgttttgggaataagtgtggggggtttttgtttcattggacaacttgttttgttggctatgcttcatgatgtattttgggccatacttgatgtacattgtatattggttaaatgttggacatgctgaatgaaatgttgtttctcaaaggcttaaaaaaaacaaaaaaagcaataaagttgagtgaataagatcttaaatggcacaagaatgaagaaactcttggttctactcttcatgtat

SEQ ID NO: 182328 - DNA, 455 bp, Glycine max
actaacctgctatcatgctatcccaactcctttgatagggatttactcataatcagtttcgagaattgtctgctagtatattgggaaagttatagattaattaaactaaaccaaaccagcaatacacattatatatttgtttgtaaagagaataaatactgaaaaggacaagttaaaacaattgcaatttatcatacagccatggctattcagtttccaattgattctgacaaaaataagaatgtatagaagaaaataaaaggttggagagtgatatcaagaacccatgatgatgacctggagaatatttgtctcttgctcacgtggtctctggcatgagacctttagcagagaagttatctgcttttcgttaagccctcttgtatatctttgacccccaactatcttacatgactgggacagattcactataattgtcattgaaaaaaagactt

SEQ ID NO: 182329 - DNA, 397 bp, Glycine max
  unsure (1)..(397): unsure at all n locations
agcttgcatcacttcgggggaaatgatgattttnttnttgataggccaaggttcaaaaaagtctaaggttgtgtttcaatggggtcttttatcgtgggaacccaatgttgatatctggggcaaaacaaatttgggtgtcaaggtgtcggtctcgggccgaactcccatatcactccataaggcacgcgtgacaatgatgatttgaaaacaacatgcaaaattagtcatggctacagccaggtgggcactcaagcatcccgtttatggcattgtgatactacggttgggaatttacacaaacagacccaatgtttccaaattatgttctcccatcagttcaatgaattcatccattcttatctcggttagttcagacaataaactcttagcgtcagtc

SEQ ID NO: 182330 - DNA, 442 bp, Glycine max
  unsure (1)..(442): unsure at all n locations
ngaataaagtgccaatgtcatgacatatgtctatgcatctatatttttggtcttggatgtaaaaatgcatatatatgagaacatgtttgtgaggttttctttatactagcacttggattggttgcatcatggcgaataccttgcacatatgtaggaaaatgtgtttcaaaaatacaaaatatatgtgaataggtagcatgaaaatgcctttaaaaatgtatatatatgtgaatatatagcatgaaaaattcctttcaaaaaatgtgtgtatatatgtgtggatatgtagcataaaaggctctttcaaaagaaatgtgcatatatgttggcatatagcatanagaanatgctcttcaaaaaaatgcaggtgtatatatgtggatatgtcataaaatgcctttcacccacaatatatgcatatgcatgtatgtaaatatatata

SEQ ID NO: 182331 - DNA, 330 bp, Glycine max
  unsure (1)..(330): unsure at all n locations
acctctgagtcacctgcagcatgcaagcttgtcttggtccactattactgcttttattgatacggccntctttggctaccaacctcccaacatctctctccctctctttctgctttgttccttagcttaccttttatcaattcacatgatttcattgttcctttatgtcagggcttcgattcttaactaggcatattaattgtaattttgtcgcagacaagcagtgtcatactggacatgctcaaagctatgcgcattatgatatgtagcttggaacggattttggttacttgcgcaggggacgagttaaatgtgggcttccaatatgct

SEQ ID NO: 182332 - DNA, 312 bp, Glycine max
  unsure (1)..(312): unsure at all n locations
acaagaagtgaaaatgaaaccacttcgatgtgagtggcaaagatagaagntcatatatcagctcattatttccttatccagttgatgatatattgttgattaagagtaaatcaaatttgctaaactaattcaagaatgatacagagaaagaattcagatgatagatttgggccgggtgaaatgaaatattctattgcaatggagatcttcccgtcaaatgctagaatctctatttcacaaaatatatatgtataggagatattgaggaaatattacatggagagatgcacgcctataacaacttcaactgtt

SEQ ID NO: 182333 - DNA, 418 bp, Glycine max
agcttttgcagatttagtttttgccagtgatatgattgaagtgggtctgagaatatacaaatttgattatcctgctttgatgaataggaagcctagggcaaatggagagaataaaaaggaatgaggaacccatgttgtgactgtcgttcctacatggccaaatttcccaccagctcaacaatataaatacttagccaatatcatcccttttcgttacccaccaccctatcagccaagaacacctaatcatccacaaaggccacccctaaatcagccacaaagcctgtttgctgcatatccaataccaaacaccacccttaacacaaaccaaaacaccaactagggaaggaattttccagaaaagaagcttgtagaattcaccctaatttcggtgtcgtatgctaacttactcccatat

SEQ ID NO: 182334 - DNA, 458 bp, Glycine max
  unsure (1)..(458): unsure at all n locations
tcgcttgtcctcagcaagactgaactagaaacaanatgactatgtaaaatttataataaaacttgactaaaataagaacaaggattcacaatgataagttacaaacacacttctcttgcattccccctttttattcaatgatttatttgattatgtgcttcaatcgtctaagtatggtgtccatattcagctttttagctcaaccaaatcatttgcaaagttcaaaacatggaacaagaatgacattacaaatatgatcacatagcaacttgtcctctcatgaagtgtttcacgcttaagctcatgatttagcttgggtaagtgtttcactcaattgacatcttagaacaccacaattcaactntgactttcatctcangttaatcaataaatcanaggcatccagagatcactaaggactntattngcttgtaacggngtttggctaacaaggagta

SEQ ID NO: 182335 - DNA, 467 bp, Glycine max
  unsure (1)..(467): unsure at all n locations
gacctgcagggccatgcaagccttaagcgcaaccagctgagcgttgagcctaattgtgtgctgtccgtcttatgcgtcgaangcaagctcgacattagccgttgtgagagacctgatagtgcttagtcgctaaggttctgcgccttagtcggatatgacaacttgctaaatattttcttaagtctttgttctgtctattctcttcacacaagacttaaaaccccttgttcattactaaacaagctcaaattaatcacaatcacaagcaaggtatcctaactacatgcaaaagataagaatggaaaatagaaaagggaaagaaaagttggcttgcctctcagtaagcgctcttttaacgtcactagcttgacacccatcgttaggcaatccatgaagttccgtgacanttcgggagttgaaaggatgtgttaatgcgcaatccgtaaagttccgtaacattctggaag

SEQ ID NO: 182336 - DNA, 427 bp, Glycine max
gtcgatctattcaaggtctgagagaccatacaggttttctagcgatttctaattatgtgggccattaagtctatcatatgctgacaatagccgagaagcccatgaatttcttcgggggcggaatatgtgtccgccattgccttggccttggctaacaatcggggaagttcttgactctccgtcaaggtaagagcaaaccgatccatccacatgggtgcctctaggtgtaaagagtcgatcacccttcctctagcctctttgtccgcgtatacttgggcatactcgtccgcgaccctaagctcgtgggccgcggctagacctaactcttcttggtacttggcgatgatagctagcatggtggtctccgactcgcataaacgctgagacaagctctctttggaccttgaacagggcactaactcctctt

SEQ ID NO: 182337 - DNA, 416 bp, Glycine max
agccttgtaattggtacctctggatgaagtgaccttatgattatttattctagtgttgtaggtcaacttcctagattattgctgagatagattgtaaaacttaatgaatgttgtatttcttaaattgtattgattctcttctaatagagttattgagatgcatataaataattgtcagtattgttgaatgataaagatccacaaagcgtgaacttcaatgaattatatatgtgttgtgcgaatttacattctcttatatatgtatattgctattttatctatacgcattgtggtctagtctgagggtgttcgaccctaggcaaattgtttgtcatgattgttagatggttgtaactatagttgttatgttgttcgatatatttgtgtggcaagtggtttctaccacttaaggagcc

SEQ ID NO: 182338 - DNA, 491 bp, Glycine max
  unsure (1)..(491): unsure at all n locations
gcttctgctactcttcttcttcctccatcatctgcaaccaactaccataggagaataccttttctttntctttgcctttttttcttttttgttaattttcaaatctcaatggagtagagtgagagtgagtgtgtgagagagaatgggaaaagagaatgtttttttgtttgttatgggcggngaaatgaaataaggccctttatttttttgaaaaggcctattctcaatttgaatttctctcactcgccactctctaagcaacagtagtcagtagcctcaatccattgtttagctatatcccaactgattacctgtaagtgatggatatatggtttgtttgttattcttgaaaatgaattttccttccagtcatttgcctccttagaagaagtttcaatatttgtatgagtttttcattgactattgtgccatatattagaaacggngacaatatttgtagttaattgtattgcctgaagtgaatggattct

SEQ ID NO: 182339 - DNA, 415 bp, Glycine max
agcttgtctcagcgtttatgcgagacagagacttcatgtatctatcatcaataggtaccaacaagaattaaatctagccacggcccacgagcacaaagtggcggacgaatatgcccgagtgtacgcagaaaaagaggctagaggaagagtgattgactcgttacatcaagaggcgacaatgtggatggttcgatttgctcttactttgaacaggagtcaagaacttccccaattgctagacagggccaaagcgatggtggacacctactccgcccccgaggagatccacggactcctcatctattgtcagcacatgatagacttaatggcccatataattaggaatcgctaggaagtttgtattgttgctaagatcttgactagttataactttctgaataaaataagttcatcc

SEQ ID NO: 182340 - DNA, 485 bp, Glycine max
  unsure (1)..(485): unsure at all n locations
atgcttcaatggagganaagaaagagggagagatagagagaggtgtgatcacnatattgaaggaataaaagagggggagaagtagaactttgaagtgtgtctcataagactttcattcatcaaagttacaataagtgttacacatgcttctatttatagactaggtagcttccttgagaagctctcttgagaaaacttccttgagaagcttctttgagaaaacttccttgagaagctagagcttatctacacacacccctctcataactaagctcacctccttgagaagcttccttaagaagattcctaaagaagctagagcttagctacacacacatctctaatagctaagctcacctccttgagatgagaagctagagcttagctacacacccnctataatagctaagctcacccccatgacaaataaagatgaatatacataataagaaaatnaatgtccttactacaaagactactcaaag

SEQ ID NO: 182341 - DNA, 298 bp, Glycine max
agcttaaaatatacgtgagtaataaagccaatttgtatctgcttacttaatagtatctttgctggaatatgtgacttgaattctatccatctctgcaagatgtcattgagaagggtcatgagcaaccaaatctcactgttggaattgttgtacccgttgtggatgtcatcgtgtcagttttcttgaggctcatatttggtgggaagaataagcccgtaaggggagaaacaattttattttcccctgaacttttaggtcattcttattatgtgatctctgaaacaccgtgtgtgttgtt

SEQ ID NO: 182342 - DNA, 392 bp, Glycine max
ctcatacacggcttccatggtgatactggtaatactaatacattacatggaaagtgccatatgttagactgcctttatggtttatagtggttattataaattatagtacacataaatagatgacttctagcataaaagataataatactttaaccaagtacacaagaattattatactgcttaactgatatgaaattctccacttgcatgaacctctttgaccctcttgtcatactcgtgttctttatcctccattatctcacggcttcttccacttcaatttcgttgtcctcccagcccaaacctttgacaagcctatatactggaagatggttccttgcctcttcacaattttatgatcttctcacacttgaactaaaaagctggattgc

SEQ ID NO: 182343 - DNA, 362 bp, Glycine max
  unsure (1)..(362): unsure at all n locations
gacctctaatcaccgcggctgccacttggtgagagggatttgttnctatattctctggatgngccataagacaggtttgccaaagtgtgtgcggagattgacttgtgccattcagtatctgggcagtgttgattatgcaattacataggttgacgacatcacctactcttgtatattacatgtgtttttattattatttcaatgagatattgttcgcattactcaaactaatgaaaaaaatttcttcactggctatagttgacatgtctgaaaggatgtttaatcaatgtgatattatttataattttatatattggtaacaacttctttaatgtgcttgtgtgctctctactaaggtgatg

SEQ ID NO: 182344 - DNA, 391 bp, Glycine max
atattgttgatcgtacttaaatataaataaatttaattaattttatgtcatataatgtcatcattcctaaaatattattctttcgtctaattcttttctatcttgaatgactcttatatttatgataattagtttcaaatgacagatattttataagaatagaaaattattatctttactttttcacgccagattaaatgatggtaggagatgtggagtggacttgagaatagatatgtttcgttgaccttcataggctagatttttcaaaagataatttattcttgtgtacagagacttctttcgcatgtatatgatagcattacttatgagtaatgcatgatgtatctcatgcaattcagataatgaatatgatagttattcatccttg

SEQ ID NO: 182345 - DNA, 389 bp, Glycine max
  unsure (1)..(389): unsure at all n locations
agcttcggaggataaggaccatgtaaaacgatgtcaccntctttttcaccncccccaacgaaacatccacgagaaactttctcactcttccctgcaggcggagccttaccaccatgagcaatcatgtaatggatgtgttgcttgagggctgaaaccttcatggatgcatcaaataagccttgaatattaatggcaaaaattatttgaggcctgcttccaaaaagaacgactctgttttaaatgatctaaggatatccaaaatatccagttcaactgatagccataacacatcacacaatcgataatcaagctcctcccattctgtcttcttagacactcgaaacataatccgaagctttctctctatggacatggtgtacatgaccaat

SEQ ID NO: 182346 - DNA, 310 bp, Glycine max
tcacgaacccaagcttaatatgtggacatgatattaacgcataatccttctcattgcaatgagaccatgcagttactgccacttttgccgccacgtggttataggttgaactctccttatcaaacttgggattgaatttacaccgacgagtgcacaactgtcttgattttctaagttataaacttgaacaaaactgcctcattactgcttggctgcggcacctcacaagatttcaaccatgatgtataacacctgttggatgtggacatcttcaactttatcttctaagtgtgttgggctccactctctt

SEQ ID NO: 182347 - DNA, 376 bp, Glycine max
  unsure (1)..(376): unsure at all n locations
agcttcatgacgaatcgagtttgatncgaggtgatttgatgataacaaagatgatgaccgagatctgtgccgtccatattacttcatgataactaagatgatgactttcctgaatgaggtcaagattgcgtccagagcacttttatgatcttgaggaaggacgttttagagattcttgaatccagaatcatgattcaagaatcatgaatgtcattatcacaaatctagactctaatatgcaataatgaagagaagacttatccacgcatgatattaaaaagattttcggaactttgagtagttcaagaagatgtcacataatcatttctaaggaggtttgctctgtggataacgattactagattatattaacaat

SEQ ID NO: 182348 - DNA, 332 bp, Glycine max
actcagcttattggtatgctaggacgcatgatggtcttgtctctcaccaccttgagtgaagaaatacggcggcattgcaagaggggcataatcagtggcagtttgtaaataagtggacattgtgtgcattcttgttaaaggtgccaagaccatggtgctatccaacactacctcacaggtggatgtccttaaccaacttaaccttgaccaattcgtagagggagtctaaaggaacatcgttatacaaggacaccttgactagcactacacaaggaatgggcaacctatgttgtacgagttcacaagatggatgagacacaattcttgatgac

SEQ ID NO: 182349 - DNA, 410 bp, Glycine max
gaccgcggcatgcagctggggaacaaaggtttgtgtccattttttgtacttttgttccgcaccacagggaacaaaagaagggcgaacaaacaagagttctggattacccaacatcatgttgtcctcataaccttttattcaggagtttatggagagcactctaagagaacaaaatagatagctgcctatcactaatggttatgcactgtcagacaaagtttgactccttatcaaatattttctcaatctgttactttcatatttgttattctttcaaatttatcatacttgtaggatactatgcacatcatccttgttgctccagtggagcttactaaacaaaatgattctctctttcctctttctaaaccattggcctaatcaaatgattttgatatagccatgccatg

SEQ ID NO: 182350 - DNA, 415 bp, Glycine max
  unsure (1)..(415): unsure at all n locations
agcttctttgagaaaactttcttgagaagcttgagcttancttcacacacccctgtcataactaagctcacctccttgagaagcttccttaagaagattcctaaagatgcttgagcttagctacacatacctctctaatagctaagctcacctccttgagatgagaagccagagcttagctacacaccccctataatagctaagctcacccctatgacaaaaaacatgaaaatacaaaaaaaagtccttactacaaagactactcaaaatgccccgaaatacatggctaaaaccctatactactagaatggccaaaatacaaggcctacgaaggaaatacctattctaatatttgcaaagataagcgggctcatacttagcccatgggctcgaaatctaccctaaggctcatgag

SEQ ID NO: 182351 - DNA, 467 bp, Glycine max
  unsure (1)..(467): unsure at all n locations
taatagtcttctagtaaagaaatcactggtagcagcaatattattaatcatctatatatcacgggcgatattaaataaactgcctaattataaattatttcatatcttgngctgataatagcttgtcgttattatctctatactcaaaacatagtatcaaggatactttaacagttgttacaggaaatgtacgtggtaccatttcatcatactatntagcattaaaggtatgctttccctttatctatatctttatgcacactatacaagcttancaactagttgtttagaataatataataattttgattatatatataatcaaattgtagcttttacaataaaattatntaataagtagctattaaataacgtagtaataattaaagtagttcatttggtattgtctacatggtgagacaccaaanttcaactttcacatattcctaatttcggtacctacacta

SEQ ID NO: 182352 - DNA, 393 bp, Glycine max
  unsure (1)..(393): unsure at all n locations
agcttgaccggtcaagctaatcaccactttgtttctataagttttcctttgaataaggctaagtgcatctgtgcgctaagcccttgttgtgtgttgagctaagcgccctactgcgctaagctcaactccctcactgtcttttaagtttttgtagttaggctaagtgcaccctattcgctaagtcggagtgtcattttgttgaggctgagctaagcgcgccatgctatgctaagctccaaccctctttggttttgaaaatngtagacttaggctaagctcagttgtgcgctaagcctattttgcacaaaaaaatattttttgtgtctttaagctaagcgccagcctgctatgcttagcgtctgagtaaaaatttcataacgcgcgctaagctca

SEQ ID NO: 182353 - DNA, 463 bp, Glycine max
  unsure (1)..(463): unsure at all n locations
tatcgtaatcgattagattattattgtttagacaatgactggttnttcaggagtctctactntaatcaattaccaggtgatgtaatcgattacttctctcttaaaagtgtttctgaagtgatcaataacactttatcgattatatcaagaatctaattgattacattgttcttgaaagttttccagattttgggaagaatactttaatcgattgaaatgataatataatcgattacttctttgaaataattgattacattgtatatttaatcgattacatgcgattataactattntctctataaatagccaccttgtgttctcacttcaatgtggaaaaattaagtgtgaaattatatgagttgaagtaacagataaagagaaaagaaaaaagtgcttagatacaatgtgactcacaaacttctaatctttgatatgaagatcatattgtgaaaagtgagta

SEQ ID NO: 182354 - DNA, 418 bp, Glycine max
  unsure (1)..(418): unsure at all n locations
agctnttgcagaaccttatgcgtgagcatttttctcaactattttattggcttattaatcaaatngtcttgccatcaaacaggttgccccaccttaaacaaacttaaataatgtgccccacttgcaaaaaaaagacaaaaaaggaaaaaacattgtacctggtttctgttaagaagtgtactataggaaacaagaagctcccctccaagctggccaccacttttggtgtttatgaaaacaatcacagggcaagcatgtacatgtgaaacacttctcacctcagatcccggcactaatatgtaatccggaatacagaactccctcaaagttctatcatagataccatcccncattgctatttcccaactgcacattattatctcacacacacaaaaataaaaaaaaaaacattctaatt

SEQ ID NO: 182355 - DNA, 367 bp, Glycine max
  unsure (1)..(367): unsure at all n locations
ttctttaatcatttttagngggcgttgattattttgaagaaattagaaaagaagggagaggtgtctcactttcatcgccatcttgtttgcacatgtgctagagatccgtcccacttataaatgggacaaagggaaagccttggaagttttattagagtcactacgtgagttttagtctaacagactctacgttactattttaaaaatctaacaaactctttgatcttgattcataattttttttacaaaaatcacttgaattctttgttttgtttagtggttctttttaaaatatttttatttcatttgtttcaaagtgatattatcaacaattttatttaattataataacaagtcttcgtactat

SEQ ID NO: 182356 - DNA, 417 bp, Glycine max
agctttgtgaatagaaaaaatgtggttgggatgacaaacttctttaatagtggctagtcaggttcttcaacggcaaaaattagtcctcaacaaagttgattaacgtaataacatggtaacttgatagtattttaaactgaaaataggagaaataaaaacgttttctctgcccctaagtgctttaaattaaaattacgctttgagcaaagtgcatcggttatacgcattcatgtaatgcagagtttagttatcaggggttgatttcattttcatcaattattctgtcttaaaacaaactaaattggtttctgctgtagatccactggccagtccgcatgaaaagtggaacatttggactcaataaagaatatcttgagcaaccagacattcccaatacatggagagcaatggaggcac

SEQ ID NO: 182357 - DNA, 469 bp, Glycine max
  unsure (1)..(469): unsure at all n locations
tccttggttcactccatatacaactaacaaactttagaccaagtccgtaccatgtgtttcttaggttacaatcttactcaaagtgcatatcttttgttatgatctttcaaagtctaagttgttcacctcccgtcatgttgaattcattgaagatgttctttcgttttcctccacttcaagtcaacaacacatgatccataaccctcaaattcaaaattcacaaccgaatcttccaaatccaacctccaccaattccaacaaacaattcaaattccagcttatattttaatatcaacattgtacccacccaagcacctcaatatcaaccaccttcaaattcaaattccaccttctcacaattccagcttatcttttaatatcaacattgtacccacccaagcacctcaatatcaaccaccttcaaattcanataccaccttctcacaattcctgcttatcttttaatatc

SEQ ID NO: 182358 - DNA, 417 bp, Glycine max
agctagcagagttcttcttcatcaaactctgattcaatcctaatagttgaaatttctgaaagaatgcctttgcttccaatgaatatccattggcagcatcagtatctgctctagctaacttgggcctccactcatcagcaattgctttggcttgctgcttggtttgagggttcagaaggtgatctgcacctggatcagcccttgccaataaggtggccatggcttccaaaattataatacaggatttgcgcatgccctgtagggcagcaccagatttatcttttagttgggaagtttcactggtggggtaaaacccctccagtaaatccagcaccaaacgtgctggattagttgcactttgtaatgctacagaaatttcttcacaattaacagacagttttattttattctccataa

SEQ ID NO: 182359 - DNA, 444 bp, Glycine max
ctataccctatttgcacctctcttgacgtgtcctacaccatcatgccaaacatgggttacttcgagttccttccccacgaagaagatttatcttctagctcttcaagctccaccttgtcacgtgactcgctcgaccttgcagatcttgaactcggaaaatcctacgagctcatcgtcaccacgtactccggtctgtgccgttaccgcgtatgcgacattctccaagtcacggggttccacaacaccgccccacatttcagcttcgtgaggagaataaacgtgcttctgagcatcgactccgacaagaccgacgaagcggagttacagaacgccgtcgagaacgcctccgtgctgctgaaggagttcatgacgagcgtggcggagtcacgagcttcgccgacacgaagtcgattccggagcactacgtgatgtactgggaacatc

SEQ ID NO: 182360 - DNA, 404 bp, Glycine max
  unsure (1)..(404): unsure at all n locations
agcttgtnaaaactcaaggcagacacatcctttgttttggcttttatacccaaagctcacccttggagagcccattctgtttctacattccatctacataggaactcgaggtacacaaggaactgcctcgactatcatctatattcctagatttcattctgcaaggaaaaccagtttttattaaacccaatgtctgcctttggttcaaatactttctaaacctaatgtccactcttggtacgttcttctgtaaaacccaaggcataccctatgtactctcactcgttacaaccatgacgaccacaatcaaatgtctaagttttacattactaactaccaccacactatttggcatggcctttcatactgcggaagtcatacttgcctctcaaacactctaataa

SEQ ID NO: 182361 - DNA, 408 bp, Glycine max
agcttgccacgacatctaaattcgatgtattttttatccccattttgtgtcaattggaacatggacgccagagtggcgagtgcatcgataatctgattcttctctcaaggaatgtggtgaaaggatatgtcatcgaagaactctatcagtttcctgacgtacgcctggtaaggtatgaacttatgatccctggtctcccattctcctctcaactggtggattaccaaggttgagtccccatataccttgagcaacttgaccttgaagtcaattgcctcttggatcccaagggcgcacgcctcatactcagccttgttgtgtatgcagtcaaaacccaacctagccgtgaagagtatatattgatcgtcatgggtaaccaaaaccttcccacctccatggcctagtgca

SEQ ID NO: 182362 - DNA, 200 bp, Glycine max
ctatatgggagcgctcatttgttcccatttacctgctctcggagtttatgtccgagctatacacctctcaattctggttatagcattgacctgcttgctaacatcggtatacgcccctactgccattcgcgtcacacagtgccaaggtccgagagcgccctaaaatgagcgttcattctggtcctagagggtgcatacaa

SEQ ID NO: 182363 - DNA, 389 bp, Glycine max
  unsure (1)..(389): unsure at all n locations
agcttcggatcaaaatgatgagcgtcnnaatttattacaggactcaatcacacatccgaggaaaaatttattgtcgtttgaatttggtacgagcttccgatttcaatatggagcatctctcgataaataatgacactctctcgggcatccgagtaaaaagttattgtcgtttgaattatctaagagtttccgttttcaatttggagggtctcgatatattacaggactcaaccggacatccttggataaagttattgacaattcaattttctcagagcttcggaactaaatttggagcgtctcgatatattacgggactcaatcagacatccgagtaaaaaggtattgccgtttgaattttgtacgagctatcgttttccattcggagc

SEQ ID NO: 182364 - DNA, 364 bp, Glycine max
tatcgagacgctccatactgtgaacggaagttcgtaggaaattcaaacaacaatatctttttactcggatgtctgattgaatcaggtaatctatcttgacgctcaatattgagactataagctctgagcaaatcgaaacgatattaaccttatacacggatgtccggttgaatcctgttatatatcgagacgctccatattgaaaatggaagctcttataaaattcagacgacaataacattttactcggatgtccggcagagtcttcgaatatatcaagatgctctcaattgaagacagatgctcgtatcagatctcaacgacgataactttttactcggatgtcccattgagcgccggaata

SEQ ID NO: 182365 - DNA, 399 bp, Glycine max
agctttaaaatggatttagtgctcatgaacatttcttcttttgtttcataatatctattgaggaagaaaaaaattatcttataataattattattttagtttttagatgtaatattaattatttttttctatttatatttctcgtaatattaatatataagaaacaaaaataattcaataataataggattaattttatagaactggttttttctttattttttattagtctttcttaatttatgtgaaataatctatgatgataaggagagatggaaggaaagataagaagagtttacttcgaattttatttgttgtttctatttttaatataaaactttcttcgagcttattttcactctgctgtatgtattcaaagatttgttacaaaacgaaaaa

SEQ ID NO: 182366 - DNA, 414 bp, Glycine max
  unsure (1)..(414): unsure at all n locations
acactatccacaactcaagctngaaagcncaccctcgccgtcaatgagataccaatataatatgtatcttttgcatncataggaagagataaggaccctaacttctactccaaggaggcaacaatcaacgagtgcacaaagataacccttattttattattataatttgtaacacactatagttcatgcataaccaaaagaatcatatgacgcacgtaaaaatatgaggctaaacaattcttgcgtttgaccaacaaataaaagggctatattgatatagagtatgttgcaagggagaccatcccatttacatcaattctgaattgtgctaactatcatctaaacttcatattaacgtctagaggtgctcaatcagctgaacattctaattgtggtactagcaagggcaacaac

SEQ ID NO: 182367 - DNA, 381 bp, Glycine max
agctagagaagagaatatatttgtgatttattttttcaaaaagacggtgccgctaaagcgcagcttttaagtttaaagtgaactttggtttagggaacatatgtgatagctccctttatctaatgtaaatccgtaatgcatatcttatttaactcttcgacagtgaatgctctaagatttatgaattgcgcaatcagtttaagctatcactgttataacggataaaactgatcaccttaaagtagttactcctccatgctatatatcaaatagcagattaatgatggggtgctcaactagtattggttaaatattacatctccccgattcattaagacacaccacatctatatagtatgattaagaacaatactcatgtga

SEQ ID NO: 182368 - DNA, 324 bp, Glycine max
  unsure (1)..(324): unsure at all n locations
ntnccaacccagagaggagatacagatcttgctcacattacatgaaagntatagggccacagaaatgntacacatataagaatcgaacacaatctcttccactaaacaaatacgttgctcacatgcagcggggtctcacaccatcggagcgtcaacccttcggagaatacattgagcgagcagtgtgtgtatacatacatcgcaatgaatttgattctcttatactttcacggggggtgctgaatgtgataaacaggatgaagtctactgatgaggataattccacggggagtggcggcgacgaggaataacgaacctcacttg

SEQ ID NO: 182369 - DNA, 398 bp, Glycine max
  unsure (1)..(398): unsure at all n locations
agctatttgtggtnggctgtgttttatagatttgttatngatttgattttctaaattggcattgcccctaactaagttgactcgtatgaatgagaagtttgtttggaatgagaggtgtgagcaaatgtttcatgagttgtagaggcggttgacgacagctccagtgtttattttgcctgaccctaagagatcatttgaagtgtattgcgattcaagtgggcactgcttggggtgtgtgtagatgcaagagggaagagtagtggcttatgcttcacgtcaattacgtcctcatgaaagtaactatccgacttatgacttggaactagcagcggtggcctttgcttaaagatttggaggcactatttgtacggtactcgttttgacattttccgtgatca

SEQ ID NO: 182370 - DNA, 448 bp, Glycine max
  unsure (1)..(448): unsure at all n locations
tctcagcttctaaggaggtgagcttanntatgatacgggtgtgtgtatctaagctctagcttctcaaagaagttttctcaaagaagcttctcaaggaagttttctcaagacagcttctcaaggaagctacctagtctataaatataagcatgtgtaatacttgttgtaactttgatgaatgaaagttttatgagatacacttcaaagttccacttctttcccttctttattccttcaatttcgtgctccccccttctctatttcttttcctccattaaagcatcctcttcaagcttcttatccaaggcaattcttggtggtgaagctccttctctcttggcttattccctagtggatggtgcctcccctatcctcttctcctttgccttccgctgcatgtccatggtgaaagatcaccattgaagaacctcattgtagctcaaagatc

SEQ ID NO: 182371 - DNA, 331 bp, Glycine max
agctataattataataatcatacggggtctattatctaatggacacgaattcaaacattacattaacttcaacatagaggaaatccataaaacttgcatgaaaaactacaattaagtaatactgattttgcattgaatcatgttgcgaccaagacatgtcgtcttctatttccattacctgtttactaaaaacaactaaaatttctattggcccagatttgtttcagtagttagactgtactaaaacctttagcacgtcatcgttagttatcagcgaagttagatacctgtatctgtgaatggctgccgatagtaaatatcacccaatatt

SEQ ID NO: 182372 - DNA, 360 bp, Glycine max
  unsure (1)..(360): unsure at all n locations
tgtacttnggcacagatgatagtaggtgttggaactgatttagaccatcacttaccacaagcccttttagaagaacatgtttagaatcctgtgatgtaacaagacagaaagatgagtgaaactcaaagaagacattattgtctttacaaaactgactgacactaatgagattcttagtaatagaaggaacaaacaatagattactaaggacaagagataattcacgattaagaggagaggaaaaagaggaaacacctgaagaattaatggtgagaccttgagcattgccaatagtgatctgatcaaggccctcataagtgtcacttgctgtatattctatgacatatttgtcacatgatg

SEQ ID NO: 182373 - DNA, 207 bp, Glycine max
ttacttaatataggtaacactttcatgacagaattgataattgtacgaggtacgtatcactacatatatattgaaattaagtccttcgcatcatgtaagagaatctttcgtgcagaacatcaattgtattgataggattctgtaataattcgaaccctcgtgaagatgatgtttgagcctaactacagacatggatctatccttgac

SEQ ID NO: 182374 - DNA, 418 bp, Glycine max
gatccttaagtcaccgcggctgcagcttattgaaaatgattgacccctttttttcgaagtataatgtgccaagctatgccttttggggttatagttgcttctgaaattttaactccaaatgactaaagtaggtttaaacctaaaatggctaaaatggctaaagtaggtgtaaaccaaaaatggctaaagtaggtttaaaccaaaaatggaaaattttgcttttgttaaaactggtaaaccctatcataatcccgtagatggatgtgctaaccttccttggatgtgtaatcagagtgaaccttgcacaaagtccactctcacaaagttaaattacatagtcactcaatgcacaatgcaattctttgatagatagaaattcagcttagacaattttatatctttatatcaaacaaaacac

SEQ ID NO: 182375 - DNA, 403 bp, Glycine max
  unsure (1)..(403): unsure at all n locations
tgcatgattcacattctcccnctgtgtcaagcaaattcttttttgatatcatcaaaacctgcatgatttacattctccccctttntgatgatgacaaccacctgtaggttaggagcaacaagaaagaaaaaatatctatttgcatatagtttactcccccttggtttttcaatgtttgcttatatgagacaattgaagatttcatatttttcatatataaaaagttgtctcataaaaaatagatattttttcttactattttatcttttatcttttctctccccctttgtcaacatcaaaaacaaatcatgaatagagaggaganaaaaaatgttaccacttgttgtaatgtatgagaatcaagtgataccaaaaggcattaaaccaatcattcaatattgat

SEQ ID NO: 182376 - DNA, 417 bp, Glycine max
agcttccagctccaaaaagtatagtcttggagcccatcaggagtatgaaaataatgtctgtgaaccaaatgccaggtagtcaccactcgctaattccccaaggttcctcgaacctctccgtccactataccccagtgtaccatgtaaatcatccatttttcaacataaatctcactatctcacagatggaacataaccacatgcatcaccatctcacagatggatcataaccacatgcagcaccatctcacggatggaacgtaaccatatgcgtcaccgcctctcagatggaccatgatcacatacctcactatctcatagatggaatctaaccataaccacaccatctcatagatgaaagctaacaacaaaacatgtcatctcacatatgggacaaaactaatggatccttactct

SEQ ID NO: 182377 - DNA, 469 bp, Glycine max
  unsure (1)..(469): unsure at all n locations
gctctcttaagtttctggtgttccaaaccttggaaacaaaacttgtgctattcatctntntcattcccttctccctttgccaaaaagaattcgccaaggactaaccgcctgaattctttttgtgtctctcttctcccttttccaaaagaacgaagtactaaccgcctgaattcttttgtgtctcccttctcccttgtcaaagaattcaaaacgacacagtctaagaattcttttgattcttccctttcccataaacaaaagatttcaaatgactaactgcctgagaattcttttgtttcccccttcacaaagtttcgaaggactaaccacctgagaactttgtcttataacattggagggtacatcctttgtggtacaagtagagggtacatctacttgngttgttgtgactgagaacaagagagggtacatctcttgtggatcagttctagtgaaaggtacatccact

SEQ ID NO: 182378 - DNA, 415 bp, Glycine max
agcttcattaagaggcttcttccagaagcttcctcgtggcttctttgagaagctttctcaagagacttatttgagaaactaaattctcataggctacacacattatgagtatttgactcataggctacattttctcttcgttgtagcaaacacaaaacatatttgtactatgagtatttgactcatagactacattatcttttcgttgtaacgtatttgactcataggctacattttctcttcgttgtagcaaacacaaaacatatttgtactatgagtatttgactcatagactacattatcttttcgttgtaacgaatgaaaattaatcataaactcacaataaataaaataaaaatataatccaatatccgcttttaaataccttatcaaaaatcttaaagaataaatctca

SEQ ID NO: 182379 - DNA, 485 bp, Glycine max
  unsure (1)..(485): unsure at all n locations
ggcttctacactagatgcaggcatggaaagacaaattcaaccccaaggtgaagaagatcatgttccttatggtatgttgttcactcaaaccatgaggaatgttggtgaatatgagaacctaataaacgtttcatatgattatgagaacctaatgtcaatgtgcatttgctcatgttcagaagatcattatgttggatcaagtgggcttgtaataattaagaagggggggttgaattaattatgaatatgtcttgactaattaaaaatttatccttcttaatgttactagattcaattaggctttactactaagttatgagaaagtgaagaacataaacaataacttatacaaaagtaaagcggaaataaaaactgcacagtagaaaagtaaagagtgtagggaagaagatagcaaacacaagaattatactggttcggncacaacctgtgcctacatgcagtccccaagcnaccaccggttcttg

SEQ ID NO: 182380 - DNA, 420 bp, Glycine max
agcttagaagcaaagtttgagggttttatcttacttttgatatcctgtgtccacacctttgctggggatgaaccaatttcttcatctccctgagtgttattccaattggcactttctttcttcaaatgaccaagctcgctcaacaaatattcagcattgatgtaatggcattccctccgagtcttccagaaaaggagttccacaaacaagaggggttgctttttcattttctttagcatctttctgaccaaacaagtagagaaaaggatcaaaatgtagggacatcaatgctgaatttatagacaccttgaatttataagatataaagtagagaaaaggatcaaaatgtagtaaaatcttagttggtatgcttatatttacatctgaataactatacctgcatagtccttgcagggacat

SEQ ID NO: 182381 - DNA, 471 bp, Glycine max
  unsure (1)..(471): unsure at all n locations
actcagcttctgatgattcagatgattcnagaagtttgatgataacaaggtgatgacaaatagctcagaggttaagaacacttcatgataacaaagatgatgatttcaagaatcaagaatcaagatttaaggttcaagtttccaagaattaagatcaagattcaagacttaagattcaagaatcaagagaagacttaatcaagataagtatgaaaaagttttttcaaaaactgagtagcacatggatttttctcaaaacctgtttaccaaagagtttntactctctggtaatcgattaccagattattgtaatcgattaccagtagcaaaatggttttcaaaaagctttcaactaaatttacaatgtttcaattgatttcaaaatgttgtaatcgattacaatattttggtaatcgattaccagtgtgctngaacgctgaaattcaaattcaaaagtgaagagtcacattc

SEQ ID NO: 182382 - DNA, 418 bp, Glycine max
agcttgtattgagttttctgtgtttttaattgtcaggtacattctacaactaataaggtggacaatctttcacaagcctttctaaaagacaaattatttggcagtggaaggaggaatttggtgctagttttgggagatggagctactaggtgctgacaactactacaacattcaaatatggatgagtgtttggtgtgtggcatgcgcaaattaagcctttggtagggatctgcaaaatttaggttttttttttttaacaattgaactgaatcagtgattaaaatgtatgttctttgtgcataataatttacttttaaaattggttcttcaaaaccaatttgattcaaaactacattagtacataacaatttacttttagaattgattcttcaaaaccaattcgattcaaaactgattc

SEQ ID NO: 182383 - DNA, 461 bp, Glycine max
  unsure (1)..(461): unsure at all n locations
tctatctgtntccttctcagacaagctccttcttgtggagtccagcaacagtgaagcatcacaactctaccctcacacacacacacaaaaataaaaagtgaaaaacaaatactttcatatataaaaaattaactgacaaaaaagaatgaccaacatgcaccttgcaaacacagaacaaaaaccaagcttaattacctgaacagcacagtcatggaagatgttcctgagccaggagaaagcagtgttcttgtggcgcttgtagagaagcttgacttgttctgtgatgatgtcttcagcctgagggcatgattccttgtagaagttcataacaaggccattattttgcccttcccccgcaacagaatgactcagtgacagtgctgaaacgcatattaacacagccagaaagggtaaaccctngggagccattctcttcactcttcgctctatctcactcgcct

SEQ ID NO: 182384 - DNA, 387 bp, Glycine max
agcttcattacatcttctagaaattcctcattttatagctcagctaattggaaaaaatgaaaaaaaaaaaaaaaaagcaaattgatatgaatgatcatttttcatgaaggtgtgaagaaaaaggaaaacatgtacaatttctaacaaattatgatggatgattaaaattatgtaaaaagggtttgaaattacaataagaaaggtatgaattttatttgatcatcatgcattagaagccattacttacataaaatgcgaccataactccagtggtgtaatctgcaaacaacttgatcgaggcactgaaatacttgtgaaggtaaaggtcattagacacaaatccagaacctataatcataactcagaataattgagaaaataaaatat

SEQ ID NO: 182385 - DNA, 362 bp, Glycine max
  unsure (1)..(362): unsure at all n locations
tgtcaaaacgcanggcgaacacatcactctatccaaggctctttaaaccctaagttcacccttggtgagcccttccttagctaagttccatctccacaagaatgcaaggtatgcaatgtctaccattaaccatcatttntattcctaacttttgtctatgcaagaatacaagtctgcaggaacatntgcaaccctatgtccacccttggtacagaaacccaaggcttacccttgatacaaagacccaaggtctatccttggtacgcactcctacaaaacccaaggcacccccttggtcttctcactcgcagcaactacgacgaccaccatcatatgtccatgtcccacaagacaaactacca

SEQ ID NO: 182386 - DNA, 404 bp, Glycine max
agcttctagaatttcccaatatccctctccttttctgatttcaggcttaaataggtgaccttgttggtgctttcgcgcttagcagaactctggctcgcttagtgcgcattagtgaatttcggcttagcgctcgtctttttgctcagcggatggactcaagtggtgctcttagcaggattagccctcactcagcgaacatgcacaactcatccttcttctagattcttcctcacgctcggccaaagaagtgttgtgctcagcggatggctcgctaagccagaaaattggcttagcaagcggatgaaaatcagcacttcacaaacttgcctaattaacctaaaagtgtgaggaaatgattattaaacacacaaaatgggtgtactaagtatttattacctatcttt

SEQ ID NO: 182387 - DNA, 470 bp, Glycine max
  unsure (1)..(470): unsure at all n locations
tgttaaattagatagattcgatggtaacatgctgcttattaaattagctcttctcattcagtgagttttcagtgttcatctaacatttaagaaaaagtgaggggcacaatttctttaacatatacttattcctacataaatagaattagaaaatcataagggatcaccatttattatttaacgtcaaaatttgaactaacacttatgtaattaacgaaatactcaaattcataaatccaaaaaaaaatagattattatgttaaattaaaaataaatataaaagaaaacccagtgtatacaaaaaatatattggttatgatgattaaaaaatatgctgctatattctttntaacagacaaaataagaattgtaataatcacaagaaattatgataaaagcgggacagtagagagtacagcatanagtggggtatttggtacaatcaccaatgtagaatttcacctttctat

SEQ ID NO: 182388 - DNA, 395 bp, Glycine max
agcttcggatcaaaattttgagcgtcttaatatattacaggattcaatcacacatccgagtgaaaatttattgacgtttgaatttggtaccagcttccgttttcaatttggagcatctctcgatataattatgacactctctccggcatacgagtaaaaagatattgtcgtttgaattctctaacagttaccgatttcaatttgtgagggtctcgatatattacaggactcaaccggacatccttgtatatagatattgtcaattcaatattctcagagcttcggatctcaatattgagcgtcttgatatatgaccggactcattcggacatccgagaaaaaaggtattcgtcttttaatctgataccagcatcccttttatatggaaacttttc

SEQ ID NO: 182389 - DNA, 408 bp, Glycine max
agcttcttcttccgcgctttgaaatttggtttccttcttctcctccacaggtattggcatcctccattgactagctttgttcgtttcttccgccatccaggttagtgttctaacctcgtgtcttcatttggaagtgttaatggtcgtaggatagacgacataagtgatgtgtggtggctgaggttgaagacaaaggttcttccgcgcatgtggaaggggcagttggatattgaagcggaagaatgagttcttccgcaggaacctatggaagaaaggggagaaggttcttccgcgggtttcggcagaagaaggcgaaaaaggttcttccactggatccagtggaagaaggttccatatgaaacatttccttgtcgcggaagaacctgcggaaccttcttccgtacgcta

SEQ ID NO: 182390 - DNA, 442 bp, Glycine max
  unsure (1)..(442): unsure at all n locations
tctanactntatacaagaatgaagctctaatatcacttcttagacaagtggccttagatatcttaagaaatggtgggttgaattaagatatcacaatcttttcctaatcaaaaattctattttgattttaacccaacaacccaagattctttntaaaatgaactcctaaataataatgcaaattaatcttacttaatagaaacaatatgcaataaacaataaaggagtttaagggaaaagaaaatgcaaacttagatttatactggtttggccacacccttgtgcctacgtccagtccccaagcaacccgcttgagagttccactatcttgcanaatccctttacaagttctaaaccacacaaggacaatccttcctttgtgttcagatttctttaccacaagagaccctcagtcgcttaatcccttttgagaaataaaatg

SEQ ID NO: 182391 - DNA, 407 bp, Glycine max
agctatgacaatgagctagctctattttcgtttatgaatattacattaagtaaataacacaagttaaataaatatattaattttattaagtatatagttatacacaagttaaatactatattttgtaaaataattttattgtgagttttatctttcaaatattttcttactaaatattacttaattgttcagattattaaatatataaaaaaatatttaatatacaattgtgatattaattaaaaatattaaataagagctgttatattctttgacagacttttatgctcatatttacaattgaataaaaaagtaaaatcaaaataaaaccatcaaaccttctagttacctgtcaaaaatctaggagagacaaataatataattctttccctgtatttctctccttg

SEQ ID NO: 182392 - DNA, 470 bp, Glycine max
  unsure (1)..(470): unsure at all n locations
tgagntttacttatttagttcatttatatgtaattattttttagaaaccctaaactcaaaccttaagattccatttccaaatttctaccattattcttcatttgtggtcaaagattgatgtcaagggcatttgttcttgtcgagtttgaacatggggccgaattgaataatagggattctggcattgtgggaaaggcagtgaaactcaccacatgaatggatgaaaacccaggaaatgctcttacaataccaaaattgaatggaaaaatttgttcaaattgaactatntttcttgttcaaggacttacctatcttcttttaatttggttgatttgtttatgtgcaaaaagactgggttgttgtaaaaaagaagctcgagtntgagtggcttattgtagaaaagaagttcgacgtgggttaagaattgcataatgtcgaaactcataaaaatgaatttgaagctaaacaaa

SEQ ID NO: 182393 - DNA, 373 bp, Glycine max
  unsure (1)..(373): unsure at all n locations
agcttggagttgcaatagtgctaaggcttcatgttttatttactccatattgtcgacaagaaactctggggcctgtcttcatgataactaagatgaatgtgctatggagtaccaagttaggactttggcaagtgagatcaaagatattcatgaccccctgattaataagaaagattcaacacactatggatatgaacagactttaggggtctagctacatagctgattccttaatatgatgcgcggctaactcagtgaggtctactccaataaagagagacgactctttcttgttcttacctatagctatattatatttggtgttcatacctcctgngaaaactgaaagctcaattcttaatgtgttatttta

SEQ ID NO: 182394 - DNA, 381 bp, Glycine max
tacctccactattacgcactaccacccactcttcctatctatgttaagaaaatgacatcggcagatatgcagttgagaagagaaaggggcctatgctttacttgtgatgacaagttttcccctagccatcgttgtcctaataagcaatattttgttccacagtgggaagaagaggatgaacctgcattacaaccagatccaccatacgatgttgagacagctggtgaccccagtttgcaagatcatcatttgtcttataatgctttaaaaggctcatcaggtcttgggacaatgaagtttcaaggatcaataaatggattgggagtgtagattctactagatagtgggagttcatataactttctctagcctagactagct

SEQ ID NO: 182395 - DNA, 395 bp, Glycine max
agcttgctacacaaataacctgtgattgtgttaatctcctgtgattgtgtgtaggaactaggaagtaggaaccattagcctaggtgacatctggtaaataactagattgagatagtttggtgtggccatgactatagttctaatagcaaccatgatattaaaagtccctttttgtcaacctaaattcagtttagttaaaaaaaattcagttcccttctccctaatttttatctcatgtttcccacttttttctccaatctctcttcattatctgattttatttcaatgattcaactctctccataacctgtcctgacatgttggaattttctttaacctagttagattgaagacaaggaatatcaataatgaggcataatatttttcctaaatat

SEQ ID NO: 182396 - DNA, 467 bp, Glycine max
  unsure (1)..(467): unsure at all n locations
tcagaccaccgcaacacaaaatctaagtgtccaaaacctctcaattcaatggctcttctaagcttgaaaggtggaatttagaatgaggtaaatttggagcaaactctcacctcacacaagtctataacatcaatctaaacttgctcaaactggatttacacctaaatttccaccgaatcaaaatttgactcctcaacacccaatattgccctacaaatggctcttggttcactttggtcatttgtttttctctctagctcagcctaacctttctcacatgtcctaaatgacatttcaagctattattaactcactgtaacctccatttaccacagaattcagacttagccttccaactctcaaagtctcactctgtatccactcataacatcacattctcactttctaaccttgggttagttctaccctttgtctctaacagatnttcatcagcaatttcagcatat

SEQ ID NO: 182397 - DNA, 398 bp, Glycine max
agctagtttattctatgaatgatatcctttcttattttcaccctttccccatatatatctaattgatcccctctaactaattactctagtccccaactaatttttcctttacttctatctaacacaaaactaggttagtcattatagttattgctaataatagtgtttcatatatatatatatatatatatatatatatatatatatatatatatatataagaatttacactactagaaaaatgcaatttagcaatcaaaatagcgactgaacagtttctatcgctacttgcgaccaaatttaatcgtagtagctaacttgcaccagcgaccgaaataaagagtcgctgaaaaatttggtcgctatttcagttgctctatatctataaatacaatagt

SEQ ID NO: 182398 - DNA, 392 bp, Glycine max
  unsure (1)..(392): unsure at all n locations
ngagatgaggaagtgttgaatggtgaaactttctgcttttattgttgaccacagagtggtacctggagatatgtcgcgggggttaggagaccttgtggacgtcaggtggggtgctatttcccaaaaccaagcttgaccaatcccgacccaacccgggcatagtctgtcagtgagaacctgtgatgtacctaaacaggcgagctcctggcagtcaacagataaaaggaacaaagaccacaaagcaatgaggcttgtggtggctggccagctgtgaaacttgattgatatgtgagatatggtctctggtaatcgattaccaagggtgggtaatcgattacaaggcttaataatgaagacaggaggctaagatggtctctggtaatcgattacca

SEQ ID NO: 182399 - DNA, 463 bp, Glycine max
  unsure (1)..(463): unsure at all n locations
agctttggcctantcgtagagttctcaatcttatatataatatcagagcaaggtaattcagtaatgggtttgaatcccccaagtgacactaggagaagattactggtttaacaaattgtgtctcctgnggaatcatcccatggtgcctatattagatgcaacctgtgagaattcattaaggaaattaagttgtgcccttgctaaccgctatatcttttagcctagtggtaagctcttgatcttacaagatctcttcttccaaccaagttatttccatccaaaagattcaaacataagattctgcttaagggatacgataaggttgtcaaaactagcctggcctaacaagccatttgagctaagttcggcctcgtaaatcctagtataaacatatcggcctatttagcttgacattatctttttattttttaacatataaatttatgcataanaattggtcaat

SEQ ID NO: 182400 - DNA, 426 bp, Glycine max
cgcttgatctgttgctgaagtgataaaattacttggttacatgctataatggtagctatatatacacaagttatgtggaataactaactaactaactagagttctaaccattaaccatgatccagctaagctaagcatctaattttgctaagaccgcccctcctcccctaaagctaggagaatattcctagcttggagtataagaactgaaaagcaccagccatgagtgctttggtgtatatatttgcaagttgattgacaaaatttatttacagcaatttgacaagtcctacaaggatcttctctcgaacgatatgacaatcaattttgatatgcttagtcctttcatgaaacatatgacttgcatcaatatgtaaaattgactttgtatcacagtacaaaacaacaagttgtatgaaaacacct

SEQ ID NO: 182401 - DNA, 393 bp, Glycine max
  unsure (1)..(393): unsure at all n locations
ctcagcttgaaaatattaatagactcagcctaatgttgatgagaatgactattgcagtcagtatcaaaacaactctccctaaaatcgaaagtgctaaaaagtttatagggttagtgtgagagtgctctcaaacaacttataagtctcttgctaggacattaatgagtacattgaccaccatgaagtttgatgattcatatactatgcatgaacatgtcattgacatgactaacattgcaacaagacttaagaccttgtgaatgactgtgaatgagaacttccttgttcagtttattttgaactcattaccgtctgaatatggcccatttcaaatgagctataataccatgaaagatanatggaatgtgcatgaattgcatattatgttagctg

SEQ ID NO: 182402 - DNA, 450 bp, Glycine max
  unsure (1)..(450): unsure at all n locations
agcttanataataacattgaacgcatgatattaacctcaaatagataataaaaatatttacatcaagtactcagtagaaattctcaacaaaggattttagccctccattacaagggagtagctntcacaaataggagaagggttctagagaaaataccagattacaaagcaatggggatgtctcctccacctctacctccacctctaagaacctagaaaataactctaaaatctataatctacctaaaagttaggacctttgcttccttgctcagcttttcctctgttctctacacataattcgcagtcaattcagacctctttcacgtcatcacgctctttctcaattntttatgtgcaaatcacgcttaaaaagggctttctgacctcgaaggcgtgcttagcgcgagtaagtggtatttggcttattgccaatcttgcacttaacac

SEQ ID NO: 182403 - DNA, 470 bp, Glycine max
  unsure (1)..(470): unsure at all n locations
agcttatagaatatataataaaagaactcttttctattgaagagtctatacatgtttcctttgatgagtctaatgccattcttccaaggaaggatcttttagatgatatttcagattccctagaagatacacatattcatggaaatgactctaaagaaaaagatgaaggaagcaatgaggattatcaagataatggagttagagcaaataatgaacttccaagagaatggaaagcctcaagagatcatcccctcgacaacattattggtgatatatcaaaaggggtaacaactagacattctcttaaagatttttgcaacaatatagcttttgtatctatgattgaacctaaaaatataaaagaagccatagtagatgataactggatcattgccatgcaagaagaactgaatcaatntgaaagaaacaatgtgtggaaactagtagaaaaacctgaaaattatcctgtc

SEQ ID NO: 182404 - DNA, 380 bp, Glycine max
  unsure (1)..(380): unsure at all n locations
gaaagacttgctttcatgattaattattttgntttattttttccccacttgaaataagcatgtataaaccaatccccaatcaaaatggctaaaaattatatcgaccatgctttaaagaaactacaaatgttactggtttcctgtgagaatgtctttatggtgttttattgtcagactctgcttcgataaatttgtccataaaaagacaaataaatgagtttcttctataatttaaaatcaactatgcacaacatttttaaattttctctcatctaataatttgtctaaaaattaagaacatgagttaattntagcttattggttaaaatcaatatattttatatatttntttttattnntctccggaagtacttgtgaag

SEQ ID NO: 182405 - DNA, 372 bp, Glycine max
  unsure (1)..(372): unsure at all n locations
acttatagatgtgaagattgtatctattcattaagaggagtgacttanaattgtgtctaagtcctgcagtcaaattgccctaaagggggtatctttacaaatttattccaaaaataggtctgttttcaaactaattccacaatggtgctattttctacgtaaagtgcatgctaaaaccatgcgaaccaccagctccattggtgcgtttgctgtggctgtgacacgtggcgaagacaccattgccactagcaagttccatggtgtccccagccccattggcgatttctccatgcaagggggagtagccactctaactggcgagttccaagcacagggcacaggcttctcaaccttttaggcttattatttggc

SEQ ID NO: 182406 - DNA, 366 bp, Glycine max
  unsure (1)..(366): unsure at all n locations
tgatgatcacaaaagatgatgacaaaggtgatggcccaaagctcatagatcaatccaagaacaactcaagtgaatcaaagatcaatcaaagaacaactcaagtgaatcaagaacaattcgagagttcaagatgagaatcaagaagaattcgggactcaagacgaaagtttagagtcaagaatcaagattcaaggttcaagatctcaagaatcaagatcaagattcgagattcaagactcaagattcaagaatcaagagaaggcttaatcaagataagtatgaanagtttttctcaaaaattgagtagcacatgatntttctcaaaacatgtttaccaaagaagtgttactctctangtaatcgata

SEQ ID NO: 182407 - DNA, 408 bp, Glycine max
aacatacaacaactcaccaggcggaattcccaccacctcccaacttcatagctttgtaaaactctactacactggaaatactgagctttgtggtcctctctgtacaaaaaatcgcacatacatagaagagtggactgagagtgcttttgttggacactgtgacggtaatatccttggaacatcatagtattatattggaatgggagttgtatctgcaccaagattatggggtatttgcaaggcagcactcttcaacagaacttggaagcgagctattttcattatcttgacccttgagagatctgattatgtgatatatcttaaatgaagacagtacttgggaactcggagctccagttaccagtcgtagtgacaacatatcacgtgtattccaacattaaaatgtaa

SEQ ID NO: 182408 - DNA, 464 bp, Glycine max
  unsure (1)..(464): unsure at all n locations
agctttganntacttttcaatatcgggggtattttatgaattgtnggcagtattctttatgctttcactatctcgtgttacatcaaattgtgtactttgtcacattgtccatgtatgatgttgcaagggatacctttggcattaccatcttcattggcgttttgcttcatcatcttggatggttccttaatgcttacatctgcttcaagactataataatttgaaaacggcgtcgtcaagctgctaacagggttgttacatttctaattatattgtaaagcagattttgtctgctactttgctgttaacacttctctattgatgccagtgaatttgggaatagtgtacttctttttgttatggagaaaatctctatgatgagttgcatataaaaacgtaatggacaatgttataataattgtgtgaaaaacgcggatgactaatttgtgaggacgtatattgtg

SEQ ID NO: 182409 - DNA, 388 bp, Glycine max
  unsure (1)..(388): unsure at all n locations
tttatttcattacaccgccctaattaaataaaggcctacatatataagctttctcatttgttcctataattgaataaaacattgtatgttttatgtggaattataaagttaatttggtgataagaaaaaggagaaaaaaaaatcatgggtttgattctcccactaacaaaaaattaaccattaacaattaatatttttcaataaaaaagaataaaatattatgaaaaagaataagtaataactatatttatattaagtgtgtttggataaataacttaattaaagtcttactaaataatactacatatgttanttttattatcaaagatgaaagaggatcgantngttatatatatatatatatatatatatatatatatatatatat

SEQ ID NO: 182410 - DNA, 384 bp, Glycine max
tccgactttcattgttctttttagggaaatacaacaaggtcgtacgtaacatgtaatcaaaattgccactgaatggccaaccacacatttttggggtagaaagcatattgagaacttatctcttcaaaactatatatatatatatgcatccccaccagcctaacattcaatgttacatattgatacaaaggttcgcgcatgccattcttgttcaatcaccaaaagctagatcctggccccatttatcttctcatgtgacactggaaagtgaacatgcactatcatctgccctacaagattcctcaagctaatccatttagggatcttatgcctatatcctaccatgccactatcctcctctaaactgtttattggttaatcttg

SEQ ID NO: 182411 - DNA, 476 bp, Glycine max
  unsure (1)..(476): unsure at all n locations
gcaagcttatgcgcatatatccttacaatcgttctcttgtcaagacanannaaaatgcacccatatacaatcaaggcagcttcgttacctagattatttacacgtacttccaaggtgtatttgttacttacatcacacacatctccttggctaaattcacatacatgcatactccaagcattttggggtaccaaaaattgcacctgtgcacatcttggtatttctaatacctatacatacacaaacttcatgatgaatcttgactatctacacaataaggtgctacatctcatgccttttttcaagtttttgctacctaaagccgcatgcaaattcaagcatattttcctttgctgactaaaattgtattcaaattatatatatattgtttggaataatgtctttttcacataacattcaacataattatatatatttttttgtgagacattgtgactacacaaaattatttatac

SEQ ID NO: 182412 - DNA, 402 bp, Glycine max
gcacgcccacgacaatgtgaattacccataagatctgacgcgagggatcaatcccaccaaacgggaagtatatactacaaggaagaagcttcacaccgtcagcgcggtagtgagataagtgatgacaaatctgtaaggactgctggattttatggtaaagaggggagaaagagagaaggcttgcgaattgtgacttcagagagggggagtagggcctttctctggtatgagcacaggctctggtgacatgcaatcatgattgaacagcatgttattttctctcattaatgaaagaaataatgcccttctttttaggtggctatagcattcactcaaaataaaatacaagaacacatccgctatagttatgcaaatggggatgaaaccttgctgaaaattgcc

SEQ ID NO: 182413 - DNA, 444 bp, Glycine max
  unsure (1)..(444): unsure at all n locations
agctnggaagtagaaaccaagcatggtttttatatcttgtcttccatttttaatttccttcacctttagcagngcagcttggtctggatcatttgcaagccccaatgggtcaaatggaccacctggatgaagtttgtcttcgaaattctgttcaaaataggttacaattagtaaataaatcaaatcattaagcgtgcgaatgggattgttcatgctccacaaacttgcttttgaatgtgtcaaatgggattttgcaggaaaaaaaaagtttagttgttccttataatcaagttggttataaggcatttaactaattacgaaaaaatgtagcttttgtgttgggatgcgaattttatgccacgctctactacaaacttccttatgagattaaatttctaaacgtaactcagcttcaaactcaattttagccaaatatcaagatca

SEQ ID NO: 182414 - DNA, 355 bp, Glycine max
attcgaattaaaaaggttgctcaatgatcaatagtggagtttaaattatgacaatgacaaattgacaatactcctctgaaagggagctgaatttgcatcgtgggtgggaatcataatgagggctaagctctaattattgtctaatattagcactcatatgtttaccaacccaactgatgcaatgaaactatgaaaggttgaaaccttgaatactttcagacattattgtaacttttttacatcccagcctttcctatgtagttgtataaaaaaagaatatatataagaatcgaagatagtactaaaaaagttaaaacaactaatatattttattccacaactgagttagattcta

SEQ ID NO: 182415 - DNA, 404 bp, Glycine max
agcttgaagacaagactgtacgaggtatctttcttgggtatagcaatatctctaagggctatcgtgtctacaacttgcaaactaagaaacttgtcatcagtcgagatggtgaagttgatgagtacgcttcttggaattgggatgaagaaaaagtggagaagaacgttcttatacccgctcaactacctcaagaagaagctgagaaagaatacccaggtgaaccaccttcaccttcatcacaacaacaagatcaagaactatcatcaccagagtctactccgagacgagtaagatctttggtggacatatatgaaaccataaacttggccctacttgaacctggaagctttgaagaagcgtcctagcaggaagcttggggtccggctatggaagaagatatacaa

SEQ ID NO: 182416 - DNA, 471 bp, Glycine max
  unsure (1)..(471): unsure at all n locations
agcttgaggcaactgtttttttagttttttcttattccaaaattagttnttccttatattttagatgaatatgaagctatcagttgctgatggtcatctttgtaacatgggaaggatgattgaggaaatggagagtaagctgaggaactcactagatcaggtacttcttgattatacaggattcaactgcgtgcttgttgtatntgagatcagcttctttactttttgttctttgatggggaagggtttgggtatttatcaaatttgatattcagttcgtttgtgtctatgacatttcaaactataaggcatgttaatgcatgttacaggttaaattntaaaacataaaaaataagatatttgatgaaattcttgtggtggactatatacaaagtttgtaacatataaatttgtaagctttgtctggttgacatgttcctttgtaccccattctngaataattatactttc

SEQ ID NO: 182417 - DNA, 372 bp, Glycine max
  unsure (1)..(372): unsure at all n locations
ttctgactatgtccactccactatgttgatatctcagccctttntttctctatgggtttcctctgtgccctcttcactcgccgcaccctctccctctaccttgctcaatgccctcattcttaggtcgtctaccaatttagaggaactaaaactaaaatttgttaattttaaagggactaaaaacatgttttatccttttgatctatatattaatgctaatgtggctgtcactttttttataattacttgaaactcttgtgcttgataccttgagcagcatgttaaagagatggtgntattgttctcacatttactaaacacttgacttatgggtcacatgaactttaattaattgacaaatgtgtatatata

SEQ ID NO: 182418 - DNA, 373 bp, Glycine max
  unsure (1)..(373): unsure at all n locations
agcttaccccggtgacgaaatcttcttctatctgatcgcgaaggcgatcgcggtgtactaacggngggtggtctcggccgaagcgcccttctatcagtggctcctcaaagggaatcagaaggccgtgtcggccgaagcgaaggaaggcttcaagctgttcgtgggcaaggcgaactgcgtcgcgtgccatagcggctggagcttcaccgacggcagcttccacgacatcggcatcaacgacgaagacgtgggccgtggaaaattcctccgcctcacgtcgcagcagcacgccttcaagacgcccggcctgcgcagcatcgcgctccggccgccctacatgcacgccggatcggagaagaccctcgagcaggtg

SEQ ID NO: 182419 - DNA, 302 bp, Glycine max
  unsure (1)..(302): unsure at all n locations
agcgccgattcagacaaagcccccgaatcttaagaccgtatcagtaaatacttttccgacatcgccacctccaagagtgcccattggagacctatggataccatgatgcctccacatttncgacagaaacgggctccgtttcaatttggtctcgcgccaaattaaaaaaggcatagaatcgccgcgatcgaaacggcatgactatgcccattccggaggtcgagcatggaattcacttcacgtttcaaacagggtattgcgatgggactatttaccgctggcctgatgctgcgcggatttgc

SEQ ID NO: 182420 - DNA, 406 bp, Glycine max
agcctataagaacaaaatcgccttattcatttccaaatatgcatgtgaattaggacgcatcaacaagaatcaagccaaggctattgtgcaagcaatcaatggggcaaaacacaccaaatgattataatgatggatggctcaaattctcacaaaggtaaaatcatcacttttaaattgagctttcaaaactatcatgacatgtaaagaagaatcaaggatttcaagtcacaaaatgtcaagaacttttatattcaaaacaattacccatttcttgaacatatcctataattcaaagaaaaacatgcatagtcgtacgtgcacacaaaattgaacccaaatatataactgaatatcgaccaaactaacaacttttaccaattaacacaacttaacaatttacaaaacc

SEQ ID NO: 182421 - DNA, 408 bp, Glycine max
  unsure (1)..(408): unsure at all n locations
gtctctgcactgattggtaaatctgttccccaaattcctgaaaaatgtaaagatccaggtacattcagcataccttgtattatagggaatagtaagtttgacaatgccatgctagatataggagcttctggtagtgttatgcctctgtctatatttaattctctatctctaggtcccttgcagtcaactgatgtggcaattcatttagctaatagaagtgttgcgtatcctgttggtttcatagaagatgtcttagttagagttgacgaactgattttccctgttgatntttatattttgaatatggaagatggattttctcaaggatcagttcccatcattctaggcagactctttatgaaaactactataactaagatagatgtttatacaggcacactatccatg

SEQ ID NO: 182422 - DNA, 370 bp, Glycine max
  unsure (1)..(370): unsure at all n locations
ctataatctgcagaactcgctaagcggcagtccactttttgcgcttagcgtgacaattcacactgaacgcaactccctcttgactaatgctcactcaacacactaattctcgctcaatgcaattccctcttgggttaaaatggcgcttaacacgctcactcagtgcaattccctctgggggtggaattgcacttattgcgccctttgcgcttatcgagacatcaaaaattttattttcaaaatcccaacggtcagactatggagaagtgtcttaagaacctccagtcaaaaatttgagaacatccaacagttaacgaatccgggatcacgatcttatgtaaatanggttaaggtaaactttgaaatctca

SEQ ID NO: 182423 - DNA, 273 bp, Glycine max
gtcacctgcggcatgcagcttggttcaggtacttacgccgtgaagtatttttatcgatgaagaacgaatgaagaacgtcgaagaacggttgaaccctttgcgaatttctccacggaaaacgttcacgaaccttttcgaaaccgcctcggtttagtgtttcttcacggaaacattttttccaatcaatatcgaaaaaaaagaataggccaaaggggtgaacccctttccttttacatttctctcccttttattaccaaaataggggaggtggtg

SEQ ID NO: 182424 - DNA, 361 bp, Glycine max
ccacaaccatttttatcacaagctttctttgtagttctttcacagcttaattttcttggttaattgcttgggagatcctgatccttctccaaatttggttccatacaaaccccaagaacacactaaacgctttgattcttatcctcaaaaaacaacacattttatcacaacacgcgcacacttttttgttaaatatttgggtgctcctgatacttcttctaccttgatggcgctcctttgattccctccccggttttgccgtttctccattctgatggtggggcttcctaactatgcctatctttattcatgtccttgtccatgtcacatcattcttcttgcatgcgatggatgcccccac

SEQ ID NO: 182425 - DNA, 398 bp, Glycine max
  unsure (1)..(398): unsure at all n locations
agcttgagatgaggaagtgttgaagggtgtttctttctgcntttattgtngaccacagagtggtacctggagatatgtctcgggggtcatgagaccttggggacgtcaggtggggtgctattgcccaaaaccaagcttgaccaatcccgacccaacccgggcatagtcggtcagtgagaacctgtgatgtacctaatcaggcgagctcctgtcagtcaacagataaaaggaaaacaagaccacaaagcaaggaggcttgtggtggctggccacctgtgaattttgtataatatgtggattgtggcctctggtaatcgattactaagggtgggtaatcgattacaaggcttaaaattgaagacaggaggctaagatggtctctggtaatcgattaccac

SEQ ID NO: 182426 - DNA, 320 bp, Glycine max
taccccggcaacgacgccaaatttgatcgaggccgtcctttattttataacattccaaatgaagtatctacgaagtgatcctatgtcgtcttccaacgaacaatggtcaaccaaacgctcataacatatagtaatcaaacaagtacgaattgggggtgttgtttgttttttgtaattaaacagcaaaccaatttgaattacaaaataatagaattaaaacatgttgtttccccttggctcacaaacaagtctcttatcctatgttacgagaatttatccttaatcagttcaaccacttaatctaaccctcaattaaatac

SEQ ID NO: 182427 - DNA, 407 bp, Glycine max
  unsure (1)..(407): unsure at all n locations
ggatcttaagcacctgagctgcaacntggncaaacataggtggggattttacttgaagtggagggtactgtcctttaagaaatggagaagacagaactcaaatgtgatgatcacaatgcatagctgcggtggagtctgagagggggagaaatcatccaaggagacatgatgggccaagaggaagatcataatcgcaaccgcgtttgcgacgagacatgagtaacatacaatgttactattgcggtgagaaaggcaatgtgccaccgacgtgccaaccaatgaaggacgacttgtaaaatcgatagaaatgacacagatgggcccacttccagctatgttgtaaaagtgtgaaaatagaatgattgtcttgcaacaaatattagccgctaacaacaggggaaaatttt

SEQ ID NO: 182428 - DNA, 402 bp, Glycine max
  unsure (1)..(402): unsure at all n locations
agctngccacccagctcgcccaggcgatctgttttcttcctccagaagcaacaaccttctggaggaatcttctggagggcccaagtgggcctgattactatttgcacccccatttttacataagtacacccccctgactttgtattggtgatttctttttctcaaagttaccaaacttacgaatttcgtaacgatacttgttttctttccgtaatgttacggaaccttgcggattacataatcatcccctttttgacttacggaatgttacggaacctcactaattgtgcaacgatgcttccttttgatttccggtgcgtcacagaaccttccggatcgtgcatcaatacacttcttttgatttccggcatgttccggactttacaaattgccttatgatgg

SEQ ID NO: 182429 - DNA, 485 bp, Glycine max
  unsure (1)..(485): unsure at all n locations
gatccttaagcacctgggctgcagctccactggacgggagagatgtttttgcttggtgtgaagggggggcacctgaccaaattgtggctcacccaagcagatatttgctctgttttttatattattttttcatccttatttgttacggttacggttacggcgatgaacaaattaaactaatgttgtgggcttgaaattgtctgtcatgtgcgtgtgtgagaatatggggtgcaactgtgcaaggtgggggaagaaggaaatgaacgctgctgctggcattgatgaataaccaggaaatctttttgagagtgagggtaagagaaggtanaacggataggtgttgcttatggtggttgaggtgcggcgtatggaataggctcgggctcaactgctacgatttgcggagatgtcggagaacgtgactaacttaaaacctcaatccctaaattcattatatggtccacaatccctaattcctaattatt

SEQ ID NO: 182430 - DNA, 370 bp, Glycine max
  unsure (1)..(370): unsure at all n locations
agtccatacaggagatcaagcaatgatttctaaataactcttaaaatggaattagttcttcctttgtttgaagcatggtattcttctttttaagtttgaaaacttctcacttatcttctttccctagcctagattaaatattntctgtgagaagggtcttcccaccatctgaagctatatagtagtttacaaaaatatcattaattcctaaaagagaaccaagaaataataaaacagagtccaaagttttccatgtgaatctggcatacttcacttggcaaaatgaacttaacccacctcatacctacgtgtttgtgatttgataatcaagtgaattgcaaacaaagaaaccgcaatgaccttccagttt

SEQ ID NO: 182431 - DNA, 461 bp, Glycine max
agcttgttattaaatacaaaacaaacttattattatgaaaaaattgacgttaatgacgtaaattattagtaacacttaccactgcatgtctcaactagtcgacatcagaccttgcagatgtcgacggtgctgctgcctccgtgaccggacggatatctgtgtctggatcctgaggggcaactctgggctgcgtagcatgaccatctgcccgaggatctgatggctggcccggtgtcatgaatggatgcgaaatgcggaagaatcagtccatgtagtcgctggcacactgccctggcacaacgcagatgtcacctgctacaaccatatggtccgaatagtgcatccacctgttgtgtatatcatcagacggcacccatgaatcggcaggtggagcaggaatggtctgagtgtatcaaactgccgcatgaccctctttggtcggaatatagaacaatgggccc

SEQ ID NO: 182432 - DNA, 378 bp, Glycine max
tggaagattctaagaacagagcttatctctctccctctctaaagctaagtcacctgcttagatgagaagcttgagcttaactacacacaccctataatagctgagctcacttccatgccaaaatacatgaaaagtgcctactacaaagactactcaaaatgccctgaaatacaaggcttaaatcctatactactagaatggcccaaatacaaggcccaaaagaaggaaaaaacctattctaatatttacaaagaagagtggacccaaccttggcccgtgggttcaaaaatctaccttgaggttcatgagaaccctatggagttctttagtagctctagcccaatgctcttggattcttctatctcaatacccttgggg

SEQ ID NO: 182433 - DNA, 450 bp, Glycine max
  unsure (1)..(450): unsure at all n locations
agcttaacatcggtttgaanaatgtggtggtatttttgtaaataagctaacttaattaacattggttttgaaaaaaccgatattaactagttgatgttaacattggtttttcctaaactcgatgttaacattaatatcttaacatcggttattgaaaaaccgatgttaacatcaactagctaacatcggttatttaaaaaccgatgttaactctagaaagttaacatctgctttttaaaaaaccaatgttgacatcagctagttaacatcagttatgtttaagaaaccgatgttgtctcattcataagttaaaacccaaaaatccatcttccccccacgcgattgtagatgcaattggctctgatgttttgatgatgatcatgatgatgtgttgaantgaggcaaacgggctcttaagattaaaatcacgacaatcttcagattacagtc

SEQ ID NO: 182434 - DNA, 407 bp, Glycine max
aagaaatgcagcaaccggttaatcataaatgttcctagggaatttcgagcattgaaccctctaactctgttatttgcacattggcaattttatgaacaaaactggcttctactttagacgtagaacctatctcccatattgtattttagaacctttatcttctaataattgctgctttaagtacaacaataacaaccgagccttttcccactacccactaggtgaggttggctatgtggatcaacaacaccattacattctattatgaatcatgtctatagacaaatcattgaccgccaaatccttcttaatgggtttgcctacagtgtttctcaattcttctctagcaatagggttctccacttctgctccatctgatctactctccacactcgtcaaatatatct

SEQ ID NO: 182435 - DNA, 282 bp, Glycine max
  unsure (1)..(282): unsure at all n locations
cctatacatgtcgtaattttggtatgaagttgtatcaatttttggtatatgaggcaaatggtcccaaatcacgtcacttgtatgtagtcattgacgactagctttatctgatttaccttgataagaatatacttgtgttttattttttcagccatgtgcaagagtggattggacatgaaattntatagaaatgtcatgtgacctaaatagtgataaactgattatttcattatttatgaaatggtgaaagcaagtttcttagtaattataatttactagtac

SEQ ID NO: 182436 - DNA, 416 bp, Glycine max
  unsure (1)..(416): unsure at all n locations
taaaagtctcacgattgtgacgtgctcatgcaacaattgttagtcgtggctatacgagacatcttgccaaacaaagtcaggttagcgataactcgcttgtngcttttcttccatgctatatgtagcaaagtcattgatccagtcaagtctgatgagttggaaaatgaggccgcaattatactgtgccagttggagatgtattttccccctgctttctttgacatcatgatttacttgattgtgcatctggtcagagaaatcaaatgttgtggtcctgtttatctacaatggatgtacccggttgagcgatacatgaagatcttaaaagggtatacaaagaatctatatcatccagaagcatctattgtagagaggtacattgcagaagaagctattgaattttgttcagaatactt

SEQ ID NO: 182437 - DNA, 141 bp, Glycine max
agaagaaaaataaacgagaagtaacacgaaatcacgacttagccttgttaatgagagtgactcgtcagatgcttttgatcgagtggtgatgcttagtgtggaaaatgtttgtaatgaaaactgtagtttgcaaagtgaaac

SEQ ID NO: 182438 - DNA, 394 bp, Glycine max
  unsure (1)..(394): unsure at all n locations
agtgggacattactcttaaagcaaaaatggcatataacctcctcccataaatacaaacatcaatgtaaatttagagcaagcttatgcgcatgtttccttacgaacgttcacttgcggaagacatcctattaaccgaaaaaatgcacccatatacaatcaaggcagctttgttacctagattatttacacgtacttccaaggtgtatttgttacttacatcacacacatctnctcggctaaattcacatacatgcatactccaagcattttggggtaccaaaaattgcacatgtgtacatcttggtatttctaatacctatacatacacaaactccatgatgaatcttgactatctacacaataaggtgctacacttcatgccctcttttcaagt

SEQ ID NO: 182439 - DNA, 295 bp, Glycine max
caactactatagactgttactttcgatttaatttttttttaggagcttaagggagtgacgttgtacaagggcacctatgtattatgaaactatatgccctcctaccacttttaaacttatcctataacctcaattggaaatactgttcagattgattatggactctcatatcataagcaacagtaacaagctcaatgtagccaacattcttgttcaacaaaggaaacaggactatgcctttgaacaatgttgtctgacaattgagaattagatgtgctaaacatttctttaatgg

SEQ ID NO: 182440 - DNA, 381 bp, Glycine max
  unsure (1)..(381): unsure at all n locations
agcttcgctgggaagaccctcccgctctcttatcctagggtaagggtgcgaaattccatcctatgtcaaggttatggcaaacagtcgatatttggctcaaaaggcccatgaatggcggatcataatgtatgtcaggatgtctgtttggccaatggctcatagagaagggaatgccctaaatcatttccatgaaacgtatattatgacaattggaaactcatgcaaaattaatcatagcacacatccatgtggacactcaaatatgaaaaattngtggccatgcaaacactatggcttagggtttgtttccacatccaggccaaaccagtgtttcaaggattgctcttctatcaagtcatacaaaacatccaagtccatttt

SEQ ID NO: 182441 - DNA, 338 bp, Glycine max
cgaggataaataacgaacctgtagctcattccagcgggggatgggtgaaagaagctcttctctcaacatgtcatacctcatatttagaactctaagactcaagtgggtgtcaatctgatcgagagacactcctatgaattgtttaattttgatttggacagactgacaagaggaaaggttacccacataagggcttaagtgacctgaaagtccatcgcctgaacgaaccagccagctactctttgaccaaccctgtcacatataacaccattccaattgctaggacatgaattgtcgctccaagaagactatgggctaatattctctttactcatttg

SEQ ID NO: 182442 - DNA, 400 bp, Glycine max
tcacactcgagatatctagttctcgatgaggggtgttcatcttatatctcacattaactaatgataaagcaaaaagtaatgtatataagtgggggtgcaaccctcatctcacaagtcgggtctgaaggaataaattaggtccaaacttaaattgtaaaattgtgtcccagatttatatgaagactttaggaggtacctatgtctttcacttagacaaaaatgacgagtcaggtattgatactcatgaccattataatcataataaagcctctcccttagaaatatcactagttattggagtatagctttactcctatgtatcttcttatttttcaatatttggacagcactagcttagctatgcactcctgtcctggttatatgcctttctaactaacat

SEQ ID NO: 182443 - DNA, 463 bp, Glycine max
  unsure (1)..(463): unsure at all n locations
agcttacatgatcagcttctacccattgttcttcatcctaactggtaaacatcccagtgcttaggcagctgtctcactctccccgaacgacgtcgttgcatggcttcgtcgtccacgttcgtatcacacaccaaatcccgttccacatcctttcttgtcaattcttagcattggcacaattttctctccttgtgacgttggaatgatcttgaaaaacatggtccactctgaataaataccatgtacaagataatacctcatattatatatgatgttattggccgtaaatagcaacgtggaagcctgtccttccaaaacatcattaaacacattaaattgtcttaacacgttataggcctatttgtttaaacttatttgttgaaaaaagtacttattttaataaaataagtagctttctatatttntagtgttcttgtctaaactacttctgcctaaaaaaata

SEQ ID NO: 182444 - DNA, 126 bp, Glycine max
tctataaatagaagcatgtgtaacacttgttgttactttgatgaatgagagtcctgtgagacacaactcaaaggtcaacttctctccctttttcttcctttcatttcgggcgtcctcctctctctt

SEQ ID NO: 182445 - DNA, 378 bp, Glycine max
agcttattgtaatcgattacacaattctttattagacaatgagtgatttttcaggagtgtttagtttaatcgattataaggagatataatcaattacttctcttttaaaaatgtgttagaagtgatcaagagtacttcaatcgattacattgagaatctaattaattacattgttcttgaaagttttctagtttttgggaaaaacactttaatcgattgaaatgataatataatcaattacttttttgaaataatcaattgcattgtatatcttgattataggcggttataactcatttttctatagatccccacattgtgttctcactttaataacttctaacaacttctgaacggcgtagaattaccagctgatat

SEQ ID NO: 182446 - DNA, 451 bp, Glycine max
  unsure (1)..(451): unsure at all n locations
atgctcgccactataatatgttaatccttcaggttgtttcatataaacctcttcctctaaatcaccattaagaaaagttgttttcacatccatttgttgcaactcaaggtcaaaatgagcaactaatgtcaagattatacgaagagaatctttcttagatattggagaaaaaagtctctttgtaatctattccttccttttgagtaaatcccttagcaacaagtcttgccttgtatctctcaatgttgcctaatgaatcccgtttggtcttaaatacccatttacatccaatgtcctttgccccattaggcatctctacaaggttccaaaatttgttactgtacatggaattcatctcatccttcatggcatcataccataaatntgactctttacaactcatggcttgatcaaaagttttaggatcatnttcagttacaatattatagtc

SEQ ID NO: 182447 - DNA, 331 bp, Glycine max
cttaaccataactcgcctgtgccttttcttccatgctatatgtagcaaaagcattgattctgtccaagttgatgagctggaaaatgaggccgcaattatactgtgccagttggagatgtattttccccctgctttctttgacatcatgagtcacttgattgtgcatctggtcagagaaatcaaatgttgtggtcctggttatttgtggtggatgtacccgattgagcgatacatgaagatcttaaaaggtatacaaataatctatatcattcagaagcatctattatgagaggtcattgagaagaagcattgaaatttttctaatacattg

SEQ ID NO: 182448 - DNA, 493 bp, Glycine max
  unsure (1)..(493): unsure at all n locations
gcgatccttgagtcacctgcggcatgcaagcttatnggatgcatgctagtggttcgattctttattggtgtatggngntaggaactctagcattgacnaatgtccttgttccttggaacttgatagagcagggctagataactgtagtgctagacataatgtgtagggttctagtttttattatgttgcgcttataatgctgtttaaattaggctaagttcaacaagagacatctgcgaacaaagcttagtttaaattagtccaaactcacgagacatcggtgttggtatttctgtcctcagcatataacacatgaataatttcaaatagagaaaaaccctaattgcatcaactatcctcgtggaaggacccaacacttttacttattctggttcaaactcaattgttcatgtttactatttctttgatcacaatagaatatacctcttgttaaattcatgatacttaattctttttacaaacagttgcattt

SEQ ID NO: 182449 - DNA, 397 bp, Glycine max
  unsure (1)..(397): unsure at all n locations
agctngcatctagnctgatgtcttagggttattctctctaggcgngatacatccttgtttgtgcatgctacaccaaaatttatcacctacattctggtttatgttaatgatattattataacaggcagctcctcctctgcagtccaatatgtgatttctaaacttcactctctgtatcctctcaagacctagacaccttacacttttttctatgcatcgaagccaaatacaccactactggggctctttctctatctcaattccaatatatcacttgatatttaaccaaagccaatatgcttaatgcctaacccataaagactcatcttgcgcctggttcaaaactgcatatggatggtacaaatgccttttctgacccaaatctctacaaatatgt

SEQ ID NO: 182450 - DNA, 298 bp, Glycine max
  unsure (1)..(298): unsure at all n locations
acgctccctatatcgaaggtggactccatcgaccctcaagatgcgcaacaactaatctcatgcaagattgtncacatcttttgccacccgaaaatggaggtctcgggttcccacaactaagaaaaactcgccaataccctcaggttatctgagccttggagtacatttatggaagagcttctagattgtttataagaacttaaatctgctaaacatgccatccatagactcctcatctttcatgccgaagctgccataacgcctactcaaaggcatagcaatccttagattgacatct

SEQ ID NO: 182451 - DNA, 313 bp, Glycine max
agcaatgatggcccgagttattttggttttttgttcgaacccgggatgggtttaggcaaagacaaccgcggcataactagcctgataaatgccaaaggaaatcgtgggaatgttggtttaagctataagcccacctcggcaaactgtaagagaaccatctcgggaaggaagagcggtggtcaaagctctcggttgatacaacaaagtgaacgaagcccgccctgccacataaatagaagctttataagcgcgggtctgggagacaaaggtcaagtggtcgcgggatacgaggatgatggtcctagtacattgg

SEQ ID NO: 182452 - DNA, 457 bp, Glycine max
  unsure (1)..(457): unsure at all n locations
agctngaagtaaaacaaagatggtgcaattttctgctgcattntgcagcactttaacgattgacaatggcgtgaagaaacaaacgactttaaagtcgttgtccttcctacgacttcactattggagttaacggccaagattgaatcattgaatggcgcggattgaagcacgagacatttgctgaattgttgaagtcgtggaataccacacgacttcactattcatgcaattcattattttatatatatatatatatcctaatgaatttacagtttgcattcttaagctttcttataaatattatactttcagcatatattttgtatgtaacataaattagtgtttagttattattaatttaggatnttgttagataaactattatacactgtaaattaattctggtaaatcattattttatgtgttagtatattagtgtgtagtattattaacttac

SEQ ID NO: 182453 - DNA, 316 bp, Glycine max
tgcaaactaagtgttcaatgttagtagaggagaatcctttatgctgtttcatgtaaacctcttcctctagatgaccattaaggaattccgttttcacatccatttgatgttactcaaagtcaaaatgagctactaatatcataattactcgaaaggaatctttcttagatacaggagaaaaggtctttgtgtaatcaattccttctctttgagtgaaccctttggaaacaagtcttgccttatgtctctcattgttgccttgtgagtctttcttggttttaaaaacccatctacatccaatggcttttacaccact

SEQ ID NO: 182454 - DNA, 397 bp, Glycine max
agcttcggaagagagtgatgatgttttagtctcttaggcagagcttgaaagagcccgagtagtctaagagaagttcaagtccatagccatcaaagtctgaaaagagcatgatgaactaagggacgtcaatatggccaccgctgaagccttggaacgagaaaccaagatggcccgataggaagaacacgtgccagcaaagttttgaggggctttatagggcagcaatagtaagctcaagctccgaagaggtgaaaggaatcatcacgggtcaaaggcatgatcttaaaggacgagctaaaggcttaccttaagtcgaaaagaaatatgtcccaacagttaagcgagactgaagggaatatgtgggccatcatcgatgagtgcatagagaagctatatc

SEQ ID NO: 182455 - DNA, 311 bp, Glycine max
atgaattgaatgcctagcgctgttcatgcatccttcatcatcaaatcttattcggagccccatgaattgactgtcgttcatgcatcctccaccattcagttccgagccttacgaattgactgccaagctctgttcatgaatcctctatcatcaaattatattcgaagccccatgaattgattaccattcatgcatcctccaccattgagtccggaaccccacgaatagatagcctagcgttgatcgtgcatcctccaccatactatatccagccccatgaattgattgctgtcatgcatcctccaccattg

SEQ ID NO: 182456 - DNA, 401 bp, Glycine max
tagctaacaaaaggcatgcgaagtggttgttattcctagagcaattcccttatgttatcaaacataaaaagggagaaggtaatattgtacccgatgctctttttcggcttcatgcattactttctatgcttgaaacaaaattgattggtcttgaatgtttgaaaagcatgtatgaaaatgatgaaacttttaaagaaatttttaaaaattgtgaaaaattttcataaaatggtttctttagacatgaaggctttcttttcaaagaaaacaaattgtgtgtgcctaaatgttctactagaaattttcttgtttgtgaagcacatgaaggaggattaatggggcattttgggatccaacagactctacaaacattacaagaacattttattggcctatttgaa

SEQ ID NO: 182457 - DNA, 470 bp, Glycine max
  unsure (1)..(470): unsure at all n locations
agcttgtacccaccagtactatgatagcctatcttattcatttgttcaccctttttgtccagttttcttcttaattgatttggaacatgcttgaagcacaagcatccaaacacccttaggtgcttgagacaaggcttacttccactccaagtttcttcaggtgtcacattctctagcctctttgttgaacatctgttgagcagataggctgctgttgacactgcctcaccccaaaactcctttggcaagtgaaaattccttagcatacacctggtcatgttgactatggttctattgagtatctcaaatacaccattgtggtgtggtgcatatggaggtgtgatcttatgaatattaccctcatcctcatagaatttcttgaattcatgtgatgtgtattcactaccaccatctgatctgagtctntgaatcctatttctactttgtgtttctaccatcacctttgaatc

SEQ ID NO: 182458 - DNA, 356 bp, Glycine max
  unsure (1)..(356): unsure at all n locations
agatcttattttcctgcgcaagaaagatatgtcaagtaagcacaaaaattcaaaaataagccacaattatcaattgagctcaatcatttgccttagaccaaaactaagttaaagtgggaaaataggagtcaaagagagggtcaattagcttaaaagaatagaaaaatactaaactataaatgatcaatcaaattcccctacactttatcttttgcactcctaggccaaacttanagaaagactaagacaaagaaatcaacctaaaaataataatcacaacttaaagaaggtatgaacaacggtcaccatattttcaatggatcctaacaatcggataaaatgagagagataaaaat

SEQ ID NO: 182459 - DNA, 454 bp, Glycine max
  unsure (1)..(454): unsure at all n locations
attcttcttgttatttatgtggcttcttctatttctaacaataaggtttgagaaatctttgatgtctagtggagactgtctttttccatgcttcatttgcatgtagcttgttttaaattcacaaataggacatgtgtggtgtcccttaacactatatccactcaaattttcatatgttggaaagtcattaatggtatagaataccattggacgcaacttgaaggtaatattgtgattaccatcacacatgaaccctttcctcccacaaatttttcaagtgctcaatcaagggacttagataagcaccgatgtcattttctggttgtcttggacccaaaatcatcataaataacataatgtagttttgcttcatgtacaaccaaggagggcatgaattatgatttgtgcttaatntaccaaaagggttcattccatcaatagcaagtccaaacct

SEQ ID NO: 182460 - DNA, 191 bp, Glycine max
gaatcattccaaacttgtaatactttgtgctaaaactcttaatgggaaatctatgttctaacctcaaccctttctaagaatgacccactttagtattttgcactataatcttggaataatcctcaatagaagtgagagattcagctcctaagtggaatccctcttgtgaggagaaaatctatcatttggct

SEQ ID NO: 182461 - DNA, 388 bp, Glycine max
  unsure (1)..(388): unsure at all n locations
tgcagcttaagaaccacaatagtagtggatcttttcatatgacaaacttatttttatgtatccttatgatatatcaccactaaatagcatggatatcggactaatgttntcaaactaacatcatacctcctagaatagttatactttgacccgaaaatttctgaaagccaatacaccacactgacccctcaccctgcaacacacaggttaatgtccttgtacgagtgagataacatgctaaatagacaaattagagaatgtgttatagtaagatgcatagaaaaaataaaggcagatatctagtcgatgcagcagccaaaaatgttcagaatagataaccggagttgctttgagatgtgtgctaaactttcccaatgataaaagctca

SEQ ID NO: 182462 - DNA, 362 bp, Glycine max
  unsure (1)..(362): unsure at all n locations
ccacgagatatccaacaactcaggcacactgttcaatcaattgagctggacaagctaacttctcataaaatttggagattgcactttgcacattgcatagtgtntacattactgcttaagagcaatgagcaatcactgtgagacgcttaccgattgataaagttgcaaatctctgccagaggcttcaatagcaatgcttacgggttgatgagcgacagctttcttcaaggcattctcatcatacggtggaacatcctcgaacccatcaatgttcacaaccttggcatctttctgcagaagtattatccactcaaatcattaaaaacaaatcaaatgttaagtctaataacatactagtatca

SEQ ID NO: 182463 - DNA, 446 bp, Glycine max
agcttgacccagagatagtcctggagttctatgtttatgcttggcccacagaggagggagtgcgagacatgcgttcatgggtgaagggtcagtggattccctttgatgcaaatgccctcagtcatttcctgggtgacccactatttttggaggaaggccaccagtgtgagttcagacagaagaggaacagggctgacgggttctactaggaggccattgcccatctgttatgcacaccggggcaggatttcgcccggaccgttgcagggaggcgggtgtggattatgcgcaccagcacgaccactttgacccacacgtggatgacactgctgctctcaatgtcttgctagcgacataactctgactcccttgctaactgccgtggtgatgccacctgacctgatgagcgtcacgggccatggatactgacccttatctgtatagtt

SEQ ID NO: 182464 - DNA, 309 bp, Glycine max
aaaacaactgagggaatggaaatagcctcacttttttttaccaagggacaggaatatgccgggtagaaactgggatcagtggggttttccaaacaactgacatcaaccacccgctatcatcaggaaacttactactaacagactctgcgtcacgtaaaaacaaacccaacaggggttggtgggtacccttgatttaggaacgaatatgctgtatcatccaggggtatcatgcagctaaatgacagagtaatgcttgtaacatacaagggtacatacgttaaatgtcgtgtagagcttgatcatacaatg

SEQ ID NO: 182465 - DNA, 473 bp, Glycine max
ggaccttaagtcacctgatgctgcagctactggcagagagacttgctattcttatggatcaagccggtgaggaaagaaagttgcaactgagtgagttatatgaaatccgcctaaaagcctatgagaatgccaagttctacaaagaaaagaccaagaatgtccatgatagcatgatagttaacaaagacttcgtgggtgggcaaaaagagttattgtgtaattttaggcttaaactcatgagtggtaagttgaggtctaagtggattggtccttttgttgttactaatgcttttccttatggtacagttgagatcaaaagcgactccacaaacaagagcttcaggtcaacggacatcgacttaagccattcctcacgaacccttttttagtggacgtagtggtggaagagactttttactccaccctactctgtctccaccatgagttaagggagttttctttctctatctcct

SEQ ID NO: 182466 - DNA, 464 bp, Glycine max
  unsure (1)..(464): unsure at all n locations
agctntaccatctggacaatttcctgtcttcttgcaactataaacaaatcctgcggatcctgaaattaatggaatgccaatagaaattatatgcaaatcatagtttattctaataaattcaaatatgagaatttaataatctatattgatcattccatgtgtactaacaattatggagtaaaattagtagaaaaaaaatctttgtttaaggtaaatacatggatggattaagttattctctcgctctttcttntgtcttgctttgcctctttcctctctctctccatttgttctcaaataattnttttacataaaattcttatgtatcctccacaagagtcaattctgggataggatcattatgaacctgaagggtttcacttaaagaaattaacaccttgaaatttaagagtcaagcaatcaggtcattggtaagttaaacaatattacccagtaatcccatg

SEQ ID NO: 182467 - DNA, 456 bp, Glycine max
cggatcttaagtcaccgcggctgcgcttgagggttgagagaaactttttttcttaccaaaaggggacaagtgatgatgtatcatgatttgatgattcaaaataagaatccaacatggcttcagaaaatcatatcaggctcattttgcttcatgattaatacgatattgtttcatcaaacaatagccttgatctcaagtatttcttcatagatcaagcccttgccttataaatgaaagtgatccaagctcatccaaggcacactgtaatcgcattaccaactacactgtaattcgacttaccaattgtgtttgaatagtgtgtaactcgattacacactcatactgtaatcgattatcatagactctgaacgttgagaattcaatatttatatgaagggccacaactgtccaacaaaaacaactcgtgaatcgactactctaatttttaatccatta

SEQ ID NO: 182468 - DNA, 396 bp, Glycine max
  unsure (1)..(396): unsure at all n locations
agctnttctttacaatgagaatgtctactgtctatcaatnccaattgcaagttcacattcttgttctttctttgtctagcatgcatatttgttcaaactcatgaaaggaaacacaaactccatcacaatcatgcactcaatccaaaatacagcatacaacctttttcacaaaataagtaactgcttcactgccataccattaaaaataagtcaaactgttcaaaatgcttcaggatgagcaaactaattactcataaataaaactagtagtatatgtagacataaaggaaatattgtatgaaaaccacaattataataataaatcacaaagcaaaagtatcatcaggaatcaaaattcttgtgactggtcctgtgtctgaccatccttctcatctg

SEQ ID NO: 182469 - DNA, 367 bp, Glycine max
  unsure (1)..(367): unsure at all n locations
tcagtcttcatgtnttttcatgttgctccccctatctcttattttttttagtaataaagatatgagtgtgtttttccccccaacaatctgtatcaaagttgatcttgcggcctggtgatcagagagaaaagagtattgaagaagcttgaggaagttgatggtgaatctgtgaggggtcctcgtttcaaaagtatacttggcgatgtgatagtcaagtgacgtgttccaatggaaaaagctggcggtacaagtctagaagtgtcaccattcagtacttgtgcagcagattgggaaacataccagaatttgtgcaagcaaagcagaagcgtgatgagcatacaagaagattggagatgaaattaaaatt

SEQ ID NO: 182470 - DNA, 458 bp, Glycine max
agcttggagaacatggcatggtattgtgtgttacattcttagtcaaagcggatttgactgggatagcacaaagtacatgattaccgttgaaaatgaaattgcatggaatgaatatgttaaggtagccaattatcttttaattttattcaatagtagttattatgtgtgttgttattagcatgtttctattttttttcaagtcacatgaagaggccaaacgatttcgattcaaagtcattcctaattgggatgatattgttgacctatgtgcaaaggatagagctactggactcggagcagaaaatgcattagatgcagatgatatcatgagcaaagaaacaaatgaagaggaatcaattcatagtgtgagttttgacttagagggatcaagttctgccacaagaaaaacattcgcccaagtaagagtggagagaaaaagggatgattcctctatgaag

SEQ ID NO: 182471 - DNA, 396 bp, Glycine max
  unsure (1)..(396): unsure at all n locations
ttgcagcaatatgaggtatgtccattaaagtgcctccactggttgcatcaatcatacgttttgtcattaaaattaacccatcataaaatattggatcaacaattgctcactgatttgatggtgaagacacgtagcacacaacttgttgaatctctcctagtacacatataatgtctcttcaggttactgccttataccataaatttctttctggatggaagctattatggatgcaggaaagaatttctctaaaaatcttctctttatatatgcccaagtcgtgataagatttggttgaaggtacaaccaatccttaccacaccatccagagagaatgaaaatgctntcatcttcacataatcttcatgaatgtcatgtggtcgcatggtggaacat

SEQ ID NO: 182472 - DNA, 438 bp, Glycine max
tagcaccccacctgtatttcccaaggtctcctgacccccgcgacatatctccaggtaccactctgtggtcaacaataaaagcaggaagtttcacccttcaacacttcctcatctcaagcttgtaggattatggggtacccatcacatgtggtactaggtggcggtcgggcgatggtgcacaacaagttttccacatccacaatgcgcgcataaacccaccatcccctgttgcccacctccaactgagctcacgtactcccacgtagcccatatcctcgtttctctcaacaccgggtccccatcaatcctctcaagcttccacaacatccaagcaaaacaacattcaaacagcataagctatcacagccaagcaaaagcagagcataggcagaaaactctgctcaaacaccaaccaaaatcacagcttttctcacttaa

SEQ ID NO: 182473 - DNA, 445 bp, Glycine max
  unsure (1)..(445): unsure at all n locations
gacttaccttgaatttattctcttgatagcccttttgagccttgtttccctttccttgttttgaagctcactacacgccttaaatgaaaaaccatgatatcaccatatccttaaggaattttggagctttggaatcgttttgggaataagtgtggggggttttgtttcataggataacttgttttgttggctatgcttcatgatgtattttgggccatacctgatgtacattgtatattggttaaatgttggacatgctgaatgaaatgttgtttctcaaaggctatatagtaaaaaaaaatcgaaaaagaaaaagaaaagcaataaagtttagggaataagatcttaaatgacaaaagaatgatgacactctcggttctactctttatgtttaaatnttatctctacttcttgttgtttcctaatatgaacctttccccattgt

SEQ ID NO: 182474 - DNA, 302 bp, Glycine max
tccacttggaccccatttctacctactgcaaaacttaagaaaactatattatctacaccaagggtacatttctttatctttgcataaagggtgtttctcctcacgactgaaagaactttccctagatgtcctaaatgatcatctaggctcctacttgttactaaaatatcactcaaataaacaacgacgaatctacctattgaaatccttaagacatgatgcataagcctcataaaggtgcttggtgcattagtgagcccaaaaggcatcactagccattcatacaaaccaaacttggtctt

SEQ ID NO: 182475 - DNA, 448 bp, Glycine max
agcttgtttcaatccatatatagagcgtggcttacttgtatacttcattacaaccaaccaatgatgtgaatcctttaggttgagtcatgtacacatccatttgccatatccataaaggaaagatgatttcacatccatttgccatatctcataaacatagtatgctgctatggcaagcaaaatccaaattgatttgagcattgccacaggagaaaatgcttcgccataatctattccttcctgttgacgatatcctttagcaacaaggcgagctttataggtctcgacctttccatctgctccaatatttatctttaccatgggttccttctacaagagaatctatttccaaaagggtgctcttcttgcacaacactttatggtagaaagtcggagaaataatatcacattttctttaggaaaccaagagctacactaacacacctgc

SEQ ID NO: 182476 - DNA, 324 bp, Glycine max
  unsure (1)..(324): unsure at all n locations
tgcagctgaaaggacctcagtggaaagttttttcttttaattncccgagagcttccgttgttcatttttgagggtctttatatgtgatgcgcctcaatctaacatccgggtgaacagttatgatcatttgaattccttaagagctcttgttgttcaattccgagcctctccacatattatgcgctcgaatcggatctccgtgagaaaatttatggccatttgaatttcttgagagtctctcgatgtttatctggaacgcatctgaattttataagcctgaatcggacatccgtgtgaaaagttatgaccatttgaatttctcaa

SEQ ID NO: 182477 - DNA, 332 bp, Glycine max
ataacttttcacactgatgttcgattcgggcgcattatatgtagacaggctcgaaaatgcacaacgcaagctcttgagaaattagactggcctaactctttccacggaagctctcacgaaattcatatggtcataacttttcacacagatgtccgatttaagggtataatatatcgatacactcgaaacttaacatccggaactctctacaaattcaaatggttataacgcttcacacagatgtccgattaaggctcataaatgttgagaggctcgagactgaacaactgaagctcttgagaaattcacatggtcataactcttcacacgga

SEQ ID NO: 182478 - DNA, 181 bp, Glycine max
ttcattggatttaaagacgaaacctgcgcattatcaagggaaaaagacgctaacgcttgaattgccaaaagtatctgttgggctaaacgcatatccatcgcctagtgcagcttcagcacacttaactccaaggagaatctggcagagcatcaacatcaaagttgtgcgcctaacacaacaa

SEQ ID NO: 182479 - DNA, 419 bp, Glycine max
  unsure (1)..(419): unsure at all n locations
agcttagtgacatccgtgactngatcttaatctattatgttcgcaagcgagatttaggagaatcttctagtcatgtttccaattcagcattgaataccgaaggcagaggaaagactacccagaagggttagaatggtcgagccagatcaaagtcaagagggaaaggttagacaaaattttgaagtgacattatctgctggaattgtgacaagagaggtcactttaccaatcagtgcaaggcaccaaagaaaaacaagactcacaaaaacaagaaccgcgatgatgatgaatccaaaaatgcagcaactgatgaatttgatgatggattaatttgcagcatggatagtcctgttgtttcatggattatggactcaggtgcgtcgttccacaccattccctctaaagagttattgtctaac

SEQ ID NO: 182480 - DNA, 397 bp, Glycine max
  unsure (1)..(397): unsure at all n locations
ttattgtaacaacataattaaaaccaaaacttagctcacagatccctcatgtaaggctaagtttcaatcctgcttcaatcaagttctaaggcaacaatacattttccaatgctaaagtcacctaactgtgcacacaaatgggtgatcagaccaaaagcatacaaacattaagcattgagggaagcattgaacacagaaaacataatcaattagatattaggtattaacattagttggtcattcgaaatccccaactagggtgttttgccagccattacaaagaaaccctaacaataaatgagattaanaacaaagaatgatggttccttacacaagaannggaaatcctcctnctcagctcagcatttcacactcactctctactcaataatctctc

SEQ ID NO: 182481 - DNA, 461 bp, Glycine max
  unsure (1)..(461): unsure at all n locations
agcttggagagggtgcttcaatggatgtatttattgagagagaganagagagagcggcgagcacataattgaaggatgacaagagggagacaagttgaactttgaagtttgactcacaagactctcattcatcaaagttacaacaagtgctacacatgcttctatttatagactatgtagctcccttgagaagcttacttgagaaaacttccttgagaagcttctttgagagaacttccttgagaagctagagcttagctacacaccccccctaattactaagctcacctccttgagaagattcctaaagaagttagagcttagctacgcacacctctctaatagctaagctcacctccttgagatgagaagctagagcttagctacacaccccctatatagctaactccacctcataaaatacatgatattcaataaagtctctactacaagactctcaa

SEQ ID NO: 182482 - DNA, 463 bp, Glycine max
agcttagctgaattcagattgaatcaaagttatcttatctcaaccttggccagcttagcggaccaaatcagcctcagatgcaagggttgggtgctaagcactcatgactcgcggcttagcgcatgaacagagatacacttagcgcgaggcttgcgcttagcgaaaggactgtttttcaaaaagattttctaagttatttttcaatccattttccatgaaattgaaacccttatgttaagcattcaaagatttgttgatatactcctatgtacagattacatagcaagttccaaatgatcaaatgcatgaaaaacaaacacaacagagattaaaactgggttgcctcccaggaagcgcttctttaatgtcattagcttgacacttttacctctctgggcaatctcatggtttggttctcaccttcagaacctcttgaccttctcccattacctgcaagcaaaca

SEQ ID NO: 182483 - DNA, 395 bp, Glycine max
  unsure (1)..(395): unsure at all n locations
agcttcaagaattgcccagacttctcttcttatttctganttcaggcgtaaataggtggccttgttggtgcttgtgcacttagcacaactctggctcgcttagtgtgcataagtgaatttcggcttaacgggtggcttctcacttaacggatgcatgcaagcggggtgcttaacacgatgagcctctacttagcgtgtgtgtccagatcatactttttccagattcttcctcgcgctcaaccacatgagtggtgcgctcagcagatggctcgctaagccaatggcttatcgagaagctaaaaatatgcacttcacgaacgtgtctaatttacctgaaattgaaaggaaatgattattatatacacaaaaggggaggcctatatacttattaccta

SEQ ID NO: 182484 - DNA, 314 bp, Glycine max
taaacccaaacttatctcacagatccctcatgttaggctaagattcaatcctgctctaatcaagttctaaggcaacaatacattttccaatgctaaagtcacctaactgtgcacacaaatgggtgatcagaccaaaagcatacaaaccttaagcattgcaggaagcattgaacacagaaaacataatcaattagatattagggattaacattagttggtcattccaaatccccaactatggtggtttgccagccattacaaagaaaccctaacataaatgagattaaaaaccaagaatgatggttccttacaca

SEQ ID NO: 182485 - DNA, 451 bp, Glycine max
agcttattcaaacagggtctaagaccttattaatataccttcaacaattactctatgaaatgttcttaacacaattgatttgcagttgtttctattctacacattccataacacaatacaaaaacagatctttccacaggattcaagttgtaaaataacaattctaactgagaaacatgaaataccaaggcacataattaacgaagctagttcattctttcaaggaggacataaaaaccttatttaatcgcatatcctcaaacctcataaaaaaaagctagggtttaacaaaattaaataaataaatcgattaattataaaaatagagaaaaaggaaagagaaccttgcgcttgagattgtatcgatgccactcggatatgtaatggagcttttgctctgtgtcatctatgaattcggtgttgcaagcgttgcacgttaacctccgcatgc

SEQ ID NO: 182486 - DNA, 465 bp, Glycine max
gctagcgcatactctaggcttagcgtgctctctatgcttatcgcatacttcaggcttagctcgcactccaagcttcgctcccactccaagcttagcgcgaagaaagcccacagtgaagccctaaggcacgcttaacgagaaagcccatgttaagtgcaaagtcaacgtgaaaagtaagctacctgcaccctatataaggaggaggaagctgaagggaaagacacaccgagtcttagagctatccaaagcttgagcatatcccttaggggaaaccctctttgtttagatattcctccctttctttctattattcatccaaccccttcttccatccatattagcccctaaagtgtaaagtctcttatgattatgagaggctaaacctccattgttgggagcctggcaggccaacacccttgtaatgtaattgttcttattatttattgaatgcaatttctatatcta

SEQ ID NO: 182487 - DNA, 405 bp, Glycine max
tactcagcttgtagcgttgggagcctatcgaccgtgctcttgatggctttattaggcgttgtcaaacgttacgaagcgccagtcgaatccttccaaatttgtaatactctgtgctatatctcttaatgtgaaagctatgaattaacttcaaccctctctaataatgacccactttatgatgtcgcattataacctgtgcataatcttcagtataagtgagagattcacttcctcagtggaatccctcttgtgaggagaaaagttatcataagtctaagtggatgatatacccatttgttgtgggaaagcccaatagtggctgacggtgaggaaatctagtggtgaacctgaaatccaatgcgttgctgagcccttgtgaactaattgtgtttatgaattatcatc

SEQ ID NO: 182488 - DNA, 286 bp, Glycine max
tgctatctcacaccataacaggagaagtttctctttcctccctaaagggcatcatcccgactcacaactcataggctttctcactccctcgatatatctcataaacgtcgtcccatcgcaagagagtgtcactgtcacaaagaagcccttctcatagaccaaccgcgccactgataaatcttcttctaacaactatgacactagatccatgtttaacacaagtttttctgggttcaatccagctcttcaacaaggaggttttatggctcatttggaccggccatca

SEQ ID NO: 182489 - DNA, 464 bp, Glycine max
agcttctttaggaatgttcttaaggaatcttctcatggaggtgagattatttatgggaggggtgtgtgtagctaagctctagcttctcaaggaagttttctcgaagaagcttctcaaggaagttttctcaagaaagcttctcaaggaagctacctagtctataaatagaagcatgtgtaacacttgttgtaactttgatgaatgagagtcttgtgagacacaactcaaagttcaacttctctccctttttcttccttcaatttcgtgctcccccctctctctttctctccctctttcttttcctccattgaagcatcctctccaagcttcttatccaaggttcatcttggtggagaagctctttcttccatggcttattccctagtggatggcgcctcctctcacctcttctcatttgtcttccgctgcatctccatggtggaaaatcaccattaaaggacctc

SEQ ID NO: 182490 - DNA, 418 bp, Glycine max
  unsure (1)..(418): unsure at all n locations
agctntgaatggncaccgcttcattcttgtggcgatagattacttcaccaaatgggtcgaagcggcttcttatactaatgtcacgagaagtgtggtggtcagattcataaagagggagctgatttgtcgatacggactccctaggaagatcattactgataatggcaccaatctgaataacaaaatgatgcaggaaatgtgcgaggatttcaatatctagcatcataactccaccccttgtcggccaaagatgaatggggctgtagaggctgcaaataagaatattaagaagattgttcagaagatgacggtgtcatacaaagattggcatgagatgttgcctttcgccctgcacggatatagaaccttggtatgaacttctactggggcaacgccgtattccttggtttatgggatg

SEQ ID NO: 182491 - DNA, 280 bp, Glycine max
cttgcgctcctctaatggcaatagcatcacttctggcactaaattgctgggagtttgaagccatcttctcaattaaaattatggctctaacatgggtcatgtttccaaaggctccaccactggcagcatctatcatacttctctccatgctgctgactccttcatataaatattggagaataagctgctctgaaatctggtggtgagggaaactaccacataattttttaaatctatcccagcattcatataggctctctccactgagctagctaatacc

SEQ ID NO: 182492 - DNA, 439 bp, Glycine max
  unsure (1)..(439): unsure at all n locations
agcttctcaaggaggtgagcttagttatgatatggtgtgtgtagctaacctctagcttctcaaggaagctttctcaaagaagtttctcaaggaagttttctcaataaagcttctcaaggaagctacctagtctgtaaatagaagcatgtgtaacacttgttgtaactctgatgaatgagagtcttgtgagacacaactcanagttcaacttttctccctcttttttccttcaattttgtgctccccccctctctctttctctccctctttcttttcctccattgaggcatcctcgccaagcttcttatccaaggttcatcttggtggtgaagctccttcttccatggcttattccctagtggatggcgcctcctctcacctcttctcctttgtcttccattgcatctccatggtggaaaatcaccattataggacctca

SEQ ID NO: 182493 - DNA, 453 bp, Glycine max
  unsure (1)..(453): unsure at all n locations
agctntcacgagatactgtgcgtggaacattttcttgttgttccttggagacctacgttcttatattatatatttgttttagctgtccaaactatttttaaatattcatttatttggaatgcatatgaaatactctttaccgttttcaaataaaagaagaagcaccattcgagaaggtaatgaaataggtaccagaatggggaataagatgtcctcttaggggaaatctaaaaaataagaacagatgggaaggaatattaatctaacaaaccttaggaatctcgacatgtccaataaaggggaattagttaccttgatttagtataactaaaaaatgttccatactctgcattaactatatgattttccgcggtttatgattcgtagacttatctcttttctagtggcatgttttcatgaagaaaaacatcattcattcataaatgatactcc

SEQ ID NO: 182494 - DNA, 381 bp, Glycine max
agcttggagaagagacgggtgttgttcttatgttcaattgacaaaatgctgtgctagagggacatctctgagatctgatttgtgtgaactcggacgtatctgatcttgccagtatattaaccatttctattgaacagatctgcaataactggcgggcatggaattttatatctacgttagagtatactaactatatgctccctataatagtcagtaggctatatcccagcgacaacatgcttggcacctatttattaatgccagtgatcagtctgagacaatccttcttctactccttgtatgaggaacacttgattcattttatacaacctttactttatggatcactgccacaaagcatgcattttacttttctttgat

SEQ ID NO: 182495 - DNA, 420 bp, Glycine max
caagcttctaacccatggaagctcctattatctcccacactctttggggtgggccattcttggatggccttgattttctcaaggtccacttggaccccatttctaccaatatcaaaacctaagaaaactatcttatctacataaaagatacacttctctatatttgcatagagggtgtttttcctaaggactaaaagaacttgcctgagatgtcctaagtgatcatctaggctcctactgtacactaaaatatcatcaaaataaacaactacaaatctacctatgaaatcccataagacatgatgcataatcctcataaaggtgtgtgggcattagtgagcccaaaagggccattcatacaaaccaaactctggtctgaagagattttccctcatcacccttttcatcctgattggagat

SEQ ID NO: 182496 - DNA, 382 bp, Glycine max
  unsure (1)..(382): unsure at all n locations
ctctattacacagnttcctcatttaggagattacaacatcataagaagggtgttgtatcatagagaaccattactatatctcttacatataagggctcctttcttccttatttatgttatatcctgcatctatttattagcacctcatagatcatcgctcaatcaatcaatgcaatacacaagattcaatatttttccgtcttatagatttggcattctncaccatatgtcagcaacatttcatgtttcaaaagaacatttgaagtgaaatgaactactaaccctaataacactggcaagaataagatntctaaatcgtaagatgtcatcgtgtacaaaacaatttcaaaatgaatngaaacctcaagccaatcttaacaaa

SEQ ID NO: 182497 - DNA, 164 bp, Glycine max
tttttactatcacaagagagcaacctttttcatcattatttagggtggtgtgttatgttcaatatcactggtcttgtcgttataacaataattacttttgttatgaatcttgccattacaagaatataccaaaaatgattggcttatcgagtatacactctctc

SEQ ID NO: 182498 - DNA, 468 bp, Glycine max
  unsure (1)..(468): unsure at all n locations
ctcagcttcacgtgaagtcgccagcagcagtggcgggttgggcttccacatgtccagtgcccatgaagtcgccattggagcttgcgtgttgcatgcactttgcatgcagaccacgtagaaaacaacaccatggcagaaattgttcataaacgaccccatttggggaataagtttgcaaaaggacctcaaatggggaaaattgccactatattcagtgaatacgcgtcttgtatgaaaagataagtgtggactatgaacaggtatgtaaactaactattaaacaggaaaatcatgtgagtaatgatgtgtgaagacaagtagacaatgtgttgatcttcctattangtgcctgatgttataaggatattctctacttaacactgctcatgtgttctatggtgtctcttgaaatgcttaaccccgatccctcgtgatactctagcctaatcctgatcaagcatcattctc

SEQ ID NO: 182499 - DNA, 426 bp, Glycine max
  unsure (1)..(426): unsure at all n locations
ttaccaggcagtgtaatcgattactagaaaataattttgaagcaaagggtttaaaaatggtttgaaatttgaatnttgaaagctgtaatcgattaccattggtgtgtaatcgattaccagtaacagaactcctgaaattcaatttgaaaagtcacgacccttcataatataactgtgtaatcgattaccaaaaacctgtaatcgattaccagtgaagaatttcagagaaagctttttaaaaagacacatctcttctaaccattttgaaaaggcacgaagggcctatatatatgtgtgtctgacttcgaaaagcaagagagagattctaagagaacttaattgccgaatgctctctcaacaactcttggtcaaacacttgcgaatctattgagaattcatctaggaacttcanatngtattatcatc

SEQ ID NO: 182500 - DNA, 238 bp, Glycine max
  unsure (1)..(238): unsure at all n locations
taagtcacctgcgggcatgcaagctttaanaaaaagctcctccatagtgctaccatctcttctccttggacaaagttttagtgagagatagaagcatagatgtaagcaagggctccaatcttcggtgtttccatgggttgcgctgtgatatacacatgtggcattattgtgcttacataatttctgtatacaaatagcttgtgaaccctccccatctcactgcttcacccctcttcac

SEQ ID NO: 182501 - DNA, 479 bp, Glycine max
  unsure (1)..(479): unsure at all n locations
tgctcatcttgagataatagggggncatcctcattcgaagtttattgtgcacatatttctttggcctaacaggaactccaaatatttacagcttctacggtttgaatgggtttggccacaccttccacatgtaaactcagccaatttcctctttaccttatgtcctgngacattgtcctcatctacagatctccttctattatttttggccttcctcttgggacccttctatgtggtggaacagggtgtgtatactgtgtctgggcccaacattgtggaccttggactggttcaataaaatgtnggtatgtcttattataaacttctattgacagccactcatgacacatgtcctcaggcttccctcctttgtgagttattgttgcaaaggcatgtctgcatcggatccctacatcataattgtaacatcagcacacatcgtggctatgaatgacaaacaaactataaagaacacacct

SEQ ID NO: 182502 - DNA, 118 bp, Glycine max
  unsure (1)..(118): unsure at all n locations
gcagcttaacctatcggctctcacagtctttatatttggagccaancccagccttgtgttcggactctcagccacttatgataccgccgatgatccacgtctcttgcttacacactga

SEQ ID NO: 182503 - DNA, 362 bp, Glycine max
ttgggcttagcgccagtttcgagcttatcctggctgaaggcacttattgcgcttagcgcactgatctcgcgcatagcgcgcgactttgatgctgatgctctgccagattcttctttgcgctaagcgcgctgaaattgcgcttagtatgcgctaagcccaactgctgagcttaacccatctgctacattttgtaattcaaaacttacgctctttttcacctgaaaatgcacagattttatcattaaatccaatggaaatgttctagagacaacattgaccataatacaagagttatttactaaaatcactactaaataaccataaattgcgtgactatacaaacgtttgaagatgatttctat

SEQ ID NO: 182504 - DNA, 412 bp, Glycine max
  unsure (1)..(412): unsure at all n locations
gaagagctgggtgtttttggtggcaatacagtaatgaacgctggagaactcggaacggaggtgacgaacggaggactatagtgagaagagcacaaatttaaggtgtccaaactctatttaattatttacctctggcctttgccttgaccgtcatcaagaccaataaagaaatggtcctctccattctcgctgacatccttaccatcgaaaacattgcgagcgaatatccaccaccacaacaagcacgactcagatatgagaaccacacaaatccagatatgagatatagtgagaaccacatcaagatcttagttgtgccgcgcctttgtcaagttcaccttctcacacgtgacagccattacacaatggtctattctgaaaccantgaataagattgagttcgcccttcact

SEQ ID NO: 182505 - DNA, 244 bp, Glycine max
  unsure (1)..(244): unsure at all n locations
ggatcctttaagcgaccgcggcatgaagctncnctttaatctaatacttttttttaattatcaacnccnaacaaagggcggctaatgtgggtgtccagnttaaccccccgacaagtacaactgtgctttgattttcctagacactcacctgagtgtgcctataacgcattaataaagcattcatgaaatccgaaaaaatctcacacgtacatcaacattaaaattttttgcacgcctacttttt

SEQ ID NO: 182506 - DNA, 452 bp, Glycine max
  unsure (1)..(452): unsure at all n locations
tactcaagctntacaaaaatatatatctatctttaacagaatgactctctttctctaaggaagatggagttatgatcccctacactcgatgttaaactgcatgtagtgctgcactaatctgacagaatgcattgtcccaaaggaaattacatgcttcactgtaataccaaaataaatgtcttgaaagaattgaaaatgtaattatagaggatctcactccaatgaagaaactcattgataggccccatcttaaccttcacctaaaatataaatataaaagaactaatctatttgcctttatatcgtataagttattgcttaaataagagctaacctatctaaaagtttgattcaagttataagactatcaaaaaaattattttatgataaatattatatacgaagagaatctaaacattatcgcgtaacattttgacgcattatactattta

SEQ ID NO: 182507 - DNA, 423 bp, Glycine max
ctcgaatggacactgaggtatctaaatggatcttcgatagtcttattaacggacaagacgacagcacatgacgcagcaatcacaggctatgtagatgcacattctgcacgaaatgagacataagagagtccttaactggatatgcgtttactttgcttggaaaccaatcagttggacagcaaataaacaataagctattgctctttcaacaactaaagtagagtacatggccctaattgaaggagtgaatgaacccatctggctaaaaggaatggctaatgaactcggaatagcacaaccttgtgtcacaattcactatgacaggtagagtgctattcatttaccaaatcaccaagattaccatgagaggacagagcacatagattggaaattactcttcatcagatatccgattcgatctga

SEQ ID NO: 182508 - DNA, 473 bp, Glycine max
  unsure (1)..(473): unsure at all n locations
atggatttatttagtttgcataccatatacnttgagtcacctgatacaaagatttctagttgcatcatataaattgtttcttcaatgtcaccatttagaaacacagtcttaacattcatctgatgtagctctaaatcataatgagctaccaatgccattattgttcaaaaagaatcctttgaagatattggaaaaaaggtttctttatagtcaatgccttccttttgggtaaagacttatagtcaatggtatatcattgacatataacaccaagaatgagtatttactcccactaaacttgtggtatacacaatcatcaactgcatttgcctcanaaccatatgaggtaatgacttgatggaacttgtaataccattgatgggaagcttgtttcaaaccatagatggatntatntagtnttgcaaccatagaacttgagtcacctgatacaaagntttctangtgcatcatat

SEQ ID NO: 182509 - DNA, 488 bp, Glycine max
  unsure (1)..(488): unsure at all n locations
tatagtgacagactattagttgtcactgtatacccnctcatagttgacacaaaanacatctgtaggacaaagtcctttatacatctacctatggattntggacttctagtgatagattttgactgtaggtataagtcattttccttgtaataatgtttaataaaatcaaccagcataacaataaacacagatactacaatgtttaataaaatcagtaacaaaaaaaaggtgatgcaatctgaggcatgtctaattaaagaaaaaagtataaaggctaattttttatatacttccaacaaatttcacaaggatcaaatcgctttcctccatgcacaaaatagagtatcctggcaatgaaaatntgaaaatcaagccatgtaaaagaaattaaaatggctgtaattcttaagagtacagtcaaaaaaatcaaaataattcttgtgctcattctatacacttgttagcacaccttcacttcatatattcca

SEQ ID NO: 182510 - DNA, 481 bp, Glycine max
agctaactcaagagtgtggatatgtgagattctgagcttgaaccttctttctttgcatactagtgacaaattgtggcacacttgtacttgagtagtcttcaacggtcactcgctcacgatgctcaataaccattgtggtggcttcaagcaatggtgcatctgattcccttgtcctggaaaactataaaagacgttggagctttgctgatgttcttcaagaattgttgctgcttctatatcctgcaataaaattctacgcctttctgctctgttacttctacgagttgcttcaatttccaagtctattggaaccaaattacctacagaggactttctatgcatacacatctaagcataaacagcagttaaccaatttctaagaaaaatcaattctacacgtgacaagtattcacagtaatacaacaacgaatcacagattattattaaacctacatactgagctaacctttccacataatag

SEQ ID NO: 182511 - DNA, 95 bp, Glycine max
tgtttggcaattagggtagctttgatggcatacacccccggcccatttgggaaagagcctaaatgcacacacgaacacttgctacattataaata

SEQ ID NO: 182512 - DNA, 481 bp, Glycine max
  unsure (1)..(481): unsure at all n locations
tgacattgaatatggaagctctcgagaaatacaaatggtcataatcttttcactcggattgccgattcaggtgcataacatatcgagacgctcaatattgaacaacagaagctctcgagaaattcaaatggtcataagttttcacatggatatccgattctgtgttataatatatcgagacggtcgaaattgaacaacgactcgagaaattcaaatggtcataacttttcactcggatgttcgattcaggcgcataacatatcgagacactcggaattgaacaatggaagctctcgagaaatacaaatggtcataactnttcactcggatggccgattaaggcgcatcacatatcgagacgctcaaaattgaacaacggaagctctcgagaaaatcaaatggtcataacttttaactcagatgtccgattcggggatataatatatcgagacgctcgaaattgaacaacggaagctctcga

SEQ ID NO: 182513 - DNA, 502 bp, Glycine max
gacctccatactaagcttatgtattgggggaaataaatatccaaatcaattgtttcttttgttacgaagaattctttttgcggcttttagatgaggagaggtaggagcctccgtatagctacacacaactcccaccgcatatagaatatcgggccttgtattgattatataccttaaactccccacaagaatcttgaagatctgggagtctaccttctctccttcatcaaactttgataacttcaagccaccttccataggtgtgttcacgggattgcaatcaagcatattaaatttcttcaacacttcttttgtgtagcttccttgtgagacaaagataccattctccgtttgcttcactttcatttccaagttatatgacatgagtaccatatctgtcatatcaaattgatgagatatggactcctcgaagtgttcacacaaatttgggttatggacggttaagatgacgtcatccacataaagacacataaataagaca

SEQ ID NO: 182514 - DNA, 409 bp, Glycine max
  unsure (1)..(409): unsure at all n locations
ctcagcttcaaggatacanngtaatctattacatatgttgagttcttttatcagtgcattgtaccaatggatttanggtgttggaggtttttaatggcccccaagccttcgatcggggaccatgattgcttcatggaatgtaaaacggcttaacaaggctggaaagctaagggagataagctcccgtcttctatagcttcagccagaaattgcaactttgatcgaaacaagagttacagaaaataaagctactaaagttagagagaaacttcgcctacatgggaattatcttgataactatacttgtcatgaaaatggtaggctttggatccattgagacttaaatagggtggatgtgacatgtgctagtatgactaaccaacttatacactgtggtgtctatgatgta

SEQ ID NO: 182515 - DNA, 233 bp, Glycine max
  unsure (1)..(233): unsure at all n locations
cctgcggcatgcaactataaaacanaatgcctatttatttttttattgcatgtgaactaggaagcatcaacaagaatcaagccaaggctattcgcaagcaatcaatgcgaacaattagggtatcaagattttatctcacttatagaaagatacaagaaatattaatcatcatctataaaacatgctcatatgcattatgaaaaaatatgactgcttgcatatactataaccat

SEQ ID NO: 182516 - DNA, 426 bp, Glycine max
  unsure (1)..(426): unsure at all n locations
gtctcaaccttgtttcaattagaagtgatcacgaacgtgaatatcaaaatgagtcttttgaaaaatcttgtgaagaaaatggaattcatcacacaattttttaaccccaagaacacctcaacaaaatggtgttgtggagaggaaaaatactctcttgaagaaggtgcaagaacccttctaaatgagacaagattacctaagtacttttgggcagatgttgtacatactatttgttacaccttgtacagaatacttattagacctattttgaagaaaactcctcatgaattgtataatggaagaaaaccaaacatttcacacctgagacttttttgtgcaagtgtgttgttctaaataattggtaagactcttggcagatatgacgcatangccgatgaggccacatatcttggttattcattgcat

SEQ ID NO: 182517 - DNA, 471 bp, Glycine max
  unsure (1)..(471): unsure at all n locations
tctcactattgggccacattcgatcagattgtgttatgatctaaggagaacggtgagttagcttgttatagggatttattacatataaataggggaagaaggataggagacacagagatctgtgtcattttgttaattgaacattagctctttgtgaaaggaaaaatcttttctgaaagggaaacccttagaggagagttatgtttcctatattctgttttcttcctattcaataaaattctttcttttctttctcatttcaattatcggttcctaacaaatcgttcatggtttttcatacacaaaaaaatattcttataggcagagattcaaatgcatatgttggaagtaaggccagacaatttacaagagctcatgatggttttgtgtttagagagctatatgagaaaaacaatctattcttgantctcaatggaaatcacctcaaattatcacacttatttaaaagtg

SEQ ID NO: 182518 - DNA, 498 bp, Glycine max
  unsure (1)..(498): unsure at all n locations
taatactaagctaagggggagtgctcgtctcgaaaaagggatatatgtatgtatatgctntcagatagntgncatcatcaaaagagggagaatgtgaatgaatatgtatgaagattttgatgatgccaaagacagaagcaatactagtttacttcaagtccaaatcaagatcatgtaaacaaaatatcaagagaaaaaacccgccttagtctattnttgttaaaagaatctcttaatgattgaaaaggtttggcctcaaaacataatttttaaattaattataaaaagttttaaaatattttaacatttctgaaaaaaggaatttttcctctggtaatcgattactagaagctgttatcgattcccagaagcaaaattgttttaaaagctgtttaggatgttgaaagttgaatcttgaatactgtagtcgattatcatttgtattgtatcgatcaccaataacggaactcctgatagttcatattgaaaaggcatgat

SEQ ID NO: 182519 - DNA, 366 bp, Glycine max
  unsure (1)..(366): unsure at all n locations
tgaaccanaactggtgagagtgaccttactctgtgagtgaacgactagctgtgagtnataatctttgcatgaatctctgaattctagaatgatatgtgtaaaatgagaatatgatgaaggccataatttgtgtatacacaagccttttgaccaaacagcttaccttgcaagataattgtatcctttgctccctttatatgctgaatgattntgtcataaattgaaccctgaacttaaataattatctcttgataccttgcttaaattctangagagcatatggttcaaggcaaaatttaccccaaatttggnggagtaaagtcagttagaatgcatagaataaggtaaagcatcaacacacacaac

SEQ ID NO: 182520 - DNA, 491 bp, Glycine max
  unsure (1)..(491): unsure at all n locations
tcatgatgatgaaccaaacaattttgatgatgccaaaagctctagtgattgattcaagattgattcaagacttcaagatcaagattcaagattcaagagaagaaatcaagaagcaacaagtcaagacttcatataggataagtattaaaataatttttcaaaaaccaaatagcacagtttgttttacaaaagaattttctcaaaattntctaagttaccagagtgattactctctaataatcgattaccagttatcagtaatcgattactagtgactagtttggttttcaaaatgttttcaaatggtttgcaatgttccaaaatgattntcaaacagtgtaatcgattacaagtgaatctgaacgttggaattcaaattcaattgtgaagagtcacaactttntataaaatgcattggtgtaatcgatacacctttgtggttatcgattaccagtggaacagtttgaagaaaaagtaagagtataactctt

SEQ ID NO: 182521 - DNA, 143 bp, Glycine max
ctggattcttaaactaattttgtagtctttactctttaatatccagcctggcctctgagatatcttgagtagttattcacaactatattataacttgactaattgccatgactcaatgattctgatctcacatataattctct

SEQ ID NO: 182522 - DNA, 491 bp, Glycine max
  unsure (1)..(491): unsure at all n locations
ttgacccaaccccagcagcagttgtttccttagagacttgtctatcaccttgtctccgagactgaggataattgcactatgtgccttctgcaatagtgctttcttatccccatcagccatcatcttttcgagttaggcttctccatcaagtacttccaccaggccctgctgaacaagaagggctctcatcttcaatcgccatagcccaaaatcatattgccctatgaatttttcaacctcatacttggccgagcccatttcttgaatcgaactcaaaatcgtccatgctcaccgcaccagtttgttgtgccaagatcagatttgctcacaaggaagaaatgagtttcttgtatgaacaagaataagcaaaaatgcaaaacagatgaacaaaagaacttcacagaaatgtgagtgttctaatagtaaaacaactctctcagcaaccactttnttcttagttctgcaattccttctgttgatatcatatctct

SEQ ID NO: 182523 - DNA, 200 bp, Glycine max
  unsure (1)..(200): unsure at all n locations
aagcaccgcggctgcagctttatggtgtagagaagaaatcacatgttcgttatcataaaaagggggagaatgtgagtgtctgtatacatgattttgatgatgcancaaaagaatcaccgtttaataccgcttcattaacctctcagagtagtagctacatcagtaggactctagattcactacgatatatagcatgaaaa

SEQ ID NO: 182524 - DNA, 417 bp, Glycine max
  unsure (1)..(417): unsure at all n locations
agatctctgattgttcaaattaatgtaaattggggggaaattgatgaatgatgtntttttaccatgatttanaggtatatcccacccaaactactccgtctccagaaggcacgtgtgaggctgcaccaaatgatgaagttaatgatgtgaagactctgacagaaagattactgctgctcttttaaactctagtgccaaagaagatttggcaaagcagcatgctaaagttgcggaagaagctgtctcgggtatctgttgtttggccatcttgcatctccatcacttcaccttgatttgacaaacaagtttatctaaatgagaaatctgttgaggcattgagcaatcgcaattgagtgntttttggtctgatagtgtgtttgtcaagtgttatcttgctcggcccantgaaaaaatatc

SEQ ID NO: 182525 - DNA, 512 bp, Glycine max
  unsure (1)..(512): unsure at all n locations
tactcaagcttgtctcagcgtctatgcgagacagagaccaacatgttagctatcatcgtctagtaccaagaagagttgggtctagccactgcccacgagcatataatcgcggacgaatatgcccaagtatatgcggcaaaagaggctagatgaagggtgatcgactctttacacctagaggcaaccatgtggatggatcggtttgctcttaccttgaacgggagtcaagaacttccccgattgttagccaaggccaatgcaatggcagacacctactccaccccctaagagattcatgggcttctcggctattgtcagcatatgatagacttaatggcccacataattagaaatcgttacgaaacttgtatggtctctcagaccttgactagatacgacttccttatttctgacataaaatgagatggtcccatggttctactccaacaagcttgtgctaatcacatcactcctacattntatctctagcatgcattgtatgtnggtctcgc

SEQ ID NO: 182526 - DNA, 205 bp, Glycine max
  unsure (1)..(205): unsure at all n locations
agcttancatcacatgccattgctacgttgatgaggttgctgtgatcgaaaattgcggcagcatagcgccacacgtcttcaccgtgagctttgcaaatgaggggctgtacagctatgcaggctagcctcaaactcttgccgtccccacatgtatccgtccctattctgcgccagctagatccactatcacggatttctgatcatt

SEQ ID NO: 182527 - DNA, 485 bp, Glycine max
  unsure (1)..(485): unsure at all n locations
gctgtatgtttgcagcttanaaagcctaacagaataagactgggaatatgggagactcctgttttgtcaaaggagcaactagagtatgctgcaacagatgcttttgcttcttggtatctttatcacgtaaatactaaatcttagtgtggataaactcttcaacaactattagaagaaaatcacaagataaaataagttaaaagttttctcataatacaaaatcaacttatatacctcaatgttgtaaaagcttcgaatattaaggtgcataatttgattttaaatttttacctcttattttcttttcgtatttgactaaatagtaaataccaacatcatacgataattgttagccttatcttgatttcaaactactaacgtccgtagtcttctcgtccattttattgatacttgattcaacgaatttggttattcttttgcatgcgattaaagatctcccggacgcncacaaagtcactgacaga

SEQ ID NO: 182528 - DNA, 252 bp, Glycine max
  unsure (1)..(252): unsure at all n locations
atccttaacgcacctgcngcatgcaagcttgctaacccatggaagctcctaatatcttctttactntnttgggtgggccattcttggatggccttgattttctctgggtccacttgcccccatttctacaccactaaattattaagcatctattaggttcagagactctactaagatgccgctaattaaaatcatctgactatactcttagtggtatactagctcttacatgtacgtctcctttgtgaccta

SEQ ID NO: 182529 - DNA, 410 bp, Glycine max
ctaagctttaccgctggcctaagaatcattatggcaagggtacttgttcttaatcgtcaccttattcaactggcggtagtctacacacaacctcatggacctatctttcttctttactaacaacactggtgctcccattggagatacactgggtctcacaaactgcttctccaacaactcctctaactctttcttaagctcggctaactctatatgagacatcctataaggcgctattgatatatgttcagccccaggtaccaggtctatggaaaactctatctctctcttgggtggtagaccaaatatatccttatggaacacttcatgaaactctctgacaatagggagatcacacatggaaacctttgtctctatttccagggtagacaagatcatgtacacttgag

SEQ ID NO: 182530 - DNA, 230 bp, Glycine max
aagaaaatgagatgcagtattgtagaaagatattgtaacgataaatacattaacaactatttatgttgcacaaggaggataatgagggttagaacaacatcttggtttatcatgtgtcactctaacaaaaatacaagataataaacagttaaggcacattctttaaaataacatgaactgttataaaattggtgcaacactctaatcattcttgcttgtgaacttaatta

SEQ ID NO: 182531 - DNA, 475 bp, Glycine max
tgatcaatgattcatcacgccagtttgttgaagtgctcttacatgagattaaactcgattatttaagtgagtcaaatttaagatctacaagctctttatttttagattattatctaatattaacatgttttattaaatactcaattgattaagtcaaataatttaataatttttttgcaaattaaaaaaagctataagtgaattaaacatgttaaaccaagtccaactcaagttctattttcttaaaccaagttaaacccagacttttaattaaactcatttaaataaatgagtcaagtttcagctacctatgtttcacaagccaaacctacatatgcaatctctgctcggctcgactaatgtacatagctaaatatggataaacattcttcgattagatgaatcactgttattctccatttttgagatcttcgctaggatgtattattctagattagacgagtgatattaaaat

SEQ ID NO: 182532 - DNA, 499 bp, Glycine max
  unsure (1)..(499): unsure at all n locations
nttcttntcacaatcaattgtctactgactaacaattctaattgtgagttcacattctttntatctctttgtataaaatacacacttgctcaaactcatgaaaggaaacacaaactccatcacaatcatgcattcaattcaaaatgaaaacatacatccatttttcacagaaagataaaattgtttcactgttatgtcatcaaaaataggttaaactgttcaaaatgcttcaggataatcatactaactattcatatataaaacaagaagtatatatagacataaaggaaatactgtacgaaaaccaaaattataataataacaaatcaaaaagcaaaaagtgtcatcaggaattaatattccagtgactggttctgattgtcctgtatctgaacatccttctcatctgttagatgccatactggagtagctggaagagaagtgtctaaaggcagaactggtatggtctggccctcatgtatctctaagacaggaatgg

SEQ ID NO: 182533 - DNA, 67 bp, Glycine max
cagcggcagcataacgccacacgtcttcaccgtgagccctgcaaatgagggcctgaagcaatatgca

SEQ ID NO: 182534 - DNA, 475 bp, Glycine max
  unsure (1)..(475): unsure at all n locations
tgtagaactcccncaaggcanatctattgttggagcacagtatgtgttcataanaaaaaactggatgaaatatgtaaggttgtgaggaacaaggctagacttatggcaaaaggttactcacagcagaaaggtatagattatactgaaacctttgttcttgttgctcgtctaaaggcaatacacattttattatcctttgttgcccagcatggtatgatgttatatcaaatggatgtaaaaagcgtgttcctcaacgaaattattaaggaagaagtctatgtggaataaccccctgngtttgagagttctatctatcctcatcatgttttcaaacttaataaagccttttatggtttaaagcaagctcctcgggcttggtatgaaaagttcagctcttttctaactgacaatgggtttaaagcaagctcctctggcttggtatgaaaagtataatgtatctttctgtgtcaaattc

SEQ ID NO: 182535 - DNA, 72 bp, Glycine max
  unsure (1)..(72): unsure at all n locations
attcgntgaccacagagtggtacctggagatatatccggggggtcacgatgacagggcttcacatcatccac

SEQ ID NO: 182536 - DNA, 457 bp, Glycine max
  unsure (1)..(457): unsure at all n locations
aagagaatgagcatgtgattgataatatgactggaaatgttagtcaatttgtcagatttattgtgaacaaatgcattaaccatatcccggtgagagtgtgatccttacaatttgagagaaacgactatcatttagtactgatttttgcgtgaatctttgaagtatggactgaatgcacgaaattgaggatgatgaaggccatgtttgattgtgatagccacttagccaataacctgaccatgtgcttgaatgaattatcccttgtacctagatngagctgaatgaattattgattgattgaatcctgagcctatacagtgttatctcctactaccttgacttaggttgtaggagagcatcatccacaggaagcgtggttcagagcaaatttgtcctaaatctggggagtaatataacgtaatttgtccaatttggggatgactatgtagaatggaat

SEQ ID NO: 182537 - DNA, 454 bp, Glycine max
gtttgtaagttctccactactcttcttagtcatgggttccatcagtccaagcatgattactccctattcaccattagtttagggaattccttagtcattctactaatgcatatagatgacatcatcctgtcaggaccaaattctgcctctgtgcaagctatttagacccaattcaatctatgtttcaattgaagatccttggcactttgaaatattttcttggcttagaattagctaaatccaacagaggtatttcactttcctagagaaaatacactctatctcttttggaagatacaggtttcttgacatgcaaaccttccaatcttccaatggatcccaacctgaagacttactccctgataaatcaatcttgatgatgaagacttacttcctgatcccttaatgtataaaaagggtaattggtagattggattatctgaccatttcacgt

SEQ ID NO: 182538 - DNA, 482 bp, Glycine max
  unsure (1)..(482): unsure at all n locations
ctcgcccaggcgagtaggggtgcttcctccataatcaacagccttctggaggaatcttctggagggcccaagtgggcctggttgctatttgcacccccatttttactaagtacacccccctgcctttntttggtgattcttttttcgtaaagttacggaaatttacgaatttcgtaacgatacttgttttctttccgtaatgttacggaaccttgcggattacataatcatcccctttttgacttacggaatgttacggaacctcactagttgtgcaacgatgcttccatttgatttccggtgtgtcacggaaccttacggattgtgcatcaatatattcttttgttttccagcatgtcccggaatttcacaaattgcctaatgatgggtgccaagcacctcacaaggaccaaacagaggtcgcatgtcatcaagcaaaggtccncggacgaaatanggtatgacacttcccatggaagtat

SEQ ID NO: 182539 - DNA, 131 bp, Glycine max
tcttccttgctctgaaatctgaatcttattcttagacaccgttaaaaggtcaataataactattatgtaatctagaacgctgctatgtattattttgcaacatagatacttggtagaatgcgtgttctttt

SEQ ID NO: 182540 - DNA, 490 bp, Glycine max
  unsure (1)..(490): unsure at all n locations
tgtccttcacgggcaacatgatagcactggcatgttctgcttcattgtctacaatnggaagcaagatgacagaaataaaagccactgacatattcaatgactcagatgctccctgcaagagaccagaaacacaatgtcaatgaatgaacttatgatgcagaatttatggataataggaatattgtgaatgtatgaatacagagttgtgatgatgtcaaagtaaaatcaaacaagggttgtttcaacaaacattattgctttaagattaattcaaggtcaaacaaataagatcaagaaaaagataaggtctcaaataatctcactggttgattgattnttgccttaaaacaaattgtttccaagagatcaaaggctctagtattcgattactaggcaatgtaatcgattaccaggagacacgtttacaaatcaacttttnaaaaagaatttgaaatttgaatcttgaatcttgtaatcgattaccagatgt

SEQ ID NO: 182541 - DNA, 67 bp, Glycine max
gctcggctcactacctgtcataagctctttttaaaggctccctcggcttacataagctgcaacttac

SEQ ID NO: 182542 - DNA, 368 bp, Glycine max
  unsure (1)..(368): unsure at all n locations
agtatgacagncaccgctttaggagtgctgtacaccagcagcgcttctaggccatcaagggatggtcgtttctccgggagcgacgcgtccagctcagggacgacgagtatactgatttccaggaggaaatanggcgccggcggtgggcatcactggttactcccatggccaagttcgatccagaaatagtccttgagttntatgccaatgcttggccaacagaggagggcgtacgtgacatgagatcctgtgtaaggggtcagcggatcccgtttgatgccgacgctatcggccaactcctangatatccgttggtgttggaagagggccacgaatgtgagtatggctataggaggaaccggtctgat

SEQ ID NO: 182543 - DNA, 491 bp, Glycine max
  unsure (1)..(491): unsure at all n locations
gatttcctctggtccggaagcacttcttttctcatgtgcacttcaactcaatctccgggttcgaagacaaccttctttcttcctttgttggcatgtttagcatagcttttatatttcctctcaatttgatctttgactctcccatgaagcttcttcacatagtccgcctttgcttgaccttctttatgcttaaaaacagaaacattaggcataggcaaaagatcaagaggagttagtgggttaaaaccataaacaacttcaaaatcatcaaaagtgttagtggtcaaaatctgatttttgcaaaacaagatatatagtgactgtttagcacgaaacaacctctngacctcactttttgtggctaaatagctctccctcacttcaagtgtttcactcttattcctctcaagtgtttccctctctntctcactctcaagtgtgttgctcactctttcttnttcttttatctctcgaagacgattgtctctcat

SEQ ID NO: 182544 - DNA, 126 bp, Glycine max
tctcacagtctttagattcgggagccaatccaacgccctgtgtccggatagctaagccaacattgtctatttctctccatcagtgagttgactctggctacttgaagcgatttagctctatgactc

SEQ ID NO: 182545 - DNA, 397 bp, Glycine max
  unsure (1)..(397): unsure at all n locations
tatgcatgtgtaatatgacgcatcaacaagaatctagccaaggctattgtgcaagcaatcaatggggcaaaacacaccanatgattatgatgatggatggctcaaattctcacaaaggtaaactcatcactttcaaattgagctttcaaaactatcatgacatgtagagaagaatcaaggatttcaagtcacaaaatgtcaagaacttttattttcaaaacaattacccatttcttgaacatatcctataattcaaagaaaaacatgcaaagtcgtacgtgcacacaaaattgacccaaaatattaaactaaaaatccgacgaaactaacaacattaacaaattaacacgactaacaaattaacanaaccaacataactagcaaaaccaaagaacac

SEQ ID NO: 182546 - DNA, 156 bp, Glycine max
gcctcacctttcaatgagctggtgaagaagaatgtggcatttaccaggttgaaagacaacactgtgtaaataagacttatttattaattctatgactgtgatgtgtgcagcgcattatagaattgcctatcactaaactacttggctactgctctg

SEQ ID NO: 182547 - DNA, 480 bp, Glycine max
tcggaagaaagtgatgaggtacaagccctataggcagagcttgattgagcccgagtagtcgaagagaagttcaagtccatagccatcaaagtctgaaaagagtatgatgaactaagggacgtcaatatggccaccgctgatgccttggaacgagaaaccaagaaggcccaaaaggaagaacacgtgccagcaaagttttgaggggctttatagggcagcaatagtaagctcaagctccgaagaggtgaaaggaatcatcacgggtcaaaggcatgatcttgaaggacgagctaaaggcttaccttatgtcgaaaagaaatttgtcccaacagttaagcgagactgaagggaatatgtgggccgtcatcgatgagtgcaaagagaagctaaatctagcggcgactcacgagcaaaggctagaggatgagtacgccaagatatcagctgaaagcgaagcaagggagagggtaattgattcat

SEQ ID NO: 182548 - DNA, 496 bp, Glycine max
  unsure (1)..(496): unsure at all n locations
gacctataaatctcagcttgagattatataagattgtatgggtattcaggtattgtaatactctcaataccatatgcagnttctcaaggagggtggttgagtttcattctgctaattggttttgcaatgatgttttggtacacggggttacttctacagaggtgtatgaacaagcatccactaatcaaatcttaccctgacataggtgaggttgcatttgggctaagaggaagagctatgatctctacattcatatacatagaatggtttttagtggccgctgagcttctgatattggaaggcgacaatctataaaaattgtttcctcatatgaacttcataattggtagccttagaattgaaggtaaaagtggttctgtggtgctagctgctatggtcatactaccaacaacatggttgagaagtttgcgagccttggcttatgtttctcttggtggcgtatggtttctattgttttgattggctgcgttgtgtg

SEQ ID NO: 182549 - DNA, 460 bp, Glycine max
  unsure (1)..(460): unsure at all n locations
ctcagctagccagctgcgctagcgncagtcaaaattatttttatttttatgttnttgtgaaaataaactgtgctaatctctcttgttctgtcttatattttacagatggcatctaagaaaaggaaagctccttctacacctacctaggccagatatgacagatctaggttcacatctcaagaagcctggaagagatatacagacattgtggtacctaggaagaattttcctgaaaggaatgtcattatccatcacactgagttcgatgaatttactgaagaactcgagcgtagaaactggcacaaggagttgacaaactttgtgaatggtagtattgatgtggccatcgtaaaggagttttatgcgaacctctatgaccccgaggattaaccacctaagaanggtagggtgagagggcctctgatcaaatatgatgcacacacctngaacacattcctga

SEQ ID NO: 182550 - DNA, 141 bp, Glycine max
gacccggatcttaagcacctgcggctgcaactcgcgccttatatgaaaagagcatgtgatcgggagtgtgactgataatgttgcccaatttgtcacattgacttgacagaatgcatcctcgagtgctatgatactctacat

SEQ ID NO: 182551 - DNA, 417 bp, Glycine max
  unsure (1)..(417): unsure at all n locations
aagaacatttcataaacttctttggccactggtaatcgattaccatagagtaaataccatatntttgaaatttcaaaaagctttttggaaaatgtcctttggccaaaccttntgcatcatcaagtaaagaatgttgtctaagaatctaagtactaacttcatcattgatcttgaatttccgagtcattaagttggataaaacttgagaagtgtttatcttgtggcatcatcaaaacttcatattaagtattgtcgcaacctacccttcagcgggagggcaacgcgagactcacaggtgtgtcttcgaagaaaggaaaatgcacggagtcgccaccaacgtttattcaaggaaaatgtctgataaaccggaaatggtgtggtctacgaactctaagtgtgaaaggttcnggagttgta

SEQ ID NO: 182552 - DNA, 92 bp, Glycine max
taatgaaggatgatcaccataacaggaagggtcgacgtaattgaacatctttgaagctttaccttcataatatatactctaatgcgtttgag

SEQ ID NO: 182553 - DNA, 421 bp, Glycine max
caacaagaatctaacatttctggttcataattccaacatgacgggtacgtaccctcctcgcttactttattataaattcttcaattttgacatgtctaatcacactctaatgtccaattttaaagagataaaagtataatcacatgaatggcaatatgctcccgtacgatacatgggtttagtaacgcaataagcggcctagccaataagaactggtccttgtggatgtatatatgcaaccggcacactatgtagatctataatatgtgctaatgtataaattaataagttgcaaaaaacaactaattcttataaaatatttgaagcctaaatattactgacaataggtataaatactatctacttgtgatagattattcgaatctattaatataatttatcagtgacaccttaatcaata

SEQ ID NO: 182554 - DNA, 498 bp, Glycine max
  unsure (1)..(498): unsure at all n locations
tcaatggagcttacatcatgtggtatcaagagcatcttcatttattatatgttcntttgcttcctctatctatttgttcggggaattctctttaattccttgttcttcatcttattctccttgtatatcctccattgtcttgtggtttggttctgtttagaggatattcaaaaaaataaaccgattaaatcttagatctacacttgttcttgcatttctatggttcaaattttgtagatctactctcgaatcatgttntttgtgttgattatagggtctatcattnttcattcataatattcttgtgttgaacctttagatctaaagtttcttccaanatatggattagaaaagaaacacaaaaatctaagtgtaaatcacttaatccatgttgtcttagagtcatgttcagtcatagtaattgtcacattatgctctaagtctgtgttgacattttattgtcgtgaatgaactctagatacaattgttcatgtattc

SEQ ID NO: 182555 - DNA, 498 bp, Glycine max
  unsure (1)..(498): unsure at all n locations
tgcaaagggtggttgctaattaaaagcccgacttaaggattctgtttccatgctaaaggagtctgagttgcgggctaccaatgagagggaggccaacaaagagcttgaggaggagcttctcatttacaagaaggaggttgtggagtagcagtaaaaagagtttcaaaaggccttcaagtaggtcggtttcttcgccaaggaccttgactaagatctctttgattctttaaaggatgtgaaagatggtgtcttgcttgatgaggaaaaaattcctccaaaggaggaagctgttgatgaggagcacggcgctacaaagtaaggtgatgatgcctctgtttangtttccttcgtctttatcttttctcttcattttttgaactttagccgcataggccttgtaactatgacaattattnttatatttcttcaatacatatgttttcctttgatgaagaattgcgcactcgttatgtatgtcttgtgtgtatgatatgtatg

SEQ ID NO: 182556 - DNA, 190 bp, Glycine max
agcaccgcagctgcagctaacgcaggattgctaaaatctttttttttattaaagtctaaaaagtcttttttacatattaacctcaaacaaccccggtagcattacattagacagacttccttgcaacgaaacctagtccctaaatttgataaggacggaaagagaactcattaagaaaccactatttaac

SEQ ID NO: 182557 - DNA, 397 bp, Glycine max
cttggaaatattatctatggtgatcatttcaagattaaaataacaaacaatcagattcaataaatctttcgtgcgttcatcatcgaggaaagaaaacaaagcaggcaaacactccagatctataataaacctacttagtacttcatcagctgtaatccttgctgaaacatcccttgtcagcattctcccaacaagatctcgtgcaggtttagatattgattcccacacccctgtttgaaaatctagtttgacattcttaatttcctcataaactgcttccggtgaatctcctttacatggaagaccaccaacctacagcgcatgctggagcaccccagaactccatatatccaccttctaagaatatctacacaacaacacttctagcgcaacatat

SEQ ID NO: 182558 - DNA, 158 bp, Glycine max
tgcctacaagattgacatgcctagtgagcatatgtaagtgccatatgcatatctacatgactgtaacacttaaagttagactgagctactagctgcacctagccagtgcaagcgtactagctcagatcgccttacgacttatctaaacttcttttttt

SEQ ID NO: 182559 - DNA, 445 bp, Glycine max
tgcttgtgaagcttctatggtggctgaatctttgagcttttttgtatgcctttaatggcgatcttccaccatggagatgtagcggaagacacatgagaagaggtgagaggaggtgccatccactaacgaataagccatggaagaaggaacttcaccaccaagatgagccttagataagaagcttggagatgatgcttcaatggaggaaaagaaagaatgagagaaagagagagggaggagcaagaaattgaaggaagaaaaagggtgagaagttgaactttgagttgtgtctcacaagactctcattcatcaaagttacaataagtgttacacatgtttctatttatagactaagtagcttccttgagaagctttcttgagaaaacttccttaagaagcttccttgagaaaatatccttgggaagctagagcctaactacacaca

SEQ ID NO: 182560 - DNA, 238 bp, Glycine max
atactctaagtcacgcggcgccttcaggttgccgacaagccgcccttgtatctttattgatttcgctacatggcatcttctttggacgaacctgatggactgacacctgctcctgtcatgctaaagaatatctctttacttaatcgataataatattgcatgcacttgaatacttgtaatcctcaggtcgatctgtaaattggccactagaacgcactaaagttactgaggctctaat

SEQ ID NO: 182561 - DNA, 449 bp, Glycine max
  unsure (1)..(449): unsure at all n locations
atatggacgaaagtgcacaactcctattcgttggtattatttggagaaacaccacttcttggacctgaaatgctactacagattaatgaacaagtgacgttgattcgagagaagataaaagcatctcatgataggctgaagagctactatgatagaacgaggaagccactagattttcaggaaggagaacatgtgtttntgaaggtttctcccttaatcggagtcggaagggctcttatagctatgaagttacacccaagtatctatgtccatatcacattntgaagaagattgggcctgtatcttatcatatcgccttacctccgagttatcgaatttgcatcctgtgttccatgtctctcaactgagacggtacaacccagatccatcacatatactcgcagtggacgaagtacgtgtgaatgataacctcacctatagagcacaac

SEQ ID NO: 182562 - DNA, 421 bp, Glycine max
gtgtatactgacagtaaccagaatttcaacctagaaatcacgagtagtgtttatgctgcttaaggcttacattgttacaatttatgtttgcttatgctcaattttattggataacacaattcaagagatcttaagacttattgtgattcacagatccagccacaactcatcacctcaactcaatttcttcataggcatcatatacgaaacttataaaacaaaagatatatttcaatgagactacttctaaatattgattgtggacatgttatgaactaattaacatgcatgaattatactcaaaagtcaaatgatcggcttagaatcgcaagaatactttatcaaatgtatctagaatccaatcacaagactcaaattaacacaatcttataacataatgtgacaattattattactatac

SEQ ID NO: 182563 - DNA, 208 bp, Glycine max
  unsure (1)..(208): unsure at all n locations
gtcacctgcggcatcaagcntttacttgcaatgcaagattattatatttgcctcttcttagacccacttcgatcctttcgccggtgaacactaaatcgactcgcttgaaggcctgccatttaaatgacgcttctatctattgggctaccactcctggctcaacgttacttacgcacactaatgctctcaagctagtcaatcagcatag

SEQ ID NO: 182564 - DNA, 469 bp, Glycine max
  unsure (1)..(469): unsure at all n locations
cgcaatgttagttcaatatagtcatatataggtctttgtggactctccttcaacctctcaagttcaatacagtcatatattgttgaattccgcctcatttgggcgttacttcatttactaatcatcttattcaaaatttccatattctaatgataaaaaaaatacaaacatactatataaaacaagaaataatgttgctatattctgtctagctaattagatcatactaagtggagttcattttcatgttcttcaactataatattggtagcattcataataaagagattaggccaacgttttaattacaaaagaaaaggctaacgtgatgttttggaagtccattcattcataataactctgatcttgttagtcatggagaaaatttaagtaaatgttgaagaaatttgacaaagtatctgatttttgaatcacangaacatgtgaacatgtgatggactcgcacttg

SEQ ID NO: 182565 - DNA, 324 bp, Glycine max
  unsure (1)..(324): unsure at all n locations
ataaacgaatgtcccacattagtttcatgacacgcgtgcaacaatgatgatttataaatttatgcaaagctagtcatgcatgcacctatgcggacactcaagcatcaagttttggggtcgtgtgacactagggctcacgactcaagcatcaatntatgcattcgtccgagtccatattgggtgttcggaacattccacagcattcacccttcaaagtaattttgctacctaaacatatgcatattatgtgtgtggcatctttgctacctaaacatatacatacatattcaaagcatttttgctacctaaacatatacatatata

SEQ ID NO: 182566 - DNA, 430 bp, Glycine max
  unsure (1)..(430): unsure at all n locations
tgagctntagttgccttattcttgggtaggctcaattgtttctcagaatntagagtctgaatctaataagttcactaactctggtgtttatgaactggtaggtggtggagatatattntatgctggcttgaatatcattnttctgtacatatgtcaacttcctattgatcagatgtgtggcacatatgtcaactcctgttatatgttctgtaacagacattntcagcttattaaaatttgttggcaggccatacgatcatgagatggtggacttgtagtttgagtgaactgtttttctgaaaatggagtatctacttgtaataatcttgcttgtatactctttntatttgtttatacatatgctaatgtaggatntattttcaactcttttcctcgtgtctaatttgccagcttctcttaattgtgactt

SEQ ID NO: 182567 - DNA, 132 bp, Glycine max
caaaattaaaatacattatgatgatttcttaattgaaaagatcacttttccaataagcatcaaatactgctctctgtagaagctgtctactttgagcgatggatatcttcatattagttgtagatcctgtac

SEQ ID NO: 182568 - DNA, 477 bp, Glycine max
  unsure (1)..(477): unsure at all n locations
tctcttaaataaaaatataatcttcatttttgtctaatgccaccagattgcaaacaccactcaactagactggtaatctacgtaggtatntgctatgtttaaatataacattttgggaatgatattcctaggaacatagttattaacactgaatcaaactggctggatcgacagccagtcctccgatcaaacagatcatgaatctgttccagaataaccataaaactgtttaacaaattaactggtcttaaaaaaaaaaaactttgtaccccatcgcccagaggctcttctctatgcgaaggtataggggagggatgttgtacacagccttacccttgcatatgcanagaggctgtttccggattccaacccatgaccaacaagtcaccaaggcacaactntaccgctgcaccagtgctcagcctcataacaaattaactggtcttaaccacataataacagtagatcactggatca

SEQ ID NO: 182569 - DNA, 240 bp, Glycine max
acctgcggcatcagcttaagtttctattgactctagattgtgcaaataaggacttagatctgtatggcgatctacagaagaacatataccacagactccgcaacaggtgcaactttattgatattgacagtatcctcttatacaagaactgcttgcctagctcatctgtatggatacatcatactctccaatccagtcctcctatatctcttacttattcagtccatagaaatgcattat

SEQ ID NO: 182570 - DNA, 476 bp, Glycine max
actcagctttaaagattgatctcctgacatagggggttcatggtggttcatacaatatggaactccttaagatgcttatgaggatcttcacctgctagaccatgaaacttgggcagcaaatgtattagttcaatcttgagaacatatggaacatcctcatcaggatattgaatgcacaagctttcataagtgaaatcaggtgcaaccatctccctaagagtcctctcatgatgtggaggttgagccatgttctcagtatgaaaattagtagttgaatgcttaaaatcagaatgttcagaatcactagcaacagaatactcagaatgctcaaaatgctcataatgcacaaaatgatcaggatgcacactatgcctaagtaatctatgaaaggttctatctattctacgatcaaagggttgcaaatcacctggatctcccttagtcatgccctatatgcaacaaatcatgtgtttctc

SEQ ID NO: 182571 - DNA, 210 bp, Glycine max
ggaccttaagcgactgagctgcaactaaatgaatgcatggaggttttttataatagaacggatggattgttgagatatttttgaagtatgttaaagtgtgggggataagaatattggagtatattgtggtatgaccttgtgtggtatggggtgagatgttgttgaattttcagaaattatttttgggttgttagcagtggaaattttttt

SEQ ID NO: 182572 - DNA, 440 bp, Glycine max
catacctccattgcagatcagttgtgcctgagcttgcttccctatctttatcaattttgttcatgtttatgagtgagttgaaacttcctgccgaggaccaaaaggtaaaaaaattataaatataggaaccaaaataaatggttaaaactatagggactaaaaagaaaaattattacaactatcaggactaaaagggtagttaaaccaaaataaaataaactagtgcaaaataatggtggtgtgattagacacttttaatcctaaatggctcgttgtagacatatatacctctacatatctgtgcattctgcaaccaccaccattagtggaatagaattctaaatgcaaacccttctatggtatattctatatacgcattattagtctaacactacaatagctacgatacatggagatgtttgaagcaagacttataatag

SEQ ID NO: 182573 - DNA, 189 bp, Glycine max
  unsure (1)..(189): unsure at all n locations
tctttacattaaatgacttttgtcttcaatntctatagnggatgactntctggttttatgcttcaaatcttcacatttccacagttttatcaaactgcataaatgctaccctcctgctatgtcagcgacttttttccccgtatcctatgctctggctttgacattactgtctggaacatcaacattttt

SEQ ID NO: 182574 - DNA, 408 bp, Glycine max
  unsure (1)..(408): unsure at all n locations
ttaaatgcaggagaagaatctatctctctaactaataatgcaatttatctattatgctacaatgagtgaatccaagagaacatgctcagtgagattaatttatgagcaaaatggcaactttctagcaaataggattcttgtttgggaacgggcaaattccgcacaccaataaaaatgtggaaaacctatacaaagcacgagatactaagtcctcaatttgagcacctatgatcttgcatgctgtcgaaaggttgtatttgagttgattgaggaaagcaaaattaggttagatctgcatatattcactccagtntttatacatatgcggtatttagcaattcaaatatagagatgttggtcgttgtttgcataaaaagggaatataaaaatattaataaatctgaacct

SEQ ID NO: 182575 - DNA, 149 bp, Glycine max
gactcaatcagacatccgagtaaaaatttattgtcgtttggattgctcagagattcactatacgtattcgcttatcgaagatgtatctactactatatgcgttcacatatcgaaatgctatgtactctatcacgtattcgcatatcaaa

SEQ ID NO: 182576 - DNA, 430 bp, Glycine max
  unsure (1)..(430): unsure at all n locations
ntgagccaattcaaacgacaataactttntactcggatgtttgatatagtcccgtgatataacgagacgctcgaaattgaatgttcaagctctgagctaattcaaacgacaataactttttactcggatgtctgattgaggcccgtaatatatcgagacgctcgaaattgaatgtggaagctctgagccaattcaaacgacaataactttttacacggatgtctgattgagtcccgtcatatatcgagacgctcgaaattgaatgttgaatctctgagccaatccaaacgacaataactttttactcggatgtctgattgaggcccgtaatatatcgagacgctcgaaattgaatgtggaagctctgagctaattcaaacgacaataactctttactcggatgtctgattgagtcctgtaatatatcgag

SEQ ID NO: 182577 - DNA, 453 bp, Glycine max
  unsure (1)..(453): unsure at all n locations
catcattgcaacanacattgactggttatgttgtttcttaaagnaaaactccctgacagaatcgaaatgctggaagtaacttaacaagggaaaagtatattgccgaatcttaaggatcaacgagttcattcgatcgaatgaaccatttaaaagacaggaattatataaaatgaaacgtaaattgcattgcattccaaatatacagtttacaggaacttaaaatggtgcacatacatacattctccttgcgtactcagttctctctgcgctgggaactttgagtgtataaggatttgtataaatgatctgcgacctctaaatctgactaacaaactgctatatatagacattcgaacataaactaccctaacggtcgaacactatcctaatgccaagtgtcctgctacgtataccttgcatgcatataactgctccttagaacggttatccaca

SEQ ID NO: 182578 - DNA, 127 bp, Glycine max
tttgagtgtcattgctttcctgcagtaatctgctgtgtctggaagatatagtactacgacgaaatttgccaggcttatggtaggttgatacgcgaattatcttcatttgttgtctacaatataactt

SEQ ID NO: 182579 - DNA, 407 bp, Glycine max
  unsure (1)..(407): unsure at all n locations
tctgcattctcctccaagctcttccttggtaacgctaccactctattctctatttgctttactcagcctaactcttgtgtcaagatcttgaccattnttactactcttgccatggaagggtagaatccggaaaacaagatatgacttccttcctcctagcaggcatcccaagatcttttcaaattcttctatggttggtactaactggaagtccccaaatatgaagcatctaagcaactggttgtagtattgagcgagggatcggatggcttcaacggacacttctatcatggccaaatcccaaattttcccatatgccttgcagaaggctngatgtcaaacttgatccatccactgccctagctcttgcaagctggctagttctaggctctngactttgacatgat

SEQ ID NO: 182580 - DNA, 423 bp, Glycine max
  unsure (1)..(423): unsure at all n locations
tttagatgggtgtgtgtttctaagctctatcttctaaaggaaagtnttctcaaagaagcttctcaatgaattcttctcaagatagcttcttaaggaagctacctagtctataaatagaagcatgtataacacttattgtaactctgatgaatgagagtcttgtgagacacaactcanagttcaacttctctccctttttcttccttcaatttcgtgctcccccatctctctatctctccctctttcttttcctccattgaagcatcctctccaagcttcttatccaaggctcatcttggtggtgaagctccttcttccatggcttattccttagtggatggcgcctcctctcacctcttgtcctctgtcttccgctgcatctccatgggtggaaatcaccattaaaggacctcattgaagctc

SEQ ID NO: 182581 - DNA, 437 bp, Glycine max
aaacttcctgcttttattcgttgaccacagagtggtacctggagatatgtcgcgggggtcaagagaccttgtggacgtcaggtggggtgctattgcccaaaaccaagcttgaccaatcccgacccaacccgggcatagtcagtcagtgagaacctgtgatgtacctaaacaggcgagctcctggcagtcaacagataaaaggaacaaagaccacaaagcaaggaggcttgtgtggtggctagccaggtgtgaatctgtgtgatatatgggatatgggctttggtaatcgattaccaagggtgggtaatcgattacaaggcttaaaaatgaagacaggagactaagatggtctctggtaatcgattaccaacgggtgtaatctgataccaggctcgaaaacgaggtcaggaagctaggagggcttctagtaatcgatt

SEQ ID NO: 182582 - DNA, 495 bp, Glycine max
  unsure (1)..(495): unsure at all n locations
tatatacaaatattataagtgctgttaataatgttctccaatttaaatcagaatttctctatatgggaaagaagaaatttagtgagtccaaatatttgttcaatattttaataacatctttgtgactatcagaacataccaattaaattgtattgtttgtttgggtacatttgcctaaagtaatttttatatatagagcgaatgataatattttgtattggtaatctgttctgcattttcataaatatcctcatatcaacattgatgtagcaattatggctttattttaaatcactacataaaaattgaaagtctttttttttatataaggaattgaataatgtctgtagtagggctcttattcttctttcaatatacatcacccaaatgttttctttcctatntatacacacacacatgtggttntgggtgggccttataagaaaaggattttctaattaaaatattctatagaaatctcttggacctttgtgt

SEQ ID NO: 182583 - DNA, 485 bp, Glycine max
  unsure (1)..(485): unsure at all n locations
actcagctctgggtggctggtttatagaagtcattgcggattttcttaatggcattgcctctaactaagttgactcgtaagaacgagaagattgtctggaatgagaagtgtgagcaaagtttccaagagttgaagaggcggttgacgacagctccagtgttaattntgcccgaccctaagaggacattngaagtgcattgcgatgcaagcgggcaaagcttgggatgtgtgttgatgcaagagggaagagtagtggcttatgcttcacgtcaattacgtcctcatgaagttaactatccgacccatgacttggaactagcagcggtggtctttgctttatagatttggaggcattatttgtaccatactcgttcttgaagtttcagtgatcacaagagtctcaaatacttgttcgatcagaaggaactcaatatgagacaacgaagatggatggagttcctcagcgattatgattctggactttc

SEQ ID NO: 182584 - DNA, 174 bp, Glycine max
acctgcggcatgcgagctctcttgagaaaacttccttgagaagcttctatgttaaaacttccttgagaagctagagcgtatctacacacacccctctcataacctgctcacctcctggacctaaagcaatatgtctcttttatcctgagacatactccttcatcctcaacatca

SEQ ID NO: 182585 - DNA, 126 bp, Glycine max
cgaaaccatgctcaatcatgaagatccccaagcgacagaggagctactctcatcagagactgagtgccatccatccctgagagcagctctagcacgcataacgtgactgaccgaggccatacccca

SEQ ID NO: 182586 - DNA, 358 bp, Glycine max
  unsure (1)..(358): unsure at all n locations
acttaaatcattgggttgtgcataccctaatntcgtccggggacctttgcttgatgacatgcgactattatttggtccttgtaaggtgcttggcacccatcattaggcaatttgtgaaattccgggacatgccgaacaacaaaagataatattgatgcacaatccgtaaggttccgtgacacaccgganatcaaatggaagcattgttgcacaactagtgaggttccgtaacattccgtaagtcaaaaaagggatgattatgtaatccacaaggttccgtaacattatagaaagaanacaagtatcattacgaaattcgtaagtttccgtaactttacgagaacagaatcaccacaaa

SEQ ID NO: 182587 - DNA, 178 bp, Glycine max
gatccttgagtcacctgcggcatgcaagcttgcacaccatgtttaaggtgctaagtgtattatttttgagaggtgattttgtatgtacccgaataaaattgagtttagcaacatgtgcaatgtctcttcataattaatgatctcacaactgttacctactctatgatctacattgtct

SEQ ID NO: 182588 - DNA, 458 bp, Glycine max
  unsure (1)..(458): unsure at all n locations
aagtctcacgattgtcacgtgctcatgcaacatttgttagttgtggctatacgagacgtcttgccaaacaaagtcaggttaacgataactcgcctatgctttntcttccattctatatgtagcaaagtcattgatccactcatgtttgatgagttggaaaatgaggccgcaattatactgtgccagctggagatgtattntccccctgctttctttgacatcatgattcacttgattgtgcatctgatcagagaaatcaaatgttgtggtcctgtttatctaccgtggatgtacctggttgagcgatacatgaagatcttaaaagggtatacaaagaatctatatccgtcagaagcatctattgttgagaggtacattgcataataagccattgaagtttgctcacaatacttagagaacgctgaagatgttgggctctctgagtctcggcatgatga

SEQ ID NO: 182589 - DNA, 403 bp, Glycine max
  unsure (1)..(403): unsure at all n locations
tgtgctaatgtggattacaggttaaacttctaaggaatctaattattaacgatactgattagtgtccgcatagtccggtgcatttgttaaaagcaaatagtataatgcgacttttgaatgttcttaagatgaaaagtagcttattgaatcagcggnggtgtatttaatttatgtaatgtaataataagtctgcaatgcacttttgggttgaaaatgtaaattagctactctctcttatctctgtcaaaaaaaatgaatagatatgcatacgatgtcgctatgtggccagttatggtgttgctggtactgcatgtttgtgcagttatactaatataaatactttcaatgacaatttactagaagcatatactcanagcatacatagacactaaatgtgaatact

SEQ ID NO: 182590 - DNA, 166 bp, Glycine max
tcttaatgaagcttctcaaggaagctacatgaagctgcctccgaaaaattctgccactgatggatcatgtctcaactccatcgtgctgaagtatgcactcgcaacttatgagtctgtcgtagaacttaccacttcccccctcctacgtgttgccagagctatgcgc

SEQ ID NO: 182591 - DNA, 495 bp, Glycine max
  unsure (1)..(495): unsure at all n locations
gtgataccaactgaaataacaataaacacactacaactattgtggttgaatagtgagtatatcaaacatataaacttttgcaatattaaagcagatatcgatagtgaaatatatatgtgtcaagtcatccattgaagatatatatgtgtcaagtcattcaaataaatacttgttgttaaaaatgcgatagagagtgctataagaatgattaataaactgatatcactttgatttatactatttgactcaaccttagctacatgcagttctcctttagtcactagtaaaggattccactaatcaaaacttgattacaaaacaagtattctaacctaccactcctggttttacaagtactcataataccactcttggtactttcttatgcccttacatttaagaaacccaagtattggttaacactaagcgactcttgtctttcacacacaaaagtntaaatgaatacaagtattctgtcacactcaatgagtgaat

SEQ ID NO: 182592 - DNA, 490 bp, Glycine max
  unsure (1)..(490): unsure at all n locations
gctttaatgttntagaaagcatgtaatcgattaccagtgatttgtaacgttttaaaacagccataagaaatttgaatttaaattttaaagttgtgtaatcgattatagtaagttggtaatcaattaccagtgttaaaaaattcaaatttcaaatgtgaagagttataactctttagaagtaactgtgtaatcgattacaccattgattagctaaaaaaaagattacaccattatggtaatcaattaccagtaaggattntttaaaataattcccaacagtcacatcttttcatttaaattttgaatggtcatcaaaggcctatatatatgtgactnnggccatgaaatttctcagagttnttactaactaaccaaaaagtcttatcctctcaaaagattaaattgtcttatcttctaaaaattccttggccaaacacttgtgagattcaataaggaattgagtgtttcattgtgaacatctatctctttc

SEQ ID NO: 182593 - DNA, 489 bp, Glycine max
  unsure (1)..(489): unsure at all n locations
tatatgataagagagatgccttgtccccttaaatggtcctcttacattagtacttatgttgtccttgacctcctttcttgttcctctccttattaaaatctgttacatatttgctaaatttgttacattgctagtttggtttttttgcttatgtaacaagtatcataaaaactacataatatgaaattatcaaagactaaaaaagttcaagaagaaaataagaaagtcaaatgatagccttccttatctgctattctgagtgncaaagagatgccatcatcttctcttctacctttgattgtggtgtcaacttcgaccaaattgtcatcctcttcaaatacatataaaccaatntcacttgcttcgaaatcatctcgatgataatccaattcagatacaggtccataaccaccaacattatcagtgtccccacttattaacttgttgtaatgctgtgaattccatcaaaggttgctaataatgggttac

SEQ ID NO: 182594 - DNA, 476 bp, Glycine max
  unsure (1)..(476): unsure at all n locations
tataaaactcagcttgaggattatgggggacccatcacatgtggtactatgtggttgtcgggcgatggtgcacaacaagtntttccacatccacaatgcgcgcataaacccaccatcccctgtagcccacctccaactgagctcacgtactcccacgtagcccatatcctcgtttctctcaacaccgggtccccatcaatcctcccaagcttccacaacatccaagcaaaacaacattcacacagcacaagctatcacagccaagcaaaacagagcaaaggcaaaaaaactctgccaaaacaccaaccaaaaatcacagcttttcccactcaaagaccccagtaacaattccttcgatccaattcgttaaccgttggatcgactccaaaantttactggaagtctatagtgcataagcctacattntgaccgtggtgatctactagcanacatccagaactcattctgtactactc

SEQ ID NO: 182595 - DNA, 192 bp, Glycine max
agcttcatgaatcttagaagacttttttatctgagagttctacatccgagggagcttctaatgattaaaagtggcttgccaatgttctaatgaatacttgtttaatatatagtgttatcagtgaacggggataatatctactgctcataaccaatatttaaatcctaattatatgcgccctttttccctaaa

SEQ ID NO: 182596 - DNA, 416 bp, Glycine max
tgctaccgatgaagatgttgacttcttccgaggaatgaatgtcgacctcaatttgctggagaacttgaagagcactctgagagtggttggaggtgtgcttgatgatgctgagaagaaacaaaccaaactcttcagtgtcaaccagtggctcattgagctcaaggatgttctttatgatgccgatgacatgctggatgatatttctaccaaagctgcaactcaaaagaaggtacgtaaagtgttttctcgctttaccaataagaaaatggccagtaagttggaaaaagtatttgggaaattagataaagttctataaggcatgaatggtcttcctttgcaagtgatggcaggggagagcaacgagccatggaatgctctgtcaacaacatctctggaagatggatatggtatgcatg

SEQ ID NO: 182597 - DNA, 217 bp, Glycine max
acccggatctaagcaccgagctgcgctgaactgcatttgatttatttcataatggaacagtgaagaaggagacaacaaccttaggctgatccgttaacagagaaaattgaatagcgcttacgtggaggcagaatggctctaatgttaatatttttgattatatgtcactcaggctgtgataccgggtaattgatccttaagacaatcttgattctct

SEQ ID NO: 182598 - DNA, 482 bp, Glycine max
  unsure (1)..(482): unsure at all n locations
tgccacccagctcgccctggcgagcagggttgctttctccataagcaacagccttctggaggaatcttctggagggcccaagtgggcctgattgctatttgcacccncattttttactaaatacaccccctgcctttttttggtgatatctttttcgtaaagttacagaaacttacgaatttcgtaacgatacttgttttctttccgtaatgttacggaaccttgcggattacataatcatccncttttttgacttacggaatgttatggaacctcactaattgtgcaacgatgctttcatttgatttccggtgtgtcacggaaccttacggattgtgcatcaatattttcttttgatttccggcatgtcccggaatttcacaaattgcctaatgatgggtgccaagcacctcacaaggaccaaacataagttgcatgtcatcaagcaaaggttcnccgacgaaattatggtatgacaatag

SEQ ID NO: 182599 - DNA, 101 bp, Glycine max
atccgacccctttatgggggtcgcctcatatagacgagagtactctagcttagcgctatgtgctataggggcctatttttactcttaagaccctagattgc

SEQ ID NO: 182600 - DNA, 167 bp, Glycine max
tgtgtaacctataagagctcgtatgaattattctctgaaactatagctgaacattcttgagtgagctggattgctcgcctcttagccagattgatgttattccgggtatggactatttatcttacgcccatggtctgttgaactgattttatattaacgtgacttta

SEQ ID NO: 182601 - DNA, 98 bp, Glycine max
gaggccacgcgcgtgcttacctcagcttatgttcaccactcatacatatctcagcactagtttcttgtaaacgacgtgcaccttatcctcatcgtcct

SEQ ID NO: 182602 - DNA, 403 bp, Glycine max
tttcgattcattctatgtacccgcagaggtacacatcgcgtctcttgctttatgattctagtattgattacgttttataccccctgttgacgagcttaagccattttacttaagtcgtttctcgcttaacttacaaatataataaaatgccaccgaacgttcgaattgtattatccattatcctctgttaaaataaagtcccaccgttcggtcatgccgtaatcaccttggaaatcaacacgatgtctaacataatttattacgtcaaaaatatctttttagtgaagtaaagcggaatatcaatcggacgtcttctctttgggatatgtcattcttcaccgaagtgataataactaaagtggactaagggtaaatcaactcgcctagtcagctcgccatataa

SEQ ID NO: 182603 - DNA, 96 bp, Glycine max
  unsure (1)..(96): unsure at all n locations
ctgcactataatggtattggccggttttttttttntaatatcaatgtctcaattgatagatgatacaaactgtatagtccatgcactaactctttg

SEQ ID NO: 182604 - DNA, 77 bp, Glycine max
tatagaagaaatttatgcattgcctgctgggtgctggcactgatttttcacagacagtaaatgcagctatttcttgg

SEQ ID NO: 182605 - DNA, 491 bp, Glycine max
tactcagccttgtgggtaactccaattataaatgaagcggtcaggagtcattttataatcttacctcttgagtcttttcgataactcgaaatagatgataataactcaatatatattaaccttccatatcccatgaacaagatcaagtttgtacatgcgccacaatatacaataatcttcacattgtcacctgaaatctaatcaataagtgaaagttcatcttcaaactatatttcacaaagacaatgaagatcatcattatacagaaatcattgctatcataagtatcttctttgctaatacgttatctcatatagatatcatactctagactgttcttataaaaagatcacacgttaggttgtcaaactaataagtacaaatgccattaagataaagtatctctatttatatgtggatgtttataaccctttaatggaaaatgacaaaagaatgaacgatgatgatcaaatgcttatactatgtatcta

SEQ ID NO: 182606 - DNA, 107 bp, Glycine max
  unsure (1)..(107): unsure at all n locations
agcttcttaatgcttgaaggcacatgttgttttttaatcanaagtngatatttgtcaatgtttatgctccttgtgatcctttgggaagaaagcttgatagctagtac

SEQ ID NO: 182607 - DNA, 325 bp, Glycine max
tcacttgagtccacagttttaagcattctgctcgaaggagttatacacacataagaagtgagttgaaattaacagactttagaactcttttgatagatatgttctcgacctttgagcaaatacaaaagttagcaaccatgaacatggacagtgaatatcctactgtgaggatccatgatggcgatattattataaaagatattgaaatatgccttaaataaagagacttaattatcaattctcgcattaagagattagtagaacctttgaagatgcatacaagtacataattacatgttcataagatagacacaatggcgttcat

SEQ ID NO: 182608 - DNA, 155 bp, Glycine max
ccgaagaaacaccatttcctagttaaccatgcattaggtaccatctcaattattttgtgtggggtttttttaaggaacacggttgcaccaaagtgatccttttttgttagcagtaccaaagtctcaaatgacatttactccacgggttcgacaca

SEQ ID NO: 182609 - DNA, 478 bp, Glycine max
agcacgctatgtcgagtgcataccctatttcattcgaggaccatctgtttggtgggatgcgaccttcgcatgatcgcttctaggaacttgaagcccatcgttaggcaatccgtcaagtttcgcgacatgtcgggaatcgaaaagaggcattgttgcataatccgtaaagtttcgtgacattacggaaggaaaacgagtatctttatgtaatccgtaaagttccgtaacgttacagaaaaagaatcagcataaaaaagtaaaaggggtgtatttagtcaaatggggggtgcaaatagcaattttcaaaatctgtgcccttctagaggattctgggcatttccatgcttaaggtggaagaaacctagctcgcttaagcgagctgagcggctaccacctcccctggtttattaaagaatggcttgtgggagtcccgtaatgcttccgctaaattccataaccctaataagcatatttcact

SEQ ID NO: 182610 - DNA, 100 bp, Glycine max
cttcttcgagaagcttccttgagaggcttatttgggaagctcgattttaactgccccctatcacctctatatgtacaataaatacttttcaattcggcat

SEQ ID NO: 182611 - DNA, 125 bp, Glycine max
cggaacaagataagcaggttgagcatttagttccagtcagaataaacgacgactaaaaacagaccctgtaaagactaaactacgtatagattacacctgcagttatacatgtattgggaacaaat

SEQ ID NO: 182612 - DNA, 460 bp, Glycine max
gtccttaagaagaatcctatagaagctagagcttagctactctttcttctctaatagctaagctcaccttcttgagatgagaagctagagctgtactacacatcccctataatagctaagctcacccccatgacagaatacatgaaaatacacaaacaaaatccctactacaaagactactcaatatgcctcgaaatacaatgctaaaaccttatactactagaatggccaaaatacaaggtccaactgaaggagaaacctattctaatatttacaaagataatcggactcatacttagcccatgggctcgaaatctaccctaaggctcatgagaaccctatggccttcccttggatctctggcccaatctacttggagtcttctatccaatgcccttgccgtggaagattgcatcattcaacactgtgattaatgttagtggtaagacaaaatacaatg

SEQ ID NO: 182613 - DNA, 173 bp, Glycine max
aatttctcttttattcatgatacttaatctcatgattatcgatatttgtggatcgtttaatagatctgaatatcatattatctgtgtgagtctaacggtttatactatactctaagttgctatacagatactttctggatacttatatacgcttatattatttttttttttag

SEQ ID NO: 182614 - DNA, 430 bp, Glycine max
  unsure (1)..(430): unsure at all n locations
ataatataacaacanaagcgaagcataataaccataaacaaatagtctagtctatgtgacatcaaaatcggtgaattcaaagtaaactttaattttgctctgttaaaatatatccttccaaccattcattggataaaaatatcttttgacagatcattatagtatagcaaaataatatcattactctatactctacagtataacaccaccaataatgttataaataaacgtatgcactatgcaccatgtaatagttatccagcacgtgaaaggcagggacgagtcgaaatggctgatacagagagtgtgcagattcctcaagtcaaacttggaactcaaggccttgtggtattatatgaactctatactctatcttgttctattcccgcttcagatattctctcttattccaattatcatgatgagaaaa

SEQ ID NO: 182615 - DNA, 165 bp, Glycine max
atgactagatgctatgttaaatgggtttttgtgaaactgtattcgtgttgttggaccttatctgtacttaacatgaattgtaaatcatgtccttacttttgggttacaactgctatctggtaatcttcctttatatgtatacaaaattgaagctctgactttttc

SEQ ID NO: 182616 - DNA, 382 bp, Glycine max
  unsure (1)..(382): unsure at all n locations
tgagatgtaattnttgtggaggtaactatcagaatgaccactgttcagcacctagtgatggacaacaagaagaaaaggcctattatctgcaaaaccaagccagacctcaacaaaaatttcaaggaagctaccaaggctataggggtggctcatgttcaaatcagccttatggctggagaccacataataatgcatgctctagtccaaataacacttcttttttaggtcattctaacaactattatggaggttcttcaaataaaggtccacaacaacaacaagctcaactagatagatngtccaagatggaagatactttaaaccagttgatgcaagtatctatcttaaaccaaaagaacattgacacttctattaaaaatct

SEQ ID NO: 182617 - DNA, 264 bp, Glycine max
ctccattggaagtgccgtagacaggctttgtggttgatttaaggatggcctttgtggaaactgggtggcgggtaacgagaaagattgttattggctgaataaaaatattgttgggttggtgggaaatatggccctacaagaattgcaaccaccacatgggcttctctcttattcatacccttcttatttgccccacttatttcaatcgctctccatagatgatcaaatttgcctcttttcgcgacccccattatcctttccctg

SEQ ID NO: 182618 - DNA, 349 bp, Glycine max
  unsure (1)..(349): unsure at all n locations
tacccggaattctggaaacgatgtattntgaacgattatatatatatatttatatatatatatatatattattcagtggatatgcatatatgttcttggtagaaataggactaatgggggcaaaatattgcggttaaactaattaaggaagagaaatccataactgggaggttatgggttaattcctaattaaatacgtaaaaatcatcattttgcatgccacttggaatttaacgaaaccaacctctgaaccacgctcggagatttattctgagcgttntgatatatatattgcgtactttcgaaaactggccccgacggactcataaaaacgcgaggaactggaacc

SEQ ID NO: 182619 - DNA, 310 bp, Glycine max
cacccctcgcaatttttgtacccgtgtggttggtacctgtgatgatcgctaacctttgttcttagagcagaatgacaacagtagtggacaagaagtgagaatctttcgtggagccggcgagctgacatgatgacgttgagattattttgggagagaagtgcaatttcgtaatcaacctctccatagctggctcccgaaattcttttgttgatttgaagatgtacatcacatatctaaatatatgtatgaacaaatcttattctcattatgtgaatgatgtgtactaggttactatatatatatatatata

SEQ ID NO: 182620 - DNA, 434 bp, Glycine max
gtctggtatgggtagggcttaatatttttttccaactatgttaatattgcagggggcaatttcagatggaactgaaattatgcactacatgttggattctataatatatcagagggaaagttgccaagacattaaacaacatgaaaggttactacttactagtatagctactcagattcaaacatattcaagctggagttgtgtgccagtgtttgattttatcatgggatcaagaacattgcattctactgaatgaatttataaatttggtcattattttttaaagaagctgtgcattatgcatactttgccaacttgtcctatgaggttctcaacatgagatcctaaaggaatgtggacttcgaaattctaatactatattattgagtagcctatatgcatcaagaaaagacaagaccaaatgaaaccttgac

SEQ ID NO: 182621 - DNA, 470 bp, Glycine max
  unsure (1)..(470): unsure at all n locations
cgaccttaagcaccgcggctgcagcttgaccattgaattgcggagacgttttttttctattnncaacgactcgatatattatgcgcctgaatcggacatccgagttaaaaattatgaccattagaatttctcgagagctttcgttgttcaatttcgagcgtgtcgatatattatgcacctgaatctgacttccgagggaaaaaatatgaccatttgaatttctcgaaagcttccattgttcaatttcgagcgtttcgatatattatgcgcctgaatcgaacttncgagtgaaaagatatgaccatctgaatttctcgaaagctttcgttgatcaatttcgagcggttcgatatattatgtgcctgtaatggacattctaatgaaaagttatgacattcgaattgctcacgagcttccattgttcaatttagaacggtcccatatattatgcgcctgaatcggacattcga

SEQ ID NO: 182622 - DNA, 447 bp, Glycine max
  unsure (1)..(447): unsure at all n locations
ntngagcaattcanatggtcataactcttaactcacaggttttatttatgcgcataatatactaagatgctcgaaattgaacaatggaagctnttgagcaattcgaatggtcataacttttcactcggaggtccgattcatgcgcataatatatcaagatgctcgaaattgaacaatggaagctttggagcaatctaaatggtcataacttttaactcggaggtccgattcaggcgcataatatatcgagacgcttgatattgaacaacgaaagctctcgagaaattcacatggtcataacttttcactcggaggtccgattcatgcgcataatatatcgagacgctcgaaattgaacaatggaagctctcgcgaaactcacatggtcataacttntaactccgacggctgatttacgcgcataatatatcaagacgctcaaaattg

SEQ ID NO: 182623 - DNA, 398 bp, Glycine max
ggcaatatgcaagtaaaatgagttattaaattacactctgatttatcaagagaagtttaaatgagtaaatacatattctgtttgctttaaattaggactaatatgtattatatatatttaagttcattttaatgcaattgaacaatttagagaattttctcttgtgagatgattctcgacatgatgatcgaataatagttttgagtattcgttactactatcaattatgagacttttaaatcataaaataaaataaaacagacaaaatttaagaccaataatagaggtacttaaataaaaataatttttattttccaaaatttaaaaatcaataattagaaatttaaaaattaagtattcatgacactaaaagttaatcgaaaatgacaatattatta

SEQ ID NO: 182624 - DNA, 478 bp, Glycine max
gatcttaagtcacctgcggcatgcaacttgaccaaaaaaatgttgcttgctttaattgagggtgaacatgaggtcctgaaggtgagggccaaaattgagatcacccattgaggtatatgcatcaagctaatgacgttaaaagagtgcttcctgggaggcaacccaatgctgatttctttcattctatttttcatgcattgcataatttggaattggcttgataattattgaaaaaaaggatatcagcttataacgagtcatagatattggtggctattttaaatgttttgaggaagtggactgaaaatcacttaaaaaacattttcatgaaaatagtccacttgctaagcgcataccacctcgctgtgcgcatcttctccatgccgctaagcgctcaaaccctgcatctcaagctgatttggttcactaagctggtcatggttgagctaagcccaattcaattcaatctgaattgggc

SEQ ID NO: 182625 - DNA, 480 bp, Glycine max
ggatcttagagcccctgcggcatgcaagcttgaagaattgcaagatcatctttctttattactccttgaaaattattgccatcaatacgcagagatgacaatttagagagtgatccaatactttgaaatggatttccactgaatttattaatagacagatagagatatcttaatgatgaaagttttcaaaatgatcttggaagagcaccaccaattaagttgttggaaaaatctagcatgtcaatagttttaaaagccccaatttgatctgtcagattgcctgaaagttgtgaactccgaactgcaagtgttgtgagtccatgggaaatacaaggagcaagaatttctaaaagttgattaacctgttggtttagtttgagatatgataaacctatctcccttaagttgcagagaatagccaaagaagttggaatggttccttcaagtagattatatgacaaatcaagttcaacaagagaa

SEQ ID NO: 182626 - DNA, 482 bp, Glycine max
  unsure (1)..(482): unsure at all n locations
acacataaaactcagcttggcttggatcatatataccactgtgccactggtttggagtcctctgccacaaccttacttcccatgttcttcagcttcacctccacacttatgattctgctttcgatcattcctatggattcgatgtgaatgcttacgagagatcccagattggtggagagataagtccttgtttggctgatttaaagcatctgaattacttggacttgagcgccaatgaattccttggtacggcaattccttctttccttgggacaatgacttccttgactcacctcgacctctctgatagtggattctatgggaagattcctcctcagattgggaatctctcanatttggtgtatcttgacctgagagaagttgccaacggaagagtaccctctcagatcgggaatctctctaagcttcgatatcttgacttgagcgacaattattctcttggagaaggtatggcaattcct

SEQ ID NO: 182627 - DNA, 350 bp, Glycine max
  unsure (1)..(350): unsure at all n locations
tgcagcttagtaaacgaatatccgaaattttttattgnggttgaaaacataggggacttttgtgattggtttaaaaccaatctttgcgatgagaatgcttaaaaacattaagaaagctagcaatgagcctaaagaaatgtataacctggcaggatacaataaacagtattcatttacacaaaagaacagatgacaaaagtcaatgcagacagcggggcaccctaagttgaattacacttgaagtggaagagccatcctggtacttcatcttacttggtattgagaattggactaacttggaattacgatggttcaatgaagggtgcgcacccggggcctgtattagatta

SEQ ID NO: 182628 - DNA, 473 bp, Glycine max
  unsure (1)..(473): unsure at all n locations
ccttggagtaganacatgggaccaactcattntatttcanatatgaagtcatatctagtcaaggtctgagagaccatacaagtttcctaacgatttctaattatgtgggccattaagtctatcatatgctgacaatagccgagaagcccatgaatctcttcgggggcggagtaggtgtctgccatcgccttggccttggctaacaatcggggaagttcttgactcccgttcaaggtaagggcaaaccgatccatccacatggttgcctcttggtgtaaagagtcgatcacccttcctctagcctctntttccgcgtatacttgggcatactcatccgcgattctatgctcgtgggccgtggctagacctaactcttcttggtacttggcgatgatagctagcatgttggtctccgtctcgcataaacgctgagacaagcttcttttggaccttgaacaggcaactaactcctc

SEQ ID NO: 182629 - DNA, 220 bp, Glycine max
  unsure (1)..(220): unsure at all n locations
agcttgtgccacctacatagcataggttttttatggttgatcaacctaggctgnggnngcanaattgaaaatctctcccatacccaaatataaaccatgtagtanaagggcgaccacagagttacctcttatcatcagccacaccaactattgttttctttcatagacactaaacaattgatatggttgcattaaaatattggccgcggtacttgttttt

SEQ ID NO: 182630 - DNA, 413 bp, Glycine max
  unsure (1)..(413): unsure at all n locations
tataaaactcagcttcaactaaagaagatcttcaggatgtggatcttgntttatcaactatttcgaaagcgcaaattaggttatgagagccttcttttatggttcacaaagcgtattacaggcttcttttcaatggctactagatgtagctaagtctttacagaactgagtgaatgaactgacaatattagaaaattacaggacacaagaaatacctccattattatcagttaatggcacaagagtcttcaagtgcacatgcagtgcatacaataatcaaaatcaagacaagcacaaaacatgcacaaagtgcacaaacatatacaataaatagaaacattataatacccaacaacagcctgtaccgtgaaaaggtgttctcgctctctcaaccttcaaacagcgattcaagc

SEQ ID NO: 182631 - DNA, 409 bp, Glycine max
  unsure (1)..(409): unsure at all n locations
accaatgactgtttctgaaaaatctaaagatgtaactcttcaaaaaggttttgactttttcaaatgggttttaagtttttctaaaagttataactcttcttaatggccttcttgaccagacatgaagagtctataaaagcaaggctntgttttgtattttaaatcaatctttctaacaaactcttaaaatcctttacaagccttgaaatctctttgaagttcttcttcttcttttgaccaaaagctttatgaagttttttggttttctaaaccttgaaaacttgtgctattcatcttttcattctcttctccctttgccaaaaagaattcgccaaggactaaccgcctgaattctttntgtgtctctcttctctcttttccaaaagaaggaaggactaatcgcataaat

SEQ ID NO: 182632 - DNA, 379 bp, Glycine max
acaaatatcaattgaggaaactctgccaagaatccccattgaaaaacctttattcaaacctttcaaagttagtgagaaggctaaaagaaaaattagggaacttagaaaaaataaatccttaattgaaggcgtaggtgacaaccatagtgaattactaaacaagattggtagtttacttaaagtcattccagataccccccaagcctcggaaaaatacttcaaaatggtaacaagaagtacctccaaattaatcaatgttattaatgaagatagtgaccaaaactcagataacacaactgagataggatcagtgtcagaacagaaatataaatccaattaattcaaacactggaaaacaccctccaattatattatcaac

SEQ ID NO: 182633 - DNA, 391 bp, Glycine max
gcttcgacatcaatttcgagcgtcttgatattttacgggactcaatcagacatgcgagtaaaaagttattgtcgtttgaactcgctgagagcttcaacattcaatttcgagcgtctcgatatattacgggactcaatccgacatccgagtaaaaagttatcatctgttgaatttggtcagagcttcaacattcaatttagagcgtctcatatattacgggactcaatcaaacacttcgagtaaaagttattatcgttcgaaaatcctcagagcttctgtattcaatttcgagcgcctcgatatattaggggactcactcagacatccgaagtaaaagttattgtctgttgaattaactctgaggttcaaaatcaatttcaggcgtctaata

SEQ ID NO: 182634 - DNA, 444 bp, Glycine max
  unsure (1)..(444): unsure at all n locations
acattctccctctntctcaagcaaattcttctttatatcatcaaaatcttcatgatttacactcacaactcaatattactatgttgaattagttcttgtgcactagggtttcatttggcttttccatggctataacagaattgttggactatagtggtttgaggttaatggctctaatgatgttacattacttggtttgttatgtgtcacttattangtgtttaatgtatgtcttatctgaaactattattgttaatgattagtaaagtgaaagtagaatattgttaatattagtgtagtcatgtgataatgttcaagtatggcatctaagtgaatcttttccaactacatggttgttaaagtgtgatttaatttcattangcgagttctctgcatttatagaacatgagtaatgagcttgtacatagcanggccacatggaaa

SEQ ID NO: 182635 - DNA, 400 bp, Glycine max
  unsure (1)..(400): unsure at all n locations
gcttgcagatatggaggccagagacagaaattattctatggagttgggagagaggaaaactcatagatgaatattttttcctacaacattagagggctgggcagtggcagtcacaaaatacatatacagaagggtagtagataaaaatatatatggggggtggagaaatttagattagggaagaaatagcaacttacactcncattggtggaaggaccanaggcagctcaatcaaatagaggaatcaatcaaaataaaagaccaaattcagtggaaggtgcgctgtggagacatgaccagattttgggaggacaaatggttagggggggacagaagttaacggacaaatttcctacgctctatncaagttctaaccaacaacagcaaactattatacaca

SEQ ID NO: 182636 - DNA, 401 bp, Glycine max
  unsure (1)..(401): unsure at all n locations
attctattaaccgaagaaaaaaatgcacccatatacaatcaaggcagcttcgttacctaaattatttacacgtacttccaaggtgtatttgttacttacatcacacacatcttcttggctaaattcacatacaagcatactcaaagcattttggggtaccaaaaattgcacatgtgcacatcttggtatttctaatacctatacatacacaaacttcatgatgaatcttgactatctacacaataaggtgctacatttcatgctcttttcaagtttttgctacctaaagccgcatgcaaattcaagtatattttcctttgctgactaaaatngtattcaaattaaaaggtatacattttttgggaatgtatcttctttacataacatgccaacatattatg

SEQ ID NO: 182637 - DNA, 465 bp, Glycine max
  unsure (1)..(465): unsure at all n locations
tgcctcanagaggtccaggaaggacaaggcggccgaaggatctattttcgctccggagtacgacagtcaccgctttaggagcgctgtacaccagcagcacttcgaggccatcaagggatggtcgtttctccgggagcgacgcgtccagctcagggacgacgagtatactgatttccaagaggaaatagggcgccggcggtggacatcactggttactcccatggccaagttcgatccagaaatagtccttgagttttatgccaatgcttggccaacagaggagggcgtgcgtgacatgagatcctgcgtaaggggtcagtggatcccgtttgatgccgacgctatcggccagctcctgtgatatccgttggtgttggaagagggccaggaatgtgagtatggccagaggaggaaccggtctgatgggttcgatgaggaggccatcacccagctgctatgtatacc

SEQ ID NO: 182638 - DNA, 470 bp, Glycine max
  unsure (1)..(470): unsure at all n locations
tgcattntgctattgaagaaaataaatctagatatgcaatgatatttatttgacaacaaattcagcaaaatcatgtttggctgcaaaaagtaaaaacaaaaagaagtttaatccacatgtgttgaagcaaaggaactacataagatttataaaagatattcgcatattcaagtgtcgtttgtgatatttctacacacagatataaaggaacaattacaaatatttgttatgttccatgcttcaatatttgattagatacataatagtatcaatcggtagagtttaagcttgaactaccctcacaatacaatttcaaagaaatggaataagagaaaaacaaaacatagaacacaatacaacgtctaaatgtaaggaaatggagaaactaccataaataaggagtgaggaaggagaaacacactcaatgtttggaggcacagttagcagtgaatggatcacagagttatgat

SEQ ID NO: 182639 - DNA, 403 bp, Glycine max
acaagagtttatgagactatgtaacttttagtttatgctgatgatgagttctaaatggaacactattcttgattacgatgagtgttattgcttaaatgcctgactgtttatgtgaagtcatgcatacatgcatcctagactaggatgtgttgctcaacatgctcttattgattagcattacgttgattcattataaatggcccttgagaattgaaactttcatatcagtttttaaaaccactttcacttatgcatcacagtagttgaatatattgcttatattatcgactgaaattgtgacctttgtatctcaaaattgagatagttcccaaatagtcgactatcttacgtatctaatcgactatattgggtgtgagagtatttactttcacaatagacacta

SEQ ID NO: 182640 - DNA, 411 bp, Glycine max
  unsure (1)..(411): unsure at all n locations
actctgacccanactttcatgaccactgcttcttgttatgctcctangatttatgtctaaattgtcacaaactgaagatggtgatgaagaatcggcactaggtgaagcagctagcttttggattgacaatgaattgcgattaggagaattagaagcatgaccatttaccagactcctgataacaggagatacatccgttgatgacacgtaagaactcctctcaagcttgcgtgtatcttcttgcaccatattcatgttctcaagccttctttctgaagccaagggatgtttcttagcattcacaccagtgttgttgctaattggttcgctctggaattgaattgcaattactatattgcttgatgacgaatctcctaatatattcatatatgacacacaacaaaatgactt

SEQ ID NO: 182641 - DNA, 330 bp, Glycine max
acgcgaactgtgaccattgttattacttcccgcgatgcttcttttcatgtccggctgagtgggcttatagcctaaaccatacttcccacgattccttgggtatgtatcaggctaggtatgccagcggtgatttttcctaaacccatcccgggttcataaccgctccccaacataactcgggccatcattaccgctgcatcggacagacaaggctgcccaaagagggagttcacggaggaaatgctgaccacctcaaaagactggaaagcagtttctaacgaatcttttgcggctttcacatcatgcctggaagatgggcagcttaacaag

SEQ ID NO: 182642 - DNA, 437 bp, Glycine max
  unsure (1)..(437): unsure at all n locations
ataaaccagcttgatacccagacatagaataccgtttttaccagagcgggctcatggccacttgggatagacagaccctcgctactaaaaaaaagtttatcgccccatatgaagaaagatggtcataagcattcgcactaccgtgcgtggctcgttacaaaccaagtctagggtgatgccttatgggctatacacacccttacccatcccctctgcacctgcaccttgggtagacaataatatggactttgtccttgagctctctagaacncaaagaggcgtatactctatctttgtggtggtggataggcttaacaagatggcacactctataccatgccacaacgtggatgatgcttnccacatctcaaaactctctttatggaaagtctgagaccccatggtttgcctaggacctttgtgcacatagagatgct

SEQ ID NO: 182643 - DNA, 346 bp, Glycine max
  unsure (1)..(346): unsure at all n locations
ctttaggggaaaaatatatactacaatccaaaagactatcacaaggccctaagttggtcccctctaacattatatacgtaactagcaaaaagagagagtggtcttgactcctagtccatcttctagatctaagtcttcaagaagctgtatgatctcttgtaatatccatattatctgctctcgtaccaaacatgatcatcacagccatacaacacaacatagacatgaaatccaatcataaaagactaaagtccaaataccaaaagataaataaagtgcagaaaatgataacttanatactatagccaaaatacgtggcttaaaaagaaaattataaactaaacta

SEQ ID NO: 182644 - DNA, 443 bp, Glycine max
  unsure (1)..(443): unsure at all n locations
ctaagcttgaccaccatcgagaatacactcagccagcctttgttcaccattcttgacagcactttcaattatgcgattattntattaaaatagttaactttatatcggcatttcatattatatatatatataaaatctttataatttttaatttaataaattaaaaattatgtgacaaaataaatttattaacatgacaaaaacatggttataaagcaatagttgagataaatccaaatcgtgttacattcggtggttcatataatcaagcgaattattaagtaatgaatggtcagtttaattcttagcttaatataattaaaanattgatcatcacacatgttaatgggtcaatacaacgtaaagtgctcaatatttaataataatagctaaaaatattaatataaactagtataacatatttatggatggacaatctacta

SEQ ID NO: 182645 - DNA, 367 bp, Glycine max
  unsure (1)..(367): unsure at all n locations
ggatcttaagcacctgngctgcagctttgtcctagccttggaattattttcatgtttatgccacttttcatgagttntttggttttaccattgtttcaagtgcaaagagtactgaataagagaggttacaataaaatgagatgagtaaatacaccggtggcccagtaacgtagaaattcttcggaaagagaatgttgaagtcaagaggaaaaaaaaaagtgaatactcaaatcacctaatattccctattagaagagtttggcctcttagaagcaatagaatagacaggaaagaaggtaagataagtagagactgcatcaaaaagaataactcanagaaaccatcaaaggagatgaaaatttacctg

SEQ ID NO: 182646 - DNA, 442 bp, Glycine max
  unsure (1)..(442): unsure at all n locations
tatcttannagaaaaggtaggccaaaatatgtatctttagactattggaattgactaattaanaacaagtggagtggttaaaaatgtcaggtaaagttattttattattttgaacttaatttattaataggtttatacttataatataaaattatttatactttgatgtaggaaaaaaaacttgacaaataaagctaatggaagcaaacaagaaataaaatcaattattggcacaaaatcaaatgtgcaaaaggcatctaaaatgataacatctttcaatattntatattaattttcttataagctatatactaataaatcattttttattntgtgattgtttctatatgatatatgaaagggtggtgaagattataaaggcattatgcattagattatattattcttatattatttaaattgttcttttactatgtttaat

SEQ ID NO: 182647 - DNA, 448 bp, Glycine max
  unsure (1)..(448): unsure at all n locations
agcttggaagttaattaaatagtcattgtggtattttattcttttctcatccttcaaagcatctttgatggagattaacggatcatttggatcatccatccctatgacaagtgagagaacatgagttagctaattaataaaagtgatggattattaaaaatatatgataaagattcattttattctaaattatggaatgtggaaattatataaaatgtatattaccaaataaatttgttagtgttataaaaaagtattggtacaagttgattcaatttgaaaatagatgaaccaaactaatggtggttctgagtgaccttntaaatcaatcatgcattcaaactggtgcgacccagtttcacttagccagatttagaaggaaacaaaagactaaataattcatacctaaatggtcgagtcatgctccaacaagtcctcgtatatctct

SEQ ID NO: 182648 - DNA, 477 bp, Glycine max
  unsure (1)..(477): unsure at all n locations
tggccaagtaaacctgggtctctctctctttctcggcggacatggttgcagagagagatcacaaagcgacgaacgagaagaaagaacaaacaaccaaaaaaagaaacacaaaagggggcgaagaaaaaatagatgaagggaaacaacaaacaacgacgcaatgaaggaagaaaaatagaaatgagtggagtgattatatagttaaagatgcgagcatgttgtgggggtcaaagggagaccgaaatctcaaccgtttgatctcgtagtttgaaagaggaagcgcgcaaatcgtgatcgactcagagaagagaacaatgcttatctgtaatttttgctattatatttatttattggacgaatgtcttgttgtanggtgttcgcagtggtttggtttactgtatagaacaaanatcattgcaattaaacataanataaanatataattcgattcagtcgacattaaacttaatattaaat

SEQ ID NO: 182649 - DNA, 484 bp, Glycine max
  unsure (1)..(484): unsure at all n locations
cgggatccttaagtcacctgcggcatgcaagcttccaccttttcttaatatattattttatgttactgggtaagtcttagattttgggtttagagtatagacatgttatacatccatagtaatagtagctgtcatcaatatatatggggaaaacccgaggttgacacttcacctgttcagaacagaatcttgattatgaaacctgtgagcctggggaatatggggtcaatgctattaggccattatatatgtgataatagggataacgccataacagttttaagcagnnngaggaaattgccttgtattaattaatcaataaatacaagatatttacggttcagtttcatattcttttaattatcacggnttatatatttatgccatcaatttagtattcttttaataaatgatatcattntggtgaggtcaccgngatgatatggatatggatatataagtatctgtacagtatgagacaaat

SEQ ID NO: 182650 - DNA, 349 bp, Glycine max
  unsure (1)..(349): unsure at all n locations
tcacatttgtaattgtagtgtcaaacaggggtctcatctgtaagggtagttgaattcagcattgaaattaaacaatgagtactcccttttttttaaaaaaaatattgctaaaaaatttagagaagaatggcaactattttcatatttcataaggaaaataccattccacataagctgtccaaaatcgtcagggaaaagtatcgcagctttagctcagcatttatgttttcccgagtcttgggcttcaccgaatcaccgattatgtatgccaatcggcttgatggctttctaaggtcagaacgagccaganatgtgcaagcctgcacacatataggatgataagtaacat

SEQ ID NO: 182651 - DNA, 448 bp, Glycine max
  unsure (1)..(448): unsure at all n locations
agcttgcaaccactacaagagaaagaacttgttantagaactttgactgaaaatgttagtcagtttgtcagattgattgtgaaggaatgcattgaccgtatctcggtgagagtgtgatccttaaattntgagagaaacgactatcatttagtactgatttttgcatgaatctctgaagtatggactgaatgcatgaaattgaggatgatgaaggccatgtttgattgtgatagccacttagccaaaaagctgaccatgtgcttgaatgatgtatcccttgcacccagtttgagcttgtcataccttaatttcgtccggggaccattcgttggttgagatgcgaccctcgtttgaccacttcgaggtacttggcacccatcgttaggcaatccgtgaagtttcgtacatgccggaagtcaaaggaagcttttgtgacaatccgtgaagt

SEQ ID NO: 182652 - DNA, 411 bp, Glycine max
  unsure (1)..(411): unsure at all n locations
tcgaagggaagagatagacctatcacgagcacatagcatgttcttgaaagaggagttagctgcttgctcaaggcccaaaagaaacttgcctcagtgtttatgcgagacagagaccaacatgttcgctatcgtcagcaagtaccaagaagaactaaatctagccacggcccacgagcacaaagtggcggacgagtatgcccaagtgtacacggaaaaggaggctagaggaagggtgatcgacgcgttacatcaagaggcaacaatatggatggaccgattngctcttaccttgaacgggagtcaagagctctcccgattgctagccaaggccagagcaatggcagacacctactctcgccncgatgagatcccaagacttctcggctattgtcagcatatgatagatttaat

SEQ ID NO: 182653 - DNA, 407 bp, Glycine max
ttaagacacccgcggcatgcaagctttgtccctgaaaccctcagtgtaaatctttgctttatccctgaaaccctctatgtaaatttgacagcctcgtctcttccttcctgaaaacccactaaaaactgcctaacccccctgttgttactccataatttattctgcaataactgcttaaggcagttacatatggtcctaaatcactacagattcagttacgattaaccttttatgcctaactagggtttcgaaacatcacaacagagacaaaccattgaacaatggattttcatcattaacatacaacatagacataccttcgatggaagcgcagacacgaactccacaaatgcgaactcgaaaatgtggttgcagtcacggaagcgcaacccagtttgcgacaaaca

SEQ ID NO: 182654 - DNA, 480 bp, Glycine max
  unsure (1)..(480): unsure at all n locations
tggagtnttgagntcaagagcttgactcttgttagttgcaactttacgccattatgtgctcatagctctcagtatggaggagnttctttgtcttgctctagtcttttgcttgtttcatggagcttactccatatatatgctgcgtgaagccttgtgtagtgccttttcccattgatctaactctctagctttagttttgctcatttttacgtacgtgtggggctgttactgttcttgggtttatttattttctttcgtgacgtcttttggaataatgagataatttnctagtgtcatcatatctcttgaataactgagaaacaattcatttttttctgaaatcatttactatttntaatttaattaatttcttgctcttctgaatcagtccaggagaaaaaatggctcgaaacatatatggatcttttattcgatgcctcagaaaccttatattaatgatttacaacgcctctgaatttc

SEQ ID NO: 182655 - DNA, 375 bp, Glycine max
ctgacttcttttggacataatctaacgcctctgatagagagaaaacatccatagcatcagagaaaaagtcatcattgttgtcacaactaccatctccctgatcatgaaatgcatcgtcaccacgatcaacatcttcttgagctgcttctttcggaggaagccaatggccgggtggtagtcttaggcgaggtgtgttgccatcttgtgtgatatcactcctctcagtttcttttggcttgccaggtgctttcttccaagaaaatggaaccctttcacttgtattttggaatggaccaactgaatatgatgagcaagaagtatctgcaacatttggactaccgagacgcctcgttgacaataggggtgcattcaagt

SEQ ID NO: 182656 - DNA, 510 bp, Glycine max
ctaagcttttctcatagacggtggcgatgaagcatgctgccaccaattacttcataaactgaacaccgctgctgccgccatagaaggcacccctttgagtggtcactgggaatgagtctacaaagctgagtttctgccaagaggcctgttaggggggcacctaataggccagccacagcgtgtgtggaacactccaagggtgtcatccacctgtgaaatgtaaattcacaaaatgataaggaaatacctagaaattatgaattcaatatttcttttattggtcaatgttaatattagctgttagtggggaattggaatgcactagtatttttccttcaacccttaacattatcttttcaaccaccaagttaacttttttgtaaatttaaagtaagtgtaattgtaacaaacataaagtggtattaaaaagaaatgactaaattgatctcttactcattcgactgttcaagctatgcagttcgactttatgcagattctcttcacacacta

SEQ ID NO: 182657 - DNA, 419 bp, Glycine max
  unsure (1)..(419): unsure at all n locations
ctcaagcttaagaaaaatcttgtatatgtggatgccatggattcaaaatggttttcttactgggntgaacgcggagctatacagatcatatggaaagggaaggttatggtaatgcaaggaaccaagcaaggaaatttgtatatcttcaggggtccactatgataggctctatctctggttgttcataatctggaagccatgcatccattgattcatctaataattctctatggcatttgtgcctacgccacatgagtgaaaaagggnttggatattctgagcaagcgaggcttacttggaaatcacaaggtagaacctctctagttctatgagcactacgtctatggaaagcaacanatgaagttaccacaggttatgcatacaatanaggccatgttggactatgtccattctgacta

SEQ ID NO: 182658 - DNA, 409 bp, Glycine max
  unsure (1)..(409): unsure at all n locations
atctcgccaaatgacgcttcttctccttcttggaaggtaccacgggatatggtacttccgaaccttcattcacagctttttctcttttcttctctctagcttattcacttctactcctctcttcattcttatttttttcatacttttcattttctttttctttttcttggtcatttaattcttttttcttcactattatttgnttttctttttcctgattgctttcacctctcacatcatctttcttttcatcagtacatttcttttcagcagctttcttcttggatacaacactatactcatcctacgcctncataaacctcttattccttgtcatcacagctttgcattcctccttgggattctcttctatattcaccacanaactattggatgacttgtcagctat

SEQ ID NO: 182659 - DNA, 447 bp, Glycine max
  unsure (1)..(447): unsure at all n locations
tctccaggaagctacctagtctataaatagaagcatgtgtaacacttgttgtaactntgatgaatgagagtcttgagagacacaactcanagttcaactcctctccctttttcttccttcaatttcgtgctcccccctctctctttctccccctctttcttttcctccattgaagcatcctctccaaggctcatcttggtggtggagctccttcttccatggcttattccctagtggatggtgcctcctctctcctcttctcctttgtcttctgctgcatctccatggtggaaaatcaccattaaaggacctcattgatgctcaaagatctagcctccatagaagccacacaagcaagcttccatcactactagcttagcccaacttaaatcaaactgaattgggcttagcttaatgatggtcctcttagcgcactaagtcagctat

SEQ ID NO: 182660 - DNA, 291 bp, Glycine max
gtcacacacagagtcctcgggatggcatgttgaatctctatcgcatattcataatccatactccataaaaagtcatgcctcataacccataaagcaccaaaaaacttgacaattccaaaacacaagaaccgaacacattacacggcatatgactacaaaaccaaaagcaaatactaatactttaatcctagaaactaaatgtggctgtgttgtgtccaacaaccaacagcgaaagccgagaagtgaaaaaaccccaacctgtaaatcaaacaaaggttcgaacagaggaag

SEQ ID NO: 182661 - DNA, 259 bp, Glycine max
  unsure (1)..(259): unsure at all n locations
atgaacagagcgaacgacagacttacagaacagtgaaactggatggaccgaacagacagaggtaacgccgcccaaaaagaaggagaccgagtgaagaataaccaccccacgaaatggaaaaaagatcgctcccgaagattcccaactctcactcttataggtccagacagactctagagtctcgggagttgctaggtgcacccaacaataatgctggtgcacccagcaattntagcgaacggccatttcgcccttaaag

SEQ ID NO: 182662 - DNA, 358 bp, Glycine max
  unsure (1)..(358): unsure at all n locations
agcttgggcctcttcacatgtgaaatatgaatgttttatatagatccaaagacccttaggggtttgctgatggcttcttcccgttccaagcttcaattggagtcttgtcttttacagacttagttggacatctgttgagtatgtaaacagcagtgtagactgcttcagcccagaatgtcttaggtagtcccttctccttgagcatcgatctagccatttccataattttgaaactctntctctcggacactccattttgttgaggagaatatgcgactgtaagttgtcgctcaatgccttcatcctcacaaaatctttcaaactcgcgagagggtgtactcttgccgcgatcacttct

SEQ ID NO: 182663 - DNA, 403 bp, Glycine max
tgctgcaccatggatagaattacttaaaaaagaagcattcatgtgttcaccacaggcagagacagcatttgttcaattgaagaaagtcatgacttcagctctagtgttagctcttcctaatttccagctgcccttcattctggaaactgatgcgtccggtactggtattggagcagtattacatcagaatggccatccaatagcatttttttccaagaagcttgcacctagagtgcaaaagaaatatgcctactttagagagatgttagcaattgctgaagctatagctaaggtcagacactacttgctgggacacaaatttattatcagaactgatcaaaaaagcttgagatcattgatggaacaacccctacagacacctgaacaacatgagtgattacac

SEQ ID NO: 182664 - DNA, 437 bp, Glycine max
cactattaagatggaagtggtttttttgtctaacaatattgtaaagggtctaagaatctttgagaagtccctcatgaacctataataaaagctgacatgcctaagaaagcttataactgcctttgtatcccttggtggtggtatcctttcaatcacttcaattatttcctcttccacctcaattccacgagctgagattttatgcccaagtattataccttttgtcaccatgaagtgacatttctgccaattgagcactaagttggtttcgaaacacttcttcaacaccaactctaagtttcacaaaaagcttatgaaaactaagaagtcatccataaagacctttatacacttcttcaccaaatcggagaagatagcaagcatacactactgaaaggtggttggtgtgttgcataatccaaagggcatccttcgat

SEQ ID NO: 182665 - DNA, 444 bp, Glycine max
  unsure (1)..(444): unsure at all n locations
gcttggactcctgagagatagtaaatctgttctctggtcttgnnttttctttgaattttggcgtaaatgataccagactccgaatacaaataatgcaagcatcaaaatggccaaactaaagggtaaaactgatatcaagactttcttagtcacatgaatgggagatttcttcccacttaataatgagcaaggcgtcaaaccactgacattgccacacaagcctttattatttctcaatgtatcaattgtagtattttggaacgctagaatgttaggaagtggaccctcaaactggttgtatgatacatcaaaagatgtcaaacttatcataccttccaagctagagagaccacctgaaagactattgtgtgagagatcaatctttctaagtgttgtaatcctccaagcgctggtggtattgttccactcacacaaatttcactc

SEQ ID NO: 182666 - DNA, 229 bp, Glycine max
  unsure (1)..(229): unsure at all n locations
gctttaaagaaccttggaaggaaagaactactactactactaccacccatatgntagttttgttttggtcttgctaattatgtgagatatatatgtatatttttatgtcataggaggaagatagagagatatgtctatgacatatacatatggacggtgaagagaaaataaatgatagaaaaaacatgaaatgctatctatgattgcatgatgattaattgaacgggaa

SEQ ID NO: 182667 - DNA, 488 bp, Glycine max
  unsure (1)..(488): unsure at all n locations
ntanagcctntgccaaacctcaaggacatggcaagctctttatattatttccaggcaatgcaagctgaccgcattggagcgagcccaaacacaagaaatgggcgaatgcaaggagcgttgctcacccgcaatggacagcagcaaaggagcctttcaataccaaatggtacttatgcatctccatatcaccatcagtttccccaaccatcaccaaaacccaatggcaaagcatagagctgatgaaaattttctttttctttttctctttcaccctttacaccatttcttagtttcttcttatagatgtaccttctcttaaagcatagcatatgctgctttatgatgttatgttaacttatgggtgttgaacccctttatcttgaaagaatgtgagggtgagagcaagtgaagcttattgagctactatgtcttatctcacattgtcattcaatattttcttcacggtgcttggaatatcgaacaccatc

SEQ ID NO: 182668 - DNA, 458 bp, Glycine max
  unsure (1)..(458): unsure at all n locations
agcttaagcaaaggagagcagaagtggaagcttattttntcttatgaagaaatntaccattagcagttgcagcagaagcagcagcatcctccatgatggtattaagatctgacgaaaaagaaaattggaagtggttgtaaagtaaaacgattcagaataagagaagacgaggccaccaattatccttgtaaagagaagctaagacagaaaatagggttaggacgcgcaagtacacagtcttgtcaatatttttttttatcccattctcctttttgggaaagaaatgggaataacccaacaaaagcctaagacgcaatttttctccaaatctaatggactggatccagcgccnncacccgtttcgctagagtctttgtctttgtctctctttnaaaaanaaagttttgaatntaatacaatttcataaattatctagtgtncgttagtatttttaatta

SEQ ID NO: 182669 - DNA, 473 bp, Glycine max
  unsure (1)..(473): unsure at all n locations
ntagcacaatggtgtgttgtttccttgtgaactgtggtaattacaacacaatggtgtgttgttttcaaaatgaattgttcaatggaagcaaagtgctggatgatgcaatactactaacttggacatggttcaaatcaatggagaaagattttgtattacactttaaccgatggtcccctaatctaagagtaggcttctgtacctaggttgggaggataggggctggcctgttgtaacagggtaatgtagagctggctcggatccttgtaataaccataggaaccagctggttacataatccccatattgtattttcagtaccactggtacttccaatatctacataatatatatattnttgccgagcaaaaaaaaaaaacacaagtttttgctgctgaaatagcatctctgatatgagtaataagctgacacggaagtaaaccacagattgaaatctaagtctgactatgtat

SEQ ID NO: 182670 - DNA, 403 bp, Glycine max
tccctttagtcgggaagggaccctcttcgcttcgcacacgcttcgttgacttattattactggtgaatattctgcaaattcctagaattatcataatagaaattttcaagaagaaaaaaactatgctagagaaaactctagttgaaatagattatcagtctagaaagttcatctatgaaaggtcctagaaactgagatcttgaaagaaaatgaatgtgagtgatagataaatctagaagtgaaagtacttgcctcaatatcagaattttttattgaatcaaaaattgatctttagatattttaattggcaatcatgattcgacatcaaaagattcaacattacttaatatcacttcaaggtctattgttttaagctattcccttccgtcatttcttataaatt

SEQ ID NO: 182671 - DNA, 472 bp, Glycine max
  unsure (1)..(472): unsure at all n locations
tctttatcacgagtaagattaatcatttaggatgattgtttttttattaattatactgctatttaattggntattatctgttaaactaaatttttgtgccaatggatattacatttgagctggatcttttaagttagttaaactatatatatgatccagaacaaattataatgtttttcattgactgtccgcatctatttatactgggtcatatataacttactatttgaatacttacaattgaacaattgatagatgattgcttatagttaaaaatataacaaaacagaagagttatcatgcagaccataacgagttgtgcgagatattgactcattggtgatcttacccgcttctatattattgacagtgtcctatcttatatttttattactctttttaaaacatattttgcataggttatttttaatctattatctaanattatttctgatattaatataattaattt

SEQ ID NO: 182672 - DNA, 458 bp, Glycine max
  unsure (1)..(458): unsure at all n locations
agcttaacaaaaggcatgcgaagtgggtgtatttcctagagcaattcccctatgttatcaaacataaaaagggaaaaggtaatattgtagctaatgctctttcttggcgtcatgcattactttctatacatgaaacaaaattgattagtcttgaatgtttgaaaaacatgtatgaaaatgatgaaacttttggggaaatttataaaaattgtgaaaatttttcaaaaaatggtttctttagacatgaaggctttcttttcaaagaaaacaaattgtatgtgcctaaatgttctacaagaaatttgcttgtttgtgaagcacatgaagaacgtttaatggggcattttggggtccaaaagactctagaaacattacaagaacattnttattggcctcatatgaaaaaggatgtgcagaaattttgtgaaccattgcattgtatgtaaaaggcaaagtct

SEQ ID NO: 182673 - DNA, 463 bp, Glycine max
  unsure (1)..(463): unsure at all n locations
ttgctggaacacagagctgccactcttctttataaaaggatgcagaatctataaccaaagactcataaaaagggggtcattcccaaacatctcttgtggttcttcaagaaggtgagaaatcaaaatattccaatgcaaatgagtctcttttgactgctaaacctgatcctccacagctcaattctggaatcaattagagaccaaaaaagggtcactaaacctcttaaaagatacaaatttgaagacatggctgcctatgcattacatgcagctgaagaaatagattcaaatgaaccatccacctaccaagaaactatcaatcatcctgaagctgaaaatngtttgttagctatgaaagaggaaatacaatctntatattagaatcagacctatacacttgttgaactacctaaacgaagacatgtggtangttgcaagtggatattcaacgggaaacctactc

SEQ ID NO: 182674 - DNA, 440 bp, Glycine max
  unsure (1)..(440): unsure at all n locations
agcttctacatgtctagagagttctagagagtttttgtccaagttccagagagtttgagagattttgttgttgaagatctgtaaagaccagagcttgaagagaaagtcgtcctgagagtttgagatgagtttgtgagtgattgtgaggtcctagaggtggaggagacatccccactacttgtatttctgcattctttcatatttctcttctctttggtggaaaggaagcttcccagttatggaaagctaaatcctctgttggatcttccttgtaggtacttgatgtaaatatcttttttatctatttaatgatgttttgtgtgttcactgtgctatcagaacttcattctaccatgatttttccttgatcaattagatgcatgtgtttntaggatcattcaatagtggaaactagtatgattcttataacttgataggac

SEQ ID NO: 182675 - DNA, 457 bp, Glycine max
  unsure (1)..(457): unsure at all n locations
tacggacctataaaactcagcttctcaggaagttntctcaagaaagcttctcaaggaagctacctagtctataaatagaagcatgtgtaacacttgttgtaactttgatgaatgagagtcttgtgagacatacttcaaagttccacttctctccctcctttattccttcaatttcgtgctcccccctctctttttctctccctctttcttttcctccattgaagcatcctctccaagcttcttatccaaggctcatcttggtggtgaagctccttcttccatggcttattccctagtggatggcgccgcctgttacctcttctcccttgtcttccactgcatctccatggtggaaaatcaccattaaaggacctcattgaagctcanagatccagcctccatagnaagctccacaagcagcttccatcaagtggtaatcagagcacaagagcttcaa

SEQ ID NO: 182676 - DNA, 409 bp, Glycine max
  unsure (1)..(409): unsure at all n locations
tctgaataaatcaaaagatgtaactcttcaaatggtttttgacttttacaaattggttttaagtttttctaaaagttaaaactcttctaaatggttgtcttgaccagacatgaagagtctataaaagcaaggcttttgtttgcatttcaatcatcttgaatacactntnttccaatcaatcttatacaatcctttacaagccttgaatctctatgaacttcttcttcttctttgtgccaaaagctttccaaagttttctggttttctaaaccttgaaaacttatgctattcattcttttcatctcttctccctttgccaaaaagaattcgccaaggactaaccgcctgaattcttttgtgtctgccttctctcttgtaaagaattcaaacgacacagtctgagaattct

SEQ ID NO: 182677 - DNA, 487 bp, Glycine max
  unsure (1)..(487): unsure at all n locations
tgttgtttntagctagacaacttattattactatcggntattttctatattngncttccatcttattcttttcttgctcgctctctntttgctcctttttttccatgagatactttgctacctaaacatacgtatatttttgtgaggtattttgctatatacatgcgtgtccaaggtatcttgctacctaaacatacatatatatgttttgtgagatattcttgctatatacatgcatatccaaggtatcttgctacctaaacatacatatatatattttgtgaagtatatttcctacatacatgcatatccaaggtatctttctacctaaacatacatatatactttgtgaggtatgactaccttccgagcttgtgcttgttntatttaaattcctacgatcatgagcaactaggtgtgtcctgctatgacttgagcacaaaggtgatcaataacagcagagattaaaggactagttgctcctata

SEQ ID NO: 182678 - DNA, 435 bp, Glycine max
  unsure (1)..(435): unsure at all n locations
agcttactctctncttaccaactctctgcttgtactattatttgnnnntaannnaaaataataataatttcatctagtgaaagtgtatgcttcatattttggagaaataaaaaaataatagttatctacgtcagcttaaacttttttgtaaccagaaatacttgcttgtctagctataatatatgcctcagttgcgtaagaatcacaatattattaaaagtcatattgttttataataaattataaattaggctgtgtaaaatctgattggaaaaaaaaaatcataccaaacccattccaaattaatttaattagtttggtttttaaactaaatttgaaaactgagattatcgagctgattttaaaaatattttagattgaactatnttgaactaattttaaaccacatttaagaaatgaatcactttcgaatta

SEQ ID NO: 182679 - DNA, 494 bp, Glycine max
  unsure (1)..(494): unsure at all n locations
tggcttatggtttttccaattggttgtggcttgaagatcatgagcagcatcaagatgcanaggcttccttgcatggttccactcatgtaacattgcaaggtgccaaatacaccaacaagtcatggagaaaattaccttatactcattactgagaattccagaaagtggaagaccaaatcaatcacacttttcacttgctaaacgtgagcatagacggagtcccataacctagcaacaatccaaacctgttgagcttggtcatatccaaaaaaatgtgctaatcatcttcaatatttgtatcatagtaggcacataagcatgggcaaagtacactctntgtttgaagtctttgacaagttagtaagcaactaaggagaaggcgccaaataaaatgtctcactttgnngtggaatttcatgttccataggagcatccgattatcattcacnctaagttcatcantttggatcatagtttccatgagaaagtgatat

SEQ ID NO: 182680 - DNA, 463 bp, Glycine max
  unsure (1)..(463): unsure at all n locations
gcaagctttcgattcattctatgtgccagnggtggttttcattgtgttntgggtatttttattctagtttcatttactttntataccccctattgacgtgcttaagccattttacttaagtcgtttctcgcttaacataaaaataaaataaatttccaccgaacgtttgaattgtattatccgttaacttcggttaaaatgaattccgaccggtcggtcgtgccgtaaccacattggaaaacaaaaagagataaaaaatattataataataaaaaaacatcttttagcaaaataaagcggaaaatcaatcggacgttttctctttgggatctcttattcttaatcgaattgagtaataactaaagtgaaactaaggctaanatcaactcgcctagtcaagctcatacataaaaataggggtttggaaattgtcatctcaatntctcactaagcaaaatggatc

SEQ ID NO: 182681 - DNA, 508 bp, Glycine max
  unsure (1)..(508): unsure at all n locations
ggacctataaaactaagcttcacattagaccacttccagggtgctggaactacttcacatttattttatgggcctatgcaggttgaaagccttggaggaaagaggtatgcctatgttgttgcggatgatttctccagatttacctgcgtcaactttatcagagagaaatcagaaacctttgaagtattcaaagagttgagtctaagacttcaaagagaaaaagactgtgtcatcaagagaatcaggagtgaccatggccgagagtttgaaaacagcaggttcactgaattctgcacatctgaaggcatcactcatgagttctctgcagccattacaccacaacagaatggcacagttgaaaggaaatacaggactctgcaagaggctgctagggtcatgcttcatgccanagaacttccctataatctctgcgctgaagccatgaacacaacatgctacattcacaacagagtcacacttataagagggactctcaccacactgtatg

SEQ ID NO: 182682 - DNA, 400 bp, Glycine max
  unsure (1)..(400): unsure at all n locations
agcttcatgatgatgaatccagttgattcaagttgttttgatgatgaagattaaatcaagattaatttcaagattgaataaatgacatcaagaagaatcaagattcatgagaagatgatttcacaagggaagtattgaaaagaattnttcaaaaaccaaacatagcacaattttgtcttacaagaaaagtttttctcaaaattttctaagttaccagagnttttactctctggtaatcgattactagtttcctgtaatcgattaccagnggcaaagtttgatttcaaaagttnttgactgaatctgcaacgttccaattgattttaaaatggtgtaatcgattacaatatattggtaatcaattaccagtgtatatgaacattgaaattcaagttcaatt

SEQ ID NO: 182683 - DNA, 445 bp, Glycine max
  unsure (1)..(445): unsure at all n locations
ntgtggatntagttnttgccggagaaaggatcgaagtaattctgaaaagaggcaaatttgatcatcccactctgacaaataaaaagcctagggcaaatagagaggaccagaaggaggaaggaacccatgctataactgctattcctacatggccgaatttcccaccaacttaacaatgtcattactcagccaatatcagctcttctcattacccaccacccaatcatccacaatggccacccaaaatcagccacaaaacaccacccttaacacaaaccaaaacaccaaccagggaaggaattttccagcaaaaatcttgtagaattcaccccaattccggtgtcatatgctaacttgctcccatatctactcaataatgcaagggtagccataaccccagccaagggtcctcaacctccattttttcgaggatacaacccgaatg

SEQ ID NO: 182684 - DNA, 456 bp, Glycine max
  unsure (1)..(456): unsure at all n locations
tgcaagctngcttcttttggtgcatagaatgctgtgtataaaatagtaagtgtcatgaatctctgacataagcttcaaccaattaacattgtttgaatgacaactgttgtagttggacagcaatgacatagtttgtcctccatggtatgctttatgttcctattggttatagttttggtatgctttatgttcctattggttatagttttggtatgctttatgttcctattggttatagctttggtgctagaatgttcaatttggagtccacaagaggaggatctccatattgtgctggagtttttgttggagatggtacaagacaagcaagtgaaatggagctggagcttgcagagtatcatggcaagtatatatgaaattagcccataaaagctagattggattctgtgattaanaatccattaagcccttctagctaggtcagcattctagtct

SEQ ID NO: 182685 - DNA, 412 bp, Glycine max
  unsure (1)..(412): unsure at all n locations
tctgaagcangtagacaaacttaacagttgtcatgaattgtctacttgtaaagccattttgaggtagtcattttaaagtttccatcctgaggaacctttctgatgagcattttgatgtaaaatcagaatagccaatctgatgttagaaaagaaaggatacatgtttgaggtagatctttcttattgtagaagcaaatgcctttggtgttttgatgatgatcatgatgatttgatgcaaatgatgcaaatgggattttcaagtttaaattcaggacaatgattcaagaatacaagccacaacatcaagatgatcactagtattttaggaagggaattcctaattgatatagcanaaagtttggccaagtaatctaagttaaaaagtgttctcaagagattactctctggtatc

SEQ ID NO: 182686 - DNA, 436 bp, Glycine max
  unsure (1)..(436): unsure at all n locations
agcttattcacaccattatggcatataatatttcattatttncgnggaaagttcgggcccctgacttttgcctaaataaatgataaggaatgtgagactcaaaggcactaaagtcgaaaagaacacaaacatggggtgtttctgctcccgagagaaaagagatgataacaatcttgtgcatggaatcaaattcaaagatggtgatgtcagtgcaaccacaacttgtgatggaactcatgataccacaggtcatcatcatggtagtcatgataccacaggtcatcatcaacatcactggagtcatcataccacaggtcatcatcatggtagtcatcatatcacaggccatcatcatcatcatcatcatgctagtcatcataccacacgccatcatcatcatcatgctattcatcataccacaggccatcatcatggt

SEQ ID NO: 182687 - DNA, 404 bp, Glycine max
  unsure (1)..(404): unsure at all n locations
tgccttgccccttgannatattgagggactcatggtcactatttatgacacaatcctcgggataaaggtagtgttgccatgctttcaaagcccgtactaacgcatacaactccttatcataagttgaatagttaagggtatgaccacttaacctttcactaaaataagcaattggatggccttcttgcatcaacacagtcccaatcccaacatttgaagcatcacactcaatttcaaaagaattttgtaagttggcaacgcaagtatggtggcattagtaagactttgcttaagaacattgaaagcttcttcttgtttctctccccatttgaaaccaacatttttcttgagcacttcattgagaggtgctgccaatgtgctaatatccttcacacatcgtctat

SEQ ID NO: 182688 - DNA, 439 bp, Glycine max
  unsure (1)..(439): unsure at all n locations
gcttgaggattatggggtacccatcacatgtggtactaggtggcggtcgggcgatggtgcacaaaatattttccacatccacaatgcgcgcataaacccaccatcccctgttgcccacctccaactgagctcacgtactcccacgtagcccatatcctcgtttctctcaacaccgggtccccatcaatcctcccaagcttccacaacatccaagcaaaacaacattccaacagcacaagctatcacagccaagcaaaacagagcaaaggcagaaaactctgctcaacacatcaaccaaaattacagcttttctcacttaaagaccacagtaacaatcccttcgatccaattcgttaaccggtggatcgactccaaaattntactggaagtctatagtgcataagcctacattgtgacgcgtgggatctactagcaaaca

SEQ ID NO: 182689 - DNA, 467 bp, Glycine max
  unsure (1)..(467): unsure at all n locations
ttgagccaaaatcctgactcaccatataccttgacccantgtgagaatgtcaatccttaccttcggaagcgaaaagaatagaagggaaatttccaatcaaagaaaaggaaagaaggaagatttccaatcaaagagaaagcaaaaaaagaaaagaaggaaaattcccaatcaaagagtgggagaaagcaaaaagaaaagaaagaaaattcccaatcaaagaatgggagaaagaaaaaagagaaaaggaggaaagaaagctcctgatcaaggatcgaaagaaaacagaagaaatgtgcagagaagtctttggaccggacaatatctgaacaatacataattgtcaccaaatgaacaaaaagggaaggaaaggaaaccacgacctanaatggtcttctccttttgttaccaaccaaaatcccgtgcgctagcgactntnttttctcgccccgcactaaacannaaaaaaa

SEQ ID NO: 182690 - DNA, 438 bp, Glycine max
agcttctcaaggaagctacctagtatataaatagattcatgtgtaacacttgttgtaactttgatgaatgaaagtcttatgagacacacttcaaagttccacttctcttcctcttttattccttcaattttgtgctccccccttctctctttcttttcctccattaaagcatcattttcaagcttcttatccaaggcaattcttggtggtaaagctccttcttccttggcttattccctagtggatggtgcctcccctctcctcttctcctttgccttccgctgcatctccatggtgtaaaatcaccatggaaggacctcaatgaagctcatagatccagcctccatacaagctccacaagcaagctaccattacaaccaccttaagagctattggaataagaaagcactccaaatgagtgaaacacaaaagagagaa

SEQ ID NO: 182691 - DNA, 479 bp, Glycine max
  unsure (1)..(479): unsure at all n locations
tanggttagcaaaggcagaggctctggtgtaaaggtaacacccaaagtgcctcatccattggttctaaaaactgaaattcgtatggcgcgcttagcgcatagttgtgcttagcgcgtcaatgaaacgtttaggttctgagtaaccctgtgcttagcctaacctagcgctcagcccaacttaaggtttgaaattccagtgagcatctggggcttagcacagcaggtggcgcatagcgcgcaatcaagcttcaacttacagagagtagttcaggcttagcgcagcaagcgcgctaagcgcacttccaagtatttcataacagtgaaggattggcgcttagcgcatcctgccctgctaagcccaagtcatggagtttaattacagaatggatatagggcttagctcangacaacgcatttagcgctgctacgatagaattttccagagaagaagtggtgctcagcgcatgatgtatcattat

SEQ ID NO: 182692 - DNA, 208 bp, Glycine max
agcttatcttattatttactttcgcaatttatacgtataaactaaaatatttggaactttatagttctaaagcactcattgtttttttaatataaaaaatttaagtgaattagtcacaaaggttcattagagtcagagcatctttcaaaacttaacaattctttaacaagaattttacattaatagaaaaaatcaaattaaattcact

SEQ ID NO: 182693 - DNA, 348 bp, Glycine max
tgtgctgagggtgctttcctccgacaacgcttcaaatgcttgtttctatgacacatccataggacaaggcccagacaaagtgtacggacaatcactttgcagaggggacatctccaactccacagcttgcaaagaatgcattgagaaagcaagccgagatatcatgaataggtgcaagagtgagaatgcaatgatatggtataacctttgccaagtacgttactcctttcagagctttaaggtcgtggcttatactggaaagtatccgccgcagaataatgaggagaagaaagtatcggatcctataagatttagggaatacttgacatatttaatgagcaatctctc

SEQ ID NO: 182694 - DNA, 399 bp, Glycine max
agcttgcgcaatgctgacgacatttctttttactcggaagtccgattgagtcccgtaatatatcgagacactcaaaatttaaaaccgaagctcgcagcaaatgctaacgacaataacatttcactcggaagtcctattgagtcccgtaatatatcgagacgctcgaaatttaaaaccgaagctcatagcaaattcgaactacaataacttttcactcggaagtccgattgagtcccgtaatatatcgagacactcaaaatttaaaacccaagctctcagataattctaacgacaataacttttcactcggaagtccgattgagtcccgtaatatatcgagacgctcgaaattaaaaaccgaagctcgtagcaaattcgaacgacaataacatttcactc

SEQ ID NO: 182695 - DNA, 424 bp, Glycine max
  unsure (1)..(424): unsure at all n locations
tcagttntaaatntcgagcgtctcgatatattacgctactttatccgactttcgagtgagaagttattgtcgttagaatttgctacgatcttctgatttaaatttcgagcgtctcaacaagttacgggactcaatctaacttccgagtgaaaagttattgtcgttcgaatttgctacgagcttcgattttaaatttcgagcgtctcgatatattacaggactcaatcggacttccgagtgaaaagttattgtcgttcgaatatgctacgagcttcggtctaaatttcgagcgtctcgatatattacaggactcaatcggacttccgagtgaaaagttattgtcgttcgcaattgctacgagcttcagttntaaactttgagcgtctcgatatattacgggactcaattgaacttccgagtgaaa

SEQ ID NO: 182696 - DNA, 416 bp, Glycine max
  unsure (1)..(416): unsure at all n locations
gcttatgcgtaccaagtactatactacacttttctctttcttcccacaaagcacaatatagaatttgaaattataataactgttctattttgtttggacttgcttgttaattcagagatggtaagagtcgccaatttgcgtttatcggatatcgtactgaagatgaagctcaggaagccattcgatatttcaataaaaatttccttcggacatctagaattatttgggaggtctgttatatatatgtatgtatgtatgtcgtcaattcaaatttgtgttattgagactgaaagccacgaaatgtgttttacaattcgttaaccaagcaggtggctcgaaagcatggngatgcaaatcttcctcgtccgtggagtcgacattcgaagaaggaagacgataaagtgactgccccggat

SEQ ID NO: 182697 - DNA, 297 bp, Glycine max
acaaagtactaaaccaacaatatagaataaaaaaagggttactaaaaattctaggggactagatgagtgtagaagaaagttggttacgggtaactctgaatacatataatctttttatataggtaaaaatgtctacaaggttactaatctataaacaagtaagaccacattcctatagatatcaatctgcaagaatgttctcttcttttttctttcttggtgctaatgaaatctctgacaatggtgatcatgatcactaagtcattatcctattcaattagtagctggtgacgaatg

SEQ ID NO: 182698 - DNA, 413 bp, Glycine max
  unsure (1)..(413): unsure at all n locations
agatcganaatgggtctaccatcacgattatcgtctcgctttccatcattgggggtaccacttgggccgccagatccctccaccttttgggcgtgttctttgaaagatccgcccccctttttgcaaatgttctgtagttgcatcctatccagaaccatatcaaaattgtactaatactgcctaacaaaggcaaccattatgtccttccaagaatggactcgggaaggttccaagttagtataccaagcgacagttgtcctagtaagactntctcaggaaaaatgtatcagcagtttctcatcttttgcgatgccccatcttccgacagacatctntatatggtcttggagcgagtagtccccttgtacttgtnaagtccgcacttgaacttggaatgacctgttgggtatacg

SEQ ID NO: 182699 - DNA, 431 bp, Glycine max
  unsure (1)..(431): unsure at all n locations
ctaagctntaacctcatcatctctcacagtctctagatgtgggagcctattctatccttgtgttcggactctcagccacttatgatagccgccgatgatcccattactgcttcccctaagctctttgtcctttcttcacgccgcatcccatgccttgcgaactccttggagtacctttgcattgnggtcactgaaaccccgtgtaatgaaaggcgtgatgcttttgtctaatggcactcctctcatggggtagccaagctgtcttatggcgaggacgggattataattaatacaaccccttgttcccatcaagggaacatttggacatccttcgcatgaagatagaatcctgattcttccttccttctagcgagggaaccaattaacagacgcccctccatgctagccaagaagttggcccaattcgtctt

SEQ ID NO: 182700 - DNA, 367 bp, Glycine max
tggcttcattatgaagtgttcgttcgaacttgattcgtttgtgtccaattctttgattgttatttactccaagtgtgcgaaagttgaagatgcccgcaaagtgtttgatgggatgactgtcaaagacactgtggctctaaatgctcgtgttgctgggtatgttcaacagggtgctgcaaacgatgcactgggtctggtggaaagtatgaagttgatgggtttgaagccaaatgtggtaacttggaactctttgatatctgggttttcacagaagggtgaccaaggaaaggtgtctgagatctttattgtgatgattgcagatggagtggagcctgatgtggtattatggacttctgttatatctggt

SEQ ID NO: 182701 - DNA, 383 bp, Glycine max
  unsure (1)..(383): unsure at all n locations
ttgagtctatgagaaaaaacaatatgcgtagtaagcggtatatagtttaataatctcacattcttgaccacaaatacacacatgttgacaaaaaataactacgtaattatctcatttaacagaaaatatttgtcttaacaagtactctaagtctcacctatcgttaagttgattatgcttagggatgttgtttctatttctagttctattttatgacatgataaaccctacaaaaaatgtgtggtgtgctctactatcccacccatggatatatccaagacgatgttatattanttatctcgacatttgattacatgcaattgaaatgttaaaccaataataaatgttaatccaataataacagtacagcgtgttataactta

SEQ ID NO: 182702 - DNA, 485 bp, Glycine max
  unsure (1)..(485): unsure at all n locations
atccttagagtcacccgcggcatgcaagcttcatgaggatgaatcgagtagtttgattatgactaaaaactcaaaagaaggatttcaagattgagtcaacaagttcaagatcaagattaatttcaagattcattagaagaaatcaagaagaatcaagattcaagaaaagacatcaagaagaatcaagattcaagagaagaaatcaagaagcaacaagttaagacttcacaagggaagtattgaaaaagatttttcaaaaaccaaacatagcacaattttgttttacaaaagagttttctcaaatttttctaagttaccagagtatttactctctggtaatcgattaccagtttcctgtaatcgattaccagtgataaaatttgatttcaaaaagtttttaactannattgcaacgtaccaaatgatatttaaatggtggaatcgattacaatatatttggtaatcgattagcagtgtatctaaac

SEQ ID NO: 182703 - DNA, 465 bp, Glycine max
tataacctgcgtcgccgggaataatcaagaccgtcaatgattatattctgccattcaaaggatcgctgttcgtcacacgttccgcattgacagcagaacctaactgcatcgcccgagcggttccgattccggcgccgggaaccaacgtcgccgcggcggttggcggagtcgcgggaacagctcccggcgattctgaagtagcactacaatagccctaacgataaaagcaaaccaaaaaaaaaggaaagagaaagagaaatttcaacagaatgaaaacacagcacagtgcagcgtgtaatgataatatataataggtgagtgtgttaccttagagagtggcgcgcgcgaagaacgaagcatccacggtgttcgaagattgcgagagaaactcgtggcgttgacgtggcgcgggaacggaagctttctcacaagaaatgagagtggagaaatacgttatgggactta

SEQ ID NO: 182704 - DNA, 131 bp, Glycine max
ttaagtcacctgccgctgcagctgacccatgaagatgtgggaatttttgtctcttcgacttcagaagccttactttattttcccccaatacttacaaaaatatcatcttatattttttaccccatggcatt

SEQ ID NO: 182705 - DNA, 421 bp, Glycine max
  unsure (1)..(421): unsure at all n locations
tattcaagcgtatctactntntatacttcatgcagtggagttagtttatgtctacaagngcgctgactactacttgctcgagtgtgttctaagcttcgtgatcatgatcagtatacgagctattaacctggctcggtagaagtaactactgttctgtattgtgagaatatatgtattacatacaaagcatttcaactgctctaagaatgaacatcagactttcacttcttgtactttgagtgcaattttgacacttccaatttgcgaatctcttgtgccaacattatccttctacacacttaagtcgaatctttaccaatgaattttcaaagctaagtcttatttgtaagttcatgtattctgtaacggatgaacatgtctatacagtccacatcggtgcttaattatataactaaccctc

SEQ ID NO: 182706 - DNA, 359 bp, Glycine max
aataagggccttcaatgatgatattcagtcatggagttgcagcaggggaaattataaaaaatcatgttaacaacattctgcacaagacatgtggggagatacatggagaaaaataaagaaacaacaatggcagagaaggtaaggctgaaaattaatggaggtttaaggagcacctaattgaagctcttgtgctctgataccacttgatggaagcttgcttgagaatcttctatggaggctggatctttgagcttcaataaggtccttcaatgatgattttcagtcatggagtcgcagcagtggaaattataaaaaatcatattaacaacattctgcacaagacatgtggggagatacat

SEQ ID NO: 182707 - DNA, 414 bp, Glycine max
  unsure (1)..(414): unsure at all n locations
tctcccccattttcctatanatagggggagaggtgtttggttttaatgttcagccctcctggtaattcgaaaatcacttgaaattagtgggaaaaaaatttccgtgaagaaaatcgaagccgaggtgcttctgtaacgtttccgtaggtgatttcgcgaagattttcaaccgttcttcaacgttcttcgttcgttcttcatcgctcttcggtcttcaaccggtaagtacccaaaatcgaacttttcaattcattctatgtacccttagtggtcctcatttgttttcacgtgcttttattttcatttcatttactttctgtgcccccttttgaggcgctttaatcatttgcttaagtcattctcttgcctcaacaaaaaataaaataaacttccattgatcatttgaattgaata

SEQ ID NO: 182708 - DNA, 453 bp, Glycine max
  unsure (1)..(453): unsure at all n locations
agcttttacatgcatgttcaaaccatatntactattcttcgatcaactgatgcaatctatttgattgaaaagataatttatattacacttctaatgtagtcgacaactaaaaaaaaatataacagaaagtaatgcttaagccaatcaaatcaaatcatttagaatctcatcattactatcatgcatctcaaagagaaggagaatcaggcatcataatgtatagcacaacaaaacattaaaagaaaacatgccttctaaagccaaccaaggtaaaaatgtatttatatttgtgaactttttcaaaattataacacatatataaccatatataaaaacatggttgaacaatctgaccacatgcacaacacattccacacattatttctgaaaatgagtggtaagggaatataataaagcattgttattaaaactggatgtgcactaagaataaca

SEQ ID NO: 182709 - DNA, 501 bp, Glycine max
  unsure (1)..(501): unsure at all n locations
catacggacctaaaaactaagcnttatgggttgataaatttgcatgacactggaagttgcttgtacgtgggcttttacactcgcgctagccctcaatatgtaaggtacacacaatagtcaattattataattaaataataatataaaactttttatattagtaggacaatacatatttattaaactcatattttaaatagaattatctttagaaaataataccgcgtatgtttgagttgtggttcgagagacttcagaagagtatttaaaaaagaattagaaatatatcttttatgttcattcgcttgattggtttggaaacatgtgctaccacacaatgaacaccaatacatgttcatattcgagagaaaatatatatatgatgtatgtgtataataatatcaacataaaattccataagtctgatgcatcatcactatttgttgatgtacataatatctatatattaattacttagttntattagataaagaatatagt

SEQ ID NO: 182710 - DNA, 440 bp, Glycine max
  unsure (1)..(440): unsure at all n locations
agcttatggctctactagaagtcaatattctctactggncaanctcgatctaatcagtttatttagtcctagaagcctattggtctacgtatatctaatatttttggctagtcactcttgatctagtcggagagttaaagtatcctgtaaaagaaagaaccatttatatagagaaatatagactatccattatagtatgggaggatagtataatgtgataatatcatagtaatggagttagatcgagctatacaaattgctttatcttttgctagtctcacccctgtcccattcgacttgtgtccatcttgtgtcattgaagactcatgcagatgcacattntccatagggaagagcatgtattcatgccataacaattgcatagaccatgatgtaattgtaagataatatctatttatgcgtcttttggttttagaatc

SEQ ID NO: 182711 - DNA, 404 bp, Glycine max
  unsure (1)..(404): unsure at all n locations
taattatttatcacattaaattaattaaattttccgctcctatcatagtaaaaattaaaaaaaaatatcatctatcattatacaaacaaggccctggatggcctacatgtcaacctgtggttcattgcatttcctgcctaaaaatgtcaattcatgctacaatgatgtattatacggtgcattttcaaaaaatagcgtttccctaaacaaaacgatgtgtttccaataaacctttcgtatactgctgcgtttccattacccatgcttctcgaataccaatgcttctcgaataccaacaacaattatgaccagttgacaagacgtttgcttttgcagatgaatgaagggttctggttatacactccgtttcttttgttttctctttctcctgngcttctggtata

SEQ ID NO: 182712 - DNA, 444 bp, Glycine max
  unsure (1)..(444): unsure at all n locations
agctngataaactcataaacgataaacattatttattattgataatgtccaaaatataaacttgataaactcataaaccaaaaacaagtttattgttgataacattcaaaataaactcctaattaacacataaattatgaatgtatcttgtcaagtaatccatctaaatatcattgatgttcaaaccatcaaaatttcatccattgtcatatcctcataaccttcctcacaaaagacattctttgggagccttcaaactcccaaaagaacttttcatattgttggttatgagcaaactttataactaagttaatttcctcttctttagntaatcctaatttcttaacctcttcaaccaagtctctttttgaaggattcgactctgaaggaactgaaagttggctacaacttntgcaaaatcatttggtaccatatccatttact

SEQ ID NO: 182713 - DNA, 474 bp, Glycine max
  unsure (1)..(474): unsure at all n locations
tagatttctggtgtcacctgattggattaccaaatggtcatcatccacgcaatgcactttggtcagaaattactcagatcattgtccgattatcctcacgtcgaaatctattgattggggacctaaaccttttagggttttggattcttagctctagacaaatcctttgtcagagttgtgcaggattgctggtcatctacccaacatagtgggtggggggcctacatactcaaagaaaagataaaacgactcaaaaatagattgaagatatggaataaggagcaatatggggacacatacaagaaggtaaagcagatccaggatgagctaaacaaccttgaagagatgacaatggataggcaattatcacctcatgaggcaatctttagaaagcagctacaggaaaaactgtgggtggctgcccactcacatgagtccttacttangcaaaaggcaagaacaagatggattaaa

SEQ ID NO: 182714 - DNA, 103 bp, Glycine max
  unsure (1)..(103): unsure at all n locations
atattagaccagtcnaacaagtgcatgtatgctaaaaggagagaaccttgtctcatgttgatcatttcaaatatgatctttttttatagctgcattggaacac

SEQ ID NO: 182715 - DNA, 428 bp, Glycine max
  unsure (1)..(428): unsure at all n locations
tataaaactaagcttgaccaattaaccgtgcatatgccatgcatcatcgcatcttattcacaatgatattnttaaacaaatatgagaggattaatggagaaaaatagtactaactagttcttacattttgatattgctgttgctgatcttgcatcgaatccgataataagggtaagcatgggcacaaagatgccacccccaccaacacctcccacagtcccaaatgctgatcctaggaatccaattatgctgcccactattattttccacccaaatttcatctcctacaaccaaaaacagaagcattaattacaaggtaattaatcccaattcaatgtccttaattaatatacaaacactaatccacatgcttgggctaganattttattactattgtggtacatgaaatcgactccaggtatataat

SEQ ID NO: 182716 - DNA, 448 bp, Glycine max
agcttgcacaataagtaactaattttgttttttacaatatgaagtaactaactaactaaaaaacactaatatatagagtgataaattagaagtgatgtatgggccttgattaggcccatctaatctaactaattacacaaaacaaagcccaattattcaagtgcagaggttttgacttccaagcttaatttgaccctcgagatggcagaattgaccaaagcttatttttaaaaaaattgaatatctttttctcaactttccagggactactcgcacattccattgggatttctgtagtgtcctctaggctctgcataacacatataggatcaagtaagcacaaaatcttaaatttagctacaattctcaattcaactcaatcatttgcctaagaccaaaactgagttaaggtgagaaaataaaggtcaaagagatgtaaattgagcta

SEQ ID NO: 182717 - DNA, 490 bp, Glycine max
  unsure (1)..(490): unsure at all n locations
ntatttgatgatgccaaagactcaagtcaagaatcaagatttatgcaagtttgaagaatcaaagagtcattcaatcaagaatcaagattcaagtgaagattcaagagaagactcaagattagaaagaatttcaagaaaaacatcaagataagtataaaaagattttttcaaaagaaaagattgaattgtacaatttgtccaaaagaatttttcaaagaaaaatcttttaccaaattttttactctctggtaatcgattaccataaggcagtaatcgattaccagaagcctaaacagttttataactgttttacaaagtagtaatcgattaccatgggcatgtaatcgattaccaatgtttttaaacgttgaatttcaaatttcaagagtcacaacttgtgataaaacattntcaaacttatgtaatcgattacacaacatttgtaatcgattactattggtnttaaacgttggttntcaatctaaacatg

SEQ ID NO: 182718 - DNA, 407 bp, Glycine max
  unsure (1)..(407): unsure at all n locations
agcttcttatccaaggctcatcttgtttgtgtatctccttcttccatggcttattccctagtggatggcgcctcctctctcctcttctcctttgtcttccgctgcatctccatggtggaaaatcaccattaaaggacctcattgaagctcaaagatccagcctccatagaagccccacaagcaagcttccatcaagtggtaatcagagcacaagagcttcaagtaggtgctccttaaacctccattaattntttttctttaccttctcttccattggtggttcttcatttttctccatgtatctcctcacatgtcttgttctaaatgttgttaacatgattctttagagtttccaccgattaaacttgctatagaagctatatttgattntctatggttcaaatttc

SEQ ID NO: 182719 - DNA, 355 bp, Glycine max
  unsure (1)..(355): unsure at all n locations
tcttttgcttttcaccaaccgcaacttccttgcacttcatgatcatggacaatttcactgcttcaaaatcatcaaaacactttatattttcaaaagaagccttataaggatgcaaagtattggtgatttcttgaaccttaccaccacttccaacactcccactagacacatgagagacctcttttttttcaagtatccccttctcaatgaagaccttctcatcacacactttttctcttttgatntcactccactttgctctctttatctcacttatgctgtattcttacacctcggctcctgttctccattgacttaatttgtccataccactcaccttaaactactccaaact

SEQ ID NO: 182720 - DNA, 437 bp, Glycine max
  unsure (1)..(437): unsure at all n locations
tcgattacactaatttggttatctattccagngattgnttctgataaatcaaaagatgtaactcttcaaaaggtttttgactttttcaaattggttttaagtttttctaaaaagttataactcttctaaatggtcttcttgaccagacatgaagagtctataaaagcaaggttttgttttgcatttttaatttaatcaattcattctttcacacttattcaacaatcctttacaagccgtgaatctctntgaacttcttcttcttctttgtaccaaaaactctctgaagttttctggttttctaaaccttgtgctattcatcatttcattctcttctccctttgccaaaaagaattcccaaggactaaccgcctgaattctttntgtgtctctcttctcccttttctaaaagaatgaaggactaaccgcttgaattc

SEQ ID NO: 182721 - DNA, 481 bp, Glycine max
  unsure (1)..(481): unsure at all n locations
tccactggtccattctgaacccataaatgagaagaacggatttgattctttctactaactctnggattaaatacgttatttattccaataactccataataaggaccatatgatgatgaaagagtcacttctgcaatctacaaaattcaatatagttaaataactaatcaaattgaaacattaaatatgatgcgatttattgaaattgtctatagacattagaaagttagtcatgaaaggaaaaacttacatgaacatcggcgatgtcctgactcatttgttggaccttgtggcctcaataatcttaagagggatagacttagaattcagaagaagcaataacaatcaatttaacaatgttctttanacatgcaagacataattgattgcacaaaattataagatagggaaagagaatgccacacagattatactgttcggcacaacccggctaatcagactcaacacccactgagatttg

SEQ ID NO: 182722 - DNA, 423 bp, Glycine max
  unsure (1)..(423): unsure at all n locations
gctgcagctgctctaattacattgatgtggtatttattttatgaggnngcacgccatttttgttttaagagtagtgtcccactggtaaaactaactttccaaatttttgccttcgcaggaaatggccccgaggaagcttgcctcaaagaggtccaagaaagacaaggcagccgaaagaactagttccgctccggagtatgacagtcaccgctttaggagcgctgtacaccagcagcgcttcgaggccatcaagggatggtcgtttctccgggagcgacgcgttcagctcagggacgacgagtatactgatttccaggaggaaatagctctacggagatttaaaagattggctaagattttgtaaaacataagcactagacaatgaaggaaagctggagntgctgcacatgatgtcaacgttat
